United States Patent Application Publication US 2005/0255487 A1 - sequence listing, part 61

SEQ ID NO: 1672601 - RNA, 19 nt, Homo sapiens
  misc_RNA (1)...(19): siRNA sense strand
ccucuggaauugacuugga

SEQ ID NO: 1672602 - RNA, 19 nt, Homo sapiens
  misc_RNA (1)...(19): siRNA sense strand
gacuauggagccagaggua

SEQ ID NO: 1672603 - RNA, 19 nt, Homo sapiens
  misc_RNA (1)...(19): siRNA sense strand
cuucuccgcugacgacuuc

SEQ ID NO: 1672604 - RNA, 19 nt, Homo sapiens
  misc_RNA (1)...(19): siRNA sense strand
cagcauucccgacaucuuc

SEQ ID NO: 1672605 - RNA, 19 nt, Homo sapiens
  misc_RNA (1)...(19): siRNA sense strand
aggaggaaguggacaauac

SEQ ID NO: 1672606 - RNA, 19 nt, Homo sapiens
  misc_RNA (1)...(19): siRNA sense strand
gagcaacuucgacaacaag

SEQ ID NO: 1672607 - RNA, 19 nt, Homo sapiens
  misc_RNA (1)...(19): siRNA sense strand
ccaagaagcaggcguucca

SEQ ID NO: 1672608 - RNA, 19 nt, Homo sapiens
  misc_RNA (1)...(19): siRNA sense strand
ugagaacgaugaguuugag

SEQ ID NO: 1672609 - RNA, 19 nt, Homo sapiens
  misc_RNA (1)...(19): siRNA sense strand
cgccucaaguccugcauga

SEQ ID NO: 1672610 - RNA, 19 nt, Homo sapiens
  misc_RNA (1)...(19): siRNA sense strand
agacugacauccgcgacaa

SEQ ID NO: 1672611 - RNA, 19 nt, Homo sapiens
  misc_RNA (1)...(19): siRNA sense strand
gauugaugagcuuaaggua

SEQ ID NO: 1672612 - RNA, 19 nt, Homo sapiens
  misc_RNA (1)...(19): siRNA sense strand
ugagggagcuggaaaacau

SEQ ID NO: 1672613 - RNA, 19 nt, Homo sapiens
  misc_RNA (1)...(19): siRNA sense strand
ccauugacaccaugaagga

SEQ ID NO: 1672614 - RNA, 19 nt, Homo sapiens
  misc_RNA (1)...(19): siRNA sense strand
gauccgcccaucauuguca

SEQ ID NO: 1672615 - RNA, 19 nt, Homo sapiens
  misc_RNA (1)...(19): siRNA sense strand
guguccaucuucaagcaaa

SEQ ID NO: 1672616 - RNA, 19 nt, Homo sapiens
  misc_RNA (1)...(19): siRNA sense strand
ggaggcugagcugcauuua

SEQ ID NO: 1672617 - RNA, 19 nt, Homo sapiens
  misc_RNA (1)...(19): siRNA sense strand
gggcaaagcugacuucaug

SEQ ID NO: 1672618 - RNA, 19 nt, Homo sapiens
  misc_RNA (1)...(19): siRNA sense strand
gcaaacagcgcaaggaguu

SEQ ID NO: 1672619 - RNA, 19 nt, Homo sapiens
  misc_RNA (1)...(19): siRNA sense strand
uugaugagcuuaagguaua

SEQ ID NO: 1672620 - RNA, 19 nt, Homo sapiens
  misc_RNA (1)...(19): siRNA sense strand
caacaagcgugucgccuau

SEQ ID NO: 1672621 - RNA, 19 nt, Homo sapiens
  misc_RNA (1)...(19): siRNA sense strand
gaauugacuuggaggagaa

SEQ ID NO: 1672622 - RNA, 19 nt, Homo sapiens
  misc_RNA (1)...(19): siRNA sense strand
ccaaagaggagaagaagaa

SEQ ID NO: 1672623 - RNA, 19 nt, Homo sapiens
  misc_RNA (1)...(19): siRNA sense strand
gcaaugagaacgaugaguu

SEQ ID NO: 1672624 - RNA, 19 nt, Homo sapiens
  misc_RNA (1)...(19): siRNA sense strand
caccucagcucgaguacua

SEQ ID NO: 1672625 - RNA, 19 nt, Homo sapiens
  misc_RNA (1)...(19): siRNA sense strand
gaagaagaaacccaagauu

SEQ ID NO: 1672626 - RNA, 19 nt, Homo sapiens
  misc_RNA (1)...(19): siRNA sense strand
acacauggcuacaauaucu

SEQ ID NO: 1672627 - RNA, 19 nt, Homo sapiens
  misc_RNA (1)...(19): siRNA sense strand
gaaguggaccucccagaga

SEQ ID NO: 1672628 - RNA, 19 nt, Homo sapiens
  misc_RNA (1)...(19): siRNA sense strand
agaagaaacccaagauuga

SEQ ID NO: 1672629 - RNA, 19 nt, Homo sapiens
  misc_RNA (1)...(19): siRNA sense strand
gcacagcauucccgacauc

SEQ ID NO: 1672630 - RNA, 19 nt, Homo sapiens
  misc_RNA (1)...(19): siRNA sense strand
ucaagaaacuggagaccau

SEQ ID NO: 1672631 - RNA, 19 nt, Homo sapiens
  misc_RNA (1)...(19): siRNA sense strand
cagaugagguggucuugga

SEQ ID NO: 1672632 - RNA, 19 nt, Homo sapiens
  misc_RNA (1)...(19): siRNA sense strand
ggagcaacuucgacaacaa

SEQ ID NO: 1672633 - RNA, 19 nt, Homo sapiens
  misc_RNA (1)...(19): siRNA sense strand
ugaaaucuaugaccaggau

SEQ ID NO: 1672634 - RNA, 19 nt, Homo sapiens
  misc_RNA (1)...(19): siRNA sense strand
gcugcacacuuucaacuug

SEQ ID NO: 1672635 - RNA, 19 nt, Homo sapiens
  misc_RNA (1)...(19): siRNA sense strand
gaagaaacccaagauugau

SEQ ID NO: 1672636 - RNA, 19 nt, Homo sapiens
  misc_RNA (1)...(19): siRNA sense strand
ccaaggaccugcucuucuc

SEQ ID NO: 1672637 - RNA, 19 nt, Homo sapiens
  misc_RNA (1)...(19): siRNA sense strand
ggacgacgacuucuucaca

SEQ ID NO: 1672638 - RNA, 19 nt, Homo sapiens
  misc_RNA (1)...(19): siRNA sense strand
caaguacuuugccuccauu

SEQ ID NO: 1672639 - RNA, 19 nt, Homo sapiens
  misc_RNA (1)...(19): siRNA sense strand
agaagaagaagaagaagaa

SEQ ID NO: 1672640 - RNA, 19 nt, Homo sapiens
  misc_RNA (1)...(19): siRNA sense strand
gauccacaauuauaagaag

SEQ ID NO: 1672641 - RNA, 19 nt, Homo sapiens
  misc_RNA (1)...(19): siRNA sense strand
ggaaguccuuugacaucga

SEQ ID NO: 1672642 - RNA, 19 nt, Homo sapiens
  misc_RNA (1)...(19): siRNA sense strand
ccacacauggcuacaauau

SEQ ID NO: 1672643 - RNA, 19 nt, Homo sapiens
  misc_RNA (1)...(19): siRNA sense strand
gagaagaagaagaagaaga

SEQ ID NO: 1672644 - RNA, 19 nt, Homo sapiens
  misc_RNA (1)...(19): siRNA sense strand
ucaacacccucgucaagug

SEQ ID NO: 1672645 - RNA, 19 nt, Homo sapiens
  misc_RNA (1)...(19): siRNA sense strand
ggaggacgacgacuucuuc

SEQ ID NO: 1672646 - RNA, 19 nt, Homo sapiens
  misc_RNA (1)...(19): siRNA sense strand
agaaggagaagaagaagaa

SEQ ID NO: 1672647 - RNA, 19 nt, Homo sapiens
  misc_RNA (1)...(19): siRNA sense strand
gcaaugaccccaucaaugu

SEQ ID NO: 1672648 - RNA, 19 nt, Homo sapiens
  misc_RNA (1)...(19): siRNA sense strand
caaugagaacgaugaguuu

SEQ ID NO: 1672649 - RNA, 19 nt, Homo sapiens
  misc_RNA (1)...(19): siRNA sense strand
ccaucgagcuggaccugaa

SEQ ID NO: 1672650 - RNA, 19 nt, Homo sapiens
  misc_RNA (1)...(19): siRNA sense strand
caagaaggaguccauguuc

SEQ ID NO: 1672651 - RNA, 19 nt, Homo sapiens
  misc_RNA (1)...(19): siRNA sense strand
ccaagaaggaguccauguu

SEQ ID NO: 1672652 - RNA, 19 nt, Homo sapiens
  misc_RNA (1)...(19): siRNA sense strand
gcccaucauugucauugaa

SEQ ID NO: 1672653 - RNA, 19 nt, Homo sapiens
  misc_RNA (1)...(19): siRNA sense strand
aggacuggcugcacacuuu

SEQ ID NO: 1672654 - RNA, 19 nt, Homo sapiens
  misc_RNA (1)...(19): siRNA sense strand
aagaagaaacccaagauug

SEQ ID NO: 1672655 - RNA, 19 nt, Homo sapiens
  misc_RNA (1)...(19): siRNA sense strand
gagaagaagaaacccaaga

SEQ ID NO: 1672656 - RNA, 19 nt, Homo sapiens
  misc_RNA (1)...(19): siRNA sense strand
cgucccugauccacaauua

SEQ ID NO: 1672657 - RNA, 19 nt, Homo sapiens
  misc_RNA (1)...(19): siRNA sense strand
gcagcucaacccugucuuu

SEQ ID NO: 1672658 - RNA, 19 nt, Homo sapiens
  misc_RNA (1)...(19): siRNA sense strand
ggacgauccgcccaucauu

SEQ ID NO: 1672659 - RNA, 19 nt, Homo sapiens
  misc_RNA (1)...(19): siRNA sense strand
acacagacguccacuacca

SEQ ID NO: 1672660 - RNA, 19 nt, Homo sapiens
  misc_RNA (1)...(19): siRNA sense strand
ggagaaguccagugacauc

SEQ ID NO: 1672661 - RNA, 19 nt, Homo sapiens
  misc_RNA (1)...(19): siRNA sense strand
gccagaacuuccugcagaa

SEQ ID NO: 1672662 - RNA, 19 nt, Homo sapiens
  misc_RNA (1)...(19): siRNA sense strand
ggacgccucuggacaucuc

SEQ ID NO: 1672663 - RNA, 19 nt, Homo sapiens
  misc_RNA (1)...(19): siRNA sense strand
caagauugaugagcuuaag

SEQ ID NO: 1672664 - RNA, 19 nt, Homo sapiens
  misc_RNA (1)...(19): siRNA sense strand
gaguggaggugcuguucug

SEQ ID NO: 1672665 - RNA, 19 nt, Homo sapiens
  misc_RNA (1)...(19): siRNA sense strand
gggagguuguggugacuau

SEQ ID NO: 1672666 - RNA, 19 nt, Homo sapiens
  misc_RNA (1)...(19): siRNA sense strand
gagcuggaguccgaguuug

SEQ ID NO: 1672667 - RNA, 19 nt, Homo sapiens
  misc_RNA (1)...(19): siRNA sense strand
ggacagugcaggccaaggu

SEQ ID NO: 1672668 - RNA, 19 nt, Homo sapiens
  misc_RNA (1)...(19): siRNA sense strand
cagaggaggcagagaagaa

SEQ ID NO: 1672669 - RNA, 19 nt, Homo sapiens
  misc_RNA (1)...(19): siRNA sense strand
cagcagaggaggcagagaa

SEQ ID NO: 1672670 - RNA, 19 nt, Homo sapiens
  misc_RNA (1)...(19): siRNA sense strand
ccaaguacuuugccuccau

SEQ ID NO: 1672671 - RNA, 19 nt, Homo sapiens
  misc_RNA (1)...(19): siRNA sense strand
caaugaagggcaaggagaa

SEQ ID NO: 1672672 - RNA, 19 nt, Homo sapiens
  misc_RNA (1)...(19): siRNA sense strand
caacuggcgcuaccuguuc

SEQ ID NO: 1672673 - RNA, 19 nt, Homo sapiens
  misc_RNA (1)...(19): siRNA sense strand
agaacuacaucuccaagca

SEQ ID NO: 1672674 - RNA, 19 nt, Homo sapiens
  misc_RNA (1)...(19): siRNA sense strand
ugacgguggcuguguauga

SEQ ID NO: 1672675 - RNA, 19 nt, Homo sapiens
  misc_RNA (1)...(19): siRNA sense strand
agagguacccaucaagaaa

SEQ ID NO: 1672676 - RNA, 19 nt, Homo sapiens
  misc_RNA (1)...(19): siRNA sense strand
gcgcaaagacagccaagca

SEQ ID NO: 1672677 - RNA, 19 nt, Homo sapiens
  misc_RNA (1)...(19): siRNA sense strand
gggacgagaccgaguacaa

SEQ ID NO: 1672678 - RNA, 19 nt, Homo sapiens
  misc_RNA (1)...(19): siRNA sense strand
aagaggagaagaagaagaa

SEQ ID NO: 1672679 - RNA, 19 nt, Homo sapiens
  misc_RNA (1)...(19): siRNA sense strand
ucgacaaccuggagcucua

SEQ ID NO: 1672680 - RNA, 19 nt, Homo sapiens
  misc_RNA (1)...(19): siRNA sense strand
gcacccugcugacaucaac

SEQ ID NO: 1672681 - RNA, 19 nt, Homo sapiens
  misc_RNA (1)...(19): siRNA sense strand
cgacagcagcggacucuca

SEQ ID NO: 1672682 - RNA, 19 nt, Homo sapiens
  misc_RNA (1)...(19): siRNA sense strand
aggcugagcugcauuuacu

SEQ ID NO: 1672683 - RNA, 19 nt, Homo sapiens
  misc_RNA (1)...(19): siRNA sense strand
gagaaggagaagaagaaga

SEQ ID NO: 1672684 - RNA, 19 nt, Homo sapiens
  misc_RNA (1)...(19): siRNA sense strand
gaggagaaggagaagaaga

SEQ ID NO: 1672685 - RNA, 19 nt, Homo sapiens
  misc_RNA (1)...(19): siRNA sense strand
ccagagguacccaucaaga

SEQ ID NO: 1672686 - RNA, 19 nt, Homo sapiens
  misc_RNA (1)...(19): siRNA sense strand
ggccuucggucgcuacaca

SEQ ID NO: 1672687 - RNA, 19 nt, Homo sapiens
  misc_RNA (1)...(19): siRNA sense strand
ucccugauccacaauuaua

SEQ ID NO: 1672688 - RNA, 19 nt, Homo sapiens
  misc_RNA (1)...(19): siRNA sense strand
aagaaggccugaacgacau

SEQ ID NO: 1672689 - RNA, 19 nt, Homo sapiens
  misc_RNA (1)...(19): siRNA sense strand
aaguggaccucccagagaa

SEQ ID NO: 1672690 - RNA, 19 nt, Homo sapiens
  misc_RNA (1)...(19): siRNA sense strand
cucggaagcccaagaagua

SEQ ID NO: 1672691 - RNA, 19 nt, Homo sapiens
  misc_RNA (1)...(19): siRNA sense strand
ucacugggcccucugagau

SEQ ID NO: 1672692 - RNA, 19 nt, Homo sapiens
  misc_RNA (1)...(19): siRNA sense strand
gaaggaggaaguggacaau

SEQ ID NO: 1672693 - RNA, 19 nt, Homo sapiens
  misc_RNA (1)...(19): siRNA sense strand
gacgauccgcccaucauug

SEQ ID NO: 1672694 - RNA, 19 nt, Homo sapiens
  misc_RNA (1)...(19): siRNA sense strand
gacgagaccgaguacaaga

SEQ ID NO: 1672695 - RNA, 19 nt, Homo sapiens
  misc_RNA (1)...(19): siRNA sense strand
ggacgagaccgaguacaag

SEQ ID NO: 1672696 - RNA, 19 nt, Homo sapiens
  misc_RNA (1)...(19): siRNA sense strand
cagagguacccaucaagaa

SEQ ID NO: 1672697 - RNA, 19 nt, Homo sapiens
  misc_RNA (1)...(19): siRNA sense strand
aggccaagguggagcugua

SEQ ID NO: 1672698 - RNA, 19 nt, Homo sapiens
  misc_RNA (1)...(19): siRNA sense strand
gcugagcugcauuuacuga

SEQ ID NO: 1672699 - RNA, 19 nt, Homo sapiens
  misc_RNA (1)...(19): siRNA sense strand
ugaacgacauacaggagau

SEQ ID NO: 1672700 - RNA, 19 nt, Homo sapiens
  misc_RNA (1)...(19): siRNA sense strand
cugcaaagacggcaaagug

SEQ ID NO: 1672701 - RNA, 19 nt, Homo sapiens
  misc_RNA (1)...(19): siRNA sense strand
ccucuggaauugacuugga

SEQ ID NO: 1672702 - RNA, 19 nt, Homo sapiens
  misc_RNA (1)...(19): siRNA sense strand
gacuauggagccagaggua

SEQ ID NO: 1672703 - RNA, 19 nt, Homo sapiens
  misc_RNA (1)...(19): siRNA sense strand
cuucuccgcugacgacuuc

SEQ ID NO: 1672704 - RNA, 19 nt, Homo sapiens
  misc_RNA (1)...(19): siRNA sense strand
cagcauucccgacaucuuc

SEQ ID NO: 1672705 - RNA, 19 nt, Homo sapiens
  misc_RNA (1)...(19): siRNA sense strand
aggaggaaguggacaauac

SEQ ID NO: 1672706 - RNA, 19 nt, Homo sapiens
  misc_RNA (1)...(19): siRNA sense strand
gagcaacuucgacaacaag

SEQ ID NO: 1672707 - RNA, 19 nt, Homo sapiens
  misc_RNA (1)...(19): siRNA sense strand
ccaagaagcaggcguucca

SEQ ID NO: 1672708 - RNA, 19 nt, Homo sapiens
  misc_RNA (1)...(19): siRNA sense strand
ugagaacgaugaguuugag

SEQ ID NO: 1672709 - RNA, 19 nt, Homo sapiens
  misc_RNA (1)...(19): siRNA sense strand
cgccucaaguccugcauga

SEQ ID NO: 1672710 - RNA, 19 nt, Homo sapiens
  misc_RNA (1)...(19): siRNA sense strand
agacugacauccgcgacaa

SEQ ID NO: 1672711 - RNA, 19 nt, Homo sapiens
  misc_RNA (1)...(19): siRNA sense strand
gauugaugagcuuaaggua

SEQ ID NO: 1672712 - RNA, 19 nt, Homo sapiens
  misc_RNA (1)...(19): siRNA sense strand
ugagggagcuggaaaacau

SEQ ID NO: 1672713 - RNA, 19 nt, Homo sapiens
  misc_RNA (1)...(19): siRNA sense strand
ccauugacaccaugaagga

SEQ ID NO: 1672714 - RNA, 19 nt, Homo sapiens
  misc_RNA (1)...(19): siRNA sense strand
gauccgcccaucauuguca

SEQ ID NO: 1672715 - RNA, 19 nt, Homo sapiens
  misc_RNA (1)...(19): siRNA sense strand
guguccaucuucaagcaaa

SEQ ID NO: 1672716 - RNA, 19 nt, Homo sapiens
  misc_RNA (1)...(19): siRNA sense strand
ggaggcugagcugcauuua

SEQ ID NO: 1672717 - RNA, 19 nt, Homo sapiens
  misc_RNA (1)...(19): siRNA sense strand
gggcaaagcugacuucaug

SEQ ID NO: 1672718 - RNA, 19 nt, Homo sapiens
  misc_RNA (1)...(19): siRNA sense strand
gcaaacagcgcaaggaguu

SEQ ID NO: 1672719 - RNA, 19 nt, Homo sapiens
  misc_RNA (1)...(19): siRNA sense strand
uugaugagcuuaagguaua

SEQ ID NO: 1672720 - RNA, 19 nt, Homo sapiens
  misc_RNA (1)...(19): siRNA sense strand
caacaagcgugucgccuau

SEQ ID NO: 1672721 - RNA, 19 nt, Homo sapiens
  misc_RNA (1)...(19): siRNA sense strand
gaauugacuuggaggagaa

SEQ ID NO: 1672722 - RNA, 19 nt, Homo sapiens
  misc_RNA (1)...(19): siRNA sense strand
ccaaagaggagaagaagaa

SEQ ID NO: 1672723 - RNA, 19 nt, Homo sapiens
  misc_RNA (1)...(19): siRNA sense strand
gcaaugagaacgaugaguu

SEQ ID NO: 1672724 - RNA, 19 nt, Homo sapiens
  misc_RNA (1)...(19): siRNA sense strand
caccucagcucgaguacua

SEQ ID NO: 1672725 - RNA, 19 nt, Homo sapiens
  misc_RNA (1)...(19): siRNA sense strand
gaagaagaaacccaagauu

SEQ ID NO: 1672726 - RNA, 19 nt, Homo sapiens
  misc_RNA (1)...(19): siRNA sense strand
acacauggcuacaauaucu

SEQ ID NO: 1672727 - RNA, 19 nt, Homo sapiens
  misc_RNA (1)...(19): siRNA sense strand
acaaguggcucaucaucaa

SEQ ID NO: 1672728 - RNA, 19 nt, Homo sapiens
  misc_RNA (1)...(19): siRNA sense strand
gaaguggaccucccagaga

SEQ ID NO: 1672729 - RNA, 19 nt, Homo sapiens
  misc_RNA (1)...(19): siRNA sense strand
agaagaaacccaagauuga

SEQ ID NO: 1672730 - RNA, 19 nt, Homo sapiens
  misc_RNA (1)...(19): siRNA sense strand
gcacagcauucccgacauc

SEQ ID NO: 1672731 - RNA, 19 nt, Homo sapiens
  misc_RNA (1)...(19): siRNA sense strand
ucaagaaacuggagaccau

SEQ ID NO: 1672732 - RNA, 19 nt, Homo sapiens
  misc_RNA (1)...(19): siRNA sense strand
cagaugagguggucuugga

SEQ ID NO: 1672733 - RNA, 19 nt, Homo sapiens
  misc_RNA (1)...(19): siRNA sense strand
ggagcaacuucgacaacaa

SEQ ID NO: 1672734 - RNA, 19 nt, Homo sapiens
  misc_RNA (1)...(19): siRNA sense strand
ugaaaucuaugaccaggau

SEQ ID NO: 1672735 - RNA, 19 nt, Homo sapiens
  misc_RNA (1)...(19): siRNA sense strand
gcugcacacuuucaacuug

SEQ ID NO: 1672736 - RNA, 19 nt, Homo sapiens
  misc_RNA (1)...(19): siRNA sense strand
gaagaaacccaagauugau

SEQ ID NO: 1672737 - RNA, 19 nt, Homo sapiens
  misc_RNA (1)...(19): siRNA sense strand
ccaaggaccugcucuucuc

SEQ ID NO: 1672738 - RNA, 19 nt, Homo sapiens
  misc_RNA (1)...(19): siRNA sense strand
ggacgacgacuucuucaca

SEQ ID NO: 1672739 - RNA, 19 nt, Homo sapiens
  misc_RNA (1)...(19): siRNA sense strand
caaguacuuugccuccauu

SEQ ID NO: 1672740 - RNA, 19 nt, Homo sapiens
  misc_RNA (1)...(19): siRNA sense strand
agaagaagaagaagaagaa

SEQ ID NO: 1672741 - RNA, 19 nt, Homo sapiens
  misc_RNA (1)...(19): siRNA sense strand
gauccacaauuauaagaag

SEQ ID NO: 1672742 - RNA, 19 nt, Homo sapiens
  misc_RNA (1)...(19): siRNA sense strand
ggaaguccuuugacaucga

SEQ ID NO: 1672743 - RNA, 19 nt, Homo sapiens
  misc_RNA (1)...(19): siRNA sense strand
ccacacauggcuacaauau

SEQ ID NO: 1672744 - RNA, 19 nt, Homo sapiens
  misc_RNA (1)...(19): siRNA sense strand
gagaagaagaagaagaaga

SEQ ID NO: 1672745 - RNA, 19 nt, Homo sapiens
  misc_RNA (1)...(19): siRNA sense strand
ucaacacccucgucaagug

SEQ ID NO: 1672746 - RNA, 19 nt, Homo sapiens
  misc_RNA (1)...(19): siRNA sense strand
ggaggacgacgacuucuuc

SEQ ID NO: 1672747 - RNA, 19 nt, Homo sapiens
  misc_RNA (1)...(19): siRNA sense strand
agaaggagaagaagaagaa

SEQ ID NO: 1672748 - RNA, 19 nt, Homo sapiens
  misc_RNA (1)...(19): siRNA sense strand
gcaaugaccccaucaaugu

SEQ ID NO: 1672749 - RNA, 19 nt, Homo sapiens
  misc_RNA (1)...(19): siRNA sense strand
caaugagaacgaugaguuu

SEQ ID NO: 1672750 - RNA, 19 nt, Homo sapiens
  misc_RNA (1)...(19): siRNA sense strand
ccaucgagcuggaccugaa

SEQ ID NO: 1672751 - RNA, 19 nt, Homo sapiens
  misc_RNA (1)...(19): siRNA sense strand
caagaaggaguccauguuc

SEQ ID NO: 1672752 - RNA, 19 nt, Homo sapiens
  misc_RNA (1)...(19): siRNA sense strand
ccaagaaggaguccauguu

SEQ ID NO: 1672753 - RNA, 19 nt, Homo sapiens
  misc_RNA (1)...(19): siRNA sense strand
gcccaucauugucauugaa

SEQ ID NO: 1672754 - RNA, 19 nt, Homo sapiens
  misc_RNA (1)...(19): siRNA sense strand
aggacuggcugcacacuuu

SEQ ID NO: 1672755 - RNA, 19 nt, Homo sapiens
  misc_RNA (1)...(19): siRNA sense strand
aagaagaaacccaagauug

SEQ ID NO: 1672756 - RNA, 19 nt, Homo sapiens
  misc_RNA (1)...(19): siRNA sense strand
gagaagaagaaacccaaga

SEQ ID NO: 1672757 - RNA, 19 nt, Homo sapiens
  misc_RNA (1)...(19): siRNA sense strand
cgucccugauccacaauua

SEQ ID NO: 1672758 - RNA, 19 nt, Homo sapiens
  misc_RNA (1)...(19): siRNA sense strand
gcagcucaacccugucuuu

SEQ ID NO: 1672759 - RNA, 19 nt, Homo sapiens
  misc_RNA (1)...(19): siRNA sense strand
ggacgauccgcccaucauu

SEQ ID NO: 1672760 - RNA, 19 nt, Homo sapiens
  misc_RNA (1)...(19): siRNA sense strand
acacagacguccacuacca

SEQ ID NO: 1672761 - RNA, 19 nt, Homo sapiens
  misc_RNA (1)...(19): siRNA sense strand
ggagaaguccagugacauc

SEQ ID NO: 1672762 - RNA, 19 nt, Homo sapiens
  misc_RNA (1)...(19): siRNA sense strand
gaguggaggugcuguucug

SEQ ID NO: 1672763 - RNA, 19 nt, Homo sapiens
  misc_RNA (1)...(19): siRNA sense strand
ggacgccucuggacaucuc

SEQ ID NO: 1672764 - RNA, 19 nt, Homo sapiens
  misc_RNA (1)...(19): siRNA sense strand
gccagaacuuccugcagaa

SEQ ID NO: 1672765 - RNA, 19 nt, Homo sapiens
  misc_RNA (1)...(19): siRNA sense strand
caagauugaugagcuuaag

SEQ ID NO: 1672766 - RNA, 19 nt, Homo sapiens
  misc_RNA (1)...(19): siRNA sense strand
gggagguuguggugacuau

SEQ ID NO: 1672767 - RNA, 19 nt, Homo sapiens
  misc_RNA (1)...(19): siRNA sense strand
gagcuggaguccgaguuug

SEQ ID NO: 1672768 - RNA, 19 nt, Homo sapiens
  misc_RNA (1)...(19): siRNA sense strand
ggacagugcaggccaaggu

SEQ ID NO: 1672769 - RNA, 19 nt, Homo sapiens
  misc_RNA (1)...(19): siRNA sense strand
cagaggaggcagagaagaa

SEQ ID NO: 1672770 - RNA, 19 nt, Homo sapiens
  misc_RNA (1)...(19): siRNA sense strand
cagcagaggaggcagagaa

SEQ ID NO: 1672771 - RNA, 19 nt, Homo sapiens
  misc_RNA (1)...(19): siRNA sense strand
ccaaguacuuugccuccau

SEQ ID NO: 1672772 - RNA, 19 nt, Homo sapiens
  misc_RNA (1)...(19): siRNA sense strand
caaugaagggcaaggagaa

SEQ ID NO: 1672773 - RNA, 19 nt, Homo sapiens
  misc_RNA (1)...(19): siRNA sense strand
caacuggcgcuaccuguuc

SEQ ID NO: 1672774 - RNA, 19 nt, Homo sapiens
  misc_RNA (1)...(19): siRNA sense strand
agaacuacaucuccaagca

SEQ ID NO: 1672775 - RNA, 19 nt, Homo sapiens
  misc_RNA (1)...(19): siRNA sense strand
ugacgguggcuguguauga

SEQ ID NO: 1672776 - RNA, 19 nt, Homo sapiens
  misc_RNA (1)...(19): siRNA sense strand
agagguacccaucaagaaa

SEQ ID NO: 1672777 - RNA, 19 nt, Homo sapiens
  misc_RNA (1)...(19): siRNA sense strand
gcgcaaagacagccaagca

SEQ ID NO: 1672778 - RNA, 19 nt, Homo sapiens
  misc_RNA (1)...(19): siRNA sense strand
gggacgagaccgaguacaa

SEQ ID NO: 1672779 - RNA, 19 nt, Homo sapiens
  misc_RNA (1)...(19): siRNA sense strand
aagaggagaagaagaagaa

SEQ ID NO: 1672780 - RNA, 19 nt, Homo sapiens
  misc_RNA (1)...(19): siRNA sense strand
ucgacaaccuggagcucua

SEQ ID NO: 1672781 - RNA, 19 nt, Homo sapiens
  misc_RNA (1)...(19): siRNA sense strand
gcacccugcugacaucaac

SEQ ID NO: 1672782 - RNA, 19 nt, Homo sapiens
  misc_RNA (1)...(19): siRNA sense strand
cgacagcagcggacucuca

SEQ ID NO: 1672783 - RNA, 19 nt, Homo sapiens
  misc_RNA (1)...(19): siRNA sense strand
aggcugagcugcauuuacu

SEQ ID NO: 1672784 - RNA, 19 nt, Homo sapiens
  misc_RNA (1)...(19): siRNA sense strand
gagaaggagaagaagaaga

SEQ ID NO: 1672785 - RNA, 19 nt, Homo sapiens
  misc_RNA (1)...(19): siRNA sense strand
gaggagaaggagaagaaga

SEQ ID NO: 1672786 - RNA, 19 nt, Homo sapiens
  misc_RNA (1)...(19): siRNA sense strand
ccagagguacccaucaaga

SEQ ID NO: 1672787 - RNA, 19 nt, Homo sapiens
  misc_RNA (1)...(19): siRNA sense strand
ggccuucggucgcuacaca

SEQ ID NO: 1672788 - RNA, 19 nt, Homo sapiens
  misc_RNA (1)...(19): siRNA sense strand
ucccugauccacaauuaua

SEQ ID NO: 1672789 - RNA, 19 nt, Homo sapiens
  misc_RNA (1)...(19): siRNA sense strand
aaguggaccucccagagaa

SEQ ID NO: 1672790 - RNA, 19 nt, Homo sapiens
  misc_RNA (1)...(19): siRNA sense strand
guacaaguggcucaucauc

SEQ ID NO: 1672791 - RNA, 19 nt, Homo sapiens
  misc_RNA (1)...(19): siRNA sense strand
cucggaagcccaagaagua

SEQ ID NO: 1672792 - RNA, 19 nt, Homo sapiens
  misc_RNA (1)...(19): siRNA sense strand
ucacugggcccucugagau

SEQ ID NO: 1672793 - RNA, 19 nt, Homo sapiens
  misc_RNA (1)...(19): siRNA sense strand
gaaggaggaaguggacaau

SEQ ID NO: 1672794 - RNA, 19 nt, Homo sapiens
  misc_RNA (1)...(19): siRNA sense strand
gacgauccgcccaucauug

SEQ ID NO: 1672795 - RNA, 19 nt, Homo sapiens
  misc_RNA (1)...(19): siRNA sense strand
gacgagaccgaguacaaga

SEQ ID NO: 1672796 - RNA, 19 nt, Homo sapiens
  misc_RNA (1)...(19): siRNA sense strand
ggacgagaccgaguacaag

SEQ ID NO: 1672797 - RNA, 19 nt, Homo sapiens
  misc_RNA (1)...(19): siRNA sense strand
cagagguacccaucaagaa

SEQ ID NO: 1672798 - RNA, 19 nt, Homo sapiens
  misc_RNA (1)...(19): siRNA sense strand
aggccaagguggagcugua

SEQ ID NO: 1672799 - RNA, 19 nt, Homo sapiens
  misc_RNA (1)...(19): siRNA sense strand
gcugagcugcauuuacuga

SEQ ID NO: 1672800 - RNA, 19 nt, Homo sapiens
  misc_RNA (1)...(19): siRNA sense strand
cugcaaagacggcaaagug

SEQ ID NO: 1672801 - RNA, 19 nt, Homo sapiens
  misc_RNA (1)...(19): siRNA sense strand
ccucuggaauugacuugga

SEQ ID NO: 1672802 - RNA, 19 nt, Homo sapiens
  misc_RNA (1)...(19): siRNA sense strand
gacuauggagccagaggua

SEQ ID NO: 1672803 - RNA, 19 nt, Homo sapiens
  misc_RNA (1)...(19): siRNA sense strand
cuucuccgcugacgacuuc

SEQ ID NO: 1672804 - RNA, 19 nt, Homo sapiens
  misc_RNA (1)...(19): siRNA sense strand
cagcauucccgacaucuuc

SEQ ID NO: 1672805 - RNA, 19 nt, Homo sapiens
  misc_RNA (1)...(19): siRNA sense strand
aggaggaaguggacaauac

SEQ ID NO: 1672806 - RNA, 19 nt, Homo sapiens
  misc_RNA (1)...(19): siRNA sense strand
gagcaacuucgacaacaag

SEQ ID NO: 1672807 - RNA, 19 nt, Homo sapiens
  misc_RNA (1)...(19): siRNA sense strand
gauccgcccaucauuguca

SEQ ID NO: 1672808 - RNA, 19 nt, Homo sapiens
  misc_RNA (1)...(19): siRNA sense strand
ugagaacgaugaguuugag

SEQ ID NO: 1672809 - RNA, 19 nt, Homo sapiens
  misc_RNA (1)...(19): siRNA sense strand
ccaagaagcaggcguucca

SEQ ID NO: 1672810 - RNA, 19 nt, Homo sapiens
  misc_RNA (1)...(19): siRNA sense strand
agacugacauccgcgacaa

SEQ ID NO: 1672811 - RNA, 19 nt, Homo sapiens
  misc_RNA (1)...(19): siRNA sense strand
ugagggagcuggaaaacau

SEQ ID NO: 1672812 - RNA, 19 nt, Homo sapiens
  misc_RNA (1)...(19): siRNA sense strand
gauugaugagcuuaaggua

SEQ ID NO: 1672813 - RNA, 19 nt, Homo sapiens
  misc_RNA (1)...(19): siRNA sense strand
cgccucaaguccugcauga

SEQ ID NO: 1672814 - RNA, 19 nt, Homo sapiens
  misc_RNA (1)...(19): siRNA sense strand
ccauugacaccaugaagga

SEQ ID NO: 1672815 - RNA, 19 nt, Homo sapiens
  misc_RNA (1)...(19): siRNA sense strand
guguccaucuucaagcaaa

SEQ ID NO: 1672816 - RNA, 19 nt, Homo sapiens
  misc_RNA (1)...(19): siRNA sense strand
ggaggcugagcugcauuua

SEQ ID NO: 1672817 - RNA, 19 nt, Homo sapiens
  misc_RNA (1)...(19): siRNA sense strand
gaagaaagcugaugaaguc

SEQ ID NO: 1672818 - RNA, 19 nt, Homo sapiens
  misc_RNA (1)...(19): siRNA sense strand
gcaaggauaucgagaagaa

SEQ ID NO: 1672819 - RNA, 19 nt, Homo sapiens
  misc_RNA (1)...(19): siRNA sense strand
gagcgaaccuucaccuuga

SEQ ID NO: 1672820 - RNA, 19 nt, Homo sapiens
  misc_RNA (1)...(19): siRNA sense strand
gagcgacgaugacaagaaa

SEQ ID NO: 1672821 - RNA, 19 nt, Homo sapiens
  misc_RNA (1)...(19): siRNA sense strand
gaacaacccuucaauuccu

SEQ ID NO: 1672822 - RNA, 19 nt, Homo sapiens
  misc_RNA (1)...(19): siRNA sense strand
ggaaaggccauacaaaugu

SEQ ID NO: 1672823 - RNA, 19 nt, Homo sapiens
  misc_RNA (1)...(19): siRNA sense strand
ccaccaagcucauggacuu

SEQ ID NO: 1672824 - RNA, 19 nt, Homo sapiens
  misc_RNA (1)...(19): siRNA sense strand
gaaggaaccaggaaacgaa

SEQ ID NO: 1672825 - RNA, 19 nt, Homo sapiens
  misc_RNA (1)...(19): siRNA sense strand
gggcagaccuuucauacag

SEQ ID NO: 1672826 - RNA, 19 nt, Homo sapiens
  misc_RNA (1)...(19): siRNA sense strand
gcacagacauaugaagauc

SEQ ID NO: 1672827 - RNA, 19 nt, Homo sapiens
  misc_RNA (1)...(19): siRNA sense strand
ccacagacaccaacaaguu

SEQ ID NO: 1672828 - RNA, 19 nt, Homo sapiens
  misc_RNA (1)...(19): siRNA sense strand
gaacaugcacagacauaug

SEQ ID NO: 1672829 - RNA, 19 nt, Homo sapiens
  misc_RNA (1)...(19): siRNA sense strand
gaacucaaggccuucauga

SEQ ID NO: 1672830 - RNA, 19 nt, Homo sapiens
  misc_RNA (1)...(19): siRNA sense strand
gaaguuuccucgcauuucu

SEQ ID NO: 1672831 - RNA, 19 nt, Homo sapiens
  misc_RNA (1)...(19): siRNA sense strand
ggaguuuguuugcaaguau

SEQ ID NO: 1672832 - RNA, 19 nt, Homo sapiens
  misc_RNA (1)...(19): siRNA sense strand
ucaaggaguuuguuugcaa

SEQ ID NO: 1672833 - RNA, 19 nt, Homo sapiens
  misc_RNA (1)...(19): siRNA sense strand
gagaaaagguccucagaga

SEQ ID NO: 1672834 - RNA, 19 nt, Homo sapiens
  misc_RNA (1)...(19): siRNA sense strand
gcagacauccagcaaauuc

SEQ ID NO: 1672835 - RNA, 19 nt, Homo sapiens
  misc_RNA (1)...(19): siRNA sense strand
gcaaugggcagaccuuuca

SEQ ID NO: 1672836 - RNA, 19 nt, Homo sapiens
  misc_RNA (1)...(19): siRNA sense strand
gaaaggccauacaaauguc

SEQ ID NO: 1672837 - RNA, 19 nt, Homo sapiens
  misc_RNA (1)...(19): siRNA sense strand
gggaaaggccauacaaaug

SEQ ID NO: 1672838 - RNA, 19 nt, Homo sapiens
  misc_RNA (1)...(19): siRNA sense strand
gcagaccuuucauacagaa

SEQ ID NO: 1672839 - RNA, 19 nt, Homo sapiens
  misc_RNA (1)...(19): siRNA sense strand
gaagagcgacgaugacaag

SEQ ID NO: 1672840 - RNA, 19 nt, Homo sapiens
  misc_RNA (1)...(19): siRNA sense strand
cagaacaacccuucaauuc

SEQ ID NO: 1672841 - RNA, 19 nt, Homo sapiens
  misc_RNA (1)...(19): siRNA sense strand
ucagacagcuuaggagguu

SEQ ID NO: 1672842 - RNA, 19 nt, Homo sapiens
  misc_RNA (1)...(19): siRNA sense strand
ucagauaacccacuaagau

SEQ ID NO: 1672843 - RNA, 19 nt, Homo sapiens
  misc_RNA (1)...(19): siRNA sense strand
uagggaaggucacagagaa

SEQ ID NO: 1672844 - RNA, 19 nt, Homo sapiens
  misc_RNA (1)...(19): siRNA sense strand
gaaggacagcgacaaggaa

SEQ ID NO: 1672845 - RNA, 19 nt, Homo sapiens
  misc_RNA (1)...(19): siRNA sense strand
gggaacaugcacagacaua

SEQ ID NO: 1672846 - RNA, 19 nt, Homo sapiens
  misc_RNA (1)...(19): siRNA sense strand
ggaaggacagcgacaagga

SEQ ID NO: 1672847 - RNA, 19 nt, Homo sapiens
  misc_RNA (1)...(19): siRNA sense strand
gcgagaggccuuacaagug

SEQ ID NO: 1672848 - RNA, 19 nt, Homo sapiens
  misc_RNA (1)...(19): siRNA sense strand
gggccaagcggaacucgua

SEQ ID NO: 1672849 - RNA, 19 nt, Homo sapiens
  misc_RNA (1)...(19): siRNA sense strand
guucagaccuaucuuccau

SEQ ID NO: 1672850 - RNA, 19 nt, Homo sapiens
  misc_RNA (1)...(19): siRNA sense strand
cccaagaacuucaggaaag

SEQ ID NO: 1672851 - RNA, 19 nt, Homo sapiens
  misc_RNA (1)...(19): siRNA sense strand
caauucagcuccagacacu

SEQ ID NO: 1672852 - RNA, 19 nt, Homo sapiens
  misc_RNA (1)...(19): siRNA sense strand
caggugacuuggagaagaa

SEQ ID NO: 1672853 - RNA, 19 nt, Homo sapiens
  misc_RNA (1)...(19): siRNA sense strand
caacaucugcgacuacauc

SEQ ID NO: 1672854 - RNA, 19 nt, Homo sapiens
  misc_RNA (1)...(19): siRNA sense strand
ggagaagaaagcugaugaa

SEQ ID NO: 1672855 - RNA, 19 nt, Homo sapiens
  misc_RNA (1)...(19): siRNA sense strand
ucucaggccuggugcgaaa

SEQ ID NO: 1672856 - RNA, 19 nt, Homo sapiens
  misc_RNA (1)...(19): siRNA sense strand
uggcagacauccagcaaau

SEQ ID NO: 1672857 - RNA, 19 nt, Homo sapiens
  misc_RNA (1)...(19): siRNA sense strand
ccauucagauaacccacua

SEQ ID NO: 1672858 - RNA, 19 nt, Homo sapiens
  misc_RNA (1)...(19): siRNA sense strand
caacaaguucaguccguuu

SEQ ID NO: 1672859 - RNA, 19 nt, Homo sapiens
  misc_RNA (1)...(19): siRNA sense strand
gagaagaacaucgaguaug

SEQ ID NO: 1672860 - RNA, 19 nt, Homo sapiens
  misc_RNA (1)...(19): siRNA sense strand
ucacggacuucuccuguag

SEQ ID NO: 1672861 - RNA, 19 nt, Homo sapiens
  misc_RNA (1)...(19): siRNA sense strand
auaugaagauccaugagaa

SEQ ID NO: 1672862 - RNA, 19 nt, Homo sapiens
  misc_RNA (1)...(19): siRNA sense strand
gcacaugcgcucccacaca

SEQ ID NO: 1672863 - RNA, 19 nt, Homo sapiens
  misc_RNA (1)...(19): siRNA sense strand
cagagaagagcgacgauga

SEQ ID NO: 1672864 - RNA, 19 nt, Homo sapiens
  misc_RNA (1)...(19): siRNA sense strand
ggaaaggggacaaggauuu

SEQ ID NO: 1672865 - RNA, 19 nt, Homo sapiens
  misc_RNA (1)...(19): siRNA sense strand
gcauggaggccaagaucaa

SEQ ID NO: 1672866 - RNA, 19 nt, Homo sapiens
  misc_RNA (1)...(19): siRNA sense strand
ggagacccauucagauaac

SEQ ID NO: 1672867 - RNA, 19 nt, Homo sapiens
  misc_RNA (1)...(19): siRNA sense strand
acaagaaaccaaagacaga

SEQ ID NO: 1672868 - RNA, 19 nt, Homo sapiens
  misc_RNA (1)...(19): siRNA sense strand
cagauaacccacuaagaug

SEQ ID NO: 1672869 - RNA, 19 nt, Homo sapiens
  misc_RNA (1)...(19): siRNA sense strand
gcaaggcagacaagaggaa

SEQ ID NO: 1672870 - RNA, 19 nt, Homo sapiens
  misc_RNA (1)...(19): siRNA sense strand
ucagaccuaucuuccauca

SEQ ID NO: 1672871 - RNA, 19 nt, Homo sapiens
  misc_RNA (1)...(19): siRNA sense strand
gcaacugcauccaccacau

SEQ ID NO: 1672872 - RNA, 19 nt, Homo sapiens
  misc_RNA (1)...(19): siRNA sense strand
gaagacccagcaccagcua

SEQ ID NO: 1672873 - RNA, 19 nt, Homo sapiens
  misc_RNA (1)...(19): siRNA sense strand
gaaagccaggcaugccaaa

SEQ ID NO: 1672874 - RNA, 19 nt, Homo sapiens
  misc_RNA (1)...(19): siRNA sense strand
gugagaagauuugcacuac

SEQ ID NO: 1672875 - RNA, 19 nt, Homo sapiens
  misc_RNA (1)...(19): siRNA sense strand
gcaagcccuucgagugcaa

SEQ ID NO: 1672876 - RNA, 19 nt, Homo sapiens
  misc_RNA (1)...(19): siRNA sense strand
agaccuaucuuccaucaac

SEQ ID NO: 1672877 - RNA, 19 nt, Homo sapiens
  misc_RNA (1)...(19): siRNA sense strand
ucaggugacuuggagaaga

SEQ ID NO: 1672878 - RNA, 19 nt, Homo sapiens
  misc_RNA (1)...(19): siRNA sense strand
gaaaagguccucagagaag

SEQ ID NO: 1672879 - RNA, 19 nt, Homo sapiens
  misc_RNA (1)...(19): siRNA sense strand
ggaaccaggaaacgaaaga

SEQ ID NO: 1672880 - RNA, 19 nt, Homo sapiens
  misc_RNA (1)...(19): siRNA sense strand
guguguggccagucauuua

SEQ ID NO: 1672881 - RNA, 19 nt, Homo sapiens
  misc_RNA (1)...(19): siRNA sense strand
gagcauggaggccaagauc

SEQ ID NO: 1672882 - RNA, 19 nt, Homo sapiens
  misc_RNA (1)...(19): siRNA sense strand
gcgggcacgucgaagaaga

SEQ ID NO: 1672883 - RNA, 19 nt, Homo sapiens
  misc_RNA (1)...(19): siRNA sense strand
gagaagagcgacgaugaca

SEQ ID NO: 1672884 - RNA, 19 nt, Homo sapiens
  misc_RNA (1)...(19): siRNA sense strand
gauaacccacuaagaugug

SEQ ID NO: 1672885 - RNA, 19 nt, Homo sapiens
  misc_RNA (1)...(19): siRNA sense strand
gaugacaagaaaccaaaga

SEQ ID NO: 1672886 - RNA, 19 nt, Homo sapiens
  misc_RNA (1)...(19): siRNA sense strand
gaucaucucaucuguaucc

SEQ ID NO: 1672887 - RNA, 19 nt, Homo sapiens
  misc_RNA (1)...(19): siRNA sense strand
cagcugaccaugcacauuc

SEQ ID NO: 1672888 - RNA, 19 nt, Homo sapiens
  misc_RNA (1)...(19): siRNA sense strand
acagaacaacccuucaauu

SEQ ID NO: 1672889 - RNA, 19 nt, Homo sapiens
  misc_RNA (1)...(19): siRNA sense strand
cauaugaagauccaugaga

SEQ ID NO: 1672890 - RNA, 19 nt, Homo sapiens
  misc_RNA (1)...(19): siRNA sense strand
ccaucgagcuggcagacau

SEQ ID NO: 1672891 - RNA, 19 nt, Homo sapiens
  misc_RNA (1)...(19): siRNA sense strand
gaccaaggacagcauaaag

SEQ ID NO: 1672892 - RNA, 19 nt, Homo sapiens
  misc_RNA (1)...(19): siRNA sense strand
gaugacaaccaggcaauuc

SEQ ID NO: 1672893 - RNA, 19 nt, Homo sapiens
  misc_RNA (1)...(19): siRNA sense strand
gaccuuucauacagaacaa

SEQ ID NO: 1672894 - RNA, 19 nt, Homo sapiens
  misc_RNA (1)...(19): siRNA sense strand
ggcagaccuuucauacaga

SEQ ID NO: 1672895 - RNA, 19 nt, Homo sapiens
  misc_RNA (1)...(19): siRNA sense strand
gagucacgaugccgaguca

SEQ ID NO: 1672896 - RNA, 19 nt, Homo sapiens
  misc_RNA (1)...(19): siRNA sense strand
gacauaugaagauccauga

SEQ ID NO: 1672897 - RNA, 19 nt, Homo sapiens
  misc_RNA (1)...(19): siRNA sense strand
gcuuugcgguggacuucaa

SEQ ID NO: 1672898 - RNA, 19 nt, Homo sapiens
  misc_RNA (1)...(19): siRNA sense strand
gcgguucucucacaguucu

SEQ ID NO: 1672899 - RNA, 19 nt, Homo sapiens
  misc_RNA (1)...(19): siRNA sense strand
ggaacaugcacagacauau

SEQ ID NO: 1672900 - RNA, 19 nt, Homo sapiens
  misc_RNA (1)...(19): siRNA sense strand
guagggaaggucacagaga

SEQ ID NO: 1672901 - RNA, 19 nt, Homo sapiens
  misc_RNA (1)...(19): siRNA sense strand
ccaagaacuucaggaaagg

SEQ ID NO: 1672902 - RNA, 19 nt, Homo sapiens
  misc_RNA (1)...(19): siRNA sense strand
cgagaagaacaucgaguau

SEQ ID NO: 1672903 - RNA, 19 nt, Homo sapiens
  misc_RNA (1)...(19): siRNA sense strand
ccuaggcgguucucucaca

SEQ ID NO: 1672904 - RNA, 19 nt, Homo sapiens
  misc_RNA (1)...(19): siRNA sense strand
gaggacugcugcgucacaa

SEQ ID NO: 1672905 - RNA, 19 nt, Homo sapiens
  misc_RNA (1)...(19): siRNA sense strand
gaguuuguuugcaaguaug

SEQ ID NO: 1672906 - RNA, 19 nt, Homo sapiens
  misc_RNA (1)...(19): siRNA sense strand
caguauguuucaaggaguu

SEQ ID NO: 1672907 - RNA, 19 nt, Homo sapiens
  misc_RNA (1)...(19): siRNA sense strand
gguagaagacgggcaguca

SEQ ID NO: 1672908 - RNA, 19 nt, Homo sapiens
  misc_RNA (1)...(19): siRNA sense strand
uggaggagccgaccacuca

SEQ ID NO: 1672909 - RNA, 19 nt, Homo sapiens
  misc_RNA (1)...(19): siRNA sense strand
ccgcaaggauaucgagaag

SEQ ID NO: 1672910 - RNA, 19 nt, Homo sapiens
  misc_RNA (1)...(19): siRNA sense strand
gcagaaggaaccaggaaac

SEQ ID NO: 1672911 - RNA, 19 nt, Homo sapiens
  misc_RNA (1)...(19): siRNA sense strand
gagccugucaccuuucgaa

SEQ ID NO: 1672912 - RNA, 19 nt, Homo sapiens
  misc_RNA (1)...(19): siRNA sense strand
ccaaggacagcauaaagca

SEQ ID NO: 1672913 - RNA, 19 nt, Homo sapiens
  misc_RNA (1)...(19): siRNA sense strand
gaggacagcgagaaugagu

SEQ ID NO: 1672914 - RNA, 19 nt, Homo sapiens
  misc_RNA (1)...(19): siRNA sense strand
ugucggcggucaugagugu

SEQ ID NO: 1672915 - RNA, 19 nt, Homo sapiens
  misc_RNA (1)...(19): siRNA sense strand
ggaacucaaggccuucaug

SEQ ID NO: 1672916 - RNA, 19 nt, Homo sapiens
  misc_RNA (1)...(19): siRNA sense strand
ucaagcaggagaucacaga

SEQ ID NO: 1672917 - RNA, 19 nt, Homo sapiens
  misc_RNA (1)...(19): siRNA sense strand
gcgauaugcucuucuguua

SEQ ID NO: 1672918 - RNA, 19 nt, Homo sapiens
  misc_RNA (1)...(19): siRNA sense strand
gauaugcucuucuguuaga

SEQ ID NO: 1672919 - RNA, 19 nt, Homo sapiens
  misc_RNA (1)...(19): siRNA sense strand
cagaagaaauucacaggaa

SEQ ID NO: 1672920 - RNA, 19 nt, Homo sapiens
  misc_RNA (1)...(19): siRNA sense strand
caaagucauugcugcgaua

SEQ ID NO: 1672921 - RNA, 19 nt, Homo sapiens
  misc_RNA (1)...(19): siRNA sense strand
gcuugaaacugcagaagaa

SEQ ID NO: 1672922 - RNA, 19 nt, Homo sapiens
  misc_RNA (1)...(19): siRNA sense strand
uugcaaagcuucagucaga

SEQ ID NO: 1672923 - RNA, 19 nt, Homo sapiens
  misc_RNA (1)...(19): siRNA sense strand
gaacguugaaccaaauauu

SEQ ID NO: 1672924 - RNA, 19 nt, Homo sapiens
  misc_RNA (1)...(19): siRNA sense strand
ucaacacugucgcuaauga

SEQ ID NO: 1672925 - RNA, 19 nt, Homo sapiens
  misc_RNA (1)...(19): siRNA sense strand
aaagaacguugaaccaaau

SEQ ID NO: 1672926 - RNA, 19 nt, Homo sapiens
  misc_RNA (1)...(19): siRNA sense strand
caaauucaaggcuacgaua

SEQ ID NO: 1672927 - RNA, 19 nt, Homo sapiens
  misc_RNA (1)...(19): siRNA sense strand
cagaggaugugcagguuga

SEQ ID NO: 1672928 - RNA, 19 nt, Homo sapiens
  misc_RNA (1)...(19): siRNA sense strand
agaagaaauucacaggaaa

SEQ ID NO: 1672929 - RNA, 19 nt, Homo sapiens
  misc_RNA (1)...(19): siRNA sense strand
gacgugaaccaguaucuuu

SEQ ID NO: 1672930 - RNA, 19 nt, Homo sapiens
  misc_RNA (1)...(19): siRNA sense strand
cuacaaaucccuuaccaau

SEQ ID NO: 1672931 - RNA, 19 nt, Homo sapiens
  misc_RNA (1)...(19): siRNA sense strand
uagcuuugauggcagcaua

SEQ ID NO: 1672932 - RNA, 19 nt, Homo sapiens
  misc_RNA (1)...(19): siRNA sense strand
gcucuucuguuagacauug

SEQ ID NO: 1672933 - RNA, 19 nt, Homo sapiens
  misc_RNA (1)...(19): siRNA sense strand
cacugucgcuaaugaagua

SEQ ID NO: 1672934 - RNA, 19 nt, Homo sapiens
  misc_RNA (1)...(19): siRNA sense strand
ugaaacugcagaagaaauu

SEQ ID NO: 1672935 - RNA, 19 nt, Homo sapiens
  misc_RNA (1)...(19): siRNA sense strand
gcugagagaaagcuguaua

SEQ ID NO: 1672936 - RNA, 19 nt, Homo sapiens
  misc_RNA (1)...(19): siRNA sense strand
gaagauaacagugaaacag

SEQ ID NO: 1672937 - RNA, 19 nt, Homo sapiens
  misc_RNA (1)...(19): siRNA sense strand
auucaaggcuacgauauuu

SEQ ID NO: 1672938 - RNA, 19 nt, Homo sapiens
  misc_RNA (1)...(19): siRNA sense strand
gauauuucacuccuaaaga

SEQ ID NO: 1672939 - RNA, 19 nt, Homo sapiens
  misc_RNA (1)...(19): siRNA sense strand
auagugaucucucugugaa

SEQ ID NO: 1672940 - RNA, 19 nt, Homo sapiens
  misc_RNA (1)...(19): siRNA sense strand
caacgugcauguaguagcu

SEQ ID NO: 1672941 - RNA, 19 nt, Homo sapiens
  misc_RNA (1)...(19): siRNA sense strand
agaaauagcaaaucuccuu

SEQ ID NO: 1672942 - RNA, 19 nt, Homo sapiens
  misc_RNA (1)...(19): siRNA sense strand
gauagugaucucucuguga

SEQ ID NO: 1672943 - RNA, 19 nt, Homo sapiens
  misc_RNA (1)...(19): siRNA sense strand
caagaagaacagauaacaa

SEQ ID NO: 1672944 - RNA, 19 nt, Homo sapiens
  misc_RNA (1)...(19): siRNA sense strand
gaagguccgugugcuuuac

SEQ ID NO: 1672945 - RNA, 19 nt, Homo sapiens
  misc_RNA (1)...(19): siRNA sense strand
cggauuuccugagaagaua

SEQ ID NO: 1672946 - RNA, 19 nt, Homo sapiens
  misc_RNA (1)...(19): siRNA sense strand
gaguucggauuuccugaga

SEQ ID NO: 1672947 - RNA, 19 nt, Homo sapiens
  misc_RNA (1)...(19): siRNA sense strand
ucacaagaagaacagauaa

SEQ ID NO: 1672948 - RNA, 19 nt, Homo sapiens
  misc_RNA (1)...(19): siRNA sense strand
ucagagccauuacccuuuc

SEQ ID NO: 1672949 - RNA, 19 nt, Homo sapiens
  misc_RNA (1)...(19): siRNA sense strand
ugucaacacugucgcuaau

SEQ ID NO: 1672950 - RNA, 19 nt, Homo sapiens
  misc_RNA (1)...(19): siRNA sense strand
aaaagaacguugaaccaaa

SEQ ID NO: 1672951 - RNA, 19 nt, Homo sapiens
  misc_RNA (1)...(19): siRNA sense strand
gguugagaauaucuacaaa

SEQ ID NO: 1672952 - RNA, 19 nt, Homo sapiens
  misc_RNA (1)...(19): siRNA sense strand
guucagcccacuuguagaa

SEQ ID NO: 1672953 - RNA, 19 nt, Homo sapiens
  misc_RNA (1)...(19): siRNA sense strand
gaagaacagauaacaaagc

SEQ ID NO: 1672954 - RNA, 19 nt, Homo sapiens
  misc_RNA (1)...(19): siRNA sense strand
cuguauaccugcacaagug

SEQ ID NO: 1672955 - RNA, 19 nt, Homo sapiens
  misc_RNA (1)...(19): siRNA sense strand
gcauacaguguucuggaaa

SEQ ID NO: 1672956 - RNA, 19 nt, Homo sapiens
  misc_RNA (1)...(19): siRNA sense strand
gauggcagcauacaguguu

SEQ ID NO: 1672957 - RNA, 19 nt, Homo sapiens
  misc_RNA (1)...(19): siRNA sense strand
gaaaagaacguugaaccaa

SEQ ID NO: 1672958 - RNA, 19 nt, Homo sapiens
  misc_RNA (1)...(19): siRNA sense strand
guuaucgccuacuuggaaa

SEQ ID NO: 1672959 - RNA, 19 nt, Homo sapiens
  misc_RNA (1)...(19): siRNA sense strand
gaagaaauucacaggaaaa

SEQ ID NO: 1672960 - RNA, 19 nt, Homo sapiens
  misc_RNA (1)...(19): siRNA sense strand
aauaugcaauggauguaga

SEQ ID NO: 1672961 - RNA, 19 nt, Homo sapiens
  misc_RNA (1)...(19): siRNA sense strand
cugagaagauaacagugaa

SEQ ID NO: 1672962 - RNA, 19 nt, Homo sapiens
  misc_RNA (1)...(19): siRNA sense strand
ugcgauauuucacuccuaa

SEQ ID NO: 1672963 - RNA, 19 nt, Homo sapiens
  misc_RNA (1)...(19): siRNA sense strand
gucacaagaagaacagaua

SEQ ID NO: 1672964 - RNA, 19 nt, Homo sapiens
  misc_RNA (1)...(19): siRNA sense strand
gcgcugagagaaagcugua

SEQ ID NO: 1672965 - RNA, 19 nt, Homo sapiens
  misc_RNA (1)...(19): siRNA sense strand
gaaucuguacauccacaaa

SEQ ID NO: 1672966 - RNA, 19 nt, Homo sapiens
  misc_RNA (1)...(19): siRNA sense strand
caacacugucgcuaaugaa

SEQ ID NO: 1672967 - RNA, 19 nt, Homo sapiens
  misc_RNA (1)...(19): siRNA sense strand
gcuaaugaaguauacaagu

SEQ ID NO: 1672968 - RNA, 19 nt, Homo sapiens
  misc_RNA (1)...(19): siRNA sense strand
guucggauuuccugagaag

SEQ ID NO: 1672969 - RNA, 19 nt, Homo sapiens
  misc_RNA (1)...(19): siRNA sense strand
aauagcaaaucuccuugga

SEQ ID NO: 1672970 - RNA, 19 nt, Homo sapiens
  misc_RNA (1)...(19): siRNA sense strand
guuacagacugcagaggau

SEQ ID NO: 1672971 - RNA, 19 nt, Homo sapiens
  misc_RNA (1)...(19): siRNA sense strand
gcaccacgcgcugagagaa

SEQ ID NO: 1672972 - RNA, 19 nt, Homo sapiens
  misc_RNA (1)...(19): siRNA sense strand
ucucaacgugcauguagua

SEQ ID NO: 1672973 - RNA, 19 nt, Homo sapiens
  misc_RNA (1)...(19): siRNA sense strand
uacaaaucccuuaccaauu

SEQ ID NO: 1672974 - RNA, 19 nt, Homo sapiens
  misc_RNA (1)...(19): siRNA sense strand
gaugugcagguugagaaua

SEQ ID NO: 1672975 - RNA, 19 nt, Homo sapiens
  misc_RNA (1)...(19): siRNA sense strand
agaagguccgugugcuuua

SEQ ID NO: 1672976 - RNA, 19 nt, Homo sapiens
  misc_RNA (1)...(19): siRNA sense strand
uagaagguccgugugcuuu

SEQ ID NO: 1672977 - RNA, 19 nt, Homo sapiens
  misc_RNA (1)...(19): siRNA sense strand
guagaagguccgugugcuu

SEQ ID NO: 1672978 - RNA, 19 nt, Homo sapiens
  misc_RNA (1)...(19): siRNA sense strand
ccugagaagauaacaguga

SEQ ID NO: 1672979 - RNA, 19 nt, Homo sapiens
  misc_RNA (1)...(19): siRNA sense strand
gaaacugcagaagaaauuc

SEQ ID NO: 1672980 - RNA, 19 nt, Homo sapiens
  misc_RNA (1)...(19): siRNA sense strand
cguuaucgccuacuuggaa

SEQ ID NO: 1672981 - RNA, 19 nt, Homo sapiens
  misc_RNA (1)...(19): siRNA sense strand
aagaacagauaacaaagcu

SEQ ID NO: 1672982 - RNA, 19 nt, Homo sapiens
  misc_RNA (1)...(19): siRNA sense strand
gaaccaguaucuuuuacca

SEQ ID NO: 1672983 - RNA, 19 nt, Homo sapiens
  misc_RNA (1)...(19): siRNA sense strand
gagagaaagcuguauaccu

SEQ ID NO: 1672984 - RNA, 19 nt, Homo sapiens
  misc_RNA (1)...(19): siRNA sense strand
gcugcgauaugcucuucug

SEQ ID NO: 1672985 - RNA, 19 nt, Homo sapiens
  misc_RNA (1)...(19): siRNA sense strand
aggcuacgauauuuucuua

SEQ ID NO: 1672986 - RNA, 19 nt, Homo sapiens
  misc_RNA (1)...(19): siRNA sense strand
ggauuuccugagaagauaa

SEQ ID NO: 1672987 - RNA, 19 nt, Homo sapiens
  misc_RNA (1)...(19): siRNA sense strand
acaagaagaacagauaaca

SEQ ID NO: 1672988 - RNA, 19 nt, Homo sapiens
  misc_RNA (1)...(19): siRNA sense strand
ccucuugauacaaacaaua

SEQ ID NO: 1672989 - RNA, 19 nt, Homo sapiens
  misc_RNA (1)...(19): siRNA sense strand
gagaagauaacagugaaac

SEQ ID NO: 1672990 - RNA, 19 nt, Homo sapiens
  misc_RNA (1)...(19): siRNA sense strand
ugcgggugcuggagcuaua

SEQ ID NO: 1672991 - RNA, 19 nt, Homo sapiens
  misc_RNA (1)...(19): siRNA sense strand
uaucgccuacuuggaaaua

SEQ ID NO: 1672992 - RNA, 19 nt, Homo sapiens
  misc_RNA (1)...(19): siRNA sense strand
ccucacacacaguuacuug

SEQ ID NO: 1672993 - RNA, 19 nt, Homo sapiens
  misc_RNA (1)...(19): siRNA sense strand
aauugaaucuguacaucca

SEQ ID NO: 1672994 - RNA, 19 nt, Homo sapiens
  misc_RNA (1)...(19): siRNA sense strand
cuuaaacugcgauauuuca

SEQ ID NO: 1672995 - RNA, 19 nt, Homo sapiens
  misc_RNA (1)...(19): siRNA sense strand
gcaauggauguagaaaaua

SEQ ID NO: 1672996 - RNA, 19 nt, Homo sapiens
  misc_RNA (1)...(19): siRNA sense strand
gucagagccauuacccuuu

SEQ ID NO: 1672997 - RNA, 19 nt, Homo sapiens
  misc_RNA (1)...(19): siRNA sense strand
caaccucucuuggcauucc

SEQ ID NO: 1672998 - RNA, 19 nt, Homo sapiens
  misc_RNA (1)...(19): siRNA sense strand
ggaugugcagguugagaau

SEQ ID NO: 1672999 - RNA, 19 nt, Homo sapiens
  misc_RNA (1)...(19): siRNA sense strand
aagaugacacugacgugaa

SEQ ID NO: 1673000 - RNA, 19 nt, Homo sapiens
  misc_RNA (1)...(19): siRNA sense strand
cuacuuggaaauagucuca

SEQ ID NO: 1673001 - RNA, 19 nt, Homo sapiens
  misc_RNA (1)...(19): siRNA sense strand
aaacugcagaagaaauuca

SEQ ID NO: 1673002 - RNA, 19 nt, Homo sapiens
  misc_RNA (1)...(19): siRNA sense strand
augugcagguugagaauau

SEQ ID NO: 1673003 - RNA, 19 nt, Homo sapiens
  misc_RNA (1)...(19): siRNA sense strand
ccaaaggauauggaagcua

SEQ ID NO: 1673004 - RNA, 19 nt, Homo sapiens
  misc_RNA (1)...(19): siRNA sense strand
gcgauaugcucuucuguua

SEQ ID NO: 1673005 - RNA, 19 nt, Homo sapiens
  misc_RNA (1)...(19): siRNA sense strand
gauaugcucuucuguuaga

SEQ ID NO: 1673006 - RNA, 19 nt, Homo sapiens
  misc_RNA (1)...(19): siRNA sense strand
cagaagaaauucacaggaa

SEQ ID NO: 1673007 - RNA, 19 nt, Homo sapiens
  misc_RNA (1)...(19): siRNA sense strand
caaagucauugcugcgaua

SEQ ID NO: 1673008 - RNA, 19 nt, Homo sapiens
  misc_RNA (1)...(19): siRNA sense strand
gcuugaaacugcagaagaa

SEQ ID NO: 1673009 - RNA, 19 nt, Homo sapiens
  misc_RNA (1)...(19): siRNA sense strand
uugcaaagcuucagucaga

SEQ ID NO: 1673010 - RNA, 19 nt, Homo sapiens
  misc_RNA (1)...(19): siRNA sense strand
gaacguugaaccaaauauu

SEQ ID NO: 1673011 - RNA, 19 nt, Homo sapiens
  misc_RNA (1)...(19): siRNA sense strand
ucaacacugucgcuaauga

SEQ ID NO: 1673012 - RNA, 19 nt, Homo sapiens
  misc_RNA (1)...(19): siRNA sense strand
aaagaacguugaaccaaau

SEQ ID NO: 1673013 - RNA, 19 nt, Homo sapiens
  misc_RNA (1)...(19): siRNA sense strand
caaauucaaggcuacgaua

SEQ ID NO: 1673014 - RNA, 19 nt, Homo sapiens
  misc_RNA (1)...(19): siRNA sense strand
cagaggaugugcagguuga

SEQ ID NO: 1673015 - RNA, 19 nt, Homo sapiens
  misc_RNA (1)...(19): siRNA sense strand
agaagaaauucacaggaaa

SEQ ID NO: 1673016 - RNA, 19 nt, Homo sapiens
  misc_RNA (1)...(19): siRNA sense strand
gacgugaaccaguaucuuu

SEQ ID NO: 1673017 - RNA, 19 nt, Homo sapiens
  misc_RNA (1)...(19): siRNA sense strand
cuacaaaucccuuaccaau

SEQ ID NO: 1673018 - RNA, 19 nt, Homo sapiens
  misc_RNA (1)...(19): siRNA sense strand
uagcuuugauggcagcaua

SEQ ID NO: 1673019 - RNA, 19 nt, Homo sapiens
  misc_RNA (1)...(19): siRNA sense strand
gcucuucuguuagacauug

SEQ ID NO: 1673020 - RNA, 19 nt, Homo sapiens
  misc_RNA (1)...(19): siRNA sense strand
cacugucgcuaaugaagua

SEQ ID NO: 1673021 - RNA, 19 nt, Homo sapiens
  misc_RNA (1)...(19): siRNA sense strand
ugaaacugcagaagaaauu

SEQ ID NO: 1673022 - RNA, 19 nt, Homo sapiens
  misc_RNA (1)...(19): siRNA sense strand
gcugagagaaagcuguaua

SEQ ID NO: 1673023 - RNA, 19 nt, Homo sapiens
  misc_RNA (1)...(19): siRNA sense strand
gaagauaacagugaaacag

SEQ ID NO: 1673024 - RNA, 19 nt, Homo sapiens
  misc_RNA (1)...(19): siRNA sense strand
auucaaggcuacgauauuu

SEQ ID NO: 1673025 - RNA, 19 nt, Homo sapiens
  misc_RNA (1)...(19): siRNA sense strand
gauauuucacuccuaaaga

SEQ ID NO: 1673026 - RNA, 19 nt, Homo sapiens
  misc_RNA (1)...(19): siRNA sense strand
auagugaucucucugugaa

SEQ ID NO: 1673027 - RNA, 19 nt, Homo sapiens
  misc_RNA (1)...(19): siRNA sense strand
caacgugcauguaguagcu

SEQ ID NO: 1673028 - RNA, 19 nt, Homo sapiens
  misc_RNA (1)...(19): siRNA sense strand
agaaauagcaaaucuccuu

SEQ ID NO: 1673029 - RNA, 19 nt, Homo sapiens
  misc_RNA (1)...(19): siRNA sense strand
gauagugaucucucuguga

SEQ ID NO: 1673030 - RNA, 19 nt, Homo sapiens
  misc_RNA (1)...(19): siRNA sense strand
caagaagaacagauaacaa

SEQ ID NO: 1673031 - RNA, 19 nt, Homo sapiens
  misc_RNA (1)...(19): siRNA sense strand
gaagguccgugugcuuuac

SEQ ID NO: 1673032 - RNA, 19 nt, Homo sapiens
  misc_RNA (1)...(19): siRNA sense strand
cggauuuccugagaagaua

SEQ ID NO: 1673033 - RNA, 19 nt, Homo sapiens
  misc_RNA (1)...(19): siRNA sense strand
gaguucggauuuccugaga

SEQ ID NO: 1673034 - RNA, 19 nt, Homo sapiens
  misc_RNA (1)...(19): siRNA sense strand
ucacaagaagaacagauaa

SEQ ID NO: 1673035 - RNA, 19 nt, Homo sapiens
  misc_RNA (1)...(19): siRNA sense strand
ucagagccauuacccuuuc

SEQ ID NO: 1673036 - RNA, 19 nt, Homo sapiens
  misc_RNA (1)...(19): siRNA sense strand
ugucaacacugucgcuaau

SEQ ID NO: 1673037 - RNA, 19 nt, Homo sapiens
  misc_RNA (1)...(19): siRNA sense strand
aaaagaacguugaaccaaa

SEQ ID NO: 1673038 - RNA, 19 nt, Homo sapiens
  misc_RNA (1)...(19): siRNA sense strand
gguugagaauaucuacaaa

SEQ ID NO: 1673039 - RNA, 19 nt, Homo sapiens
  misc_RNA (1)...(19): siRNA sense strand
guucagcccacuuguagaa

SEQ ID NO: 1673040 - RNA, 19 nt, Homo sapiens
  misc_RNA (1)...(19): siRNA sense strand
gaagaacagauaacaaagc

SEQ ID NO: 1673041 - RNA, 19 nt, Homo sapiens
  misc_RNA (1)...(19): siRNA sense strand
cuguauaccugcacaagug

SEQ ID NO: 1673042 - RNA, 19 nt, Homo sapiens
  misc_RNA (1)...(19): siRNA sense strand
gcauacaguguucuggaaa

SEQ ID NO: 1673043 - RNA, 19 nt, Homo sapiens
  misc_RNA (1)...(19): siRNA sense strand
gauggcagcauacaguguu

SEQ ID NO: 1673044 - RNA, 19 nt, Homo sapiens
  misc_RNA (1)...(19): siRNA sense strand
gaaaagaacguugaaccaa

SEQ ID NO: 1673045 - RNA, 19 nt, Homo sapiens
  misc_RNA (1)...(19): siRNA sense strand
guuaucgccuacuuggaaa

SEQ ID NO: 1673046 - RNA, 19 nt, Homo sapiens
  misc_RNA (1)...(19): siRNA sense strand
gaagaaauucacaggaaaa

SEQ ID NO: 1673047 - RNA, 19 nt, Homo sapiens
  misc_RNA (1)...(19): siRNA sense strand
aauaugcaauggauguaga

SEQ ID NO: 1673048 - RNA, 19 nt, Homo sapiens
  misc_RNA (1)...(19): siRNA sense strand
cugagaagauaacagugaa

SEQ ID NO: 1673049 - RNA, 19 nt, Homo sapiens
  misc_RNA (1)...(19): siRNA sense strand
ugcgauauuucacuccuaa

SEQ ID NO: 1673050 - RNA, 19 nt, Homo sapiens
  misc_RNA (1)...(19): siRNA sense strand
gucacaagaagaacagaua

SEQ ID NO: 1673051 - RNA, 19 nt, Homo sapiens
  misc_RNA (1)...(19): siRNA sense strand
gcgcugagagaaagcugua

SEQ ID NO: 1673052 - RNA, 19 nt, Homo sapiens
  misc_RNA (1)...(19): siRNA sense strand
gaaucuguacauccacaaa

SEQ ID NO: 1673053 - RNA, 19 nt, Homo sapiens
  misc_RNA (1)...(19): siRNA sense strand
caacacugucgcuaaugaa

SEQ ID NO: 1673054 - RNA, 19 nt, Homo sapiens
  misc_RNA (1)...(19): siRNA sense strand
gcuaaugaaguauacaagu

SEQ ID NO: 1673055 - RNA, 19 nt, Homo sapiens
  misc_RNA (1)...(19): siRNA sense strand
guucggauuuccugagaag

SEQ ID NO: 1673056 - RNA, 19 nt, Homo sapiens
  misc_RNA (1)...(19): siRNA sense strand
aauagcaaaucuccuugga

SEQ ID NO: 1673057 - RNA, 19 nt, Homo sapiens
  misc_RNA (1)...(19): siRNA sense strand
guuacagacugcagaggau

SEQ ID NO: 1673058 - RNA, 19 nt, Homo sapiens
  misc_RNA (1)...(19): siRNA sense strand
gcaccacgcgcugagagaa

SEQ ID NO: 1673059 - RNA, 19 nt, Homo sapiens
  misc_RNA (1)...(19): siRNA sense strand
ucucaacgugcauguagua

SEQ ID NO: 1673060 - RNA, 19 nt, Homo sapiens
  misc_RNA (1)...(19): siRNA sense strand
uacaaaucccuuaccaauu

SEQ ID NO: 1673061 - RNA, 19 nt, Homo sapiens
  misc_RNA (1)...(19): siRNA sense strand
gaugugcagguugagaaua

SEQ ID NO: 1673062 - RNA, 19 nt, Homo sapiens
  misc_RNA (1)...(19): siRNA sense strand
agaagguccgugugcuuua

SEQ ID NO: 1673063 - RNA, 19 nt, Homo sapiens
  misc_RNA (1)...(19): siRNA sense strand
uagaagguccgugugcuuu

SEQ ID NO: 1673064 - RNA, 19 nt, Homo sapiens
  misc_RNA (1)...(19): siRNA sense strand
guagaagguccgugugcuu

SEQ ID NO: 1673065 - RNA, 19 nt, Homo sapiens
  misc_RNA (1)...(19): siRNA sense strand
ccugagaagauaacaguga

SEQ ID NO: 1673066 - RNA, 19 nt, Homo sapiens
  misc_RNA (1)...(19): siRNA sense strand
gaaacugcagaagaaauuc

SEQ ID NO: 1673067 - RNA, 19 nt, Homo sapiens
  misc_RNA (1)...(19): siRNA sense strand
cguuaucgccuacuuggaa

SEQ ID NO: 1673068 - RNA, 19 nt, Homo sapiens
  misc_RNA (1)...(19): siRNA sense strand
aagaacagauaacaaagcu

SEQ ID NO: 1673069 - RNA, 19 nt, Homo sapiens
  misc_RNA (1)...(19): siRNA sense strand
gaaccaguaucuuuuacca

SEQ ID NO: 1673070 - RNA, 19 nt, Homo sapiens
  misc_RNA (1)...(19): siRNA sense strand
gagagaaagcuguauaccu

SEQ ID NO: 1673071 - RNA, 19 nt, Homo sapiens
  misc_RNA (1)...(19): siRNA sense strand
gcugcgauaugcucuucug

SEQ ID NO: 1673072 - RNA, 19 nt, Homo sapiens
  misc_RNA (1)...(19): siRNA sense strand
aggcuacgauauuuucuua

SEQ ID NO: 1673073 - RNA, 19 nt, Homo sapiens
  misc_RNA (1)...(19): siRNA sense strand
ggauuuccugagaagauaa

SEQ ID NO: 1673074 - RNA, 19 nt, Homo sapiens
  misc_RNA (1)...(19): siRNA sense strand
acaagaagaacagauaaca

SEQ ID NO: 1673075 - RNA, 19 nt, Homo sapiens
  misc_RNA (1)...(19): siRNA sense strand
ccucuugauacaaacaaua

SEQ ID NO: 1673076 - RNA, 19 nt, Homo sapiens
  misc_RNA (1)...(19): siRNA sense strand
gagaagauaacagugaaac

SEQ ID NO: 1673077 - RNA, 19 nt, Homo sapiens
  misc_RNA (1)...(19): siRNA sense strand
ugcgggugcuggagcuaua

SEQ ID NO: 1673078 - RNA, 19 nt, Homo sapiens
  misc_RNA (1)...(19): siRNA sense strand
uaucgccuacuuggaaaua

SEQ ID NO: 1673079 - RNA, 19 nt, Homo sapiens
  misc_RNA (1)...(19): siRNA sense strand
ccucacacacaguuacuug

SEQ ID NO: 1673080 - RNA, 19 nt, Homo sapiens
  misc_RNA (1)...(19): siRNA sense strand
aauugaaucuguacaucca

SEQ ID NO: 1673081 - RNA, 19 nt, Homo sapiens
  misc_RNA (1)...(19): siRNA sense strand
cuuaaacugcgauauuuca

SEQ ID NO: 1673082 - RNA, 19 nt, Homo sapiens
  misc_RNA (1)...(19): siRNA sense strand
gcaauggauguagaaaaua

SEQ ID NO: 1673083 - RNA, 19 nt, Homo sapiens
  misc_RNA (1)...(19): siRNA sense strand
gucagagccauuacccuuu

SEQ ID NO: 1673084 - RNA, 19 nt, Homo sapiens
  misc_RNA (1)...(19): siRNA sense strand
caaccucucuuggcauucc

SEQ ID NO: 1673085 - RNA, 19 nt, Homo sapiens
  misc_RNA (1)...(19): siRNA sense strand
ggaugugcagguugagaau

SEQ ID NO: 1673086 - RNA, 19 nt, Homo sapiens
  misc_RNA (1)...(19): siRNA sense strand
aagaugacacugacgugaa

SEQ ID NO: 1673087 - RNA, 19 nt, Homo sapiens
  misc_RNA (1)...(19): siRNA sense strand
cuacuuggaaauagucuca

SEQ ID NO: 1673088 - RNA, 19 nt, Homo sapiens
  misc_RNA (1)...(19): siRNA sense strand
aaacugcagaagaaauuca

SEQ ID NO: 1673089 - RNA, 19 nt, Homo sapiens
  misc_RNA (1)...(19): siRNA sense strand
augugcagguugagaauau

SEQ ID NO: 1673090 - RNA, 19 nt, Homo sapiens
  misc_RNA (1)...(19): siRNA sense strand
ccaaaggauauggaagcua

SEQ ID NO: 1673091 - RNA, 19 nt, Homo sapiens
  misc_RNA (1)...(19): siRNA sense strand
gcgauaugcucuucuguua

SEQ ID NO: 1673092 - RNA, 19 nt, Homo sapiens
  misc_RNA (1)...(19): siRNA sense strand
gauaugcucuucuguuaga

SEQ ID NO: 1673093 - RNA, 19 nt, Homo sapiens
  misc_RNA (1)...(19): siRNA sense strand
cagaagaaauucacaggaa

SEQ ID NO: 1673094 - RNA, 19 nt, Homo sapiens
  misc_RNA (1)...(19): siRNA sense strand
caaagucauugcugcgaua

SEQ ID NO: 1673095 - RNA, 19 nt, Homo sapiens
  misc_RNA (1)...(19): siRNA sense strand
gcuugaaacugcagaagaa

SEQ ID NO: 1673096 - RNA, 19 nt, Homo sapiens
  misc_RNA (1)...(19): siRNA sense strand
uugcaaagcuucagucaga

SEQ ID NO: 1673097 - RNA, 19 nt, Homo sapiens
  misc_RNA (1)...(19): siRNA sense strand
gaacguugaaccaaauauu

SEQ ID NO: 1673098 - RNA, 19 nt, Homo sapiens
  misc_RNA (1)...(19): siRNA sense strand
ucaacacugucgcuaauga

SEQ ID NO: 1673099 - RNA, 19 nt, Homo sapiens
  misc_RNA (1)...(19): siRNA sense strand
aaagaacguugaaccaaau

SEQ ID NO: 1673100 - RNA, 19 nt, Homo sapiens
  misc_RNA (1)...(19): siRNA sense strand
caaauucaaggcuacgaua

SEQ ID NO: 1673101 - RNA, 19 nt, Homo sapiens
  misc_RNA (1)...(19): siRNA sense strand
cagaggaugugcagguuga

SEQ ID NO: 1673102 - RNA, 19 nt, Homo sapiens
  misc_RNA (1)...(19): siRNA sense strand
agaagaaauucacaggaaa

SEQ ID NO: 1673103 - RNA, 19 nt, Homo sapiens
  misc_RNA (1)...(19): siRNA sense strand
gacgugaaccaguaucuuu

SEQ ID NO: 1673104 - RNA, 19 nt, Homo sapiens
  misc_RNA (1)...(19): siRNA sense strand
cuacaaaucccuuaccaau

SEQ ID NO: 1673105 - RNA, 19 nt, Homo sapiens
  misc_RNA (1)...(19): siRNA sense strand
uagcuuugauggcagcaua

SEQ ID NO: 1673106 - RNA, 19 nt, Homo sapiens
  misc_RNA (1)...(19): siRNA sense strand
gcucuucuguuagacauug

SEQ ID NO: 1673107 - RNA, 19 nt, Homo sapiens
  misc_RNA (1)...(19): siRNA sense strand
cacugucgcuaaugaagua

SEQ ID NO: 1673108 - RNA, 19 nt, Homo sapiens
  misc_RNA (1)...(19): siRNA sense strand
ugaaacugcagaagaaauu

SEQ ID NO: 1673109 - RNA, 19 nt, Homo sapiens
  misc_RNA (1)...(19): siRNA sense strand
gcugagagaaagcuguaua

SEQ ID NO: 1673110 - RNA, 19 nt, Homo sapiens
  misc_RNA (1)...(19): siRNA sense strand
gaagauaacagugaaacag

SEQ ID NO: 1673111 - RNA, 19 nt, Homo sapiens
  misc_RNA (1)...(19): siRNA sense strand
auucaaggcuacgauauuu

SEQ ID NO: 1673112 - RNA, 19 nt, Homo sapiens
  misc_RNA (1)...(19): siRNA sense strand
gauauuucacuccuaaaga

SEQ ID NO: 1673113 - RNA, 19 nt, Homo sapiens
  misc_RNA (1)...(19): siRNA sense strand
auagugaucucucugugaa

SEQ ID NO: 1673114 - RNA, 19 nt, Homo sapiens
  misc_RNA (1)...(19): siRNA sense strand
caacgugcauguaguagcu

SEQ ID NO: 1673115 - RNA, 19 nt, Homo sapiens
  misc_RNA (1)...(19): siRNA sense strand
agaaauagcaaaucuccuu

SEQ ID NO: 1673116 - RNA, 19 nt, Homo sapiens
  misc_RNA (1)...(19): siRNA sense strand
gauagugaucucucuguga

SEQ ID NO: 1673117 - RNA, 19 nt, Homo sapiens
  misc_RNA (1)...(19): siRNA sense strand
caagaagaacagauaacaa

SEQ ID NO: 1673118 - RNA, 19 nt, Homo sapiens
  misc_RNA (1)...(19): siRNA sense strand
gaagguccgugugcuuuac

SEQ ID NO: 1673119 - RNA, 19 nt, Homo sapiens
  misc_RNA (1)...(19): siRNA sense strand
cggauuuccugagaagaua

SEQ ID NO: 1673120 - RNA, 19 nt, Homo sapiens
  misc_RNA (1)...(19): siRNA sense strand
gaguucggauuuccugaga

SEQ ID NO: 1673121 - RNA, 19 nt, Homo sapiens
  misc_RNA (1)...(19): siRNA sense strand
ucacaagaagaacagauaa

SEQ ID NO: 1673122 - RNA, 19 nt, Homo sapiens
  misc_RNA (1)...(19): siRNA sense strand
ucagagccauuacccuuuc

SEQ ID NO: 1673123 - RNA, 19 nt, Homo sapiens
  misc_RNA (1)...(19): siRNA sense strand
ugucaacacugucgcuaau

SEQ ID NO: 1673124 - RNA, 19 nt, Homo sapiens
  misc_RNA (1)...(19): siRNA sense strand
aaaagaacguugaaccaaa

SEQ ID NO: 1673125 - RNA, 19 nt, Homo sapiens
  misc_RNA (1)...(19): siRNA sense strand
gguugagaauaucuacaaa

SEQ ID NO: 1673126 - RNA, 19 nt, Homo sapiens
  misc_RNA (1)...(19): siRNA sense strand
guucagcccacuuguagaa

SEQ ID NO: 1673127 - RNA, 19 nt, Homo sapiens
  misc_RNA (1)...(19): siRNA sense strand
gaagaacagauaacaaagc

SEQ ID NO: 1673128 - RNA, 19 nt, Homo sapiens
  misc_RNA (1)...(19): siRNA sense strand
cuguauaccugcacaagug

SEQ ID NO: 1673129 - RNA, 19 nt, Homo sapiens
  misc_RNA (1)...(19): siRNA sense strand
gcauacaguguucuggaaa

SEQ ID NO: 1673130 - RNA, 19 nt, Homo sapiens
  misc_RNA (1)...(19): siRNA sense strand
gauggcagcauacaguguu

SEQ ID NO: 1673131 - RNA, 19 nt, Homo sapiens
  misc_RNA (1)...(19): siRNA sense strand
gaaaagaacguugaaccaa

SEQ ID NO: 1673132 - RNA, 19 nt, Homo sapiens
  misc_RNA (1)...(19): siRNA sense strand
guuaucgccuacuuggaaa

SEQ ID NO: 1673133 - RNA, 19 nt, Homo sapiens
  misc_RNA (1)...(19): siRNA sense strand
gaagaaauucacaggaaaa

SEQ ID NO: 1673134 - RNA, 19 nt, Homo sapiens
  misc_RNA (1)...(19): siRNA sense strand
aauaugcaauggauguaga

SEQ ID NO: 1673135 - RNA, 19 nt, Homo sapiens
  misc_RNA (1)...(19): siRNA sense strand
cugagaagauaacagugaa

SEQ ID NO: 1673136 - RNA, 19 nt, Homo sapiens
  misc_RNA (1)...(19): siRNA sense strand
ugcgauauuucacuccuaa

SEQ ID NO: 1673137 - RNA, 19 nt, Homo sapiens
  misc_RNA (1)...(19): siRNA sense strand
gucacaagaagaacagaua

SEQ ID NO: 1673138 - RNA, 19 nt, Homo sapiens
  misc_RNA (1)...(19): siRNA sense strand
gcgcugagagaaagcugua

SEQ ID NO: 1673139 - RNA, 19 nt, Homo sapiens
  misc_RNA (1)...(19): siRNA sense strand
gaaucuguacauccacaaa

SEQ ID NO: 1673140 - RNA, 19 nt, Homo sapiens
  misc_RNA (1)...(19): siRNA sense strand
caacacugucgcuaaugaa

SEQ ID NO: 1673141 - RNA, 19 nt, Homo sapiens
  misc_RNA (1)...(19): siRNA sense strand
gcuaaugaaguauacaagu

SEQ ID NO: 1673142 - RNA, 19 nt, Homo sapiens
  misc_RNA (1)...(19): siRNA sense strand
guucggauuuccugagaag

SEQ ID NO: 1673143 - RNA, 19 nt, Homo sapiens
  misc_RNA (1)...(19): siRNA sense strand
aauagcaaaucuccuugga

SEQ ID NO: 1673144 - RNA, 19 nt, Homo sapiens
  misc_RNA (1)...(19): siRNA sense strand
guuacagacugcagaggau

SEQ ID NO: 1673145 - RNA, 19 nt, Homo sapiens
  misc_RNA (1)...(19): siRNA sense strand
gcaccacgcgcugagagaa

SEQ ID NO: 1673146 - RNA, 19 nt, Homo sapiens
  misc_RNA (1)...(19): siRNA sense strand
ucucaacgugcauguagua

SEQ ID NO: 1673147 - RNA, 19 nt, Homo sapiens
  misc_RNA (1)...(19): siRNA sense strand
uacaaaucccuuaccaauu

SEQ ID NO: 1673148 - RNA, 19 nt, Homo sapiens
  misc_RNA (1)...(19): siRNA sense strand
gaugugcagguugagaaua

SEQ ID NO: 1673149 - RNA, 19 nt, Homo sapiens
  misc_RNA (1)...(19): siRNA sense strand
agaagguccgugugcuuua

SEQ ID NO: 1673150 - RNA, 19 nt, Homo sapiens
  misc_RNA (1)...(19): siRNA sense strand
uagaagguccgugugcuuu

SEQ ID NO: 1673151 - RNA, 19 nt, Homo sapiens
  misc_RNA (1)...(19): siRNA sense strand
guagaagguccgugugcuu

SEQ ID NO: 1673152 - RNA, 19 nt, Homo sapiens
  misc_RNA (1)...(19): siRNA sense strand
ccugagaagauaacaguga

SEQ ID NO: 1673153 - RNA, 19 nt, Homo sapiens
  misc_RNA (1)...(19): siRNA sense strand
gaaacugcagaagaaauuc

SEQ ID NO: 1673154 - RNA, 19 nt, Homo sapiens
  misc_RNA (1)...(19): siRNA sense strand
cguuaucgccuacuuggaa

SEQ ID NO: 1673155 - RNA, 19 nt, Homo sapiens
  misc_RNA (1)...(19): siRNA sense strand
aagaacagauaacaaagcu

SEQ ID NO: 1673156 - RNA, 19 nt, Homo sapiens
  misc_RNA (1)...(19): siRNA sense strand
gaaccaguaucuuuuacca

SEQ ID NO: 1673157 - RNA, 19 nt, Homo sapiens
  misc_RNA (1)...(19): siRNA sense strand
gagagaaagcuguauaccu

SEQ ID NO: 1673158 - RNA, 19 nt, Homo sapiens
  misc_RNA (1)...(19): siRNA sense strand
gcugcgauaugcucuucug

SEQ ID NO: 1673159 - RNA, 19 nt, Homo sapiens
  misc_RNA (1)...(19): siRNA sense strand
aggcuacgauauuuucuua

SEQ ID NO: 1673160 - RNA, 19 nt, Homo sapiens
  misc_RNA (1)...(19): siRNA sense strand
ggauuuccugagaagauaa

SEQ ID NO: 1673161 - RNA, 19 nt, Homo sapiens
  misc_RNA (1)...(19): siRNA sense strand
acaagaagaacagauaaca

SEQ ID NO: 1673162 - RNA, 19 nt, Homo sapiens
  misc_RNA (1)...(19): siRNA sense strand
ccucuugauacaaacaaua

SEQ ID NO: 1673163 - RNA, 19 nt, Homo sapiens
  misc_RNA (1)...(19): siRNA sense strand
gagaagauaacagugaaac

SEQ ID NO: 1673164 - RNA, 19 nt, Homo sapiens
  misc_RNA (1)...(19): siRNA sense strand
ugcgggugcuggagcuaua

SEQ ID NO: 1673165 - RNA, 19 nt, Homo sapiens
  misc_RNA (1)...(19): siRNA sense strand
uaucgccuacuuggaaaua

SEQ ID NO: 1673166 - RNA, 19 nt, Homo sapiens
  misc_RNA (1)...(19): siRNA sense strand
ccucacacacaguuacuug

SEQ ID NO: 1673167 - RNA, 19 nt, Homo sapiens
  misc_RNA (1)...(19): siRNA sense strand
aauugaaucuguacaucca

SEQ ID NO: 1673168 - RNA, 19 nt, Homo sapiens
  misc_RNA (1)...(19): siRNA sense strand
cuuaaacugcgauauuuca

SEQ ID NO: 1673169 - RNA, 19 nt, Homo sapiens
  misc_RNA (1)...(19): siRNA sense strand
gcaauggauguagaaaaua

SEQ ID NO: 1673170 - RNA, 19 nt, Homo sapiens
  misc_RNA (1)...(19): siRNA sense strand
gucagagccauuacccuuu

SEQ ID NO: 1673171 - RNA, 19 nt, Homo sapiens
  misc_RNA (1)...(19): siRNA sense strand
caaccucucuuggcauucc

SEQ ID NO: 1673172 - RNA, 19 nt, Homo sapiens
  misc_RNA (1)...(19): siRNA sense strand
ggaugugcagguugagaau

SEQ ID NO: 1673173 - RNA, 19 nt, Homo sapiens
  misc_RNA (1)...(19): siRNA sense strand
aagaugacacugacgugaa

SEQ ID NO: 1673174 - RNA, 19 nt, Homo sapiens
  misc_RNA (1)...(19): siRNA sense strand
cuacuuggaaauagucuca

SEQ ID NO: 1673175 - RNA, 19 nt, Homo sapiens
  misc_RNA (1)...(19): siRNA sense strand
aaacugcagaagaaauuca

SEQ ID NO: 1673176 - RNA, 19 nt, Homo sapiens
  misc_RNA (1)...(19): siRNA sense strand
augugcagguugagaauau

SEQ ID NO: 1673177 - RNA, 19 nt, Homo sapiens
  misc_RNA (1)...(19): siRNA sense strand
ccaaaggauauggaagcua

SEQ ID NO: 1673178 - RNA, 19 nt, Homo sapiens
  misc_RNA (1)...(19): siRNA sense strand
ucaacacugucgcuaauga

SEQ ID NO: 1673179 - RNA, 19 nt, Homo sapiens
  misc_RNA (1)...(19): siRNA sense strand
cacugucgcuaaugaagua

SEQ ID NO: 1673180 - RNA, 19 nt, Homo sapiens
  misc_RNA (1)...(19): siRNA sense strand
gcugagagaaagcuguaua

SEQ ID NO: 1673181 - RNA, 19 nt, Homo sapiens
  misc_RNA (1)...(19): siRNA sense strand
ugucaacacugucgcuaau

SEQ ID NO: 1673182 - RNA, 19 nt, Homo sapiens
  misc_RNA (1)...(19): siRNA sense strand
cuguauaccugcacaagug

SEQ ID NO: 1673183 - RNA, 19 nt, Homo sapiens
  misc_RNA (1)...(19): siRNA sense strand
gcgcugagagaaagcugua

SEQ ID NO: 1673184 - RNA, 19 nt, Homo sapiens
  misc_RNA (1)...(19): siRNA sense strand
caacacugucgcuaaugaa

SEQ ID NO: 1673185 - RNA, 19 nt, Homo sapiens
  misc_RNA (1)...(19): siRNA sense strand
gcuaaugaaguauacaagu

SEQ ID NO: 1673186 - RNA, 19 nt, Homo sapiens
  misc_RNA (1)...(19): siRNA sense strand
gcaccacgcgcugagagaa

SEQ ID NO: 1673187 - RNA, 19 nt, Homo sapiens
  misc_RNA (1)...(19): siRNA sense strand
gagagaaagcuguauaccu

SEQ ID NO: 1673188 - RNA, 19 nt, Homo sapiens
  misc_RNA (1)...(19): siRNA sense strand
ugcgggugcuggagcuaua

SEQ ID NO: 1673189 - RNA, 19 nt, Homo sapiens
  misc_RNA (1)...(19): siRNA sense strand
ccucacacacaguuacuug

SEQ ID NO: 1673190 - RNA, 19 nt, Homo sapiens
  misc_RNA (1)...(19): siRNA sense strand
ucaacacugucgcuaauga

SEQ ID NO: 1673191 - RNA, 19 nt, Homo sapiens
  misc_RNA (1)...(19): siRNA sense strand
cacugucgcuaaugaagua

SEQ ID NO: 1673192 - RNA, 19 nt, Homo sapiens
  misc_RNA (1)...(19): siRNA sense strand
gcugagagaaagcuguaua

SEQ ID NO: 1673193 - RNA, 19 nt, Homo sapiens
  misc_RNA (1)...(19): siRNA sense strand
ugucaacacugucgcuaau

SEQ ID NO: 1673194 - RNA, 19 nt, Homo sapiens
  misc_RNA (1)...(19): siRNA sense strand
cuguauaccugcacaagug

SEQ ID NO: 1673195 - RNA, 19 nt, Homo sapiens
  misc_RNA (1)...(19): siRNA sense strand
gcgcugagagaaagcugua

SEQ ID NO: 1673196 - RNA, 19 nt, Homo sapiens
  misc_RNA (1)...(19): siRNA sense strand
caacacugucgcuaaugaa

SEQ ID NO: 1673197 - RNA, 19 nt, Homo sapiens
  misc_RNA (1)...(19): siRNA sense strand
gcuaaugaaguauacaagu

SEQ ID NO: 1673198 - RNA, 19 nt, Homo sapiens
  misc_RNA (1)...(19): siRNA sense strand
gcaccacgcgcugagagaa

SEQ ID NO: 1673199 - RNA, 19 nt, Homo sapiens
  misc_RNA (1)...(19): siRNA sense strand
gagagaaagcuguauaccu

SEQ ID NO: 1673200 - RNA, 19 nt, Homo sapiens
  misc_RNA (1)...(19): siRNA sense strand
ugcgggugcuggagcuaua

SEQ ID NO: 1673201 - RNA, 19 nt, Homo sapiens
  misc_RNA (1)...(19): siRNA sense strand
ccucacacacaguuacuug

SEQ ID NO: 1673202 - RNA, 19 nt, Homo sapiens
  misc_RNA (1)...(19): siRNA sense strand
uugcaaagcuucagucaga

SEQ ID NO: 1673203 - RNA, 19 nt, Homo sapiens
  misc_RNA (1)...(19): siRNA sense strand
ucaacacugucgcuaauga

SEQ ID NO: 1673204 - RNA, 19 nt, Homo sapiens
  misc_RNA (1)...(19): siRNA sense strand
caaauucaaggcuacgaua

SEQ ID NO: 1673205 - RNA, 19 nt, Homo sapiens
  misc_RNA (1)...(19): siRNA sense strand
cacugucgcuaaugaagua

SEQ ID NO: 1673206 - RNA, 19 nt, Homo sapiens
  misc_RNA (1)...(19): siRNA sense strand
gcugagagaaagcuguaua

SEQ ID NO: 1673207 - RNA, 19 nt, Homo sapiens
  misc_RNA (1)...(19): siRNA sense strand
auucaaggcuacgauauuu

SEQ ID NO: 1673208 - RNA, 19 nt, Homo sapiens
  misc_RNA (1)...(19): siRNA sense strand
ugucaacacugucgcuaau

SEQ ID NO: 1673209 - RNA, 19 nt, Homo sapiens
  misc_RNA (1)...(19): siRNA sense strand
ucagagccauuacccuuuc

SEQ ID NO: 1673210 - RNA, 19 nt, Homo sapiens
  misc_RNA (1)...(19): siRNA sense strand
cuguauaccugcacaagug

SEQ ID NO: 1673211 - RNA, 19 nt, Homo sapiens
  misc_RNA (1)...(19): siRNA sense strand
gcgcugagagaaagcugua

SEQ ID NO: 1673212 - RNA, 19 nt, Homo sapiens
  misc_RNA (1)...(19): siRNA sense strand
caacacugucgcuaaugaa

SEQ ID NO: 1673213 - RNA, 19 nt, Homo sapiens
  misc_RNA (1)...(19): siRNA sense strand
gcuaaugaaguauacaagu

SEQ ID NO: 1673214 - RNA, 19 nt, Homo sapiens
  misc_RNA (1)...(19): siRNA sense strand
gcaccacgcgcugagagaa

SEQ ID NO: 1673215 - RNA, 19 nt, Homo sapiens
  misc_RNA (1)...(19): siRNA sense strand
gagagaaagcuguauaccu

SEQ ID NO: 1673216 - RNA, 19 nt, Homo sapiens
  misc_RNA (1)...(19): siRNA sense strand
ccucuugauacaaacaaua

SEQ ID NO: 1673217 - RNA, 19 nt, Homo sapiens
  misc_RNA (1)...(19): siRNA sense strand
aggcuacgauauuuucuua

SEQ ID NO: 1673218 - RNA, 19 nt, Homo sapiens
  misc_RNA (1)...(19): siRNA sense strand
ugcgggugcuggagcuaua

SEQ ID NO: 1673219 - RNA, 19 nt, Homo sapiens
  misc_RNA (1)...(19): siRNA sense strand
ccucacacacaguuacuug

SEQ ID NO: 1673220 - RNA, 19 nt, Homo sapiens
  misc_RNA (1)...(19): siRNA sense strand
caaccucucuuggcauucc

SEQ ID NO: 1673221 - RNA, 19 nt, Homo sapiens
  misc_RNA (1)...(19): siRNA sense strand
gucagagccauuacccuuu

SEQ ID NO: 1673222 - RNA, 19 nt, Homo sapiens
  misc_RNA (1)...(19): siRNA sense strand
gcgauaugcucuucuguua

SEQ ID NO: 1673223 - RNA, 19 nt, Homo sapiens
  misc_RNA (1)...(19): siRNA sense strand
gauaugcucuucuguuaga

SEQ ID NO: 1673224 - RNA, 19 nt, Homo sapiens
  misc_RNA (1)...(19): siRNA sense strand
cagaagaaauucacaggaa

SEQ ID NO: 1673225 - RNA, 19 nt, Homo sapiens
  misc_RNA (1)...(19): siRNA sense strand
caaagucauugcugcgaua

SEQ ID NO: 1673226 - RNA, 19 nt, Homo sapiens
  misc_RNA (1)...(19): siRNA sense strand
gcuugaaacugcagaagaa

SEQ ID NO: 1673227 - RNA, 19 nt, Homo sapiens
  misc_RNA (1)...(19): siRNA sense strand
uugcaaagcuucagucaga

SEQ ID NO: 1673228 - RNA, 19 nt, Homo sapiens
  misc_RNA (1)...(19): siRNA sense strand
gaacguugaaccaaauauu

SEQ ID NO: 1673229 - RNA, 19 nt, Homo sapiens
  misc_RNA (1)...(19): siRNA sense strand
ucaacacugucgcuaauga

SEQ ID NO: 1673230 - RNA, 19 nt, Homo sapiens
  misc_RNA (1)...(19): siRNA sense strand
aaagaacguugaaccaaau

SEQ ID NO: 1673231 - RNA, 19 nt, Homo sapiens
  misc_RNA (1)...(19): siRNA sense strand
caaauucaaggcuacgaua

SEQ ID NO: 1673232 - RNA, 19 nt, Homo sapiens
  misc_RNA (1)...(19): siRNA sense strand
cagaggaugugcagguuga

SEQ ID NO: 1673233 - RNA, 19 nt, Homo sapiens
  misc_RNA (1)...(19): siRNA sense strand
agaagaaauucacaggaaa

SEQ ID NO: 1673234 - RNA, 19 nt, Homo sapiens
  misc_RNA (1)...(19): siRNA sense strand
gacgugaaccaguaucuuu

SEQ ID NO: 1673235 - RNA, 19 nt, Homo sapiens
  misc_RNA (1)...(19): siRNA sense strand
cuacaaaucccuuaccaau

SEQ ID NO: 1673236 - RNA, 19 nt, Homo sapiens
  misc_RNA (1)...(19): siRNA sense strand
uagcuuugauggcagcaua

SEQ ID NO: 1673237 - RNA, 19 nt, Homo sapiens
  misc_RNA (1)...(19): siRNA sense strand
gcucuucuguuagacauug

SEQ ID NO: 1673238 - RNA, 19 nt, Homo sapiens
  misc_RNA (1)...(19): siRNA sense strand
cacugucgcuaaugaagua

SEQ ID NO: 1673239 - RNA, 19 nt, Homo sapiens
  misc_RNA (1)...(19): siRNA sense strand
ugaaacugcagaagaaauu

SEQ ID NO: 1673240 - RNA, 19 nt, Homo sapiens
  misc_RNA (1)...(19): siRNA sense strand
gcugagagaaagcuguaua

SEQ ID NO: 1673241 - RNA, 19 nt, Homo sapiens
  misc_RNA (1)...(19): siRNA sense strand
gaagauaacagugaaacag

SEQ ID NO: 1673242 - RNA, 19 nt, Homo sapiens
  misc_RNA (1)...(19): siRNA sense strand
auucaaggcuacgauauuu

SEQ ID NO: 1673243 - RNA, 19 nt, Homo sapiens
  misc_RNA (1)...(19): siRNA sense strand
gauauuucacuccuaaaga

SEQ ID NO: 1673244 - RNA, 19 nt, Homo sapiens
  misc_RNA (1)...(19): siRNA sense strand
auagugaucucucugugaa

SEQ ID NO: 1673245 - RNA, 19 nt, Homo sapiens
  misc_RNA (1)...(19): siRNA sense strand
caacgugcauguaguagcu

SEQ ID NO: 1673246 - RNA, 19 nt, Homo sapiens
  misc_RNA (1)...(19): siRNA sense strand
agaaauagcaaaucuccuu

SEQ ID NO: 1673247 - RNA, 19 nt, Homo sapiens
  misc_RNA (1)...(19): siRNA sense strand
gauagugaucucucuguga

SEQ ID NO: 1673248 - RNA, 19 nt, Homo sapiens
  misc_RNA (1)...(19): siRNA sense strand
caagaagaacagauaacaa

SEQ ID NO: 1673249 - RNA, 19 nt, Homo sapiens
  misc_RNA (1)...(19): siRNA sense strand
gaagguccgugugcuuuac

SEQ ID NO: 1673250 - RNA, 19 nt, Homo sapiens
  misc_RNA (1)...(19): siRNA sense strand
cggauuuccugagaagaua

SEQ ID NO: 1673251 - RNA, 19 nt, Homo sapiens
  misc_RNA (1)...(19): siRNA sense strand
gaguucggauuuccugaga

SEQ ID NO: 1673252 - RNA, 19 nt, Homo sapiens
  misc_RNA (1)...(19): siRNA sense strand
ucacaagaagaacagauaa

SEQ ID NO: 1673253 - RNA, 19 nt, Homo sapiens
  misc_RNA (1)...(19): siRNA sense strand
ucagagccauuacccuuuc

SEQ ID NO: 1673254 - RNA, 19 nt, Homo sapiens
  misc_RNA (1)...(19): siRNA sense strand
ugucaacacugucgcuaau

SEQ ID NO: 1673255 - RNA, 19 nt, Homo sapiens
  misc_RNA (1)...(19): siRNA sense strand
aaaagaacguugaaccaaa

SEQ ID NO: 1673256 - RNA, 19 nt, Homo sapiens
  misc_RNA (1)...(19): siRNA sense strand
gguugagaauaucuacaaa

SEQ ID NO: 1673257 - RNA, 19 nt, Homo sapiens
  misc_RNA (1)...(19): siRNA sense strand
guucagcccacuuguagaa

SEQ ID NO: 1673258 - RNA, 19 nt, Homo sapiens
  misc_RNA (1)...(19): siRNA sense strand
gaagaacagauaacaaagc

SEQ ID NO: 1673259 - RNA, 19 nt, Homo sapiens
  misc_RNA (1)...(19): siRNA sense strand
cuguauaccugcacaagug

SEQ ID NO: 1673260 - RNA, 19 nt, Homo sapiens
  misc_RNA (1)...(19): siRNA sense strand
gcauacaguguucuggaaa

SEQ ID NO: 1673261 - RNA, 19 nt, Homo sapiens
  misc_RNA (1)...(19): siRNA sense strand
gauggcagcauacaguguu

SEQ ID NO: 1673262 - RNA, 19 nt, Homo sapiens
  misc_RNA (1)...(19): siRNA sense strand
gaaaagaacguugaaccaa

SEQ ID NO: 1673263 - RNA, 19 nt, Homo sapiens
  misc_RNA (1)...(19): siRNA sense strand
guuaucgccuacuuggaaa

SEQ ID NO: 1673264 - RNA, 19 nt, Homo sapiens
  misc_RNA (1)...(19): siRNA sense strand
gaagaaauucacaggaaaa

SEQ ID NO: 1673265 - RNA, 19 nt, Homo sapiens
  misc_RNA (1)...(19): siRNA sense strand
aauaugcaauggauguaga

SEQ ID NO: 1673266 - RNA, 19 nt, Homo sapiens
  misc_RNA (1)...(19): siRNA sense strand
cugagaagauaacagugaa

SEQ ID NO: 1673267 - RNA, 19 nt, Homo sapiens
  misc_RNA (1)...(19): siRNA sense strand
ugcgauauuucacuccuaa

SEQ ID NO: 1673268 - RNA, 19 nt, Homo sapiens
  misc_RNA (1)...(19): siRNA sense strand
gucacaagaagaacagaua

SEQ ID NO: 1673269 - RNA, 19 nt, Homo sapiens
  misc_RNA (1)...(19): siRNA sense strand
gcgcugagagaaagcugua

SEQ ID NO: 1673270 - RNA, 19 nt, Homo sapiens
  misc_RNA (1)...(19): siRNA sense strand
gaaucuguacauccacaaa

SEQ ID NO: 1673271 - RNA, 19 nt, Homo sapiens
  misc_RNA (1)...(19): siRNA sense strand
caacacugucgcuaaugaa

SEQ ID NO: 1673272 - RNA, 19 nt, Homo sapiens
  misc_RNA (1)...(19): siRNA sense strand
gcuaaugaaguauacaagu

SEQ ID NO: 1673273 - RNA, 19 nt, Homo sapiens
  misc_RNA (1)...(19): siRNA sense strand
guucggauuuccugagaag

SEQ ID NO: 1673274 - RNA, 19 nt, Homo sapiens
  misc_RNA (1)...(19): siRNA sense strand
aauagcaaaucuccuugga

SEQ ID NO: 1673275 - RNA, 19 nt, Homo sapiens
  misc_RNA (1)...(19): siRNA sense strand
guuacagacugcagaggau

SEQ ID NO: 1673276 - RNA, 19 nt, Homo sapiens
  misc_RNA (1)...(19): siRNA sense strand
gcaccacgcgcugagagaa

SEQ ID NO: 1673277 - RNA, 19 nt, Homo sapiens
  misc_RNA (1)...(19): siRNA sense strand
ucucaacgugcauguagua

SEQ ID NO: 1673278 - RNA, 19 nt, Homo sapiens
  misc_RNA (1)...(19): siRNA sense strand
uacaaaucccuuaccaauu

SEQ ID NO: 1673279 - RNA, 19 nt, Homo sapiens
  misc_RNA (1)...(19): siRNA sense strand
gaugugcagguugagaaua

SEQ ID NO: 1673280 - RNA, 19 nt, Homo sapiens
  misc_RNA (1)...(19): siRNA sense strand
agaagguccgugugcuuua

SEQ ID NO: 1673281 - RNA, 19 nt, Homo sapiens
  misc_RNA (1)...(19): siRNA sense strand
uagaagguccgugugcuuu

SEQ ID NO: 1673282 - RNA, 19 nt, Homo sapiens
  misc_RNA (1)...(19): siRNA sense strand
guagaagguccgugugcuu

SEQ ID NO: 1673283 - RNA, 19 nt, Homo sapiens
  misc_RNA (1)...(19): siRNA sense strand
ccugagaagauaacaguga

SEQ ID NO: 1673284 - RNA, 19 nt, Homo sapiens
  misc_RNA (1)...(19): siRNA sense strand
gaaacugcagaagaaauuc

SEQ ID NO: 1673285 - RNA, 19 nt, Homo sapiens
  misc_RNA (1)...(19): siRNA sense strand
cguuaucgccuacuuggaa

SEQ ID NO: 1673286 - RNA, 19 nt, Homo sapiens
  misc_RNA (1)...(19): siRNA sense strand
aagaacagauaacaaagcu

SEQ ID NO: 1673287 - RNA, 19 nt, Homo sapiens
  misc_RNA (1)...(19): siRNA sense strand
gaaccaguaucuuuuacca

SEQ ID NO: 1673288 - RNA, 19 nt, Homo sapiens
  misc_RNA (1)...(19): siRNA sense strand
gagagaaagcuguauaccu

SEQ ID NO: 1673289 - RNA, 19 nt, Homo sapiens
  misc_RNA (1)...(19): siRNA sense strand
gcugcgauaugcucuucug

SEQ ID NO: 1673290 - RNA, 19 nt, Homo sapiens
  misc_RNA (1)...(19): siRNA sense strand
aggcuacgauauuuucuua

SEQ ID NO: 1673291 - RNA, 19 nt, Homo sapiens
  misc_RNA (1)...(19): siRNA sense strand
ggauuuccugagaagauaa

SEQ ID NO: 1673292 - RNA, 19 nt, Homo sapiens
  misc_RNA (1)...(19): siRNA sense strand
acaagaagaacagauaaca

SEQ ID NO: 1673293 - RNA, 19 nt, Homo sapiens
  misc_RNA (1)...(19): siRNA sense strand
ccucuugauacaaacaaua

SEQ ID NO: 1673294 - RNA, 19 nt, Homo sapiens
  misc_RNA (1)...(19): siRNA sense strand
gagaagauaacagugaaac

SEQ ID NO: 1673295 - RNA, 19 nt, Homo sapiens
  misc_RNA (1)...(19): siRNA sense strand
ugcgggugcuggagcuaua

SEQ ID NO: 1673296 - RNA, 19 nt, Homo sapiens
  misc_RNA (1)...(19): siRNA sense strand
uaucgccuacuuggaaaua

SEQ ID NO: 1673297 - RNA, 19 nt, Homo sapiens
  misc_RNA (1)...(19): siRNA sense strand
ccucacacacaguuacuug

SEQ ID NO: 1673298 - RNA, 19 nt, Homo sapiens
  misc_RNA (1)...(19): siRNA sense strand
aauugaaucuguacaucca

SEQ ID NO: 1673299 - RNA, 19 nt, Homo sapiens
  misc_RNA (1)...(19): siRNA sense strand
cuuaaacugcgauauuuca

SEQ ID NO: 1673300 - RNA, 19 nt, Homo sapiens
  misc_RNA (1)...(19): siRNA sense strand
gcaauggauguagaaaaua

SEQ ID NO: 1673301 - RNA, 19 nt, Homo sapiens
  misc_RNA (1)...(19): siRNA sense strand
gucagagccauuacccuuu

SEQ ID NO: 1673302 - RNA, 19 nt, Homo sapiens
  misc_RNA (1)...(19): siRNA sense strand
caaccucucuuggcauucc

SEQ ID NO: 1673303 - RNA, 19 nt, Homo sapiens
  misc_RNA (1)...(19): siRNA sense strand
ggaugugcagguugagaau

SEQ ID NO: 1673304 - RNA, 19 nt, Homo sapiens
  misc_RNA (1)...(19): siRNA sense strand
aagaugacacugacgugaa

SEQ ID NO: 1673305 - RNA, 19 nt, Homo sapiens
  misc_RNA (1)...(19): siRNA sense strand
cuacuuggaaauagucuca

SEQ ID NO: 1673306 - RNA, 19 nt, Homo sapiens
  misc_RNA (1)...(19): siRNA sense strand
aaacugcagaagaaauuca

SEQ ID NO: 1673307 - RNA, 19 nt, Homo sapiens
  misc_RNA (1)...(19): siRNA sense strand
augugcagguugagaauau

SEQ ID NO: 1673308 - RNA, 19 nt, Homo sapiens
  misc_RNA (1)...(19): siRNA sense strand
ccaaaggauauggaagcua

SEQ ID NO: 1673309 - RNA, 19 nt, Homo sapiens
  misc_RNA (1)...(19): siRNA sense strand
gcgauaugcucuucuguua

SEQ ID NO: 1673310 - RNA, 19 nt, Homo sapiens
  misc_RNA (1)...(19): siRNA sense strand
gauaugcucuucuguuaga

SEQ ID NO: 1673311 - RNA, 19 nt, Homo sapiens
  misc_RNA (1)...(19): siRNA sense strand
cagaagaaauucacaggaa

SEQ ID NO: 1673312 - RNA, 19 nt, Homo sapiens
  misc_RNA (1)...(19): siRNA sense strand
caaagucauugcugcgaua

SEQ ID NO: 1673313 - RNA, 19 nt, Homo sapiens
  misc_RNA (1)...(19): siRNA sense strand
gcuugaaacugcagaagaa

SEQ ID NO: 1673314 - RNA, 19 nt, Homo sapiens
  misc_RNA (1)...(19): siRNA sense strand
uugcaaagcuucagucaga

SEQ ID NO: 1673315 - RNA, 19 nt, Homo sapiens
  misc_RNA (1)...(19): siRNA sense strand
gaacguugaaccaaauauu

SEQ ID NO: 1673316 - RNA, 19 nt, Homo sapiens
  misc_RNA (1)...(19): siRNA sense strand
ucaacacugucgcuaauga

SEQ ID NO: 1673317 - RNA, 19 nt, Homo sapiens
  misc_RNA (1)...(19): siRNA sense strand
aaagaacguugaaccaaau

SEQ ID NO: 1673318 - RNA, 19 nt, Homo sapiens
  misc_RNA (1)...(19): siRNA sense strand
caaauucaaggcuacgaua

SEQ ID NO: 1673319 - RNA, 19 nt, Homo sapiens
  misc_RNA (1)...(19): siRNA sense strand
cagaggaugugcagguuga

SEQ ID NO: 1673320 - RNA, 19 nt, Homo sapiens
  misc_RNA (1)...(19): siRNA sense strand
agaagaaauucacaggaaa

SEQ ID NO: 1673321 - RNA, 19 nt, Homo sapiens
  misc_RNA (1)...(19): siRNA sense strand
gacgugaaccaguaucuuu

SEQ ID NO: 1673322 - RNA, 19 nt, Homo sapiens
  misc_RNA (1)...(19): siRNA sense strand
cuacaaaucccuuaccaau

SEQ ID NO: 1673323 - RNA, 19 nt, Homo sapiens
  misc_RNA (1)...(19): siRNA sense strand
uagcuuugauggcagcaua

SEQ ID NO: 1673324 - RNA, 19 nt, Homo sapiens
  misc_RNA (1)...(19): siRNA sense strand
gcucuucuguuagacauug

SEQ ID NO: 1673325 - RNA, 19 nt, Homo sapiens
  misc_RNA (1)...(19): siRNA sense strand
cacugucgcuaaugaagua

SEQ ID NO: 1673326 - RNA, 19 nt, Homo sapiens
  misc_RNA (1)...(19): siRNA sense strand
ugaaacugcagaagaaauu

SEQ ID NO: 1673327 - RNA, 19 nt, Homo sapiens
  misc_RNA (1)...(19): siRNA sense strand
gcugagagaaagcuguaua

SEQ ID NO: 1673328 - RNA, 19 nt, Homo sapiens
  misc_RNA (1)...(19): siRNA sense strand
gaagauaacagugaaacag

SEQ ID NO: 1673329 - RNA, 19 nt, Homo sapiens
  misc_RNA (1)...(19): siRNA sense strand
auucaaggcuacgauauuu

SEQ ID NO: 1673330 - RNA, 19 nt, Homo sapiens
  misc_RNA (1)...(19): siRNA sense strand
gauauuucacuccuaaaga

SEQ ID NO: 1673331 - RNA, 19 nt, Homo sapiens
  misc_RNA (1)...(19): siRNA sense strand
auagugaucucucugugaa

SEQ ID NO: 1673332 - RNA, 19 nt, Homo sapiens
  misc_RNA (1)...(19): siRNA sense strand
caacgugcauguaguagcu

SEQ ID NO: 1673333 - RNA, 19 nt, Homo sapiens
  misc_RNA (1)...(19): siRNA sense strand
agaaauagcaaaucuccuu

SEQ ID NO: 1673334 - RNA, 19 nt, Homo sapiens
  misc_RNA (1)...(19): siRNA sense strand
gauagugaucucucuguga

SEQ ID NO: 1673335 - RNA, 19 nt, Homo sapiens
  misc_RNA (1)...(19): siRNA sense strand
caagaagaacagauaacaa

SEQ ID NO: 1673336 - RNA, 19 nt, Homo sapiens
  misc_RNA (1)...(19): siRNA sense strand
gaagguccgugugcuuuac

SEQ ID NO: 1673337 - RNA, 19 nt, Homo sapiens
  misc_RNA (1)...(19): siRNA sense strand
cggauuuccugagaagaua

SEQ ID NO: 1673338 - RNA, 19 nt, Homo sapiens
  misc_RNA (1)...(19): siRNA sense strand
gaguucggauuuccugaga

SEQ ID NO: 1673339 - RNA, 19 nt, Homo sapiens
  misc_RNA (1)...(19): siRNA sense strand
ucacaagaagaacagauaa

SEQ ID NO: 1673340 - RNA, 19 nt, Homo sapiens
  misc_RNA (1)...(19): siRNA sense strand
ucagagccauuacccuuuc

SEQ ID NO: 1673341 - RNA, 19 nt, Homo sapiens
  misc_RNA (1)...(19): siRNA sense strand
ugucaacacugucgcuaau

SEQ ID NO: 1673342 - RNA, 19 nt, Homo sapiens
  misc_RNA (1)...(19): siRNA sense strand
aaaagaacguugaaccaaa

SEQ ID NO: 1673343 - RNA, 19 nt, Homo sapiens
  misc_RNA (1)...(19): siRNA sense strand
gguugagaauaucuacaaa

SEQ ID NO: 1673344 - RNA, 19 nt, Homo sapiens
  misc_RNA (1)...(19): siRNA sense strand
guucagcccacuuguagaa

SEQ ID NO: 1673345 - RNA, 19 nt, Homo sapiens
  misc_RNA (1)...(19): siRNA sense strand
gaagaacagauaacaaagc

SEQ ID NO: 1673346 - RNA, 19 nt, Homo sapiens
  misc_RNA (1)...(19): siRNA sense strand
cuguauaccugcacaagug

SEQ ID NO: 1673347 - RNA, 19 nt, Homo sapiens
  misc_RNA (1)...(19): siRNA sense strand
gcauacaguguucuggaaa

SEQ ID NO: 1673348 - RNA, 19 nt, Homo sapiens
  misc_RNA (1)...(19): siRNA sense strand
gauggcagcauacaguguu

SEQ ID NO: 1673349 - RNA, 19 nt, Homo sapiens
  misc_RNA (1)...(19): siRNA sense strand
gaaaagaacguugaaccaa

SEQ ID NO: 1673350 - RNA, 19 nt, Homo sapiens
  misc_RNA (1)...(19): siRNA sense strand
guuaucgccuacuuggaaa

SEQ ID NO: 1673351 - RNA, 19 nt, Homo sapiens
  misc_RNA (1)...(19): siRNA sense strand
gaagaaauucacaggaaaa

SEQ ID NO: 1673352 - RNA, 19 nt, Homo sapiens
  misc_RNA (1)...(19): siRNA sense strand
aauaugcaauggauguaga

SEQ ID NO: 1673353 - RNA, 19 nt, Homo sapiens
  misc_RNA (1)...(19): siRNA sense strand
cugagaagauaacagugaa

SEQ ID NO: 1673354 - RNA, 19 nt, Homo sapiens
  misc_RNA (1)...(19): siRNA sense strand
ugcgauauuucacuccuaa

SEQ ID NO: 1673355 - RNA, 19 nt, Homo sapiens
  misc_RNA (1)...(19): siRNA sense strand
gucacaagaagaacagaua

SEQ ID NO: 1673356 - RNA, 19 nt, Homo sapiens
  misc_RNA (1)...(19): siRNA sense strand
gcgcugagagaaagcugua

SEQ ID NO: 1673357 - RNA, 19 nt, Homo sapiens
  misc_RNA (1)...(19): siRNA sense strand
gaaucuguacauccacaaa

SEQ ID NO: 1673358 - RNA, 19 nt, Homo sapiens
  misc_RNA (1)...(19): siRNA sense strand
caacacugucgcuaaugaa

SEQ ID NO: 1673359 - RNA, 19 nt, Homo sapiens
  misc_RNA (1)...(19): siRNA sense strand
gcuaaugaaguauacaagu

SEQ ID NO: 1673360 - RNA, 19 nt, Homo sapiens
  misc_RNA (1)...(19): siRNA sense strand
guucggauuuccugagaag

SEQ ID NO: 1673361 - RNA, 19 nt, Homo sapiens
  misc_RNA (1)...(19): siRNA sense strand
aauagcaaaucuccuugga

SEQ ID NO: 1673362 - RNA, 19 nt, Homo sapiens
  misc_RNA (1)...(19): siRNA sense strand
guuacagacugcagaggau

SEQ ID NO: 1673363 - RNA, 19 nt, Homo sapiens
  misc_RNA (1)...(19): siRNA sense strand
gcaccacgcgcugagagaa

SEQ ID NO: 1673364 - RNA, 19 nt, Homo sapiens
  misc_RNA (1)...(19): siRNA sense strand
ucucaacgugcauguagua

SEQ ID NO: 1673365 - RNA, 19 nt, Homo sapiens
  misc_RNA (1)...(19): siRNA sense strand
uacaaaucccuuaccaauu

SEQ ID NO: 1673366 - RNA, 19 nt, Homo sapiens
  misc_RNA (1)...(19): siRNA sense strand
gaugugcagguugagaaua

SEQ ID NO: 1673367 - RNA, 19 nt, Homo sapiens
  misc_RNA (1)...(19): siRNA sense strand
agaagguccgugugcuuua

SEQ ID NO: 1673368 - RNA, 19 nt, Homo sapiens
  misc_RNA (1)...(19): siRNA sense strand
uagaagguccgugugcuuu

SEQ ID NO: 1673369 - RNA, 19 nt, Homo sapiens
  misc_RNA (1)...(19): siRNA sense strand
guagaagguccgugugcuu

SEQ ID NO: 1673370 - RNA, 19 nt, Homo sapiens
  misc_RNA (1)...(19): siRNA sense strand
ccugagaagauaacaguga

SEQ ID NO: 1673371 - RNA, 19 nt, Homo sapiens
  misc_RNA (1)...(19): siRNA sense strand
gaaacugcagaagaaauuc

SEQ ID NO: 1673372 - RNA, 19 nt, Homo sapiens
  misc_RNA (1)...(19): siRNA sense strand
cguuaucgccuacuuggaa

SEQ ID NO: 1673373 - RNA, 19 nt, Homo sapiens
  misc_RNA (1)...(19): siRNA sense strand
aagaacagauaacaaagcu

SEQ ID NO: 1673374 - RNA, 19 nt, Homo sapiens
  misc_RNA (1)...(19): siRNA sense strand
gaaccaguaucuuuuacca

SEQ ID NO: 1673375 - RNA, 19 nt, Homo sapiens
  misc_RNA (1)...(19): siRNA sense strand
gagagaaagcuguauaccu

SEQ ID NO: 1673376 - RNA, 19 nt, Homo sapiens
  misc_RNA (1)...(19): siRNA sense strand
gcugcgauaugcucuucug

SEQ ID NO: 1673377 - RNA, 19 nt, Homo sapiens
  misc_RNA (1)...(19): siRNA sense strand
aggcuacgauauuuucuua

SEQ ID NO: 1673378 - RNA, 19 nt, Homo sapiens
  misc_RNA (1)...(19): siRNA sense strand
ggauuuccugagaagauaa

SEQ ID NO: 1673379 - RNA, 19 nt, Homo sapiens
  misc_RNA (1)...(19): siRNA sense strand
acaagaagaacagauaaca

SEQ ID NO: 1673380 - RNA, 19 nt, Homo sapiens
  misc_RNA (1)...(19): siRNA sense strand
ccucuugauacaaacaaua

SEQ ID NO: 1673381 - RNA, 19 nt, Homo sapiens
  misc_RNA (1)...(19): siRNA sense strand
gagaagauaacagugaaac

SEQ ID NO: 1673382 - RNA, 19 nt, Homo sapiens
  misc_RNA (1)...(19): siRNA sense strand
ugcgggugcuggagcuaua

SEQ ID NO: 1673383 - RNA, 19 nt, Homo sapiens
  misc_RNA (1)...(19): siRNA sense strand
uaucgccuacuuggaaaua

SEQ ID NO: 1673384 - RNA, 19 nt, Homo sapiens
  misc_RNA (1)...(19): siRNA sense strand
ccucacacacaguuacuug

SEQ ID NO: 1673385 - RNA, 19 nt, Homo sapiens
  misc_RNA (1)...(19): siRNA sense strand
aauugaaucuguacaucca

SEQ ID NO: 1673386 - RNA, 19 nt, Homo sapiens
  misc_RNA (1)...(19): siRNA sense strand
cuuaaacugcgauauuuca

SEQ ID NO: 1673387 - RNA, 19 nt, Homo sapiens
  misc_RNA (1)...(19): siRNA sense strand
gcaauggauguagaaaaua

SEQ ID NO: 1673388 - RNA, 19 nt, Homo sapiens
  misc_RNA (1)...(19): siRNA sense strand
gucagagccauuacccuuu

SEQ ID NO: 1673389 - RNA, 19 nt, Homo sapiens
  misc_RNA (1)...(19): siRNA sense strand
caaccucucuuggcauucc

SEQ ID NO: 1673390 - RNA, 19 nt, Homo sapiens
  misc_RNA (1)...(19): siRNA sense strand
ggaugugcagguugagaau

SEQ ID NO: 1673391 - RNA, 19 nt, Homo sapiens
  misc_RNA (1)...(19): siRNA sense strand
aagaugacacugacgugaa

SEQ ID NO: 1673392 - RNA, 19 nt, Homo sapiens
  misc_RNA (1)...(19): siRNA sense strand
cuacuuggaaauagucuca

SEQ ID NO: 1673393 - RNA, 19 nt, Homo sapiens
  misc_RNA (1)...(19): siRNA sense strand
aaacugcagaagaaauuca

SEQ ID NO: 1673394 - RNA, 19 nt, Homo sapiens
  misc_RNA (1)...(19): siRNA sense strand
augugcagguugagaauau

SEQ ID NO: 1673395 - RNA, 19 nt, Homo sapiens
  misc_RNA (1)...(19): siRNA sense strand
ccaaaggauauggaagcua

SEQ ID NO: 1673396 - RNA, 19 nt, Homo sapiens
  misc_RNA (1)...(19): siRNA sense strand
gcgauaugcucuucuguua

SEQ ID NO: 1673397 - RNA, 19 nt, Homo sapiens
  misc_RNA (1)...(19): siRNA sense strand
gauaugcucuucuguuaga

SEQ ID NO: 1673398 - RNA, 19 nt, Homo sapiens
  misc_RNA (1)...(19): siRNA sense strand
cagaagaaauucacaggaa

SEQ ID NO: 1673399 - RNA, 19 nt, Homo sapiens
  misc_RNA (1)...(19): siRNA sense strand
caaagucauugcugcgaua

SEQ ID NO: 1673400 - RNA, 19 nt, Homo sapiens
  misc_RNA (1)...(19): siRNA sense strand
gcuugaaacugcagaagaa

SEQ ID NO: 1673401 - RNA, 19 nt, Homo sapiens
  misc_RNA (1)...(19): siRNA sense strand
uugcaaagcuucagucaga

SEQ ID NO: 1673402 - RNA, 19 nt, Homo sapiens
  misc_RNA (1)...(19): siRNA sense strand
gaacguugaaccaaauauu

SEQ ID NO: 1673403 - RNA, 19 nt, Homo sapiens
  misc_RNA (1)...(19): siRNA sense strand
ucaacacugucgcuaauga

SEQ ID NO: 1673404 - RNA, 19 nt, Homo sapiens
  misc_RNA (1)...(19): siRNA sense strand
aaagaacguugaaccaaau

SEQ ID NO: 1673405 - RNA, 19 nt, Homo sapiens
  misc_RNA (1)...(19): siRNA sense strand
caaauucaaggcuacgaua

SEQ ID NO: 1673406 - RNA, 19 nt, Homo sapiens
  misc_RNA (1)...(19): siRNA sense strand
cagaggaugugcagguuga

SEQ ID NO: 1673407 - RNA, 19 nt, Homo sapiens
  misc_RNA (1)...(19): siRNA sense strand
agaagaaauucacaggaaa

SEQ ID NO: 1673408 - RNA, 19 nt, Homo sapiens
  misc_RNA (1)...(19): siRNA sense strand
gacgugaaccaguaucuuu

SEQ ID NO: 1673409 - RNA, 19 nt, Homo sapiens
  misc_RNA (1)...(19): siRNA sense strand
cuacaaaucccuuaccaau

SEQ ID NO: 1673410 - RNA, 19 nt, Homo sapiens
  misc_RNA (1)...(19): siRNA sense strand
uagcuuugauggcagcaua

SEQ ID NO: 1673411 - RNA, 19 nt, Homo sapiens
  misc_RNA (1)...(19): siRNA sense strand
gcucuucuguuagacauug

SEQ ID NO: 1673412 - RNA, 19 nt, Homo sapiens
  misc_RNA (1)...(19): siRNA sense strand
cacugucgcuaaugaagua

SEQ ID NO: 1673413 - RNA, 19 nt, Homo sapiens
  misc_RNA (1)...(19): siRNA sense strand
ugaaacugcagaagaaauu

SEQ ID NO: 1673414 - RNA, 19 nt, Homo sapiens
  misc_RNA (1)...(19): siRNA sense strand
gcugagagaaagcuguaua

SEQ ID NO: 1673415 - RNA, 19 nt, Homo sapiens
  misc_RNA (1)...(19): siRNA sense strand
gaagauaacagugaaacag

SEQ ID NO: 1673416 - RNA, 19 nt, Homo sapiens
  misc_RNA (1)...(19): siRNA sense strand
auucaaggcuacgauauuu

SEQ ID NO: 1673417 - RNA, 19 nt, Homo sapiens
  misc_RNA (1)...(19): siRNA sense strand
gauauuucacuccuaaaga

SEQ ID NO: 1673418 - RNA, 19 nt, Homo sapiens
  misc_RNA (1)...(19): siRNA sense strand
auagugaucucucugugaa

SEQ ID NO: 1673419 - RNA, 19 nt, Homo sapiens
  misc_RNA (1)...(19): siRNA sense strand
caacgugcauguaguagcu

SEQ ID NO: 1673420 - RNA, 19 nt, Homo sapiens
  misc_RNA (1)...(19): siRNA sense strand
agaaauagcaaaucuccuu

SEQ ID NO: 1673421 - RNA, 19 nt, Homo sapiens
  misc_RNA (1)...(19): siRNA sense strand
gauagugaucucucuguga

SEQ ID NO: 1673422 - RNA, 19 nt, Homo sapiens
  misc_RNA (1)...(19): siRNA sense strand
caagaagaacagauaacaa

SEQ ID NO: 1673423 - RNA, 19 nt, Homo sapiens
  misc_RNA (1)...(19): siRNA sense strand
gaagguccgugugcuuuac

SEQ ID NO: 1673424 - RNA, 19 nt, Homo sapiens
  misc_RNA (1)...(19): siRNA sense strand
cggauuuccugagaagaua

SEQ ID NO: 1673425 - RNA, 19 nt, Homo sapiens
  misc_RNA (1)...(19): siRNA sense strand
gaguucggauuuccugaga

SEQ ID NO: 1673426 - RNA, 19 nt, Homo sapiens
  misc_RNA (1)...(19): siRNA sense strand
ucacaagaagaacagauaa

SEQ ID NO: 1673427 - RNA, 19 nt, Homo sapiens
  misc_RNA (1)...(19): siRNA sense strand
ucagagccauuacccuuuc

SEQ ID NO: 1673428 - RNA, 19 nt, Homo sapiens
  misc_RNA (1)...(19): siRNA sense strand
ugucaacacugucgcuaau

SEQ ID NO: 1673429 - RNA, 19 nt, Homo sapiens
  misc_RNA (1)...(19): siRNA sense strand
aaaagaacguugaaccaaa

SEQ ID NO: 1673430 - RNA, 19 nt, Homo sapiens
  misc_RNA (1)...(19): siRNA sense strand
gguugagaauaucuacaaa

SEQ ID NO: 1673431 - RNA, 19 nt, Homo sapiens
  misc_RNA (1)...(19): siRNA sense strand
guucagcccacuuguagaa

SEQ ID NO: 1673432 - RNA, 19 nt, Homo sapiens
  misc_RNA (1)...(19): siRNA sense strand
gaagaacagauaacaaagc

SEQ ID NO: 1673433 - RNA, 19 nt, Homo sapiens
  misc_RNA (1)...(19): siRNA sense strand
cuguauaccugcacaagug

SEQ ID NO: 1673434 - RNA, 19 nt, Homo sapiens
  misc_RNA (1)...(19): siRNA sense strand
gcauacaguguucuggaaa

SEQ ID NO: 1673435 - RNA, 19 nt, Homo sapiens
  misc_RNA (1)...(19): siRNA sense strand
gauggcagcauacaguguu

SEQ ID NO: 1673436 - RNA, 19 nt, Homo sapiens
  misc_RNA (1)...(19): siRNA sense strand
gaaaagaacguugaaccaa

SEQ ID NO: 1673437 - RNA, 19 nt, Homo sapiens
  misc_RNA (1)...(19): siRNA sense strand
guuaucgccuacuuggaaa

SEQ ID NO: 1673438 - RNA, 19 nt, Homo sapiens
  misc_RNA (1)...(19): siRNA sense strand
gaagaaauucacaggaaaa

SEQ ID NO: 1673439 - RNA, 19 nt, Homo sapiens
  misc_RNA (1)...(19): siRNA sense strand
aauaugcaauggauguaga

SEQ ID NO: 1673440 - RNA, 19 nt, Homo sapiens
  misc_RNA (1)...(19): siRNA sense strand
cugagaagauaacagugaa

SEQ ID NO: 1673441 - RNA, 19 nt, Homo sapiens
  misc_RNA (1)...(19): siRNA sense strand
ugcgauauuucacuccuaa

SEQ ID NO: 1673442 - RNA, 19 nt, Homo sapiens
  misc_RNA (1)...(19): siRNA sense strand
gucacaagaagaacagaua

SEQ ID NO: 1673443 - RNA, 19 nt, Homo sapiens
  misc_RNA (1)...(19): siRNA sense strand
gcgcugagagaaagcugua

SEQ ID NO: 1673444 - RNA, 19 nt, Homo sapiens
  misc_RNA (1)...(19): siRNA sense strand
gaaucuguacauccacaaa

SEQ ID NO: 1673445 - RNA, 19 nt, Homo sapiens
  misc_RNA (1)...(19): siRNA sense strand
caacacugucgcuaaugaa

SEQ ID NO: 1673446 - RNA, 19 nt, Homo sapiens
  misc_RNA (1)...(19): siRNA sense strand
gcuaaugaaguauacaagu

SEQ ID NO: 1673447 - RNA, 19 nt, Homo sapiens
  misc_RNA (1)...(19): siRNA sense strand
guucggauuuccugagaag

SEQ ID NO: 1673448 - RNA, 19 nt, Homo sapiens
  misc_RNA (1)...(19): siRNA sense strand
aauagcaaaucuccuugga

SEQ ID NO: 1673449 - RNA, 19 nt, Homo sapiens
  misc_RNA (1)...(19): siRNA sense strand
guuacagacugcagaggau

SEQ ID NO: 1673450 - RNA, 19 nt, Homo sapiens
  misc_RNA (1)...(19): siRNA sense strand
gcaccacgcgcugagagaa

SEQ ID NO: 1673451 - RNA, 19 nt, Homo sapiens
  misc_RNA (1)...(19): siRNA sense strand
ucucaacgugcauguagua

SEQ ID NO: 1673452 - RNA, 19 nt, Homo sapiens
  misc_RNA (1)...(19): siRNA sense strand
uacaaaucccuuaccaauu

SEQ ID NO: 1673453 - RNA, 19 nt, Homo sapiens
  misc_RNA (1)...(19): siRNA sense strand
gaugugcagguugagaaua

SEQ ID NO: 1673454 - RNA, 19 nt, Homo sapiens
  misc_RNA (1)...(19): siRNA sense strand
agaagguccgugugcuuua

SEQ ID NO: 1673455 - RNA, 19 nt, Homo sapiens
  misc_RNA (1)...(19): siRNA sense strand
uagaagguccgugugcuuu

SEQ ID NO: 1673456 - RNA, 19 nt, Homo sapiens
  misc_RNA (1)...(19): siRNA sense strand
guagaagguccgugugcuu

SEQ ID NO: 1673457 - RNA, 19 nt, Homo sapiens
  misc_RNA (1)...(19): siRNA sense strand
ccugagaagauaacaguga

SEQ ID NO: 1673458 - RNA, 19 nt, Homo sapiens
  misc_RNA (1)...(19): siRNA sense strand
gaaacugcagaagaaauuc

SEQ ID NO: 1673459 - RNA, 19 nt, Homo sapiens
  misc_RNA (1)...(19): siRNA sense strand
cguuaucgccuacuuggaa

SEQ ID NO: 1673460 - RNA, 19 nt, Homo sapiens
  misc_RNA (1)...(19): siRNA sense strand
aagaacagauaacaaagcu

SEQ ID NO: 1673461 - RNA, 19 nt, Homo sapiens
  misc_RNA (1)...(19): siRNA sense strand
gaaccaguaucuuuuacca

SEQ ID NO: 1673462 - RNA, 19 nt, Homo sapiens
  misc_RNA (1)...(19): siRNA sense strand
gagagaaagcuguauaccu

SEQ ID NO: 1673463 - RNA, 19 nt, Homo sapiens
  misc_RNA (1)...(19): siRNA sense strand
gcugcgauaugcucuucug

SEQ ID NO: 1673464 - RNA, 19 nt, Homo sapiens
  misc_RNA (1)...(19): siRNA sense strand
aggcuacgauauuuucuua

SEQ ID NO: 1673465 - RNA, 19 nt, Homo sapiens
  misc_RNA (1)...(19): siRNA sense strand
ggauuuccugagaagauaa

SEQ ID NO: 1673466 - RNA, 19 nt, Homo sapiens
  misc_RNA (1)...(19): siRNA sense strand
acaagaagaacagauaaca

SEQ ID NO: 1673467 - RNA, 19 nt, Homo sapiens
  misc_RNA (1)...(19): siRNA sense strand
ccucuugauacaaacaaua

SEQ ID NO: 1673468 - RNA, 19 nt, Homo sapiens
  misc_RNA (1)...(19): siRNA sense strand
gagaagauaacagugaaac

SEQ ID NO: 1673469 - RNA, 19 nt, Homo sapiens
  misc_RNA (1)...(19): siRNA sense strand
ugcgggugcuggagcuaua

SEQ ID NO: 1673470 - RNA, 19 nt, Homo sapiens
  misc_RNA (1)...(19): siRNA sense strand
uaucgccuacuuggaaaua

SEQ ID NO: 1673471 - RNA, 19 nt, Homo sapiens
  misc_RNA (1)...(19): siRNA sense strand
ccucacacacaguuacuug

SEQ ID NO: 1673472 - RNA, 19 nt, Homo sapiens
  misc_RNA (1)...(19): siRNA sense strand
aauugaaucuguacaucca

SEQ ID NO: 1673473 - RNA, 19 nt, Homo sapiens
  misc_RNA (1)...(19): siRNA sense strand
cuuaaacugcgauauuuca

SEQ ID NO: 1673474 - RNA, 19 nt, Homo sapiens
  misc_RNA (1)...(19): siRNA sense strand
gcaauggauguagaaaaua

SEQ ID NO: 1673475 - RNA, 19 nt, Homo sapiens
  misc_RNA (1)...(19): siRNA sense strand
gucagagccauuacccuuu

SEQ ID NO: 1673476 - RNA, 19 nt, Homo sapiens
  misc_RNA (1)...(19): siRNA sense strand
caaccucucuuggcauucc

SEQ ID NO: 1673477 - RNA, 19 nt, Homo sapiens
  misc_RNA (1)...(19): siRNA sense strand
ggaugugcagguugagaau

SEQ ID NO: 1673478 - RNA, 19 nt, Homo sapiens
  misc_RNA (1)...(19): siRNA sense strand
aagaugacacugacgugaa

SEQ ID NO: 1673479 - RNA, 19 nt, Homo sapiens
  misc_RNA (1)...(19): siRNA sense strand
cuacuuggaaauagucuca

SEQ ID NO: 1673480 - RNA, 19 nt, Homo sapiens
  misc_RNA (1)...(19): siRNA sense strand
aaacugcagaagaaauuca

SEQ ID NO: 1673481 - RNA, 19 nt, Homo sapiens
  misc_RNA (1)...(19): siRNA sense strand
augugcagguugagaauau

SEQ ID NO: 1673482 - RNA, 19 nt, Homo sapiens
  misc_RNA (1)...(19): siRNA sense strand
ccaaaggauauggaagcua

SEQ ID NO: 1673483 - RNA, 19 nt, Homo sapiens
  misc_RNA (1)...(19): siRNA sense strand
ucaacacugucgcuaauga

SEQ ID NO: 1673484 - RNA, 19 nt, Homo sapiens
  misc_RNA (1)...(19): siRNA sense strand
cacugucgcuaaugaagua

SEQ ID NO: 1673485 - RNA, 19 nt, Homo sapiens
  misc_RNA (1)...(19): siRNA sense strand
gcugagagaaagcuguaua

SEQ ID NO: 1673486 - RNA, 19 nt, Homo sapiens
  misc_RNA (1)...(19): siRNA sense strand
ugucaacacugucgcuaau

SEQ ID NO: 1673487 - RNA, 19 nt, Homo sapiens
  misc_RNA (1)...(19): siRNA sense strand
cuguauaccugcacaagug

SEQ ID NO: 1673488 - RNA, 19 nt, Homo sapiens
  misc_RNA (1)...(19): siRNA sense strand
gcgcugagagaaagcugua

SEQ ID NO: 1673489 - RNA, 19 nt, Homo sapiens
  misc_RNA (1)...(19): siRNA sense strand
caacacugucgcuaaugaa

SEQ ID NO: 1673490 - RNA, 19 nt, Homo sapiens
  misc_RNA (1)...(19): siRNA sense strand
gcuaaugaaguauacaagu

SEQ ID NO: 1673491 - RNA, 19 nt, Homo sapiens
  misc_RNA (1)...(19): siRNA sense strand
gcaccacgcgcugagagaa

SEQ ID NO: 1673492 - RNA, 19 nt, Homo sapiens
  misc_RNA (1)...(19): siRNA sense strand
gagagaaagcuguauaccu

SEQ ID NO: 1673493 - RNA, 19 nt, Homo sapiens
  misc_RNA (1)...(19): siRNA sense strand
ugcgggugcuggagcuaua

SEQ ID NO: 1673494 - RNA, 19 nt, Homo sapiens
  misc_RNA (1)...(19): siRNA sense strand
ccucacacacaguuacuug

SEQ ID NO: 1673495 - RNA, 19 nt, Homo sapiens
  misc_RNA (1)...(19): siRNA sense strand
ucaacacugucgcuaauga

SEQ ID NO: 1673496 - RNA, 19 nt, Homo sapiens
  misc_RNA (1)...(19): siRNA sense strand
cacugucgcuaaugaagua

SEQ ID NO: 1673497 - RNA, 19 nt, Homo sapiens
  misc_RNA (1)...(19): siRNA sense strand
gcugagagaaagcuguaua

SEQ ID NO: 1673498 - RNA, 19 nt, Homo sapiens
  misc_RNA (1)...(19): siRNA sense strand
ugucaacacugucgcuaau

SEQ ID NO: 1673499 - RNA, 19 nt, Homo sapiens
  misc_RNA (1)...(19): siRNA sense strand
cuguauaccugcacaagug

SEQ ID NO: 1673500 - RNA, 19 nt, Homo sapiens
  misc_RNA (1)...(19): siRNA sense strand
gcgcugagagaaagcugua

SEQ ID NO: 1673501 - RNA, 19 nt, Homo sapiens
  misc_RNA (1)...(19): siRNA sense strand
caacacugucgcuaaugaa

SEQ ID NO: 1673502 - RNA, 19 nt, Homo sapiens
  misc_RNA (1)...(19): siRNA sense strand
gcuaaugaaguauacaagu

SEQ ID NO: 1673503 - RNA, 19 nt, Homo sapiens
  misc_RNA (1)...(19): siRNA sense strand
gcaccacgcgcugagagaa

SEQ ID NO: 1673504 - RNA, 19 nt, Homo sapiens
  misc_RNA (1)...(19): siRNA sense strand
gagagaaagcuguauaccu

SEQ ID NO: 1673505 - RNA, 19 nt, Homo sapiens
  misc_RNA (1)...(19): siRNA sense strand
ugcgggugcuggagcuaua

SEQ ID NO: 1673506 - RNA, 19 nt, Homo sapiens
  misc_RNA (1)...(19): siRNA sense strand
ccucacacacaguuacuug

SEQ ID NO: 1673507 - RNA, 19 nt, Homo sapiens
  misc_RNA (1)...(19): siRNA sense strand
uugcaaagcuucagucaga

SEQ ID NO: 1673508 - RNA, 19 nt, Homo sapiens
  misc_RNA (1)...(19): siRNA sense strand
ucaacacugucgcuaauga

SEQ ID NO: 1673509 - RNA, 19 nt, Homo sapiens
  misc_RNA (1)...(19): siRNA sense strand
caaauucaaggcuacgaua

SEQ ID NO: 1673510 - RNA, 19 nt, Homo sapiens
  misc_RNA (1)...(19): siRNA sense strand
cacugucgcuaaugaagua

SEQ ID NO: 1673511 - RNA, 19 nt, Homo sapiens
  misc_RNA (1)...(19): siRNA sense strand
gcugagagaaagcuguaua

SEQ ID NO: 1673512 - RNA, 19 nt, Homo sapiens
  misc_RNA (1)...(19): siRNA sense strand
auucaaggcuacgauauuu

SEQ ID NO: 1673513 - RNA, 19 nt, Homo sapiens
  misc_RNA (1)...(19): siRNA sense strand
ugucaacacugucgcuaau

SEQ ID NO: 1673514 - RNA, 19 nt, Homo sapiens
  misc_RNA (1)...(19): siRNA sense strand
ucagagccauuacccuuuc

SEQ ID NO: 1673515 - RNA, 19 nt, Homo sapiens
  misc_RNA (1)...(19): siRNA sense strand
cuguauaccugcacaagug

SEQ ID NO: 1673516 - RNA, 19 nt, Homo sapiens
  misc_RNA (1)...(19): siRNA sense strand
gcgcugagagaaagcugua

SEQ ID NO: 1673517 - RNA, 19 nt, Homo sapiens
  misc_RNA (1)...(19): siRNA sense strand
caacacugucgcuaaugaa

SEQ ID NO: 1673518 - RNA, 19 nt, Homo sapiens
  misc_RNA (1)...(19): siRNA sense strand
gcuaaugaaguauacaagu

SEQ ID NO: 1673519 - RNA, 19 nt, Homo sapiens
  misc_RNA (1)...(19): siRNA sense strand
gcaccacgcgcugagagaa

SEQ ID NO: 1673520 - RNA, 19 nt, Homo sapiens
  misc_RNA (1)...(19): siRNA sense strand
gagagaaagcuguauaccu

SEQ ID NO: 1673521 - RNA, 19 nt, Homo sapiens
  misc_RNA (1)...(19): siRNA sense strand
ccucuugauacaaacaaua

SEQ ID NO: 1673522 - RNA, 19 nt, Homo sapiens
  misc_RNA (1)...(19): siRNA sense strand
aggcuacgauauuuucuua

SEQ ID NO: 1673523 - RNA, 19 nt, Homo sapiens
  misc_RNA (1)...(19): siRNA sense strand
ugcgggugcuggagcuaua

SEQ ID NO: 1673524 - RNA, 19 nt, Homo sapiens
  misc_RNA (1)...(19): siRNA sense strand
ccucacacacaguuacuug

SEQ ID NO: 1673525 - RNA, 19 nt, Homo sapiens
  misc_RNA (1)...(19): siRNA sense strand
caaccucucuuggcauucc

SEQ ID NO: 1673526 - RNA, 19 nt, Homo sapiens
  misc_RNA (1)...(19): siRNA sense strand
gucagagccauuacccuuu

SEQ ID NO: 1673527 - RNA, 19 nt, Homo sapiens
  misc_RNA (1)...(19): siRNA sense strand
guacaggaguugcaacaaa

SEQ ID NO: 1673528 - RNA, 19 nt, Homo sapiens
  misc_RNA (1)...(19): siRNA sense strand
ggacagugccuuuggagua

SEQ ID NO: 1673529 - RNA, 19 nt, Homo sapiens
  misc_RNA (1)...(19): siRNA sense strand
gaaggacuguugcugguau

SEQ ID NO: 1673530 - RNA, 19 nt, Homo sapiens
  misc_RNA (1)...(19): siRNA sense strand
gaugguggcuuucaugucu

SEQ ID NO: 1673531 - RNA, 19 nt, Homo sapiens
  misc_RNA (1)...(19): siRNA sense strand
caaaagugcuagaagaaaa

SEQ ID NO: 1673532 - RNA, 19 nt, Homo sapiens
  misc_RNA (1)...(19): siRNA sense strand
gaagcuccauuuaccaaca

SEQ ID NO: 1673533 - RNA, 19 nt, Homo sapiens
  misc_RNA (1)...(19): siRNA sense strand
uaauaaccgugagagauuu

SEQ ID NO: 1673534 - RNA, 19 nt, Homo sapiens
  misc_RNA (1)...(19): siRNA sense strand
gcugagugaugguggcuuu

SEQ ID NO: 1673535 - RNA, 19 nt, Homo sapiens
  misc_RNA (1)...(19): siRNA sense strand
gacugaagcugguaaaggu

SEQ ID NO: 1673536 - RNA, 19 nt, Homo sapiens
  misc_RNA (1)...(19): siRNA sense strand
uuucaugucuugucuguug

SEQ ID NO: 1673537 - RNA, 19 nt, Homo sapiens
  misc_RNA (1)...(19): siRNA sense strand
gagagggucaagaugguua

SEQ ID NO: 1673538 - RNA, 19 nt, Homo sapiens
  misc_RNA (1)...(19): siRNA sense strand
gacagugccuuuggaguau

SEQ ID NO: 1673539 - RNA, 19 nt, Homo sapiens
  misc_RNA (1)...(19): siRNA sense strand
guaaaggugcugagugaug

SEQ ID NO: 1673540 - RNA, 19 nt, Homo sapiens
  misc_RNA (1)...(19): siRNA sense strand
caucuuacauggagaggau

SEQ ID NO: 1673541 - RNA, 19 nt, Homo sapiens
  misc_RNA (1)...(19): siRNA sense strand
ugguaaaggugcugaguga

SEQ ID NO: 1673542 - RNA, 19 nt, Homo sapiens
  misc_RNA (1)...(19): siRNA sense strand
uuaauaaccgugagagauu

SEQ ID NO: 1673543 - RNA, 19 nt, Homo sapiens
  misc_RNA (1)...(19): siRNA sense strand
ugagagauuuccugagcaa

SEQ ID NO: 1673544 - RNA, 19 nt, Homo sapiens
  misc_RNA (1)...(19): siRNA sense strand
gaacaaagagagggucaag

SEQ ID NO: 1673545 - RNA, 19 nt, Homo sapiens
  misc_RNA (1)...(19): siRNA sense strand
ggguugcaaguaucaauua

SEQ ID NO: 1673546 - RNA, 19 nt, Homo sapiens
  misc_RNA (1)...(19): siRNA sense strand
uaaaagccccacacuguua

SEQ ID NO: 1673547 - RNA, 19 nt, Homo sapiens
  misc_RNA (1)...(19): siRNA sense strand
acaaagagagggucaagau

SEQ ID NO: 1673548 - RNA, 19 nt, Homo sapiens
  misc_RNA (1)...(19): siRNA sense strand
uggcaucacucccgugugu

SEQ ID NO: 1673549 - RNA, 19 nt, Homo sapiens
  misc_RNA (1)...(19): siRNA sense strand
uacaggaguugcaacaaau

SEQ ID NO: 1673550 - RNA, 19 nt, Homo sapiens
  misc_RNA (1)...(19): siRNA sense strand
ggaugccauuugugucuau

SEQ ID NO: 1673551 - RNA, 19 nt, Homo sapiens
  misc_RNA (1)...(19): siRNA sense strand
acauguggguugcaaguau

SEQ ID NO: 1673552 - RNA, 19 nt, Homo sapiens
  misc_RNA (1)...(19): siRNA sense strand
ggaaggacuguugcuggua

SEQ ID NO: 1673553 - RNA, 19 nt, Homo sapiens
  misc_RNA (1)...(19): siRNA sense strand
gagauuuccugagcaagca

SEQ ID NO: 1673554 - RNA, 19 nt, Homo sapiens
  misc_RNA (1)...(19): siRNA sense strand
gcacagacugaagcuggua

SEQ ID NO: 1673555 - RNA, 19 nt, Homo sapiens
  misc_RNA (1)...(19): siRNA sense strand
caaagagagggucaagaug

SEQ ID NO: 1673556 - RNA, 19 nt, Homo sapiens
  misc_RNA (1)...(19): siRNA sense strand
ugacuacggaugccauuug

SEQ ID NO: 1673557 - RNA, 19 nt, Homo sapiens
  misc_RNA (1)...(19): siRNA sense strand
cagggcagcuucgcacaga

SEQ ID NO: 1673558 - RNA, 19 nt, Homo sapiens
  misc_RNA (1)...(19): siRNA sense strand
gcauacaggaacaaagaga

SEQ ID NO: 1673559 - RNA, 19 nt, Homo sapiens
  misc_RNA (1)...(19): siRNA sense strand
gguugcaaguaucaauuau

SEQ ID NO: 1673560 - RNA, 19 nt, Homo sapiens
  misc_RNA (1)...(19): siRNA sense strand
gacuacggaugccauuugu

SEQ ID NO: 1673561 - RNA, 19 nt, Homo sapiens
  misc_RNA (1)...(19): siRNA sense strand
gcuuucaugucuugucugu

SEQ ID NO: 1673562 - RNA, 19 nt, Homo sapiens
  misc_RNA (1)...(19): siRNA sense strand
caacaaaugcugcaaaagu

SEQ ID NO: 1673563 - RNA, 19 nt, Homo sapiens
  misc_RNA (1)...(19): siRNA sense strand
ugucuugucuguugacuac

SEQ ID NO: 1673564 - RNA, 19 nt, Homo sapiens
  misc_RNA (1)...(19): siRNA sense strand
ccuccuggcuuccaacaca

SEQ ID NO: 1673565 - RNA, 19 nt, Homo sapiens
  misc_RNA (1)...(19): siRNA sense strand
cuacggaugccauuugugu

SEQ ID NO: 1673566 - RNA, 19 nt, Homo sapiens
  misc_RNA (1)...(19): siRNA sense strand
gagcaagcaguggucauga

SEQ ID NO: 1673567 - RNA, 19 nt, Homo sapiens
  misc_RNA (1)...(19): siRNA sense strand
gacuguugcugguaugaag

SEQ ID NO: 1673568 - RNA, 19 nt, Homo sapiens
  misc_RNA (1)...(19): siRNA sense strand
gaugcccaguugaugcuau

SEQ ID NO: 1673569 - RNA, 19 nt, Homo sapiens
  misc_RNA (1)...(19): siRNA sense strand
gcaaaagugcuagaagaaa

SEQ ID NO: 1673570 - RNA, 19 nt, Homo sapiens
  misc_RNA (1)...(19): siRNA sense strand
aaagcucuaugaaauugca

SEQ ID NO: 1673571 - RNA, 19 nt, Homo sapiens
  misc_RNA (1)...(19): siRNA sense strand
gcagaacacagggcagcuu

SEQ ID NO: 1673572 - RNA, 19 nt, Homo sapiens
  misc_RNA (1)...(19): siRNA sense strand
acaggacagugccuuugga

SEQ ID NO: 1673573 - RNA, 19 nt, Homo sapiens
  misc_RNA (1)...(19): siRNA sense strand
ggacuguugcugguaugaa

SEQ ID NO: 1673574 - RNA, 19 nt, Homo sapiens
  misc_RNA (1)...(19): siRNA sense strand
acuuauggaugcccugaga

SEQ ID NO: 1673575 - RNA, 19 nt, Homo sapiens
  misc_RNA (1)...(19): siRNA sense strand
aagagagggucaagauggu

SEQ ID NO: 1673576 - RNA, 19 nt, Homo sapiens
  misc_RNA (1)...(19): siRNA sense strand
cauguggguugcaaguauc

SEQ ID NO: 1673577 - RNA, 19 nt, Homo sapiens
  misc_RNA (1)...(19): siRNA sense strand
ccucuucucaucuuacaug

SEQ ID NO: 1673578 - RNA, 19 nt, Homo sapiens
  misc_RNA (1)...(19): siRNA sense strand
cuacagguaagcccacaga

SEQ ID NO: 1673579 - RNA, 19 nt, Homo sapiens
  misc_RNA (1)...(19): siRNA sense strand
guaaaagccccacacuguu

SEQ ID NO: 1673580 - RNA, 19 nt, Homo sapiens
  misc_RNA (1)...(19): siRNA sense strand
gcaaugcauacaggaacaa

SEQ ID NO: 1673581 - RNA, 19 nt, Homo sapiens
  misc_RNA (1)...(19): siRNA sense strand
ugacaggacagugccuuug

SEQ ID NO: 1673582 - RNA, 19 nt, Homo sapiens
  misc_RNA (1)...(19): siRNA sense strand
cuucuccucuucucaucuu

SEQ ID NO: 1673583 - RNA, 19 nt, Homo sapiens
  misc_RNA (1)...(19): siRNA sense strand
ccugagaaaagacaaaaua

SEQ ID NO: 1673584 - RNA, 19 nt, Homo sapiens
  misc_RNA (1)...(19): siRNA sense strand
gagugaugguggcuuucau

SEQ ID NO: 1673585 - RNA, 19 nt, Homo sapiens
  misc_RNA (1)...(19): siRNA sense strand
cggaugccauuugugucua

SEQ ID NO: 1673586 - RNA, 19 nt, Homo sapiens
  misc_RNA (1)...(19): siRNA sense strand
uuauggaugcccugagaaa

SEQ ID NO: 1673587 - RNA, 19 nt, Homo sapiens
  misc_RNA (1)...(19): siRNA sense strand
aaagauuuaccggaacauu

SEQ ID NO: 1673588 - RNA, 19 nt, Homo sapiens
  misc_RNA (1)...(19): siRNA sense strand
uugaugcuauugucuugga

SEQ ID NO: 1673589 - RNA, 19 nt, Homo sapiens
  misc_RNA (1)...(19): siRNA sense strand
guacaggaguugcaacaaa

SEQ ID NO: 1673590 - RNA, 19 nt, Homo sapiens
  misc_RNA (1)...(19): siRNA sense strand
ggacagugccuuuggagua

SEQ ID NO: 1673591 - RNA, 19 nt, Homo sapiens
  misc_RNA (1)...(19): siRNA sense strand
gaaggacuguugcugguau

SEQ ID NO: 1673592 - RNA, 19 nt, Homo sapiens
  misc_RNA (1)...(19): siRNA sense strand
gaugguggcuuucaugucu

SEQ ID NO: 1673593 - RNA, 19 nt, Homo sapiens
  misc_RNA (1)...(19): siRNA sense strand
caaaagugcuagaagaaaa

SEQ ID NO: 1673594 - RNA, 19 nt, Homo sapiens
  misc_RNA (1)...(19): siRNA sense strand
gaagcuccauuuaccaaca

SEQ ID NO: 1673595 - RNA, 19 nt, Homo sapiens
  misc_RNA (1)...(19): siRNA sense strand
uaauaaccgugagagauuu

SEQ ID NO: 1673596 - RNA, 19 nt, Homo sapiens
  misc_RNA (1)...(19): siRNA sense strand
gcugagugaugguggcuuu

SEQ ID NO: 1673597 - RNA, 19 nt, Homo sapiens
  misc_RNA (1)...(19): siRNA sense strand
gacugaagcugguaaaggu

SEQ ID NO: 1673598 - RNA, 19 nt, Homo sapiens
  misc_RNA (1)...(19): siRNA sense strand
uuucaugucuugucuguug

SEQ ID NO: 1673599 - RNA, 19 nt, Homo sapiens
  misc_RNA (1)...(19): siRNA sense strand
gagagggucaagaugguua

SEQ ID NO: 1673600 - RNA, 19 nt, Homo sapiens
  misc_RNA (1)...(19): siRNA sense strand
gacagugccuuuggaguau

SEQ ID NO: 1673601 - RNA, 19 nt, Homo sapiens
  misc_RNA (1)...(19): siRNA sense strand
guaaaggugcugagugaug

SEQ ID NO: 1673602 - RNA, 19 nt, Homo sapiens
  misc_RNA (1)...(19): siRNA sense strand
caucuuacauggagaggau

SEQ ID NO: 1673603 - RNA, 19 nt, Homo sapiens
  misc_RNA (1)...(19): siRNA sense strand
ugguaaaggugcugaguga

SEQ ID NO: 1673604 - RNA, 19 nt, Homo sapiens
  misc_RNA (1)...(19): siRNA sense strand
uuaauaaccgugagagauu

SEQ ID NO: 1673605 - RNA, 19 nt, Homo sapiens
  misc_RNA (1)...(19): siRNA sense strand
ugagagauuuccugagcaa

SEQ ID NO: 1673606 - RNA, 19 nt, Homo sapiens
  misc_RNA (1)...(19): siRNA sense strand
gaacaaagagagggucaag

SEQ ID NO: 1673607 - RNA, 19 nt, Homo sapiens
  misc_RNA (1)...(19): siRNA sense strand
ggguugcaaguaucaauua

SEQ ID NO: 1673608 - RNA, 19 nt, Homo sapiens
  misc_RNA (1)...(19): siRNA sense strand
uaaaagccccacacuguua

SEQ ID NO: 1673609 - RNA, 19 nt, Homo sapiens
  misc_RNA (1)...(19): siRNA sense strand
acaaagagagggucaagau

SEQ ID NO: 1673610 - RNA, 19 nt, Homo sapiens
  misc_RNA (1)...(19): siRNA sense strand
uggcaucacucccgugugu

SEQ ID NO: 1673611 - RNA, 19 nt, Homo sapiens
  misc_RNA (1)...(19): siRNA sense strand
uacaggaguugcaacaaau

SEQ ID NO: 1673612 - RNA, 19 nt, Homo sapiens
  misc_RNA (1)...(19): siRNA sense strand
ggaugccauuugugucuau

SEQ ID NO: 1673613 - RNA, 19 nt, Homo sapiens
  misc_RNA (1)...(19): siRNA sense strand
acauguggguugcaaguau

SEQ ID NO: 1673614 - RNA, 19 nt, Homo sapiens
  misc_RNA (1)...(19): siRNA sense strand
ggaaggacuguugcuggua

SEQ ID NO: 1673615 - RNA, 19 nt, Homo sapiens
  misc_RNA (1)...(19): siRNA sense strand
gagauuuccugagcaagca

SEQ ID NO: 1673616 - RNA, 19 nt, Homo sapiens
  misc_RNA (1)...(19): siRNA sense strand
gcacagacugaagcuggua

SEQ ID NO: 1673617 - RNA, 19 nt, Homo sapiens
  misc_RNA (1)...(19): siRNA sense strand
caaagagagggucaagaug

SEQ ID NO: 1673618 - RNA, 19 nt, Homo sapiens
  misc_RNA (1)...(19): siRNA sense strand
ugacuacggaugccauuug

SEQ ID NO: 1673619 - RNA, 19 nt, Homo sapiens
  misc_RNA (1)...(19): siRNA sense strand
cagggcagcuucgcacaga

SEQ ID NO: 1673620 - RNA, 19 nt, Homo sapiens
  misc_RNA (1)...(19): siRNA sense strand
gcauacaggaacaaagaga

SEQ ID NO: 1673621 - RNA, 19 nt, Homo sapiens
  misc_RNA (1)...(19): siRNA sense strand
gguugcaaguaucaauuau

SEQ ID NO: 1673622 - RNA, 19 nt, Homo sapiens
  misc_RNA (1)...(19): siRNA sense strand
gacuacggaugccauuugu

SEQ ID NO: 1673623 - RNA, 19 nt, Homo sapiens
  misc_RNA (1)...(19): siRNA sense strand
gcuuucaugucuugucugu

SEQ ID NO: 1673624 - RNA, 19 nt, Homo sapiens
  misc_RNA (1)...(19): siRNA sense strand
caacaaaugcugcaaaagu

SEQ ID NO: 1673625 - RNA, 19 nt, Homo sapiens
  misc_RNA (1)...(19): siRNA sense strand
ugucuugucuguugacuac

SEQ ID NO: 1673626 - RNA, 19 nt, Homo sapiens
  misc_RNA (1)...(19): siRNA sense strand
ccuccuggcuuccaacaca

SEQ ID NO: 1673627 - RNA, 19 nt, Homo sapiens
  misc_RNA (1)...(19): siRNA sense strand
cuacggaugccauuugugu

SEQ ID NO: 1673628 - RNA, 19 nt, Homo sapiens
  misc_RNA (1)...(19): siRNA sense strand
gagcaagcaguggucauga

SEQ ID NO: 1673629 - RNA, 19 nt, Homo sapiens
  misc_RNA (1)...(19): siRNA sense strand
gacuguugcugguaugaag

SEQ ID NO: 1673630 - RNA, 19 nt, Homo sapiens
  misc_RNA (1)...(19): siRNA sense strand
gaugcccaguugaugcuau

SEQ ID NO: 1673631 - RNA, 19 nt, Homo sapiens
  misc_RNA (1)...(19): siRNA sense strand
gcaaaagugcuagaagaaa

SEQ ID NO: 1673632 - RNA, 19 nt, Homo sapiens
  misc_RNA (1)...(19): siRNA sense strand
aaagcucuaugaaauugca

SEQ ID NO: 1673633 - RNA, 19 nt, Homo sapiens
  misc_RNA (1)...(19): siRNA sense strand
gcagaacacagggcagcuu

SEQ ID NO: 1673634 - RNA, 19 nt, Homo sapiens
  misc_RNA (1)...(19): siRNA sense strand
ggacuguugcugguaugaa

SEQ ID NO: 1673635 - RNA, 19 nt, Homo sapiens
  misc_RNA (1)...(19): siRNA sense strand
acaggacagugccuuugga

SEQ ID NO: 1673636 - RNA, 19 nt, Homo sapiens
  misc_RNA (1)...(19): siRNA sense strand
acuuauggaugcccugaga

SEQ ID NO: 1673637 - RNA, 19 nt, Homo sapiens
  misc_RNA (1)...(19): siRNA sense strand
aagagagggucaagauggu

SEQ ID NO: 1673638 - RNA, 19 nt, Homo sapiens
  misc_RNA (1)...(19): siRNA sense strand
cauguggguugcaaguauc

SEQ ID NO: 1673639 - RNA, 19 nt, Homo sapiens
  misc_RNA (1)...(19): siRNA sense strand
ccucuucucaucuuacaug

SEQ ID NO: 1673640 - RNA, 19 nt, Homo sapiens
  misc_RNA (1)...(19): siRNA sense strand
cuacagguaagcccacaga

SEQ ID NO: 1673641 - RNA, 19 nt, Homo sapiens
  misc_RNA (1)...(19): siRNA sense strand
guaaaagccccacacuguu

SEQ ID NO: 1673642 - RNA, 19 nt, Homo sapiens
  misc_RNA (1)...(19): siRNA sense strand
gcaaugcauacaggaacaa

SEQ ID NO: 1673643 - RNA, 19 nt, Homo sapiens
  misc_RNA (1)...(19): siRNA sense strand
ugacaggacagugccuuug

SEQ ID NO: 1673644 - RNA, 19 nt, Homo sapiens
  misc_RNA (1)...(19): siRNA sense strand
cuucuccucuucucaucuu

SEQ ID NO: 1673645 - RNA, 19 nt, Homo sapiens
  misc_RNA (1)...(19): siRNA sense strand
gagugaugguggcuuucau

SEQ ID NO: 1673646 - RNA, 19 nt, Homo sapiens
  misc_RNA (1)...(19): siRNA sense strand
ccugagaaaagacaaaaua

SEQ ID NO: 1673647 - RNA, 19 nt, Homo sapiens
  misc_RNA (1)...(19): siRNA sense strand
cggaugccauuugugucua

SEQ ID NO: 1673648 - RNA, 19 nt, Homo sapiens
  misc_RNA (1)...(19): siRNA sense strand
uuauggaugcccugagaaa

SEQ ID NO: 1673649 - RNA, 19 nt, Homo sapiens
  misc_RNA (1)...(19): siRNA sense strand
aaagauuuaccggaacauu

SEQ ID NO: 1673650 - RNA, 19 nt, Homo sapiens
  misc_RNA (1)...(19): siRNA sense strand
uugaugcuauugucuugga

SEQ ID NO: 1673651 - RNA, 19 nt, Homo sapiens
  misc_RNA (1)...(19): siRNA sense strand
gcaagagccuggaggagaa

SEQ ID NO: 1673652 - RNA, 19 nt, Homo sapiens
  misc_RNA (1)...(19): siRNA sense strand
gcaaguuucucccaaguau

SEQ ID NO: 1673653 - RNA, 19 nt, Homo sapiens
  misc_RNA (1)...(19): siRNA sense strand
ccaaguaucucaacaaagg

SEQ ID NO: 1673654 - RNA, 19 nt, Homo sapiens
  misc_RNA (1)...(19): siRNA sense strand
gggaagggcccuacaguga

SEQ ID NO: 1673655 - RNA, 19 nt, Homo sapiens
  misc_RNA (1)...(19): siRNA sense strand
aggaagauccgaaugcuua

SEQ ID NO: 1673656 - RNA, 19 nt, Homo sapiens
  misc_RNA (1)...(19): siRNA sense strand
caacaaaggagaacacucu

SEQ ID NO: 1673657 - RNA, 19 nt, Homo sapiens
  misc_RNA (1)...(19): siRNA sense strand
ggagagaugccagagcuuu

SEQ ID NO: 1673658 - RNA, 19 nt, Homo sapiens
  misc_RNA (1)...(19): siRNA sense strand
ugaaggagcuggagaaaag

SEQ ID NO: 1673659 - RNA, 19 nt, Homo sapiens
  misc_RNA (1)...(19): siRNA sense strand
ucccaaguaucucaacaaa

SEQ ID NO: 1673660 - RNA, 19 nt, Homo sapiens
  misc_RNA (1)...(19): siRNA sense strand
gagaacacucugagcaaga

SEQ ID NO: 1673661 - RNA, 19 nt, Homo sapiens
  misc_RNA (1)...(19): siRNA sense strand
caagcucucugggucauuc

SEQ ID NO: 1673662 - RNA, 19 nt, Homo sapiens
  misc_RNA (1)...(19): siRNA sense strand
gggucucucugacggguuu

SEQ ID NO: 1673663 - RNA, 19 nt, Homo sapiens
  misc_RNA (1)...(19): siRNA sense strand
gaagcgcuauggcgguuuu

SEQ ID NO: 1673664 - RNA, 19 nt, Homo sapiens
  misc_RNA (1)...(19): siRNA sense strand
ccaaggagcaggucaaacg

SEQ ID NO: 1673665 - RNA, 19 nt, Homo sapiens
  misc_RNA (1)...(19): siRNA sense strand
gagcaggucaaacgcuaug

SEQ ID NO: 1673666 - RNA, 19 nt, Homo sapiens
  misc_RNA (1)...(19): siRNA sense strand
gauggucccaaaccuauca

SEQ ID NO: 1673667 - RNA, 19 nt, Homo sapiens
  misc_RNA (1)...(19): siRNA sense strand
ucaagugggacaaccagaa

SEQ ID NO: 1673668 - RNA, 19 nt, Homo sapiens
  misc_RNA (1)...(19): siRNA sense strand
gccaugaggaccuguacaa

SEQ ID NO: 1673669 - RNA, 19 nt, Homo sapiens
  misc_RNA (1)...(19): siRNA sense strand
gagagaugccagagcuuuc

SEQ ID NO: 1673670 - RNA, 19 nt, Homo sapiens
  misc_RNA (1)...(19): siRNA sense strand
ggagacuggcacacucuau

SEQ ID NO: 1673671 - RNA, 19 nt, Homo sapiens
  misc_RNA (1)...(19): siRNA sense strand
ggaccuguacaaacgcuau

SEQ ID NO: 1673672 - RNA, 19 nt, Homo sapiens
  misc_RNA (1)...(19): siRNA sense strand
caggauggucccaaaccua

SEQ ID NO: 1673673 - RNA, 19 nt, Homo sapiens
  misc_RNA (1)...(19): siRNA sense strand
ucaaugacaaggaggacuu

SEQ ID NO: 1673674 - RNA, 19 nt, Homo sapiens
  misc_RNA (1)...(19): siRNA sense strand
gagacuggcacacucuauc

SEQ ID NO: 1673675 - RNA, 19 nt, Homo sapiens
  misc_RNA (1)...(19): siRNA sense strand
aagcaaguuucucccaagu

SEQ ID NO: 1673676 - RNA, 19 nt, Homo sapiens
  misc_RNA (1)...(19): siRNA sense strand
acaaaggagaacacucuga

SEQ ID NO: 1673677 - RNA, 19 nt, Homo sapiens
  misc_RNA (1)...(19): siRNA sense strand
caagugggacaaccagaag

SEQ ID NO: 1673678 - RNA, 19 nt, Homo sapiens
  misc_RNA (1)...(19): siRNA sense strand
ggacaaccagaagcgcuau

SEQ ID NO: 1673679 - RNA, 19 nt, Homo sapiens
  misc_RNA (1)...(19): siRNA sense strand
cccuugggcucaaugacaa

SEQ ID NO: 1673680 - RNA, 19 nt, Homo sapiens
  misc_RNA (1)...(19): siRNA sense strand
caugaggaccuguacaaac

SEQ ID NO: 1673681 - RNA, 19 nt, Homo sapiens
  misc_RNA (1)...(19): siRNA sense strand
ccaugaggaccuguacaaa

SEQ ID NO: 1673682 - RNA, 19 nt, Homo sapiens
  misc_RNA (1)...(19): siRNA sense strand
gggaugcccagcugaacga

SEQ ID NO: 1673683 - RNA, 19 nt, Homo sapiens
  misc_RNA (1)...(19): siRNA sense strand
cugccugccuccucauguu

SEQ ID NO: 1673684 - RNA, 19 nt, Homo sapiens
  misc_RNA (1)...(19): siRNA sense strand
ugagggaugcccagcugaa

SEQ ID NO: 1673685 - RNA, 19 nt, Homo sapiens
  misc_RNA (1)...(19): siRNA sense strand
ucaggaagauccgaaugcu

SEQ ID NO: 1673686 - RNA, 19 nt, Homo sapiens
  misc_RNA (1)...(19): siRNA sense strand
gaucaucucucuauuguuu

SEQ ID NO: 1673687 - RNA, 19 nt, Homo sapiens
  misc_RNA (1)...(19): siRNA sense strand
gaauuucacuggcccuuua

SEQ ID NO: 1673688 - RNA, 19 nt, Homo sapiens
  misc_RNA (1)...(19): siRNA sense strand
gcaaguaccugucaagaau

SEQ ID NO: 1673689 - RNA, 19 nt, Homo sapiens
  misc_RNA (1)...(19): siRNA sense strand
ggacauaccuuucguagag

SEQ ID NO: 1673690 - RNA, 19 nt, Homo sapiens
  misc_RNA (1)...(19): siRNA sense strand
guaagaagcugguguauac

SEQ ID NO: 1673691 - RNA, 19 nt, Homo sapiens
  misc_RNA (1)...(19): siRNA sense strand
uaaagcagaugccgaaauu

SEQ ID NO: 1673692 - RNA, 19 nt, Homo sapiens
  misc_RNA (1)...(19): siRNA sense strand
caaaugagcauaaugguaa

SEQ ID NO: 1673693 - RNA, 19 nt, Homo sapiens
  misc_RNA (1)...(19): siRNA sense strand
ugaauagucucccacaaua

SEQ ID NO: 1673694 - RNA, 19 nt, Homo sapiens
  misc_RNA (1)...(19): siRNA sense strand
gaauuucgcuucacucuca

SEQ ID NO: 1673695 - RNA, 19 nt, Homo sapiens
  misc_RNA (1)...(19): siRNA sense strand
uaaagugugucagcaauua

SEQ ID NO: 1673696 - RNA, 19 nt, Homo sapiens
  misc_RNA (1)...(19): siRNA sense strand
gcagaaaccacuaauacua

SEQ ID NO: 1673697 - RNA, 19 nt, Homo sapiens
  misc_RNA (1)...(19): siRNA sense strand
gaucacaacucucagucua

SEQ ID NO: 1673698 - RNA, 19 nt, Homo sapiens
  misc_RNA (1)...(19): siRNA sense strand
ggagcaggaugaucaagua

SEQ ID NO: 1673699 - RNA, 19 nt, Homo sapiens
  misc_RNA (1)...(19): siRNA sense strand
ugaagaagguggacacaaa

SEQ ID NO: 1673700 - RNA, 19 nt, Homo sapiens
  misc_RNA (1)...(19): siRNA sense strand
ggaaacagccuuauaugga

SEQ ID NO: 1673701 - RNA, 19 nt, Homo sapiens
  misc_RNA (1)...(19): siRNA sense strand
gaauaggaaugcaaauuuc

SEQ ID NO: 1673702 - RNA, 19 nt, Homo sapiens
  misc_RNA (1)...(19): siRNA sense strand
gcaaagcgauguguaugaa

SEQ ID NO: 1673703 - RNA, 19 nt, Homo sapiens
  misc_RNA (1)...(19): siRNA sense strand
caauaccucuacagauuua

SEQ ID NO: 1673704 - RNA, 19 nt, Homo sapiens
  misc_RNA (1)...(19): siRNA sense strand
gaaacagccuuauauggau

SEQ ID NO: 1673705 - RNA, 19 nt, Homo sapiens
  misc_RNA (1)...(19): siRNA sense strand
gcaagaagauccuuauagg

SEQ ID NO: 1673706 - RNA, 19 nt, Homo sapiens
  misc_RNA (1)...(19): siRNA sense strand
gcacaaaugcucaguguau

SEQ ID NO: 1673707 - RNA, 19 nt, Homo sapiens
  misc_RNA (1)...(19): siRNA sense strand
gaaagacaguaagcaaauu

SEQ ID NO: 1673708 - RNA, 19 nt, Homo sapiens
  misc_RNA (1)...(19): siRNA sense strand
ggaaugcaguuuacauaau

SEQ ID NO: 1673709 - RNA, 19 nt, Homo sapiens
  misc_RNA (1)...(19): siRNA sense strand
gcacugauaugcagaugau

SEQ ID NO: 1673710 - RNA, 19 nt, Homo sapiens
  misc_RNA (1)...(19): siRNA sense strand
gaagaaggaagcauugaaa

SEQ ID NO: 1673711 - RNA, 19 nt, Homo sapiens
  misc_RNA (1)...(19): siRNA sense strand
ggaaggauuuggagcaaga

SEQ ID NO: 1673712 - RNA, 19 nt, Homo sapiens
  misc_RNA (1)...(19): siRNA sense strand
gcauucagcugucucaaau

SEQ ID NO: 1673713 - RNA, 19 nt, Homo sapiens
  misc_RNA (1)...(19): siRNA sense strand
ccaaacacaucccgcgaua

SEQ ID NO: 1673714 - RNA, 19 nt, Homo sapiens
  misc_RNA (1)...(19): siRNA sense strand
gagaacacaucaggacuuu

SEQ ID NO: 1673715 - RNA, 19 nt, Homo sapiens
  misc_RNA (1)...(19): siRNA sense strand
ggucugagcugagcaguga

SEQ ID NO: 1673716 - RNA, 19 nt, Homo sapiens
  misc_RNA (1)...(19): siRNA sense strand
gaaggaagcauugaaaguu

SEQ ID NO: 1673717 - RNA, 19 nt, Homo sapiens
  misc_RNA (1)...(19): siRNA sense strand
ugaaguagaucauugugaa

SEQ ID NO: 1673718 - RNA, 19 nt, Homo sapiens
  misc_RNA (1)...(19): siRNA sense strand
ggaauuggcacucguagaa

SEQ ID NO: 1673719 - RNA, 19 nt, Homo sapiens
  misc_RNA (1)...(19): siRNA sense strand
gaauuuaacccuucccaaa

SEQ ID NO: 1673720 - RNA, 19 nt, Homo sapiens
  misc_RNA (1)...(19): siRNA sense strand
guuguuaucuggaaucuga

SEQ ID NO: 1673721 - RNA, 19 nt, Homo sapiens
  misc_RNA (1)...(19): siRNA sense strand
gaagaaauguguggacaag

SEQ ID NO: 1673722 - RNA, 19 nt, Homo sapiens
  misc_RNA (1)...(19): siRNA sense strand
ccaagaaacucaccucagu

SEQ ID NO: 1673723 - RNA, 19 nt, Homo sapiens
  misc_RNA (1)...(19): siRNA sense strand
gcaaagcagcuaccaaaug

SEQ ID NO: 1673724 - RNA, 19 nt, Homo sapiens
  misc_RNA (1)...(19): siRNA sense strand
gcacuagggagguuuguaa

SEQ ID NO: 1673725 - RNA, 19 nt, Homo sapiens
  misc_RNA (1)...(19): siRNA sense strand
acacaaagccuucuucaga

SEQ ID NO: 1673726 - RNA, 19 nt, Homo sapiens
  misc_RNA (1)...(19): siRNA sense strand
gaaacuugcuguuaaagac

SEQ ID NO: 1673727 - RNA, 19 nt, Homo sapiens
  misc_RNA (1)...(19): siRNA sense strand
gcaaguggcauaaauguca

SEQ ID NO: 1673728 - RNA, 19 nt, Homo sapiens
  misc_RNA (1)...(19): siRNA sense strand
cgaauaggaaugcaaauuu

SEQ ID NO: 1673729 - RNA, 19 nt, Homo sapiens
  misc_RNA (1)...(19): siRNA sense strand
ccacagguguugaagaaga

SEQ ID NO: 1673730 - RNA, 19 nt, Homo sapiens
  misc_RNA (1)...(19): siRNA sense strand
caaagcagcuaccaaaugc

SEQ ID NO: 1673731 - RNA, 19 nt, Homo sapiens
  misc_RNA (1)...(19): siRNA sense strand
gaaaauugcugccccauca

SEQ ID NO: 1673732 - RNA, 19 nt, Homo sapiens
  misc_RNA (1)...(19): siRNA sense strand
gcccacagguguugaagaa

SEQ ID NO: 1673733 - RNA, 19 nt, Homo sapiens
  misc_RNA (1)...(19): siRNA sense strand
ccuugaaucuuucucauaa

SEQ ID NO: 1673734 - RNA, 19 nt, Homo sapiens
  misc_RNA (1)...(19): siRNA sense strand
ggguauaacugccaagguu

SEQ ID NO: 1673735 - RNA, 19 nt, Homo sapiens
  misc_RNA (1)...(19): siRNA sense strand
uuacguagcuacagaugaa

SEQ ID NO: 1673736 - RNA, 19 nt, Homo sapiens
  misc_RNA (1)...(19): siRNA sense strand
ugaccguaguguuguauua

SEQ ID NO: 1673737 - RNA, 19 nt, Homo sapiens
  misc_RNA (1)...(19): siRNA sense strand
agaaauguguggacaaguu

SEQ ID NO: 1673738 - RNA, 19 nt, Homo sapiens
  misc_RNA (1)...(19): siRNA sense strand
ggaaagcacuagggagguu

SEQ ID NO: 1673739 - RNA, 19 nt, Homo sapiens
  misc_RNA (1)...(19): siRNA sense strand
gaaaaggguuggcguaguu

SEQ ID NO: 1673740 - RNA, 19 nt, Homo sapiens
  misc_RNA (1)...(19): siRNA sense strand
ugcaauaccucuacagauu

SEQ ID NO: 1673741 - RNA, 19 nt, Homo sapiens
  misc_RNA (1)...(19): siRNA sense strand
cauuggaauugaacgauua

SEQ ID NO: 1673742 - RNA, 19 nt, Homo sapiens
  misc_RNA (1)...(19): siRNA sense strand
gcaggaugaucaaguacuu

SEQ ID NO: 1673743 - RNA, 19 nt, Homo sapiens
  misc_RNA (1)...(19): siRNA sense strand
gcaauaccucuacagauuu

SEQ ID NO: 1673744 - RNA, 19 nt, Homo sapiens
  misc_RNA (1)...(19): siRNA sense strand
ggacaugccaguuucauca

SEQ ID NO: 1673745 - RNA, 19 nt, Homo sapiens
  misc_RNA (1)...(19): siRNA sense strand
aaacagccuuauauggaua

SEQ ID NO: 1673746 - RNA, 19 nt, Homo sapiens
  misc_RNA (1)...(19): siRNA sense strand
agacagacuuuauugauca

SEQ ID NO: 1673747 - RNA, 19 nt, Homo sapiens
  misc_RNA (1)...(19): siRNA sense strand
ccagaagccugagaagaaa

SEQ ID NO: 1673748 - RNA, 19 nt, Homo sapiens
  misc_RNA (1)...(19): siRNA sense strand
aaaguuaccucacucauac

SEQ ID NO: 1673749 - RNA, 19 nt, Homo sapiens
  misc_RNA (1)...(19): siRNA sense strand
ccauaaaucuauucaccaa

SEQ ID NO: 1673750 - RNA, 19 nt, Homo sapiens
  misc_RNA (1)...(19): siRNA sense strand
gaacacaucaggacuuugg

SEQ ID NO: 1673751 - RNA, 19 nt, Homo sapiens
  misc_RNA (1)...(19): siRNA sense strand
gcaaagcagcuacaucaug

SEQ ID NO: 1673752 - RNA, 19 nt, Homo sapiens
  misc_RNA (1)...(19): siRNA sense strand
gcaauuaaaggguuguuau

SEQ ID NO: 1673753 - RNA, 19 nt, Homo sapiens
  misc_RNA (1)...(19): siRNA sense strand
gcaaauuucccacugucua

SEQ ID NO: 1673754 - RNA, 19 nt, Homo sapiens
  misc_RNA (1)...(19): siRNA sense strand
gaacauguagaaagaacaa

SEQ ID NO: 1673755 - RNA, 19 nt, Homo sapiens
  misc_RNA (1)...(19): siRNA sense strand
gaagaaauccaaggaguca

SEQ ID NO: 1673756 - RNA, 19 nt, Homo sapiens
  misc_RNA (1)...(19): siRNA sense strand
ggagaccaagcacauguua

SEQ ID NO: 1673757 - RNA, 19 nt, Homo sapiens
  misc_RNA (1)...(19): siRNA sense strand
gacaaguucugcuccgauu

SEQ ID NO: 1673758 - RNA, 19 nt, Homo sapiens
  misc_RNA (1)...(19): siRNA sense strand
cuaaggaaacugacauuaa

SEQ ID NO: 1673759 - RNA, 19 nt, Homo sapiens
  misc_RNA (1)...(19): siRNA sense strand
gaagaaaacacacugaaaa

SEQ ID NO: 1673760 - RNA, 19 nt, Homo sapiens
  misc_RNA (1)...(19): siRNA sense strand
uauuggaccucuuccuaua

SEQ ID NO: 1673761 - RNA, 19 nt, Homo sapiens
  misc_RNA (1)...(19): siRNA sense strand
ccaagcacauguuaaagau

SEQ ID NO: 1673762 - RNA, 19 nt, Homo sapiens
  misc_RNA (1)...(19): siRNA sense strand
gaagaaaacacacaacauu

SEQ ID NO: 1673763 - RNA, 19 nt, Homo sapiens
  misc_RNA (1)...(19): siRNA sense strand
cgaaauugcaagcaguuua

SEQ ID NO: 1673764 - RNA, 19 nt, Homo sapiens
  misc_RNA (1)...(19): siRNA sense strand
caacccaguuucacauaga

SEQ ID NO: 1673765 - RNA, 19 nt, Homo sapiens
  misc_RNA (1)...(19): siRNA sense strand
gagccuggccucauguuaa

SEQ ID NO: 1673766 - RNA, 19 nt, Homo sapiens
  misc_RNA (1)...(19): siRNA sense strand
gaagacauguuuucugaga

SEQ ID NO: 1673767 - RNA, 19 nt, Homo sapiens
  misc_RNA (1)...(19): siRNA sense strand
gauucgaggugcuggauug

SEQ ID NO: 1673768 - RNA, 19 nt, Homo sapiens
  misc_RNA (1)...(19): siRNA sense strand
gagcaagagaguuauuaaa

SEQ ID NO: 1673769 - RNA, 19 nt, Homo sapiens
  misc_RNA (1)...(19): siRNA sense strand
uaucauguaucuggaauug

SEQ ID NO: 1673770 - RNA, 19 nt, Homo sapiens
  misc_RNA (1)...(19): siRNA sense strand
ggauauacgccauuucuca

SEQ ID NO: 1673771 - RNA, 19 nt, Homo sapiens
  misc_RNA (1)...(19): siRNA sense strand
ggagacaguguuucacaaa

SEQ ID NO: 1673772 - RNA, 19 nt, Homo sapiens
  misc_RNA (1)...(19): siRNA sense strand
gagcaagaagauccuuaua

SEQ ID NO: 1673773 - RNA, 19 nt, Homo sapiens
  misc_RNA (1)...(19): siRNA sense strand
gaaaaccauuuaccaagaa

SEQ ID NO: 1673774 - RNA, 19 nt, Homo sapiens
  misc_RNA (1)...(19): siRNA sense strand
ggagcaagagaguuauuaa

SEQ ID NO: 1673775 - RNA, 19 nt, Homo sapiens
  misc_RNA (1)...(19): siRNA sense strand
ggacuuuggucaauauggu

SEQ ID NO: 1673776 - RNA, 19 nt, Homo sapiens
  misc_RNA (1)...(19): siRNA sense strand
gcagaugauuaauuucaca

SEQ ID NO: 1673777 - RNA, 19 nt, Homo sapiens
  misc_RNA (1)...(19): siRNA sense strand
gaggcucacuccgauuuaa

SEQ ID NO: 1673778 - RNA, 19 nt, Homo sapiens
  misc_RNA (1)...(19): siRNA sense strand
aagcaugccucuucucuuc

SEQ ID NO: 1673779 - RNA, 19 nt, Homo sapiens
  misc_RNA (1)...(19): siRNA sense strand
gcaaucccaugaccgugaa

SEQ ID NO: 1673780 - RNA, 19 nt, Homo sapiens
  misc_RNA (1)...(19): siRNA sense strand
gaaucuuucucauaacauc

SEQ ID NO: 1673781 - RNA, 19 nt, Homo sapiens
  misc_RNA (1)...(19): siRNA sense strand
gaggacauuugcacugaug

SEQ ID NO: 1673782 - RNA, 19 nt, Homo sapiens
  misc_RNA (1)...(19): siRNA sense strand
acaaaugcucaguguauua

SEQ ID NO: 1673783 - RNA, 19 nt, Homo sapiens
  misc_RNA (1)...(19): siRNA sense strand
aaacaaugguccuauggau

SEQ ID NO: 1673784 - RNA, 19 nt, Homo sapiens
  misc_RNA (1)...(19): siRNA sense strand
agagagaggcagaagguua

SEQ ID NO: 1673785 - RNA, 19 nt, Homo sapiens
  misc_RNA (1)...(19): siRNA sense strand
gaacgauuacaaugccuuu

SEQ ID NO: 1673786 - RNA, 19 nt, Homo sapiens
  misc_RNA (1)...(19): siRNA sense strand
gggcaaagcugacuucaug

SEQ ID NO: 1673787 - RNA, 19 nt, Homo sapiens
  misc_RNA (1)...(19): siRNA sense strand
gcaaacagcgcaaggaguu

SEQ ID NO: 1673788 - RNA, 19 nt, Homo sapiens
  misc_RNA (1)...(19): siRNA sense strand
uugaugagcuuaagguaua

SEQ ID NO: 1673789 - RNA, 19 nt, Homo sapiens
  misc_RNA (1)...(19): siRNA sense strand
caacaagcgugucgccuau

SEQ ID NO: 1673790 - RNA, 19 nt, Homo sapiens
  misc_RNA (1)...(19): siRNA sense strand
gaauugacuuggaggagaa

SEQ ID NO: 1673791 - RNA, 19 nt, Homo sapiens
  misc_RNA (1)...(19): siRNA sense strand
ccaaagaggagaagaagaa

SEQ ID NO: 1673792 - RNA, 19 nt, Homo sapiens
  misc_RNA (1)...(19): siRNA sense strand
gcaaugagaacgaugaguu

SEQ ID NO: 1673793 - RNA, 19 nt, Homo sapiens
  misc_RNA (1)...(19): siRNA sense strand
caccucagcucgaguacua

SEQ ID NO: 1673794 - RNA, 19 nt, Homo sapiens
  misc_RNA (1)...(19): siRNA sense strand
gaagaagaaacccaagauu

SEQ ID NO: 1673795 - RNA, 19 nt, Homo sapiens
  misc_RNA (1)...(19): siRNA sense strand
acacauggcuacaauaucu

SEQ ID NO: 1673796 - RNA, 19 nt, Homo sapiens
  misc_RNA (1)...(19): siRNA sense strand
gaaguggaccucccagaga

SEQ ID NO: 1673797 - RNA, 19 nt, Homo sapiens
  misc_RNA (1)...(19): siRNA sense strand
agaagaaacccaagauuga

SEQ ID NO: 1673798 - RNA, 19 nt, Homo sapiens
  misc_RNA (1)...(19): siRNA sense strand
gcacagcauucccgacauc

SEQ ID NO: 1673799 - RNA, 19 nt, Homo sapiens
  misc_RNA (1)...(19): siRNA sense strand
ucaagaaacuggagaccau

SEQ ID NO: 1673800 - RNA, 19 nt, Homo sapiens
  misc_RNA (1)...(19): siRNA sense strand
cagaugagguggucuugga

SEQ ID NO: 1673801 - RNA, 19 nt, Homo sapiens
  misc_RNA (1)...(19): siRNA sense strand
ggagcaacuucgacaacaa

SEQ ID NO: 1673802 - RNA, 19 nt, Homo sapiens
  misc_RNA (1)...(19): siRNA sense strand
ugaaaucuaugaccaggau

SEQ ID NO: 1673803 - RNA, 19 nt, Homo sapiens
  misc_RNA (1)...(19): siRNA sense strand
gcugcacacuuucaacuug

SEQ ID NO: 1673804 - RNA, 19 nt, Homo sapiens
  misc_RNA (1)...(19): siRNA sense strand
gaagaaacccaagauugau

SEQ ID NO: 1673805 - RNA, 19 nt, Homo sapiens
  misc_RNA (1)...(19): siRNA sense strand
ccaaggaccugcucuucuc

SEQ ID NO: 1673806 - RNA, 19 nt, Homo sapiens
  misc_RNA (1)...(19): siRNA sense strand
ggacgacgacuucuucaca

SEQ ID NO: 1673807 - RNA, 19 nt, Homo sapiens
  misc_RNA (1)...(19): siRNA sense strand
caaguacuuugccuccauu

SEQ ID NO: 1673808 - RNA, 19 nt, Homo sapiens
  misc_RNA (1)...(19): siRNA sense strand
agaagaagaagaagaagaa

SEQ ID NO: 1673809 - RNA, 19 nt, Homo sapiens
  misc_RNA (1)...(19): siRNA sense strand
gauccacaauuauaagaag

SEQ ID NO: 1673810 - RNA, 19 nt, Homo sapiens
  misc_RNA (1)...(19): siRNA sense strand
ggaaguccuuugacaucga

SEQ ID NO: 1673811 - RNA, 19 nt, Homo sapiens
  misc_RNA (1)...(19): siRNA sense strand
ccacacauggcuacaauau

SEQ ID NO: 1673812 - RNA, 19 nt, Homo sapiens
  misc_RNA (1)...(19): siRNA sense strand
gagaagaagaagaagaaga

SEQ ID NO: 1673813 - RNA, 19 nt, Homo sapiens
  misc_RNA (1)...(19): siRNA sense strand
ucaacacccucgucaagug

SEQ ID NO: 1673814 - RNA, 19 nt, Homo sapiens
  misc_RNA (1)...(19): siRNA sense strand
ggaggacgacgacuucuuc

SEQ ID NO: 1673815 - RNA, 19 nt, Homo sapiens
  misc_RNA (1)...(19): siRNA sense strand
agaaggagaagaagaagaa

SEQ ID NO: 1673816 - RNA, 19 nt, Homo sapiens
  misc_RNA (1)...(19): siRNA sense strand
gcaaugaccccaucaaugu

SEQ ID NO: 1673817 - RNA, 19 nt, Homo sapiens
  misc_RNA (1)...(19): siRNA sense strand
caaugagaacgaugaguuu

SEQ ID NO: 1673818 - RNA, 19 nt, Homo sapiens
  misc_RNA (1)...(19): siRNA sense strand
ccaucgagcuggaccugaa

SEQ ID NO: 1673819 - RNA, 19 nt, Homo sapiens
  misc_RNA (1)...(19): siRNA sense strand
caagaaggaguccauguuc

SEQ ID NO: 1673820 - RNA, 19 nt, Homo sapiens
  misc_RNA (1)...(19): siRNA sense strand
ccaagaaggaguccauguu

SEQ ID NO: 1673821 - RNA, 19 nt, Homo sapiens
  misc_RNA (1)...(19): siRNA sense strand
gcccaucauugucauugaa

SEQ ID NO: 1673822 - RNA, 19 nt, Homo sapiens
  misc_RNA (1)...(19): siRNA sense strand
aggacuggcugcacacuuu

SEQ ID NO: 1673823 - RNA, 19 nt, Homo sapiens
  misc_RNA (1)...(19): siRNA sense strand
aagaagaaacccaagauug

SEQ ID NO: 1673824 - RNA, 19 nt, Homo sapiens
  misc_RNA (1)...(19): siRNA sense strand
gagaagaagaaacccaaga

SEQ ID NO: 1673825 - RNA, 19 nt, Homo sapiens
  misc_RNA (1)...(19): siRNA sense strand
cgucccugauccacaauua

SEQ ID NO: 1673826 - RNA, 19 nt, Homo sapiens
  misc_RNA (1)...(19): siRNA sense strand
gcagcucaacccugucuuu

SEQ ID NO: 1673827 - RNA, 19 nt, Homo sapiens
  misc_RNA (1)...(19): siRNA sense strand
ggacgauccgcccaucauu

SEQ ID NO: 1673828 - RNA, 19 nt, Homo sapiens
  misc_RNA (1)...(19): siRNA sense strand
acacagacguccacuacca

SEQ ID NO: 1673829 - RNA, 19 nt, Homo sapiens
  misc_RNA (1)...(19): siRNA sense strand
ggagaaguccagugacauc

SEQ ID NO: 1673830 - RNA, 19 nt, Homo sapiens
  misc_RNA (1)...(19): siRNA sense strand
gaguggaggugcuguucug

SEQ ID NO: 1673831 - RNA, 19 nt, Homo sapiens
  misc_RNA (1)...(19): siRNA sense strand
ggacgccucuggacaucuc

SEQ ID NO: 1673832 - RNA, 19 nt, Homo sapiens
  misc_RNA (1)...(19): siRNA sense strand
caagauugaugagcuuaag

SEQ ID NO: 1673833 - RNA, 19 nt, Homo sapiens
  misc_RNA (1)...(19): siRNA sense strand
gccagaacuuccugcagaa

SEQ ID NO: 1673834 - RNA, 19 nt, Homo sapiens
  misc_RNA (1)...(19): siRNA sense strand
gggagguuguggugacuau

SEQ ID NO: 1673835 - RNA, 19 nt, Homo sapiens
  misc_RNA (1)...(19): siRNA sense strand
gagcuggaguccgaguuug

SEQ ID NO: 1673836 - RNA, 19 nt, Homo sapiens
  misc_RNA (1)...(19): siRNA sense strand
ggacagugcaggccaaggu

SEQ ID NO: 1673837 - RNA, 19 nt, Homo sapiens
  misc_RNA (1)...(19): siRNA sense strand
cagaggaggcagagaagaa

SEQ ID NO: 1673838 - RNA, 19 nt, Homo sapiens
  misc_RNA (1)...(19): siRNA sense strand
cagcagaggaggcagagaa

SEQ ID NO: 1673839 - RNA, 19 nt, Homo sapiens
  misc_RNA (1)...(19): siRNA sense strand
ccaaguacuuugccuccau

SEQ ID NO: 1673840 - RNA, 19 nt, Homo sapiens
  misc_RNA (1)...(19): siRNA sense strand
caaugaagggcaaggagaa

SEQ ID NO: 1673841 - RNA, 19 nt, Homo sapiens
  misc_RNA (1)...(19): siRNA sense strand
caacuggcgcuaccuguuc

SEQ ID NO: 1673842 - RNA, 19 nt, Homo sapiens
  misc_RNA (1)...(19): siRNA sense strand
agaacuacaucuccaagca

SEQ ID NO: 1673843 - RNA, 19 nt, Homo sapiens
  misc_RNA (1)...(19): siRNA sense strand
ugacgguggcuguguauga

SEQ ID NO: 1673844 - RNA, 19 nt, Homo sapiens
  misc_RNA (1)...(19): siRNA sense strand
agagguacccaucaagaaa

SEQ ID NO: 1673845 - RNA, 19 nt, Homo sapiens
  misc_RNA (1)...(19): siRNA sense strand
gcgcaaagacagccaagca

SEQ ID NO: 1673846 - RNA, 19 nt, Homo sapiens
  misc_RNA (1)...(19): siRNA sense strand
gggacgagaccgaguacaa

SEQ ID NO: 1673847 - RNA, 19 nt, Homo sapiens
  misc_RNA (1)...(19): siRNA sense strand
aagaggagaagaagaagaa

SEQ ID NO: 1673848 - RNA, 19 nt, Homo sapiens
  misc_RNA (1)...(19): siRNA sense strand
ucgacaaccuggagcucua

SEQ ID NO: 1673849 - RNA, 19 nt, Homo sapiens
  misc_RNA (1)...(19): siRNA sense strand
gcacccugcugacaucaac

SEQ ID NO: 1673850 - RNA, 19 nt, Homo sapiens
  misc_RNA (1)...(19): siRNA sense strand
cgacagcagcggacucuca

SEQ ID NO: 1673851 - RNA, 19 nt, Homo sapiens
  misc_RNA (1)...(19): siRNA sense strand
aggcugagcugcauuuacu

SEQ ID NO: 1673852 - RNA, 19 nt, Homo sapiens
  misc_RNA (1)...(19): siRNA sense strand
gagaaggagaagaagaaga

SEQ ID NO: 1673853 - RNA, 19 nt, Homo sapiens
  misc_RNA (1)...(19): siRNA sense strand
gaggagaaggagaagaaga

SEQ ID NO: 1673854 - RNA, 19 nt, Homo sapiens
  misc_RNA (1)...(19): siRNA sense strand
ccagagguacccaucaaga

SEQ ID NO: 1673855 - RNA, 19 nt, Homo sapiens
  misc_RNA (1)...(19): siRNA sense strand
ggccuucggucgcuacaca

SEQ ID NO: 1673856 - RNA, 19 nt, Homo sapiens
  misc_RNA (1)...(19): siRNA sense strand
ucccugauccacaauuaua

SEQ ID NO: 1673857 - RNA, 19 nt, Homo sapiens
  misc_RNA (1)...(19): siRNA sense strand
aaguggaccucccagagaa

SEQ ID NO: 1673858 - RNA, 19 nt, Homo sapiens
  misc_RNA (1)...(19): siRNA sense strand
cucggaagcccaagaagua

SEQ ID NO: 1673859 - RNA, 19 nt, Homo sapiens
  misc_RNA (1)...(19): siRNA sense strand
ucacugggcccucugagau

SEQ ID NO: 1673860 - RNA, 19 nt, Homo sapiens
  misc_RNA (1)...(19): siRNA sense strand
gaaggaggaaguggacaau

SEQ ID NO: 1673861 - RNA, 19 nt, Homo sapiens
  misc_RNA (1)...(19): siRNA sense strand
gacgauccgcccaucauug

SEQ ID NO: 1673862 - RNA, 19 nt, Homo sapiens
  misc_RNA (1)...(19): siRNA sense strand
gacgagaccgaguacaaga

SEQ ID NO: 1673863 - RNA, 19 nt, Homo sapiens
  misc_RNA (1)...(19): siRNA sense strand
ggacgagaccgaguacaag

SEQ ID NO: 1673864 - RNA, 19 nt, Homo sapiens
  misc_RNA (1)...(19): siRNA sense strand
cagagguacccaucaagaa

SEQ ID NO: 1673865 - RNA, 19 nt, Homo sapiens
  misc_RNA (1)...(19): siRNA sense strand
aggccaagguggagcugua

SEQ ID NO: 1673866 - RNA, 19 nt, Homo sapiens
  misc_RNA (1)...(19): siRNA sense strand
gcugagcugcauuuacuga

SEQ ID NO: 1673867 - RNA, 19 nt, Homo sapiens
  misc_RNA (1)...(19): siRNA sense strand
cugcaaagacggcaaagug

SEQ ID NO: 1673868 - RNA, 19 nt, Homo sapiens
  misc_RNA (1)...(19): siRNA sense strand
ccucuggaauugacuugga

SEQ ID NO: 1673869 - RNA, 19 nt, Homo sapiens
  misc_RNA (1)...(19): siRNA sense strand
gacuauggagccagaggua

SEQ ID NO: 1673870 - RNA, 19 nt, Homo sapiens
  misc_RNA (1)...(19): siRNA sense strand
cuucuccgcugacgacuuc

SEQ ID NO: 1673871 - RNA, 19 nt, Homo sapiens
  misc_RNA (1)...(19): siRNA sense strand
cagcauucccgacaucuuc

SEQ ID NO: 1673872 - RNA, 19 nt, Homo sapiens
  misc_RNA (1)...(19): siRNA sense strand
aggaggaaguggacaauac

SEQ ID NO: 1673873 - RNA, 19 nt, Homo sapiens
  misc_RNA (1)...(19): siRNA sense strand
gagcaacuucgacaacaag

SEQ ID NO: 1673874 - RNA, 19 nt, Homo sapiens
  misc_RNA (1)...(19): siRNA sense strand
ccaagaagcaggcguucca

SEQ ID NO: 1673875 - RNA, 19 nt, Homo sapiens
  misc_RNA (1)...(19): siRNA sense strand
ugagaacgaugaguuugag

SEQ ID NO: 1673876 - RNA, 19 nt, Homo sapiens
  misc_RNA (1)...(19): siRNA sense strand
agacugacauccgcgacaa

SEQ ID NO: 1673877 - RNA, 19 nt, Homo sapiens
  misc_RNA (1)...(19): siRNA sense strand
gauugaugagcuuaaggua

SEQ ID NO: 1673878 - RNA, 19 nt, Homo sapiens
  misc_RNA (1)...(19): siRNA sense strand
ccauugacaccaugaagga

SEQ ID NO: 1673879 - RNA, 19 nt, Homo sapiens
  misc_RNA (1)...(19): siRNA sense strand
cgccucaaguccugcauga

SEQ ID NO: 1673880 - RNA, 19 nt, Homo sapiens
  misc_RNA (1)...(19): siRNA sense strand
ugagggagcuggaaaacau

SEQ ID NO: 1673881 - RNA, 19 nt, Homo sapiens
  misc_RNA (1)...(19): siRNA sense strand
gauccgcccaucauuguca

SEQ ID NO: 1673882 - RNA, 19 nt, Homo sapiens
  misc_RNA (1)...(19): siRNA sense strand
ggacugcgccaaggucaag

SEQ ID NO: 1673883 - RNA, 19 nt, Homo sapiens
  misc_RNA (1)...(19): siRNA sense strand
ggaggcugagcugcauuua

SEQ ID NO: 1673884 - RNA, 19 nt, Homo sapiens
  misc_RNA (1)...(19): siRNA sense strand
guguccaucuucaagcaaa

SEQ ID NO: 1673885 - RNA, 19 nt, Homo sapiens
  misc_RNA (1)...(19): siRNA sense strand
cgacaaggagaacuacauc

SEQ ID NO: 1673886 - RNA, 19 nt, Homo sapiens
  misc_RNA (1)...(19): siRNA sense strand
gggcaaagcugacuucaug

SEQ ID NO: 1673887 - RNA, 19 nt, Homo sapiens
  misc_RNA (1)...(19): siRNA sense strand
gcaaacagcgcaaggaguu

SEQ ID NO: 1673888 - RNA, 19 nt, Homo sapiens
  misc_RNA (1)...(19): siRNA sense strand
uugaugagcuuaagguaua

SEQ ID NO: 1673889 - RNA, 19 nt, Homo sapiens
  misc_RNA (1)...(19): siRNA sense strand
caacaagcgugucgccuau

SEQ ID NO: 1673890 - RNA, 19 nt, Homo sapiens
  misc_RNA (1)...(19): siRNA sense strand
gaauugacuuggaggagaa

SEQ ID NO: 1673891 - RNA, 19 nt, Homo sapiens
  misc_RNA (1)...(19): siRNA sense strand
ccaaagaggagaagaagaa

SEQ ID NO: 1673892 - RNA, 19 nt, Homo sapiens
  misc_RNA (1)...(19): siRNA sense strand
gcaaugagaacgaugaguu

SEQ ID NO: 1673893 - RNA, 19 nt, Homo sapiens
  misc_RNA (1)...(19): siRNA sense strand
caccucagcucgaguacua

SEQ ID NO: 1673894 - RNA, 19 nt, Homo sapiens
  misc_RNA (1)...(19): siRNA sense strand
gaagaagaaacccaagauu

SEQ ID NO: 1673895 - RNA, 19 nt, Homo sapiens
  misc_RNA (1)...(19): siRNA sense strand
acacauggcuacaauaucu

SEQ ID NO: 1673896 - RNA, 19 nt, Homo sapiens
  misc_RNA (1)...(19): siRNA sense strand
gaaguggaccucccagaga

SEQ ID NO: 1673897 - RNA, 19 nt, Homo sapiens
  misc_RNA (1)...(19): siRNA sense strand
agaagaaacccaagauuga

SEQ ID NO: 1673898 - RNA, 19 nt, Homo sapiens
  misc_RNA (1)...(19): siRNA sense strand
gcacagcauucccgacauc

SEQ ID NO: 1673899 - RNA, 19 nt, Homo sapiens
  misc_RNA (1)...(19): siRNA sense strand
ucaagaaacuggagaccau

SEQ ID NO: 1673900 - RNA, 19 nt, Homo sapiens
  misc_RNA (1)...(19): siRNA sense strand
cagaugagguggucuugga

SEQ ID NO: 1673901 - RNA, 19 nt, Homo sapiens
  misc_RNA (1)...(19): siRNA sense strand
ggagcaacuucgacaacaa

SEQ ID NO: 1673902 - RNA, 19 nt, Homo sapiens
  misc_RNA (1)...(19): siRNA sense strand
ugaaaucuaugaccaggau

SEQ ID NO: 1673903 - RNA, 19 nt, Homo sapiens
  misc_RNA (1)...(19): siRNA sense strand
gcugcacacuuucaacuug

SEQ ID NO: 1673904 - RNA, 19 nt, Homo sapiens
  misc_RNA (1)...(19): siRNA sense strand
gaagaaacccaagauugau

SEQ ID NO: 1673905 - RNA, 19 nt, Homo sapiens
  misc_RNA (1)...(19): siRNA sense strand
ccaaggaccugcucuucuc

SEQ ID NO: 1673906 - RNA, 19 nt, Homo sapiens
  misc_RNA (1)...(19): siRNA sense strand
ggacgacgacuucuucaca

SEQ ID NO: 1673907 - RNA, 19 nt, Homo sapiens
  misc_RNA (1)...(19): siRNA sense strand
caaguacuuugccuccauu

SEQ ID NO: 1673908 - RNA, 19 nt, Homo sapiens
  misc_RNA (1)...(19): siRNA sense strand
agaagaagaagaagaagaa

SEQ ID NO: 1673909 - RNA, 19 nt, Homo sapiens
  misc_RNA (1)...(19): siRNA sense strand
gauccacaauuauaagaag

SEQ ID NO: 1673910 - RNA, 19 nt, Homo sapiens
  misc_RNA (1)...(19): siRNA sense strand
ggaaguccuuugacaucga

SEQ ID NO: 1673911 - RNA, 19 nt, Homo sapiens
  misc_RNA (1)...(19): siRNA sense strand
ccacacauggcuacaauau

SEQ ID NO: 1673912 - RNA, 19 nt, Homo sapiens
  misc_RNA (1)...(19): siRNA sense strand
gagaagaagaagaagaaga

SEQ ID NO: 1673913 - RNA, 19 nt, Homo sapiens
  misc_RNA (1)...(19): siRNA sense strand
ucaacacccucgucaagug

SEQ ID NO: 1673914 - RNA, 19 nt, Homo sapiens
  misc_RNA (1)...(19): siRNA sense strand
ggaggacgacgacuucuuc

SEQ ID NO: 1673915 - RNA, 19 nt, Homo sapiens
  misc_RNA (1)...(19): siRNA sense strand
agaaggagaagaagaagaa

SEQ ID NO: 1673916 - RNA, 19 nt, Homo sapiens
  misc_RNA (1)...(19): siRNA sense strand
gcaaugaccccaucaaugu

SEQ ID NO: 1673917 - RNA, 19 nt, Homo sapiens
  misc_RNA (1)...(19): siRNA sense strand
caaugagaacgaugaguuu

SEQ ID NO: 1673918 - RNA, 19 nt, Homo sapiens
  misc_RNA (1)...(19): siRNA sense strand
ccaucgagcuggaccugaa

SEQ ID NO: 1673919 - RNA, 19 nt, Homo sapiens
  misc_RNA (1)...(19): siRNA sense strand
caagaaggaguccauguuc

SEQ ID NO: 1673920 - RNA, 19 nt, Homo sapiens
  misc_RNA (1)...(19): siRNA sense strand
ccaagaaggaguccauguu

SEQ ID NO: 1673921 - RNA, 19 nt, Homo sapiens
  misc_RNA (1)...(19): siRNA sense strand
gcccaucauugucauugaa

SEQ ID NO: 1673922 - RNA, 19 nt, Homo sapiens
  misc_RNA (1)...(19): siRNA sense strand
aggacuggcugcacacuuu

SEQ ID NO: 1673923 - RNA, 19 nt, Homo sapiens
  misc_RNA (1)...(19): siRNA sense strand
aagaagaaacccaagauug

SEQ ID NO: 1673924 - RNA, 19 nt, Homo sapiens
  misc_RNA (1)...(19): siRNA sense strand
gagaagaagaaacccaaga

SEQ ID NO: 1673925 - RNA, 19 nt, Homo sapiens
  misc_RNA (1)...(19): siRNA sense strand
cgucccugauccacaauua

SEQ ID NO: 1673926 - RNA, 19 nt, Homo sapiens
  misc_RNA (1)...(19): siRNA sense strand
gcagcucaacccugucuuu

SEQ ID NO: 1673927 - RNA, 19 nt, Homo sapiens
  misc_RNA (1)...(19): siRNA sense strand
ggacgauccgcccaucauu

SEQ ID NO: 1673928 - RNA, 19 nt, Homo sapiens
  misc_RNA (1)...(19): siRNA sense strand
acacagacguccacuacca

SEQ ID NO: 1673929 - RNA, 19 nt, Homo sapiens
  misc_RNA (1)...(19): siRNA sense strand
ggagaaguccagugacauc

SEQ ID NO: 1673930 - RNA, 19 nt, Homo sapiens
  misc_RNA (1)...(19): siRNA sense strand
gccagaacuuccugcagaa

SEQ ID NO: 1673931 - RNA, 19 nt, Homo sapiens
  misc_RNA (1)...(19): siRNA sense strand
ggacgccucuggacaucuc

SEQ ID NO: 1673932 - RNA, 19 nt, Homo sapiens
  misc_RNA (1)...(19): siRNA sense strand
caagauugaugagcuuaag

SEQ ID NO: 1673933 - RNA, 19 nt, Homo sapiens
  misc_RNA (1)...(19): siRNA sense strand
gaguggaggugcuguucug

SEQ ID NO: 1673934 - RNA, 19 nt, Homo sapiens
  misc_RNA (1)...(19): siRNA sense strand
gggagguuguggugacuau

SEQ ID NO: 1673935 - RNA, 19 nt, Homo sapiens
  misc_RNA (1)...(19): siRNA sense strand
gagcuggaguccgaguuug

SEQ ID NO: 1673936 - RNA, 19 nt, Homo sapiens
  misc_RNA (1)...(19): siRNA sense strand
ggacagugcaggccaaggu

SEQ ID NO: 1673937 - RNA, 19 nt, Homo sapiens
  misc_RNA (1)...(19): siRNA sense strand
cagaggaggcagagaagaa

SEQ ID NO: 1673938 - RNA, 19 nt, Homo sapiens
  misc_RNA (1)...(19): siRNA sense strand
cagcagaggaggcagagaa

SEQ ID NO: 1673939 - RNA, 19 nt, Homo sapiens
  misc_RNA (1)...(19): siRNA sense strand
ccaaguacuuugccuccau

SEQ ID NO: 1673940 - RNA, 19 nt, Homo sapiens
  misc_RNA (1)...(19): siRNA sense strand
caaugaagggcaaggagaa

SEQ ID NO: 1673941 - RNA, 19 nt, Homo sapiens
  misc_RNA (1)...(19): siRNA sense strand
caacuggcgcuaccuguuc

SEQ ID NO: 1673942 - RNA, 19 nt, Homo sapiens
  misc_RNA (1)...(19): siRNA sense strand
agaacuacaucuccaagca

SEQ ID NO: 1673943 - RNA, 19 nt, Homo sapiens
  misc_RNA (1)...(19): siRNA sense strand
ugacgguggcuguguauga

SEQ ID NO: 1673944 - RNA, 19 nt, Homo sapiens
  misc_RNA (1)...(19): siRNA sense strand
agagguacccaucaagaaa

SEQ ID NO: 1673945 - RNA, 19 nt, Homo sapiens
  misc_RNA (1)...(19): siRNA sense strand
gcgcaaagacagccaagca

SEQ ID NO: 1673946 - RNA, 19 nt, Homo sapiens
  misc_RNA (1)...(19): siRNA sense strand
gggacgagaccgaguacaa

SEQ ID NO: 1673947 - RNA, 19 nt, Homo sapiens
  misc_RNA (1)...(19): siRNA sense strand
aagaggagaagaagaagaa

SEQ ID NO: 1673948 - RNA, 19 nt, Homo sapiens
  misc_RNA (1)...(19): siRNA sense strand
ucgacaaccuggagcucua

SEQ ID NO: 1673949 - RNA, 19 nt, Homo sapiens
  misc_RNA (1)...(19): siRNA sense strand
gcacccugcugacaucaac

SEQ ID NO: 1673950 - RNA, 19 nt, Homo sapiens
  misc_RNA (1)...(19): siRNA sense strand
cgacagcagcggacucuca

SEQ ID NO: 1673951 - RNA, 19 nt, Homo sapiens
  misc_RNA (1)...(19): siRNA sense strand
aggcugagcugcauuuacu

SEQ ID NO: 1673952 - RNA, 19 nt, Homo sapiens
  misc_RNA (1)...(19): siRNA sense strand
gagaaggagaagaagaaga

SEQ ID NO: 1673953 - RNA, 19 nt, Homo sapiens
  misc_RNA (1)...(19): siRNA sense strand
gaggagaaggagaagaaga

SEQ ID NO: 1673954 - RNA, 19 nt, Homo sapiens
  misc_RNA (1)...(19): siRNA sense strand
ccagagguacccaucaaga

SEQ ID NO: 1673955 - RNA, 19 nt, Homo sapiens
  misc_RNA (1)...(19): siRNA sense strand
ggccuucggucgcuacaca

SEQ ID NO: 1673956 - RNA, 19 nt, Homo sapiens
  misc_RNA (1)...(19): siRNA sense strand
ucccugauccacaauuaua

SEQ ID NO: 1673957 - RNA, 19 nt, Homo sapiens
  misc_RNA (1)...(19): siRNA sense strand
aagaaggccugaacgacau

SEQ ID NO: 1673958 - RNA, 19 nt, Homo sapiens
  misc_RNA (1)...(19): siRNA sense strand
aaguggaccucccagagaa

SEQ ID NO: 1673959 - RNA, 19 nt, Homo sapiens
  misc_RNA (1)...(19): siRNA sense strand
cucggaagcccaagaagua

SEQ ID NO: 1673960 - RNA, 19 nt, Homo sapiens
  misc_RNA (1)...(19): siRNA sense strand
ucacugggcccucugagau

SEQ ID NO: 1673961 - RNA, 19 nt, Homo sapiens
  misc_RNA (1)...(19): siRNA sense strand
gaaggaggaaguggacaau

SEQ ID NO: 1673962 - RNA, 19 nt, Homo sapiens
  misc_RNA (1)...(19): siRNA sense strand
gacgauccgcccaucauug

SEQ ID NO: 1673963 - RNA, 19 nt, Homo sapiens
  misc_RNA (1)...(19): siRNA sense strand
gacgagaccgaguacaaga

SEQ ID NO: 1673964 - RNA, 19 nt, Homo sapiens
  misc_RNA (1)...(19): siRNA sense strand
ggacgagaccgaguacaag

SEQ ID NO: 1673965 - RNA, 19 nt, Homo sapiens
  misc_RNA (1)...(19): siRNA sense strand
cagagguacccaucaagaa

SEQ ID NO: 1673966 - RNA, 19 nt, Homo sapiens
  misc_RNA (1)...(19): siRNA sense strand
aggccaagguggagcugua

SEQ ID NO: 1673967 - RNA, 19 nt, Homo sapiens
  misc_RNA (1)...(19): siRNA sense strand
gcugagcugcauuuacuga

SEQ ID NO: 1673968 - RNA, 19 nt, Homo sapiens
  misc_RNA (1)...(19): siRNA sense strand
ugaacgacauacaggagau

SEQ ID NO: 1673969 - RNA, 19 nt, Homo sapiens
  misc_RNA (1)...(19): siRNA sense strand
cugcaaagacggcaaagug

SEQ ID NO: 1673970 - RNA, 19 nt, Homo sapiens
  misc_RNA (1)...(19): siRNA sense strand
ccucuggaauugacuugga

SEQ ID NO: 1673971 - RNA, 19 nt, Homo sapiens
  misc_RNA (1)...(19): siRNA sense strand
gacuauggagccagaggua

SEQ ID NO: 1673972 - RNA, 19 nt, Homo sapiens
  misc_RNA (1)...(19): siRNA sense strand
cuucuccgcugacgacuuc

SEQ ID NO: 1673973 - RNA, 19 nt, Homo sapiens
  misc_RNA (1)...(19): siRNA sense strand
cagcauucccgacaucuuc

SEQ ID NO: 1673974 - RNA, 19 nt, Homo sapiens
  misc_RNA (1)...(19): siRNA sense strand
aggaggaaguggacaauac

SEQ ID NO: 1673975 - RNA, 19 nt, Homo sapiens
  misc_RNA (1)...(19): siRNA sense strand
gagcaacuucgacaacaag

SEQ ID NO: 1673976 - RNA, 19 nt, Homo sapiens
  misc_RNA (1)...(19): siRNA sense strand
ccaagaagcaggcguucca

SEQ ID NO: 1673977 - RNA, 19 nt, Homo sapiens
  misc_RNA (1)...(19): siRNA sense strand
ugagaacgaugaguuugag

SEQ ID NO: 1673978 - RNA, 19 nt, Homo sapiens
  misc_RNA (1)...(19): siRNA sense strand
cgccucaaguccugcauga

SEQ ID NO: 1673979 - RNA, 19 nt, Homo sapiens
  misc_RNA (1)...(19): siRNA sense strand
agacugacauccgcgacaa

SEQ ID NO: 1673980 - RNA, 19 nt, Homo sapiens
  misc_RNA (1)...(19): siRNA sense strand
gauugaugagcuuaaggua

SEQ ID NO: 1673981 - RNA, 19 nt, Homo sapiens
  misc_RNA (1)...(19): siRNA sense strand
ugagggagcuggaaaacau

SEQ ID NO: 1673982 - RNA, 19 nt, Homo sapiens
  misc_RNA (1)...(19): siRNA sense strand
ccauugacaccaugaagga

SEQ ID NO: 1673983 - RNA, 19 nt, Homo sapiens
  misc_RNA (1)...(19): siRNA sense strand
gauccgcccaucauuguca

SEQ ID NO: 1673984 - RNA, 19 nt, Homo sapiens
  misc_RNA (1)...(19): siRNA sense strand
guguccaucuucaagcaaa

SEQ ID NO: 1673985 - RNA, 19 nt, Homo sapiens
  misc_RNA (1)...(19): siRNA sense strand
ggaggcugagcugcauuua

SEQ ID NO: 1673986 - RNA, 19 nt, Homo sapiens
  misc_RNA (1)...(19): siRNA sense strand
gggcaaagcugacuucaug

SEQ ID NO: 1673987 - RNA, 19 nt, Homo sapiens
  misc_RNA (1)...(19): siRNA sense strand
gcaaacagcgcaaggaguu

SEQ ID NO: 1673988 - RNA, 19 nt, Homo sapiens
  misc_RNA (1)...(19): siRNA sense strand
uugaugagcuuaagguaua

SEQ ID NO: 1673989 - RNA, 19 nt, Homo sapiens
  misc_RNA (1)...(19): siRNA sense strand
caacaagcgugucgccuau

SEQ ID NO: 1673990 - RNA, 19 nt, Homo sapiens
  misc_RNA (1)...(19): siRNA sense strand
gaauugacuuggaggagaa

SEQ ID NO: 1673991 - RNA, 19 nt, Homo sapiens
  misc_RNA (1)...(19): siRNA sense strand
ccaaagaggagaagaagaa

SEQ ID NO: 1673992 - RNA, 19 nt, Homo sapiens
  misc_RNA (1)...(19): siRNA sense strand
gcaaugagaacgaugaguu

SEQ ID NO: 1673993 - RNA, 19 nt, Homo sapiens
  misc_RNA (1)...(19): siRNA sense strand
caccucagcucgaguacua

SEQ ID NO: 1673994 - RNA, 19 nt, Homo sapiens
  misc_RNA (1)...(19): siRNA sense strand
gaagaagaaacccaagauu

SEQ ID NO: 1673995 - RNA, 19 nt, Homo sapiens
  misc_RNA (1)...(19): siRNA sense strand
acacauggcuacaauaucu

SEQ ID NO: 1673996 - RNA, 19 nt, Homo sapiens
  misc_RNA (1)...(19): siRNA sense strand
gaaguggaccucccagaga

SEQ ID NO: 1673997 - RNA, 19 nt, Homo sapiens
  misc_RNA (1)...(19): siRNA sense strand
agaagaaacccaagauuga

SEQ ID NO: 1673998 - RNA, 19 nt, Homo sapiens
  misc_RNA (1)...(19): siRNA sense strand
gcacagcauucccgacauc

SEQ ID NO: 1673999 - RNA, 19 nt, Homo sapiens
  misc_RNA (1)...(19): siRNA sense strand
ucaagaaacuggagaccau

SEQ ID NO: 1674000 - RNA, 19 nt, Homo sapiens
  misc_RNA (1)...(19): siRNA sense strand
cagaugagguggucuugga

SEQ ID NO: 1674001 - RNA, 19 nt, Homo sapiens
  misc_RNA (1)...(19): siRNA sense strand
ggagcaacuucgacaacaa

SEQ ID NO: 1674002 - RNA, 19 nt, Homo sapiens
  misc_RNA (1)...(19): siRNA sense strand
ugaaaucuaugaccaggau

SEQ ID NO: 1674003 - RNA, 19 nt, Homo sapiens
  misc_RNA (1)...(19): siRNA sense strand
gcugcacacuuucaacuug

SEQ ID NO: 1674004 - RNA, 19 nt, Homo sapiens
  misc_RNA (1)...(19): siRNA sense strand
gaagaaacccaagauugau

SEQ ID NO: 1674005 - RNA, 19 nt, Homo sapiens
  misc_RNA (1)...(19): siRNA sense strand
ccaaggaccugcucuucuc

SEQ ID NO: 1674006 - RNA, 19 nt, Homo sapiens
  misc_RNA (1)...(19): siRNA sense strand
ggacgacgacuucuucaca

SEQ ID NO: 1674007 - RNA, 19 nt, Homo sapiens
  misc_RNA (1)...(19): siRNA sense strand
caaguacuuugccuccauu

SEQ ID NO: 1674008 - RNA, 19 nt, Homo sapiens
  misc_RNA (1)...(19): siRNA sense strand
agaagaagaagaagaagaa

SEQ ID NO: 1674009 - RNA, 19 nt, Homo sapiens
  misc_RNA (1)...(19): siRNA sense strand
gauccacaauuauaagaag

SEQ ID NO: 1674010 - RNA, 19 nt, Homo sapiens
  misc_RNA (1)...(19): siRNA sense strand
ggaaguccuuugacaucga

SEQ ID NO: 1674011 - RNA, 19 nt, Homo sapiens
  misc_RNA (1)...(19): siRNA sense strand
ccacacauggcuacaauau

SEQ ID NO: 1674012 - RNA, 19 nt, Homo sapiens
  misc_RNA (1)...(19): siRNA sense strand
gagaagaagaagaagaaga

SEQ ID NO: 1674013 - RNA, 19 nt, Homo sapiens
  misc_RNA (1)...(19): siRNA sense strand
ucaacacccucgucaagug

SEQ ID NO: 1674014 - RNA, 19 nt, Homo sapiens
  misc_RNA (1)...(19): siRNA sense strand
ggaggacgacgacuucuuc

SEQ ID NO: 1674015 - RNA, 19 nt, Homo sapiens
  misc_RNA (1)...(19): siRNA sense strand
agaaggagaagaagaagaa

SEQ ID NO: 1674016 - RNA, 19 nt, Homo sapiens
  misc_RNA (1)...(19): siRNA sense strand
gcaaugaccccaucaaugu

SEQ ID NO: 1674017 - RNA, 19 nt, Homo sapiens
  misc_RNA (1)...(19): siRNA sense strand
caaugagaacgaugaguuu

SEQ ID NO: 1674018 - RNA, 19 nt, Homo sapiens
  misc_RNA (1)...(19): siRNA sense strand
ccaucgagcuggaccugaa

SEQ ID NO: 1674019 - RNA, 19 nt, Homo sapiens
  misc_RNA (1)...(19): siRNA sense strand
caagaaggaguccauguuc

SEQ ID NO: 1674020 - RNA, 19 nt, Homo sapiens
  misc_RNA (1)...(19): siRNA sense strand
ccaagaaggaguccauguu

SEQ ID NO: 1674021 - RNA, 19 nt, Homo sapiens
  misc_RNA (1)...(19): siRNA sense strand
gcccaucauugucauugaa

SEQ ID NO: 1674022 - RNA, 19 nt, Homo sapiens
  misc_RNA (1)...(19): siRNA sense strand
aggacuggcugcacacuuu

SEQ ID NO: 1674023 - RNA, 19 nt, Homo sapiens
  misc_RNA (1)...(19): siRNA sense strand
aagaagaaacccaagauug

SEQ ID NO: 1674024 - RNA, 19 nt, Homo sapiens
  misc_RNA (1)...(19): siRNA sense strand
gagaagaagaaacccaaga

SEQ ID NO: 1674025 - RNA, 19 nt, Homo sapiens
  misc_RNA (1)...(19): siRNA sense strand
cgucccugauccacaauua

SEQ ID NO: 1674026 - RNA, 19 nt, Homo sapiens
  misc_RNA (1)...(19): siRNA sense strand
gcagcucaacccugucuuu

SEQ ID NO: 1674027 - RNA, 19 nt, Homo sapiens
  misc_RNA (1)...(19): siRNA sense strand
ggacgauccgcccaucauu

SEQ ID NO: 1674028 - RNA, 19 nt, Homo sapiens
  misc_RNA (1)...(19): siRNA sense strand
acacagacguccacuacca

SEQ ID NO: 1674029 - RNA, 19 nt, Homo sapiens
  misc_RNA (1)...(19): siRNA sense strand
ggagaaguccagugacauc

SEQ ID NO: 1674030 - RNA, 19 nt, Homo sapiens
  misc_RNA (1)...(19): siRNA sense strand
gccagaacuuccugcagaa

SEQ ID NO: 1674031 - RNA, 19 nt, Homo sapiens
  misc_RNA (1)...(19): siRNA sense strand
ggacgccucuggacaucuc

SEQ ID NO: 1674032 - RNA, 19 nt, Homo sapiens
  misc_RNA (1)...(19): siRNA sense strand
caagauugaugagcuuaag

SEQ ID NO: 1674033 - RNA, 19 nt, Homo sapiens
  misc_RNA (1)...(19): siRNA sense strand
gaguggaggugcuguucug

SEQ ID NO: 1674034 - RNA, 19 nt, Homo sapiens
  misc_RNA (1)...(19): siRNA sense strand
gggagguuguggugacuau

SEQ ID NO: 1674035 - RNA, 19 nt, Homo sapiens
  misc_RNA (1)...(19): siRNA sense strand
gagcuggaguccgaguuug

SEQ ID NO: 1674036 - RNA, 19 nt, Homo sapiens
  misc_RNA (1)...(19): siRNA sense strand
ggacagugcaggccaaggu

SEQ ID NO: 1674037 - RNA, 19 nt, Homo sapiens
  misc_RNA (1)...(19): siRNA sense strand
cagaggaggcagagaagaa

SEQ ID NO: 1674038 - RNA, 19 nt, Homo sapiens
  misc_RNA (1)...(19): siRNA sense strand
cagcagaggaggcagagaa

SEQ ID NO: 1674039 - RNA, 19 nt, Homo sapiens
  misc_RNA (1)...(19): siRNA sense strand
ccaaguacuuugccuccau

SEQ ID NO: 1674040 - RNA, 19 nt, Homo sapiens
  misc_RNA (1)...(19): siRNA sense strand
caaugaagggcaaggagaa

SEQ ID NO: 1674041 - RNA, 19 nt, Homo sapiens
  misc_RNA (1)...(19): siRNA sense strand
caacuggcgcuaccuguuc

SEQ ID NO: 1674042 - RNA, 19 nt, Homo sapiens
  misc_RNA (1)...(19): siRNA sense strand
agaacuacaucuccaagca

SEQ ID NO: 1674043 - RNA, 19 nt, Homo sapiens
  misc_RNA (1)...(19): siRNA sense strand
ugacgguggcuguguauga

SEQ ID NO: 1674044 - RNA, 19 nt, Homo sapiens
  misc_RNA (1)...(19): siRNA sense strand
agagguacccaucaagaaa

SEQ ID NO: 1674045 - RNA, 19 nt, Homo sapiens
  misc_RNA (1)...(19): siRNA sense strand
gcgcaaagacagccaagca

SEQ ID NO: 1674046 - RNA, 19 nt, Homo sapiens
  misc_RNA (1)...(19): siRNA sense strand
gggacgagaccgaguacaa

SEQ ID NO: 1674047 - RNA, 19 nt, Homo sapiens
  misc_RNA (1)...(19): siRNA sense strand
aagaggagaagaagaagaa

SEQ ID NO: 1674048 - RNA, 19 nt, Homo sapiens
  misc_RNA (1)...(19): siRNA sense strand
ucgacaaccuggagcucua

SEQ ID NO: 1674049 - RNA, 19 nt, Homo sapiens
  misc_RNA (1)...(19): siRNA sense strand
gcacccugcugacaucaac

SEQ ID NO: 1674050 - RNA, 19 nt, Homo sapiens
  misc_RNA (1)...(19): siRNA sense strand
cgacagcagcggacucuca

SEQ ID NO: 1674051 - RNA, 19 nt, Homo sapiens
  misc_RNA (1)...(19): siRNA sense strand
aggcugagcugcauuuacu

SEQ ID NO: 1674052 - RNA, 19 nt, Homo sapiens
  misc_RNA (1)...(19): siRNA sense strand
gagaaggagaagaagaaga

SEQ ID NO: 1674053 - RNA, 19 nt, Homo sapiens
  misc_RNA (1)...(19): siRNA sense strand
gaggagaaggagaagaaga

SEQ ID NO: 1674054 - RNA, 19 nt, Homo sapiens
  misc_RNA (1)...(19): siRNA sense strand
ccagagguacccaucaaga

SEQ ID NO: 1674055 - RNA, 19 nt, Homo sapiens
  misc_RNA (1)...(19): siRNA sense strand
ggccuucggucgcuacaca

SEQ ID NO: 1674056 - RNA, 19 nt, Homo sapiens
  misc_RNA (1)...(19): siRNA sense strand
ucccugauccacaauuaua

SEQ ID NO: 1674057 - RNA, 19 nt, Homo sapiens
  misc_RNA (1)...(19): siRNA sense strand
aagaaggccugaacgacau

SEQ ID NO: 1674058 - RNA, 19 nt, Homo sapiens
  misc_RNA (1)...(19): siRNA sense strand
aaguggaccucccagagaa

SEQ ID NO: 1674059 - RNA, 19 nt, Homo sapiens
  misc_RNA (1)...(19): siRNA sense strand
cucggaagcccaagaagua

SEQ ID NO: 1674060 - RNA, 19 nt, Homo sapiens
  misc_RNA (1)...(19): siRNA sense strand
ucacugggcccucugagau

SEQ ID NO: 1674061 - RNA, 19 nt, Homo sapiens
  misc_RNA (1)...(19): siRNA sense strand
gaaggaggaaguggacaau

SEQ ID NO: 1674062 - RNA, 19 nt, Homo sapiens
  misc_RNA (1)...(19): siRNA sense strand
gacgauccgcccaucauug

SEQ ID NO: 1674063 - RNA, 19 nt, Homo sapiens
  misc_RNA (1)...(19): siRNA sense strand
gacgagaccgaguacaaga

SEQ ID NO: 1674064 - RNA, 19 nt, Homo sapiens
  misc_RNA (1)...(19): siRNA sense strand
ggacgagaccgaguacaag

SEQ ID NO: 1674065 - RNA, 19 nt, Homo sapiens
  misc_RNA (1)...(19): siRNA sense strand
cagagguacccaucaagaa

SEQ ID NO: 1674066 - RNA, 19 nt, Homo sapiens
  misc_RNA (1)...(19): siRNA sense strand
aggccaagguggagcugua

SEQ ID NO: 1674067 - RNA, 19 nt, Homo sapiens
  misc_RNA (1)...(19): siRNA sense strand
gcugagcugcauuuacuga

SEQ ID NO: 1674068 - RNA, 19 nt, Homo sapiens
  misc_RNA (1)...(19): siRNA sense strand
ugaacgacauacaggagau

SEQ ID NO: 1674069 - RNA, 19 nt, Homo sapiens
  misc_RNA (1)...(19): siRNA sense strand
cugcaaagacggcaaagug

SEQ ID NO: 1674070 - RNA, 19 nt, Homo sapiens
  misc_RNA (1)...(19): siRNA sense strand
ccucuggaauugacuugga

SEQ ID NO: 1674071 - RNA, 19 nt, Homo sapiens
  misc_RNA (1)...(19): siRNA sense strand
gacuauggagccagaggua

SEQ ID NO: 1674072 - RNA, 19 nt, Homo sapiens
  misc_RNA (1)...(19): siRNA sense strand
cuucuccgcugacgacuuc

SEQ ID NO: 1674073 - RNA, 19 nt, Homo sapiens
  misc_RNA (1)...(19): siRNA sense strand
cagcauucccgacaucuuc

SEQ ID NO: 1674074 - RNA, 19 nt, Homo sapiens
  misc_RNA (1)...(19): siRNA sense strand
aggaggaaguggacaauac

SEQ ID NO: 1674075 - RNA, 19 nt, Homo sapiens
  misc_RNA (1)...(19): siRNA sense strand
gagcaacuucgacaacaag

SEQ ID NO: 1674076 - RNA, 19 nt, Homo sapiens
  misc_RNA (1)...(19): siRNA sense strand
ccaagaagcaggcguucca

SEQ ID NO: 1674077 - RNA, 19 nt, Homo sapiens
  misc_RNA (1)...(19): siRNA sense strand
ugagaacgaugaguuugag

SEQ ID NO: 1674078 - RNA, 19 nt, Homo sapiens
  misc_RNA (1)...(19): siRNA sense strand
cgccucaaguccugcauga

SEQ ID NO: 1674079 - RNA, 19 nt, Homo sapiens
  misc_RNA (1)...(19): siRNA sense strand
agacugacauccgcgacaa

SEQ ID NO: 1674080 - RNA, 19 nt, Homo sapiens
  misc_RNA (1)...(19): siRNA sense strand
gauugaugagcuuaaggua

SEQ ID NO: 1674081 - RNA, 19 nt, Homo sapiens
  misc_RNA (1)...(19): siRNA sense strand
ugagggagcuggaaaacau

SEQ ID NO: 1674082 - RNA, 19 nt, Homo sapiens
  misc_RNA (1)...(19): siRNA sense strand
ccauugacaccaugaagga

SEQ ID NO: 1674083 - RNA, 19 nt, Homo sapiens
  misc_RNA (1)...(19): siRNA sense strand
gauccgcccaucauuguca

SEQ ID NO: 1674084 - RNA, 19 nt, Homo sapiens
  misc_RNA (1)...(19): siRNA sense strand
guguccaucuucaagcaaa

SEQ ID NO: 1674085 - RNA, 19 nt, Homo sapiens
  misc_RNA (1)...(19): siRNA sense strand
ggaggcugagcugcauuua

SEQ ID NO: 1674086 - RNA, 19 nt, Homo sapiens
  misc_RNA (1)...(19): siRNA sense strand
gggcaaagcugacuucaug

SEQ ID NO: 1674087 - RNA, 19 nt, Homo sapiens
  misc_RNA (1)...(19): siRNA sense strand
gcaaacagcgcaaggaguu

SEQ ID NO: 1674088 - RNA, 19 nt, Homo sapiens
  misc_RNA (1)...(19): siRNA sense strand
uugaugagcuuaagguaua

SEQ ID NO: 1674089 - RNA, 19 nt, Homo sapiens
  misc_RNA (1)...(19): siRNA sense strand
caacaagcgugucgccuau

SEQ ID NO: 1674090 - RNA, 19 nt, Homo sapiens
  misc_RNA (1)...(19): siRNA sense strand
gaauugacuuggaggagaa

SEQ ID NO: 1674091 - RNA, 19 nt, Homo sapiens
  misc_RNA (1)...(19): siRNA sense strand
ccaaagaggagaagaagaa

SEQ ID NO: 1674092 - RNA, 19 nt, Homo sapiens
  misc_RNA (1)...(19): siRNA sense strand
gcaaugagaacgaugaguu

SEQ ID NO: 1674093 - RNA, 19 nt, Homo sapiens
  misc_RNA (1)...(19): siRNA sense strand
caccucagcucgaguacua

SEQ ID NO: 1674094 - RNA, 19 nt, Homo sapiens
  misc_RNA (1)...(19): siRNA sense strand
gaagaagaaacccaagauu

SEQ ID NO: 1674095 - RNA, 19 nt, Homo sapiens
  misc_RNA (1)...(19): siRNA sense strand
acacauggcuacaauaucu

SEQ ID NO: 1674096 - RNA, 19 nt, Homo sapiens
  misc_RNA (1)...(19): siRNA sense strand
acaaguggcucaucaucaa

SEQ ID NO: 1674097 - RNA, 19 nt, Homo sapiens
  misc_RNA (1)...(19): siRNA sense strand
gaaguggaccucccagaga

SEQ ID NO: 1674098 - RNA, 19 nt, Homo sapiens
  misc_RNA (1)...(19): siRNA sense strand
agaagaaacccaagauuga

SEQ ID NO: 1674099 - RNA, 19 nt, Homo sapiens
  misc_RNA (1)...(19): siRNA sense strand
gcacagcauucccgacauc

SEQ ID NO: 1674100 - RNA, 19 nt, Homo sapiens
  misc_RNA (1)...(19): siRNA sense strand
ucaagaaacuggagaccau

SEQ ID NO: 1674101 - RNA, 19 nt, Homo sapiens
  misc_RNA (1)...(19): siRNA sense strand
cagaugagguggucuugga

SEQ ID NO: 1674102 - RNA, 19 nt, Homo sapiens
  misc_RNA (1)...(19): siRNA sense strand
ggagcaacuucgacaacaa

SEQ ID NO: 1674103 - RNA, 19 nt, Homo sapiens
  misc_RNA (1)...(19): siRNA sense strand
ugaaaucuaugaccaggau

SEQ ID NO: 1674104 - RNA, 19 nt, Homo sapiens
  misc_RNA (1)...(19): siRNA sense strand
gcugcacacuuucaacuug

SEQ ID NO: 1674105 - RNA, 19 nt, Homo sapiens
  misc_RNA (1)...(19): siRNA sense strand
gaagaaacccaagauugau

SEQ ID NO: 1674106 - RNA, 19 nt, Homo sapiens
  misc_RNA (1)...(19): siRNA sense strand
ccaaggaccugcucuucuc

SEQ ID NO: 1674107 - RNA, 19 nt, Homo sapiens
  misc_RNA (1)...(19): siRNA sense strand
ggacgacgacuucuucaca

SEQ ID NO: 1674108 - RNA, 19 nt, Homo sapiens
  misc_RNA (1)...(19): siRNA sense strand
caaguacuuugccuccauu

SEQ ID NO: 1674109 - RNA, 19 nt, Homo sapiens
  misc_RNA (1)...(19): siRNA sense strand
agaagaagaagaagaagaa

SEQ ID NO: 1674110 - RNA, 19 nt, Homo sapiens
  misc_RNA (1)...(19): siRNA sense strand
gauccacaauuauaagaag

SEQ ID NO: 1674111 - RNA, 19 nt, Homo sapiens
  misc_RNA (1)...(19): siRNA sense strand
ggaaguccuuugacaucga

SEQ ID NO: 1674112 - RNA, 19 nt, Homo sapiens
  misc_RNA (1)...(19): siRNA sense strand
ccacacauggcuacaauau

SEQ ID NO: 1674113 - RNA, 19 nt, Homo sapiens
  misc_RNA (1)...(19): siRNA sense strand
gagaagaagaagaagaaga

SEQ ID NO: 1674114 - RNA, 19 nt, Homo sapiens
  misc_RNA (1)...(19): siRNA sense strand
ucaacacccucgucaagug

SEQ ID NO: 1674115 - RNA, 19 nt, Homo sapiens
  misc_RNA (1)...(19): siRNA sense strand
ggaggacgacgacuucuuc

SEQ ID NO: 1674116 - RNA, 19 nt, Homo sapiens
  misc_RNA (1)...(19): siRNA sense strand
agaaggagaagaagaagaa

SEQ ID NO: 1674117 - RNA, 19 nt, Homo sapiens
  misc_RNA (1)...(19): siRNA sense strand
gcaaugaccccaucaaugu

SEQ ID NO: 1674118 - RNA, 19 nt, Homo sapiens
  misc_RNA (1)...(19): siRNA sense strand
caaugagaacgaugaguuu

SEQ ID NO: 1674119 - RNA, 19 nt, Homo sapiens
  misc_RNA (1)...(19): siRNA sense strand
ccaucgagcuggaccugaa

SEQ ID NO: 1674120 - RNA, 19 nt, Homo sapiens
  misc_RNA (1)...(19): siRNA sense strand
caagaaggaguccauguuc

SEQ ID NO: 1674121 - RNA, 19 nt, Homo sapiens
  misc_RNA (1)...(19): siRNA sense strand
ccaagaaggaguccauguu

SEQ ID NO: 1674122 - RNA, 19 nt, Homo sapiens
  misc_RNA (1)...(19): siRNA sense strand
gcccaucauugucauugaa

SEQ ID NO: 1674123 - RNA, 19 nt, Homo sapiens
  misc_RNA (1)...(19): siRNA sense strand
aggacuggcugcacacuuu

SEQ ID NO: 1674124 - RNA, 19 nt, Homo sapiens
  misc_RNA (1)...(19): siRNA sense strand
aagaagaaacccaagauug

SEQ ID NO: 1674125 - RNA, 19 nt, Homo sapiens
  misc_RNA (1)...(19): siRNA sense strand
gagaagaagaaacccaaga

SEQ ID NO: 1674126 - RNA, 19 nt, Homo sapiens
  misc_RNA (1)...(19): siRNA sense strand
cgucccugauccacaauua

SEQ ID NO: 1674127 - RNA, 19 nt, Homo sapiens
  misc_RNA (1)...(19): siRNA sense strand
gcagcucaacccugucuuu

SEQ ID NO: 1674128 - RNA, 19 nt, Homo sapiens
  misc_RNA (1)...(19): siRNA sense strand
ggacgauccgcccaucauu

SEQ ID NO: 1674129 - RNA, 19 nt, Homo sapiens
  misc_RNA (1)...(19): siRNA sense strand
acacagacguccacuacca

SEQ ID NO: 1674130 - RNA, 19 nt, Homo sapiens
  misc_RNA (1)...(19): siRNA sense strand
ggagaaguccagugacauc

SEQ ID NO: 1674131 - RNA, 19 nt, Homo sapiens
  misc_RNA (1)...(19): siRNA sense strand
gaguggaggugcuguucug

SEQ ID NO: 1674132 - RNA, 19 nt, Homo sapiens
  misc_RNA (1)...(19): siRNA sense strand
ggacgccucuggacaucuc

SEQ ID NO: 1674133 - RNA, 19 nt, Homo sapiens
  misc_RNA (1)...(19): siRNA sense strand
gccagaacuuccugcagaa

SEQ ID NO: 1674134 - RNA, 19 nt, Homo sapiens
  misc_RNA (1)...(19): siRNA sense strand
caagauugaugagcuuaag

SEQ ID NO: 1674135 - RNA, 19 nt, Homo sapiens
  misc_RNA (1)...(19): siRNA sense strand
gggagguuguggugacuau

SEQ ID NO: 1674136 - RNA, 19 nt, Homo sapiens
  misc_RNA (1)...(19): siRNA sense strand
gagcuggaguccgaguuug

SEQ ID NO: 1674137 - RNA, 19 nt, Homo sapiens
  misc_RNA (1)...(19): siRNA sense strand
ggacagugcaggccaaggu

SEQ ID NO: 1674138 - RNA, 19 nt, Homo sapiens
  misc_RNA (1)...(19): siRNA sense strand
cagaggaggcagagaagaa

SEQ ID NO: 1674139 - RNA, 19 nt, Homo sapiens
  misc_RNA (1)...(19): siRNA sense strand
cagcagaggaggcagagaa

SEQ ID NO: 1674140 - RNA, 19 nt, Homo sapiens
  misc_RNA (1)...(19): siRNA sense strand
ccaaguacuuugccuccau

SEQ ID NO: 1674141 - RNA, 19 nt, Homo sapiens
  misc_RNA (1)...(19): siRNA sense strand
caaugaagggcaaggagaa

SEQ ID NO: 1674142 - RNA, 19 nt, Homo sapiens
  misc_RNA (1)...(19): siRNA sense strand
caacuggcgcuaccuguuc

SEQ ID NO: 1674143 - RNA, 19 nt, Homo sapiens
  misc_RNA (1)...(19): siRNA sense strand
agaacuacaucuccaagca

SEQ ID NO: 1674144 - RNA, 19 nt, Homo sapiens
  misc_RNA (1)...(19): siRNA sense strand
ugacgguggcuguguauga

SEQ ID NO: 1674145 - RNA, 19 nt, Homo sapiens
  misc_RNA (1)...(19): siRNA sense strand
agagguacccaucaagaaa

SEQ ID NO: 1674146 - RNA, 19 nt, Homo sapiens
  misc_RNA (1)...(19): siRNA sense strand
gcgcaaagacagccaagca

SEQ ID NO: 1674147 - RNA, 19 nt, Homo sapiens
  misc_RNA (1)...(19): siRNA sense strand
gggacgagaccgaguacaa

SEQ ID NO: 1674148 - RNA, 19 nt, Homo sapiens
  misc_RNA (1)...(19): siRNA sense strand
aagaggagaagaagaagaa

SEQ ID NO: 1674149 - RNA, 19 nt, Homo sapiens
  misc_RNA (1)...(19): siRNA sense strand
ucgacaaccuggagcucua

SEQ ID NO: 1674150 - RNA, 19 nt, Homo sapiens
  misc_RNA (1)...(19): siRNA sense strand
gcacccugcugacaucaac

SEQ ID NO: 1674151 - RNA, 19 nt, Homo sapiens
  misc_RNA (1)...(19): siRNA sense strand
cgacagcagcggacucuca

SEQ ID NO: 1674152 - RNA, 19 nt, Homo sapiens
  misc_RNA (1)...(19): siRNA sense strand
aggcugagcugcauuuacu

SEQ ID NO: 1674153 - RNA, 19 nt, Homo sapiens
  misc_RNA (1)...(19): siRNA sense strand
gagaaggagaagaagaaga

SEQ ID NO: 1674154 - RNA, 19 nt, Homo sapiens
  misc_RNA (1)...(19): siRNA sense strand
gaggagaaggagaagaaga

SEQ ID NO: 1674155 - RNA, 19 nt, Homo sapiens
  misc_RNA (1)...(19): siRNA sense strand
ccagagguacccaucaaga

SEQ ID NO: 1674156 - RNA, 19 nt, Homo sapiens
  misc_RNA (1)...(19): siRNA sense strand
ggccuucggucgcuacaca

SEQ ID NO: 1674157 - RNA, 19 nt, Homo sapiens
  misc_RNA (1)...(19): siRNA sense strand
ucccugauccacaauuaua

SEQ ID NO: 1674158 - RNA, 19 nt, Homo sapiens
  misc_RNA (1)...(19): siRNA sense strand
aaguggaccucccagagaa

SEQ ID NO: 1674159 - RNA, 19 nt, Homo sapiens
  misc_RNA (1)...(19): siRNA sense strand
guacaaguggcucaucauc

SEQ ID NO: 1674160 - RNA, 19 nt, Homo sapiens
  misc_RNA (1)...(19): siRNA sense strand
cucggaagcccaagaagua

SEQ ID NO: 1674161 - RNA, 19 nt, Homo sapiens
  misc_RNA (1)...(19): siRNA sense strand
ucacugggcccucugagau

SEQ ID NO: 1674162 - RNA, 19 nt, Homo sapiens
  misc_RNA (1)...(19): siRNA sense strand
gaaggaggaaguggacaau

SEQ ID NO: 1674163 - RNA, 19 nt, Homo sapiens
  misc_RNA (1)...(19): siRNA sense strand
gacgauccgcccaucauug

SEQ ID NO: 1674164 - RNA, 19 nt, Homo sapiens
  misc_RNA (1)...(19): siRNA sense strand
gacgagaccgaguacaaga

SEQ ID NO: 1674165 - RNA, 19 nt, Homo sapiens
  misc_RNA (1)...(19): siRNA sense strand
ggacgagaccgaguacaag

SEQ ID NO: 1674166 - RNA, 19 nt, Homo sapiens
  misc_RNA (1)...(19): siRNA sense strand
cagagguacccaucaagaa

SEQ ID NO: 1674167 - RNA, 19 nt, Homo sapiens
  misc_RNA (1)...(19): siRNA sense strand
aggccaagguggagcugua

SEQ ID NO: 1674168 - RNA, 19 nt, Homo sapiens
  misc_RNA (1)...(19): siRNA sense strand
gcugagcugcauuuacuga

SEQ ID NO: 1674169 - RNA, 19 nt, Homo sapiens
  misc_RNA (1)...(19): siRNA sense strand
cugcaaagacggcaaagug

SEQ ID NO: 1674170 - RNA, 19 nt, Homo sapiens
  misc_RNA (1)...(19): siRNA sense strand
ccucuggaauugacuugga

SEQ ID NO: 1674171 - RNA, 19 nt, Homo sapiens
  misc_RNA (1)...(19): siRNA sense strand
gacuauggagccagaggua

SEQ ID NO: 1674172 - RNA, 19 nt, Homo sapiens
  misc_RNA (1)...(19): siRNA sense strand
cuucuccgcugacgacuuc

SEQ ID NO: 1674173 - RNA, 19 nt, Homo sapiens
  misc_RNA (1)...(19): siRNA sense strand
cagcauucccgacaucuuc

SEQ ID NO: 1674174 - RNA, 19 nt, Homo sapiens
  misc_RNA (1)...(19): siRNA sense strand
aggaggaaguggacaauac

SEQ ID NO: 1674175 - RNA, 19 nt, Homo sapiens
  misc_RNA (1)...(19): siRNA sense strand
gagcaacuucgacaacaag

SEQ ID NO: 1674176 - RNA, 19 nt, Homo sapiens
  misc_RNA (1)...(19): siRNA sense strand
gauccgcccaucauuguca

SEQ ID NO: 1674177 - RNA, 19 nt, Homo sapiens
  misc_RNA (1)...(19): siRNA sense strand
ugagaacgaugaguuugag

SEQ ID NO: 1674178 - RNA, 19 nt, Homo sapiens
  misc_RNA (1)...(19): siRNA sense strand
ccaagaagcaggcguucca

SEQ ID NO: 1674179 - RNA, 19 nt, Homo sapiens
  misc_RNA (1)...(19): siRNA sense strand
agacugacauccgcgacaa

SEQ ID NO: 1674180 - RNA, 19 nt, Homo sapiens
  misc_RNA (1)...(19): siRNA sense strand
ugagggagcuggaaaacau

SEQ ID NO: 1674181 - RNA, 19 nt, Homo sapiens
  misc_RNA (1)...(19): siRNA sense strand
gauugaugagcuuaaggua

SEQ ID NO: 1674182 - RNA, 19 nt, Homo sapiens
  misc_RNA (1)...(19): siRNA sense strand
cgccucaaguccugcauga

SEQ ID NO: 1674183 - RNA, 19 nt, Homo sapiens
  misc_RNA (1)...(19): siRNA sense strand
ccauugacaccaugaagga

SEQ ID NO: 1674184 - RNA, 19 nt, Homo sapiens
  misc_RNA (1)...(19): siRNA sense strand
guguccaucuucaagcaaa

SEQ ID NO: 1674185 - RNA, 19 nt, Homo sapiens
  misc_RNA (1)...(19): siRNA sense strand
ggaggcugagcugcauuua

SEQ ID NO: 1674186 - RNA, 19 nt, Homo sapiens
  misc_RNA (1)...(19): siRNA sense strand
gcgauaugcucuucuguua

SEQ ID NO: 1674187 - RNA, 19 nt, Homo sapiens
  misc_RNA (1)...(19): siRNA sense strand
gauaugcucuucuguuaga

SEQ ID NO: 1674188 - RNA, 19 nt, Homo sapiens
  misc_RNA (1)...(19): siRNA sense strand
cagaagaaauucacaggaa

SEQ ID NO: 1674189 - RNA, 19 nt, Homo sapiens
  misc_RNA (1)...(19): siRNA sense strand
caaagucauugcugcgaua

SEQ ID NO: 1674190 - RNA, 19 nt, Homo sapiens
  misc_RNA (1)...(19): siRNA sense strand
gcuugaaacugcagaagaa

SEQ ID NO: 1674191 - RNA, 19 nt, Homo sapiens
  misc_RNA (1)...(19): siRNA sense strand
uugcaaagcuucagucaga

SEQ ID NO: 1674192 - RNA, 19 nt, Homo sapiens
  misc_RNA (1)...(19): siRNA sense strand
gaacguugaaccaaauauu

SEQ ID NO: 1674193 - RNA, 19 nt, Homo sapiens
  misc_RNA (1)...(19): siRNA sense strand
ucaacacugucgcuaauga

SEQ ID NO: 1674194 - RNA, 19 nt, Homo sapiens
  misc_RNA (1)...(19): siRNA sense strand
aaagaacguugaaccaaau

SEQ ID NO: 1674195 - RNA, 19 nt, Homo sapiens
  misc_RNA (1)...(19): siRNA sense strand
caaauucaaggcuacgaua

SEQ ID NO: 1674196 - RNA, 19 nt, Homo sapiens
  misc_RNA (1)...(19): siRNA sense strand
cagaggaugugcagguuga

SEQ ID NO: 1674197 - RNA, 19 nt, Homo sapiens
  misc_RNA (1)...(19): siRNA sense strand
agaagaaauucacaggaaa

SEQ ID NO: 1674198 - RNA, 19 nt, Homo sapiens
  misc_RNA (1)...(19): siRNA sense strand
gacgugaaccaguaucuuu

SEQ ID NO: 1674199 - RNA, 19 nt, Homo sapiens
  misc_RNA (1)...(19): siRNA sense strand
cuacaaaucccuuaccaau

SEQ ID NO: 1674200 - RNA, 19 nt, Homo sapiens
  misc_RNA (1)...(19): siRNA sense strand
uagcuuugauggcagcaua

SEQ ID NO: 1674201 - RNA, 19 nt, Homo sapiens
  misc_RNA (1)...(19): siRNA sense strand
gcucuucuguuagacauug

SEQ ID NO: 1674202 - RNA, 19 nt, Homo sapiens
  misc_RNA (1)...(19): siRNA sense strand
cacugucgcuaaugaagua

SEQ ID NO: 1674203 - RNA, 19 nt, Homo sapiens
  misc_RNA (1)...(19): siRNA sense strand
ugaaacugcagaagaaauu

SEQ ID NO: 1674204 - RNA, 19 nt, Homo sapiens
  misc_RNA (1)...(19): siRNA sense strand
gcugagagaaagcuguaua

SEQ ID NO: 1674205 - RNA, 19 nt, Homo sapiens
  misc_RNA (1)...(19): siRNA sense strand
gaagauaacagugaaacag

SEQ ID NO: 1674206 - RNA, 19 nt, Homo sapiens
  misc_RNA (1)...(19): siRNA sense strand
auucaaggcuacgauauuu

SEQ ID NO: 1674207 - RNA, 19 nt, Homo sapiens
  misc_RNA (1)...(19): siRNA sense strand
gauauuucacuccuaaaga

SEQ ID NO: 1674208 - RNA, 19 nt, Homo sapiens
  misc_RNA (1)...(19): siRNA sense strand
auagugaucucucugugaa

SEQ ID NO: 1674209 - RNA, 19 nt, Homo sapiens
  misc_RNA (1)...(19): siRNA sense strand
caacgugcauguaguagcu

SEQ ID NO: 1674210 - RNA, 19 nt, Homo sapiens
  misc_RNA (1)...(19): siRNA sense strand
agaaauagcaaaucuccuu

SEQ ID NO: 1674211 - RNA, 19 nt, Homo sapiens
  misc_RNA (1)...(19): siRNA sense strand
gauagugaucucucuguga

SEQ ID NO: 1674212 - RNA, 19 nt, Homo sapiens
  misc_RNA (1)...(19): siRNA sense strand
caagaagaacagauaacaa

SEQ ID NO: 1674213 - RNA, 19 nt, Homo sapiens
  misc_RNA (1)...(19): siRNA sense strand
gaagguccgugugcuuuac

SEQ ID NO: 1674214 - RNA, 19 nt, Homo sapiens
  misc_RNA (1)...(19): siRNA sense strand
cggauuuccugagaagaua

SEQ ID NO: 1674215 - RNA, 19 nt, Homo sapiens
  misc_RNA (1)...(19): siRNA sense strand
gaguucggauuuccugaga

SEQ ID NO: 1674216 - RNA, 19 nt, Homo sapiens
  misc_RNA (1)...(19): siRNA sense strand
ucacaagaagaacagauaa

SEQ ID NO: 1674217 - RNA, 19 nt, Homo sapiens
  misc_RNA (1)...(19): siRNA sense strand
ucagagccauuacccuuuc

SEQ ID NO: 1674218 - RNA, 19 nt, Homo sapiens
  misc_RNA (1)...(19): siRNA sense strand
ugucaacacugucgcuaau

SEQ ID NO: 1674219 - RNA, 19 nt, Homo sapiens
  misc_RNA (1)...(19): siRNA sense strand
aaaagaacguugaaccaaa

SEQ ID NO: 1674220 - RNA, 19 nt, Homo sapiens
  misc_RNA (1)...(19): siRNA sense strand
gguugagaauaucuacaaa

SEQ ID NO: 1674221 - RNA, 19 nt, Homo sapiens
  misc_RNA (1)...(19): siRNA sense strand
guucagcccacuuguagaa

SEQ ID NO: 1674222 - RNA, 19 nt, Homo sapiens
  misc_RNA (1)...(19): siRNA sense strand
gaagaacagauaacaaagc

SEQ ID NO: 1674223 - RNA, 19 nt, Homo sapiens
  misc_RNA (1)...(19): siRNA sense strand
cuguauaccugcacaagug

SEQ ID NO: 1674224 - RNA, 19 nt, Homo sapiens
  misc_RNA (1)...(19): siRNA sense strand
gcauacaguguucuggaaa

SEQ ID NO: 1674225 - RNA, 19 nt, Homo sapiens
  misc_RNA (1)...(19): siRNA sense strand
gauggcagcauacaguguu

SEQ ID NO: 1674226 - RNA, 19 nt, Homo sapiens
  misc_RNA (1)...(19): siRNA sense strand
gaaaagaacguugaaccaa

SEQ ID NO: 1674227 - RNA, 19 nt, Homo sapiens
  misc_RNA (1)...(19): siRNA sense strand
guuaucgccuacuuggaaa

SEQ ID NO: 1674228 - RNA, 19 nt, Homo sapiens
  misc_RNA (1)...(19): siRNA sense strand
gaagaaauucacaggaaaa

SEQ ID NO: 1674229 - RNA, 19 nt, Homo sapiens
  misc_RNA (1)...(19): siRNA sense strand
aauaugcaauggauguaga

SEQ ID NO: 1674230 - RNA, 19 nt, Homo sapiens
  misc_RNA (1)...(19): siRNA sense strand
cugagaagauaacagugaa

SEQ ID NO: 1674231 - RNA, 19 nt, Homo sapiens
  misc_RNA (1)...(19): siRNA sense strand
ugcgauauuucacuccuaa

SEQ ID NO: 1674232 - RNA, 19 nt, Homo sapiens
  misc_RNA (1)...(19): siRNA sense strand
gucacaagaagaacagaua

SEQ ID NO: 1674233 - RNA, 19 nt, Homo sapiens
  misc_RNA (1)...(19): siRNA sense strand
gcgcugagagaaagcugua

SEQ ID NO: 1674234 - RNA, 19 nt, Homo sapiens
  misc_RNA (1)...(19): siRNA sense strand
gaaucuguacauccacaaa

SEQ ID NO: 1674235 - RNA, 19 nt, Homo sapiens
  misc_RNA (1)...(19): siRNA sense strand
caacacugucgcuaaugaa

SEQ ID NO: 1674236 - RNA, 19 nt, Homo sapiens
  misc_RNA (1)...(19): siRNA sense strand
gcuaaugaaguauacaagu

SEQ ID NO: 1674237 - RNA, 19 nt, Homo sapiens
  misc_RNA (1)...(19): siRNA sense strand
guucggauuuccugagaag

SEQ ID NO: 1674238 - RNA, 19 nt, Homo sapiens
  misc_RNA (1)...(19): siRNA sense strand
aauagcaaaucuccuugga

SEQ ID NO: 1674239 - RNA, 19 nt, Homo sapiens
  misc_RNA (1)...(19): siRNA sense strand
guuacagacugcagaggau

SEQ ID NO: 1674240 - RNA, 19 nt, Homo sapiens
  misc_RNA (1)...(19): siRNA sense strand
gcaccacgcgcugagagaa

SEQ ID NO: 1674241 - RNA, 19 nt, Homo sapiens
  misc_RNA (1)...(19): siRNA sense strand
ucucaacgugcauguagua

SEQ ID NO: 1674242 - RNA, 19 nt, Homo sapiens
  misc_RNA (1)...(19): siRNA sense strand
uacaaaucccuuaccaauu

SEQ ID NO: 1674243 - RNA, 19 nt, Homo sapiens
  misc_RNA (1)...(19): siRNA sense strand
gaugugcagguugagaaua

SEQ ID NO: 1674244 - RNA, 19 nt, Homo sapiens
  misc_RNA (1)...(19): siRNA sense strand
agaagguccgugugcuuua

SEQ ID NO: 1674245 - RNA, 19 nt, Homo sapiens
  misc_RNA (1)...(19): siRNA sense strand
uagaagguccgugugcuuu

SEQ ID NO: 1674246 - RNA, 19 nt, Homo sapiens
  misc_RNA (1)...(19): siRNA sense strand
guagaagguccgugugcuu

SEQ ID NO: 1674247 - RNA, 19 nt, Homo sapiens
  misc_RNA (1)...(19): siRNA sense strand
ccugagaagauaacaguga

SEQ ID NO: 1674248 - RNA, 19 nt, Homo sapiens
  misc_RNA (1)...(19): siRNA sense strand
gaaacugcagaagaaauuc

SEQ ID NO: 1674249 - RNA, 19 nt, Homo sapiens
  misc_RNA (1)...(19): siRNA sense strand
cguuaucgccuacuuggaa

SEQ ID NO: 1674250 - RNA, 19 nt, Homo sapiens
  misc_RNA (1)...(19): siRNA sense strand
aagaacagauaacaaagcu

SEQ ID NO: 1674251 - RNA, 19 nt, Homo sapiens
  misc_RNA (1)...(19): siRNA sense strand
gaaccaguaucuuuuacca

SEQ ID NO: 1674252 - RNA, 19 nt, Homo sapiens
  misc_RNA (1)...(19): siRNA sense strand
gagagaaagcuguauaccu

SEQ ID NO: 1674253 - RNA, 19 nt, Homo sapiens
  misc_RNA (1)...(19): siRNA sense strand
gcugcgauaugcucuucug

SEQ ID NO: 1674254 - RNA, 19 nt, Homo sapiens
  misc_RNA (1)...(19): siRNA sense strand
aggcuacgauauuuucuua

SEQ ID NO: 1674255 - RNA, 19 nt, Homo sapiens
  misc_RNA (1)...(19): siRNA sense strand
ggauuuccugagaagauaa

SEQ ID NO: 1674256 - RNA, 19 nt, Homo sapiens
  misc_RNA (1)...(19): siRNA sense strand
acaagaagaacagauaaca

SEQ ID NO: 1674257 - RNA, 19 nt, Homo sapiens
  misc_RNA (1)...(19): siRNA sense strand
ccucuugauacaaacaaua

SEQ ID NO: 1674258 - RNA, 19 nt, Homo sapiens
  misc_RNA (1)...(19): siRNA sense strand
gagaagauaacagugaaac

SEQ ID NO: 1674259 - RNA, 19 nt, Homo sapiens
  misc_RNA (1)...(19): siRNA sense strand
ugcgggugcuggagcuaua

SEQ ID NO: 1674260 - RNA, 19 nt, Homo sapiens
  misc_RNA (1)...(19): siRNA sense strand
uaucgccuacuuggaaaua

SEQ ID NO: 1674261 - RNA, 19 nt, Homo sapiens
  misc_RNA (1)...(19): siRNA sense strand
ccucacacacaguuacuug

SEQ ID NO: 1674262 - RNA, 19 nt, Homo sapiens
  misc_RNA (1)...(19): siRNA sense strand
aauugaaucuguacaucca

SEQ ID NO: 1674263 - RNA, 19 nt, Homo sapiens
  misc_RNA (1)...(19): siRNA sense strand
cuuaaacugcgauauuuca

SEQ ID NO: 1674264 - RNA, 19 nt, Homo sapiens
  misc_RNA (1)...(19): siRNA sense strand
gcaauggauguagaaaaua

SEQ ID NO: 1674265 - RNA, 19 nt, Homo sapiens
  misc_RNA (1)...(19): siRNA sense strand
gucagagccauuacccuuu

SEQ ID NO: 1674266 - RNA, 19 nt, Homo sapiens
  misc_RNA (1)...(19): siRNA sense strand
caaccucucuuggcauucc

SEQ ID NO: 1674267 - RNA, 19 nt, Homo sapiens
  misc_RNA (1)...(19): siRNA sense strand
ggaugugcagguugagaau

SEQ ID NO: 1674268 - RNA, 19 nt, Homo sapiens
  misc_RNA (1)...(19): siRNA sense strand
aagaugacacugacgugaa

SEQ ID NO: 1674269 - RNA, 19 nt, Homo sapiens
  misc_RNA (1)...(19): siRNA sense strand
cuacuuggaaauagucuca

SEQ ID NO: 1674270 - RNA, 19 nt, Homo sapiens
  misc_RNA (1)...(19): siRNA sense strand
aaacugcagaagaaauuca

SEQ ID NO: 1674271 - RNA, 19 nt, Homo sapiens
  misc_RNA (1)...(19): siRNA sense strand
augugcagguugagaauau

SEQ ID NO: 1674272 - RNA, 19 nt, Homo sapiens
  misc_RNA (1)...(19): siRNA sense strand
ccaaaggauauggaagcua

SEQ ID NO: 1674273 - RNA, 19 nt, Homo sapiens
  misc_RNA (1)...(19): siRNA sense strand
gcgauaugcucuucuguua

SEQ ID NO: 1674274 - RNA, 19 nt, Homo sapiens
  misc_RNA (1)...(19): siRNA sense strand
gauaugcucuucuguuaga

SEQ ID NO: 1674275 - RNA, 19 nt, Homo sapiens
  misc_RNA (1)...(19): siRNA sense strand
cagaagaaauucacaggaa

SEQ ID NO: 1674276 - RNA, 19 nt, Homo sapiens
  misc_RNA (1)...(19): siRNA sense strand
caaagucauugcugcgaua

SEQ ID NO: 1674277 - RNA, 19 nt, Homo sapiens
  misc_RNA (1)...(19): siRNA sense strand
gcuugaaacugcagaagaa

SEQ ID NO: 1674278 - RNA, 19 nt, Homo sapiens
  misc_RNA (1)...(19): siRNA sense strand
uugcaaagcuucagucaga

SEQ ID NO: 1674279 - RNA, 19 nt, Homo sapiens
  misc_RNA (1)...(19): siRNA sense strand
gaacguugaaccaaauauu

SEQ ID NO: 1674280 - RNA, 19 nt, Homo sapiens
  misc_RNA (1)...(19): siRNA sense strand
ucaacacugucgcuaauga

SEQ ID NO: 1674281 - RNA, 19 nt, Homo sapiens
  misc_RNA (1)...(19): siRNA sense strand
aaagaacguugaaccaaau

SEQ ID NO: 1674282 - RNA, 19 nt, Homo sapiens
  misc_RNA (1)...(19): siRNA sense strand
caaauucaaggcuacgaua

SEQ ID NO: 1674283 - RNA, 19 nt, Homo sapiens
  misc_RNA (1)...(19): siRNA sense strand
cagaggaugugcagguuga

SEQ ID NO: 1674284 - RNA, 19 nt, Homo sapiens
  misc_RNA (1)...(19): siRNA sense strand
agaagaaauucacaggaaa

SEQ ID NO: 1674285 - RNA, 19 nt, Homo sapiens
  misc_RNA (1)...(19): siRNA sense strand
gacgugaaccaguaucuuu

SEQ ID NO: 1674286 - RNA, 19 nt, Homo sapiens
  misc_RNA (1)...(19): siRNA sense strand
cuacaaaucccuuaccaau

SEQ ID NO: 1674287 - RNA, 19 nt, Homo sapiens
  misc_RNA (1)...(19): siRNA sense strand
uagcuuugauggcagcaua

SEQ ID NO: 1674288 - RNA, 19 nt, Homo sapiens
  misc_RNA (1)...(19): siRNA sense strand
gcucuucuguuagacauug

SEQ ID NO: 1674289 - RNA, 19 nt, Homo sapiens
  misc_RNA (1)...(19): siRNA sense strand
cacugucgcuaaugaagua

SEQ ID NO: 1674290 - RNA, 19 nt, Homo sapiens
  misc_RNA (1)...(19): siRNA sense strand
ugaaacugcagaagaaauu

SEQ ID NO: 1674291 - RNA, 19 nt, Homo sapiens
  misc_RNA (1)...(19): siRNA sense strand
gcugagagaaagcuguaua

SEQ ID NO: 1674292 - RNA, 19 nt, Homo sapiens
  misc_RNA (1)...(19): siRNA sense strand
gaagauaacagugaaacag

SEQ ID NO: 1674293 - RNA, 19 nt, Homo sapiens
  misc_RNA (1)...(19): siRNA sense strand
auucaaggcuacgauauuu

SEQ ID NO: 1674294 - RNA, 19 nt, Homo sapiens
  misc_RNA (1)...(19): siRNA sense strand
gauauuucacuccuaaaga

SEQ ID NO: 1674295 - RNA, 19 nt, Homo sapiens
  misc_RNA (1)...(19): siRNA sense strand
auagugaucucucugugaa

SEQ ID NO: 1674296 - RNA, 19 nt, Homo sapiens
  misc_RNA (1)...(19): siRNA sense strand
caacgugcauguaguagcu

SEQ ID NO: 1674297 - RNA, 19 nt, Homo sapiens
  misc_RNA (1)...(19): siRNA sense strand
agaaauagcaaaucuccuu

SEQ ID NO: 1674298 - RNA, 19 nt, Homo sapiens
  misc_RNA (1)...(19): siRNA sense strand
gauagugaucucucuguga

SEQ ID NO: 1674299 - RNA, 19 nt, Homo sapiens
  misc_RNA (1)...(19): siRNA sense strand
caagaagaacagauaacaa

SEQ ID NO: 1674300 - RNA, 19 nt, Homo sapiens
  misc_RNA (1)...(19): siRNA sense strand
gaagguccgugugcuuuac

SEQ ID NO: 1674301 - RNA, 19 nt, Homo sapiens
  misc_RNA (1)...(19): siRNA sense strand
cggauuuccugagaagaua

SEQ ID NO: 1674302 - RNA, 19 nt, Homo sapiens
  misc_RNA (1)...(19): siRNA sense strand
gaguucggauuuccugaga

SEQ ID NO: 1674303 - RNA, 19 nt, Homo sapiens
  misc_RNA (1)...(19): siRNA sense strand
ucacaagaagaacagauaa

SEQ ID NO: 1674304 - RNA, 19 nt, Homo sapiens
  misc_RNA (1)...(19): siRNA sense strand
ucagagccauuacccuuuc

SEQ ID NO: 1674305 - RNA, 19 nt, Homo sapiens
  misc_RNA (1)...(19): siRNA sense strand
ugucaacacugucgcuaau

SEQ ID NO: 1674306 - RNA, 19 nt, Homo sapiens
  misc_RNA (1)...(19): siRNA sense strand
aaaagaacguugaaccaaa

SEQ ID NO: 1674307 - RNA, 19 nt, Homo sapiens
  misc_RNA (1)...(19): siRNA sense strand
gguugagaauaucuacaaa

SEQ ID NO: 1674308 - RNA, 19 nt, Homo sapiens
  misc_RNA (1)...(19): siRNA sense strand
guucagcccacuuguagaa

SEQ ID NO: 1674309 - RNA, 19 nt, Homo sapiens
  misc_RNA (1)...(19): siRNA sense strand
gaagaacagauaacaaagc

SEQ ID NO: 1674310 - RNA, 19 nt, Homo sapiens
  misc_RNA (1)...(19): siRNA sense strand
cuguauaccugcacaagug

SEQ ID NO: 1674311 - RNA, 19 nt, Homo sapiens
  misc_RNA (1)...(19): siRNA sense strand
gcauacaguguucuggaaa

SEQ ID NO: 1674312 - RNA, 19 nt, Homo sapiens
  misc_RNA (1)...(19): siRNA sense strand
gauggcagcauacaguguu

SEQ ID NO: 1674313 - RNA, 19 nt, Homo sapiens
  misc_RNA (1)...(19): siRNA sense strand
gaaaagaacguugaaccaa

SEQ ID NO: 1674314 - RNA, 19 nt, Homo sapiens
  misc_RNA (1)...(19): siRNA sense strand
guuaucgccuacuuggaaa

SEQ ID NO: 1674315 - RNA, 19 nt, Homo sapiens
  misc_RNA (1)...(19): siRNA sense strand
gaagaaauucacaggaaaa

SEQ ID NO: 1674316 - RNA, 19 nt, Homo sapiens
  misc_RNA (1)...(19): siRNA sense strand
aauaugcaauggauguaga

SEQ ID NO: 1674317 - RNA, 19 nt, Homo sapiens
  misc_RNA (1)...(19): siRNA sense strand
cugagaagauaacagugaa

SEQ ID NO: 1674318 - RNA, 19 nt, Homo sapiens
  misc_RNA (1)...(19): siRNA sense strand
ugcgauauuucacuccuaa

SEQ ID NO: 1674319 - RNA, 19 nt, Homo sapiens
  misc_RNA (1)...(19): siRNA sense strand
gucacaagaagaacagaua

SEQ ID NO: 1674320 - RNA, 19 nt, Homo sapiens
  misc_RNA (1)...(19): siRNA sense strand
gcgcugagagaaagcugua

SEQ ID NO: 1674321 - RNA, 19 nt, Homo sapiens
  misc_RNA (1)...(19): siRNA sense strand
gaaucuguacauccacaaa

SEQ ID NO: 1674322 - RNA, 19 nt, Homo sapiens
  misc_RNA (1)...(19): siRNA sense strand
caacacugucgcuaaugaa

SEQ ID NO: 1674323 - RNA, 19 nt, Homo sapiens
  misc_RNA (1)...(19): siRNA sense strand
gcuaaugaaguauacaagu

SEQ ID NO: 1674324 - RNA, 19 nt, Homo sapiens
  misc_RNA (1)...(19): siRNA sense strand
guucggauuuccugagaag

SEQ ID NO: 1674325 - RNA, 19 nt, Homo sapiens
  misc_RNA (1)...(19): siRNA sense strand
aauagcaaaucuccuugga

SEQ ID NO: 1674326 - RNA, 19 nt, Homo sapiens
  misc_RNA (1)...(19): siRNA sense strand
guuacagacugcagaggau

SEQ ID NO: 1674327 - RNA, 19 nt, Homo sapiens
  misc_RNA (1)...(19): siRNA sense strand
gcaccacgcgcugagagaa

SEQ ID NO: 1674328 - RNA, 19 nt, Homo sapiens
  misc_RNA (1)...(19): siRNA sense strand
ucucaacgugcauguagua

SEQ ID NO: 1674329 - RNA, 19 nt, Homo sapiens
  misc_RNA (1)...(19): siRNA sense strand
uacaaaucccuuaccaauu

SEQ ID NO: 1674330 - RNA, 19 nt, Homo sapiens
  misc_RNA (1)...(19): siRNA sense strand
gaugugcagguugagaaua

SEQ ID NO: 1674331 - RNA, 19 nt, Homo sapiens
  misc_RNA (1)...(19): siRNA sense strand
agaagguccgugugcuuua

SEQ ID NO: 1674332 - RNA, 19 nt, Homo sapiens
  misc_RNA (1)...(19): siRNA sense strand
uagaagguccgugugcuuu

SEQ ID NO: 1674333 - RNA, 19 nt, Homo sapiens
  misc_RNA (1)...(19): siRNA sense strand
guagaagguccgugugcuu

SEQ ID NO: 1674334 - RNA, 19 nt, Homo sapiens
  misc_RNA (1)...(19): siRNA sense strand
ccugagaagauaacaguga

SEQ ID NO: 1674335 - RNA, 19 nt, Homo sapiens
  misc_RNA (1)...(19): siRNA sense strand
gaaacugcagaagaaauuc

SEQ ID NO: 1674336 - RNA, 19 nt, Homo sapiens
  misc_RNA (1)...(19): siRNA sense strand
cguuaucgccuacuuggaa

SEQ ID NO: 1674337 - RNA, 19 nt, Homo sapiens
  misc_RNA (1)...(19): siRNA sense strand
aagaacagauaacaaagcu

SEQ ID NO: 1674338 - RNA, 19 nt, Homo sapiens
  misc_RNA (1)...(19): siRNA sense strand
gaaccaguaucuuuuacca

SEQ ID NO: 1674339 - RNA, 19 nt, Homo sapiens
  misc_RNA (1)...(19): siRNA sense strand
gagagaaagcuguauaccu

SEQ ID NO: 1674340 - RNA, 19 nt, Homo sapiens
  misc_RNA (1)...(19): siRNA sense strand
gcugcgauaugcucuucug

SEQ ID NO: 1674341 - RNA, 19 nt, Homo sapiens
  misc_RNA (1)...(19): siRNA sense strand
aggcuacgauauuuucuua

SEQ ID NO: 1674342 - RNA, 19 nt, Homo sapiens
  misc_RNA (1)...(19): siRNA sense strand
ggauuuccugagaagauaa

SEQ ID NO: 1674343 - RNA, 19 nt, Homo sapiens
  misc_RNA (1)...(19): siRNA sense strand
acaagaagaacagauaaca

SEQ ID NO: 1674344 - RNA, 19 nt, Homo sapiens
  misc_RNA (1)...(19): siRNA sense strand
ccucuugauacaaacaaua

SEQ ID NO: 1674345 - RNA, 19 nt, Homo sapiens
  misc_RNA (1)...(19): siRNA sense strand
gagaagauaacagugaaac

SEQ ID NO: 1674346 - RNA, 19 nt, Homo sapiens
  misc_RNA (1)...(19): siRNA sense strand
ugcgggugcuggagcuaua

SEQ ID NO: 1674347 - RNA, 19 nt, Homo sapiens
  misc_RNA (1)...(19): siRNA sense strand
uaucgccuacuuggaaaua

SEQ ID NO: 1674348 - RNA, 19 nt, Homo sapiens
  misc_RNA (1)...(19): siRNA sense strand
ccucacacacaguuacuug

SEQ ID NO: 1674349 - RNA, 19 nt, Homo sapiens
  misc_RNA (1)...(19): siRNA sense strand
aauugaaucuguacaucca

SEQ ID NO: 1674350 - RNA, 19 nt, Homo sapiens
  misc_RNA (1)...(19): siRNA sense strand
cuuaaacugcgauauuuca

SEQ ID NO: 1674351 - RNA, 19 nt, Homo sapiens
  misc_RNA (1)...(19): siRNA sense strand
gcaauggauguagaaaaua

SEQ ID NO: 1674352 - RNA, 19 nt, Homo sapiens
  misc_RNA (1)...(19): siRNA sense strand
gucagagccauuacccuuu

SEQ ID NO: 1674353 - RNA, 19 nt, Homo sapiens
  misc_RNA (1)...(19): siRNA sense strand
caaccucucuuggcauucc

SEQ ID NO: 1674354 - RNA, 19 nt, Homo sapiens
  misc_RNA (1)...(19): siRNA sense strand
ggaugugcagguugagaau

SEQ ID NO: 1674355 - RNA, 19 nt, Homo sapiens
  misc_RNA (1)...(19): siRNA sense strand
aagaugacacugacgugaa

SEQ ID NO: 1674356 - RNA, 19 nt, Homo sapiens
  misc_RNA (1)...(19): siRNA sense strand
cuacuuggaaauagucuca

SEQ ID NO: 1674357 - RNA, 19 nt, Homo sapiens
  misc_RNA (1)...(19): siRNA sense strand
aaacugcagaagaaauuca

SEQ ID NO: 1674358 - RNA, 19 nt, Homo sapiens
  misc_RNA (1)...(19): siRNA sense strand
augugcagguugagaauau

SEQ ID NO: 1674359 - RNA, 19 nt, Homo sapiens
  misc_RNA (1)...(19): siRNA sense strand
ccaaaggauauggaagcua

SEQ ID NO: 1674360 - RNA, 19 nt, Homo sapiens
  misc_RNA (1)...(19): siRNA sense strand
gcgauaugcucuucuguua

SEQ ID NO: 1674361 - RNA, 19 nt, Homo sapiens
  misc_RNA (1)...(19): siRNA sense strand
gauaugcucuucuguuaga

SEQ ID NO: 1674362 - RNA, 19 nt, Homo sapiens
  misc_RNA (1)...(19): siRNA sense strand
cagaagaaauucacaggaa

SEQ ID NO: 1674363 - RNA, 19 nt, Homo sapiens
  misc_RNA (1)...(19): siRNA sense strand
caaagucauugcugcgaua

SEQ ID NO: 1674364 - RNA, 19 nt, Homo sapiens
  misc_RNA (1)...(19): siRNA sense strand
gcuugaaacugcagaagaa

SEQ ID NO: 1674365 - RNA, 19 nt, Homo sapiens
  misc_RNA (1)...(19): siRNA sense strand
uugcaaagcuucagucaga

SEQ ID NO: 1674366 - RNA, 19 nt, Homo sapiens
  misc_RNA (1)...(19): siRNA sense strand
gaacguugaaccaaauauu

SEQ ID NO: 1674367 - RNA, 19 nt, Homo sapiens
  misc_RNA (1)...(19): siRNA sense strand
ucaacacugucgcuaauga

SEQ ID NO: 1674368 - RNA, 19 nt, Homo sapiens
  misc_RNA (1)...(19): siRNA sense strand
aaagaacguugaaccaaau

SEQ ID NO: 1674369 - RNA, 19 nt, Homo sapiens
  misc_RNA (1)...(19): siRNA sense strand
caaauucaaggcuacgaua

SEQ ID NO: 1674370 - RNA, 19 nt, Homo sapiens
  misc_RNA (1)...(19): siRNA sense strand
cagaggaugugcagguuga

SEQ ID NO: 1674371 - RNA, 19 nt, Homo sapiens
  misc_RNA (1)...(19): siRNA sense strand
agaagaaauucacaggaaa

SEQ ID NO: 1674372 - RNA, 19 nt, Homo sapiens
  misc_RNA (1)...(19): siRNA sense strand
gacgugaaccaguaucuuu

SEQ ID NO: 1674373 - RNA, 19 nt, Homo sapiens
  misc_RNA (1)...(19): siRNA sense strand
cuacaaaucccuuaccaau

SEQ ID NO: 1674374 - RNA, 19 nt, Homo sapiens
  misc_RNA (1)...(19): siRNA sense strand
uagcuuugauggcagcaua

SEQ ID NO: 1674375 - RNA, 19 nt, Homo sapiens
  misc_RNA (1)...(19): siRNA sense strand
gcucuucuguuagacauug

SEQ ID NO: 1674376 - RNA, 19 nt, Homo sapiens
  misc_RNA (1)...(19): siRNA sense strand
cacugucgcuaaugaagua

SEQ ID NO: 1674377 - RNA, 19 nt, Homo sapiens
  misc_RNA (1)...(19): siRNA sense strand
ugaaacugcagaagaaauu

SEQ ID NO: 1674378 - RNA, 19 nt, Homo sapiens
  misc_RNA (1)...(19): siRNA sense strand
gcugagagaaagcuguaua

SEQ ID NO: 1674379 - RNA, 19 nt, Homo sapiens
  misc_RNA (1)...(19): siRNA sense strand
gaagauaacagugaaacag

SEQ ID NO: 1674380 - RNA, 19 nt, Homo sapiens
  misc_RNA (1)...(19): siRNA sense strand
auucaaggcuacgauauuu

SEQ ID NO: 1674381 - RNA, 19 nt, Homo sapiens
  misc_RNA (1)...(19): siRNA sense strand
gauauuucacuccuaaaga

SEQ ID NO: 1674382 - RNA, 19 nt, Homo sapiens
  misc_RNA (1)...(19): siRNA sense strand
auagugaucucucugugaa

SEQ ID NO: 1674383 - RNA, 19 nt, Homo sapiens
  misc_RNA (1)...(19): siRNA sense strand
caacgugcauguaguagcu

SEQ ID NO: 1674384 - RNA, 19 nt, Homo sapiens
  misc_RNA (1)...(19): siRNA sense strand
agaaauagcaaaucuccuu

SEQ ID NO: 1674385 - RNA, 19 nt, Homo sapiens
  misc_RNA (1)...(19): siRNA sense strand
gauagugaucucucuguga

SEQ ID NO: 1674386 - RNA, 19 nt, Homo sapiens
  misc_RNA (1)...(19): siRNA sense strand
caagaagaacagauaacaa

SEQ ID NO: 1674387 - RNA, 19 nt, Homo sapiens
  misc_RNA (1)...(19): siRNA sense strand
gaagguccgugugcuuuac

SEQ ID NO: 1674388 - RNA, 19 nt, Homo sapiens
  misc_RNA (1)...(19): siRNA sense strand
cggauuuccugagaagaua

SEQ ID NO: 1674389 - RNA, 19 nt, Homo sapiens
  misc_RNA (1)...(19): siRNA sense strand
gaguucggauuuccugaga

SEQ ID NO: 1674390 - RNA, 19 nt, Homo sapiens
  misc_RNA (1)...(19): siRNA sense strand
ucacaagaagaacagauaa

SEQ ID NO: 1674391 - RNA, 19 nt, Homo sapiens
  misc_RNA (1)...(19): siRNA sense strand
ucagagccauuacccuuuc

SEQ ID NO: 1674392 - RNA, 19 nt, Homo sapiens
  misc_RNA (1)...(19): siRNA sense strand
ugucaacacugucgcuaau

SEQ ID NO: 1674393 - RNA, 19 nt, Homo sapiens
  misc_RNA (1)...(19): siRNA sense strand
aaaagaacguugaaccaaa

SEQ ID NO: 1674394 - RNA, 19 nt, Homo sapiens
  misc_RNA (1)...(19): siRNA sense strand
gguugagaauaucuacaaa

SEQ ID NO: 1674395 - RNA, 19 nt, Homo sapiens
  misc_RNA (1)...(19): siRNA sense strand
guucagcccacuuguagaa

SEQ ID NO: 1674396 - RNA, 19 nt, Homo sapiens
  misc_RNA (1)...(19): siRNA sense strand
gaagaacagauaacaaagc

SEQ ID NO: 1674397 - RNA, 19 nt, Homo sapiens
  misc_RNA (1)...(19): siRNA sense strand
cuguauaccugcacaagug

SEQ ID NO: 1674398 - RNA, 19 nt, Homo sapiens
  misc_RNA (1)...(19): siRNA sense strand
gcauacaguguucuggaaa

SEQ ID NO: 1674399 - RNA, 19 nt, Homo sapiens
  misc_RNA (1)...(19): siRNA sense strand
gauggcagcauacaguguu

SEQ ID NO: 1674400 - RNA, 19 nt, Homo sapiens
  misc_RNA (1)...(19): siRNA sense strand
gaaaagaacguugaaccaa

SEQ ID NO: 1674401 - RNA, 19 nt, Homo sapiens
  misc_RNA (1)...(19): siRNA sense strand
guuaucgccuacuuggaaa

SEQ ID NO: 1674402 - RNA, 19 nt, Homo sapiens
  misc_RNA (1)...(19): siRNA sense strand
gaagaaauucacaggaaaa

SEQ ID NO: 1674403 - RNA, 19 nt, Homo sapiens
  misc_RNA (1)...(19): siRNA sense strand
aauaugcaauggauguaga

SEQ ID NO: 1674404 - RNA, 19 nt, Homo sapiens
  misc_RNA (1)...(19): siRNA sense strand
cugagaagauaacagugaa

SEQ ID NO: 1674405 - RNA, 19 nt, Homo sapiens
  misc_RNA (1)...(19): siRNA sense strand
ugcgauauuucacuccuaa

SEQ ID NO: 1674406 - RNA, 19 nt, Homo sapiens
  misc_RNA (1)...(19): siRNA sense strand
gucacaagaagaacagaua

SEQ ID NO: 1674407 - RNA, 19 nt, Homo sapiens
  misc_RNA (1)...(19): siRNA sense strand
gcgcugagagaaagcugua

SEQ ID NO: 1674408 - RNA, 19 nt, Homo sapiens
  misc_RNA (1)...(19): siRNA sense strand
gaaucuguacauccacaaa

SEQ ID NO: 1674409 - RNA, 19 nt, Homo sapiens
  misc_RNA (1)...(19): siRNA sense strand
caacacugucgcuaaugaa

SEQ ID NO: 1674410 - RNA, 19 nt, Homo sapiens
  misc_RNA (1)...(19): siRNA sense strand
gcuaaugaaguauacaagu

SEQ ID NO: 1674411 - RNA, 19 nt, Homo sapiens
  misc_RNA (1)...(19): siRNA sense strand
guucggauuuccugagaag

SEQ ID NO: 1674412 - RNA, 19 nt, Homo sapiens
  misc_RNA (1)...(19): siRNA sense strand
aauagcaaaucuccuugga

SEQ ID NO: 1674413 - RNA, 19 nt, Homo sapiens
  misc_RNA (1)...(19): siRNA sense strand
guuacagacugcagaggau

SEQ ID NO: 1674414 - RNA, 19 nt, Homo sapiens
  misc_RNA (1)...(19): siRNA sense strand
gcaccacgcgcugagagaa

SEQ ID NO: 1674415 - RNA, 19 nt, Homo sapiens
  misc_RNA (1)...(19): siRNA sense strand
ucucaacgugcauguagua

SEQ ID NO: 1674416 - RNA, 19 nt, Homo sapiens
  misc_RNA (1)...(19): siRNA sense strand
uacaaaucccuuaccaauu

SEQ ID NO: 1674417 - RNA, 19 nt, Homo sapiens
  misc_RNA (1)...(19): siRNA sense strand
gaugugcagguugagaaua

SEQ ID NO: 1674418 - RNA, 19 nt, Homo sapiens
  misc_RNA (1)...(19): siRNA sense strand
agaagguccgugugcuuua

SEQ ID NO: 1674419 - RNA, 19 nt, Homo sapiens
  misc_RNA (1)...(19): siRNA sense strand
uagaagguccgugugcuuu

SEQ ID NO: 1674420 - RNA, 19 nt, Homo sapiens
  misc_RNA (1)...(19): siRNA sense strand
guagaagguccgugugcuu

SEQ ID NO: 1674421 - RNA, 19 nt, Homo sapiens
  misc_RNA (1)...(19): siRNA sense strand
ccugagaagauaacaguga

SEQ ID NO: 1674422 - RNA, 19 nt, Homo sapiens
  misc_RNA (1)...(19): siRNA sense strand
gaaacugcagaagaaauuc

SEQ ID NO: 1674423 - RNA, 19 nt, Homo sapiens
  misc_RNA (1)...(19): siRNA sense strand
cguuaucgccuacuuggaa

SEQ ID NO: 1674424 - RNA, 19 nt, Homo sapiens
  misc_RNA (1)...(19): siRNA sense strand
aagaacagauaacaaagcu

SEQ ID NO: 1674425 - RNA, 19 nt, Homo sapiens
  misc_RNA (1)...(19): siRNA sense strand
gaaccaguaucuuuuacca

SEQ ID NO: 1674426 - RNA, 19 nt, Homo sapiens
  misc_RNA (1)...(19): siRNA sense strand
gagagaaagcuguauaccu

SEQ ID NO: 1674427 - RNA, 19 nt, Homo sapiens
  misc_RNA (1)...(19): siRNA sense strand
gcugcgauaugcucuucug

SEQ ID NO: 1674428 - RNA, 19 nt, Homo sapiens
  misc_RNA (1)...(19): siRNA sense strand
aggcuacgauauuuucuua

SEQ ID NO: 1674429 - RNA, 19 nt, Homo sapiens
  misc_RNA (1)...(19): siRNA sense strand
ggauuuccugagaagauaa

SEQ ID NO: 1674430 - RNA, 19 nt, Homo sapiens
  misc_RNA (1)...(19): siRNA sense strand
acaagaagaacagauaaca

SEQ ID NO: 1674431 - RNA, 19 nt, Homo sapiens
  misc_RNA (1)...(19): siRNA sense strand
ccucuugauacaaacaaua

SEQ ID NO: 1674432 - RNA, 19 nt, Homo sapiens
  misc_RNA (1)...(19): siRNA sense strand
gagaagauaacagugaaac

SEQ ID NO: 1674433 - RNA, 19 nt, Homo sapiens
  misc_RNA (1)...(19): siRNA sense strand
ugcgggugcuggagcuaua

SEQ ID NO: 1674434 - RNA, 19 nt, Homo sapiens
  misc_RNA (1)...(19): siRNA sense strand
uaucgccuacuuggaaaua

SEQ ID NO: 1674435 - RNA, 19 nt, Homo sapiens
  misc_RNA (1)...(19): siRNA sense strand
ccucacacacaguuacuug

SEQ ID NO: 1674436 - RNA, 19 nt, Homo sapiens
  misc_RNA (1)...(19): siRNA sense strand
aauugaaucuguacaucca

SEQ ID NO: 1674437 - RNA, 19 nt, Homo sapiens
  misc_RNA (1)...(19): siRNA sense strand
cuuaaacugcgauauuuca

SEQ ID NO: 1674438 - RNA, 19 nt, Homo sapiens
  misc_RNA (1)...(19): siRNA sense strand
gcaauggauguagaaaaua

SEQ ID NO: 1674439 - RNA, 19 nt, Homo sapiens
  misc_RNA (1)...(19): siRNA sense strand
gucagagccauuacccuuu

SEQ ID NO: 1674440 - RNA, 19 nt, Homo sapiens
  misc_RNA (1)...(19): siRNA sense strand
caaccucucuuggcauucc

SEQ ID NO: 1674441 - RNA, 19 nt, Homo sapiens
  misc_RNA (1)...(19): siRNA sense strand
ggaugugcagguugagaau

SEQ ID NO: 1674442 - RNA, 19 nt, Homo sapiens
  misc_RNA (1)...(19): siRNA sense strand
aagaugacacugacgugaa

SEQ ID NO: 1674443 - RNA, 19 nt, Homo sapiens
  misc_RNA (1)...(19): siRNA sense strand
cuacuuggaaauagucuca

SEQ ID NO: 1674444 - RNA, 19 nt, Homo sapiens
  misc_RNA (1)...(19): siRNA sense strand
aaacugcagaagaaauuca

SEQ ID NO: 1674445 - RNA, 19 nt, Homo sapiens
  misc_RNA (1)...(19): siRNA sense strand
augugcagguugagaauau

SEQ ID NO: 1674446 - RNA, 19 nt, Homo sapiens
  misc_RNA (1)...(19): siRNA sense strand
ccaaaggauauggaagcua

SEQ ID NO: 1674447 - RNA, 19 nt, Homo sapiens
  misc_RNA (1)...(19): siRNA sense strand
ucaacacugucgcuaauga

SEQ ID NO: 1674448 - RNA, 19 nt, Homo sapiens
  misc_RNA (1)...(19): siRNA sense strand
cacugucgcuaaugaagua

SEQ ID NO: 1674449 - RNA, 19 nt, Homo sapiens
  misc_RNA (1)...(19): siRNA sense strand
gcugagagaaagcuguaua

SEQ ID NO: 1674450 - RNA, 19 nt, Homo sapiens
  misc_RNA (1)...(19): siRNA sense strand
ugucaacacugucgcuaau

SEQ ID NO: 1674451 - RNA, 19 nt, Homo sapiens
  misc_RNA (1)...(19): siRNA sense strand
cuguauaccugcacaagug

SEQ ID NO: 1674452 - RNA, 19 nt, Homo sapiens
  misc_RNA (1)...(19): siRNA sense strand
gcgcugagagaaagcugua

SEQ ID NO: 1674453 - RNA, 19 nt, Homo sapiens
  misc_RNA (1)...(19): siRNA sense strand
caacacugucgcuaaugaa

SEQ ID NO: 1674454 - RNA, 19 nt, Homo sapiens
  misc_RNA (1)...(19): siRNA sense strand
gcuaaugaaguauacaagu

SEQ ID NO: 1674455 - RNA, 19 nt, Homo sapiens
  misc_RNA (1)...(19): siRNA sense strand
gcaccacgcgcugagagaa

SEQ ID NO: 1674456 - RNA, 19 nt, Homo sapiens
  misc_RNA (1)...(19): siRNA sense strand
gagagaaagcuguauaccu

SEQ ID NO: 1674457 - RNA, 19 nt, Homo sapiens
  misc_RNA (1)...(19): siRNA sense strand
ugcgggugcuggagcuaua

SEQ ID NO: 1674458 - RNA, 19 nt, Homo sapiens
  misc_RNA (1)...(19): siRNA sense strand
ccucacacacaguuacuug

SEQ ID NO: 1674459 - RNA, 19 nt, Homo sapiens
  misc_RNA (1)...(19): siRNA sense strand
ucaacacugucgcuaauga

SEQ ID NO: 1674460 - RNA, 19 nt, Homo sapiens
  misc_RNA (1)...(19): siRNA sense strand
cacugucgcuaaugaagua

SEQ ID NO: 1674461 - RNA, 19 nt, Homo sapiens
  misc_RNA (1)...(19): siRNA sense strand
gcugagagaaagcuguaua

SEQ ID NO: 1674462 - RNA, 19 nt, Homo sapiens
  misc_RNA (1)...(19): siRNA sense strand
ugucaacacugucgcuaau

SEQ ID NO: 1674463 - RNA, 19 nt, Homo sapiens
  misc_RNA (1)...(19): siRNA sense strand
cuguauaccugcacaagug

SEQ ID NO: 1674464 - RNA, 19 nt, Homo sapiens
  misc_RNA (1)...(19): siRNA sense strand
gcgcugagagaaagcugua

SEQ ID NO: 1674465 - RNA, 19 nt, Homo sapiens
  misc_RNA (1)...(19): siRNA sense strand
caacacugucgcuaaugaa

SEQ ID NO: 1674466 - RNA, 19 nt, Homo sapiens
  misc_RNA (1)...(19): siRNA sense strand
gcuaaugaaguauacaagu

SEQ ID NO: 1674467 - RNA, 19 nt, Homo sapiens
  misc_RNA (1)...(19): siRNA sense strand
gcaccacgcgcugagagaa

SEQ ID NO: 1674468 - RNA, 19 nt, Homo sapiens
  misc_RNA (1)...(19): siRNA sense strand
gagagaaagcuguauaccu

SEQ ID NO: 1674469 - RNA, 19 nt, Homo sapiens
  misc_RNA (1)...(19): siRNA sense strand
ugcgggugcuggagcuaua

SEQ ID NO: 1674470 - RNA, 19 nt, Homo sapiens
  misc_RNA (1)...(19): siRNA sense strand
ccucacacacaguuacuug

SEQ ID NO: 1674471 - RNA, 19 nt, Homo sapiens
  misc_RNA (1)...(19): siRNA sense strand
uugcaaagcuucagucaga

SEQ ID NO: 1674472 - RNA, 19 nt, Homo sapiens
  misc_RNA (1)...(19): siRNA sense strand
ucaacacugucgcuaauga

SEQ ID NO: 1674473 - RNA, 19 nt, Homo sapiens
  misc_RNA (1)...(19): siRNA sense strand
caaauucaaggcuacgaua

SEQ ID NO: 1674474 - RNA, 19 nt, Homo sapiens
  misc_RNA (1)...(19): siRNA sense strand
cacugucgcuaaugaagua

SEQ ID NO: 1674475 - RNA, 19 nt, Homo sapiens
  misc_RNA (1)...(19): siRNA sense strand
gcugagagaaagcuguaua

SEQ ID NO: 1674476 - RNA, 19 nt, Homo sapiens
  misc_RNA (1)...(19): siRNA sense strand
auucaaggcuacgauauuu

SEQ ID NO: 1674477 - RNA, 19 nt, Homo sapiens
  misc_RNA (1)...(19): siRNA sense strand
ugucaacacugucgcuaau

SEQ ID NO: 1674478 - RNA, 19 nt, Homo sapiens
  misc_RNA (1)...(19): siRNA sense strand
ucagagccauuacccuuuc

SEQ ID NO: 1674479 - RNA, 19 nt, Homo sapiens
  misc_RNA (1)...(19): siRNA sense strand
cuguauaccugcacaagug

SEQ ID NO: 1674480 - RNA, 19 nt, Homo sapiens
  misc_RNA (1)...(19): siRNA sense strand
gcgcugagagaaagcugua

SEQ ID NO: 1674481 - RNA, 19 nt, Homo sapiens
  misc_RNA (1)...(19): siRNA sense strand
caacacugucgcuaaugaa

SEQ ID NO: 1674482 - RNA, 19 nt, Homo sapiens
  misc_RNA (1)...(19): siRNA sense strand
gcuaaugaaguauacaagu

SEQ ID NO: 1674483 - RNA, 19 nt, Homo sapiens
  misc_RNA (1)...(19): siRNA sense strand
gcaccacgcgcugagagaa

SEQ ID NO: 1674484 - RNA, 19 nt, Homo sapiens
  misc_RNA (1)...(19): siRNA sense strand
gagagaaagcuguauaccu

SEQ ID NO: 1674485 - RNA, 19 nt, Homo sapiens
  misc_RNA (1)...(19): siRNA sense strand
ccucuugauacaaacaaua

SEQ ID NO: 1674486 - RNA, 19 nt, Homo sapiens
  misc_RNA (1)...(19): siRNA sense strand
aggcuacgauauuuucuua

SEQ ID NO: 1674487 - RNA, 19 nt, Homo sapiens
  misc_RNA (1)...(19): siRNA sense strand
ugcgggugcuggagcuaua

SEQ ID NO: 1674488 - RNA, 19 nt, Homo sapiens
  misc_RNA (1)...(19): siRNA sense strand
ccucacacacaguuacuug

SEQ ID NO: 1674489 - RNA, 19 nt, Homo sapiens
  misc_RNA (1)...(19): siRNA sense strand
caaccucucuuggcauucc

SEQ ID NO: 1674490 - RNA, 19 nt, Homo sapiens
  misc_RNA (1)...(19): siRNA sense strand
gucagagccauuacccuuu

SEQ ID NO: 1674491 - RNA, 19 nt, Homo sapiens
  misc_RNA (1)...(19): siRNA sense strand
gcgauaugcucuucuguua

SEQ ID NO: 1674492 - RNA, 19 nt, Homo sapiens
  misc_RNA (1)...(19): siRNA sense strand
gauaugcucuucuguuaga

SEQ ID NO: 1674493 - RNA, 19 nt, Homo sapiens
  misc_RNA (1)...(19): siRNA sense strand
cagaagaaauucacaggaa

SEQ ID NO: 1674494 - RNA, 19 nt, Homo sapiens
  misc_RNA (1)...(19): siRNA sense strand
caaagucauugcugcgaua

SEQ ID NO: 1674495 - RNA, 19 nt, Homo sapiens
  misc_RNA (1)...(19): siRNA sense strand
gcuugaaacugcagaagaa

SEQ ID NO: 1674496 - RNA, 19 nt, Homo sapiens
  misc_RNA (1)...(19): siRNA sense strand
uugcaaagcuucagucaga

SEQ ID NO: 1674497 - RNA, 19 nt, Homo sapiens
  misc_RNA (1)...(19): siRNA sense strand
gaacguugaaccaaauauu

SEQ ID NO: 1674498 - RNA, 19 nt, Homo sapiens
  misc_RNA (1)...(19): siRNA sense strand
ucaacacugucgcuaauga

SEQ ID NO: 1674499 - RNA, 19 nt, Homo sapiens
  misc_RNA (1)...(19): siRNA sense strand
aaagaacguugaaccaaau

SEQ ID NO: 1674500 - RNA, 19 nt, Homo sapiens
  misc_RNA (1)...(19): siRNA sense strand
caaauucaaggcuacgaua

SEQ ID NO: 1674501 - RNA, 19 nt, Homo sapiens
  misc_RNA (1)...(19): siRNA sense strand
cagaggaugugcagguuga

SEQ ID NO: 1674502 - RNA, 19 nt, Homo sapiens
  misc_RNA (1)...(19): siRNA sense strand
agaagaaauucacaggaaa

SEQ ID NO: 1674503 - RNA, 19 nt, Homo sapiens
  misc_RNA (1)...(19): siRNA sense strand
gacgugaaccaguaucuuu

SEQ ID NO: 1674504 - RNA, 19 nt, Homo sapiens
  misc_RNA (1)...(19): siRNA sense strand
cuacaaaucccuuaccaau

SEQ ID NO: 1674505 - RNA, 19 nt, Homo sapiens
  misc_RNA (1)...(19): siRNA sense strand
uagcuuugauggcagcaua

SEQ ID NO: 1674506 - RNA, 19 nt, Homo sapiens
  misc_RNA (1)...(19): siRNA sense strand
gcucuucuguuagacauug

SEQ ID NO: 1674507 - RNA, 19 nt, Homo sapiens
  misc_RNA (1)...(19): siRNA sense strand
cacugucgcuaaugaagua

SEQ ID NO: 1674508 - RNA, 19 nt, Homo sapiens
  misc_RNA (1)...(19): siRNA sense strand
ugaaacugcagaagaaauu

SEQ ID NO: 1674509 - RNA, 19 nt, Homo sapiens
  misc_RNA (1)...(19): siRNA sense strand
gcugagagaaagcuguaua

SEQ ID NO: 1674510 - RNA, 19 nt, Homo sapiens
  misc_RNA (1)...(19): siRNA sense strand
gaagauaacagugaaacag

SEQ ID NO: 1674511 - RNA, 19 nt, Homo sapiens
  misc_RNA (1)...(19): siRNA sense strand
auucaaggcuacgauauuu

SEQ ID NO: 1674512 - RNA, 19 nt, Homo sapiens
  misc_RNA (1)...(19): siRNA sense strand
gauauuucacuccuaaaga

SEQ ID NO: 1674513 - RNA, 19 nt, Homo sapiens
  misc_RNA (1)...(19): siRNA sense strand
auagugaucucucugugaa

SEQ ID NO: 1674514 - RNA, 19 nt, Homo sapiens
  misc_RNA (1)...(19): siRNA sense strand
caacgugcauguaguagcu

SEQ ID NO: 1674515 - RNA, 19 nt, Homo sapiens
  misc_RNA (1)...(19): siRNA sense strand
agaaauagcaaaucuccuu

SEQ ID NO: 1674516 - RNA, 19 nt, Homo sapiens
  misc_RNA (1)...(19): siRNA sense strand
gauagugaucucucuguga

SEQ ID NO: 1674517 - RNA, 19 nt, Homo sapiens
  misc_RNA (1)...(19): siRNA sense strand
caagaagaacagauaacaa

SEQ ID NO: 1674518 - RNA, 19 nt, Homo sapiens
  misc_RNA (1)...(19): siRNA sense strand
gaagguccgugugcuuuac

SEQ ID NO: 1674519 - RNA, 19 nt, Homo sapiens
  misc_RNA (1)...(19): siRNA sense strand
cggauuuccugagaagaua

SEQ ID NO: 1674520 - RNA, 19 nt, Homo sapiens
  misc_RNA (1)...(19): siRNA sense strand
gaguucggauuuccugaga

SEQ ID NO: 1674521 - RNA, 19 nt, Homo sapiens
  misc_RNA (1)...(19): siRNA sense strand
ucacaagaagaacagauaa

SEQ ID NO: 1674522 - RNA, 19 nt, Homo sapiens
  misc_RNA (1)...(19): siRNA sense strand
ucagagccauuacccuuuc

SEQ ID NO: 1674523 - RNA, 19 nt, Homo sapiens
  misc_RNA (1)...(19): siRNA sense strand
ugucaacacugucgcuaau

SEQ ID NO: 1674524 - RNA, 19 nt, Homo sapiens
  misc_RNA (1)...(19): siRNA sense strand
aaaagaacguugaaccaaa

SEQ ID NO: 1674525 - RNA, 19 nt, Homo sapiens
  misc_RNA (1)...(19): siRNA sense strand
gguugagaauaucuacaaa

SEQ ID NO: 1674526 - RNA, 19 nt, Homo sapiens
  misc_RNA (1)...(19): siRNA sense strand
guucagcccacuuguagaa

SEQ ID NO: 1674527 - RNA, 19 nt, Homo sapiens
  misc_RNA (1)...(19): siRNA sense strand
gaagaacagauaacaaagc

SEQ ID NO: 1674528 - RNA, 19 nt, Homo sapiens
  misc_RNA (1)...(19): siRNA sense strand
cuguauaccugcacaagug

SEQ ID NO: 1674529 - RNA, 19 nt, Homo sapiens
  misc_RNA (1)...(19): siRNA sense strand
gcauacaguguucuggaaa

SEQ ID NO: 1674530 - RNA, 19 nt, Homo sapiens
  misc_RNA (1)...(19): siRNA sense strand
gauggcagcauacaguguu

SEQ ID NO: 1674531 - RNA, 19 nt, Homo sapiens
  misc_RNA (1)...(19): siRNA sense strand
gaaaagaacguugaaccaa

SEQ ID NO: 1674532 - RNA, 19 nt, Homo sapiens
  misc_RNA (1)...(19): siRNA sense strand
guuaucgccuacuuggaaa

SEQ ID NO: 1674533 - RNA, 19 nt, Homo sapiens
  misc_RNA (1)...(19): siRNA sense strand
gaagaaauucacaggaaaa

SEQ ID NO: 1674534 - RNA, 19 nt, Homo sapiens
  misc_RNA (1)...(19): siRNA sense strand
aauaugcaauggauguaga

SEQ ID NO: 1674535 - RNA, 19 nt, Homo sapiens
  misc_RNA (1)...(19): siRNA sense strand
cugagaagauaacagugaa

SEQ ID NO: 1674536 - RNA, 19 nt, Homo sapiens
  misc_RNA (1)...(19): siRNA sense strand
ugcgauauuucacuccuaa

SEQ ID NO: 1674537 - RNA, 19 nt, Homo sapiens
  misc_RNA (1)...(19): siRNA sense strand
gucacaagaagaacagaua

SEQ ID NO: 1674538 - RNA, 19 nt, Homo sapiens
  misc_RNA (1)...(19): siRNA sense strand
gcgcugagagaaagcugua

SEQ ID NO: 1674539 - RNA, 19 nt, Homo sapiens
  misc_RNA (1)...(19): siRNA sense strand
gaaucuguacauccacaaa

SEQ ID NO: 1674540 - RNA, 19 nt, Homo sapiens
  misc_RNA (1)...(19): siRNA sense strand
caacacugucgcuaaugaa

SEQ ID NO: 1674541 - RNA, 19 nt, Homo sapiens
  misc_RNA (1)...(19): siRNA sense strand
gcuaaugaaguauacaagu

SEQ ID NO: 1674542 - RNA, 19 nt, Homo sapiens
  misc_RNA (1)...(19): siRNA sense strand
guucggauuuccugagaag

SEQ ID NO: 1674543 - RNA, 19 nt, Homo sapiens
  misc_RNA (1)...(19): siRNA sense strand
aauagcaaaucuccuugga

SEQ ID NO: 1674544 - RNA, 19 nt, Homo sapiens
  misc_RNA (1)...(19): siRNA sense strand
guuacagacugcagaggau

SEQ ID NO: 1674545 - RNA, 19 nt, Homo sapiens
  misc_RNA (1)...(19): siRNA sense strand
gcaccacgcgcugagagaa

SEQ ID NO: 1674546 - RNA, 19 nt, Homo sapiens
  misc_RNA (1)...(19): siRNA sense strand
ucucaacgugcauguagua

SEQ ID NO: 1674547 - RNA, 19 nt, Homo sapiens
  misc_RNA (1)...(19): siRNA sense strand
uacaaaucccuuaccaauu

SEQ ID NO: 1674548 - RNA, 19 nt, Homo sapiens
  misc_RNA (1)...(19): siRNA sense strand
gaugugcagguugagaaua

SEQ ID NO: 1674549 - RNA, 19 nt, Homo sapiens
  misc_RNA (1)...(19): siRNA sense strand
agaagguccgugugcuuua

SEQ ID NO: 1674550 - RNA, 19 nt, Homo sapiens
  misc_RNA (1)...(19): siRNA sense strand
uagaagguccgugugcuuu

SEQ ID NO: 1674551 - RNA, 19 nt, Homo sapiens
  misc_RNA (1)...(19): siRNA sense strand
guagaagguccgugugcuu

SEQ ID NO: 1674552 - RNA, 19 nt, Homo sapiens
  misc_RNA (1)...(19): siRNA sense strand
ccugagaagauaacaguga

SEQ ID NO: 1674553 - RNA, 19 nt, Homo sapiens
  misc_RNA (1)...(19): siRNA sense strand
gaaacugcagaagaaauuc

SEQ ID NO: 1674554 - RNA, 19 nt, Homo sapiens
  misc_RNA (1)...(19): siRNA sense strand
cguuaucgccuacuuggaa

SEQ ID NO: 1674555 - RNA, 19 nt, Homo sapiens
  misc_RNA (1)...(19): siRNA sense strand
aagaacagauaacaaagcu

SEQ ID NO: 1674556 - RNA, 19 nt, Homo sapiens
  misc_RNA (1)...(19): siRNA sense strand
gaaccaguaucuuuuacca

SEQ ID NO: 1674557 - RNA, 19 nt, Homo sapiens
  misc_RNA (1)...(19): siRNA sense strand
gagagaaagcuguauaccu

SEQ ID NO: 1674558 - RNA, 19 nt, Homo sapiens
  misc_RNA (1)...(19): siRNA sense strand
gcugcgauaugcucuucug

SEQ ID NO: 1674559 - RNA, 19 nt, Homo sapiens
  misc_RNA (1)...(19): siRNA sense strand
aggcuacgauauuuucuua

SEQ ID NO: 1674560 - RNA, 19 nt, Homo sapiens
  misc_RNA (1)...(19): siRNA sense strand
ggauuuccugagaagauaa

SEQ ID NO: 1674561 - RNA, 19 nt, Homo sapiens
  misc_RNA (1)...(19): siRNA sense strand
acaagaagaacagauaaca

SEQ ID NO: 1674562 - RNA, 19 nt, Homo sapiens
  misc_RNA (1)...(19): siRNA sense strand
ccucuugauacaaacaaua

SEQ ID NO: 1674563 - RNA, 19 nt, Homo sapiens
  misc_RNA (1)...(19): siRNA sense strand
gagaagauaacagugaaac

SEQ ID NO: 1674564 - RNA, 19 nt, Homo sapiens
  misc_RNA (1)...(19): siRNA sense strand
ugcgggugcuggagcuaua

SEQ ID NO: 1674565 - RNA, 19 nt, Homo sapiens
  misc_RNA (1)...(19): siRNA sense strand
uaucgccuacuuggaaaua

SEQ ID NO: 1674566 - RNA, 19 nt, Homo sapiens
  misc_RNA (1)...(19): siRNA sense strand
ccucacacacaguuacuug

SEQ ID NO: 1674567 - RNA, 19 nt, Homo sapiens
  misc_RNA (1)...(19): siRNA sense strand
aauugaaucuguacaucca

SEQ ID NO: 1674568 - RNA, 19 nt, Homo sapiens
  misc_RNA (1)...(19): siRNA sense strand
cuuaaacugcgauauuuca

SEQ ID NO: 1674569 - RNA, 19 nt, Homo sapiens
  misc_RNA (1)...(19): siRNA sense strand
gcaauggauguagaaaaua

SEQ ID NO: 1674570 - RNA, 19 nt, Homo sapiens
  misc_RNA (1)...(19): siRNA sense strand
gucagagccauuacccuuu

SEQ ID NO: 1674571 - RNA, 19 nt, Homo sapiens
  misc_RNA (1)...(19): siRNA sense strand
caaccucucuuggcauucc

SEQ ID NO: 1674572 - RNA, 19 nt, Homo sapiens
  misc_RNA (1)...(19): siRNA sense strand
ggaugugcagguugagaau

SEQ ID NO: 1674573 - RNA, 19 nt, Homo sapiens
  misc_RNA (1)...(19): siRNA sense strand
aagaugacacugacgugaa

SEQ ID NO: 1674574 - RNA, 19 nt, Homo sapiens
  misc_RNA (1)...(19): siRNA sense strand
cuacuuggaaauagucuca

SEQ ID NO: 1674575 - RNA, 19 nt, Homo sapiens
  misc_RNA (1)...(19): siRNA sense strand
aaacugcagaagaaauuca

SEQ ID NO: 1674576 - RNA, 19 nt, Homo sapiens
  misc_RNA (1)...(19): siRNA sense strand
augugcagguugagaauau

SEQ ID NO: 1674577 - RNA, 19 nt, Homo sapiens
  misc_RNA (1)...(19): siRNA sense strand
ccaaaggauauggaagcua

SEQ ID NO: 1674578 - RNA, 19 nt, Homo sapiens
  misc_RNA (1)...(19): siRNA sense strand
gcgauaugcucuucuguua

SEQ ID NO: 1674579 - RNA, 19 nt, Homo sapiens
  misc_RNA (1)...(19): siRNA sense strand
gauaugcucuucuguuaga

SEQ ID NO: 1674580 - RNA, 19 nt, Homo sapiens
  misc_RNA (1)...(19): siRNA sense strand
cagaagaaauucacaggaa

SEQ ID NO: 1674581 - RNA, 19 nt, Homo sapiens
  misc_RNA (1)...(19): siRNA sense strand
caaagucauugcugcgaua

SEQ ID NO: 1674582 - RNA, 19 nt, Homo sapiens
  misc_RNA (1)...(19): siRNA sense strand
gcuugaaacugcagaagaa

SEQ ID NO: 1674583 - RNA, 19 nt, Homo sapiens
  misc_RNA (1)...(19): siRNA sense strand
uugcaaagcuucagucaga

SEQ ID NO: 1674584 - RNA, 19 nt, Homo sapiens
  misc_RNA (1)...(19): siRNA sense strand
gaacguugaaccaaauauu

SEQ ID NO: 1674585 - RNA, 19 nt, Homo sapiens
  misc_RNA (1)...(19): siRNA sense strand
ucaacacugucgcuaauga

SEQ ID NO: 1674586 - RNA, 19 nt, Homo sapiens
  misc_RNA (1)...(19): siRNA sense strand
aaagaacguugaaccaaau

SEQ ID NO: 1674587 - RNA, 19 nt, Homo sapiens
  misc_RNA (1)...(19): siRNA sense strand
caaauucaaggcuacgaua

SEQ ID NO: 1674588 - RNA, 19 nt, Homo sapiens
  misc_RNA (1)...(19): siRNA sense strand
cagaggaugugcagguuga

SEQ ID NO: 1674589 - RNA, 19 nt, Homo sapiens
  misc_RNA (1)...(19): siRNA sense strand
agaagaaauucacaggaaa

SEQ ID NO: 1674590 - RNA, 19 nt, Homo sapiens
  misc_RNA (1)...(19): siRNA sense strand
gacgugaaccaguaucuuu

SEQ ID NO: 1674591 - RNA, 19 nt, Homo sapiens
  misc_RNA (1)...(19): siRNA sense strand
cuacaaaucccuuaccaau

SEQ ID NO: 1674592 - RNA, 19 nt, Homo sapiens
  misc_RNA (1)...(19): siRNA sense strand
uagcuuugauggcagcaua

SEQ ID NO: 1674593 - RNA, 19 nt, Homo sapiens
  misc_RNA (1)...(19): siRNA sense strand
gcucuucuguuagacauug

SEQ ID NO: 1674594 - RNA, 19 nt, Homo sapiens
  misc_RNA (1)...(19): siRNA sense strand
cacugucgcuaaugaagua

SEQ ID NO: 1674595 - RNA, 19 nt, Homo sapiens
  misc_RNA (1)...(19): siRNA sense strand
ugaaacugcagaagaaauu

SEQ ID NO: 1674596 - RNA, 19 nt, Homo sapiens
  misc_RNA (1)...(19): siRNA sense strand
gcugagagaaagcuguaua

SEQ ID NO: 1674597 - RNA, 19 nt, Homo sapiens
  misc_RNA (1)...(19): siRNA sense strand
gaagauaacagugaaacag

SEQ ID NO: 1674598 - RNA, 19 nt, Homo sapiens
  misc_RNA (1)...(19): siRNA sense strand
auucaaggcuacgauauuu

SEQ ID NO: 1674599 - RNA, 19 nt, Homo sapiens
  misc_RNA (1)...(19): siRNA sense strand
gauauuucacuccuaaaga

SEQ ID NO: 1674600 - RNA, 19 nt, Homo sapiens
  misc_RNA (1)...(19): siRNA sense strand
auagugaucucucugugaa

SEQ ID NO: 1674601 - RNA, 19 nt, Homo sapiens
  misc_RNA (1)...(19): siRNA sense strand
caacgugcauguaguagcu

SEQ ID NO: 1674602 - RNA, 19 nt, Homo sapiens
  misc_RNA (1)...(19): siRNA sense strand
agaaauagcaaaucuccuu

SEQ ID NO: 1674603 - RNA, 19 nt, Homo sapiens
  misc_RNA (1)...(19): siRNA sense strand
gauagugaucucucuguga

SEQ ID NO: 1674604 - RNA, 19 nt, Homo sapiens
  misc_RNA (1)...(19): siRNA sense strand
caagaagaacagauaacaa

SEQ ID NO: 1674605 - RNA, 19 nt, Homo sapiens
  misc_RNA (1)...(19): siRNA sense strand
gaagguccgugugcuuuac

SEQ ID NO: 1674606 - RNA, 19 nt, Homo sapiens
  misc_RNA (1)...(19): siRNA sense strand
cggauuuccugagaagaua

SEQ ID NO: 1674607 - RNA, 19 nt, Homo sapiens
  misc_RNA (1)...(19): siRNA sense strand
gaguucggauuuccugaga

SEQ ID NO: 1674608 - RNA, 19 nt, Homo sapiens
  misc_RNA (1)...(19): siRNA sense strand
ucacaagaagaacagauaa

SEQ ID NO: 1674609 - RNA, 19 nt, Homo sapiens
  misc_RNA (1)...(19): siRNA sense strand
ucagagccauuacccuuuc

SEQ ID NO: 1674610 - RNA, 19 nt, Homo sapiens
  misc_RNA (1)...(19): siRNA sense strand
ugucaacacugucgcuaau

SEQ ID NO: 1674611 - RNA, 19 nt, Homo sapiens
  misc_RNA (1)...(19): siRNA sense strand
aaaagaacguugaaccaaa

SEQ ID NO: 1674612 - RNA, 19 nt, Homo sapiens
  misc_RNA (1)...(19): siRNA sense strand
gguugagaauaucuacaaa

SEQ ID NO: 1674613 - RNA, 19 nt, Homo sapiens
  misc_RNA (1)...(19): siRNA sense strand
guucagcccacuuguagaa

SEQ ID NO: 1674614 - RNA, 19 nt, Homo sapiens
  misc_RNA (1)...(19): siRNA sense strand
gaagaacagauaacaaagc

SEQ ID NO: 1674615 - RNA, 19 nt, Homo sapiens
  misc_RNA (1)...(19): siRNA sense strand
cuguauaccugcacaagug

SEQ ID NO: 1674616 - RNA, 19 nt, Homo sapiens
  misc_RNA (1)...(19): siRNA sense strand
gcauacaguguucuggaaa

SEQ ID NO: 1674617 - RNA, 19 nt, Homo sapiens
  misc_RNA (1)...(19): siRNA sense strand
gauggcagcauacaguguu

SEQ ID NO: 1674618 - RNA, 19 nt, Homo sapiens
  misc_RNA (1)...(19): siRNA sense strand
gaaaagaacguugaaccaa

SEQ ID NO: 1674619 - RNA, 19 nt, Homo sapiens
  misc_RNA (1)...(19): siRNA sense strand
guuaucgccuacuuggaaa

SEQ ID NO: 1674620 - RNA, 19 nt, Homo sapiens
  misc_RNA (1)...(19): siRNA sense strand
gaagaaauucacaggaaaa

SEQ ID NO: 1674621 - RNA, 19 nt, Homo sapiens
  misc_RNA (1)...(19): siRNA sense strand
aauaugcaauggauguaga

SEQ ID NO: 1674622 - RNA, 19 nt, Homo sapiens
  misc_RNA (1)...(19): siRNA sense strand
cugagaagauaacagugaa

SEQ ID NO: 1674623 - RNA, 19 nt, Homo sapiens
  misc_RNA (1)...(19): siRNA sense strand
ugcgauauuucacuccuaa

SEQ ID NO: 1674624 - RNA, 19 nt, Homo sapiens
  misc_RNA (1)...(19): siRNA sense strand
gucacaagaagaacagaua

SEQ ID NO: 1674625 - RNA, 19 nt, Homo sapiens
  misc_RNA (1)...(19): siRNA sense strand
gcgcugagagaaagcugua

SEQ ID NO: 1674626 - RNA, 19 nt, Homo sapiens
  misc_RNA (1)...(19): siRNA sense strand
gaaucuguacauccacaaa

SEQ ID NO: 1674627 - RNA, 19 nt, Homo sapiens
  misc_RNA (1)...(19): siRNA sense strand
caacacugucgcuaaugaa

SEQ ID NO: 1674628 - RNA, 19 nt, Homo sapiens
  misc_RNA (1)...(19): siRNA sense strand
gcuaaugaaguauacaagu

SEQ ID NO: 1674629 - RNA, 19 nt, Homo sapiens
  misc_RNA (1)...(19): siRNA sense strand
guucggauuuccugagaag

SEQ ID NO: 1674630 - RNA, 19 nt, Homo sapiens
  misc_RNA (1)...(19): siRNA sense strand
aauagcaaaucuccuugga

SEQ ID NO: 1674631 - RNA, 19 nt, Homo sapiens
  misc_RNA (1)...(19): siRNA sense strand
guuacagacugcagaggau

SEQ ID NO: 1674632 - RNA, 19 nt, Homo sapiens
  misc_RNA (1)...(19): siRNA sense strand
gcaccacgcgcugagagaa

SEQ ID NO: 1674633 - RNA, 19 nt, Homo sapiens
  misc_RNA (1)...(19): siRNA sense strand
ucucaacgugcauguagua

SEQ ID NO: 1674634 - RNA, 19 nt, Homo sapiens
  misc_RNA (1)...(19): siRNA sense strand
uacaaaucccuuaccaauu

SEQ ID NO: 1674635 - RNA, 19 nt, Homo sapiens
  misc_RNA (1)...(19): siRNA sense strand
gaugugcagguugagaaua

SEQ ID NO: 1674636 - RNA, 19 nt, Homo sapiens
  misc_RNA (1)...(19): siRNA sense strand
agaagguccgugugcuuua

SEQ ID NO: 1674637 - RNA, 19 nt, Homo sapiens
  misc_RNA (1)...(19): siRNA sense strand
uagaagguccgugugcuuu

SEQ ID NO: 1674638 - RNA, 19 nt, Homo sapiens
  misc_RNA (1)...(19): siRNA sense strand
guagaagguccgugugcuu

SEQ ID NO: 1674639 - RNA, 19 nt, Homo sapiens
  misc_RNA (1)...(19): siRNA sense strand
ccugagaagauaacaguga

SEQ ID NO: 1674640 - RNA, 19 nt, Homo sapiens
  misc_RNA (1)...(19): siRNA sense strand
gaaacugcagaagaaauuc

SEQ ID NO: 1674641 - RNA, 19 nt, Homo sapiens
  misc_RNA (1)...(19): siRNA sense strand
cguuaucgccuacuuggaa

SEQ ID NO: 1674642 - RNA, 19 nt, Homo sapiens
  misc_RNA (1)...(19): siRNA sense strand
aagaacagauaacaaagcu

SEQ ID NO: 1674643 - RNA, 19 nt, Homo sapiens
  misc_RNA (1)...(19): siRNA sense strand
gaaccaguaucuuuuacca

SEQ ID NO: 1674644 - RNA, 19 nt, Homo sapiens
  misc_RNA (1)...(19): siRNA sense strand
gagagaaagcuguauaccu

SEQ ID NO: 1674645 - RNA, 19 nt, Homo sapiens
  misc_RNA (1)...(19): siRNA sense strand
gcugcgauaugcucuucug

SEQ ID NO: 1674646 - RNA, 19 nt, Homo sapiens
  misc_RNA (1)...(19): siRNA sense strand
aggcuacgauauuuucuua

SEQ ID NO: 1674647 - RNA, 19 nt, Homo sapiens
  misc_RNA (1)...(19): siRNA sense strand
ggauuuccugagaagauaa

SEQ ID NO: 1674648 - RNA, 19 nt, Homo sapiens
  misc_RNA (1)...(19): siRNA sense strand
acaagaagaacagauaaca

SEQ ID NO: 1674649 - RNA, 19 nt, Homo sapiens
  misc_RNA (1)...(19): siRNA sense strand
ccucuugauacaaacaaua

SEQ ID NO: 1674650 - RNA, 19 nt, Homo sapiens
  misc_RNA (1)...(19): siRNA sense strand
gagaagauaacagugaaac

SEQ ID NO: 1674651 - RNA, 19 nt, Homo sapiens
  misc_RNA (1)...(19): siRNA sense strand
ugcgggugcuggagcuaua

SEQ ID NO: 1674652 - RNA, 19 nt, Homo sapiens
  misc_RNA (1)...(19): siRNA sense strand
uaucgccuacuuggaaaua

SEQ ID NO: 1674653 - RNA, 19 nt, Homo sapiens
  misc_RNA (1)...(19): siRNA sense strand
ccucacacacaguuacuug

SEQ ID NO: 1674654 - RNA, 19 nt, Homo sapiens
  misc_RNA (1)...(19): siRNA sense strand
aauugaaucuguacaucca

SEQ ID NO: 1674655 - RNA, 19 nt, Homo sapiens
  misc_RNA (1)...(19): siRNA sense strand
cuuaaacugcgauauuuca

SEQ ID NO: 1674656 - RNA, 19 nt, Homo sapiens
  misc_RNA (1)...(19): siRNA sense strand
gcaauggauguagaaaaua

SEQ ID NO: 1674657 - RNA, 19 nt, Homo sapiens
  misc_RNA (1)...(19): siRNA sense strand
gucagagccauuacccuuu

SEQ ID NO: 1674658 - RNA, 19 nt, Homo sapiens
  misc_RNA (1)...(19): siRNA sense strand
caaccucucuuggcauucc

SEQ ID NO: 1674659 - RNA, 19 nt, Homo sapiens
  misc_RNA (1)...(19): siRNA sense strand
ggaugugcagguugagaau

SEQ ID NO: 1674660 - RNA, 19 nt, Homo sapiens
  misc_RNA (1)...(19): siRNA sense strand
aagaugacacugacgugaa

SEQ ID NO: 1674661 - RNA, 19 nt, Homo sapiens
  misc_RNA (1)...(19): siRNA sense strand
cuacuuggaaauagucuca

SEQ ID NO: 1674662 - RNA, 19 nt, Homo sapiens
  misc_RNA (1)...(19): siRNA sense strand
aaacugcagaagaaauuca

SEQ ID NO: 1674663 - RNA, 19 nt, Homo sapiens
  misc_RNA (1)...(19): siRNA sense strand
augugcagguugagaauau

SEQ ID NO: 1674664 - RNA, 19 nt, Homo sapiens
  misc_RNA (1)...(19): siRNA sense strand
ccaaaggauauggaagcua

SEQ ID NO: 1674665 - RNA, 19 nt, Homo sapiens
  misc_RNA (1)...(19): siRNA sense strand
gcgauaugcucuucuguua

SEQ ID NO: 1674666 - RNA, 19 nt, Homo sapiens
  misc_RNA (1)...(19): siRNA sense strand
gauaugcucuucuguuaga

SEQ ID NO: 1674667 - RNA, 19 nt, Homo sapiens
  misc_RNA (1)...(19): siRNA sense strand
cagaagaaauucacaggaa

SEQ ID NO: 1674668 - RNA, 19 nt, Homo sapiens
  misc_RNA (1)...(19): siRNA sense strand
caaagucauugcugcgaua

SEQ ID NO: 1674669 - RNA, 19 nt, Homo sapiens
  misc_RNA (1)...(19): siRNA sense strand
gcuugaaacugcagaagaa

SEQ ID NO: 1674670 - RNA, 19 nt, Homo sapiens
  misc_RNA (1)...(19): siRNA sense strand
uugcaaagcuucagucaga

SEQ ID NO: 1674671 - RNA, 19 nt, Homo sapiens
  misc_RNA (1)...(19): siRNA sense strand
gaacguugaaccaaauauu

SEQ ID NO: 1674672 - RNA, 19 nt, Homo sapiens
  misc_RNA (1)...(19): siRNA sense strand
ucaacacugucgcuaauga

SEQ ID NO: 1674673 - RNA, 19 nt, Homo sapiens
  misc_RNA (1)...(19): siRNA sense strand
aaagaacguugaaccaaau

SEQ ID NO: 1674674 - RNA, 19 nt, Homo sapiens
  misc_RNA (1)...(19): siRNA sense strand
caaauucaaggcuacgaua

SEQ ID NO: 1674675 - RNA, 19 nt, Homo sapiens
  misc_RNA (1)...(19): siRNA sense strand
cagaggaugugcagguuga

SEQ ID NO: 1674676 - RNA, 19 nt, Homo sapiens
  misc_RNA (1)...(19): siRNA sense strand
agaagaaauucacaggaaa

SEQ ID NO: 1674677 - RNA, 19 nt, Homo sapiens
  misc_RNA (1)...(19): siRNA sense strand
gacgugaaccaguaucuuu

SEQ ID NO: 1674678 - RNA, 19 nt, Homo sapiens
  misc_RNA (1)...(19): siRNA sense strand
cuacaaaucccuuaccaau

SEQ ID NO: 1674679 - RNA, 19 nt, Homo sapiens
  misc_RNA (1)...(19): siRNA sense strand
uagcuuugauggcagcaua

SEQ ID NO: 1674680 - RNA, 19 nt, Homo sapiens
  misc_RNA (1)...(19): siRNA sense strand
gcucuucuguuagacauug

SEQ ID NO: 1674681 - RNA, 19 nt, Homo sapiens
  misc_RNA (1)...(19): siRNA sense strand
cacugucgcuaaugaagua

SEQ ID NO: 1674682 - RNA, 19 nt, Homo sapiens
  misc_RNA (1)...(19): siRNA sense strand
ugaaacugcagaagaaauu

SEQ ID NO: 1674683 - RNA, 19 nt, Homo sapiens
  misc_RNA (1)...(19): siRNA sense strand
gcugagagaaagcuguaua

SEQ ID NO: 1674684 - RNA, 19 nt, Homo sapiens
  misc_RNA (1)...(19): siRNA sense strand
gaagauaacagugaaacag

SEQ ID NO: 1674685 - RNA, 19 nt, Homo sapiens
  misc_RNA (1)...(19): siRNA sense strand
auucaaggcuacgauauuu

SEQ ID NO: 1674686 - RNA, 19 nt, Homo sapiens
  misc_RNA (1)...(19): siRNA sense strand
gauauuucacuccuaaaga

SEQ ID NO: 1674687 - RNA, 19 nt, Homo sapiens
  misc_RNA (1)...(19): siRNA sense strand
auagugaucucucugugaa

SEQ ID NO: 1674688 - RNA, 19 nt, Homo sapiens
  misc_RNA (1)...(19): siRNA sense strand
caacgugcauguaguagcu

SEQ ID NO: 1674689 - RNA, 19 nt, Homo sapiens
  misc_RNA (1)...(19): siRNA sense strand
agaaauagcaaaucuccuu

SEQ ID NO: 1674690 - RNA, 19 nt, Homo sapiens
  misc_RNA (1)...(19): siRNA sense strand
gauagugaucucucuguga

SEQ ID NO: 1674691 - RNA, 19 nt, Homo sapiens
  misc_RNA (1)...(19): siRNA sense strand
caagaagaacagauaacaa

SEQ ID NO: 1674692 - RNA, 19 nt, Homo sapiens
  misc_RNA (1)...(19): siRNA sense strand
gaagguccgugugcuuuac

SEQ ID NO: 1674693 - RNA, 19 nt, Homo sapiens
  misc_RNA (1)...(19): siRNA sense strand
cggauuuccugagaagaua

SEQ ID NO: 1674694 - RNA, 19 nt, Homo sapiens
  misc_RNA (1)...(19): siRNA sense strand
gaguucggauuuccugaga

SEQ ID NO: 1674695 - RNA, 19 nt, Homo sapiens
  misc_RNA (1)...(19): siRNA sense strand
ucacaagaagaacagauaa

SEQ ID NO: 1674696 - RNA, 19 nt, Homo sapiens
  misc_RNA (1)...(19): siRNA sense strand
ucagagccauuacccuuuc

SEQ ID NO: 1674697 - RNA, 19 nt, Homo sapiens
  misc_RNA (1)...(19): siRNA sense strand
ugucaacacugucgcuaau

SEQ ID NO: 1674698 - RNA, 19 nt, Homo sapiens
  misc_RNA (1)...(19): siRNA sense strand
aaaagaacguugaaccaaa

SEQ ID NO: 1674699 - RNA, 19 nt, Homo sapiens
  misc_RNA (1)...(19): siRNA sense strand
gguugagaauaucuacaaa

SEQ ID NO: 1674700 - RNA, 19 nt, Homo sapiens
  misc_RNA (1)...(19): siRNA sense strand
guucagcccacuuguagaa

SEQ ID NO: 1674701 - RNA, 19 nt, Homo sapiens
  misc_RNA (1)...(19): siRNA sense strand
gaagaacagauaacaaagc

SEQ ID NO: 1674702 - RNA, 19 nt, Homo sapiens
  misc_RNA (1)...(19): siRNA sense strand
cuguauaccugcacaagug

SEQ ID NO: 1674703 - RNA, 19 nt, Homo sapiens
  misc_RNA (1)...(19): siRNA sense strand
gcauacaguguucuggaaa

SEQ ID NO: 1674704 - RNA, 19 nt, Homo sapiens
  misc_RNA (1)...(19): siRNA sense strand
gauggcagcauacaguguu

SEQ ID NO: 1674705 - RNA, 19 nt, Homo sapiens
  misc_RNA (1)...(19): siRNA sense strand
gaaaagaacguugaaccaa

SEQ ID NO: 1674706 - RNA, 19 nt, Homo sapiens
  misc_RNA (1)...(19): siRNA sense strand
guuaucgccuacuuggaaa

SEQ ID NO: 1674707 - RNA, 19 nt, Homo sapiens
  misc_RNA (1)...(19): siRNA sense strand
gaagaaauucacaggaaaa

SEQ ID NO: 1674708 - RNA, 19 nt, Homo sapiens
  misc_RNA (1)...(19): siRNA sense strand
aauaugcaauggauguaga

SEQ ID NO: 1674709 - RNA, 19 nt, Homo sapiens
  misc_RNA (1)...(19): siRNA sense strand
cugagaagauaacagugaa

SEQ ID NO: 1674710 - RNA, 19 nt, Homo sapiens
  misc_RNA (1)...(19): siRNA sense strand
ugcgauauuucacuccuaa

SEQ ID NO: 1674711 - RNA, 19 nt, Homo sapiens
  misc_RNA (1)...(19): siRNA sense strand
gucacaagaagaacagaua

SEQ ID NO: 1674712 - RNA, 19 nt, Homo sapiens
  misc_RNA (1)...(19): siRNA sense strand
gcgcugagagaaagcugua

SEQ ID NO: 1674713 - RNA, 19 nt, Homo sapiens
  misc_RNA (1)...(19): siRNA sense strand
gaaucuguacauccacaaa

SEQ ID NO: 1674714 - RNA, 19 nt, Homo sapiens
  misc_RNA (1)...(19): siRNA sense strand
caacacugucgcuaaugaa

SEQ ID NO: 1674715 - RNA, 19 nt, Homo sapiens
  misc_RNA (1)...(19): siRNA sense strand
gcuaaugaaguauacaagu

SEQ ID NO: 1674716 - RNA, 19 nt, Homo sapiens
  misc_RNA (1)...(19): siRNA sense strand
guucggauuuccugagaag

SEQ ID NO: 1674717 - RNA, 19 nt, Homo sapiens
  misc_RNA (1)...(19): siRNA sense strand
aauagcaaaucuccuugga

SEQ ID NO: 1674718 - RNA, 19 nt, Homo sapiens
  misc_RNA (1)...(19): siRNA sense strand
guuacagacugcagaggau

SEQ ID NO: 1674719 - RNA, 19 nt, Homo sapiens
  misc_RNA (1)...(19): siRNA sense strand
gcaccacgcgcugagagaa

SEQ ID NO: 1674720 - RNA, 19 nt, Homo sapiens
  misc_RNA (1)...(19): siRNA sense strand
ucucaacgugcauguagua

SEQ ID NO: 1674721 - RNA, 19 nt, Homo sapiens
  misc_RNA (1)...(19): siRNA sense strand
uacaaaucccuuaccaauu

SEQ ID NO: 1674722 - RNA, 19 nt, Homo sapiens
  misc_RNA (1)...(19): siRNA sense strand
gaugugcagguugagaaua

SEQ ID NO: 1674723 - RNA, 19 nt, Homo sapiens
  misc_RNA (1)...(19): siRNA sense strand
agaagguccgugugcuuua

SEQ ID NO: 1674724 - RNA, 19 nt, Homo sapiens
  misc_RNA (1)...(19): siRNA sense strand
uagaagguccgugugcuuu

SEQ ID NO: 1674725 - RNA, 19 nt, Homo sapiens
  misc_RNA (1)...(19): siRNA sense strand
guagaagguccgugugcuu

SEQ ID NO: 1674726 - RNA, 19 nt, Homo sapiens
  misc_RNA (1)...(19): siRNA sense strand
ccugagaagauaacaguga

SEQ ID NO: 1674727 - RNA, 19 nt, Homo sapiens
  misc_RNA (1)...(19): siRNA sense strand
gaaacugcagaagaaauuc

SEQ ID NO: 1674728 - RNA, 19 nt, Homo sapiens
  misc_RNA (1)...(19): siRNA sense strand
cguuaucgccuacuuggaa

SEQ ID NO: 1674729 - RNA, 19 nt, Homo sapiens
  misc_RNA (1)...(19): siRNA sense strand
aagaacagauaacaaagcu

SEQ ID NO: 1674730 - RNA, 19 nt, Homo sapiens
  misc_RNA (1)...(19): siRNA sense strand
gaaccaguaucuuuuacca

SEQ ID NO: 1674731 - RNA, 19 nt, Homo sapiens
  misc_RNA (1)...(19): siRNA sense strand
gagagaaagcuguauaccu

SEQ ID NO: 1674732 - RNA, 19 nt, Homo sapiens
  misc_RNA (1)...(19): siRNA sense strand
gcugcgauaugcucuucug

SEQ ID NO: 1674733 - RNA, 19 nt, Homo sapiens
  misc_RNA (1)...(19): siRNA sense strand
aggcuacgauauuuucuua

SEQ ID NO: 1674734 - RNA, 19 nt, Homo sapiens
  misc_RNA (1)...(19): siRNA sense strand
ggauuuccugagaagauaa

SEQ ID NO: 1674735 - RNA, 19 nt, Homo sapiens
  misc_RNA (1)...(19): siRNA sense strand
acaagaagaacagauaaca

SEQ ID NO: 1674736 - RNA, 19 nt, Homo sapiens
  misc_RNA (1)...(19): siRNA sense strand
ccucuugauacaaacaaua

SEQ ID NO: 1674737 - RNA, 19 nt, Homo sapiens
  misc_RNA (1)...(19): siRNA sense strand
gagaagauaacagugaaac

SEQ ID NO: 1674738 - RNA, 19 nt, Homo sapiens
  misc_RNA (1)...(19): siRNA sense strand
ugcgggugcuggagcuaua

SEQ ID NO: 1674739 - RNA, 19 nt, Homo sapiens
  misc_RNA (1)...(19): siRNA sense strand
uaucgccuacuuggaaaua

SEQ ID NO: 1674740 - RNA, 19 nt, Homo sapiens
  misc_RNA (1)...(19): siRNA sense strand
ccucacacacaguuacuug

SEQ ID NO: 1674741 - RNA, 19 nt, Homo sapiens
  misc_RNA (1)...(19): siRNA sense strand
aauugaaucuguacaucca

SEQ ID NO: 1674742 - RNA, 19 nt, Homo sapiens
  misc_RNA (1)...(19): siRNA sense strand
cuuaaacugcgauauuuca

SEQ ID NO: 1674743 - RNA, 19 nt, Homo sapiens
  misc_RNA (1)...(19): siRNA sense strand
gcaauggauguagaaaaua

SEQ ID NO: 1674744 - RNA, 19 nt, Homo sapiens
  misc_RNA (1)...(19): siRNA sense strand
gucagagccauuacccuuu

SEQ ID NO: 1674745 - RNA, 19 nt, Homo sapiens
  misc_RNA (1)...(19): siRNA sense strand
caaccucucuuggcauucc

SEQ ID NO: 1674746 - RNA, 19 nt, Homo sapiens
  misc_RNA (1)...(19): siRNA sense strand
ggaugugcagguugagaau

SEQ ID NO: 1674747 - RNA, 19 nt, Homo sapiens
  misc_RNA (1)...(19): siRNA sense strand
aagaugacacugacgugaa

SEQ ID NO: 1674748 - RNA, 19 nt, Homo sapiens
  misc_RNA (1)...(19): siRNA sense strand
cuacuuggaaauagucuca

SEQ ID NO: 1674749 - RNA, 19 nt, Homo sapiens
  misc_RNA (1)...(19): siRNA sense strand
aaacugcagaagaaauuca

SEQ ID NO: 1674750 - RNA, 19 nt, Homo sapiens
  misc_RNA (1)...(19): siRNA sense strand
augugcagguugagaauau

SEQ ID NO: 1674751 - RNA, 19 nt, Homo sapiens
  misc_RNA (1)...(19): siRNA sense strand
ccaaaggauauggaagcua

SEQ ID NO: 1674752 - RNA, 19 nt, Homo sapiens
  misc_RNA (1)...(19): siRNA sense strand
ucaacacugucgcuaauga

SEQ ID NO: 1674753 - RNA, 19 nt, Homo sapiens
  misc_RNA (1)...(19): siRNA sense strand
cacugucgcuaaugaagua

SEQ ID NO: 1674754 - RNA, 19 nt, Homo sapiens
  misc_RNA (1)...(19): siRNA sense strand
gcugagagaaagcuguaua

SEQ ID NO: 1674755 - RNA, 19 nt, Homo sapiens
  misc_RNA (1)...(19): siRNA sense strand
ugucaacacugucgcuaau

SEQ ID NO: 1674756 - RNA, 19 nt, Homo sapiens
  misc_RNA (1)...(19): siRNA sense strand
cuguauaccugcacaagug

SEQ ID NO: 1674757 - RNA, 19 nt, Homo sapiens
  misc_RNA (1)...(19): siRNA sense strand
gcgcugagagaaagcugua

SEQ ID NO: 1674758 - RNA, 19 nt, Homo sapiens
  misc_RNA (1)...(19): siRNA sense strand
caacacugucgcuaaugaa

SEQ ID NO: 1674759 - RNA, 19 nt, Homo sapiens
  misc_RNA (1)...(19): siRNA sense strand
gcuaaugaaguauacaagu

SEQ ID NO: 1674760 - RNA, 19 nt, Homo sapiens
  misc_RNA (1)...(19): siRNA sense strand
gcaccacgcgcugagagaa

SEQ ID NO: 1674761 - RNA, 19 nt, Homo sapiens
  misc_RNA (1)...(19): siRNA sense strand
gagagaaagcuguauaccu

SEQ ID NO: 1674762 - RNA, 19 nt, Homo sapiens
  misc_RNA (1)...(19): siRNA sense strand
ugcgggugcuggagcuaua

SEQ ID NO: 1674763 - RNA, 19 nt, Homo sapiens
  misc_RNA (1)...(19): siRNA sense strand
ccucacacacaguuacuug

SEQ ID NO: 1674764 - RNA, 19 nt, Homo sapiens
  misc_RNA (1)...(19): siRNA sense strand
ucaacacugucgcuaauga

SEQ ID NO: 1674765 - RNA, 19 nt, Homo sapiens
  misc_RNA (1)...(19): siRNA sense strand
cacugucgcuaaugaagua

SEQ ID NO: 1674766 - RNA, 19 nt, Homo sapiens
  misc_RNA (1)...(19): siRNA sense strand
gcugagagaaagcuguaua

SEQ ID NO: 1674767 - RNA, 19 nt, Homo sapiens
  misc_RNA (1)...(19): siRNA sense strand
ugucaacacugucgcuaau

SEQ ID NO: 1674768 - RNA, 19 nt, Homo sapiens
  misc_RNA (1)...(19): siRNA sense strand
cuguauaccugcacaagug

SEQ ID NO: 1674769 - RNA, 19 nt, Homo sapiens
  misc_RNA (1)...(19): siRNA sense strand
gcgcugagagaaagcugua

SEQ ID NO: 1674770 - RNA, 19 nt, Homo sapiens
  misc_RNA (1)...(19): siRNA sense strand
caacacugucgcuaaugaa

SEQ ID NO: 1674771 - RNA, 19 nt, Homo sapiens
  misc_RNA (1)...(19): siRNA sense strand
gcuaaugaaguauacaagu

SEQ ID NO: 1674772 - RNA, 19 nt, Homo sapiens
  misc_RNA (1)...(19): siRNA sense strand
gcaccacgcgcugagagaa

SEQ ID NO: 1674773 - RNA, 19 nt, Homo sapiens
  misc_RNA (1)...(19): siRNA sense strand
gagagaaagcuguauaccu

SEQ ID NO: 1674774 - RNA, 19 nt, Homo sapiens
  misc_RNA (1)...(19): siRNA sense strand
ugcgggugcuggagcuaua

SEQ ID NO: 1674775 - RNA, 19 nt, Homo sapiens
  misc_RNA (1)...(19): siRNA sense strand
ccucacacacaguuacuug

SEQ ID NO: 1674776 - RNA, 19 nt, Homo sapiens
  misc_RNA (1)...(19): siRNA sense strand
uugcaaagcuucagucaga

SEQ ID NO: 1674777 - RNA, 19 nt, Homo sapiens
  misc_RNA (1)...(19): siRNA sense strand
ucaacacugucgcuaauga

SEQ ID NO: 1674778 - RNA, 19 nt, Homo sapiens
  misc_RNA (1)...(19): siRNA sense strand
caaauucaaggcuacgaua

SEQ ID NO: 1674779 - RNA, 19 nt, Homo sapiens
  misc_RNA (1)...(19): siRNA sense strand
cacugucgcuaaugaagua

SEQ ID NO: 1674780 - RNA, 19 nt, Homo sapiens
  misc_RNA (1)...(19): siRNA sense strand
gcugagagaaagcuguaua

SEQ ID NO: 1674781 - RNA, 19 nt, Homo sapiens
  misc_RNA (1)...(19): siRNA sense strand
auucaaggcuacgauauuu

SEQ ID NO: 1674782 - RNA, 19 nt, Homo sapiens
  misc_RNA (1)...(19): siRNA sense strand
ugucaacacugucgcuaau

SEQ ID NO: 1674783 - RNA, 19 nt, Homo sapiens
  misc_RNA (1)...(19): siRNA sense strand
ucagagccauuacccuuuc

SEQ ID NO: 1674784 - RNA, 19 nt, Homo sapiens
  misc_RNA (1)...(19): siRNA sense strand
cuguauaccugcacaagug

SEQ ID NO: 1674785 - RNA, 19 nt, Homo sapiens
  misc_RNA (1)...(19): siRNA sense strand
gcgcugagagaaagcugua

SEQ ID NO: 1674786 - RNA, 19 nt, Homo sapiens
  misc_RNA (1)...(19): siRNA sense strand
caacacugucgcuaaugaa

SEQ ID NO: 1674787 - RNA, 19 nt, Homo sapiens
  misc_RNA (1)...(19): siRNA sense strand
gcuaaugaaguauacaagu

SEQ ID NO: 1674788 - RNA, 19 nt, Homo sapiens
  misc_RNA (1)...(19): siRNA sense strand
gcaccacgcgcugagagaa

SEQ ID NO: 1674789 - RNA, 19 nt, Homo sapiens
  misc_RNA (1)...(19): siRNA sense strand
gagagaaagcuguauaccu

SEQ ID NO: 1674790 - RNA, 19 nt, Homo sapiens
  misc_RNA (1)...(19): siRNA sense strand
ccucuugauacaaacaaua

SEQ ID NO: 1674791 - RNA, 19 nt, Homo sapiens
  misc_RNA (1)...(19): siRNA sense strand
aggcuacgauauuuucuua

SEQ ID NO: 1674792 - RNA, 19 nt, Homo sapiens
  misc_RNA (1)...(19): siRNA sense strand
ugcgggugcuggagcuaua

SEQ ID NO: 1674793 - RNA, 19 nt, Homo sapiens
  misc_RNA (1)...(19): siRNA sense strand
ccucacacacaguuacuug

SEQ ID NO: 1674794 - RNA, 19 nt, Homo sapiens
  misc_RNA (1)...(19): siRNA sense strand
caaccucucuuggcauucc

SEQ ID NO: 1674795 - RNA, 19 nt, Homo sapiens
  misc_RNA (1)...(19): siRNA sense strand
gucagagccauuacccuuu

SEQ ID NO: 1674796 - RNA, 19 nt, Homo sapiens
  misc_RNA (1)...(19): siRNA sense strand
gaauaacgcugagcugugu

SEQ ID NO: 1674797 - RNA, 19 nt, Homo sapiens
  misc_RNA (1)...(19): siRNA sense strand
uggaagacaucgagaagua

SEQ ID NO: 1674798 - RNA, 19 nt, Homo sapiens
  misc_RNA (1)...(19): siRNA sense strand
gcaucgagcugacggauuc

SEQ ID NO: 1674799 - RNA, 19 nt, Homo sapiens
  misc_RNA (1)...(19): siRNA sense strand
gcucucagcuggcaacaug

SEQ ID NO: 1674800 - RNA, 19 nt, Homo sapiens
  misc_RNA (1)...(19): siRNA sense strand
ggacaaggaaggcaaauuc

SEQ ID NO: 1674801 - RNA, 19 nt, Homo sapiens
  misc_RNA (1)...(19): siRNA sense strand
gagagauccuugccuugaa

SEQ ID NO: 1674802 - RNA, 19 nt, Homo sapiens
  misc_RNA (1)...(19): siRNA sense strand
ucaagaccauccagaagaa

SEQ ID NO: 1674803 - RNA, 19 nt, Homo sapiens
  misc_RNA (1)...(19): siRNA sense strand
gaacacaaucuuuaccaau

SEQ ID NO: 1674804 - RNA, 19 nt, Homo sapiens
  misc_RNA (1)...(19): siRNA sense strand
gcuacaacuucggcaaaua

SEQ ID NO: 1674805 - RNA, 19 nt, Homo sapiens
  misc_RNA (1)...(19): siRNA sense strand
cccaagaucuuccauguca

SEQ ID NO: 1674806 - RNA, 19 nt, Homo sapiens
  misc_RNA (1)...(19): siRNA sense strand
gaaccucucggccaaaguu

SEQ ID NO: 1674807 - RNA, 19 nt, Homo sapiens
  misc_RNA (1)...(19): siRNA sense strand
gaacauaaaggcaaaauca

SEQ ID NO: 1674808 - RNA, 19 nt, Homo sapiens
  misc_RNA (1)...(19): siRNA sense strand
gacauugccuggaugaagu

SEQ ID NO: 1674809 - RNA, 19 nt, Homo sapiens
  misc_RNA (1)...(19): siRNA sense strand
ugaaaggucgcaccaugua

SEQ ID NO: 1674810 - RNA, 19 nt, Homo sapiens
  misc_RNA (1)...(19): siRNA sense strand
gggaugacauugccuggau

SEQ ID NO: 1674811 - RNA, 19 nt, Homo sapiens
  misc_RNA (1)...(19): siRNA sense strand
cagccaaacugcccaagau

SEQ ID NO: 1674812 - RNA, 19 nt, Homo sapiens
  misc_RNA (1)...(19): siRNA sense strand
gaugaaguuugacgcacaa

SEQ ID NO: 1674813 - RNA, 19 nt, Homo sapiens
  misc_RNA (1)...(19): siRNA sense strand
caaagaauaagccagaugu

SEQ ID NO: 1674814 - RNA, 19 nt, Homo sapiens
  misc_RNA (1)...(19): siRNA sense strand
ccauguacgucaucccauu

SEQ ID NO: 1674815 - RNA, 19 nt, Homo sapiens
  misc_RNA (1)...(19): siRNA sense strand
gcucgccucugucaaagau

SEQ ID NO: 1674816 - RNA, 19 nt, Homo sapiens
  misc_RNA (1)...(19): siRNA sense strand
gaaggacaaggaaggcaaa

SEQ ID NO: 1674817 - RNA, 19 nt, Homo sapiens
  misc_RNA (1)...(19): siRNA sense strand
gcaaagaauaagccagaug

SEQ ID NO: 1674818 - RNA, 19 nt, Homo sapiens
  misc_RNA (1)...(19): siRNA sense strand
aacacaaucuuuaccaaug

SEQ ID NO: 1674819 - RNA, 19 nt, Homo sapiens
  misc_RNA (1)...(19): siRNA sense strand
acacaaucuuuaccaaugu

SEQ ID NO: 1674820 - RNA, 19 nt, Homo sapiens
  misc_RNA (1)...(19): siRNA sense strand
gaagacaucgagaaguauc

SEQ ID NO: 1674821 - RNA, 19 nt, Homo sapiens
  misc_RNA (1)...(19): siRNA sense strand
caaggaggaugcccugaac

SEQ ID NO: 1674822 - RNA, 19 nt, Homo sapiens
  misc_RNA (1)...(19): siRNA sense strand
ccugugaaaucgagagaga

SEQ ID NO: 1674823 - RNA, 19 nt, Homo sapiens
  misc_RNA (1)...(19): siRNA sense strand
aagaauaagccagauguaa

SEQ ID NO: 1674824 - RNA, 19 nt, Homo sapiens
  misc_RNA (1)...(19): siRNA sense strand
agaccaaccuggccaugau

SEQ ID NO: 1674825 - RNA, 19 nt, Homo sapiens
  misc_RNA (1)...(19): siRNA sense strand
cauugaaggcauuaucuuu

SEQ ID NO: 1674826 - RNA, 19 nt, Homo sapiens
  misc_RNA (1)...(19): siRNA sense strand
ccagggauguggccaggau

SEQ ID NO: 1674827 - RNA, 19 nt, Homo sapiens
  misc_RNA (1)...(19): siRNA sense strand
ucaaccggaucgauggaaa

SEQ ID NO: 1674828 - RNA, 19 nt, Homo sapiens
  misc_RNA (1)...(19): siRNA sense strand
ccaaugccaucaagaccau

SEQ ID NO: 1674829 - RNA, 19 nt, Homo sapiens
  misc_RNA (1)...(19): siRNA sense strand
gaaguuugacgcacaaggu

SEQ ID NO: 1674830 - RNA, 19 nt, Homo sapiens
  misc_RNA (1)...(19): siRNA sense strand
ggaugucagaggaggauuu

SEQ ID NO: 1674831 - RNA, 19 nt, Homo sapiens
  misc_RNA (1)...(19): siRNA sense strand
aagaagugcuuugcucuca

SEQ ID NO: 1674832 - RNA, 19 nt, Homo sapiens
  misc_RNA (1)...(19): siRNA sense strand
gcacccagcagccaaacug

SEQ ID NO: 1674833 - RNA, 19 nt, Homo sapiens
  misc_RNA (1)...(19): siRNA sense strand
agaacacaaucuuuaccaa

SEQ ID NO: 1674834 - RNA, 19 nt, Homo sapiens
  misc_RNA (1)...(19): siRNA sense strand
ucacguccuggaagaauaa

SEQ ID NO: 1674835 - RNA, 19 nt, Homo sapiens
  misc_RNA (1)...(19): siRNA sense strand
gcucugaggaggagaaugg

SEQ ID NO: 1674836 - RNA, 19 nt, Homo sapiens
  misc_RNA (1)...(19): siRNA sense strand
ggaagacaucgagaaguau

SEQ ID NO: 1674837 - RNA, 19 nt, Homo sapiens
  misc_RNA (1)...(19): siRNA sense strand
ccaaggaggaugcccugaa

SEQ ID NO: 1674838 - RNA, 19 nt, Homo sapiens
  misc_RNA (1)...(19): siRNA sense strand
ccaaacugcccaagaucuu

SEQ ID NO: 1674839 - RNA, 19 nt, Homo sapiens
  misc_RNA (1)...(19): siRNA sense strand
gauguggccaggaucgaaa

SEQ ID NO: 1674840 - RNA, 19 nt, Homo sapiens
  misc_RNA (1)...(19): siRNA sense strand
gaugacauugccuggauga

SEQ ID NO: 1674841 - RNA, 19 nt, Homo sapiens
  misc_RNA (1)...(19): siRNA sense strand
gaagguguucccauugaag

SEQ ID NO: 1674842 - RNA, 19 nt, Homo sapiens
  misc_RNA (1)...(19): siRNA sense strand
cuggcaacauggagucuuu

SEQ ID NO: 1674843 - RNA, 19 nt, Homo sapiens
  misc_RNA (1)...(19): siRNA sense strand
gccuugaagcaaagaauaa

SEQ ID NO: 1674844 - RNA, 19 nt, Homo sapiens
  misc_RNA (1)...(19): siRNA sense strand
agagagauccuugccuuga

SEQ ID NO: 1674845 - RNA, 19 nt, Homo sapiens
  misc_RNA (1)...(19): siRNA sense strand
ugucaaagaucggcaucga

SEQ ID NO: 1674846 - RNA, 19 nt, Homo sapiens
  misc_RNA (1)...(19): siRNA sense strand
aaagaauaagccagaugua

SEQ ID NO: 1674847 - RNA, 19 nt, Homo sapiens
  misc_RNA (1)...(19): siRNA sense strand
gugcuggaguggauguuca

SEQ ID NO: 1674848 - RNA, 19 nt, Homo sapiens
  misc_RNA (1)...(19): siRNA sense strand
ugaaggcauuaucuuugga

SEQ ID NO: 1674849 - RNA, 19 nt, Homo sapiens
  misc_RNA (1)...(19): siRNA sense strand
ugaagaaguaugacaacug

SEQ ID NO: 1674850 - RNA, 19 nt, Homo sapiens
  misc_RNA (1)...(19): siRNA sense strand
uugccuggaugaaguuuga

SEQ ID NO: 1674851 - RNA, 19 nt, Homo sapiens
  misc_RNA (1)...(19): siRNA sense strand
ccaucaagaccauccagaa

SEQ ID NO: 1674852 - RNA, 19 nt, Homo sapiens
  misc_RNA (1)...(19): siRNA sense strand
ggaguggagcucagaggau

SEQ ID NO: 1674853 - RNA, 19 nt, Homo sapiens
  misc_RNA (1)...(19): siRNA sense strand
cagcaucuccaaggaauuc

SEQ ID NO: 1674854 - RNA, 19 nt, Homo sapiens
  misc_RNA (1)...(19): siRNA sense strand
ugcagaacauaaaggcaaa

SEQ ID NO: 1674855 - RNA, 19 nt, Homo sapiens
  misc_RNA (1)...(19): siRNA sense strand
agaggaggauuuugagaaa

SEQ ID NO: 1674856 - RNA, 19 nt, Homo sapiens
  misc_RNA (1)...(19): siRNA sense strand
aggaugcccugaaccugaa

SEQ ID NO: 1674857 - RNA, 19 nt, Homo sapiens
  misc_RNA (1)...(19): siRNA sense strand
ugcccaagaucuuccaugu

SEQ ID NO: 1674858 - RNA, 19 nt, Homo sapiens
  misc_RNA (1)...(19): siRNA sense strand
uggugucccucuagucuau

SEQ ID NO: 1674859 - RNA, 19 nt, Homo sapiens
  misc_RNA (1)...(19): siRNA sense strand
cgcacaaggucauuuaagg

SEQ ID NO: 1674860 - RNA, 19 nt, Homo sapiens
  misc_RNA (1)...(19): siRNA sense strand
gcuccugggacuucaguga

SEQ ID NO: 1674861 - RNA, 19 nt, Homo sapiens
  misc_RNA (1)...(19): siRNA sense strand
ggcuacaacuucggcaaau

SEQ ID NO: 1674862 - RNA, 19 nt, Homo sapiens
  misc_RNA (1)...(19): siRNA sense strand
caucaagaccauccagaag

SEQ ID NO: 1674863 - RNA, 19 nt, Homo sapiens
  misc_RNA (1)...(19): siRNA sense strand
uaucgucacccaagagcaa

SEQ ID NO: 1674864 - RNA, 19 nt, Homo sapiens
  misc_RNA (1)...(19): siRNA sense strand
gcugguuggcucucacuga

SEQ ID NO: 1674865 - RNA, 19 nt, Homo sapiens
  misc_RNA (1)...(19): siRNA sense strand
ugaaaucgagagagagauc

SEQ ID NO: 1674866 - RNA, 19 nt, Homo sapiens
  misc_RNA (1)...(19): siRNA sense strand
gaaagcaagacgguuaucg

SEQ ID NO: 1674867 - RNA, 19 nt, Homo sapiens
  misc_RNA (1)...(19): siRNA sense strand
ccaagaucuuccaugucaa

SEQ ID NO: 1674868 - RNA, 19 nt, Homo sapiens
  misc_RNA (1)...(19): siRNA sense strand
ggauguggccaggaucgaa

SEQ ID NO: 1674869 - RNA, 19 nt, Homo sapiens
  misc_RNA (1)...(19): siRNA sense strand
gccaggaucgaaagcaaga

SEQ ID NO: 1674870 - RNA, 19 nt, Homo sapiens
  misc_RNA (1)...(19): siRNA sense strand
gaaaggucgcaccauguac

SEQ ID NO: 1674871 - RNA, 19 nt, Homo sapiens
  misc_RNA (1)...(19): siRNA sense strand
caugcugguucuggguaua

SEQ ID NO: 1674872 - RNA, 19 nt, Homo sapiens
  misc_RNA (1)...(19): siRNA sense strand
agagauccuugccuugaag

SEQ ID NO: 1674873 - RNA, 19 nt, Homo sapiens
  misc_RNA (1)...(19): siRNA sense strand
cuacaacuucggcaaauac

SEQ ID NO: 1674874 - RNA, 19 nt, Homo sapiens
  misc_RNA (1)...(19): siRNA sense strand
uugaaggcauuaucuuugg

SEQ ID NO: 1674875 - RNA, 19 nt, Homo sapiens
  misc_RNA (1)...(19): siRNA sense strand
gcaacauggagucuuugug

SEQ ID NO: 1674876 - RNA, 19 nt, Homo sapiens
  misc_RNA (1)...(19): siRNA sense strand
ggccaggcuuuggagagaa

SEQ ID NO: 1674877 - RNA, 19 nt, Homo sapiens
  misc_RNA (1)...(19): siRNA sense strand
ucaacugguuccggaagga

SEQ ID NO: 1674878 - RNA, 19 nt, Homo sapiens
  misc_RNA (1)...(19): siRNA sense strand
uaccuggcccacuggcuua

SEQ ID NO: 1674879 - RNA, 19 nt, Homo sapiens
  misc_RNA (1)...(19): siRNA sense strand
ugacauugccuggaugaag

SEQ ID NO: 1674880 - RNA, 19 nt, Homo sapiens
  misc_RNA (1)...(19): siRNA sense strand
gguggaagacaucgagaag

SEQ ID NO: 1674881 - RNA, 19 nt, Homo sapiens
  misc_RNA (1)...(19): siRNA sense strand
uggccaggcuuuggagaga

SEQ ID NO: 1674882 - RNA, 19 nt, Homo sapiens
  misc_RNA (1)...(19): siRNA sense strand
caagaucuuccaugucaac

SEQ ID NO: 1674883 - RNA, 19 nt, Homo sapiens
  misc_RNA (1)...(19): siRNA sense strand
caaacugcccaagaucuuc

SEQ ID NO: 1674884 - RNA, 19 nt, Homo sapiens
  misc_RNA (1)...(19): siRNA sense strand
gacgcacaaggucauuuaa

SEQ ID NO: 1674885 - RNA, 19 nt, Homo sapiens
  misc_RNA (1)...(19): siRNA sense strand
gggcucgccucugucaaag

SEQ ID NO: 1674886 - RNA, 19 nt, Homo sapiens
  misc_RNA (1)...(19): siRNA sense strand
uggccaggaucgaaagcaa

SEQ ID NO: 1674887 - RNA, 19 nt, Homo sapiens
  misc_RNA (1)...(19): siRNA sense strand
ggugcccucugccuuuaca

SEQ ID NO: 1674888 - RNA, 19 nt, Homo sapiens
  misc_RNA (1)...(19): siRNA sense strand
ggggugcccucugccuuua

SEQ ID NO: 1674889 - RNA, 19 nt, Homo sapiens
  misc_RNA (1)...(19): siRNA sense strand
ggaagcaacccaagacguu

SEQ ID NO: 1674890 - RNA, 19 nt, Homo sapiens
  misc_RNA (1)...(19): siRNA sense strand
agaagcagauuuuagauga

SEQ ID NO: 1674891 - RNA, 19 nt, Homo sapiens
  misc_RNA (1)...(19): siRNA sense strand
gaagcagauuuuagaugaa

SEQ ID NO: 1674892 - RNA, 19 nt, Homo sapiens
  misc_RNA (1)...(19): siRNA sense strand
caccauggacgccgagaug

SEQ ID NO: 1674893 - RNA, 19 nt, Homo sapiens
  misc_RNA (1)...(19): siRNA sense strand
acgccgagauggaguucaa

SEQ ID NO: 1674894 - RNA, 19 nt, Homo sapiens
  misc_RNA (1)...(19): siRNA sense strand
gccaucgcuucccgcauga

SEQ ID NO: 1674895 - RNA, 19 nt, Homo sapiens
  misc_RNA (1)...(19): siRNA sense strand
gccgagauggaguucaauu

SEQ ID NO: 1674896 - RNA, 19 nt, Homo sapiens
  misc_RNA (1)...(19): siRNA sense strand
cgagauggaguucaauugc

SEQ ID NO: 1674897 - RNA, 19 nt, Homo sapiens
  misc_RNA (1)...(19): siRNA sense strand
ugaggaucgucaccaugga

SEQ ID NO: 1674898 - RNA, 19 nt, Homo sapiens
  misc_RNA (1)...(19): siRNA sense strand
ccgagauggaguucaauug

SEQ ID NO: 1674899 - RNA, 19 nt, Homo sapiens
  misc_RNA (1)...(19): siRNA sense strand
ggaagcaacccaagacguu

SEQ ID NO: 1674900 - RNA, 19 nt, Homo sapiens
  misc_RNA (1)...(19): siRNA sense strand
agaagcagauuuuagauga

SEQ ID NO: 1674901 - RNA, 19 nt, Homo sapiens
  misc_RNA (1)...(19): siRNA sense strand
gaagcagauuuuagaugaa

SEQ ID NO: 1674902 - RNA, 19 nt, Homo sapiens
  misc_RNA (1)...(19): siRNA sense strand
caccauggacgccgagaug

SEQ ID NO: 1674903 - RNA, 19 nt, Homo sapiens
  misc_RNA (1)...(19): siRNA sense strand
acgccgagauggaguucaa

SEQ ID NO: 1674904 - RNA, 19 nt, Homo sapiens
  misc_RNA (1)...(19): siRNA sense strand
gccaucgcuucccgcauga

SEQ ID NO: 1674905 - RNA, 19 nt, Homo sapiens
  misc_RNA (1)...(19): siRNA sense strand
gccgagauggaguucaauu

SEQ ID NO: 1674906 - RNA, 19 nt, Homo sapiens
  misc_RNA (1)...(19): siRNA sense strand
cgagauggaguucaauugc

SEQ ID NO: 1674907 - RNA, 19 nt, Homo sapiens
  misc_RNA (1)...(19): siRNA sense strand
ugaggaucgucaccaugga

SEQ ID NO: 1674908 - RNA, 19 nt, Homo sapiens
  misc_RNA (1)...(19): siRNA sense strand
ccgagauggaguucaauug

SEQ ID NO: 1674909 - RNA, 19 nt, Homo sapiens
  misc_RNA (1)...(19): siRNA sense strand
ggaagcaacccaagacguu

SEQ ID NO: 1674910 - RNA, 19 nt, Homo sapiens
  misc_RNA (1)...(19): siRNA sense strand
agaagcagauuuuagauga

SEQ ID NO: 1674911 - RNA, 19 nt, Homo sapiens
  misc_RNA (1)...(19): siRNA sense strand
gaagcagauuuuagaugaa

SEQ ID NO: 1674912 - RNA, 19 nt, Homo sapiens
  misc_RNA (1)...(19): siRNA sense strand
caccauggacgccgagaug

SEQ ID NO: 1674913 - RNA, 19 nt, Homo sapiens
  misc_RNA (1)...(19): siRNA sense strand
acgccgagauggaguucaa

SEQ ID NO: 1674914 - RNA, 19 nt, Homo sapiens
  misc_RNA (1)...(19): siRNA sense strand
gccaucgcuucccgcauga

SEQ ID NO: 1674915 - RNA, 19 nt, Homo sapiens
  misc_RNA (1)...(19): siRNA sense strand
gccgagauggaguucaauu

SEQ ID NO: 1674916 - RNA, 19 nt, Homo sapiens
  misc_RNA (1)...(19): siRNA sense strand
cgagauggaguucaauugc

SEQ ID NO: 1674917 - RNA, 19 nt, Homo sapiens
  misc_RNA (1)...(19): siRNA sense strand
ugaggaucgucaccaugga

SEQ ID NO: 1674918 - RNA, 19 nt, Homo sapiens
  misc_RNA (1)...(19): siRNA sense strand
ccgagauggaguucaauug

SEQ ID NO: 1674919 - RNA, 19 nt, Homo sapiens
  misc_RNA (1)...(19): siRNA sense strand
ggaagcaacccaagacguu

SEQ ID NO: 1674920 - RNA, 19 nt, Homo sapiens
  misc_RNA (1)...(19): siRNA sense strand
caccauggacgccgagaug

SEQ ID NO: 1674921 - RNA, 19 nt, Homo sapiens
  misc_RNA (1)...(19): siRNA sense strand
acgccgagauggaguucaa

SEQ ID NO: 1674922 - RNA, 19 nt, Homo sapiens
  misc_RNA (1)...(19): siRNA sense strand
gccaucgcuucccgcauga

SEQ ID NO: 1674923 - RNA, 19 nt, Homo sapiens
  misc_RNA (1)...(19): siRNA sense strand
gccgagauggaguucaauu

SEQ ID NO: 1674924 - RNA, 19 nt, Homo sapiens
  misc_RNA (1)...(19): siRNA sense strand
cgagauggaguucaauugc

SEQ ID NO: 1674925 - RNA, 19 nt, Homo sapiens
  misc_RNA (1)...(19): siRNA sense strand
ugaggaucgucaccaugga

SEQ ID NO: 1674926 - RNA, 19 nt, Homo sapiens
  misc_RNA (1)...(19): siRNA sense strand
ccgagauggaguucaauug

SEQ ID NO: 1674927 - RNA, 19 nt, Homo sapiens
  misc_RNA (1)...(19): siRNA sense strand
ggaagcaacccaagacguu

SEQ ID NO: 1674928 - RNA, 19 nt, Homo sapiens
  misc_RNA (1)...(19): siRNA sense strand
caccauggacgccgagaug

SEQ ID NO: 1674929 - RNA, 19 nt, Homo sapiens
  misc_RNA (1)...(19): siRNA sense strand
acgccgagauggaguucaa

SEQ ID NO: 1674930 - RNA, 19 nt, Homo sapiens
  misc_RNA (1)...(19): siRNA sense strand
gccaucgcuucccgcauga

SEQ ID NO: 1674931 - RNA, 19 nt, Homo sapiens
  misc_RNA (1)...(19): siRNA sense strand
gccgagauggaguucaauu

SEQ ID NO: 1674932 - RNA, 19 nt, Homo sapiens
  misc_RNA (1)...(19): siRNA sense strand
cgagauggaguucaauugc

SEQ ID NO: 1674933 - RNA, 19 nt, Homo sapiens
  misc_RNA (1)...(19): siRNA sense strand
ugaggaucgucaccaugga

SEQ ID NO: 1674934 - RNA, 19 nt, Homo sapiens
  misc_RNA (1)...(19): siRNA sense strand
ccgagauggaguucaauug

SEQ ID NO: 1674935 - RNA, 19 nt, Homo sapiens
  misc_RNA (1)...(19): siRNA sense strand
ggaagcaacccaagacguu

SEQ ID NO: 1674936 - RNA, 19 nt, Homo sapiens
  misc_RNA (1)...(19): siRNA sense strand
agaagcagauuuuagauga

SEQ ID NO: 1674937 - RNA, 19 nt, Homo sapiens
  misc_RNA (1)...(19): siRNA sense strand
gaagcagauuuuagaugaa

SEQ ID NO: 1674938 - RNA, 19 nt, Homo sapiens
  misc_RNA (1)...(19): siRNA sense strand
caccauggacgccgagaug

SEQ ID NO: 1674939 - RNA, 19 nt, Homo sapiens
  misc_RNA (1)...(19): siRNA sense strand
acgccgagauggaguucaa

SEQ ID NO: 1674940 - RNA, 19 nt, Homo sapiens
  misc_RNA (1)...(19): siRNA sense strand
gccaucgcuucccgcauga

SEQ ID NO: 1674941 - RNA, 19 nt, Homo sapiens
  misc_RNA (1)...(19): siRNA sense strand
gccgagauggaguucaauu

SEQ ID NO: 1674942 - RNA, 19 nt, Homo sapiens
  misc_RNA (1)...(19): siRNA sense strand
cgagauggaguucaauugc

SEQ ID NO: 1674943 - RNA, 19 nt, Homo sapiens
  misc_RNA (1)...(19): siRNA sense strand
ugaggaucgucaccaugga

SEQ ID NO: 1674944 - RNA, 19 nt, Homo sapiens
  misc_RNA (1)...(19): siRNA sense strand
ccgagauggaguucaauug

SEQ ID NO: 1674945 - RNA, 19 nt, Homo sapiens
  misc_RNA (1)...(19): siRNA sense strand
ggaagcaacccaagacguu

SEQ ID NO: 1674946 - RNA, 19 nt, Homo sapiens
  misc_RNA (1)...(19): siRNA sense strand
agaagcagauuuuagauga

SEQ ID NO: 1674947 - RNA, 19 nt, Homo sapiens
  misc_RNA (1)...(19): siRNA sense strand
gaagcagauuuuagaugaa

SEQ ID NO: 1674948 - RNA, 19 nt, Homo sapiens
  misc_RNA (1)...(19): siRNA sense strand
caccauggacgccgagaug

SEQ ID NO: 1674949 - RNA, 19 nt, Homo sapiens
  misc_RNA (1)...(19): siRNA sense strand
acgccgagauggaguucaa

SEQ ID NO: 1674950 - RNA, 19 nt, Homo sapiens
  misc_RNA (1)...(19): siRNA sense strand
gccaucgcuucccgcauga

SEQ ID NO: 1674951 - RNA, 19 nt, Homo sapiens
  misc_RNA (1)...(19): siRNA sense strand
gccgagauggaguucaauu

SEQ ID NO: 1674952 - RNA, 19 nt, Homo sapiens
  misc_RNA (1)...(19): siRNA sense strand
cgagauggaguucaauugc

SEQ ID NO: 1674953 - RNA, 19 nt, Homo sapiens
  misc_RNA (1)...(19): siRNA sense strand
ugaggaucgucaccaugga

SEQ ID NO: 1674954 - RNA, 19 nt, Homo sapiens
  misc_RNA (1)...(19): siRNA sense strand
ccgagauggaguucaauug

SEQ ID NO: 1674955 - RNA, 19 nt, Homo sapiens
  misc_RNA (1)...(19): siRNA sense strand
ggaagcaacccaagacguu

SEQ ID NO: 1674956 - RNA, 19 nt, Homo sapiens
  misc_RNA (1)...(19): siRNA sense strand
agaagcagauuuuagauga

SEQ ID NO: 1674957 - RNA, 19 nt, Homo sapiens
  misc_RNA (1)...(19): siRNA sense strand
gaagcagauuuuagaugaa

SEQ ID NO: 1674958 - RNA, 19 nt, Homo sapiens
  misc_RNA (1)...(19): siRNA sense strand
caccauggacgccgagaug

SEQ ID NO: 1674959 - RNA, 19 nt, Homo sapiens
  misc_RNA (1)...(19): siRNA sense strand
acgccgagauggaguucaa

SEQ ID NO: 1674960 - RNA, 19 nt, Homo sapiens
  misc_RNA (1)...(19): siRNA sense strand
gccaucgcuucccgcauga

SEQ ID NO: 1674961 - RNA, 19 nt, Homo sapiens
  misc_RNA (1)...(19): siRNA sense strand
gccgagauggaguucaauu

SEQ ID NO: 1674962 - RNA, 19 nt, Homo sapiens
  misc_RNA (1)...(19): siRNA sense strand
cgagauggaguucaauugc

SEQ ID NO: 1674963 - RNA, 19 nt, Homo sapiens
  misc_RNA (1)...(19): siRNA sense strand
ugaggaucgucaccaugga

SEQ ID NO: 1674964 - RNA, 19 nt, Homo sapiens
  misc_RNA (1)...(19): siRNA sense strand
ccgagauggaguucaauug

SEQ ID NO: 1674965 - RNA, 19 nt, Homo sapiens
  misc_RNA (1)...(19): siRNA sense strand
ggaagcaacccaagacguu

SEQ ID NO: 1674966 - RNA, 19 nt, Homo sapiens
  misc_RNA (1)...(19): siRNA sense strand
agaagcagauuuuagauga

SEQ ID NO: 1674967 - RNA, 19 nt, Homo sapiens
  misc_RNA (1)...(19): siRNA sense strand
gaagcagauuuuagaugaa

SEQ ID NO: 1674968 - RNA, 19 nt, Homo sapiens
  misc_RNA (1)...(19): siRNA sense strand
caccauggacgccgagaug

SEQ ID NO: 1674969 - RNA, 19 nt, Homo sapiens
  misc_RNA (1)...(19): siRNA sense strand
acgccgagauggaguucaa

SEQ ID NO: 1674970 - RNA, 19 nt, Homo sapiens
  misc_RNA (1)...(19): siRNA sense strand
gccaucgcuucccgcauga

SEQ ID NO: 1674971 - RNA, 19 nt, Homo sapiens
  misc_RNA (1)...(19): siRNA sense strand
gccgagauggaguucaauu

SEQ ID NO: 1674972 - RNA, 19 nt, Homo sapiens
  misc_RNA (1)...(19): siRNA sense strand
cgagauggaguucaauugc

SEQ ID NO: 1674973 - RNA, 19 nt, Homo sapiens
  misc_RNA (1)...(19): siRNA sense strand
ugaggaucgucaccaugga

SEQ ID NO: 1674974 - RNA, 19 nt, Homo sapiens
  misc_RNA (1)...(19): siRNA sense strand
ccgagauggaguucaauug

SEQ ID NO: 1674975 - RNA, 19 nt, Homo sapiens
  misc_RNA (1)...(19): siRNA sense strand
ggaagcaacccaagacguu

SEQ ID NO: 1674976 - RNA, 19 nt, Homo sapiens
  misc_RNA (1)...(19): siRNA sense strand
agaagcagauuuuagauga

SEQ ID NO: 1674977 - RNA, 19 nt, Homo sapiens
  misc_RNA (1)...(19): siRNA sense strand
gaagcagauuuuagaugaa

SEQ ID NO: 1674978 - RNA, 19 nt, Homo sapiens
  misc_RNA (1)...(19): siRNA sense strand
caccauggacgccgagaug

SEQ ID NO: 1674979 - RNA, 19 nt, Homo sapiens
  misc_RNA (1)...(19): siRNA sense strand
acgccgagauggaguucaa

SEQ ID NO: 1674980 - RNA, 19 nt, Homo sapiens
  misc_RNA (1)...(19): siRNA sense strand
gccaucgcuucccgcauga

SEQ ID NO: 1674981 - RNA, 19 nt, Homo sapiens
  misc_RNA (1)...(19): siRNA sense strand
gccgagauggaguucaauu

SEQ ID NO: 1674982 - RNA, 19 nt, Homo sapiens
  misc_RNA (1)...(19): siRNA sense strand
cgagauggaguucaauugc

SEQ ID NO: 1674983 - RNA, 19 nt, Homo sapiens
  misc_RNA (1)...(19): siRNA sense strand
ugaggaucgucaccaugga

SEQ ID NO: 1674984 - RNA, 19 nt, Homo sapiens
  misc_RNA (1)...(19): siRNA sense strand
ccgagauggaguucaauug

SEQ ID NO: 1674985 - RNA, 19 nt, Homo sapiens
  misc_RNA (1)...(19): siRNA sense strand
ggaagcaacccaagacguu

SEQ ID NO: 1674986 - RNA, 19 nt, Homo sapiens
  misc_RNA (1)...(19): siRNA sense strand
agaagcagauuuuagauga

SEQ ID NO: 1674987 - RNA, 19 nt, Homo sapiens
  misc_RNA (1)...(19): siRNA sense strand
gaagcagauuuuagaugaa

SEQ ID NO: 1674988 - RNA, 19 nt, Homo sapiens
  misc_RNA (1)...(19): siRNA sense strand
caccauggacgccgagaug

SEQ ID NO: 1674989 - RNA, 19 nt, Homo sapiens
  misc_RNA (1)...(19): siRNA sense strand
acgccgagauggaguucaa

SEQ ID NO: 1674990 - RNA, 19 nt, Homo sapiens
  misc_RNA (1)...(19): siRNA sense strand
gccaucgcuucccgcauga

SEQ ID NO: 1674991 - RNA, 19 nt, Homo sapiens
  misc_RNA (1)...(19): siRNA sense strand
gccgagauggaguucaauu

SEQ ID NO: 1674992 - RNA, 19 nt, Homo sapiens
  misc_RNA (1)...(19): siRNA sense strand
cgagauggaguucaauugc

SEQ ID NO: 1674993 - RNA, 19 nt, Homo sapiens
  misc_RNA (1)...(19): siRNA sense strand
ugaggaucgucaccaugga

SEQ ID NO: 1674994 - RNA, 19 nt, Homo sapiens
  misc_RNA (1)...(19): siRNA sense strand
ccgagauggaguucaauug

SEQ ID NO: 1674995 - RNA, 19 nt, Homo sapiens
  misc_RNA (1)...(19): siRNA sense strand
ggaagcaacccaagacguu

SEQ ID NO: 1674996 - RNA, 19 nt, Homo sapiens
  misc_RNA (1)...(19): siRNA sense strand
agaagcagauuuuagauga

SEQ ID NO: 1674997 - RNA, 19 nt, Homo sapiens
  misc_RNA (1)...(19): siRNA sense strand
gaagcagauuuuagaugaa

SEQ ID NO: 1674998 - RNA, 19 nt, Homo sapiens
  misc_RNA (1)...(19): siRNA sense strand
caccauggacgccgagaug

SEQ ID NO: 1674999 - RNA, 19 nt, Homo sapiens
  misc_RNA (1)...(19): siRNA sense strand
acgccgagauggaguucaa

SEQ ID NO: 1675000 - RNA, 19 nt, Homo sapiens
  misc_RNA (1)...(19): siRNA sense strand
gccaucgcuucccgcauga

SEQ ID NO: 1675001 - RNA, 19 nt, Homo sapiens
  misc_RNA (1)...(19): siRNA sense strand
gccgagauggaguucaauu

SEQ ID NO: 1675002 - RNA, 19 nt, Homo sapiens
  misc_RNA (1)...(19): siRNA sense strand
cgagauggaguucaauugc

SEQ ID NO: 1675003 - RNA, 19 nt, Homo sapiens
  misc_RNA (1)...(19): siRNA sense strand
ugaggaucgucaccaugga

SEQ ID NO: 1675004 - RNA, 19 nt, Homo sapiens
  misc_RNA (1)...(19): siRNA sense strand
ccgagauggaguucaauug

SEQ ID NO: 1675005 - RNA, 19 nt, Homo sapiens
  misc_RNA (1)...(19): siRNA sense strand
ggaagcaacccaagacguu

SEQ ID NO: 1675006 - RNA, 19 nt, Homo sapiens
  misc_RNA (1)...(19): siRNA sense strand
agaagcagauuuuagauga

SEQ ID NO: 1675007 - RNA, 19 nt, Homo sapiens
  misc_RNA (1)...(19): siRNA sense strand
gaagcagauuuuagaugaa

SEQ ID NO: 1675008 - RNA, 19 nt, Homo sapiens
  misc_RNA (1)...(19): siRNA sense strand
caccauggacgccgagaug

SEQ ID NO: 1675009 - RNA, 19 nt, Homo sapiens
  misc_RNA (1)...(19): siRNA sense strand
acgccgagauggaguucaa

SEQ ID NO: 1675010 - RNA, 19 nt, Homo sapiens
  misc_RNA (1)...(19): siRNA sense strand
gccaucgcuucccgcauga

SEQ ID NO: 1675011 - RNA, 19 nt, Homo sapiens
  misc_RNA (1)...(19): siRNA sense strand
gccgagauggaguucaauu

SEQ ID NO: 1675012 - RNA, 19 nt, Homo sapiens
  misc_RNA (1)...(19): siRNA sense strand
cgagauggaguucaauugc

SEQ ID NO: 1675013 - RNA, 19 nt, Homo sapiens
  misc_RNA (1)...(19): siRNA sense strand
ugaggaucgucaccaugga

SEQ ID NO: 1675014 - RNA, 19 nt, Homo sapiens
  misc_RNA (1)...(19): siRNA sense strand
ccgagauggaguucaauug

SEQ ID NO: 1675015 - RNA, 19 nt, Homo sapiens
  misc_RNA (1)...(19): siRNA sense strand
ggaagcaacccaagacguu

SEQ ID NO: 1675016 - RNA, 19 nt, Homo sapiens
  misc_RNA (1)...(19): siRNA sense strand
agaagcagauuuuagauga

SEQ ID NO: 1675017 - RNA, 19 nt, Homo sapiens
  misc_RNA (1)...(19): siRNA sense strand
gaagcagauuuuagaugaa

SEQ ID NO: 1675018 - RNA, 19 nt, Homo sapiens
  misc_RNA (1)...(19): siRNA sense strand
caccauggacgccgagaug

SEQ ID NO: 1675019 - RNA, 19 nt, Homo sapiens
  misc_RNA (1)...(19): siRNA sense strand
acgccgagauggaguucaa

SEQ ID NO: 1675020 - RNA, 19 nt, Homo sapiens
  misc_RNA (1)...(19): siRNA sense strand
gccaucgcuucccgcauga

SEQ ID NO: 1675021 - RNA, 19 nt, Homo sapiens
  misc_RNA (1)...(19): siRNA sense strand
gccgagauggaguucaauu

SEQ ID NO: 1675022 - RNA, 19 nt, Homo sapiens
  misc_RNA (1)...(19): siRNA sense strand
cgagauggaguucaauugc

SEQ ID NO: 1675023 - RNA, 19 nt, Homo sapiens
  misc_RNA (1)...(19): siRNA sense strand
ugaggaucgucaccaugga

SEQ ID NO: 1675024 - RNA, 19 nt, Homo sapiens
  misc_RNA (1)...(19): siRNA sense strand
ccgagauggaguucaauug

SEQ ID NO: 1675025 - RNA, 19 nt, Homo sapiens
  misc_RNA (1)...(19): siRNA sense strand
ggaagcaacccaagacguu

SEQ ID NO: 1675026 - RNA, 19 nt, Homo sapiens
  misc_RNA (1)...(19): siRNA sense strand
agaagcagauuuuagauga

SEQ ID NO: 1675027 - RNA, 19 nt, Homo sapiens
  misc_RNA (1)...(19): siRNA sense strand
gaagcagauuuuagaugaa

SEQ ID NO: 1675028 - RNA, 19 nt, Homo sapiens
  misc_RNA (1)...(19): siRNA sense strand
caccauggacgccgagaug

SEQ ID NO: 1675029 - RNA, 19 nt, Homo sapiens
  misc_RNA (1)...(19): siRNA sense strand
acgccgagauggaguucaa

SEQ ID NO: 1675030 - RNA, 19 nt, Homo sapiens
  misc_RNA (1)...(19): siRNA sense strand
gccaucgcuucccgcauga

SEQ ID NO: 1675031 - RNA, 19 nt, Homo sapiens
  misc_RNA (1)...(19): siRNA sense strand
gccgagauggaguucaauu

SEQ ID NO: 1675032 - RNA, 19 nt, Homo sapiens
  misc_RNA (1)...(19): siRNA sense strand
cgagauggaguucaauugc

SEQ ID NO: 1675033 - RNA, 19 nt, Homo sapiens
  misc_RNA (1)...(19): siRNA sense strand
ugaggaucgucaccaugga

SEQ ID NO: 1675034 - RNA, 19 nt, Homo sapiens
  misc_RNA (1)...(19): siRNA sense strand
ccgagauggaguucaauug

SEQ ID NO: 1675035 - RNA, 19 nt, Homo sapiens
  misc_RNA (1)...(19): siRNA sense strand
ggaagcaacccaagacguu

SEQ ID NO: 1675036 - RNA, 19 nt, Homo sapiens
  misc_RNA (1)...(19): siRNA sense strand
agaagcagauuuuagauga

SEQ ID NO: 1675037 - RNA, 19 nt, Homo sapiens
  misc_RNA (1)...(19): siRNA sense strand
gaagcagauuuuagaugaa

SEQ ID NO: 1675038 - RNA, 19 nt, Homo sapiens
  misc_RNA (1)...(19): siRNA sense strand
caccauggacgccgagaug

SEQ ID NO: 1675039 - RNA, 19 nt, Homo sapiens
  misc_RNA (1)...(19): siRNA sense strand
acgccgagauggaguucaa

SEQ ID NO: 1675040 - RNA, 19 nt, Homo sapiens
  misc_RNA (1)...(19): siRNA sense strand
gccaucgcuucccgcauga

SEQ ID NO: 1675041 - RNA, 19 nt, Homo sapiens
  misc_RNA (1)...(19): siRNA sense strand
gccgagauggaguucaauu

SEQ ID NO: 1675042 - RNA, 19 nt, Homo sapiens
  misc_RNA (1)...(19): siRNA sense strand
cgagauggaguucaauugc

SEQ ID NO: 1675043 - RNA, 19 nt, Homo sapiens
  misc_RNA (1)...(19): siRNA sense strand
ugaggaucgucaccaugga

SEQ ID NO: 1675044 - RNA, 19 nt, Homo sapiens
  misc_RNA (1)...(19): siRNA sense strand
ccgagauggaguucaauug

SEQ ID NO: 1675045 - RNA, 19 nt, Homo sapiens
  misc_RNA (1)...(19): siRNA sense strand
ggaagcaacccaagacguu

SEQ ID NO: 1675046 - RNA, 19 nt, Homo sapiens
  misc_RNA (1)...(19): siRNA sense strand
caccauggacgccgagaug

SEQ ID NO: 1675047 - RNA, 19 nt, Homo sapiens
  misc_RNA (1)...(19): siRNA sense strand
acgccgagauggaguucaa

SEQ ID NO: 1675048 - RNA, 19 nt, Homo sapiens
  misc_RNA (1)...(19): siRNA sense strand
gccaucgcuucccgcauga

SEQ ID NO: 1675049 - RNA, 19 nt, Homo sapiens
  misc_RNA (1)...(19): siRNA sense strand
gccgagauggaguucaauu

SEQ ID NO: 1675050 - RNA, 19 nt, Homo sapiens
  misc_RNA (1)...(19): siRNA sense strand
cgagauggaguucaauugc

SEQ ID NO: 1675051 - RNA, 19 nt, Homo sapiens
  misc_RNA (1)...(19): siRNA sense strand
ugaggaucgucaccaugga

SEQ ID NO: 1675052 - RNA, 19 nt, Homo sapiens
  misc_RNA (1)...(19): siRNA sense strand
ccgagauggaguucaauug

SEQ ID NO: 1675053 - RNA, 19 nt, Homo sapiens
  misc_RNA (1)...(19): siRNA sense strand
ggaagcaacccaagacguu

SEQ ID NO: 1675054 - RNA, 19 nt, Homo sapiens
  misc_RNA (1)...(19): siRNA sense strand
caccauggacgccgagaug

SEQ ID NO: 1675055 - RNA, 19 nt, Homo sapiens
  misc_RNA (1)...(19): siRNA sense strand
acgccgagauggaguucaa

SEQ ID NO: 1675056 - RNA, 19 nt, Homo sapiens
  misc_RNA (1)...(19): siRNA sense strand
gccaucgcuucccgcauga

SEQ ID NO: 1675057 - RNA, 19 nt, Homo sapiens
  misc_RNA (1)...(19): siRNA sense strand
gccgagauggaguucaauu

SEQ ID NO: 1675058 - RNA, 19 nt, Homo sapiens
  misc_RNA (1)...(19): siRNA sense strand
cgagauggaguucaauugc

SEQ ID NO: 1675059 - RNA, 19 nt, Homo sapiens
  misc_RNA (1)...(19): siRNA sense strand
ugaggaucgucaccaugga

SEQ ID NO: 1675060 - RNA, 19 nt, Homo sapiens
  misc_RNA (1)...(19): siRNA sense strand
ccgagauggaguucaauug

SEQ ID NO: 1675061 - RNA, 19 nt, Homo sapiens
  misc_RNA (1)...(19): siRNA sense strand
ggaagcaacccaagacguu

SEQ ID NO: 1675062 - RNA, 19 nt, Homo sapiens
  misc_RNA (1)...(19): siRNA sense strand
agaagcagauuuuagauga

SEQ ID NO: 1675063 - RNA, 19 nt, Homo sapiens
  misc_RNA (1)...(19): siRNA sense strand
gaagcagauuuuagaugaa

SEQ ID NO: 1675064 - RNA, 19 nt, Homo sapiens
  misc_RNA (1)...(19): siRNA sense strand
caccauggacgccgagaug

SEQ ID NO: 1675065 - RNA, 19 nt, Homo sapiens
  misc_RNA (1)...(19): siRNA sense strand
acgccgagauggaguucaa

SEQ ID NO: 1675066 - RNA, 19 nt, Homo sapiens
  misc_RNA (1)...(19): siRNA sense strand
gccaucgcuucccgcauga

SEQ ID NO: 1675067 - RNA, 19 nt, Homo sapiens
  misc_RNA (1)...(19): siRNA sense strand
gccgagauggaguucaauu

SEQ ID NO: 1675068 - RNA, 19 nt, Homo sapiens
  misc_RNA (1)...(19): siRNA sense strand
cgagauggaguucaauugc

SEQ ID NO: 1675069 - RNA, 19 nt, Homo sapiens
  misc_RNA (1)...(19): siRNA sense strand
ugaggaucgucaccaugga

SEQ ID NO: 1675070 - RNA, 19 nt, Homo sapiens
  misc_RNA (1)...(19): siRNA sense strand
ccgagauggaguucaauug

SEQ ID NO: 1675071 - RNA, 19 nt, Homo sapiens
  misc_RNA (1)...(19): siRNA sense strand
ggaagcaacccaagacguu

SEQ ID NO: 1675072 - RNA, 19 nt, Homo sapiens
  misc_RNA (1)...(19): siRNA sense strand
agaagcagauuuuagauga

SEQ ID NO: 1675073 - RNA, 19 nt, Homo sapiens
  misc_RNA (1)...(19): siRNA sense strand
gaagcagauuuuagaugaa

SEQ ID NO: 1675074 - RNA, 19 nt, Homo sapiens
  misc_RNA (1)...(19): siRNA sense strand
caccauggacgccgagaug

SEQ ID NO: 1675075 - RNA, 19 nt, Homo sapiens
  misc_RNA (1)...(19): siRNA sense strand
acgccgagauggaguucaa

SEQ ID NO: 1675076 - RNA, 19 nt, Homo sapiens
  misc_RNA (1)...(19): siRNA sense strand
gccaucgcuucccgcauga

SEQ ID NO: 1675077 - RNA, 19 nt, Homo sapiens
  misc_RNA (1)...(19): siRNA sense strand
gccgagauggaguucaauu

SEQ ID NO: 1675078 - RNA, 19 nt, Homo sapiens
  misc_RNA (1)...(19): siRNA sense strand
cgagauggaguucaauugc

SEQ ID NO: 1675079 - RNA, 19 nt, Homo sapiens
  misc_RNA (1)...(19): siRNA sense strand
ugaggaucgucaccaugga

SEQ ID NO: 1675080 - RNA, 19 nt, Homo sapiens
  misc_RNA (1)...(19): siRNA sense strand
ccgagauggaguucaauug

SEQ ID NO: 1675081 - RNA, 19 nt, Homo sapiens
  misc_RNA (1)...(19): siRNA sense strand
ggaagcaacccaagacguu

SEQ ID NO: 1675082 - RNA, 19 nt, Homo sapiens
  misc_RNA (1)...(19): siRNA sense strand
agaagcagauuuuagauga

SEQ ID NO: 1675083 - RNA, 19 nt, Homo sapiens
  misc_RNA (1)...(19): siRNA sense strand
gaagcagauuuuagaugaa

SEQ ID NO: 1675084 - RNA, 19 nt, Homo sapiens
  misc_RNA (1)...(19): siRNA sense strand
caccauggacgccgagaug

SEQ ID NO: 1675085 - RNA, 19 nt, Homo sapiens
  misc_RNA (1)...(19): siRNA sense strand
acgccgagauggaguucaa

SEQ ID NO: 1675086 - RNA, 19 nt, Homo sapiens
  misc_RNA (1)...(19): siRNA sense strand
gccaucgcuucccgcauga

SEQ ID NO: 1675087 - RNA, 19 nt, Homo sapiens
  misc_RNA (1)...(19): siRNA sense strand
gccgagauggaguucaauu

SEQ ID NO: 1675088 - RNA, 19 nt, Homo sapiens
  misc_RNA (1)...(19): siRNA sense strand
cgagauggaguucaauugc

SEQ ID NO: 1675089 - RNA, 19 nt, Homo sapiens
  misc_RNA (1)...(19): siRNA sense strand
ugaggaucgucaccaugga

SEQ ID NO: 1675090 - RNA, 19 nt, Homo sapiens
  misc_RNA (1)...(19): siRNA sense strand
ccgagauggaguucaauug

SEQ ID NO: 1675091 - RNA, 19 nt, Homo sapiens
  misc_RNA (1)...(19): siRNA sense strand
ggaagcaacccaagacguu

SEQ ID NO: 1675092 - RNA, 19 nt, Homo sapiens
  misc_RNA (1)...(19): siRNA sense strand
agaagcagauuuuagauga

SEQ ID NO: 1675093 - RNA, 19 nt, Homo sapiens
  misc_RNA (1)...(19): siRNA sense strand
gaagcagauuuuagaugaa

SEQ ID NO: 1675094 - RNA, 19 nt, Homo sapiens
  misc_RNA (1)...(19): siRNA sense strand
caccauggacgccgagaug

SEQ ID NO: 1675095 - RNA, 19 nt, Homo sapiens
  misc_RNA (1)...(19): siRNA sense strand
acgccgagauggaguucaa

SEQ ID NO: 1675096 - RNA, 19 nt, Homo sapiens
  misc_RNA (1)...(19): siRNA sense strand
gccaucgcuucccgcauga

SEQ ID NO: 1675097 - RNA, 19 nt, Homo sapiens
  misc_RNA (1)...(19): siRNA sense strand
gccgagauggaguucaauu

SEQ ID NO: 1675098 - RNA, 19 nt, Homo sapiens
  misc_RNA (1)...(19): siRNA sense strand
cgagauggaguucaauugc

SEQ ID NO: 1675099 - RNA, 19 nt, Homo sapiens
  misc_RNA (1)...(19): siRNA sense strand
ugaggaucgucaccaugga

SEQ ID NO: 1675100 - RNA, 19 nt, Homo sapiens
  misc_RNA (1)...(19): siRNA sense strand
ccgagauggaguucaauug

SEQ ID NO: 1675101 - RNA, 19 nt, Homo sapiens
  misc_RNA (1)...(19): siRNA sense strand
ggaagcaacccaagacguu

SEQ ID NO: 1675102 - RNA, 19 nt, Homo sapiens
  misc_RNA (1)...(19): siRNA sense strand
agaagcagauuuuagauga

SEQ ID NO: 1675103 - RNA, 19 nt, Homo sapiens
  misc_RNA (1)...(19): siRNA sense strand
gaagcagauuuuagaugaa

SEQ ID NO: 1675104 - RNA, 19 nt, Homo sapiens
  misc_RNA (1)...(19): siRNA sense strand
caccauggacgccgagaug

SEQ ID NO: 1675105 - RNA, 19 nt, Homo sapiens
  misc_RNA (1)...(19): siRNA sense strand
acgccgagauggaguucaa

SEQ ID NO: 1675106 - RNA, 19 nt, Homo sapiens
  misc_RNA (1)...(19): siRNA sense strand
gccaucgcuucccgcauga

SEQ ID NO: 1675107 - RNA, 19 nt, Homo sapiens
  misc_RNA (1)...(19): siRNA sense strand
gccgagauggaguucaauu

SEQ ID NO: 1675108 - RNA, 19 nt, Homo sapiens
  misc_RNA (1)...(19): siRNA sense strand
cgagauggaguucaauugc

SEQ ID NO: 1675109 - RNA, 19 nt, Homo sapiens
  misc_RNA (1)...(19): siRNA sense strand
ugaggaucgucaccaugga

SEQ ID NO: 1675110 - RNA, 19 nt, Homo sapiens
  misc_RNA (1)...(19): siRNA sense strand
ccgagauggaguucaauug

SEQ ID NO: 1675111 - RNA, 19 nt, Homo sapiens
  misc_RNA (1)...(19): siRNA sense strand
ggaagcaacccaagacguu

SEQ ID NO: 1675112 - RNA, 19 nt, Homo sapiens
  misc_RNA (1)...(19): siRNA sense strand
agaagcagauuuuagauga

SEQ ID NO: 1675113 - RNA, 19 nt, Homo sapiens
  misc_RNA (1)...(19): siRNA sense strand
gaagcagauuuuagaugaa

SEQ ID NO: 1675114 - RNA, 19 nt, Homo sapiens
  misc_RNA (1)...(19): siRNA sense strand
caccauggacgccgagaug

SEQ ID NO: 1675115 - RNA, 19 nt, Homo sapiens
  misc_RNA (1)...(19): siRNA sense strand
acgccgagauggaguucaa

SEQ ID NO: 1675116 - RNA, 19 nt, Homo sapiens
  misc_RNA (1)...(19): siRNA sense strand
gccaucgcuucccgcauga

SEQ ID NO: 1675117 - RNA, 19 nt, Homo sapiens
  misc_RNA (1)...(19): siRNA sense strand
gccgagauggaguucaauu

SEQ ID NO: 1675118 - RNA, 19 nt, Homo sapiens
  misc_RNA (1)...(19): siRNA sense strand
cgagauggaguucaauugc

SEQ ID NO: 1675119 - RNA, 19 nt, Homo sapiens
  misc_RNA (1)...(19): siRNA sense strand
ugaggaucgucaccaugga

SEQ ID NO: 1675120 - RNA, 19 nt, Homo sapiens
  misc_RNA (1)...(19): siRNA sense strand
ccgagauggaguucaauug

SEQ ID NO: 1675121 - RNA, 19 nt, Homo sapiens
  misc_RNA (1)...(19): siRNA sense strand
ggaagcaacccaagacguu

SEQ ID NO: 1675122 - RNA, 19 nt, Homo sapiens
  misc_RNA (1)...(19): siRNA sense strand
agaagcagauuuuagauga

SEQ ID NO: 1675123 - RNA, 19 nt, Homo sapiens
  misc_RNA (1)...(19): siRNA sense strand
gaagcagauuuuagaugaa

SEQ ID NO: 1675124 - RNA, 19 nt, Homo sapiens
  misc_RNA (1)...(19): siRNA sense strand
caccauggacgccgagaug

SEQ ID NO: 1675125 - RNA, 19 nt, Homo sapiens
  misc_RNA (1)...(19): siRNA sense strand
acgccgagauggaguucaa

SEQ ID NO: 1675126 - RNA, 19 nt, Homo sapiens
  misc_RNA (1)...(19): siRNA sense strand
gccaucgcuucccgcauga

SEQ ID NO: 1675127 - RNA, 19 nt, Homo sapiens
  misc_RNA (1)...(19): siRNA sense strand
gccgagauggaguucaauu

SEQ ID NO: 1675128 - RNA, 19 nt, Homo sapiens
  misc_RNA (1)...(19): siRNA sense strand
cgagauggaguucaauugc

SEQ ID NO: 1675129 - RNA, 19 nt, Homo sapiens
  misc_RNA (1)...(19): siRNA sense strand
ugaggaucgucaccaugga

SEQ ID NO: 1675130 - RNA, 19 nt, Homo sapiens
  misc_RNA (1)...(19): siRNA sense strand
ccgagauggaguucaauug

SEQ ID NO: 1675131 - RNA, 19 nt, Homo sapiens
  misc_RNA (1)...(19): siRNA sense strand
ggaagcaacccaagacguu

SEQ ID NO: 1675132 - RNA, 19 nt, Homo sapiens
  misc_RNA (1)...(19): siRNA sense strand
agaagcagauuuuagauga

SEQ ID NO: 1675133 - RNA, 19 nt, Homo sapiens
  misc_RNA (1)...(19): siRNA sense strand
gaagcagauuuuagaugaa

SEQ ID NO: 1675134 - RNA, 19 nt, Homo sapiens
  misc_RNA (1)...(19): siRNA sense strand
caccauggacgccgagaug

SEQ ID NO: 1675135 - RNA, 19 nt, Homo sapiens
  misc_RNA (1)...(19): siRNA sense strand
acgccgagauggaguucaa

SEQ ID NO: 1675136 - RNA, 19 nt, Homo sapiens
  misc_RNA (1)...(19): siRNA sense strand
gccaucgcuucccgcauga

SEQ ID NO: 1675137 - RNA, 19 nt, Homo sapiens
  misc_RNA (1)...(19): siRNA sense strand
gccgagauggaguucaauu

SEQ ID NO: 1675138 - RNA, 19 nt, Homo sapiens
  misc_RNA (1)...(19): siRNA sense strand
cgagauggaguucaauugc

SEQ ID NO: 1675139 - RNA, 19 nt, Homo sapiens
  misc_RNA (1)...(19): siRNA sense strand
ugaggaucgucaccaugga

SEQ ID NO: 1675140 - RNA, 19 nt, Homo sapiens
  misc_RNA (1)...(19): siRNA sense strand
ccgagauggaguucaauug

SEQ ID NO: 1675141 - RNA, 19 nt, Homo sapiens
  misc_RNA (1)...(19): siRNA sense strand
ggaagcaacccaagacguu

SEQ ID NO: 1675142 - RNA, 19 nt, Homo sapiens
  misc_RNA (1)...(19): siRNA sense strand
agaagcagauuuuagauga

SEQ ID NO: 1675143 - RNA, 19 nt, Homo sapiens
  misc_RNA (1)...(19): siRNA sense strand
gaagcagauuuuagaugaa

SEQ ID NO: 1675144 - RNA, 19 nt, Homo sapiens
  misc_RNA (1)...(19): siRNA sense strand
caccauggacgccgagaug

SEQ ID NO: 1675145 - RNA, 19 nt, Homo sapiens
  misc_RNA (1)...(19): siRNA sense strand
acgccgagauggaguucaa

SEQ ID NO: 1675146 - RNA, 19 nt, Homo sapiens
  misc_RNA (1)...(19): siRNA sense strand
gccaucgcuucccgcauga

SEQ ID NO: 1675147 - RNA, 19 nt, Homo sapiens
  misc_RNA (1)...(19): siRNA sense strand
gccgagauggaguucaauu

SEQ ID NO: 1675148 - RNA, 19 nt, Homo sapiens
  misc_RNA (1)...(19): siRNA sense strand
cgagauggaguucaauugc

SEQ ID NO: 1675149 - RNA, 19 nt, Homo sapiens
  misc_RNA (1)...(19): siRNA sense strand
ugaggaucgucaccaugga

SEQ ID NO: 1675150 - RNA, 19 nt, Homo sapiens
  misc_RNA (1)...(19): siRNA sense strand
ccgagauggaguucaauug

SEQ ID NO: 1675151 - RNA, 19 nt, Homo sapiens
  misc_RNA (1)...(19): siRNA sense strand
ggaagcaacccaagacguu

SEQ ID NO: 1675152 - RNA, 19 nt, Homo sapiens
  misc_RNA (1)...(19): siRNA sense strand
agaagcagauuuuagauga

SEQ ID NO: 1675153 - RNA, 19 nt, Homo sapiens
  misc_RNA (1)...(19): siRNA sense strand
gaagcagauuuuagaugaa

SEQ ID NO: 1675154 - RNA, 19 nt, Homo sapiens
  misc_RNA (1)...(19): siRNA sense strand
caccauggacgccgagaug

SEQ ID NO: 1675155 - RNA, 19 nt, Homo sapiens
  misc_RNA (1)...(19): siRNA sense strand
acgccgagauggaguucaa

SEQ ID NO: 1675156 - RNA, 19 nt, Homo sapiens
  misc_RNA (1)...(19): siRNA sense strand
gccaucgcuucccgcauga

SEQ ID NO: 1675157 - RNA, 19 nt, Homo sapiens
  misc_RNA (1)...(19): siRNA sense strand
gccgagauggaguucaauu

SEQ ID NO: 1675158 - RNA, 19 nt, Homo sapiens
  misc_RNA (1)...(19): siRNA sense strand
cgagauggaguucaauugc

SEQ ID NO: 1675159 - RNA, 19 nt, Homo sapiens
  misc_RNA (1)...(19): siRNA sense strand
ugaggaucgucaccaugga

SEQ ID NO: 1675160 - RNA, 19 nt, Homo sapiens
  misc_RNA (1)...(19): siRNA sense strand
ccgagauggaguucaauug

SEQ ID NO: 1675161 - RNA, 19 nt, Homo sapiens
  misc_RNA (1)...(19): siRNA sense strand
ggaagcaacccaagacguu

SEQ ID NO: 1675162 - RNA, 19 nt, Homo sapiens
  misc_RNA (1)...(19): siRNA sense strand
agaagcagauuuuagauga

SEQ ID NO: 1675163 - RNA, 19 nt, Homo sapiens
  misc_RNA (1)...(19): siRNA sense strand
gaagcagauuuuagaugaa

SEQ ID NO: 1675164 - RNA, 19 nt, Homo sapiens
  misc_RNA (1)...(19): siRNA sense strand
caccauggacgccgagaug

SEQ ID NO: 1675165 - RNA, 19 nt, Homo sapiens
  misc_RNA (1)...(19): siRNA sense strand
acgccgagauggaguucaa

SEQ ID NO: 1675166 - RNA, 19 nt, Homo sapiens
  misc_RNA (1)...(19): siRNA sense strand
gccaucgcuucccgcauga

SEQ ID NO: 1675167 - RNA, 19 nt, Homo sapiens
  misc_RNA (1)...(19): siRNA sense strand
gccgagauggaguucaauu

SEQ ID NO: 1675168 - RNA, 19 nt, Homo sapiens
  misc_RNA (1)...(19): siRNA sense strand
cgagauggaguucaauugc

SEQ ID NO: 1675169 - RNA, 19 nt, Homo sapiens
  misc_RNA (1)...(19): siRNA sense strand
ugaggaucgucaccaugga

SEQ ID NO: 1675170 - RNA, 19 nt, Homo sapiens
  misc_RNA (1)...(19): siRNA sense strand
ccgagauggaguucaauug

SEQ ID NO: 1675171 - RNA, 19 nt, Homo sapiens
  misc_RNA (1)...(19): siRNA sense strand
ggaagcaacccaagacguu

SEQ ID NO: 1675172 - RNA, 19 nt, Homo sapiens
  misc_RNA (1)...(19): siRNA sense strand
caccauggacgccgagaug

SEQ ID NO: 1675173 - RNA, 19 nt, Homo sapiens
  misc_RNA (1)...(19): siRNA sense strand
acgccgagauggaguucaa

SEQ ID NO: 1675174 - RNA, 19 nt, Homo sapiens
  misc_RNA (1)...(19): siRNA sense strand
gccaucgcuucccgcauga

SEQ ID NO: 1675175 - RNA, 19 nt, Homo sapiens
  misc_RNA (1)...(19): siRNA sense strand
gccgagauggaguucaauu

SEQ ID NO: 1675176 - RNA, 19 nt, Homo sapiens
  misc_RNA (1)...(19): siRNA sense strand
cgagauggaguucaauugc

SEQ ID NO: 1675177 - RNA, 19 nt, Homo sapiens
  misc_RNA (1)...(19): siRNA sense strand
ugaggaucgucaccaugga

SEQ ID NO: 1675178 - RNA, 19 nt, Homo sapiens
  misc_RNA (1)...(19): siRNA sense strand
ccgagauggaguucaauug

SEQ ID NO: 1675179 - RNA, 19 nt, Homo sapiens
  misc_RNA (1)...(19): siRNA sense strand
ggaagcaacccaagacguu

SEQ ID NO: 1675180 - RNA, 19 nt, Homo sapiens
  misc_RNA (1)...(19): siRNA sense strand
caccauggacgccgagaug

SEQ ID NO: 1675181 - RNA, 19 nt, Homo sapiens
  misc_RNA (1)...(19): siRNA sense strand
acgccgagauggaguucaa

SEQ ID NO: 1675182 - RNA, 19 nt, Homo sapiens
  misc_RNA (1)...(19): siRNA sense strand
gccaucgcuucccgcauga

SEQ ID NO: 1675183 - RNA, 19 nt, Homo sapiens
  misc_RNA (1)...(19): siRNA sense strand
gccgagauggaguucaauu

SEQ ID NO: 1675184 - RNA, 19 nt, Homo sapiens
  misc_RNA (1)...(19): siRNA sense strand
cgagauggaguucaauugc

SEQ ID NO: 1675185 - RNA, 19 nt, Homo sapiens
  misc_RNA (1)...(19): siRNA sense strand
ugaggaucgucaccaugga

SEQ ID NO: 1675186 - RNA, 19 nt, Homo sapiens
  misc_RNA (1)...(19): siRNA sense strand
ccgagauggaguucaauug

SEQ ID NO: 1675187 - RNA, 19 nt, Homo sapiens
  misc_RNA (1)...(19): siRNA sense strand
ggaagcaacccaagacguu

SEQ ID NO: 1675188 - RNA, 19 nt, Homo sapiens
  misc_RNA (1)...(19): siRNA sense strand
agaagcagauuuuagauga

SEQ ID NO: 1675189 - RNA, 19 nt, Homo sapiens
  misc_RNA (1)...(19): siRNA sense strand
gaagcagauuuuagaugaa

SEQ ID NO: 1675190 - RNA, 19 nt, Homo sapiens
  misc_RNA (1)...(19): siRNA sense strand
caccauggacgccgagaug

SEQ ID NO: 1675191 - RNA, 19 nt, Homo sapiens
  misc_RNA (1)...(19): siRNA sense strand
acgccgagauggaguucaa

SEQ ID NO: 1675192 - RNA, 19 nt, Homo sapiens
  misc_RNA (1)...(19): siRNA sense strand
gccaucgcuucccgcauga

SEQ ID NO: 1675193 - RNA, 19 nt, Homo sapiens
  misc_RNA (1)...(19): siRNA sense strand
gccgagauggaguucaauu

SEQ ID NO: 1675194 - RNA, 19 nt, Homo sapiens
  misc_RNA (1)...(19): siRNA sense strand
cgagauggaguucaauugc

SEQ ID NO: 1675195 - RNA, 19 nt, Homo sapiens
  misc_RNA (1)...(19): siRNA sense strand
ugaggaucgucaccaugga

SEQ ID NO: 1675196 - RNA, 19 nt, Homo sapiens
  misc_RNA (1)...(19): siRNA sense strand
ccgagauggaguucaauug

SEQ ID NO: 1675197 - RNA, 19 nt, Homo sapiens
  misc_RNA (1)...(19): siRNA sense strand
ggaagcaacccaagacguu

SEQ ID NO: 1675198 - RNA, 19 nt, Homo sapiens
  misc_RNA (1)...(19): siRNA sense strand
agaagcagauuuuagauga

SEQ ID NO: 1675199 - RNA, 19 nt, Homo sapiens
  misc_RNA (1)...(19): siRNA sense strand
gaagcagauuuuagaugaa

SEQ ID NO: 1675200 - RNA, 19 nt, Homo sapiens
  misc_RNA (1)...(19): siRNA sense strand
caccauggacgccgagaug

SEQ ID NO: 1675201 - RNA, 19 nt, Homo sapiens
  misc_RNA (1)...(19): siRNA sense strand
acgccgagauggaguucaa

SEQ ID NO: 1675202 - RNA, 19 nt, Homo sapiens
  misc_RNA (1)...(19): siRNA sense strand
gccaucgcuucccgcauga

SEQ ID NO: 1675203 - RNA, 19 nt, Homo sapiens
  misc_RNA (1)...(19): siRNA sense strand
gccgagauggaguucaauu

SEQ ID NO: 1675204 - RNA, 19 nt, Homo sapiens
  misc_RNA (1)...(19): siRNA sense strand
cgagauggaguucaauugc

SEQ ID NO: 1675205 - RNA, 19 nt, Homo sapiens
  misc_RNA (1)...(19): siRNA sense strand
ugaggaucgucaccaugga

SEQ ID NO: 1675206 - RNA, 19 nt, Homo sapiens
  misc_RNA (1)...(19): siRNA sense strand
ccgagauggaguucaauug

SEQ ID NO: 1675207 - RNA, 19 nt, Homo sapiens
  misc_RNA (1)...(19): siRNA sense strand
ggaagcaacccaagacguu

SEQ ID NO: 1675208 - RNA, 19 nt, Homo sapiens
  misc_RNA (1)...(19): siRNA sense strand
agaagcagauuuuagauga

SEQ ID NO: 1675209 - RNA, 19 nt, Homo sapiens
  misc_RNA (1)...(19): siRNA sense strand
gaagcagauuuuagaugaa

SEQ ID NO: 1675210 - RNA, 19 nt, Homo sapiens
  misc_RNA (1)...(19): siRNA sense strand
caccauggacgccgagaug

SEQ ID NO: 1675211 - RNA, 19 nt, Homo sapiens
  misc_RNA (1)...(19): siRNA sense strand
acgccgagauggaguucaa

SEQ ID NO: 1675212 - RNA, 19 nt, Homo sapiens
  misc_RNA (1)...(19): siRNA sense strand
gccaucgcuucccgcauga

SEQ ID NO: 1675213 - RNA, 19 nt, Homo sapiens
  misc_RNA (1)...(19): siRNA sense strand
gccgagauggaguucaauu

SEQ ID NO: 1675214 - RNA, 19 nt, Homo sapiens
  misc_RNA (1)...(19): siRNA sense strand
cgagauggaguucaauugc

SEQ ID NO: 1675215 - RNA, 19 nt, Homo sapiens
  misc_RNA (1)...(19): siRNA sense strand
ugaggaucgucaccaugga

SEQ ID NO: 1675216 - RNA, 19 nt, Homo sapiens
  misc_RNA (1)...(19): siRNA sense strand
ccgagauggaguucaauug

SEQ ID NO: 1675217 - RNA, 19 nt, Homo sapiens
  misc_RNA (1)...(19): siRNA sense strand
ggaagcaacccaagacguu

SEQ ID NO: 1675218 - RNA, 19 nt, Homo sapiens
  misc_RNA (1)...(19): siRNA sense strand
agaagcagauuuuagauga

SEQ ID NO: 1675219 - RNA, 19 nt, Homo sapiens
  misc_RNA (1)...(19): siRNA sense strand
gaagcagauuuuagaugaa

SEQ ID NO: 1675220 - RNA, 19 nt, Homo sapiens
  misc_RNA (1)...(19): siRNA sense strand
caccauggacgccgagaug

SEQ ID NO: 1675221 - RNA, 19 nt, Homo sapiens
  misc_RNA (1)...(19): siRNA sense strand
acgccgagauggaguucaa

SEQ ID NO: 1675222 - RNA, 19 nt, Homo sapiens
  misc_RNA (1)...(19): siRNA sense strand
gccaucgcuucccgcauga

SEQ ID NO: 1675223 - RNA, 19 nt, Homo sapiens
  misc_RNA (1)...(19): siRNA sense strand
gccgagauggaguucaauu

SEQ ID NO: 1675224 - RNA, 19 nt, Homo sapiens
  misc_RNA (1)...(19): siRNA sense strand
cgagauggaguucaauugc

SEQ ID NO: 1675225 - RNA, 19 nt, Homo sapiens
  misc_RNA (1)...(19): siRNA sense strand
ugaggaucgucaccaugga

SEQ ID NO: 1675226 - RNA, 19 nt, Homo sapiens
  misc_RNA (1)...(19): siRNA sense strand
ccgagauggaguucaauug

SEQ ID NO: 1675227 - RNA, 19 nt, Homo sapiens
  misc_RNA (1)...(19): siRNA sense strand
ggaagcaacccaagacguu

SEQ ID NO: 1675228 - RNA, 19 nt, Homo sapiens
  misc_RNA (1)...(19): siRNA sense strand
agaagcagauuuuagauga

SEQ ID NO: 1675229 - RNA, 19 nt, Homo sapiens
  misc_RNA (1)...(19): siRNA sense strand
gaagcagauuuuagaugaa

SEQ ID NO: 1675230 - RNA, 19 nt, Homo sapiens
  misc_RNA (1)...(19): siRNA sense strand
caccauggacgccgagaug

SEQ ID NO: 1675231 - RNA, 19 nt, Homo sapiens
  misc_RNA (1)...(19): siRNA sense strand
acgccgagauggaguucaa

SEQ ID NO: 1675232 - RNA, 19 nt, Homo sapiens
  misc_RNA (1)...(19): siRNA sense strand
gccaucgcuucccgcauga

SEQ ID NO: 1675233 - RNA, 19 nt, Homo sapiens
  misc_RNA (1)...(19): siRNA sense strand
gccgagauggaguucaauu

SEQ ID NO: 1675234 - RNA, 19 nt, Homo sapiens
  misc_RNA (1)...(19): siRNA sense strand
cgagauggaguucaauugc

SEQ ID NO: 1675235 - RNA, 19 nt, Homo sapiens
  misc_RNA (1)...(19): siRNA sense strand
ugaggaucgucaccaugga

SEQ ID NO: 1675236 - RNA, 19 nt, Homo sapiens
  misc_RNA (1)...(19): siRNA sense strand
ccgagauggaguucaauug

SEQ ID NO: 1675237 - RNA, 19 nt, Homo sapiens
  misc_RNA (1)...(19): siRNA sense strand
ggaagcaacccaagacguu

SEQ ID NO: 1675238 - RNA, 19 nt, Homo sapiens
  misc_RNA (1)...(19): siRNA sense strand
agaagcagauuuuagauga

SEQ ID NO: 1675239 - RNA, 19 nt, Homo sapiens
  misc_RNA (1)...(19): siRNA sense strand
gaagcagauuuuagaugaa

SEQ ID NO: 1675240 - RNA, 19 nt, Homo sapiens
  misc_RNA (1)...(19): siRNA sense strand
caccauggacgccgagaug

SEQ ID NO: 1675241 - RNA, 19 nt, Homo sapiens
  misc_RNA (1)...(19): siRNA sense strand
acgccgagauggaguucaa

SEQ ID NO: 1675242 - RNA, 19 nt, Homo sapiens
  misc_RNA (1)...(19): siRNA sense strand
gccaucgcuucccgcauga

SEQ ID NO: 1675243 - RNA, 19 nt, Homo sapiens
  misc_RNA (1)...(19): siRNA sense strand
gccgagauggaguucaauu

SEQ ID NO: 1675244 - RNA, 19 nt, Homo sapiens
  misc_RNA (1)...(19): siRNA sense strand
cgagauggaguucaauugc

SEQ ID NO: 1675245 - RNA, 19 nt, Homo sapiens
  misc_RNA (1)...(19): siRNA sense strand
ugaggaucgucaccaugga

SEQ ID NO: 1675246 - RNA, 19 nt, Homo sapiens
  misc_RNA (1)...(19): siRNA sense strand
ccgagauggaguucaauug

SEQ ID NO: 1675247 - RNA, 19 nt, Homo sapiens
  misc_RNA (1)...(19): siRNA sense strand
ggaagcaacccaagacguu

SEQ ID NO: 1675248 - RNA, 19 nt, Homo sapiens
  misc_RNA (1)...(19): siRNA sense strand
agaagcagauuuuagauga

SEQ ID NO: 1675249 - RNA, 19 nt, Homo sapiens
  misc_RNA (1)...(19): siRNA sense strand
gaagcagauuuuagaugaa

SEQ ID NO: 1675250 - RNA, 19 nt, Homo sapiens
  misc_RNA (1)...(19): siRNA sense strand
caccauggacgccgagaug

SEQ ID NO: 1675251 - RNA, 19 nt, Homo sapiens
  misc_RNA (1)...(19): siRNA sense strand
acgccgagauggaguucaa

SEQ ID NO: 1675252 - RNA, 19 nt, Homo sapiens
  misc_RNA (1)...(19): siRNA sense strand
gccaucgcuucccgcauga

SEQ ID NO: 1675253 - RNA, 19 nt, Homo sapiens
  misc_RNA (1)...(19): siRNA sense strand
gccgagauggaguucaauu

SEQ ID NO: 1675254 - RNA, 19 nt, Homo sapiens
  misc_RNA (1)...(19): siRNA sense strand
cgagauggaguucaauugc

SEQ ID NO: 1675255 - RNA, 19 nt, Homo sapiens
  misc_RNA (1)...(19): siRNA sense strand
ugaggaucgucaccaugga

SEQ ID NO: 1675256 - RNA, 19 nt, Homo sapiens
  misc_RNA (1)...(19): siRNA sense strand
ccgagauggaguucaauug

SEQ ID NO: 1675257 - RNA, 19 nt, Homo sapiens
  misc_RNA (1)...(19): siRNA sense strand
ggaagcaacccaagacguu

SEQ ID NO: 1675258 - RNA, 19 nt, Homo sapiens
  misc_RNA (1)...(19): siRNA sense strand
agaagcagauuuuagauga

SEQ ID NO: 1675259 - RNA, 19 nt, Homo sapiens
  misc_RNA (1)...(19): siRNA sense strand
gaagcagauuuuagaugaa

SEQ ID NO: 1675260 - RNA, 19 nt, Homo sapiens
  misc_RNA (1)...(19): siRNA sense strand
caccauggacgccgagaug

SEQ ID NO: 1675261 - RNA, 19 nt, Homo sapiens
  misc_RNA (1)...(19): siRNA sense strand
acgccgagauggaguucaa

SEQ ID NO: 1675262 - RNA, 19 nt, Homo sapiens
  misc_RNA (1)...(19): siRNA sense strand
gccaucgcuucccgcauga

SEQ ID NO: 1675263 - RNA, 19 nt, Homo sapiens
  misc_RNA (1)...(19): siRNA sense strand
gccgagauggaguucaauu

SEQ ID NO: 1675264 - RNA, 19 nt, Homo sapiens
  misc_RNA (1)...(19): siRNA sense strand
cgagauggaguucaauugc

SEQ ID NO: 1675265 - RNA, 19 nt, Homo sapiens
  misc_RNA (1)...(19): siRNA sense strand
ugaggaucgucaccaugga

SEQ ID NO: 1675266 - RNA, 19 nt, Homo sapiens
  misc_RNA (1)...(19): siRNA sense strand
ccgagauggaguucaauug

SEQ ID NO: 1675267 - RNA, 19 nt, Homo sapiens
  misc_RNA (1)...(19): siRNA sense strand
ggaagcaacccaagacguu

SEQ ID NO: 1675268 - RNA, 19 nt, Homo sapiens
  misc_RNA (1)...(19): siRNA sense strand
agaagcagauuuuagauga

SEQ ID NO: 1675269 - RNA, 19 nt, Homo sapiens
  misc_RNA (1)...(19): siRNA sense strand
gaagcagauuuuagaugaa

SEQ ID NO: 1675270 - RNA, 19 nt, Homo sapiens
  misc_RNA (1)...(19): siRNA sense strand
caccauggacgccgagaug

SEQ ID NO: 1675271 - RNA, 19 nt, Homo sapiens
  misc_RNA (1)...(19): siRNA sense strand
acgccgagauggaguucaa

SEQ ID NO: 1675272 - RNA, 19 nt, Homo sapiens
  misc_RNA (1)...(19): siRNA sense strand
gccaucgcuucccgcauga

SEQ ID NO: 1675273 - RNA, 19 nt, Homo sapiens
  misc_RNA (1)...(19): siRNA sense strand
gccgagauggaguucaauu

SEQ ID NO: 1675274 - RNA, 19 nt, Homo sapiens
  misc_RNA (1)...(19): siRNA sense strand
cgagauggaguucaauugc

SEQ ID NO: 1675275 - RNA, 19 nt, Homo sapiens
  misc_RNA (1)...(19): siRNA sense strand
ugaggaucgucaccaugga

SEQ ID NO: 1675276 - RNA, 19 nt, Homo sapiens
  misc_RNA (1)...(19): siRNA sense strand
ccgagauggaguucaauug

SEQ ID NO: 1675277 - RNA, 19 nt, Homo sapiens
  misc_RNA (1)...(19): siRNA sense strand
ggaagcaacccaagacguu

SEQ ID NO: 1675278 - RNA, 19 nt, Homo sapiens
  misc_RNA (1)...(19): siRNA sense strand
agaagcagauuuuagauga

SEQ ID NO: 1675279 - RNA, 19 nt, Homo sapiens
  misc_RNA (1)...(19): siRNA sense strand
gaagcagauuuuagaugaa

SEQ ID NO: 1675280 - RNA, 19 nt, Homo sapiens
  misc_RNA (1)...(19): siRNA sense strand
caccauggacgccgagaug

SEQ ID NO: 1675281 - RNA, 19 nt, Homo sapiens
  misc_RNA (1)...(19): siRNA sense strand
acgccgagauggaguucaa

SEQ ID NO: 1675282 - RNA, 19 nt, Homo sapiens
  misc_RNA (1)...(19): siRNA sense strand
gccaucgcuucccgcauga

SEQ ID NO: 1675283 - RNA, 19 nt, Homo sapiens
  misc_RNA (1)...(19): siRNA sense strand
gccgagauggaguucaauu

SEQ ID NO: 1675284 - RNA, 19 nt, Homo sapiens
  misc_RNA (1)...(19): siRNA sense strand
cgagauggaguucaauugc

SEQ ID NO: 1675285 - RNA, 19 nt, Homo sapiens
  misc_RNA (1)...(19): siRNA sense strand
ugaggaucgucaccaugga

SEQ ID NO: 1675286 - RNA, 19 nt, Homo sapiens
  misc_RNA (1)...(19): siRNA sense strand
ccgagauggaguucaauug

SEQ ID NO: 1675287 - RNA, 19 nt, Homo sapiens
  misc_RNA (1)...(19): siRNA sense strand
ggaagcaacccaagacguu

SEQ ID NO: 1675288 - RNA, 19 nt, Homo sapiens
  misc_RNA (1)...(19): siRNA sense strand
agaagcagauuuuagauga

SEQ ID NO: 1675289 - RNA, 19 nt, Homo sapiens
  misc_RNA (1)...(19): siRNA sense strand
gaagcagauuuuagaugaa

SEQ ID NO: 1675290 - RNA, 19 nt, Homo sapiens
  misc_RNA (1)...(19): siRNA sense strand
caccauggacgccgagaug

SEQ ID NO: 1675291 - RNA, 19 nt, Homo sapiens
  misc_RNA (1)...(19): siRNA sense strand
acgccgagauggaguucaa

SEQ ID NO: 1675292 - RNA, 19 nt, Homo sapiens
  misc_RNA (1)...(19): siRNA sense strand
gccaucgcuucccgcauga

SEQ ID NO: 1675293 - RNA, 19 nt, Homo sapiens
  misc_RNA (1)...(19): siRNA sense strand
gccgagauggaguucaauu

SEQ ID NO: 1675294 - RNA, 19 nt, Homo sapiens
  misc_RNA (1)...(19): siRNA sense strand
cgagauggaguucaauugc

SEQ ID NO: 1675295 - RNA, 19 nt, Homo sapiens
  misc_RNA (1)...(19): siRNA sense strand
ugaggaucgucaccaugga

SEQ ID NO: 1675296 - RNA, 19 nt, Homo sapiens
  misc_RNA (1)...(19): siRNA sense strand
ccgagauggaguucaauug

SEQ ID NO: 1675297 - RNA, 19 nt, Homo sapiens
  misc_RNA (1)...(19): siRNA sense strand
ggaagcaacccaagacguu

SEQ ID NO: 1675298 - RNA, 19 nt, Homo sapiens
  misc_RNA (1)...(19): siRNA sense strand
caccauggacgccgagaug

SEQ ID NO: 1675299 - RNA, 19 nt, Homo sapiens
  misc_RNA (1)...(19): siRNA sense strand
acgccgagauggaguucaa

SEQ ID NO: 1675300 - RNA, 19 nt, Homo sapiens
  misc_RNA (1)...(19): siRNA sense strand
gccaucgcuucccgcauga

SEQ ID NO: 1675301 - RNA, 19 nt, Homo sapiens
  misc_RNA (1)...(19): siRNA sense strand
gccgagauggaguucaauu

SEQ ID NO: 1675302 - RNA, 19 nt, Homo sapiens
  misc_RNA (1)...(19): siRNA sense strand
cgagauggaguucaauugc

SEQ ID NO: 1675303 - RNA, 19 nt, Homo sapiens
  misc_RNA (1)...(19): siRNA sense strand
ugaggaucgucaccaugga

SEQ ID NO: 1675304 - RNA, 19 nt, Homo sapiens
  misc_RNA (1)...(19): siRNA sense strand
ccgagauggaguucaauug

SEQ ID NO: 1675305 - RNA, 19 nt, Homo sapiens
  misc_RNA (1)...(19): siRNA sense strand
ggaagcaacccaagacguu

SEQ ID NO: 1675306 - RNA, 19 nt, Homo sapiens
  misc_RNA (1)...(19): siRNA sense strand
caccauggacgccgagaug

SEQ ID NO: 1675307 - RNA, 19 nt, Homo sapiens
  misc_RNA (1)...(19): siRNA sense strand
acgccgagauggaguucaa

SEQ ID NO: 1675308 - RNA, 19 nt, Homo sapiens
  misc_RNA (1)...(19): siRNA sense strand
gccaucgcuucccgcauga

SEQ ID NO: 1675309 - RNA, 19 nt, Homo sapiens
  misc_RNA (1)...(19): siRNA sense strand
gccgagauggaguucaauu

SEQ ID NO: 1675310 - RNA, 19 nt, Homo sapiens
  misc_RNA (1)...(19): siRNA sense strand
cgagauggaguucaauugc

SEQ ID NO: 1675311 - RNA, 19 nt, Homo sapiens
  misc_RNA (1)...(19): siRNA sense strand
ugaggaucgucaccaugga

SEQ ID NO: 1675312 - RNA, 19 nt, Homo sapiens
  misc_RNA (1)...(19): siRNA sense strand
ccgagauggaguucaauug

SEQ ID NO: 1675313 - RNA, 19 nt, Homo sapiens
  misc_RNA (1)...(19): siRNA sense strand
ggaagcaacccaagacguu

SEQ ID NO: 1675314 - RNA, 19 nt, Homo sapiens
  misc_RNA (1)...(19): siRNA sense strand
agaagcagauuuuagauga

SEQ ID NO: 1675315 - RNA, 19 nt, Homo sapiens
  misc_RNA (1)...(19): siRNA sense strand
gaagcagauuuuagaugaa

SEQ ID NO: 1675316 - RNA, 19 nt, Homo sapiens
  misc_RNA (1)...(19): siRNA sense strand
caccauggacgccgagaug

SEQ ID NO: 1675317 - RNA, 19 nt, Homo sapiens
  misc_RNA (1)...(19): siRNA sense strand
acgccgagauggaguucaa

SEQ ID NO: 1675318 - RNA, 19 nt, Homo sapiens
  misc_RNA (1)...(19): siRNA sense strand
gccaucgcuucccgcauga

SEQ ID NO: 1675319 - RNA, 19 nt, Homo sapiens
  misc_RNA (1)...(19): siRNA sense strand
gccgagauggaguucaauu

SEQ ID NO: 1675320 - RNA, 19 nt, Homo sapiens
  misc_RNA (1)...(19): siRNA sense strand
cgagauggaguucaauugc

SEQ ID NO: 1675321 - RNA, 19 nt, Homo sapiens
  misc_RNA (1)...(19): siRNA sense strand
ugaggaucgucaccaugga

SEQ ID NO: 1675322 - RNA, 19 nt, Homo sapiens
  misc_RNA (1)...(19): siRNA sense strand
ccgagauggaguucaauug

SEQ ID NO: 1675323 - RNA, 19 nt, Homo sapiens
  misc_RNA (1)...(19): siRNA sense strand
ggaagcaacccaagacguu

SEQ ID NO: 1675324 - RNA, 19 nt, Homo sapiens
  misc_RNA (1)...(19): siRNA sense strand
agaagcagauuuuagauga

SEQ ID NO: 1675325 - RNA, 19 nt, Homo sapiens
  misc_RNA (1)...(19): siRNA sense strand
gaagcagauuuuagaugaa

SEQ ID NO: 1675326 - RNA, 19 nt, Homo sapiens
  misc_RNA (1)...(19): siRNA sense strand
caccauggacgccgagaug

SEQ ID NO: 1675327 - RNA, 19 nt, Homo sapiens
  misc_RNA (1)...(19): siRNA sense strand
acgccgagauggaguucaa

SEQ ID NO: 1675328 - RNA, 19 nt, Homo sapiens
  misc_RNA (1)...(19): siRNA sense strand
gccaucgcuucccgcauga

SEQ ID NO: 1675329 - RNA, 19 nt, Homo sapiens
  misc_RNA (1)...(19): siRNA sense strand
gccgagauggaguucaauu

SEQ ID NO: 1675330 - RNA, 19 nt, Homo sapiens
  misc_RNA (1)...(19): siRNA sense strand
cgagauggaguucaauugc

SEQ ID NO: 1675331 - RNA, 19 nt, Homo sapiens
  misc_RNA (1)...(19): siRNA sense strand
ugaggaucgucaccaugga

SEQ ID NO: 1675332 - RNA, 19 nt, Homo sapiens
  misc_RNA (1)...(19): siRNA sense strand
ccgagauggaguucaauug

SEQ ID NO: 1675333 - RNA, 19 nt, Homo sapiens
  misc_RNA (1)...(19): siRNA sense strand
ggaagcaacccaagacguu

SEQ ID NO: 1675334 - RNA, 19 nt, Homo sapiens
  misc_RNA (1)...(19): siRNA sense strand
agaagcagauuuuagauga

SEQ ID NO: 1675335 - RNA, 19 nt, Homo sapiens
  misc_RNA (1)...(19): siRNA sense strand
gaagcagauuuuagaugaa

SEQ ID NO: 1675336 - RNA, 19 nt, Homo sapiens
  misc_RNA (1)...(19): siRNA sense strand
caccauggacgccgagaug

SEQ ID NO: 1675337 - RNA, 19 nt, Homo sapiens
  misc_RNA (1)...(19): siRNA sense strand
acgccgagauggaguucaa

SEQ ID NO: 1675338 - RNA, 19 nt, Homo sapiens
  misc_RNA (1)...(19): siRNA sense strand
gccaucgcuucccgcauga

SEQ ID NO: 1675339 - RNA, 19 nt, Homo sapiens
  misc_RNA (1)...(19): siRNA sense strand
gccgagauggaguucaauu

SEQ ID NO: 1675340 - RNA, 19 nt, Homo sapiens
  misc_RNA (1)...(19): siRNA sense strand
cgagauggaguucaauugc

SEQ ID NO: 1675341 - RNA, 19 nt, Homo sapiens
  misc_RNA (1)...(19): siRNA sense strand
ugaggaucgucaccaugga

SEQ ID NO: 1675342 - RNA, 19 nt, Homo sapiens
  misc_RNA (1)...(19): siRNA sense strand
ccgagauggaguucaauug

SEQ ID NO: 1675343 - RNA, 19 nt, Homo sapiens
  misc_RNA (1)...(19): siRNA sense strand
ggaagcaacccaagacguu

SEQ ID NO: 1675344 - RNA, 19 nt, Homo sapiens
  misc_RNA (1)...(19): siRNA sense strand
agaagcagauuuuagauga

SEQ ID NO: 1675345 - RNA, 19 nt, Homo sapiens
  misc_RNA (1)...(19): siRNA sense strand
gaagcagauuuuagaugaa

SEQ ID NO: 1675346 - RNA, 19 nt, Homo sapiens
  misc_RNA (1)...(19): siRNA sense strand
caccauggacgccgagaug

SEQ ID NO: 1675347 - RNA, 19 nt, Homo sapiens
  misc_RNA (1)...(19): siRNA sense strand
acgccgagauggaguucaa

SEQ ID NO: 1675348 - RNA, 19 nt, Homo sapiens
  misc_RNA (1)...(19): siRNA sense strand
gccaucgcuucccgcauga

SEQ ID NO: 1675349 - RNA, 19 nt, Homo sapiens
  misc_RNA (1)...(19): siRNA sense strand
gccgagauggaguucaauu

SEQ ID NO: 1675350 - RNA, 19 nt, Homo sapiens
  misc_RNA (1)...(19): siRNA sense strand
cgagauggaguucaauugc

SEQ ID NO: 1675351 - RNA, 19 nt, Homo sapiens
  misc_RNA (1)...(19): siRNA sense strand
ugaggaucgucaccaugga

SEQ ID NO: 1675352 - RNA, 19 nt, Homo sapiens
  misc_RNA (1)...(19): siRNA sense strand
ccgagauggaguucaauug

SEQ ID NO: 1675353 - RNA, 19 nt, Homo sapiens
  misc_RNA (1)...(19): siRNA sense strand
ggaagcaacccaagacguu

SEQ ID NO: 1675354 - RNA, 19 nt, Homo sapiens
  misc_RNA (1)...(19): siRNA sense strand
agaagcagauuuuagauga

SEQ ID NO: 1675355 - RNA, 19 nt, Homo sapiens
  misc_RNA (1)...(19): siRNA sense strand
gaagcagauuuuagaugaa

SEQ ID NO: 1675356 - RNA, 19 nt, Homo sapiens
  misc_RNA (1)...(19): siRNA sense strand
caccauggacgccgagaug

SEQ ID NO: 1675357 - RNA, 19 nt, Homo sapiens
  misc_RNA (1)...(19): siRNA sense strand
acgccgagauggaguucaa

SEQ ID NO: 1675358 - RNA, 19 nt, Homo sapiens
  misc_RNA (1)...(19): siRNA sense strand
gccaucgcuucccgcauga

SEQ ID NO: 1675359 - RNA, 19 nt, Homo sapiens
  misc_RNA (1)...(19): siRNA sense strand
gccgagauggaguucaauu

SEQ ID NO: 1675360 - RNA, 19 nt, Homo sapiens
  misc_RNA (1)...(19): siRNA sense strand
cgagauggaguucaauugc

SEQ ID NO: 1675361 - RNA, 19 nt, Homo sapiens
  misc_RNA (1)...(19): siRNA sense strand
ugaggaucgucaccaugga

SEQ ID NO: 1675362 - RNA, 19 nt, Homo sapiens
  misc_RNA (1)...(19): siRNA sense strand
ccgagauggaguucaauug

SEQ ID NO: 1675363 - RNA, 19 nt, Homo sapiens
  misc_RNA (1)...(19): siRNA sense strand
ggaagcaacccaagacguu

SEQ ID NO: 1675364 - RNA, 19 nt, Homo sapiens
  misc_RNA (1)...(19): siRNA sense strand
agaagcagauuuuagauga

SEQ ID NO: 1675365 - RNA, 19 nt, Homo sapiens
  misc_RNA (1)...(19): siRNA sense strand
gaagcagauuuuagaugaa

SEQ ID NO: 1675366 - RNA, 19 nt, Homo sapiens
  misc_RNA (1)...(19): siRNA sense strand
caccauggacgccgagaug

SEQ ID NO: 1675367 - RNA, 19 nt, Homo sapiens
  misc_RNA (1)...(19): siRNA sense strand
acgccgagauggaguucaa

SEQ ID NO: 1675368 - RNA, 19 nt, Homo sapiens
  misc_RNA (1)...(19): siRNA sense strand
gccaucgcuucccgcauga

SEQ ID NO: 1675369 - RNA, 19 nt, Homo sapiens
  misc_RNA (1)...(19): siRNA sense strand
gccgagauggaguucaauu

SEQ ID NO: 1675370 - RNA, 19 nt, Homo sapiens
  misc_RNA (1)...(19): siRNA sense strand
cgagauggaguucaauugc

SEQ ID NO: 1675371 - RNA, 19 nt, Homo sapiens
  misc_RNA (1)...(19): siRNA sense strand
ugaggaucgucaccaugga

SEQ ID NO: 1675372 - RNA, 19 nt, Homo sapiens
  misc_RNA (1)...(19): siRNA sense strand
ccgagauggaguucaauug

SEQ ID NO: 1675373 - RNA, 19 nt, Homo sapiens
  misc_RNA (1)...(19): siRNA sense strand
ggaagcaacccaagacguu

SEQ ID NO: 1675374 - RNA, 19 nt, Homo sapiens
  misc_RNA (1)...(19): siRNA sense strand
agaagcagauuuuagauga

SEQ ID NO: 1675375 - RNA, 19 nt, Homo sapiens
  misc_RNA (1)...(19): siRNA sense strand
gaagcagauuuuagaugaa

SEQ ID NO: 1675376 - RNA, 19 nt, Homo sapiens
  misc_RNA (1)...(19): siRNA sense strand
caccauggacgccgagaug

SEQ ID NO: 1675377 - RNA, 19 nt, Homo sapiens
  misc_RNA (1)...(19): siRNA sense strand
acgccgagauggaguucaa

SEQ ID NO: 1675378 - RNA, 19 nt, Homo sapiens
  misc_RNA (1)...(19): siRNA sense strand
gccaucgcuucccgcauga

SEQ ID NO: 1675379 - RNA, 19 nt, Homo sapiens
  misc_RNA (1)...(19): siRNA sense strand
gccgagauggaguucaauu

SEQ ID NO: 1675380 - RNA, 19 nt, Homo sapiens
  misc_RNA (1)...(19): siRNA sense strand
cgagauggaguucaauugc

SEQ ID NO: 1675381 - RNA, 19 nt, Homo sapiens
  misc_RNA (1)...(19): siRNA sense strand
ugaggaucgucaccaugga

SEQ ID NO: 1675382 - RNA, 19 nt, Homo sapiens
  misc_RNA (1)...(19): siRNA sense strand
ccgagauggaguucaauug

SEQ ID NO: 1675383 - RNA, 19 nt, Homo sapiens
  misc_RNA (1)...(19): siRNA sense strand
ggaagcaacccaagacguu

SEQ ID NO: 1675384 - RNA, 19 nt, Homo sapiens
  misc_RNA (1)...(19): siRNA sense strand
agaagcagauuuuagauga

SEQ ID NO: 1675385 - RNA, 19 nt, Homo sapiens
  misc_RNA (1)...(19): siRNA sense strand
gaagcagauuuuagaugaa

SEQ ID NO: 1675386 - RNA, 19 nt, Homo sapiens
  misc_RNA (1)...(19): siRNA sense strand
caccauggacgccgagaug

SEQ ID NO: 1675387 - RNA, 19 nt, Homo sapiens
  misc_RNA (1)...(19): siRNA sense strand
acgccgagauggaguucaa

SEQ ID NO: 1675388 - RNA, 19 nt, Homo sapiens
  misc_RNA (1)...(19): siRNA sense strand
gccaucgcuucccgcauga

SEQ ID NO: 1675389 - RNA, 19 nt, Homo sapiens
  misc_RNA (1)...(19): siRNA sense strand
gccgagauggaguucaauu

SEQ ID NO: 1675390 - RNA, 19 nt, Homo sapiens
  misc_RNA (1)...(19): siRNA sense strand
cgagauggaguucaauugc

SEQ ID NO: 1675391 - RNA, 19 nt, Homo sapiens
  misc_RNA (1)...(19): siRNA sense strand
ugaggaucgucaccaugga

SEQ ID NO: 1675392 - RNA, 19 nt, Homo sapiens
  misc_RNA (1)...(19): siRNA sense strand
ccgagauggaguucaauug

SEQ ID NO: 1675393 - RNA, 19 nt, Homo sapiens
  misc_RNA (1)...(19): siRNA sense strand
ggaagcaacccaagacguu

SEQ ID NO: 1675394 - RNA, 19 nt, Homo sapiens
  misc_RNA (1)...(19): siRNA sense strand
agaagcagauuuuagauga

SEQ ID NO: 1675395 - RNA, 19 nt, Homo sapiens
  misc_RNA (1)...(19): siRNA sense strand
gaagcagauuuuagaugaa

SEQ ID NO: 1675396 - RNA, 19 nt, Homo sapiens
  misc_RNA (1)...(19): siRNA sense strand
caccauggacgccgagaug

SEQ ID NO: 1675397 - RNA, 19 nt, Homo sapiens
  misc_RNA (1)...(19): siRNA sense strand
acgccgagauggaguucaa

SEQ ID NO: 1675398 - RNA, 19 nt, Homo sapiens
  misc_RNA (1)...(19): siRNA sense strand
gccaucgcuucccgcauga

SEQ ID NO: 1675399 - RNA, 19 nt, Homo sapiens
  misc_RNA (1)...(19): siRNA sense strand
gccgagauggaguucaauu

SEQ ID NO: 1675400 - RNA, 19 nt, Homo sapiens
  misc_RNA (1)...(19): siRNA sense strand
cgagauggaguucaauugc

SEQ ID NO: 1675401 - RNA, 19 nt, Homo sapiens
  misc_RNA (1)...(19): siRNA sense strand
ugaggaucgucaccaugga

SEQ ID NO: 1675402 - RNA, 19 nt, Homo sapiens
  misc_RNA (1)...(19): siRNA sense strand
ccgagauggaguucaauug

SEQ ID NO: 1675403 - RNA, 19 nt, Homo sapiens
  misc_RNA (1)...(19): siRNA sense strand
ggaagcaacccaagacguu

SEQ ID NO: 1675404 - RNA, 19 nt, Homo sapiens
  misc_RNA (1)...(19): siRNA sense strand
agaagcagauuuuagauga

SEQ ID NO: 1675405 - RNA, 19 nt, Homo sapiens
  misc_RNA (1)...(19): siRNA sense strand
gaagcagauuuuagaugaa

SEQ ID NO: 1675406 - RNA, 19 nt, Homo sapiens
  misc_RNA (1)...(19): siRNA sense strand
caccauggacgccgagaug

SEQ ID NO: 1675407 - RNA, 19 nt, Homo sapiens
  misc_RNA (1)...(19): siRNA sense strand
acgccgagauggaguucaa

SEQ ID NO: 1675408 - RNA, 19 nt, Homo sapiens
  misc_RNA (1)...(19): siRNA sense strand
gccaucgcuucccgcauga

SEQ ID NO: 1675409 - RNA, 19 nt, Homo sapiens
  misc_RNA (1)...(19): siRNA sense strand
gccgagauggaguucaauu

SEQ ID NO: 1675410 - RNA, 19 nt, Homo sapiens
  misc_RNA (1)...(19): siRNA sense strand
cgagauggaguucaauugc

SEQ ID NO: 1675411 - RNA, 19 nt, Homo sapiens
  misc_RNA (1)...(19): siRNA sense strand
ugaggaucgucaccaugga

SEQ ID NO: 1675412 - RNA, 19 nt, Homo sapiens
  misc_RNA (1)...(19): siRNA sense strand
ccgagauggaguucaauug

SEQ ID NO: 1675413 - RNA, 19 nt, Homo sapiens
  misc_RNA (1)...(19): siRNA sense strand
ggaagcaacccaagacguu

SEQ ID NO: 1675414 - RNA, 19 nt, Homo sapiens
  misc_RNA (1)...(19): siRNA sense strand
agaagcagauuuuagauga

SEQ ID NO: 1675415 - RNA, 19 nt, Homo sapiens
  misc_RNA (1)...(19): siRNA sense strand
gaagcagauuuuagaugaa

SEQ ID NO: 1675416 - RNA, 19 nt, Homo sapiens
  misc_RNA (1)...(19): siRNA sense strand
caccauggacgccgagaug

SEQ ID NO: 1675417 - RNA, 19 nt, Homo sapiens
  misc_RNA (1)...(19): siRNA sense strand
acgccgagauggaguucaa

SEQ ID NO: 1675418 - RNA, 19 nt, Homo sapiens
  misc_RNA (1)...(19): siRNA sense strand
gccaucgcuucccgcauga

SEQ ID NO: 1675419 - RNA, 19 nt, Homo sapiens
  misc_RNA (1)...(19): siRNA sense strand
gccgagauggaguucaauu

SEQ ID NO: 1675420 - RNA, 19 nt, Homo sapiens
  misc_RNA (1)...(19): siRNA sense strand
cgagauggaguucaauugc

SEQ ID NO: 1675421 - RNA, 19 nt, Homo sapiens
  misc_RNA (1)...(19): siRNA sense strand
ugaggaucgucaccaugga

SEQ ID NO: 1675422 - RNA, 19 nt, Homo sapiens
  misc_RNA (1)...(19): siRNA sense strand
ccgagauggaguucaauug

SEQ ID NO: 1675423 - RNA, 19 nt, Homo sapiens
  misc_RNA (1)...(19): siRNA sense strand
ggaagcaacccaagacguu

SEQ ID NO: 1675424 - RNA, 19 nt, Homo sapiens
  misc_RNA (1)...(19): siRNA sense strand
caccauggacgccgagaug

SEQ ID NO: 1675425 - RNA, 19 nt, Homo sapiens
  misc_RNA (1)...(19): siRNA sense strand
acgccgagauggaguucaa

SEQ ID NO: 1675426 - RNA, 19 nt, Homo sapiens
  misc_RNA (1)...(19): siRNA sense strand
gccaucgcuucccgcauga

SEQ ID NO: 1675427 - RNA, 19 nt, Homo sapiens
  misc_RNA (1)...(19): siRNA sense strand
gccgagauggaguucaauu

SEQ ID NO: 1675428 - RNA, 19 nt, Homo sapiens
  misc_RNA (1)...(19): siRNA sense strand
cgagauggaguucaauugc

SEQ ID NO: 1675429 - RNA, 19 nt, Homo sapiens
  misc_RNA (1)...(19): siRNA sense strand
ugaggaucgucaccaugga

SEQ ID NO: 1675430 - RNA, 19 nt, Homo sapiens
  misc_RNA (1)...(19): siRNA sense strand
ccgagauggaguucaauug

SEQ ID NO: 1675431 - RNA, 19 nt, Homo sapiens
  misc_RNA (1)...(19): siRNA sense strand
ggaagcaacccaagacguu

SEQ ID NO: 1675432 - RNA, 19 nt, Homo sapiens
  misc_RNA (1)...(19): siRNA sense strand
caccauggacgccgagaug

SEQ ID NO: 1675433 - RNA, 19 nt, Homo sapiens
  misc_RNA (1)...(19): siRNA sense strand
acgccgagauggaguucaa

SEQ ID NO: 1675434 - RNA, 19 nt, Homo sapiens
  misc_RNA (1)...(19): siRNA sense strand
gccaucgcuucccgcauga

SEQ ID NO: 1675435 - RNA, 19 nt, Homo sapiens
  misc_RNA (1)...(19): siRNA sense strand
gccgagauggaguucaauu

SEQ ID NO: 1675436 - RNA, 19 nt, Homo sapiens
  misc_RNA (1)...(19): siRNA sense strand
cgagauggaguucaauugc

SEQ ID NO: 1675437 - RNA, 19 nt, Homo sapiens
  misc_RNA (1)...(19): siRNA sense strand
ugaggaucgucaccaugga

SEQ ID NO: 1675438 - RNA, 19 nt, Homo sapiens
  misc_RNA (1)...(19): siRNA sense strand
ccgagauggaguucaauug

SEQ ID NO: 1675439 - RNA, 19 nt, Homo sapiens
  misc_RNA (1)...(19): siRNA sense strand
ggaagcaacccaagacguu

SEQ ID NO: 1675440 - RNA, 19 nt, Homo sapiens
  misc_RNA (1)...(19): siRNA sense strand
agaagcagauuuuagauga

SEQ ID NO: 1675441 - RNA, 19 nt, Homo sapiens
  misc_RNA (1)...(19): siRNA sense strand
gaagcagauuuuagaugaa

SEQ ID NO: 1675442 - RNA, 19 nt, Homo sapiens
  misc_RNA (1)...(19): siRNA sense strand
caccauggacgccgagaug

SEQ ID NO: 1675443 - RNA, 19 nt, Homo sapiens
  misc_RNA (1)...(19): siRNA sense strand
acgccgagauggaguucaa

SEQ ID NO: 1675444 - RNA, 19 nt, Homo sapiens
  misc_RNA (1)...(19): siRNA sense strand
gccaucgcuucccgcauga

SEQ ID NO: 1675445 - RNA, 19 nt, Homo sapiens
  misc_RNA (1)...(19): siRNA sense strand
gccgagauggaguucaauu

SEQ ID NO: 1675446 - RNA, 19 nt, Homo sapiens
  misc_RNA (1)...(19): siRNA sense strand
cgagauggaguucaauugc

SEQ ID NO: 1675447 - RNA, 19 nt, Homo sapiens
  misc_RNA (1)...(19): siRNA sense strand
ugaggaucgucaccaugga

SEQ ID NO: 1675448 - RNA, 19 nt, Homo sapiens
  misc_RNA (1)...(19): siRNA sense strand
ccgagauggaguucaauug

SEQ ID NO: 1675449 - RNA, 19 nt, Homo sapiens
  misc_RNA (1)...(19): siRNA sense strand
ggaagcaacccaagacguu

SEQ ID NO: 1675450 - RNA, 19 nt, Homo sapiens
  misc_RNA (1)...(19): siRNA sense strand
agaagcagauuuuagauga

SEQ ID NO: 1675451 - RNA, 19 nt, Homo sapiens
  misc_RNA (1)...(19): siRNA sense strand
gaagcagauuuuagaugaa

SEQ ID NO: 1675452 - RNA, 19 nt, Homo sapiens
  misc_RNA (1)...(19): siRNA sense strand
caccauggacgccgagaug

SEQ ID NO: 1675453 - RNA, 19 nt, Homo sapiens
  misc_RNA (1)...(19): siRNA sense strand
acgccgagauggaguucaa

SEQ ID NO: 1675454 - RNA, 19 nt, Homo sapiens
  misc_RNA (1)...(19): siRNA sense strand
gccaucgcuucccgcauga

SEQ ID NO: 1675455 - RNA, 19 nt, Homo sapiens
  misc_RNA (1)...(19): siRNA sense strand
gccgagauggaguucaauu

SEQ ID NO: 1675456 - RNA, 19 nt, Homo sapiens
  misc_RNA (1)...(19): siRNA sense strand
cgagauggaguucaauugc

SEQ ID NO: 1675457 - RNA, 19 nt, Homo sapiens
  misc_RNA (1)...(19): siRNA sense strand
ugaggaucgucaccaugga

SEQ ID NO: 1675458 - RNA, 19 nt, Homo sapiens
  misc_RNA (1)...(19): siRNA sense strand
ccgagauggaguucaauug

SEQ ID NO: 1675459 - RNA, 19 nt, Homo sapiens
  misc_RNA (1)...(19): siRNA sense strand
ggaagcaacccaagacguu

SEQ ID NO: 1675460 - RNA, 19 nt, Homo sapiens
  misc_RNA (1)...(19): siRNA sense strand
agaagcagauuuuagauga

SEQ ID NO: 1675461 - RNA, 19 nt, Homo sapiens
  misc_RNA (1)...(19): siRNA sense strand
gaagcagauuuuagaugaa

SEQ ID NO: 1675462 - RNA, 19 nt, Homo sapiens
  misc_RNA (1)...(19): siRNA sense strand
caccauggacgccgagaug

SEQ ID NO: 1675463 - RNA, 19 nt, Homo sapiens
  misc_RNA (1)...(19): siRNA sense strand
acgccgagauggaguucaa

SEQ ID NO: 1675464 - RNA, 19 nt, Homo sapiens
  misc_RNA (1)...(19): siRNA sense strand
gccaucgcuucccgcauga

SEQ ID NO: 1675465 - RNA, 19 nt, Homo sapiens
  misc_RNA (1)...(19): siRNA sense strand
gccgagauggaguucaauu

SEQ ID NO: 1675466 - RNA, 19 nt, Homo sapiens
  misc_RNA (1)...(19): siRNA sense strand
cgagauggaguucaauugc

SEQ ID NO: 1675467 - RNA, 19 nt, Homo sapiens
  misc_RNA (1)...(19): siRNA sense strand
ugaggaucgucaccaugga

SEQ ID NO: 1675468 - RNA, 19 nt, Homo sapiens
  misc_RNA (1)...(19): siRNA sense strand
ccgagauggaguucaauug

SEQ ID NO: 1675469 - RNA, 19 nt, Homo sapiens
  misc_RNA (1)...(19): siRNA sense strand
ggaagcaacccaagacguu

SEQ ID NO: 1675470 - RNA, 19 nt, Homo sapiens
  misc_RNA (1)...(19): siRNA sense strand
agaagcagauuuuagauga

SEQ ID NO: 1675471 - RNA, 19 nt, Homo sapiens
  misc_RNA (1)...(19): siRNA sense strand
gaagcagauuuuagaugaa

SEQ ID NO: 1675472 - RNA, 19 nt, Homo sapiens
  misc_RNA (1)...(19): siRNA sense strand
caccauggacgccgagaug

SEQ ID NO: 1675473 - RNA, 19 nt, Homo sapiens
  misc_RNA (1)...(19): siRNA sense strand
acgccgagauggaguucaa

SEQ ID NO: 1675474 - RNA, 19 nt, Homo sapiens
  misc_RNA (1)...(19): siRNA sense strand
gccaucgcuucccgcauga

SEQ ID NO: 1675475 - RNA, 19 nt, Homo sapiens
  misc_RNA (1)...(19): siRNA sense strand
gccgagauggaguucaauu

SEQ ID NO: 1675476 - RNA, 19 nt, Homo sapiens
  misc_RNA (1)...(19): siRNA sense strand
cgagauggaguucaauugc

SEQ ID NO: 1675477 - RNA, 19 nt, Homo sapiens
  misc_RNA (1)...(19): siRNA sense strand
ugaggaucgucaccaugga

SEQ ID NO: 1675478 - RNA, 19 nt, Homo sapiens
  misc_RNA (1)...(19): siRNA sense strand
ccgagauggaguucaauug

SEQ ID NO: 1675479 - RNA, 19 nt, Homo sapiens
  misc_RNA (1)...(19): siRNA sense strand
ggaagcaacccaagacguu

SEQ ID NO: 1675480 - RNA, 19 nt, Homo sapiens
  misc_RNA (1)...(19): siRNA sense strand
agaagcagauuuuagauga

SEQ ID NO: 1675481 - RNA, 19 nt, Homo sapiens
  misc_RNA (1)...(19): siRNA sense strand
gaagcagauuuuagaugaa

SEQ ID NO: 1675482 - RNA, 19 nt, Homo sapiens
  misc_RNA (1)...(19): siRNA sense strand
caccauggacgccgagaug

SEQ ID NO: 1675483 - RNA, 19 nt, Homo sapiens
  misc_RNA (1)...(19): siRNA sense strand
acgccgagauggaguucaa

SEQ ID NO: 1675484 - RNA, 19 nt, Homo sapiens
  misc_RNA (1)...(19): siRNA sense strand
gccaucgcuucccgcauga

SEQ ID NO: 1675485 - RNA, 19 nt, Homo sapiens
  misc_RNA (1)...(19): siRNA sense strand
gccgagauggaguucaauu

SEQ ID NO: 1675486 - RNA, 19 nt, Homo sapiens
  misc_RNA (1)...(19): siRNA sense strand
cgagauggaguucaauugc

SEQ ID NO: 1675487 - RNA, 19 nt, Homo sapiens
  misc_RNA (1)...(19): siRNA sense strand
ugaggaucgucaccaugga

SEQ ID NO: 1675488 - RNA, 19 nt, Homo sapiens
  misc_RNA (1)...(19): siRNA sense strand
ccgagauggaguucaauug

SEQ ID NO: 1675489 - RNA, 19 nt, Homo sapiens
  misc_RNA (1)...(19): siRNA sense strand
ggaagcaacccaagacguu

SEQ ID NO: 1675490 - RNA, 19 nt, Homo sapiens
  misc_RNA (1)...(19): siRNA sense strand
agaagcagauuuuagauga

SEQ ID NO: 1675491 - RNA, 19 nt, Homo sapiens
  misc_RNA (1)...(19): siRNA sense strand
gaagcagauuuuagaugaa

SEQ ID NO: 1675492 - RNA, 19 nt, Homo sapiens
  misc_RNA (1)...(19): siRNA sense strand
caccauggacgccgagaug

SEQ ID NO: 1675493 - RNA, 19 nt, Homo sapiens
  misc_RNA (1)...(19): siRNA sense strand
acgccgagauggaguucaa

SEQ ID NO: 1675494 - RNA, 19 nt, Homo sapiens
  misc_RNA (1)...(19): siRNA sense strand
gccaucgcuucccgcauga

SEQ ID NO: 1675495 - RNA, 19 nt, Homo sapiens
  misc_RNA (1)...(19): siRNA sense strand
gccgagauggaguucaauu

SEQ ID NO: 1675496 - RNA, 19 nt, Homo sapiens
  misc_RNA (1)...(19): siRNA sense strand
cgagauggaguucaauugc

SEQ ID NO: 1675497 - RNA, 19 nt, Homo sapiens
  misc_RNA (1)...(19): siRNA sense strand
ugaggaucgucaccaugga

SEQ ID NO: 1675498 - RNA, 19 nt, Homo sapiens
  misc_RNA (1)...(19): siRNA sense strand
ccgagauggaguucaauug

SEQ ID NO: 1675499 - RNA, 19 nt, Homo sapiens
  misc_RNA (1)...(19): siRNA sense strand
ggaagcaacccaagacguu

SEQ ID NO: 1675500 - RNA, 19 nt, Homo sapiens
  misc_RNA (1)...(19): siRNA sense strand
agaagcagauuuuagauga

SEQ ID NO: 1675501 - RNA, 19 nt, Homo sapiens
  misc_RNA (1)...(19): siRNA sense strand
gaagcagauuuuagaugaa

SEQ ID NO: 1675502 - RNA, 19 nt, Homo sapiens
  misc_RNA (1)...(19): siRNA sense strand
caccauggacgccgagaug

SEQ ID NO: 1675503 - RNA, 19 nt, Homo sapiens
  misc_RNA (1)...(19): siRNA sense strand
acgccgagauggaguucaa

SEQ ID NO: 1675504 - RNA, 19 nt, Homo sapiens
  misc_RNA (1)...(19): siRNA sense strand
gccaucgcuucccgcauga

SEQ ID NO: 1675505 - RNA, 19 nt, Homo sapiens
  misc_RNA (1)...(19): siRNA sense strand
gccgagauggaguucaauu

SEQ ID NO: 1675506 - RNA, 19 nt, Homo sapiens
  misc_RNA (1)...(19): siRNA sense strand
cgagauggaguucaauugc

SEQ ID NO: 1675507 - RNA, 19 nt, Homo sapiens
  misc_RNA (1)...(19): siRNA sense strand
ugaggaucgucaccaugga

SEQ ID NO: 1675508 - RNA, 19 nt, Homo sapiens
  misc_RNA (1)...(19): siRNA sense strand
ccgagauggaguucaauug

SEQ ID NO: 1675509 - RNA, 19 nt, Homo sapiens
  misc_RNA (1)...(19): siRNA sense strand
ggaagcaacccaagacguu

SEQ ID NO: 1675510 - RNA, 19 nt, Homo sapiens
  misc_RNA (1)...(19): siRNA sense strand
agaagcagauuuuagauga

SEQ ID NO: 1675511 - RNA, 19 nt, Homo sapiens
  misc_RNA (1)...(19): siRNA sense strand
gaagcagauuuuagaugaa

SEQ ID NO: 1675512 - RNA, 19 nt, Homo sapiens
  misc_RNA (1)...(19): siRNA sense strand
caccauggacgccgagaug

SEQ ID NO: 1675513 - RNA, 19 nt, Homo sapiens
  misc_RNA (1)...(19): siRNA sense strand
acgccgagauggaguucaa

SEQ ID NO: 1675514 - RNA, 19 nt, Homo sapiens
  misc_RNA (1)...(19): siRNA sense strand
gccaucgcuucccgcauga

SEQ ID NO: 1675515 - RNA, 19 nt, Homo sapiens
  misc_RNA (1)...(19): siRNA sense strand
gccgagauggaguucaauu

SEQ ID NO: 1675516 - RNA, 19 nt, Homo sapiens
  misc_RNA (1)...(19): siRNA sense strand
cgagauggaguucaauugc

SEQ ID NO: 1675517 - RNA, 19 nt, Homo sapiens
  misc_RNA (1)...(19): siRNA sense strand
ugaggaucgucaccaugga

SEQ ID NO: 1675518 - RNA, 19 nt, Homo sapiens
  misc_RNA (1)...(19): siRNA sense strand
ccgagauggaguucaauug

SEQ ID NO: 1675519 - RNA, 19 nt, Homo sapiens
  misc_RNA (1)...(19): siRNA sense strand
ggaagcaacccaagacguu

SEQ ID NO: 1675520 - RNA, 19 nt, Homo sapiens
  misc_RNA (1)...(19): siRNA sense strand
agaagcagauuuuagauga

SEQ ID NO: 1675521 - RNA, 19 nt, Homo sapiens
  misc_RNA (1)...(19): siRNA sense strand
gaagcagauuuuagaugaa

SEQ ID NO: 1675522 - RNA, 19 nt, Homo sapiens
  misc_RNA (1)...(19): siRNA sense strand
caccauggacgccgagaug

SEQ ID NO: 1675523 - RNA, 19 nt, Homo sapiens
  misc_RNA (1)...(19): siRNA sense strand
acgccgagauggaguucaa

SEQ ID NO: 1675524 - RNA, 19 nt, Homo sapiens
  misc_RNA (1)...(19): siRNA sense strand
gccaucgcuucccgcauga

SEQ ID NO: 1675525 - RNA, 19 nt, Homo sapiens
  misc_RNA (1)...(19): siRNA sense strand
gccgagauggaguucaauu

SEQ ID NO: 1675526 - RNA, 19 nt, Homo sapiens
  misc_RNA (1)...(19): siRNA sense strand
cgagauggaguucaauugc

SEQ ID NO: 1675527 - RNA, 19 nt, Homo sapiens
  misc_RNA (1)...(19): siRNA sense strand
ugaggaucgucaccaugga

SEQ ID NO: 1675528 - RNA, 19 nt, Homo sapiens
  misc_RNA (1)...(19): siRNA sense strand
ccgagauggaguucaauug

SEQ ID NO: 1675529 - RNA, 19 nt, Homo sapiens
  misc_RNA (1)...(19): siRNA sense strand
ggaagcaacccaagacguu

SEQ ID NO: 1675530 - RNA, 19 nt, Homo sapiens
  misc_RNA (1)...(19): siRNA sense strand
agaagcagauuuuagauga

SEQ ID NO: 1675531 - RNA, 19 nt, Homo sapiens
  misc_RNA (1)...(19): siRNA sense strand
gaagcagauuuuagaugaa

SEQ ID NO: 1675532 - RNA, 19 nt, Homo sapiens
  misc_RNA (1)...(19): siRNA sense strand
caccauggacgccgagaug

SEQ ID NO: 1675533 - RNA, 19 nt, Homo sapiens
  misc_RNA (1)...(19): siRNA sense strand
acgccgagauggaguucaa

SEQ ID NO: 1675534 - RNA, 19 nt, Homo sapiens
  misc_RNA (1)...(19): siRNA sense strand
gccaucgcuucccgcauga

SEQ ID NO: 1675535 - RNA, 19 nt, Homo sapiens
  misc_RNA (1)...(19): siRNA sense strand
gccgagauggaguucaauu

SEQ ID NO: 1675536 - RNA, 19 nt, Homo sapiens
  misc_RNA (1)...(19): siRNA sense strand
cgagauggaguucaauugc

SEQ ID NO: 1675537 - RNA, 19 nt, Homo sapiens
  misc_RNA (1)...(19): siRNA sense strand
ugaggaucgucaccaugga

SEQ ID NO: 1675538 - RNA, 19 nt, Homo sapiens
  misc_RNA (1)...(19): siRNA sense strand
ccgagauggaguucaauug

SEQ ID NO: 1675539 - RNA, 19 nt, Homo sapiens
  misc_RNA (1)...(19): siRNA sense strand
ggaagcaacccaagacguu

SEQ ID NO: 1675540 - RNA, 19 nt, Homo sapiens
  misc_RNA (1)...(19): siRNA sense strand
agaagcagauuuuagauga

SEQ ID NO: 1675541 - RNA, 19 nt, Homo sapiens
  misc_RNA (1)...(19): siRNA sense strand
gaagcagauuuuagaugaa

SEQ ID NO: 1675542 - RNA, 19 nt, Homo sapiens
  misc_RNA (1)...(19): siRNA sense strand
caccauggacgccgagaug

SEQ ID NO: 1675543 - RNA, 19 nt, Homo sapiens
  misc_RNA (1)...(19): siRNA sense strand
acgccgagauggaguucaa

SEQ ID NO: 1675544 - RNA, 19 nt, Homo sapiens
  misc_RNA (1)...(19): siRNA sense strand
gccaucgcuucccgcauga

SEQ ID NO: 1675545 - RNA, 19 nt, Homo sapiens
  misc_RNA (1)...(19): siRNA sense strand
gccgagauggaguucaauu

SEQ ID NO: 1675546 - RNA, 19 nt, Homo sapiens
  misc_RNA (1)...(19): siRNA sense strand
cgagauggaguucaauugc

SEQ ID NO: 1675547 - RNA, 19 nt, Homo sapiens
  misc_RNA (1)...(19): siRNA sense strand
ugaggaucgucaccaugga

SEQ ID NO: 1675548 - RNA, 19 nt, Homo sapiens
  misc_RNA (1)...(19): siRNA sense strand
ccgagauggaguucaauug

SEQ ID NO: 1675549 - RNA, 19 nt, Homo sapiens
  misc_RNA (1)...(19): siRNA sense strand
ggaagcaacccaagacguu

SEQ ID NO: 1675550 - RNA, 19 nt, Homo sapiens
  misc_RNA (1)...(19): siRNA sense strand
caccauggacgccgagaug

SEQ ID NO: 1675551 - RNA, 19 nt, Homo sapiens
  misc_RNA (1)...(19): siRNA sense strand
acgccgagauggaguucaa

SEQ ID NO: 1675552 - RNA, 19 nt, Homo sapiens
  misc_RNA (1)...(19): siRNA sense strand
gccaucgcuucccgcauga

SEQ ID NO: 1675553 - RNA, 19 nt, Homo sapiens
  misc_RNA (1)...(19): siRNA sense strand
gccgagauggaguucaauu

SEQ ID NO: 1675554 - RNA, 19 nt, Homo sapiens
  misc_RNA (1)...(19): siRNA sense strand
cgagauggaguucaauugc

SEQ ID NO: 1675555 - RNA, 19 nt, Homo sapiens
  misc_RNA (1)...(19): siRNA sense strand
ugaggaucgucaccaugga

SEQ ID NO: 1675556 - RNA, 19 nt, Homo sapiens
  misc_RNA (1)...(19): siRNA sense strand
ccgagauggaguucaauug

SEQ ID NO: 1675557 - RNA, 19 nt, Homo sapiens
  misc_RNA (1)...(19): siRNA sense strand
ggaagcaacccaagacguu

SEQ ID NO: 1675558 - RNA, 19 nt, Homo sapiens
  misc_RNA (1)...(19): siRNA sense strand
caccauggacgccgagaug

SEQ ID NO: 1675559 - RNA, 19 nt, Homo sapiens
  misc_RNA (1)...(19): siRNA sense strand
acgccgagauggaguucaa

SEQ ID NO: 1675560 - RNA, 19 nt, Homo sapiens
  misc_RNA (1)...(19): siRNA sense strand
gccaucgcuucccgcauga

SEQ ID NO: 1675561 - RNA, 19 nt, Homo sapiens
  misc_RNA (1)...(19): siRNA sense strand
gccgagauggaguucaauu

SEQ ID NO: 1675562 - RNA, 19 nt, Homo sapiens
  misc_RNA (1)...(19): siRNA sense strand
cgagauggaguucaauugc

SEQ ID NO: 1675563 - RNA, 19 nt, Homo sapiens
  misc_RNA (1)...(19): siRNA sense strand
ugaggaucgucaccaugga

SEQ ID NO: 1675564 - RNA, 19 nt, Homo sapiens
  misc_RNA (1)...(19): siRNA sense strand
ccgagauggaguucaauug

SEQ ID NO: 1675565 - RNA, 19 nt, Homo sapiens
  misc_RNA (1)...(19): siRNA sense strand
ggaagcaacccaagacguu

SEQ ID NO: 1675566 - RNA, 19 nt, Homo sapiens
  misc_RNA (1)...(19): siRNA sense strand
agaagcagauuuuagauga

SEQ ID NO: 1675567 - RNA, 19 nt, Homo sapiens
  misc_RNA (1)...(19): siRNA sense strand
gaagcagauuuuagaugaa

SEQ ID NO: 1675568 - RNA, 19 nt, Homo sapiens
  misc_RNA (1)...(19): siRNA sense strand
caccauggacgccgagaug

SEQ ID NO: 1675569 - RNA, 19 nt, Homo sapiens
  misc_RNA (1)...(19): siRNA sense strand
acgccgagauggaguucaa

SEQ ID NO: 1675570 - RNA, 19 nt, Homo sapiens
  misc_RNA (1)...(19): siRNA sense strand
gccaucgcuucccgcauga

SEQ ID NO: 1675571 - RNA, 19 nt, Homo sapiens
  misc_RNA (1)...(19): siRNA sense strand
gccgagauggaguucaauu

SEQ ID NO: 1675572 - RNA, 19 nt, Homo sapiens
  misc_RNA (1)...(19): siRNA sense strand
cgagauggaguucaauugc

SEQ ID NO: 1675573 - RNA, 19 nt, Homo sapiens
  misc_RNA (1)...(19): siRNA sense strand
ugaggaucgucaccaugga

SEQ ID NO: 1675574 - RNA, 19 nt, Homo sapiens
  misc_RNA (1)...(19): siRNA sense strand
ccgagauggaguucaauug

SEQ ID NO: 1675575 - RNA, 19 nt, Homo sapiens
  misc_RNA (1)...(19): siRNA sense strand
ggaagcaacccaagacguu

SEQ ID NO: 1675576 - RNA, 19 nt, Homo sapiens
  misc_RNA (1)...(19): siRNA sense strand
agaagcagauuuuagauga

SEQ ID NO: 1675577 - RNA, 19 nt, Homo sapiens
  misc_RNA (1)...(19): siRNA sense strand
gaagcagauuuuagaugaa

SEQ ID NO: 1675578 - RNA, 19 nt, Homo sapiens
  misc_RNA (1)...(19): siRNA sense strand
caccauggacgccgagaug

SEQ ID NO: 1675579 - RNA, 19 nt, Homo sapiens
  misc_RNA (1)...(19): siRNA sense strand
acgccgagauggaguucaa

SEQ ID NO: 1675580 - RNA, 19 nt, Homo sapiens
  misc_RNA (1)...(19): siRNA sense strand
gccaucgcuucccgcauga

SEQ ID NO: 1675581 - RNA, 19 nt, Homo sapiens
  misc_RNA (1)...(19): siRNA sense strand
gccgagauggaguucaauu

SEQ ID NO: 1675582 - RNA, 19 nt, Homo sapiens
  misc_RNA (1)...(19): siRNA sense strand
cgagauggaguucaauugc

SEQ ID NO: 1675583 - RNA, 19 nt, Homo sapiens
  misc_RNA (1)...(19): siRNA sense strand
ugaggaucgucaccaugga

SEQ ID NO: 1675584 - RNA, 19 nt, Homo sapiens
  misc_RNA (1)...(19): siRNA sense strand
ccgagauggaguucaauug

SEQ ID NO: 1675585 - RNA, 19 nt, Homo sapiens
  misc_RNA (1)...(19): siRNA sense strand
ggaagcaacccaagacguu

SEQ ID NO: 1675586 - RNA, 19 nt, Homo sapiens
  misc_RNA (1)...(19): siRNA sense strand
agaagcagauuuuagauga

SEQ ID NO: 1675587 - RNA, 19 nt, Homo sapiens
  misc_RNA (1)...(19): siRNA sense strand
gaagcagauuuuagaugaa

SEQ ID NO: 1675588 - RNA, 19 nt, Homo sapiens
  misc_RNA (1)...(19): siRNA sense strand
caccauggacgccgagaug

SEQ ID NO: 1675589 - RNA, 19 nt, Homo sapiens
  misc_RNA (1)...(19): siRNA sense strand
acgccgagauggaguucaa

SEQ ID NO: 1675590 - RNA, 19 nt, Homo sapiens
  misc_RNA (1)...(19): siRNA sense strand
gccaucgcuucccgcauga

SEQ ID NO: 1675591 - RNA, 19 nt, Homo sapiens
  misc_RNA (1)...(19): siRNA sense strand
gccgagauggaguucaauu

SEQ ID NO: 1675592 - RNA, 19 nt, Homo sapiens
  misc_RNA (1)...(19): siRNA sense strand
cgagauggaguucaauugc

SEQ ID NO: 1675593 - RNA, 19 nt, Homo sapiens
  misc_RNA (1)...(19): siRNA sense strand
ugaggaucgucaccaugga

SEQ ID NO: 1675594 - RNA, 19 nt, Homo sapiens
  misc_RNA (1)...(19): siRNA sense strand
ccgagauggaguucaauug

SEQ ID NO: 1675595 - RNA, 19 nt, Homo sapiens
  misc_RNA (1)...(19): siRNA sense strand
ggaagcaacccaagacguu

SEQ ID NO: 1675596 - RNA, 19 nt, Homo sapiens
  misc_RNA (1)...(19): siRNA sense strand
agaagcagauuuuagauga

SEQ ID NO: 1675597 - RNA, 19 nt, Homo sapiens
  misc_RNA (1)...(19): siRNA sense strand
gaagcagauuuuagaugaa

SEQ ID NO: 1675598 - RNA, 19 nt, Homo sapiens
  misc_RNA (1)...(19): siRNA sense strand
caccauggacgccgagaug

SEQ ID NO: 1675599 - RNA, 19 nt, Homo sapiens
  misc_RNA (1)...(19): siRNA sense strand
acgccgagauggaguucaa

SEQ ID NO: 1675600 - RNA, 19 nt, Homo sapiens
  misc_RNA (1)...(19): siRNA sense strand
gccaucgcuucccgcauga

SEQ ID NO: 1675601 - RNA, 19 nt, Homo sapiens
  misc_RNA (1)...(19): siRNA sense strand
gccgagauggaguucaauu

SEQ ID NO: 1675602 - RNA, 19 nt, Homo sapiens
  misc_RNA (1)...(19): siRNA sense strand
cgagauggaguucaauugc

SEQ ID NO: 1675603 - RNA, 19 nt, Homo sapiens
  misc_RNA (1)...(19): siRNA sense strand
ugaggaucgucaccaugga

SEQ ID NO: 1675604 - RNA, 19 nt, Homo sapiens
  misc_RNA (1)...(19): siRNA sense strand
ccgagauggaguucaauug

SEQ ID NO: 1675605 - RNA, 19 nt, Homo sapiens
  misc_RNA (1)...(19): siRNA sense strand
ggaagcaacccaagacguu

SEQ ID NO: 1675606 - RNA, 19 nt, Homo sapiens
  misc_RNA (1)...(19): siRNA sense strand
agaagcagauuuuagauga

SEQ ID NO: 1675607 - RNA, 19 nt, Homo sapiens
  misc_RNA (1)...(19): siRNA sense strand
gaagcagauuuuagaugaa

SEQ ID NO: 1675608 - RNA, 19 nt, Homo sapiens
  misc_RNA (1)...(19): siRNA sense strand
caccauggacgccgagaug

SEQ ID NO: 1675609 - RNA, 19 nt, Homo sapiens
  misc_RNA (1)...(19): siRNA sense strand
acgccgagauggaguucaa

SEQ ID NO: 1675610 - RNA, 19 nt, Homo sapiens
  misc_RNA (1)...(19): siRNA sense strand
gccaucgcuucccgcauga

SEQ ID NO: 1675611 - RNA, 19 nt, Homo sapiens
  misc_RNA (1)...(19): siRNA sense strand
gccgagauggaguucaauu

SEQ ID NO: 1675612 - RNA, 19 nt, Homo sapiens
  misc_RNA (1)...(19): siRNA sense strand
cgagauggaguucaauugc

SEQ ID NO: 1675613 - RNA, 19 nt, Homo sapiens
  misc_RNA (1)...(19): siRNA sense strand
ugaggaucgucaccaugga

SEQ ID NO: 1675614 - RNA, 19 nt, Homo sapiens
  misc_RNA (1)...(19): siRNA sense strand
ccgagauggaguucaauug

SEQ ID NO: 1675615 - RNA, 19 nt, Homo sapiens
  misc_RNA (1)...(19): siRNA sense strand
ggaagcaacccaagacguu

SEQ ID NO: 1675616 - RNA, 19 nt, Homo sapiens
  misc_RNA (1)...(19): siRNA sense strand
agaagcagauuuuagauga

SEQ ID NO: 1675617 - RNA, 19 nt, Homo sapiens
  misc_RNA (1)...(19): siRNA sense strand
gaagcagauuuuagaugaa

SEQ ID NO: 1675618 - RNA, 19 nt, Homo sapiens
  misc_RNA (1)...(19): siRNA sense strand
caccauggacgccgagaug

SEQ ID NO: 1675619 - RNA, 19 nt, Homo sapiens
  misc_RNA (1)...(19): siRNA sense strand
acgccgagauggaguucaa

SEQ ID NO: 1675620 - RNA, 19 nt, Homo sapiens
  misc_RNA (1)...(19): siRNA sense strand
gccaucgcuucccgcauga

SEQ ID NO: 1675621 - RNA, 19 nt, Homo sapiens
  misc_RNA (1)...(19): siRNA sense strand
gccgagauggaguucaauu

SEQ ID NO: 1675622 - RNA, 19 nt, Homo sapiens
  misc_RNA (1)...(19): siRNA sense strand
cgagauggaguucaauugc

SEQ ID NO: 1675623 - RNA, 19 nt, Homo sapiens
  misc_RNA (1)...(19): siRNA sense strand
ugaggaucgucaccaugga

SEQ ID NO: 1675624 - RNA, 19 nt, Homo sapiens
  misc_RNA (1)...(19): siRNA sense strand
ccgagauggaguucaauug

SEQ ID NO: 1675625 - RNA, 19 nt, Homo sapiens
  misc_RNA (1)...(19): siRNA sense strand
ggaagcaacccaagacguu

SEQ ID NO: 1675626 - RNA, 19 nt, Homo sapiens
  misc_RNA (1)...(19): siRNA sense strand
agaagcagauuuuagauga

SEQ ID NO: 1675627 - RNA, 19 nt, Homo sapiens
  misc_RNA (1)...(19): siRNA sense strand
gaagcagauuuuagaugaa

SEQ ID NO: 1675628 - RNA, 19 nt, Homo sapiens
  misc_RNA (1)...(19): siRNA sense strand
caccauggacgccgagaug

SEQ ID NO: 1675629 - RNA, 19 nt, Homo sapiens
  misc_RNA (1)...(19): siRNA sense strand
acgccgagauggaguucaa

SEQ ID NO: 1675630 - RNA, 19 nt, Homo sapiens
  misc_RNA (1)...(19): siRNA sense strand
gccaucgcuucccgcauga

SEQ ID NO: 1675631 - RNA, 19 nt, Homo sapiens
  misc_RNA (1)...(19): siRNA sense strand
gccgagauggaguucaauu

SEQ ID NO: 1675632 - RNA, 19 nt, Homo sapiens
  misc_RNA (1)...(19): siRNA sense strand
cgagauggaguucaauugc

SEQ ID NO: 1675633 - RNA, 19 nt, Homo sapiens
  misc_RNA (1)...(19): siRNA sense strand
ugaggaucgucaccaugga

SEQ ID NO: 1675634 - RNA, 19 nt, Homo sapiens
  misc_RNA (1)...(19): siRNA sense strand
ccgagauggaguucaauug

SEQ ID NO: 1675635 - RNA, 19 nt, Homo sapiens
  misc_RNA (1)...(19): siRNA sense strand
ggaagcaacccaagacguu

SEQ ID NO: 1675636 - RNA, 19 nt, Homo sapiens
  misc_RNA (1)...(19): siRNA sense strand
agaagcagauuuuagauga

SEQ ID NO: 1675637 - RNA, 19 nt, Homo sapiens
  misc_RNA (1)...(19): siRNA sense strand
gaagcagauuuuagaugaa

SEQ ID NO: 1675638 - RNA, 19 nt, Homo sapiens
  misc_RNA (1)...(19): siRNA sense strand
caccauggacgccgagaug

SEQ ID NO: 1675639 - RNA, 19 nt, Homo sapiens
  misc_RNA (1)...(19): siRNA sense strand
acgccgagauggaguucaa

SEQ ID NO: 1675640 - RNA, 19 nt, Homo sapiens
  misc_RNA (1)...(19): siRNA sense strand
gccaucgcuucccgcauga

SEQ ID NO: 1675641 - RNA, 19 nt, Homo sapiens
  misc_RNA (1)...(19): siRNA sense strand
gccgagauggaguucaauu

SEQ ID NO: 1675642 - RNA, 19 nt, Homo sapiens
  misc_RNA (1)...(19): siRNA sense strand
cgagauggaguucaauugc

SEQ ID NO: 1675643 - RNA, 19 nt, Homo sapiens
  misc_RNA (1)...(19): siRNA sense strand
ugaggaucgucaccaugga

SEQ ID NO: 1675644 - RNA, 19 nt, Homo sapiens
  misc_RNA (1)...(19): siRNA sense strand
ccgagauggaguucaauug

SEQ ID NO: 1675645 - RNA, 19 nt, Homo sapiens
  misc_RNA (1)...(19): siRNA sense strand
ggaagcaacccaagacguu

SEQ ID NO: 1675646 - RNA, 19 nt, Homo sapiens
  misc_RNA (1)...(19): siRNA sense strand
agaagcagauuuuagauga

SEQ ID NO: 1675647 - RNA, 19 nt, Homo sapiens
  misc_RNA (1)...(19): siRNA sense strand
gaagcagauuuuagaugaa

SEQ ID NO: 1675648 - RNA, 19 nt, Homo sapiens
  misc_RNA (1)...(19): siRNA sense strand
caccauggacgccgagaug

SEQ ID NO: 1675649 - RNA, 19 nt, Homo sapiens
  misc_RNA (1)...(19): siRNA sense strand
acgccgagauggaguucaa

SEQ ID NO: 1675650 - RNA, 19 nt, Homo sapiens
  misc_RNA (1)...(19): siRNA sense strand
gccaucgcuucccgcauga

SEQ ID NO: 1675651 - RNA, 19 nt, Homo sapiens
  misc_RNA (1)...(19): siRNA sense strand
gccgagauggaguucaauu

SEQ ID NO: 1675652 - RNA, 19 nt, Homo sapiens
  misc_RNA (1)...(19): siRNA sense strand
cgagauggaguucaauugc

SEQ ID NO: 1675653 - RNA, 19 nt, Homo sapiens
  misc_RNA (1)...(19): siRNA sense strand
ugaggaucgucaccaugga

SEQ ID NO: 1675654 - RNA, 19 nt, Homo sapiens
  misc_RNA (1)...(19): siRNA sense strand
ccgagauggaguucaauug

SEQ ID NO: 1675655 - RNA, 19 nt, Homo sapiens
  misc_RNA (1)...(19): siRNA sense strand
ggaagcaacccaagacguu

SEQ ID NO: 1675656 - RNA, 19 nt, Homo sapiens
  misc_RNA (1)...(19): siRNA sense strand
agaagcagauuuuagauga

SEQ ID NO: 1675657 - RNA, 19 nt, Homo sapiens
  misc_RNA (1)...(19): siRNA sense strand
gaagcagauuuuagaugaa

SEQ ID NO: 1675658 - RNA, 19 nt, Homo sapiens
  misc_RNA (1)...(19): siRNA sense strand
caccauggacgccgagaug

SEQ ID NO: 1675659 - RNA, 19 nt, Homo sapiens
  misc_RNA (1)...(19): siRNA sense strand
acgccgagauggaguucaa

SEQ ID NO: 1675660 - RNA, 19 nt, Homo sapiens
  misc_RNA (1)...(19): siRNA sense strand
gccaucgcuucccgcauga

SEQ ID NO: 1675661 - RNA, 19 nt, Homo sapiens
  misc_RNA (1)...(19): siRNA sense strand
gccgagauggaguucaauu

SEQ ID NO: 1675662 - RNA, 19 nt, Homo sapiens
  misc_RNA (1)...(19): siRNA sense strand
cgagauggaguucaauugc

SEQ ID NO: 1675663 - RNA, 19 nt, Homo sapiens
  misc_RNA (1)...(19): siRNA sense strand
ugaggaucgucaccaugga

SEQ ID NO: 1675664 - RNA, 19 nt, Homo sapiens
  misc_RNA (1)...(19): siRNA sense strand
ccgagauggaguucaauug

SEQ ID NO: 1675665 - RNA, 19 nt, Homo sapiens
  misc_RNA (1)...(19): siRNA sense strand
ggaagcaacccaagacguu

SEQ ID NO: 1675666 - RNA, 19 nt, Homo sapiens
  misc_RNA (1)...(19): siRNA sense strand
agaagcagauuuuagauga

SEQ ID NO: 1675667 - RNA, 19 nt, Homo sapiens
  misc_RNA (1)...(19): siRNA sense strand
gaagcagauuuuagaugaa

SEQ ID NO: 1675668 - RNA, 19 nt, Homo sapiens
  misc_RNA (1)...(19): siRNA sense strand
caccauggacgccgagaug

SEQ ID NO: 1675669 - RNA, 19 nt, Homo sapiens
  misc_RNA (1)...(19): siRNA sense strand
acgccgagauggaguucaa

SEQ ID NO: 1675670 - RNA, 19 nt, Homo sapiens
  misc_RNA (1)...(19): siRNA sense strand
gccaucgcuucccgcauga

SEQ ID NO: 1675671 - RNA, 19 nt, Homo sapiens
  misc_RNA (1)...(19): siRNA sense strand
gccgagauggaguucaauu

SEQ ID NO: 1675672 - RNA, 19 nt, Homo sapiens
  misc_RNA (1)...(19): siRNA sense strand
cgagauggaguucaauugc

SEQ ID NO: 1675673 - RNA, 19 nt, Homo sapiens
  misc_RNA (1)...(19): siRNA sense strand
ugaggaucgucaccaugga

SEQ ID NO: 1675674 - RNA, 19 nt, Homo sapiens
  misc_RNA (1)...(19): siRNA sense strand
ccgagauggaguucaauug

SEQ ID NO: 1675675 - RNA, 19 nt, Homo sapiens
  misc_RNA (1)...(19): siRNA sense strand
ggaagcaacccaagacguu

SEQ ID NO: 1675676 - RNA, 19 nt, Homo sapiens
  misc_RNA (1)...(19): siRNA sense strand
caccauggacgccgagaug

SEQ ID NO: 1675677 - RNA, 19 nt, Homo sapiens
  misc_RNA (1)...(19): siRNA sense strand
acgccgagauggaguucaa

SEQ ID NO: 1675678 - RNA, 19 nt, Homo sapiens
  misc_RNA (1)...(19): siRNA sense strand
gccaucgcuucccgcauga

SEQ ID NO: 1675679 - RNA, 19 nt, Homo sapiens
  misc_RNA (1)...(19): siRNA sense strand
gccgagauggaguucaauu

SEQ ID NO: 1675680 - RNA, 19 nt, Homo sapiens
  misc_RNA (1)...(19): siRNA sense strand
cgagauggaguucaauugc

SEQ ID NO: 1675681 - RNA, 19 nt, Homo sapiens
  misc_RNA (1)...(19): siRNA sense strand
ugaggaucgucaccaugga

SEQ ID NO: 1675682 - RNA, 19 nt, Homo sapiens
  misc_RNA (1)...(19): siRNA sense strand
ccgagauggaguucaauug

SEQ ID NO: 1675683 - RNA, 19 nt, Homo sapiens
  misc_RNA (1)...(19): siRNA sense strand
ggaagcaacccaagacguu

SEQ ID NO: 1675684 - RNA, 19 nt, Homo sapiens
  misc_RNA (1)...(19): siRNA sense strand
caccauggacgccgagaug

SEQ ID NO: 1675685 - RNA, 19 nt, Homo sapiens
  misc_RNA (1)...(19): siRNA sense strand
acgccgagauggaguucaa

SEQ ID NO: 1675686 - RNA, 19 nt, Homo sapiens
  misc_RNA (1)...(19): siRNA sense strand
gccaucgcuucccgcauga

SEQ ID NO: 1675687 - RNA, 19 nt, Homo sapiens
  misc_RNA (1)...(19): siRNA sense strand
gccgagauggaguucaauu

SEQ ID NO: 1675688 - RNA, 19 nt, Homo sapiens
  misc_RNA (1)...(19): siRNA sense strand
cgagauggaguucaauugc

SEQ ID NO: 1675689 - RNA, 19 nt, Homo sapiens
  misc_RNA (1)...(19): siRNA sense strand
ugaggaucgucaccaugga

SEQ ID NO: 1675690 - RNA, 19 nt, Homo sapiens
  misc_RNA (1)...(19): siRNA sense strand
ccgagauggaguucaauug

SEQ ID NO: 1675691 - RNA, 19 nt, Homo sapiens
  misc_RNA (1)...(19): siRNA sense strand
ggaagcaacccaagacguu

SEQ ID NO: 1675692 - RNA, 19 nt, Homo sapiens
  misc_RNA (1)...(19): siRNA sense strand
agaagcagauuuuagauga

SEQ ID NO: 1675693 - RNA, 19 nt, Homo sapiens
  misc_RNA (1)...(19): siRNA sense strand
gaagcagauuuuagaugaa

SEQ ID NO: 1675694 - RNA, 19 nt, Homo sapiens
  misc_RNA (1)...(19): siRNA sense strand
caccauggacgccgagaug

SEQ ID NO: 1675695 - RNA, 19 nt, Homo sapiens
  misc_RNA (1)...(19): siRNA sense strand
acgccgagauggaguucaa

SEQ ID NO: 1675696 - RNA, 19 nt, Homo sapiens
  misc_RNA (1)...(19): siRNA sense strand
gccaucgcuucccgcauga

SEQ ID NO: 1675697 - RNA, 19 nt, Homo sapiens
  misc_RNA (1)...(19): siRNA sense strand
gccgagauggaguucaauu

SEQ ID NO: 1675698 - RNA, 19 nt, Homo sapiens
  misc_RNA (1)...(19): siRNA sense strand
cgagauggaguucaauugc

SEQ ID NO: 1675699 - RNA, 19 nt, Homo sapiens
  misc_RNA (1)...(19): siRNA sense strand
ugaggaucgucaccaugga

SEQ ID NO: 1675700 - RNA, 19 nt, Homo sapiens
  misc_RNA (1)...(19): siRNA sense strand
ccgagauggaguucaauug

SEQ ID NO: 1675701 - RNA, 19 nt, Homo sapiens
  misc_RNA (1)...(19): siRNA sense strand
ggaagcaacccaagacguu

SEQ ID NO: 1675702 - RNA, 19 nt, Homo sapiens
  misc_RNA (1)...(19): siRNA sense strand
agaagcagauuuuagauga

SEQ ID NO: 1675703 - RNA, 19 nt, Homo sapiens
  misc_RNA (1)...(19): siRNA sense strand
gaagcagauuuuagaugaa

SEQ ID NO: 1675704 - RNA, 19 nt, Homo sapiens
  misc_RNA (1)...(19): siRNA sense strand
caccauggacgccgagaug

SEQ ID NO: 1675705 - RNA, 19 nt, Homo sapiens
  misc_RNA (1)...(19): siRNA sense strand
acgccgagauggaguucaa

SEQ ID NO: 1675706 - RNA, 19 nt, Homo sapiens
  misc_RNA (1)...(19): siRNA sense strand
gccaucgcuucccgcauga

SEQ ID NO: 1675707 - RNA, 19 nt, Homo sapiens
  misc_RNA (1)...(19): siRNA sense strand
gccgagauggaguucaauu

SEQ ID NO: 1675708 - RNA, 19 nt, Homo sapiens
  misc_RNA (1)...(19): siRNA sense strand
cgagauggaguucaauugc

SEQ ID NO: 1675709 - RNA, 19 nt, Homo sapiens
  misc_RNA (1)...(19): siRNA sense strand
ugaggaucgucaccaugga

SEQ ID NO: 1675710 - RNA, 19 nt, Homo sapiens
  misc_RNA (1)...(19): siRNA sense strand
ccgagauggaguucaauug

SEQ ID NO: 1675711 - RNA, 19 nt, Homo sapiens
  misc_RNA (1)...(19): siRNA sense strand
ggaagcaacccaagacguu

SEQ ID NO: 1675712 - RNA, 19 nt, Homo sapiens
  misc_RNA (1)...(19): siRNA sense strand
agaagcagauuuuagauga

SEQ ID NO: 1675713 - RNA, 19 nt, Homo sapiens
  misc_RNA (1)...(19): siRNA sense strand
gaagcagauuuuagaugaa

SEQ ID NO: 1675714 - RNA, 19 nt, Homo sapiens
  misc_RNA (1)...(19): siRNA sense strand
caccauggacgccgagaug

SEQ ID NO: 1675715 - RNA, 19 nt, Homo sapiens
  misc_RNA (1)...(19): siRNA sense strand
acgccgagauggaguucaa

SEQ ID NO: 1675716 - RNA, 19 nt, Homo sapiens
  misc_RNA (1)...(19): siRNA sense strand
gccaucgcuucccgcauga

SEQ ID NO: 1675717 - RNA, 19 nt, Homo sapiens
  misc_RNA (1)...(19): siRNA sense strand
gccgagauggaguucaauu

SEQ ID NO: 1675718 - RNA, 19 nt, Homo sapiens
  misc_RNA (1)...(19): siRNA sense strand
cgagauggaguucaauugc

SEQ ID NO: 1675719 - RNA, 19 nt, Homo sapiens
  misc_RNA (1)...(19): siRNA sense strand
ugaggaucgucaccaugga

SEQ ID NO: 1675720 - RNA, 19 nt, Homo sapiens
  misc_RNA (1)...(19): siRNA sense strand
ccgagauggaguucaauug

SEQ ID NO: 1675721 - RNA, 19 nt, Homo sapiens
  misc_RNA (1)...(19): siRNA sense strand
ggaagcaacccaagacguu

SEQ ID NO: 1675722 - RNA, 19 nt, Homo sapiens
  misc_RNA (1)...(19): siRNA sense strand
agaagcagauuuuagauga

SEQ ID NO: 1675723 - RNA, 19 nt, Homo sapiens
  misc_RNA (1)...(19): siRNA sense strand
gaagcagauuuuagaugaa

SEQ ID NO: 1675724 - RNA, 19 nt, Homo sapiens
  misc_RNA (1)...(19): siRNA sense strand
caccauggacgccgagaug

SEQ ID NO: 1675725 - RNA, 19 nt, Homo sapiens
  misc_RNA (1)...(19): siRNA sense strand
acgccgagauggaguucaa

SEQ ID NO: 1675726 - RNA, 19 nt, Homo sapiens
  misc_RNA (1)...(19): siRNA sense strand
gccaucgcuucccgcauga

SEQ ID NO: 1675727 - RNA, 19 nt, Homo sapiens
  misc_RNA (1)...(19): siRNA sense strand
gccgagauggaguucaauu

SEQ ID NO: 1675728 - RNA, 19 nt, Homo sapiens
  misc_RNA (1)...(19): siRNA sense strand
cgagauggaguucaauugc

SEQ ID NO: 1675729 - RNA, 19 nt, Homo sapiens
  misc_RNA (1)...(19): siRNA sense strand
ugaggaucgucaccaugga

SEQ ID NO: 1675730 - RNA, 19 nt, Homo sapiens
  misc_RNA (1)...(19): siRNA sense strand
ccgagauggaguucaauug

SEQ ID NO: 1675731 - RNA, 19 nt, Homo sapiens
  misc_RNA (1)...(19): siRNA sense strand
ggaagcaacccaagacguu

SEQ ID NO: 1675732 - RNA, 19 nt, Homo sapiens
  misc_RNA (1)...(19): siRNA sense strand
agaagcagauuuuagauga

SEQ ID NO: 1675733 - RNA, 19 nt, Homo sapiens
  misc_RNA (1)...(19): siRNA sense strand
gaagcagauuuuagaugaa

SEQ ID NO: 1675734 - RNA, 19 nt, Homo sapiens
  misc_RNA (1)...(19): siRNA sense strand
caccauggacgccgagaug

SEQ ID NO: 1675735 - RNA, 19 nt, Homo sapiens
  misc_RNA (1)...(19): siRNA sense strand
acgccgagauggaguucaa

SEQ ID NO: 1675736 - RNA, 19 nt, Homo sapiens
  misc_RNA (1)...(19): siRNA sense strand
gccaucgcuucccgcauga

SEQ ID NO: 1675737 - RNA, 19 nt, Homo sapiens
  misc_RNA (1)...(19): siRNA sense strand
gccgagauggaguucaauu

SEQ ID NO: 1675738 - RNA, 19 nt, Homo sapiens
  misc_RNA (1)...(19): siRNA sense strand
cgagauggaguucaauugc

SEQ ID NO: 1675739 - RNA, 19 nt, Homo sapiens
  misc_RNA (1)...(19): siRNA sense strand
ugaggaucgucaccaugga

SEQ ID NO: 1675740 - RNA, 19 nt, Homo sapiens
  misc_RNA (1)...(19): siRNA sense strand
ccgagauggaguucaauug

SEQ ID NO: 1675741 - RNA, 19 nt, Homo sapiens
  misc_RNA (1)...(19): siRNA sense strand
ggaagcaacccaagacguu

SEQ ID NO: 1675742 - RNA, 19 nt, Homo sapiens
  misc_RNA (1)...(19): siRNA sense strand
agaagcagauuuuagauga

SEQ ID NO: 1675743 - RNA, 19 nt, Homo sapiens
  misc_RNA (1)...(19): siRNA sense strand
gaagcagauuuuagaugaa

SEQ ID NO: 1675744 - RNA, 19 nt, Homo sapiens
  misc_RNA (1)...(19): siRNA sense strand
caccauggacgccgagaug

SEQ ID NO: 1675745 - RNA, 19 nt, Homo sapiens
  misc_RNA (1)...(19): siRNA sense strand
acgccgagauggaguucaa

SEQ ID NO: 1675746 - RNA, 19 nt, Homo sapiens
  misc_RNA (1)...(19): siRNA sense strand
gccaucgcuucccgcauga

SEQ ID NO: 1675747 - RNA, 19 nt, Homo sapiens
  misc_RNA (1)...(19): siRNA sense strand
gccgagauggaguucaauu

SEQ ID NO: 1675748 - RNA, 19 nt, Homo sapiens
  misc_RNA (1)...(19): siRNA sense strand
cgagauggaguucaauugc

SEQ ID NO: 1675749 - RNA, 19 nt, Homo sapiens
  misc_RNA (1)...(19): siRNA sense strand
ugaggaucgucaccaugga

SEQ ID NO: 1675750 - RNA, 19 nt, Homo sapiens
  misc_RNA (1)...(19): siRNA sense strand
ccgagauggaguucaauug

SEQ ID NO: 1675751 - RNA, 19 nt, Homo sapiens
  misc_RNA (1)...(19): siRNA sense strand
ggaagcaacccaagacguu

SEQ ID NO: 1675752 - RNA, 19 nt, Homo sapiens
  misc_RNA (1)...(19): siRNA sense strand
agaagcagauuuuagauga

SEQ ID NO: 1675753 - RNA, 19 nt, Homo sapiens
  misc_RNA (1)...(19): siRNA sense strand
gaagcagauuuuagaugaa

SEQ ID NO: 1675754 - RNA, 19 nt, Homo sapiens
  misc_RNA (1)...(19): siRNA sense strand
caccauggacgccgagaug

SEQ ID NO: 1675755 - RNA, 19 nt, Homo sapiens
  misc_RNA (1)...(19): siRNA sense strand
acgccgagauggaguucaa

SEQ ID NO: 1675756 - RNA, 19 nt, Homo sapiens
  misc_RNA (1)...(19): siRNA sense strand
gccaucgcuucccgcauga

SEQ ID NO: 1675757 - RNA, 19 nt, Homo sapiens
  misc_RNA (1)...(19): siRNA sense strand
gccgagauggaguucaauu

SEQ ID NO: 1675758 - RNA, 19 nt, Homo sapiens
  misc_RNA (1)...(19): siRNA sense strand
cgagauggaguucaauugc

SEQ ID NO: 1675759 - RNA, 19 nt, Homo sapiens
  misc_RNA (1)...(19): siRNA sense strand
ugaggaucgucaccaugga

SEQ ID NO: 1675760 - RNA, 19 nt, Homo sapiens
  misc_RNA (1)...(19): siRNA sense strand
ccgagauggaguucaauug

SEQ ID NO: 1675761 - RNA, 19 nt, Homo sapiens
  misc_RNA (1)...(19): siRNA sense strand
ggaagcaacccaagacguu

SEQ ID NO: 1675762 - RNA, 19 nt, Homo sapiens
  misc_RNA (1)...(19): siRNA sense strand
agaagcagauuuuagauga

SEQ ID NO: 1675763 - RNA, 19 nt, Homo sapiens
  misc_RNA (1)...(19): siRNA sense strand
gaagcagauuuuagaugaa

SEQ ID NO: 1675764 - RNA, 19 nt, Homo sapiens
  misc_RNA (1)...(19): siRNA sense strand
caccauggacgccgagaug

SEQ ID NO: 1675765 - RNA, 19 nt, Homo sapiens
  misc_RNA (1)...(19): siRNA sense strand
acgccgagauggaguucaa

SEQ ID NO: 1675766 - RNA, 19 nt, Homo sapiens
  misc_RNA (1)...(19): siRNA sense strand
gccaucgcuucccgcauga

SEQ ID NO: 1675767 - RNA, 19 nt, Homo sapiens
  misc_RNA (1)...(19): siRNA sense strand
gccgagauggaguucaauu

SEQ ID NO: 1675768 - RNA, 19 nt, Homo sapiens
  misc_RNA (1)...(19): siRNA sense strand
cgagauggaguucaauugc

SEQ ID NO: 1675769 - RNA, 19 nt, Homo sapiens
  misc_RNA (1)...(19): siRNA sense strand
ugaggaucgucaccaugga

SEQ ID NO: 1675770 - RNA, 19 nt, Homo sapiens
  misc_RNA (1)...(19): siRNA sense strand
ccgagauggaguucaauug

SEQ ID NO: 1675771 - RNA, 19 nt, Homo sapiens
  misc_RNA (1)...(19): siRNA sense strand
ggaagcaacccaagacguu

SEQ ID NO: 1675772 - RNA, 19 nt, Homo sapiens
  misc_RNA (1)...(19): siRNA sense strand
agaagcagauuuuagauga

SEQ ID NO: 1675773 - RNA, 19 nt, Homo sapiens
  misc_RNA (1)...(19): siRNA sense strand
gaagcagauuuuagaugaa

SEQ ID NO: 1675774 - RNA, 19 nt, Homo sapiens
  misc_RNA (1)...(19): siRNA sense strand
caccauggacgccgagaug

SEQ ID NO: 1675775 - RNA, 19 nt, Homo sapiens
  misc_RNA (1)...(19): siRNA sense strand
acgccgagauggaguucaa

SEQ ID NO: 1675776 - RNA, 19 nt, Homo sapiens
  misc_RNA (1)...(19): siRNA sense strand
gccaucgcuucccgcauga

SEQ ID NO: 1675777 - RNA, 19 nt, Homo sapiens
  misc_RNA (1)...(19): siRNA sense strand
gccgagauggaguucaauu

SEQ ID NO: 1675778 - RNA, 19 nt, Homo sapiens
  misc_RNA (1)...(19): siRNA sense strand
cgagauggaguucaauugc

SEQ ID NO: 1675779 - RNA, 19 nt, Homo sapiens
  misc_RNA (1)...(19): siRNA sense strand
ugaggaucgucaccaugga

SEQ ID NO: 1675780 - RNA, 19 nt, Homo sapiens
  misc_RNA (1)...(19): siRNA sense strand
ccgagauggaguucaauug

SEQ ID NO: 1675781 - RNA, 19 nt, Homo sapiens
  misc_RNA (1)...(19): siRNA sense strand
ggaagcaacccaagacguu

SEQ ID NO: 1675782 - RNA, 19 nt, Homo sapiens
  misc_RNA (1)...(19): siRNA sense strand
agaagcagauuuuagauga

SEQ ID NO: 1675783 - RNA, 19 nt, Homo sapiens
  misc_RNA (1)...(19): siRNA sense strand
gaagcagauuuuagaugaa

SEQ ID NO: 1675784 - RNA, 19 nt, Homo sapiens
  misc_RNA (1)...(19): siRNA sense strand
caccauggacgccgagaug

SEQ ID NO: 1675785 - RNA, 19 nt, Homo sapiens
  misc_RNA (1)...(19): siRNA sense strand
acgccgagauggaguucaa

SEQ ID NO: 1675786 - RNA, 19 nt, Homo sapiens
  misc_RNA (1)...(19): siRNA sense strand
gccaucgcuucccgcauga

SEQ ID NO: 1675787 - RNA, 19 nt, Homo sapiens
  misc_RNA (1)...(19): siRNA sense strand
gccgagauggaguucaauu

SEQ ID NO: 1675788 - RNA, 19 nt, Homo sapiens
  misc_RNA (1)...(19): siRNA sense strand
cgagauggaguucaauugc

SEQ ID NO: 1675789 - RNA, 19 nt, Homo sapiens
  misc_RNA (1)...(19): siRNA sense strand
ugaggaucgucaccaugga

SEQ ID NO: 1675790 - RNA, 19 nt, Homo sapiens
  misc_RNA (1)...(19): siRNA sense strand
ccgagauggaguucaauug

SEQ ID NO: 1675791 - RNA, 19 nt, Homo sapiens
  misc_RNA (1)...(19): siRNA sense strand
ggaagcaacccaagacguu

SEQ ID NO: 1675792 - RNA, 19 nt, Homo sapiens
  misc_RNA (1)...(19): siRNA sense strand
agaagcagauuuuagauga

SEQ ID NO: 1675793 - RNA, 19 nt, Homo sapiens
  misc_RNA (1)...(19): siRNA sense strand
gaagcagauuuuagaugaa

SEQ ID NO: 1675794 - RNA, 19 nt, Homo sapiens
  misc_RNA (1)...(19): siRNA sense strand
caccauggacgccgagaug

SEQ ID NO: 1675795 - RNA, 19 nt, Homo sapiens
  misc_RNA (1)...(19): siRNA sense strand
acgccgagauggaguucaa

SEQ ID NO: 1675796 - RNA, 19 nt, Homo sapiens
  misc_RNA (1)...(19): siRNA sense strand
gccaucgcuucccgcauga

SEQ ID NO: 1675797 - RNA, 19 nt, Homo sapiens
  misc_RNA (1)...(19): siRNA sense strand
gccgagauggaguucaauu

SEQ ID NO: 1675798 - RNA, 19 nt, Homo sapiens
  misc_RNA (1)...(19): siRNA sense strand
cgagauggaguucaauugc

SEQ ID NO: 1675799 - RNA, 19 nt, Homo sapiens
  misc_RNA (1)...(19): siRNA sense strand
ugaggaucgucaccaugga

SEQ ID NO: 1675800 - RNA, 19 nt, Homo sapiens
  misc_RNA (1)...(19): siRNA sense strand
ccgagauggaguucaauug

SEQ ID NO: 1675801 - RNA, 19 nt, Homo sapiens
  misc_RNA (1)...(19): siRNA sense strand
ggaagcaacccaagacguu

SEQ ID NO: 1675802 - RNA, 19 nt, Homo sapiens
  misc_RNA (1)...(19): siRNA sense strand
caccauggacgccgagaug

SEQ ID NO: 1675803 - RNA, 19 nt, Homo sapiens
  misc_RNA (1)...(19): siRNA sense strand
acgccgagauggaguucaa

SEQ ID NO: 1675804 - RNA, 19 nt, Homo sapiens
  misc_RNA (1)...(19): siRNA sense strand
gccaucgcuucccgcauga

SEQ ID NO: 1675805 - RNA, 19 nt, Homo sapiens
  misc_RNA (1)...(19): siRNA sense strand
gccgagauggaguucaauu

SEQ ID NO: 1675806 - RNA, 19 nt, Homo sapiens
  misc_RNA (1)...(19): siRNA sense strand
cgagauggaguucaauugc

SEQ ID NO: 1675807 - RNA, 19 nt, Homo sapiens
  misc_RNA (1)...(19): siRNA sense strand
ugaggaucgucaccaugga

SEQ ID NO: 1675808 - RNA, 19 nt, Homo sapiens
  misc_RNA (1)...(19): siRNA sense strand
ccgagauggaguucaauug

SEQ ID NO: 1675809 - RNA, 19 nt, Homo sapiens
  misc_RNA (1)...(19): siRNA sense strand
ggaagcaacccaagacguu

SEQ ID NO: 1675810 - RNA, 19 nt, Homo sapiens
  misc_RNA (1)...(19): siRNA sense strand
caccauggacgccgagaug

SEQ ID NO: 1675811 - RNA, 19 nt, Homo sapiens
  misc_RNA (1)...(19): siRNA sense strand
acgccgagauggaguucaa

SEQ ID NO: 1675812 - RNA, 19 nt, Homo sapiens
  misc_RNA (1)...(19): siRNA sense strand
gccaucgcuucccgcauga

SEQ ID NO: 1675813 - RNA, 19 nt, Homo sapiens
  misc_RNA (1)...(19): siRNA sense strand
gccgagauggaguucaauu

SEQ ID NO: 1675814 - RNA, 19 nt, Homo sapiens
  misc_RNA (1)...(19): siRNA sense strand
cgagauggaguucaauugc

SEQ ID NO: 1675815 - RNA, 19 nt, Homo sapiens
  misc_RNA (1)...(19): siRNA sense strand
ugaggaucgucaccaugga

SEQ ID NO: 1675816 - RNA, 19 nt, Homo sapiens
  misc_RNA (1)...(19): siRNA sense strand
ccgagauggaguucaauug

SEQ ID NO: 1675817 - RNA, 19 nt, Homo sapiens
  misc_RNA (1)...(19): siRNA sense strand
ggaagcaacccaagacguu

SEQ ID NO: 1675818 - RNA, 19 nt, Homo sapiens
  misc_RNA (1)...(19): siRNA sense strand
agaagcagauuuuagauga

SEQ ID NO: 1675819 - RNA, 19 nt, Homo sapiens
  misc_RNA (1)...(19): siRNA sense strand
gaagcagauuuuagaugaa

SEQ ID NO: 1675820 - RNA, 19 nt, Homo sapiens
  misc_RNA (1)...(19): siRNA sense strand
caccauggacgccgagaug

SEQ ID NO: 1675821 - RNA, 19 nt, Homo sapiens
  misc_RNA (1)...(19): siRNA sense strand
acgccgagauggaguucaa

SEQ ID NO: 1675822 - RNA, 19 nt, Homo sapiens
  misc_RNA (1)...(19): siRNA sense strand
gccaucgcuucccgcauga

SEQ ID NO: 1675823 - RNA, 19 nt, Homo sapiens
  misc_RNA (1)...(19): siRNA sense strand
gccgagauggaguucaauu

SEQ ID NO: 1675824 - RNA, 19 nt, Homo sapiens
  misc_RNA (1)...(19): siRNA sense strand
cgagauggaguucaauugc

SEQ ID NO: 1675825 - RNA, 19 nt, Homo sapiens
  misc_RNA (1)...(19): siRNA sense strand
ugaggaucgucaccaugga

SEQ ID NO: 1675826 - RNA, 19 nt, Homo sapiens
  misc_RNA (1)...(19): siRNA sense strand
ccgagauggaguucaauug

SEQ ID NO: 1675827 - RNA, 19 nt, Homo sapiens
  misc_RNA (1)...(19): siRNA sense strand
ggaagcaacccaagacguu

SEQ ID NO: 1675828 - RNA, 19 nt, Homo sapiens
  misc_RNA (1)...(19): siRNA sense strand
agaagcagauuuuagauga

SEQ ID NO: 1675829 - RNA, 19 nt, Homo sapiens
  misc_RNA (1)...(19): siRNA sense strand
gaagcagauuuuagaugaa

SEQ ID NO: 1675830 - RNA, 19 nt, Homo sapiens
  misc_RNA (1)...(19): siRNA sense strand
caccauggacgccgagaug

SEQ ID NO: 1675831 - RNA, 19 nt, Homo sapiens
  misc_RNA (1)...(19): siRNA sense strand
acgccgagauggaguucaa

SEQ ID NO: 1675832 - RNA, 19 nt, Homo sapiens
  misc_RNA (1)...(19): siRNA sense strand
gccaucgcuucccgcauga

SEQ ID NO: 1675833 - RNA, 19 nt, Homo sapiens
  misc_RNA (1)...(19): siRNA sense strand
gccgagauggaguucaauu

SEQ ID NO: 1675834 - RNA, 19 nt, Homo sapiens
  misc_RNA (1)...(19): siRNA sense strand
cgagauggaguucaauugc

SEQ ID NO: 1675835 - RNA, 19 nt, Homo sapiens
  misc_RNA (1)...(19): siRNA sense strand
ugaggaucgucaccaugga

SEQ ID NO: 1675836 - RNA, 19 nt, Homo sapiens
  misc_RNA (1)...(19): siRNA sense strand
ccgagauggaguucaauug

SEQ ID NO: 1675837 - RNA, 19 nt, Homo sapiens
  misc_RNA (1)...(19): siRNA sense strand
ggaagcaacccaagacguu

SEQ ID NO: 1675838 - RNA, 19 nt, Homo sapiens
  misc_RNA (1)...(19): siRNA sense strand
agaagcagauuuuagauga

SEQ ID NO: 1675839 - RNA, 19 nt, Homo sapiens
  misc_RNA (1)...(19): siRNA sense strand
gaagcagauuuuagaugaa

SEQ ID NO: 1675840 - RNA, 19 nt, Homo sapiens
  misc_RNA (1)...(19): siRNA sense strand
caccauggacgccgagaug

SEQ ID NO: 1675841 - RNA, 19 nt, Homo sapiens
  misc_RNA (1)...(19): siRNA sense strand
acgccgagauggaguucaa

SEQ ID NO: 1675842 - RNA, 19 nt, Homo sapiens
  misc_RNA (1)...(19): siRNA sense strand
gccaucgcuucccgcauga

SEQ ID NO: 1675843 - RNA, 19 nt, Homo sapiens
  misc_RNA (1)...(19): siRNA sense strand
gccgagauggaguucaauu

SEQ ID NO: 1675844 - RNA, 19 nt, Homo sapiens
  misc_RNA (1)...(19): siRNA sense strand
cgagauggaguucaauugc

SEQ ID NO: 1675845 - RNA, 19 nt, Homo sapiens
  misc_RNA (1)...(19): siRNA sense strand
ugaggaucgucaccaugga

SEQ ID NO: 1675846 - RNA, 19 nt, Homo sapiens
  misc_RNA (1)...(19): siRNA sense strand
ccgagauggaguucaauug

SEQ ID NO: 1675847 - RNA, 19 nt, Homo sapiens
  misc_RNA (1)...(19): siRNA sense strand
ggaagcaacccaagacguu

SEQ ID NO: 1675848 - RNA, 19 nt, Homo sapiens
  misc_RNA (1)...(19): siRNA sense strand
agaagcagauuuuagauga

SEQ ID NO: 1675849 - RNA, 19 nt, Homo sapiens
  misc_RNA (1)...(19): siRNA sense strand
gaagcagauuuuagaugaa

SEQ ID NO: 1675850 - RNA, 19 nt, Homo sapiens
  misc_RNA (1)...(19): siRNA sense strand
caccauggacgccgagaug

SEQ ID NO: 1675851 - RNA, 19 nt, Homo sapiens
  misc_RNA (1)...(19): siRNA sense strand
acgccgagauggaguucaa

SEQ ID NO: 1675852 - RNA, 19 nt, Homo sapiens
  misc_RNA (1)...(19): siRNA sense strand
gccaucgcuucccgcauga

SEQ ID NO: 1675853 - RNA, 19 nt, Homo sapiens
  misc_RNA (1)...(19): siRNA sense strand
gccgagauggaguucaauu

SEQ ID NO: 1675854 - RNA, 19 nt, Homo sapiens
  misc_RNA (1)...(19): siRNA sense strand
cgagauggaguucaauugc

SEQ ID NO: 1675855 - RNA, 19 nt, Homo sapiens
  misc_RNA (1)...(19): siRNA sense strand
ugaggaucgucaccaugga

SEQ ID NO: 1675856 - RNA, 19 nt, Homo sapiens
  misc_RNA (1)...(19): siRNA sense strand
ccgagauggaguucaauug

SEQ ID NO: 1675857 - RNA, 19 nt, Homo sapiens
  misc_RNA (1)...(19): siRNA sense strand
ggaagcaacccaagacguu

SEQ ID NO: 1675858 - RNA, 19 nt, Homo sapiens
  misc_RNA (1)...(19): siRNA sense strand
agaagcagauuuuagauga

SEQ ID NO: 1675859 - RNA, 19 nt, Homo sapiens
  misc_RNA (1)...(19): siRNA sense strand
gaagcagauuuuagaugaa

SEQ ID NO: 1675860 - RNA, 19 nt, Homo sapiens
  misc_RNA (1)...(19): siRNA sense strand
caccauggacgccgagaug

SEQ ID NO: 1675861 - RNA, 19 nt, Homo sapiens
  misc_RNA (1)...(19): siRNA sense strand
acgccgagauggaguucaa

SEQ ID NO: 1675862 - RNA, 19 nt, Homo sapiens
  misc_RNA (1)...(19): siRNA sense strand
gccaucgcuucccgcauga

SEQ ID NO: 1675863 - RNA, 19 nt, Homo sapiens
  misc_RNA (1)...(19): siRNA sense strand
gccgagauggaguucaauu

SEQ ID NO: 1675864 - RNA, 19 nt, Homo sapiens
  misc_RNA (1)...(19): siRNA sense strand
cgagauggaguucaauugc

SEQ ID NO: 1675865 - RNA, 19 nt, Homo sapiens
  misc_RNA (1)...(19): siRNA sense strand
ugaggaucgucaccaugga

SEQ ID NO: 1675866 - RNA, 19 nt, Homo sapiens
  misc_RNA (1)...(19): siRNA sense strand
ccgagauggaguucaauug

SEQ ID NO: 1675867 - RNA, 19 nt, Homo sapiens
  misc_RNA (1)...(19): siRNA sense strand
ggaagcaacccaagacguu

SEQ ID NO: 1675868 - RNA, 19 nt, Homo sapiens
  misc_RNA (1)...(19): siRNA sense strand
agaagcagauuuuagauga

SEQ ID NO: 1675869 - RNA, 19 nt, Homo sapiens
  misc_RNA (1)...(19): siRNA sense strand
gaagcagauuuuagaugaa

SEQ ID NO: 1675870 - RNA, 19 nt, Homo sapiens
  misc_RNA (1)...(19): siRNA sense strand
caccauggacgccgagaug

SEQ ID NO: 1675871 - RNA, 19 nt, Homo sapiens
  misc_RNA (1)...(19): siRNA sense strand
acgccgagauggaguucaa

SEQ ID NO: 1675872 - RNA, 19 nt, Homo sapiens
  misc_RNA (1)...(19): siRNA sense strand
gccaucgcuucccgcauga

SEQ ID NO: 1675873 - RNA, 19 nt, Homo sapiens
  misc_RNA (1)...(19): siRNA sense strand
gccgagauggaguucaauu

SEQ ID NO: 1675874 - RNA, 19 nt, Homo sapiens
  misc_RNA (1)...(19): siRNA sense strand
cgagauggaguucaauugc

SEQ ID NO: 1675875 - RNA, 19 nt, Homo sapiens
  misc_RNA (1)...(19): siRNA sense strand
ugaggaucgucaccaugga

SEQ ID NO: 1675876 - RNA, 19 nt, Homo sapiens
  misc_RNA (1)...(19): siRNA sense strand
ccgagauggaguucaauug

SEQ ID NO: 1675877 - RNA, 19 nt, Homo sapiens
  misc_RNA (1)...(19): siRNA sense strand
ggaagcaacccaagacguu

SEQ ID NO: 1675878 - RNA, 19 nt, Homo sapiens
  misc_RNA (1)...(19): siRNA sense strand
agaagcagauuuuagauga

SEQ ID NO: 1675879 - RNA, 19 nt, Homo sapiens
  misc_RNA (1)...(19): siRNA sense strand
gaagcagauuuuagaugaa

SEQ ID NO: 1675880 - RNA, 19 nt, Homo sapiens
  misc_RNA (1)...(19): siRNA sense strand
caccauggacgccgagaug

SEQ ID NO: 1675881 - RNA, 19 nt, Homo sapiens
  misc_RNA (1)...(19): siRNA sense strand
acgccgagauggaguucaa

SEQ ID NO: 1675882 - RNA, 19 nt, Homo sapiens
  misc_RNA (1)...(19): siRNA sense strand
gccaucgcuucccgcauga

SEQ ID NO: 1675883 - RNA, 19 nt, Homo sapiens
  misc_RNA (1)...(19): siRNA sense strand
gccgagauggaguucaauu

SEQ ID NO: 1675884 - RNA, 19 nt, Homo sapiens
  misc_RNA (1)...(19): siRNA sense strand
cgagauggaguucaauugc

SEQ ID NO: 1675885 - RNA, 19 nt, Homo sapiens
  misc_RNA (1)...(19): siRNA sense strand
ugaggaucgucaccaugga

SEQ ID NO: 1675886 - RNA, 19 nt, Homo sapiens
  misc_RNA (1)...(19): siRNA sense strand
ccgagauggaguucaauug

SEQ ID NO: 1675887 - RNA, 19 nt, Homo sapiens
  misc_RNA (1)...(19): siRNA sense strand
ggaagcaacccaagacguu

SEQ ID NO: 1675888 - RNA, 19 nt, Homo sapiens
  misc_RNA (1)...(19): siRNA sense strand
agaagcagauuuuagauga

SEQ ID NO: 1675889 - RNA, 19 nt, Homo sapiens
  misc_RNA (1)...(19): siRNA sense strand
gaagcagauuuuagaugaa

SEQ ID NO: 1675890 - RNA, 19 nt, Homo sapiens
  misc_RNA (1)...(19): siRNA sense strand
caccauggacgccgagaug

SEQ ID NO: 1675891 - RNA, 19 nt, Homo sapiens
  misc_RNA (1)...(19): siRNA sense strand
acgccgagauggaguucaa

SEQ ID NO: 1675892 - RNA, 19 nt, Homo sapiens
  misc_RNA (1)...(19): siRNA sense strand
gccaucgcuucccgcauga

SEQ ID NO: 1675893 - RNA, 19 nt, Homo sapiens
  misc_RNA (1)...(19): siRNA sense strand
gccgagauggaguucaauu

SEQ ID NO: 1675894 - RNA, 19 nt, Homo sapiens
  misc_RNA (1)...(19): siRNA sense strand
cgagauggaguucaauugc

SEQ ID NO: 1675895 - RNA, 19 nt, Homo sapiens
  misc_RNA (1)...(19): siRNA sense strand
ugaggaucgucaccaugga

SEQ ID NO: 1675896 - RNA, 19 nt, Homo sapiens
  misc_RNA (1)...(19): siRNA sense strand
ccgagauggaguucaauug

SEQ ID NO: 1675897 - RNA, 19 nt, Homo sapiens
  misc_RNA (1)...(19): siRNA sense strand
ggaagcaacccaagacguu

SEQ ID NO: 1675898 - RNA, 19 nt, Homo sapiens
  misc_RNA (1)...(19): siRNA sense strand
agaagcagauuuuagauga

SEQ ID NO: 1675899 - RNA, 19 nt, Homo sapiens
  misc_RNA (1)...(19): siRNA sense strand
gaagcagauuuuagaugaa

SEQ ID NO: 1675900 - RNA, 19 nt, Homo sapiens
  misc_RNA (1)...(19): siRNA sense strand
caccauggacgccgagaug

SEQ ID NO: 1675901 - RNA, 19 nt, Homo sapiens
  misc_RNA (1)...(19): siRNA sense strand
acgccgagauggaguucaa

SEQ ID NO: 1675902 - RNA, 19 nt, Homo sapiens
  misc_RNA (1)...(19): siRNA sense strand
gccaucgcuucccgcauga

SEQ ID NO: 1675903 - RNA, 19 nt, Homo sapiens
  misc_RNA (1)...(19): siRNA sense strand
gccgagauggaguucaauu

SEQ ID NO: 1675904 - RNA, 19 nt, Homo sapiens
  misc_RNA (1)...(19): siRNA sense strand
cgagauggaguucaauugc

SEQ ID NO: 1675905 - RNA, 19 nt, Homo sapiens
  misc_RNA (1)...(19): siRNA sense strand
ugaggaucgucaccaugga

SEQ ID NO: 1675906 - RNA, 19 nt, Homo sapiens
  misc_RNA (1)...(19): siRNA sense strand
ccgagauggaguucaauug

SEQ ID NO: 1675907 - RNA, 19 nt, Homo sapiens
  misc_RNA (1)...(19): siRNA sense strand
ggaagcaacccaagacguu

SEQ ID NO: 1675908 - RNA, 19 nt, Homo sapiens
  misc_RNA (1)...(19): siRNA sense strand
agaagcagauuuuagauga

SEQ ID NO: 1675909 - RNA, 19 nt, Homo sapiens
  misc_RNA (1)...(19): siRNA sense strand
gaagcagauuuuagaugaa

SEQ ID NO: 1675910 - RNA, 19 nt, Homo sapiens
  misc_RNA (1)...(19): siRNA sense strand
caccauggacgccgagaug

SEQ ID NO: 1675911 - RNA, 19 nt, Homo sapiens
  misc_RNA (1)...(19): siRNA sense strand
acgccgagauggaguucaa

SEQ ID NO: 1675912 - RNA, 19 nt, Homo sapiens
  misc_RNA (1)...(19): siRNA sense strand
gccaucgcuucccgcauga

SEQ ID NO: 1675913 - RNA, 19 nt, Homo sapiens
  misc_RNA (1)...(19): siRNA sense strand
gccgagauggaguucaauu

SEQ ID NO: 1675914 - RNA, 19 nt, Homo sapiens
  misc_RNA (1)...(19): siRNA sense strand
cgagauggaguucaauugc

SEQ ID NO: 1675915 - RNA, 19 nt, Homo sapiens
  misc_RNA (1)...(19): siRNA sense strand
ugaggaucgucaccaugga

SEQ ID NO: 1675916 - RNA, 19 nt, Homo sapiens
  misc_RNA (1)...(19): siRNA sense strand
ccgagauggaguucaauug

SEQ ID NO: 1675917 - RNA, 19 nt, Homo sapiens
  misc_RNA (1)...(19): siRNA sense strand
ggaagcaacccaagacguu

SEQ ID NO: 1675918 - RNA, 19 nt, Homo sapiens
  misc_RNA (1)...(19): siRNA sense strand
agaagcagauuuuagauga

SEQ ID NO: 1675919 - RNA, 19 nt, Homo sapiens
  misc_RNA (1)...(19): siRNA sense strand
gaagcagauuuuagaugaa

SEQ ID NO: 1675920 - RNA, 19 nt, Homo sapiens
  misc_RNA (1)...(19): siRNA sense strand
caccauggacgccgagaug

SEQ ID NO: 1675921 - RNA, 19 nt, Homo sapiens
  misc_RNA (1)...(19): siRNA sense strand
acgccgagauggaguucaa

SEQ ID NO: 1675922 - RNA, 19 nt, Homo sapiens
  misc_RNA (1)...(19): siRNA sense strand
gccaucgcuucccgcauga

SEQ ID NO: 1675923 - RNA, 19 nt, Homo sapiens
  misc_RNA (1)...(19): siRNA sense strand
gccgagauggaguucaauu

SEQ ID NO: 1675924 - RNA, 19 nt, Homo sapiens
  misc_RNA (1)...(19): siRNA sense strand
cgagauggaguucaauugc

SEQ ID NO: 1675925 - RNA, 19 nt, Homo sapiens
  misc_RNA (1)...(19): siRNA sense strand
ugaggaucgucaccaugga

SEQ ID NO: 1675926 - RNA, 19 nt, Homo sapiens
  misc_RNA (1)...(19): siRNA sense strand
ccgagauggaguucaauug

SEQ ID NO: 1675927 - RNA, 19 nt, Homo sapiens
  misc_RNA (1)...(19): siRNA sense strand
ggaagcaacccaagacguu

SEQ ID NO: 1675928 - RNA, 19 nt, Homo sapiens
  misc_RNA (1)...(19): siRNA sense strand
caccauggacgccgagaug

SEQ ID NO: 1675929 - RNA, 19 nt, Homo sapiens
  misc_RNA (1)...(19): siRNA sense strand
acgccgagauggaguucaa

SEQ ID NO: 1675930 - RNA, 19 nt, Homo sapiens
  misc_RNA (1)...(19): siRNA sense strand
gccaucgcuucccgcauga

SEQ ID NO: 1675931 - RNA, 19 nt, Homo sapiens
  misc_RNA (1)...(19): siRNA sense strand
gccgagauggaguucaauu

SEQ ID NO: 1675932 - RNA, 19 nt, Homo sapiens
  misc_RNA (1)...(19): siRNA sense strand
cgagauggaguucaauugc

SEQ ID NO: 1675933 - RNA, 19 nt, Homo sapiens
  misc_RNA (1)...(19): siRNA sense strand
ugaggaucgucaccaugga

SEQ ID NO: 1675934 - RNA, 19 nt, Homo sapiens
  misc_RNA (1)...(19): siRNA sense strand
ccgagauggaguucaauug

SEQ ID NO: 1675935 - RNA, 19 nt, Homo sapiens
  misc_RNA (1)...(19): siRNA sense strand
ggaagcaacccaagacguu

SEQ ID NO: 1675936 - RNA, 19 nt, Homo sapiens
  misc_RNA (1)...(19): siRNA sense strand
caccauggacgccgagaug

SEQ ID NO: 1675937 - RNA, 19 nt, Homo sapiens
  misc_RNA (1)...(19): siRNA sense strand
acgccgagauggaguucaa

SEQ ID NO: 1675938 - RNA, 19 nt, Homo sapiens
  misc_RNA (1)...(19): siRNA sense strand
gccaucgcuucccgcauga

SEQ ID NO: 1675939 - RNA, 19 nt, Homo sapiens
  misc_RNA (1)...(19): siRNA sense strand
gccgagauggaguucaauu

SEQ ID NO: 1675940 - RNA, 19 nt, Homo sapiens
  misc_RNA (1)...(19): siRNA sense strand
cgagauggaguucaauugc

SEQ ID NO: 1675941 - RNA, 19 nt, Homo sapiens
  misc_RNA (1)...(19): siRNA sense strand
ugaggaucgucaccaugga

SEQ ID NO: 1675942 - RNA, 19 nt, Homo sapiens
  misc_RNA (1)...(19): siRNA sense strand
ccgagauggaguucaauug

SEQ ID NO: 1675943 - RNA, 19 nt, Homo sapiens
  misc_RNA (1)...(19): siRNA sense strand
ggaagcaacccaagacguu

SEQ ID NO: 1675944 - RNA, 19 nt, Homo sapiens
  misc_RNA (1)...(19): siRNA sense strand
agaagcagauuuuagauga

SEQ ID NO: 1675945 - RNA, 19 nt, Homo sapiens
  misc_RNA (1)...(19): siRNA sense strand
gaagcagauuuuagaugaa

SEQ ID NO: 1675946 - RNA, 19 nt, Homo sapiens
  misc_RNA (1)...(19): siRNA sense strand
caccauggacgccgagaug

SEQ ID NO: 1675947 - RNA, 19 nt, Homo sapiens
  misc_RNA (1)...(19): siRNA sense strand
acgccgagauggaguucaa

SEQ ID NO: 1675948 - RNA, 19 nt, Homo sapiens
  misc_RNA (1)...(19): siRNA sense strand
gccaucgcuucccgcauga

SEQ ID NO: 1675949 - RNA, 19 nt, Homo sapiens
  misc_RNA (1)...(19): siRNA sense strand
gccgagauggaguucaauu

SEQ ID NO: 1675950 - RNA, 19 nt, Homo sapiens
  misc_RNA (1)...(19): siRNA sense strand
cgagauggaguucaauugc

SEQ ID NO: 1675951 - RNA, 19 nt, Homo sapiens
  misc_RNA (1)...(19): siRNA sense strand
ugaggaucgucaccaugga

SEQ ID NO: 1675952 - RNA, 19 nt, Homo sapiens
  misc_RNA (1)...(19): siRNA sense strand
ccgagauggaguucaauug

SEQ ID NO: 1675953 - RNA, 19 nt, Homo sapiens
  misc_RNA (1)...(19): siRNA sense strand
ggaagcaacccaagacguu

SEQ ID NO: 1675954 - RNA, 19 nt, Homo sapiens
  misc_RNA (1)...(19): siRNA sense strand
agaagcagauuuuagauga

SEQ ID NO: 1675955 - RNA, 19 nt, Homo sapiens
  misc_RNA (1)...(19): siRNA sense strand
gaagcagauuuuagaugaa

SEQ ID NO: 1675956 - RNA, 19 nt, Homo sapiens
  misc_RNA (1)...(19): siRNA sense strand
caccauggacgccgagaug

SEQ ID NO: 1675957 - RNA, 19 nt, Homo sapiens
  misc_RNA (1)...(19): siRNA sense strand
acgccgagauggaguucaa

SEQ ID NO: 1675958 - RNA, 19 nt, Homo sapiens
  misc_RNA (1)...(19): siRNA sense strand
gccaucgcuucccgcauga

SEQ ID NO: 1675959 - RNA, 19 nt, Homo sapiens
  misc_RNA (1)...(19): siRNA sense strand
gccgagauggaguucaauu

SEQ ID NO: 1675960 - RNA, 19 nt, Homo sapiens
  misc_RNA (1)...(19): siRNA sense strand
cgagauggaguucaauugc

SEQ ID NO: 1675961 - RNA, 19 nt, Homo sapiens
  misc_RNA (1)...(19): siRNA sense strand
ugaggaucgucaccaugga

SEQ ID NO: 1675962 - RNA, 19 nt, Homo sapiens
  misc_RNA (1)...(19): siRNA sense strand
ccgagauggaguucaauug

SEQ ID NO: 1675963 - RNA, 19 nt, Homo sapiens
  misc_RNA (1)...(19): siRNA sense strand
ggaagcaacccaagacguu

SEQ ID NO: 1675964 - RNA, 19 nt, Homo sapiens
  misc_RNA (1)...(19): siRNA sense strand
agaagcagauuuuagauga

SEQ ID NO: 1675965 - RNA, 19 nt, Homo sapiens
  misc_RNA (1)...(19): siRNA sense strand
gaagcagauuuuagaugaa

SEQ ID NO: 1675966 - RNA, 19 nt, Homo sapiens
  misc_RNA (1)...(19): siRNA sense strand
caccauggacgccgagaug

SEQ ID NO: 1675967 - RNA, 19 nt, Homo sapiens
  misc_RNA (1)...(19): siRNA sense strand
acgccgagauggaguucaa

SEQ ID NO: 1675968 - RNA, 19 nt, Homo sapiens
  misc_RNA (1)...(19): siRNA sense strand
gccaucgcuucccgcauga

SEQ ID NO: 1675969 - RNA, 19 nt, Homo sapiens
  misc_RNA (1)...(19): siRNA sense strand
gccgagauggaguucaauu

SEQ ID NO: 1675970 - RNA, 19 nt, Homo sapiens
  misc_RNA (1)...(19): siRNA sense strand
cgagauggaguucaauugc

SEQ ID NO: 1675971 - RNA, 19 nt, Homo sapiens
  misc_RNA (1)...(19): siRNA sense strand
ugaggaucgucaccaugga

SEQ ID NO: 1675972 - RNA, 19 nt, Homo sapiens
  misc_RNA (1)...(19): siRNA sense strand
ccgagauggaguucaauug

SEQ ID NO: 1675973 - RNA, 19 nt, Homo sapiens
  misc_RNA (1)...(19): siRNA sense strand
ggaagcaacccaagacguu

SEQ ID NO: 1675974 - RNA, 19 nt, Homo sapiens
  misc_RNA (1)...(19): siRNA sense strand
agaagcagauuuuagauga

SEQ ID NO: 1675975 - RNA, 19 nt, Homo sapiens
  misc_RNA (1)...(19): siRNA sense strand
gaagcagauuuuagaugaa

SEQ ID NO: 1675976 - RNA, 19 nt, Homo sapiens
  misc_RNA (1)...(19): siRNA sense strand
caccauggacgccgagaug

SEQ ID NO: 1675977 - RNA, 19 nt, Homo sapiens
  misc_RNA (1)...(19): siRNA sense strand
acgccgagauggaguucaa

SEQ ID NO: 1675978 - RNA, 19 nt, Homo sapiens
  misc_RNA (1)...(19): siRNA sense strand
gccaucgcuucccgcauga

SEQ ID NO: 1675979 - RNA, 19 nt, Homo sapiens
  misc_RNA (1)...(19): siRNA sense strand
gccgagauggaguucaauu

SEQ ID NO: 1675980 - RNA, 19 nt, Homo sapiens
  misc_RNA (1)...(19): siRNA sense strand
cgagauggaguucaauugc

SEQ ID NO: 1675981 - RNA, 19 nt, Homo sapiens
  misc_RNA (1)...(19): siRNA sense strand
ugaggaucgucaccaugga

SEQ ID NO: 1675982 - RNA, 19 nt, Homo sapiens
  misc_RNA (1)...(19): siRNA sense strand
ccgagauggaguucaauug

SEQ ID NO: 1675983 - RNA, 19 nt, Homo sapiens
  misc_RNA (1)...(19): siRNA sense strand
ggaagcaacccaagacguu

SEQ ID NO: 1675984 - RNA, 19 nt, Homo sapiens
  misc_RNA (1)...(19): siRNA sense strand
agaagcagauuuuagauga

SEQ ID NO: 1675985 - RNA, 19 nt, Homo sapiens
  misc_RNA (1)...(19): siRNA sense strand
gaagcagauuuuagaugaa

SEQ ID NO: 1675986 - RNA, 19 nt, Homo sapiens
  misc_RNA (1)...(19): siRNA sense strand
caccauggacgccgagaug

SEQ ID NO: 1675987 - RNA, 19 nt, Homo sapiens
  misc_RNA (1)...(19): siRNA sense strand
acgccgagauggaguucaa

SEQ ID NO: 1675988 - RNA, 19 nt, Homo sapiens
  misc_RNA (1)...(19): siRNA sense strand
gccaucgcuucccgcauga

SEQ ID NO: 1675989 - RNA, 19 nt, Homo sapiens
  misc_RNA (1)...(19): siRNA sense strand
gccgagauggaguucaauu

SEQ ID NO: 1675990 - RNA, 19 nt, Homo sapiens
  misc_RNA (1)...(19): siRNA sense strand
cgagauggaguucaauugc

SEQ ID NO: 1675991 - RNA, 19 nt, Homo sapiens
  misc_RNA (1)...(19): siRNA sense strand
ugaggaucgucaccaugga

SEQ ID NO: 1675992 - RNA, 19 nt, Homo sapiens
  misc_RNA (1)...(19): siRNA sense strand
ccgagauggaguucaauug

SEQ ID NO: 1675993 - RNA, 19 nt, Homo sapiens
  misc_RNA (1)...(19): siRNA sense strand
ggaagcaacccaagacguu

SEQ ID NO: 1675994 - RNA, 19 nt, Homo sapiens
  misc_RNA (1)...(19): siRNA sense strand
agaagcagauuuuagauga

SEQ ID NO: 1675995 - RNA, 19 nt, Homo sapiens
  misc_RNA (1)...(19): siRNA sense strand
gaagcagauuuuagaugaa

SEQ ID NO: 1675996 - RNA, 19 nt, Homo sapiens
  misc_RNA (1)...(19): siRNA sense strand
caccauggacgccgagaug

SEQ ID NO: 1675997 - RNA, 19 nt, Homo sapiens
  misc_RNA (1)...(19): siRNA sense strand
acgccgagauggaguucaa

SEQ ID NO: 1675998 - RNA, 19 nt, Homo sapiens
  misc_RNA (1)...(19): siRNA sense strand
gccaucgcuucccgcauga

SEQ ID NO: 1675999 - RNA, 19 nt, Homo sapiens
  misc_RNA (1)...(19): siRNA sense strand
gccgagauggaguucaauu

SEQ ID NO: 1676000 - RNA, 19 nt, Homo sapiens
  misc_RNA (1)...(19): siRNA sense strand
cgagauggaguucaauugc

SEQ ID NO: 1676001 - RNA, 19 nt, Homo sapiens
  misc_RNA (1)...(19): siRNA sense strand
ugaggaucgucaccaugga

SEQ ID NO: 1676002 - RNA, 19 nt, Homo sapiens
  misc_RNA (1)...(19): siRNA sense strand
ccgagauggaguucaauug

SEQ ID NO: 1676003 - RNA, 19 nt, Homo sapiens
  misc_RNA (1)...(19): siRNA sense strand
ggaagcaacccaagacguu

SEQ ID NO: 1676004 - RNA, 19 nt, Homo sapiens
  misc_RNA (1)...(19): siRNA sense strand
agaagcagauuuuagauga

SEQ ID NO: 1676005 - RNA, 19 nt, Homo sapiens
  misc_RNA (1)...(19): siRNA sense strand
gaagcagauuuuagaugaa

SEQ ID NO: 1676006 - RNA, 19 nt, Homo sapiens
  misc_RNA (1)...(19): siRNA sense strand
caccauggacgccgagaug

SEQ ID NO: 1676007 - RNA, 19 nt, Homo sapiens
  misc_RNA (1)...(19): siRNA sense strand
acgccgagauggaguucaa

SEQ ID NO: 1676008 - RNA, 19 nt, Homo sapiens
  misc_RNA (1)...(19): siRNA sense strand
gccaucgcuucccgcauga

SEQ ID NO: 1676009 - RNA, 19 nt, Homo sapiens
  misc_RNA (1)...(19): siRNA sense strand
gccgagauggaguucaauu

SEQ ID NO: 1676010 - RNA, 19 nt, Homo sapiens
  misc_RNA (1)...(19): siRNA sense strand
cgagauggaguucaauugc

SEQ ID NO: 1676011 - RNA, 19 nt, Homo sapiens
  misc_RNA (1)...(19): siRNA sense strand
ugaggaucgucaccaugga

SEQ ID NO: 1676012 - RNA, 19 nt, Homo sapiens
  misc_RNA (1)...(19): siRNA sense strand
ccgagauggaguucaauug

SEQ ID NO: 1676013 - RNA, 19 nt, Homo sapiens
  misc_RNA (1)...(19): siRNA sense strand
ggaagcaacccaagacguu

SEQ ID NO: 1676014 - RNA, 19 nt, Homo sapiens
  misc_RNA (1)...(19): siRNA sense strand
agaagcagauuuuagauga

SEQ ID NO: 1676015 - RNA, 19 nt, Homo sapiens
  misc_RNA (1)...(19): siRNA sense strand
gaagcagauuuuagaugaa

SEQ ID NO: 1676016 - RNA, 19 nt, Homo sapiens
  misc_RNA (1)...(19): siRNA sense strand
caccauggacgccgagaug

SEQ ID NO: 1676017 - RNA, 19 nt, Homo sapiens
  misc_RNA (1)...(19): siRNA sense strand
acgccgagauggaguucaa

SEQ ID NO: 1676018 - RNA, 19 nt, Homo sapiens
  misc_RNA (1)...(19): siRNA sense strand
gccaucgcuucccgcauga

SEQ ID NO: 1676019 - RNA, 19 nt, Homo sapiens
  misc_RNA (1)...(19): siRNA sense strand
gccgagauggaguucaauu

SEQ ID NO: 1676020 - RNA, 19 nt, Homo sapiens
  misc_RNA (1)...(19): siRNA sense strand
cgagauggaguucaauugc

SEQ ID NO: 1676021 - RNA, 19 nt, Homo sapiens
  misc_RNA (1)...(19): siRNA sense strand
ugaggaucgucaccaugga

SEQ ID NO: 1676022 - RNA, 19 nt, Homo sapiens
  misc_RNA (1)...(19): siRNA sense strand
ccgagauggaguucaauug

SEQ ID NO: 1676023 - RNA, 19 nt, Homo sapiens
  misc_RNA (1)...(19): siRNA sense strand
ggaagcaacccaagacguu

SEQ ID NO: 1676024 - RNA, 19 nt, Homo sapiens
  misc_RNA (1)...(19): siRNA sense strand
agaagcagauuuuagauga

SEQ ID NO: 1676025 - RNA, 19 nt, Homo sapiens
  misc_RNA (1)...(19): siRNA sense strand
gaagcagauuuuagaugaa

SEQ ID NO: 1676026 - RNA, 19 nt, Homo sapiens
  misc_RNA (1)...(19): siRNA sense strand
caccauggacgccgagaug

SEQ ID NO: 1676027 - RNA, 19 nt, Homo sapiens
  misc_RNA (1)...(19): siRNA sense strand
acgccgagauggaguucaa

SEQ ID NO: 1676028 - RNA, 19 nt, Homo sapiens
  misc_RNA (1)...(19): siRNA sense strand
gccaucgcuucccgcauga

SEQ ID NO: 1676029 - RNA, 19 nt, Homo sapiens
  misc_RNA (1)...(19): siRNA sense strand
gccgagauggaguucaauu

SEQ ID NO: 1676030 - RNA, 19 nt, Homo sapiens
  misc_RNA (1)...(19): siRNA sense strand
cgagauggaguucaauugc

SEQ ID NO: 1676031 - RNA, 19 nt, Homo sapiens
  misc_RNA (1)...(19): siRNA sense strand
ugaggaucgucaccaugga

SEQ ID NO: 1676032 - RNA, 19 nt, Homo sapiens
  misc_RNA (1)...(19): siRNA sense strand
ccgagauggaguucaauug

SEQ ID NO: 1676033 - RNA, 19 nt, Homo sapiens
  misc_RNA (1)...(19): siRNA sense strand
ggaagcaacccaagacguu

SEQ ID NO: 1676034 - RNA, 19 nt, Homo sapiens
  misc_RNA (1)...(19): siRNA sense strand
agaagcagauuuuagauga

SEQ ID NO: 1676035 - RNA, 19 nt, Homo sapiens
  misc_RNA (1)...(19): siRNA sense strand
gaagcagauuuuagaugaa

SEQ ID NO: 1676036 - RNA, 19 nt, Homo sapiens
  misc_RNA (1)...(19): siRNA sense strand
caccauggacgccgagaug

SEQ ID NO: 1676037 - RNA, 19 nt, Homo sapiens
  misc_RNA (1)...(19): siRNA sense strand
acgccgagauggaguucaa

SEQ ID NO: 1676038 - RNA, 19 nt, Homo sapiens
  misc_RNA (1)...(19): siRNA sense strand
gccaucgcuucccgcauga

SEQ ID NO: 1676039 - RNA, 19 nt, Homo sapiens
  misc_RNA (1)...(19): siRNA sense strand
gccgagauggaguucaauu

SEQ ID NO: 1676040 - RNA, 19 nt, Homo sapiens
  misc_RNA (1)...(19): siRNA sense strand
cgagauggaguucaauugc

SEQ ID NO: 1676041 - RNA, 19 nt, Homo sapiens
  misc_RNA (1)...(19): siRNA sense strand
ugaggaucgucaccaugga

SEQ ID NO: 1676042 - RNA, 19 nt, Homo sapiens
  misc_RNA (1)...(19): siRNA sense strand
ccgagauggaguucaauug

SEQ ID NO: 1676043 - RNA, 19 nt, Homo sapiens
  misc_RNA (1)...(19): siRNA sense strand
ggaagcaacccaagacguu

SEQ ID NO: 1676044 - RNA, 19 nt, Homo sapiens
  misc_RNA (1)...(19): siRNA sense strand
agaagcagauuuuagauga

SEQ ID NO: 1676045 - RNA, 19 nt, Homo sapiens
  misc_RNA (1)...(19): siRNA sense strand
gaagcagauuuuagaugaa

SEQ ID NO: 1676046 - RNA, 19 nt, Homo sapiens
  misc_RNA (1)...(19): siRNA sense strand
caccauggacgccgagaug

SEQ ID NO: 1676047 - RNA, 19 nt, Homo sapiens
  misc_RNA (1)...(19): siRNA sense strand
acgccgagauggaguucaa

SEQ ID NO: 1676048 - RNA, 19 nt, Homo sapiens
  misc_RNA (1)...(19): siRNA sense strand
gccaucgcuucccgcauga

SEQ ID NO: 1676049 - RNA, 19 nt, Homo sapiens
  misc_RNA (1)...(19): siRNA sense strand
gccgagauggaguucaauu

SEQ ID NO: 1676050 - RNA, 19 nt, Homo sapiens
  misc_RNA (1)...(19): siRNA sense strand
cgagauggaguucaauugc

SEQ ID NO: 1676051 - RNA, 19 nt, Homo sapiens
  misc_RNA (1)...(19): siRNA sense strand
ugaggaucgucaccaugga

SEQ ID NO: 1676052 - RNA, 19 nt, Homo sapiens
  misc_RNA (1)...(19): siRNA sense strand
ccgagauggaguucaauug

SEQ ID NO: 1676053 - RNA, 19 nt, Homo sapiens
  misc_RNA (1)...(19): siRNA sense strand
ggaagcaacccaagacguu

SEQ ID NO: 1676054 - RNA, 19 nt, Homo sapiens
  misc_RNA (1)...(19): siRNA sense strand
caccauggacgccgagaug

SEQ ID NO: 1676055 - RNA, 19 nt, Homo sapiens
  misc_RNA (1)...(19): siRNA sense strand
acgccgagauggaguucaa

SEQ ID NO: 1676056 - RNA, 19 nt, Homo sapiens
  misc_RNA (1)...(19): siRNA sense strand
gccaucgcuucccgcauga

SEQ ID NO: 1676057 - RNA, 19 nt, Homo sapiens
  misc_RNA (1)...(19): siRNA sense strand
gccgagauggaguucaauu

SEQ ID NO: 1676058 - RNA, 19 nt, Homo sapiens
  misc_RNA (1)...(19): siRNA sense strand
cgagauggaguucaauugc

SEQ ID NO: 1676059 - RNA, 19 nt, Homo sapiens
  misc_RNA (1)...(19): siRNA sense strand
ugaggaucgucaccaugga

SEQ ID NO: 1676060 - RNA, 19 nt, Homo sapiens
  misc_RNA (1)...(19): siRNA sense strand
ccgagauggaguucaauug

SEQ ID NO: 1676061 - RNA, 19 nt, Homo sapiens
  misc_RNA (1)...(19): siRNA sense strand
ggaagcaacccaagacguu

SEQ ID NO: 1676062 - RNA, 19 nt, Homo sapiens
  misc_RNA (1)...(19): siRNA sense strand
caccauggacgccgagaug

SEQ ID NO: 1676063 - RNA, 19 nt, Homo sapiens
  misc_RNA (1)...(19): siRNA sense strand
acgccgagauggaguucaa

SEQ ID NO: 1676064 - RNA, 19 nt, Homo sapiens
  misc_RNA (1)...(19): siRNA sense strand
gccaucgcuucccgcauga

SEQ ID NO: 1676065 - RNA, 19 nt, Homo sapiens
  misc_RNA (1)...(19): siRNA sense strand
gccgagauggaguucaauu

SEQ ID NO: 1676066 - RNA, 19 nt, Homo sapiens
  misc_RNA (1)...(19): siRNA sense strand
cgagauggaguucaauugc

SEQ ID NO: 1676067 - RNA, 19 nt, Homo sapiens
  misc_RNA (1)...(19): siRNA sense strand
ugaggaucgucaccaugga

SEQ ID NO: 1676068 - RNA, 19 nt, Homo sapiens
  misc_RNA (1)...(19): siRNA sense strand
ccgagauggaguucaauug

SEQ ID NO: 1676069 - RNA, 19 nt, Homo sapiens
  misc_RNA (1)...(19): siRNA sense strand
ggaagcaacccaagacguu

SEQ ID NO: 1676070 - RNA, 19 nt, Homo sapiens
  misc_RNA (1)...(19): siRNA sense strand
agaagcagauuuuagauga

SEQ ID NO: 1676071 - RNA, 19 nt, Homo sapiens
  misc_RNA (1)...(19): siRNA sense strand
gaagcagauuuuagaugaa

SEQ ID NO: 1676072 - RNA, 19 nt, Homo sapiens
  misc_RNA (1)...(19): siRNA sense strand
caccauggacgccgagaug

SEQ ID NO: 1676073 - RNA, 19 nt, Homo sapiens
  misc_RNA (1)...(19): siRNA sense strand
acgccgagauggaguucaa

SEQ ID NO: 1676074 - RNA, 19 nt, Homo sapiens
  misc_RNA (1)...(19): siRNA sense strand
gccaucgcuucccgcauga

SEQ ID NO: 1676075 - RNA, 19 nt, Homo sapiens
  misc_RNA (1)...(19): siRNA sense strand
gccgagauggaguucaauu

SEQ ID NO: 1676076 - RNA, 19 nt, Homo sapiens
  misc_RNA (1)...(19): siRNA sense strand
cgagauggaguucaauugc

SEQ ID NO: 1676077 - RNA, 19 nt, Homo sapiens
  misc_RNA (1)...(19): siRNA sense strand
ugaggaucgucaccaugga

SEQ ID NO: 1676078 - RNA, 19 nt, Homo sapiens
  misc_RNA (1)...(19): siRNA sense strand
ccgagauggaguucaauug

SEQ ID NO: 1676079 - RNA, 19 nt, Homo sapiens
  misc_RNA (1)...(19): siRNA sense strand
ggaagcaacccaagacguu

SEQ ID NO: 1676080 - RNA, 19 nt, Homo sapiens
  misc_RNA (1)...(19): siRNA sense strand
agaagcagauuuuagauga

SEQ ID NO: 1676081 - RNA, 19 nt, Homo sapiens
  misc_RNA (1)...(19): siRNA sense strand
gaagcagauuuuagaugaa

SEQ ID NO: 1676082 - RNA, 19 nt, Homo sapiens
  misc_RNA (1)...(19): siRNA sense strand
caccauggacgccgagaug

SEQ ID NO: 1676083 - RNA, 19 nt, Homo sapiens
  misc_RNA (1)...(19): siRNA sense strand
acgccgagauggaguucaa

SEQ ID NO: 1676084 - RNA, 19 nt, Homo sapiens
  misc_RNA (1)...(19): siRNA sense strand
gccaucgcuucccgcauga

SEQ ID NO: 1676085 - RNA, 19 nt, Homo sapiens
  misc_RNA (1)...(19): siRNA sense strand
gccgagauggaguucaauu

SEQ ID NO: 1676086 - RNA, 19 nt, Homo sapiens
  misc_RNA (1)...(19): siRNA sense strand
cgagauggaguucaauugc

SEQ ID NO: 1676087 - RNA, 19 nt, Homo sapiens
  misc_RNA (1)...(19): siRNA sense strand
ugaggaucgucaccaugga

SEQ ID NO: 1676088 - RNA, 19 nt, Homo sapiens
  misc_RNA (1)...(19): siRNA sense strand
ccgagauggaguucaauug

SEQ ID NO: 1676089 - RNA, 19 nt, Homo sapiens
  misc_RNA (1)...(19): siRNA sense strand
ggaagcaacccaagacguu

SEQ ID NO: 1676090 - RNA, 19 nt, Homo sapiens
  misc_RNA (1)...(19): siRNA sense strand
agaagcagauuuuagauga

SEQ ID NO: 1676091 - RNA, 19 nt, Homo sapiens
  misc_RNA (1)...(19): siRNA sense strand
gaagcagauuuuagaugaa

SEQ ID NO: 1676092 - RNA, 19 nt, Homo sapiens
  misc_RNA (1)...(19): siRNA sense strand
caccauggacgccgagaug

SEQ ID NO: 1676093 - RNA, 19 nt, Homo sapiens
  misc_RNA (1)...(19): siRNA sense strand
acgccgagauggaguucaa

SEQ ID NO: 1676094 - RNA, 19 nt, Homo sapiens
  misc_RNA (1)...(19): siRNA sense strand
gccaucgcuucccgcauga

SEQ ID NO: 1676095 - RNA, 19 nt, Homo sapiens
  misc_RNA (1)...(19): siRNA sense strand
gccgagauggaguucaauu

SEQ ID NO: 1676096 - RNA, 19 nt, Homo sapiens
  misc_RNA (1)...(19): siRNA sense strand
cgagauggaguucaauugc

SEQ ID NO: 1676097 - RNA, 19 nt, Homo sapiens
  misc_RNA (1)...(19): siRNA sense strand
ugaggaucgucaccaugga

SEQ ID NO: 1676098 - RNA, 19 nt, Homo sapiens
  misc_RNA (1)...(19): siRNA sense strand
ccgagauggaguucaauug

SEQ ID NO: 1676099 - RNA, 19 nt, Homo sapiens
  misc_RNA (1)...(19): siRNA sense strand
ggaagcaacccaagacguu

SEQ ID NO: 1676100 - RNA, 19 nt, Homo sapiens
  misc_RNA (1)...(19): siRNA sense strand
agaagcagauuuuagauga

SEQ ID NO: 1676101 - RNA, 19 nt, Homo sapiens
  misc_RNA (1)...(19): siRNA sense strand
gaagcagauuuuagaugaa

SEQ ID NO: 1676102 - RNA, 19 nt, Homo sapiens
  misc_RNA (1)...(19): siRNA sense strand
caccauggacgccgagaug

SEQ ID NO: 1676103 - RNA, 19 nt, Homo sapiens
  misc_RNA (1)...(19): siRNA sense strand
acgccgagauggaguucaa

SEQ ID NO: 1676104 - RNA, 19 nt, Homo sapiens
  misc_RNA (1)...(19): siRNA sense strand
gccaucgcuucccgcauga

SEQ ID NO: 1676105 - RNA, 19 nt, Homo sapiens
  misc_RNA (1)...(19): siRNA sense strand
gccgagauggaguucaauu

SEQ ID NO: 1676106 - RNA, 19 nt, Homo sapiens
  misc_RNA (1)...(19): siRNA sense strand
cgagauggaguucaauugc

SEQ ID NO: 1676107 - RNA, 19 nt, Homo sapiens
  misc_RNA (1)...(19): siRNA sense strand
ugaggaucgucaccaugga

SEQ ID NO: 1676108 - RNA, 19 nt, Homo sapiens
  misc_RNA (1)...(19): siRNA sense strand
ccgagauggaguucaauug

SEQ ID NO: 1676109 - RNA, 19 nt, Homo sapiens
  misc_RNA (1)...(19): siRNA sense strand
ggaagcaacccaagacguu

SEQ ID NO: 1676110 - RNA, 19 nt, Homo sapiens
  misc_RNA (1)...(19): siRNA sense strand
agaagcagauuuuagauga

SEQ ID NO: 1676111 - RNA, 19 nt, Homo sapiens
  misc_RNA (1)...(19): siRNA sense strand
gaagcagauuuuagaugaa

SEQ ID NO: 1676112 - RNA, 19 nt, Homo sapiens
  misc_RNA (1)...(19): siRNA sense strand
caccauggacgccgagaug

SEQ ID NO: 1676113 - RNA, 19 nt, Homo sapiens
  misc_RNA (1)...(19): siRNA sense strand
acgccgagauggaguucaa

SEQ ID NO: 1676114 - RNA, 19 nt, Homo sapiens
  misc_RNA (1)...(19): siRNA sense strand
gccaucgcuucccgcauga

SEQ ID NO: 1676115 - RNA, 19 nt, Homo sapiens
  misc_RNA (1)...(19): siRNA sense strand
gccgagauggaguucaauu

SEQ ID NO: 1676116 - RNA, 19 nt, Homo sapiens
  misc_RNA (1)...(19): siRNA sense strand
cgagauggaguucaauugc

SEQ ID NO: 1676117 - RNA, 19 nt, Homo sapiens
  misc_RNA (1)...(19): siRNA sense strand
ugaggaucgucaccaugga

SEQ ID NO: 1676118 - RNA, 19 nt, Homo sapiens
  misc_RNA (1)...(19): siRNA sense strand
ccgagauggaguucaauug

SEQ ID NO: 1676119 - RNA, 19 nt, Homo sapiens
  misc_RNA (1)...(19): siRNA sense strand
ggaagcaacccaagacguu

SEQ ID NO: 1676120 - RNA, 19 nt, Homo sapiens
  misc_RNA (1)...(19): siRNA sense strand
agaagcagauuuuagauga

SEQ ID NO: 1676121 - RNA, 19 nt, Homo sapiens
  misc_RNA (1)...(19): siRNA sense strand
gaagcagauuuuagaugaa

SEQ ID NO: 1676122 - RNA, 19 nt, Homo sapiens
  misc_RNA (1)...(19): siRNA sense strand
caccauggacgccgagaug

SEQ ID NO: 1676123 - RNA, 19 nt, Homo sapiens
  misc_RNA (1)...(19): siRNA sense strand
acgccgagauggaguucaa

SEQ ID NO: 1676124 - RNA, 19 nt, Homo sapiens
  misc_RNA (1)...(19): siRNA sense strand
gccaucgcuucccgcauga

SEQ ID NO: 1676125 - RNA, 19 nt, Homo sapiens
  misc_RNA (1)...(19): siRNA sense strand
gccgagauggaguucaauu

SEQ ID NO: 1676126 - RNA, 19 nt, Homo sapiens
  misc_RNA (1)...(19): siRNA sense strand
cgagauggaguucaauugc

SEQ ID NO: 1676127 - RNA, 19 nt, Homo sapiens
  misc_RNA (1)...(19): siRNA sense strand
ugaggaucgucaccaugga

SEQ ID NO: 1676128 - RNA, 19 nt, Homo sapiens
  misc_RNA (1)...(19): siRNA sense strand
ccgagauggaguucaauug

SEQ ID NO: 1676129 - RNA, 19 nt, Homo sapiens
  misc_RNA (1)...(19): siRNA sense strand
ggaagcaacccaagacguu

SEQ ID NO: 1676130 - RNA, 19 nt, Homo sapiens
  misc_RNA (1)...(19): siRNA sense strand
agaagcagauuuuagauga

SEQ ID NO: 1676131 - RNA, 19 nt, Homo sapiens
  misc_RNA (1)...(19): siRNA sense strand
gaagcagauuuuagaugaa

SEQ ID NO: 1676132 - RNA, 19 nt, Homo sapiens
  misc_RNA (1)...(19): siRNA sense strand
caccauggacgccgagaug

SEQ ID NO: 1676133 - RNA, 19 nt, Homo sapiens
  misc_RNA (1)...(19): siRNA sense strand
acgccgagauggaguucaa

SEQ ID NO: 1676134 - RNA, 19 nt, Homo sapiens
  misc_RNA (1)...(19): siRNA sense strand
gccaucgcuucccgcauga

SEQ ID NO: 1676135 - RNA, 19 nt, Homo sapiens
  misc_RNA (1)...(19): siRNA sense strand
gccgagauggaguucaauu

SEQ ID NO: 1676136 - RNA, 19 nt, Homo sapiens
  misc_RNA (1)...(19): siRNA sense strand
cgagauggaguucaauugc

SEQ ID NO: 1676137 - RNA, 19 nt, Homo sapiens
  misc_RNA (1)...(19): siRNA sense strand
ugaggaucgucaccaugga

SEQ ID NO: 1676138 - RNA, 19 nt, Homo sapiens
  misc_RNA (1)...(19): siRNA sense strand
ccgagauggaguucaauug

SEQ ID NO: 1676139 - RNA, 19 nt, Homo sapiens
  misc_RNA (1)...(19): siRNA sense strand
ggaagcaacccaagacguu

SEQ ID NO: 1676140 - RNA, 19 nt, Homo sapiens
  misc_RNA (1)...(19): siRNA sense strand
agaagcagauuuuagauga

SEQ ID NO: 1676141 - RNA, 19 nt, Homo sapiens
  misc_RNA (1)...(19): siRNA sense strand
gaagcagauuuuagaugaa

SEQ ID NO: 1676142 - RNA, 19 nt, Homo sapiens
  misc_RNA (1)...(19): siRNA sense strand
caccauggacgccgagaug

SEQ ID NO: 1676143 - RNA, 19 nt, Homo sapiens
  misc_RNA (1)...(19): siRNA sense strand
acgccgagauggaguucaa

SEQ ID NO: 1676144 - RNA, 19 nt, Homo sapiens
  misc_RNA (1)...(19): siRNA sense strand
gccaucgcuucccgcauga

SEQ ID NO: 1676145 - RNA, 19 nt, Homo sapiens
  misc_RNA (1)...(19): siRNA sense strand
gccgagauggaguucaauu

SEQ ID NO: 1676146 - RNA, 19 nt, Homo sapiens
  misc_RNA (1)...(19): siRNA sense strand
cgagauggaguucaauugc

SEQ ID NO: 1676147 - RNA, 19 nt, Homo sapiens
  misc_RNA (1)...(19): siRNA sense strand
ugaggaucgucaccaugga

SEQ ID NO: 1676148 - RNA, 19 nt, Homo sapiens
  misc_RNA (1)...(19): siRNA sense strand
ccgagauggaguucaauug

SEQ ID NO: 1676149 - RNA, 19 nt, Homo sapiens
  misc_RNA (1)...(19): siRNA sense strand
ccagagaucuucaacauga

SEQ ID NO: 1676150 - RNA, 19 nt, Homo sapiens
  misc_RNA (1)...(19): siRNA sense strand
gaaguacacucauuucauc

SEQ ID NO: 1676151 - RNA, 19 nt, Homo sapiens
  misc_RNA (1)...(19): siRNA sense strand
ccacugaaccugaccauug

SEQ ID NO: 1676152 - RNA, 19 nt, Homo sapiens
  misc_RNA (1)...(19): siRNA sense strand
gcccagagaucuucaacau

SEQ ID NO: 1676153 - RNA, 19 nt, Homo sapiens
  misc_RNA (1)...(19): siRNA sense strand
acaugaagcugcacuacaa

SEQ ID NO: 1676154 - RNA, 19 nt, Homo sapiens
  misc_RNA (1)...(19): siRNA sense strand
caaacaagccguccaaggu

SEQ ID NO: 1676155 - RNA, 19 nt, Homo sapiens
  misc_RNA (1)...(19): siRNA sense strand
ggaaguacacucauuucau

SEQ ID NO: 1676156 - RNA, 19 nt, Homo sapiens
  misc_RNA (1)...(19): siRNA sense strand
ggguguaucuugagaacug

SEQ ID NO: 1676157 - RNA, 19 nt, Homo sapiens
  misc_RNA (1)...(19): siRNA sense strand
gguaccgggugcacuacua

SEQ ID NO: 1676158 - RNA, 19 nt, Homo sapiens
  misc_RNA (1)...(19): siRNA sense strand
gcagguggccaggguauau

SEQ ID NO: 1676159 - RNA, 19 nt, Homo sapiens
  misc_RNA (1)...(19): siRNA sense strand
ggagucagccgaggaguuc

SEQ ID NO: 1676160 - RNA, 19 nt, Homo sapiens
  misc_RNA (1)...(19): siRNA sense strand
uaugagcgcaggcguguuu

SEQ ID NO: 1676161 - RNA, 19 nt, Homo sapiens
  misc_RNA (1)...(19): siRNA sense strand
acuacuacaucuucacuga

SEQ ID NO: 1676162 - RNA, 19 nt, Homo sapiens
  misc_RNA (1)...(19): siRNA sense strand
gccaggguauaugaguuua

SEQ ID NO: 1676163 - RNA, 19 nt, Homo sapiens
  misc_RNA (1)...(19): siRNA sense strand
gaaccgucacuucaucuca

SEQ ID NO: 1676164 - RNA, 19 nt, Homo sapiens
  misc_RNA (1)...(19): siRNA sense strand
ggccaggguauaugaguuu

SEQ ID NO: 1676165 - RNA, 19 nt, Homo sapiens
  misc_RNA (1)...(19): siRNA sense strand
uuucuacacuggacaagga

SEQ ID NO: 1676166 - RNA, 19 nt, Homo sapiens
  misc_RNA (1)...(19): siRNA sense strand
ucuccuauguccccuauua

SEQ ID NO: 1676167 - RNA, 19 nt, Homo sapiens
  misc_RNA (1)...(19): siRNA sense strand
gggaaguacacucauuuca

SEQ ID NO: 1676168 - RNA, 19 nt, Homo sapiens
  misc_RNA (1)...(19): siRNA sense strand
ggaggaaagccaccugaac

SEQ ID NO: 1676169 - RNA, 19 nt, Homo sapiens
  misc_RNA (1)...(19): siRNA sense strand
gaccaucagccagcacauu

SEQ ID NO: 1676170 - RNA, 19 nt, Homo sapiens
  misc_RNA (1)...(19): siRNA sense strand
uacuacaucuucacugaca

SEQ ID NO: 1676171 - RNA, 19 nt, Homo sapiens
  misc_RNA (1)...(19): siRNA sense strand
ggguauaugaguuuacuag

SEQ ID NO: 1676172 - RNA, 19 nt, Homo sapiens
  misc_RNA (1)...(19): siRNA sense strand
ucaguguccugugggugua

SEQ ID NO: 1676173 - RNA, 19 nt, Homo sapiens
  misc_RNA (1)...(19): siRNA sense strand
cacugaaccugaccauugg

SEQ ID NO: 1676174 - RNA, 19 nt, Homo sapiens
  misc_RNA (1)...(19): siRNA sense strand
gcacuacuacaucuucacu

SEQ ID NO: 1676175 - RNA, 19 nt, Homo sapiens
  misc_RNA (1)...(19): siRNA sense strand
gugcacuacuacaucuuca

SEQ ID NO: 1676176 - RNA, 19 nt, Homo sapiens
  misc_RNA (1)...(19): siRNA sense strand
aaccgucacuucaucucaa

SEQ ID NO: 1676177 - RNA, 19 nt, Homo sapiens
  misc_RNA (1)...(19): siRNA sense strand
gggaggaaagccaccugaa

SEQ ID NO: 1676178 - RNA, 19 nt, Homo sapiens
  misc_RNA (1)...(19): siRNA sense strand
guggguaccgggugcacua

SEQ ID NO: 1676179 - RNA, 19 nt, Homo sapiens
  misc_RNA (1)...(19): siRNA sense strand
caacaugaagcugcacuac

SEQ ID NO: 1676180 - RNA, 19 nt, Homo sapiens
  misc_RNA (1)...(19): siRNA sense strand
ccaccugaaccgucacuuc

SEQ ID NO: 1676181 - RNA, 19 nt, Homo sapiens
  misc_RNA (1)...(19): siRNA sense strand
gccagcaguuccccuauga

SEQ ID NO: 1676182 - RNA, 19 nt, Homo sapiens
  misc_RNA (1)...(19): siRNA sense strand
uggccaggguauaugaguu

SEQ ID NO: 1676183 - RNA, 19 nt, Homo sapiens
  misc_RNA (1)...(19): siRNA sense strand
caggguauaugaguuuacu

SEQ ID NO: 1676184 - RNA, 19 nt, Homo sapiens
  misc_RNA (1)...(19): siRNA sense strand
ggacaagacucuggacauu

SEQ ID NO: 1676185 - RNA, 19 nt, Homo sapiens
  misc_RNA (1)...(19): siRNA sense strand
gaaagaaacccugcggaua

SEQ ID NO: 1676186 - RNA, 19 nt, Homo sapiens
  misc_RNA (1)...(19): siRNA sense strand
gaggaaagcaugaaagaaa

SEQ ID NO: 1676187 - RNA, 19 nt, Homo sapiens
  misc_RNA (1)...(19): siRNA sense strand
acaagacucuggacauuaa

SEQ ID NO: 1676188 - RNA, 19 nt, Homo sapiens
  misc_RNA (1)...(19): siRNA sense strand
aaagaaacccugcggauaa

SEQ ID NO: 1676189 - RNA, 19 nt, Homo sapiens
  misc_RNA (1)...(19): siRNA sense strand
gaucgugucuuccauagca

SEQ ID NO: 1676190 - RNA, 19 nt, Homo sapiens
  misc_RNA (1)...(19): siRNA sense strand
ccaagacccuggccauaga

SEQ ID NO: 1676191 - RNA, 19 nt, Homo sapiens
  misc_RNA (1)...(19): siRNA sense strand
gacaagacucuggacauua

SEQ ID NO: 1676192 - RNA, 19 nt, Homo sapiens
  misc_RNA (1)...(19): siRNA sense strand
gcaccuggacuuaucaaga

SEQ ID NO: 1676193 - RNA, 19 nt, Homo sapiens
  misc_RNA (1)...(19): siRNA sense strand
gugcuggcaucgugucuuu

SEQ ID NO: 1676194 - RNA, 19 nt, Homo sapiens
  misc_RNA (1)...(19): siRNA sense strand
caaggaacauuagggugaa

SEQ ID NO: 1676195 - RNA, 19 nt, Homo sapiens
  misc_RNA (1)...(19): siRNA sense strand
ugucaacccuuucuuugga

SEQ ID NO: 1676196 - RNA, 19 nt, Homo sapiens
  misc_RNA (1)...(19): siRNA sense strand
gaaacccugcggauaagaa

SEQ ID NO: 1676197 - RNA, 19 nt, Homo sapiens
  misc_RNA (1)...(19): siRNA sense strand
gcaggaugcucuggaugga

SEQ ID NO: 1676198 - RNA, 19 nt, Homo sapiens
  misc_RNA (1)...(19): siRNA sense strand
gaggaggugugggacaaga

SEQ ID NO: 1676199 - RNA, 19 nt, Homo sapiens
  misc_RNA (1)...(19): siRNA sense strand
gaccaagacccuggccaua

SEQ ID NO: 1676200 - RNA, 19 nt, Homo sapiens
  misc_RNA (1)...(19): siRNA sense strand
ccuagcaccuggacuuauc

SEQ ID NO: 1676201 - RNA, 19 nt, Homo sapiens
  misc_RNA (1)...(19): siRNA sense strand
ggacuuaucaagacuagcu

SEQ ID NO: 1676202 - RNA, 19 nt, Homo sapiens
  misc_RNA (1)...(19): siRNA sense strand
gcugucaacccuuucuuug

SEQ ID NO: 1676203 - RNA, 19 nt, Homo sapiens
  misc_RNA (1)...(19): siRNA sense strand
ggugaucgugucuuccaua

SEQ ID NO: 1676204 - RNA, 19 nt, Homo sapiens
  misc_RNA (1)...(19): siRNA sense strand
gcucugaagaugccagcua

SEQ ID NO: 1676205 - RNA, 19 nt, Homo sapiens
  misc_RNA (1)...(19): siRNA sense strand
gaagcuucauggagguauc

SEQ ID NO: 1676206 - RNA, 19 nt, Homo sapiens
  misc_RNA (1)...(19): siRNA sense strand
ucauggagguaucgauauc

SEQ ID NO: 1676207 - RNA, 19 nt, Homo sapiens
  misc_RNA (1)...(19): siRNA sense strand
gccggaagcagcagaaugu

SEQ ID NO: 1676208 - RNA, 19 nt, Homo sapiens
  misc_RNA (1)...(19): siRNA sense strand
ucuccuggcuucaguccuu

SEQ ID NO: 1676209 - RNA, 19 nt, Homo sapiens
  misc_RNA (1)...(19): siRNA sense strand
ggccacggcugugaagcuu

SEQ ID NO: 1676210 - RNA, 19 nt, Homo sapiens
  misc_RNA (1)...(19): siRNA sense strand
cuucauggagguaucgaua

SEQ ID NO: 1676211 - RNA, 19 nt, Homo sapiens
  misc_RNA (1)...(19): siRNA sense strand
uggcuucaguccuuacaau

SEQ ID NO: 1676212 - RNA, 19 nt, Homo sapiens
  misc_RNA (1)...(19): siRNA sense strand
caccuggacuuaucaagac

SEQ ID NO: 1676213 - RNA, 19 nt, Homo sapiens
  misc_RNA (1)...(19): siRNA sense strand
gugaucgugucuuccauag

SEQ ID NO: 1676214 - RNA, 19 nt, Homo sapiens
  misc_RNA (1)...(19): siRNA sense strand
aagaggaaagcaugaaaga

SEQ ID NO: 1676215 - RNA, 19 nt, Homo sapiens
  misc_RNA (1)...(19): siRNA sense strand
gauauccuagucuccaaug

SEQ ID NO: 1676216 - RNA, 19 nt, Homo sapiens
  misc_RNA (1)...(19): siRNA sense strand
aagaaacccugcggauaag

SEQ ID NO: 1676217 - RNA, 19 nt, Homo sapiens
  misc_RNA (1)...(19): siRNA sense strand
gucaacccuuucuuuggaa

SEQ ID NO: 1676218 - RNA, 19 nt, Homo sapiens
  misc_RNA (1)...(19): siRNA sense strand
ugucuuuccugugcucuga

SEQ ID NO: 1676219 - RNA, 19 nt, Homo sapiens
  misc_RNA (1)...(19): siRNA sense strand
gggacaagacucuggacau

SEQ ID NO: 1676220 - RNA, 19 nt, Homo sapiens
  misc_RNA (1)...(19): siRNA sense strand
uaggcgagccagaggauug

SEQ ID NO: 1676221 - RNA, 19 nt, Homo sapiens
  misc_RNA (1)...(19): siRNA sense strand
cuucaguccuuacaauguc

SEQ ID NO: 1676222 - RNA, 19 nt, Homo sapiens
  misc_RNA (1)...(19): siRNA sense strand
gcuucaguccuuacaaugu

SEQ ID NO: 1676223 - RNA, 19 nt, Homo sapiens
  misc_RNA (1)...(19): siRNA sense strand
aauaagguggcccugguaa

SEQ ID NO: 1676224 - RNA, 19 nt, Homo sapiens
  misc_RNA (1)...(19): siRNA sense strand
aggaaagcaugaaagaaac

SEQ ID NO: 1676225 - RNA, 19 nt, Homo sapiens
  misc_RNA (1)...(19): siRNA sense strand
caguggugaucgugucuuc

SEQ ID NO: 1676226 - RNA, 19 nt, Homo sapiens
  misc_RNA (1)...(19): siRNA sense strand
augcugcugucaacccuuu

SEQ ID NO: 1676227 - RNA, 19 nt, Homo sapiens
  misc_RNA (1)...(19): siRNA sense strand
gcaguggugccagaaaugg

SEQ ID NO: 1676228 - RNA, 19 nt, Homo sapiens
  misc_RNA (1)...(19): siRNA sense strand
cugaggaggugugggacaa

SEQ ID NO: 1676229 - RNA, 19 nt, Homo sapiens
  misc_RNA (1)...(19): siRNA sense strand
ugccagaaauggagaaacg

SEQ ID NO: 1676230 - RNA, 19 nt, Homo sapiens
  misc_RNA (1)...(19): siRNA sense strand
ggaggaaacacaauuauua

SEQ ID NO: 1676231 - RNA, 19 nt, Homo sapiens
  misc_RNA (1)...(19): siRNA sense strand
ggacugcuguguagauaua

SEQ ID NO: 1676232 - RNA, 19 nt, Homo sapiens
  misc_RNA (1)...(19): siRNA sense strand
gaaggaggaaacacaauua

SEQ ID NO: 1676233 - RNA, 19 nt, Homo sapiens
  misc_RNA (1)...(19): siRNA sense strand
gcuaaagauuguccagaua

SEQ ID NO: 1676234 - RNA, 19 nt, Homo sapiens
  misc_RNA (1)...(19): siRNA sense strand
ugagaugucuucauaaguu

SEQ ID NO: 1676235 - RNA, 19 nt, Homo sapiens
  misc_RNA (1)...(19): siRNA sense strand
guaagaagcaaaccaaauu

SEQ ID NO: 1676236 - RNA, 19 nt, Homo sapiens
  misc_RNA (1)...(19): siRNA sense strand
gaacuucauugacugucua

SEQ ID NO: 1676237 - RNA, 19 nt, Homo sapiens
  misc_RNA (1)...(19): siRNA sense strand
guccagauaugaaacauuu

SEQ ID NO: 1676238 - RNA, 19 nt, Homo sapiens
  misc_RNA (1)...(19): siRNA sense strand
aaagaucucucugccaaua

SEQ ID NO: 1676239 - RNA, 19 nt, Homo sapiens
  misc_RNA (1)...(19): siRNA sense strand
gaacugaugaccauacuug

SEQ ID NO: 1676240 - RNA, 19 nt, Homo sapiens
  misc_RNA (1)...(19): siRNA sense strand
cagcacagcuaagagaaua

SEQ ID NO: 1676241 - RNA, 19 nt, Homo sapiens
  misc_RNA (1)...(19): siRNA sense strand
gaaaugaaggaguuaagaa

SEQ ID NO: 1676242 - RNA, 19 nt, Homo sapiens
  misc_RNA (1)...(19): siRNA sense strand
ccucuucucuucccaagua

SEQ ID NO: 1676243 - RNA, 19 nt, Homo sapiens
  misc_RNA (1)...(19): siRNA sense strand
ugacuacgguacucgauaa

SEQ ID NO: 1676244 - RNA, 19 nt, Homo sapiens
  misc_RNA (1)...(19): siRNA sense strand
gucaacaucuccaugaauu

SEQ ID NO: 1676245 - RNA, 19 nt, Homo sapiens
  misc_RNA (1)...(19): siRNA sense strand
agacagaccucuaucaucu

SEQ ID NO: 1676246 - RNA, 19 nt, Homo sapiens
  misc_RNA (1)...(19): siRNA sense strand
gaaguaagaagcaaaccaa

SEQ ID NO: 1676247 - RNA, 19 nt, Homo sapiens
  misc_RNA (1)...(19): siRNA sense strand
uauuagagcuguuucugaa

SEQ ID NO: 1676248 - RNA, 19 nt, Homo sapiens
  misc_RNA (1)...(19): siRNA sense strand
ugucacagaucaugauuug

SEQ ID NO: 1676249 - RNA, 19 nt, Homo sapiens
  misc_RNA (1)...(19): siRNA sense strand
cagaaguccuuauuggaaa

SEQ ID NO: 1676250 - RNA, 19 nt, Homo sapiens
  misc_RNA (1)...(19): siRNA sense strand
ggcaaaggaugaacugaug

SEQ ID NO: 1676251 - RNA, 19 nt, Homo sapiens
  misc_RNA (1)...(19): siRNA sense strand
gaaaagaacauaugggauu

SEQ ID NO: 1676252 - RNA, 19 nt, Homo sapiens
  misc_RNA (1)...(19): siRNA sense strand
ugaaggauauggaaagcuu

SEQ ID NO: 1676253 - RNA, 19 nt, Homo sapiens
  misc_RNA (1)...(19): siRNA sense strand
ucuaaggguugcuuuguuu

SEQ ID NO: 1676254 - RNA, 19 nt, Homo sapiens
  misc_RNA (1)...(19): siRNA sense strand
gacuucagcuuucucuauu

SEQ ID NO: 1676255 - RNA, 19 nt, Homo sapiens
  misc_RNA (1)...(19): siRNA sense strand
ggacuucagcuuucucuau

SEQ ID NO: 1676256 - RNA, 19 nt, Homo sapiens
  misc_RNA (1)...(19): siRNA sense strand
ggaauagccacaucuccua

SEQ ID NO: 1676257 - RNA, 19 nt, Homo sapiens
  misc_RNA (1)...(19): siRNA sense strand
gagaaaauguugugaacuu

SEQ ID NO: 1676258 - RNA, 19 nt, Homo sapiens
  misc_RNA (1)...(19): siRNA sense strand
agacacagccucuccauga

SEQ ID NO: 1676259 - RNA, 19 nt, Homo sapiens
  misc_RNA (1)...(19): siRNA sense strand
caccauauguagucucauu

SEQ ID NO: 1676260 - RNA, 19 nt, Homo sapiens
  misc_RNA (1)...(19): siRNA sense strand
gaccauacuugagaaaugu

SEQ ID NO: 1676261 - RNA, 19 nt, Homo sapiens
  misc_RNA (1)...(19): siRNA sense strand
gcagucaacaucuccauga

SEQ ID NO: 1676262 - RNA, 19 nt, Homo sapiens
  misc_RNA (1)...(19): siRNA sense strand
cauacaaacugcaccuaga

SEQ ID NO: 1676263 - RNA, 19 nt, Homo sapiens
  misc_RNA (1)...(19): siRNA sense strand
gaagacagaccucuaucau

SEQ ID NO: 1676264 - RNA, 19 nt, Homo sapiens
  misc_RNA (1)...(19): siRNA sense strand
uaaagauuguccagauaug

SEQ ID NO: 1676265 - RNA, 19 nt, Homo sapiens
  misc_RNA (1)...(19): siRNA sense strand
gcaguaucaucucuauugu

SEQ ID NO: 1676266 - RNA, 19 nt, Homo sapiens
  misc_RNA (1)...(19): siRNA sense strand
ccaaagaggaggaaagugu

SEQ ID NO: 1676267 - RNA, 19 nt, Homo sapiens
  misc_RNA (1)...(19): siRNA sense strand
uaaguguccugugcuguaa

SEQ ID NO: 1676268 - RNA, 19 nt, Homo sapiens
  misc_RNA (1)...(19): siRNA sense strand
ggaaaugaaggaguuaaga

SEQ ID NO: 1676269 - RNA, 19 nt, Homo sapiens
  misc_RNA (1)...(19): siRNA sense strand
ggaguaugcaucagucuug

SEQ ID NO: 1676270 - RNA, 19 nt, Homo sapiens
  misc_RNA (1)...(19): siRNA sense strand
gaguuaagaagaaguaaga

SEQ ID NO: 1676271 - RNA, 19 nt, Homo sapiens
  misc_RNA (1)...(19): siRNA sense strand
ugaccauacuugagaaaug

SEQ ID NO: 1676272 - RNA, 19 nt, Homo sapiens
  misc_RNA (1)...(19): siRNA sense strand
guaaggagcaccugacuac

SEQ ID NO: 1676273 - RNA, 19 nt, Homo sapiens
  misc_RNA (1)...(19): siRNA sense strand
ccaaagaaagacacauuau

SEQ ID NO: 1676274 - RNA, 19 nt, Homo sapiens
  misc_RNA (1)...(19): siRNA sense strand
ucagaaguccuuauuggaa

SEQ ID NO: 1676275 - RNA, 19 nt, Homo sapiens
  misc_RNA (1)...(19): siRNA sense strand
gaucaugauuugacauucg

SEQ ID NO: 1676276 - RNA, 19 nt, Homo sapiens
  misc_RNA (1)...(19): siRNA sense strand
acagaagacugaccaugug

SEQ ID NO: 1676277 - RNA, 19 nt, Homo sapiens
  misc_RNA (1)...(19): siRNA sense strand
gaucagagaguuguacugu

SEQ ID NO: 1676278 - RNA, 19 nt, Homo sapiens
  misc_RNA (1)...(19): siRNA sense strand
ccaaugagagauauuugaa

SEQ ID NO: 1676279 - RNA, 19 nt, Homo sapiens
  misc_RNA (1)...(19): siRNA sense strand
caugauuucucaguucaaa

SEQ ID NO: 1676280 - RNA, 19 nt, Homo sapiens
  misc_RNA (1)...(19): siRNA sense strand
uaucaugauuucucaguuc

SEQ ID NO: 1676281 - RNA, 19 nt, Homo sapiens
  misc_RNA (1)...(19): siRNA sense strand
guacuacaagacuucauaa

SEQ ID NO: 1676282 - RNA, 19 nt, Homo sapiens
  misc_RNA (1)...(19): siRNA sense strand
gaccauguggcaagacuaa

SEQ ID NO: 1676283 - RNA, 19 nt, Homo sapiens
  misc_RNA (1)...(19): siRNA sense strand
caagaaugaagcacugaaa

SEQ ID NO: 1676284 - RNA, 19 nt, Homo sapiens
  misc_RNA (1)...(19): siRNA sense strand
gagaugucuucauaaguuc

SEQ ID NO: 1676285 - RNA, 19 nt, Homo sapiens
  misc_RNA (1)...(19): siRNA sense strand
caacaucuccaugaauuuc

SEQ ID NO: 1676286 - RNA, 19 nt, Homo sapiens
  misc_RNA (1)...(19): siRNA sense strand
acucaacaauccuuacuau

SEQ ID NO: 1676287 - RNA, 19 nt, Homo sapiens
  misc_RNA (1)...(19): siRNA sense strand
ccacaucuccuauuaucau

SEQ ID NO: 1676288 - RNA, 19 nt, Homo sapiens
  misc_RNA (1)...(19): siRNA sense strand
gcgacuacaagaggaauua

SEQ ID NO: 1676289 - RNA, 19 nt, Homo sapiens
  misc_RNA (1)...(19): siRNA sense strand
gcaaaggaugaacugauga

SEQ ID NO: 1676290 - RNA, 19 nt, Homo sapiens
  misc_RNA (1)...(19): siRNA sense strand
gaugaaaucugaaaaugag

SEQ ID NO: 1676291 - RNA, 19 nt, Homo sapiens
  misc_RNA (1)...(19): siRNA sense strand
aaguugaucucacaguuga

SEQ ID NO: 1676292 - RNA, 19 nt, Homo sapiens
  misc_RNA (1)...(19): siRNA sense strand
caaauuugaaguacucaga

SEQ ID NO: 1676293 - RNA, 19 nt, Homo sapiens
  misc_RNA (1)...(19): siRNA sense strand
uccaaucuuugucuuguaa

SEQ ID NO: 1676294 - RNA, 19 nt, Homo sapiens
  misc_RNA (1)...(19): siRNA sense strand
caaagaggaggaaaguguu

SEQ ID NO: 1676295 - RNA, 19 nt, Homo sapiens
  misc_RNA (1)...(19): siRNA sense strand
cagaagaauucaagagacu

SEQ ID NO: 1676296 - RNA, 19 nt, Homo sapiens
  misc_RNA (1)...(19): siRNA sense strand
ugaaggaggaaacacaauu

SEQ ID NO: 1676297 - RNA, 19 nt, Homo sapiens
  misc_RNA (1)...(19): siRNA sense strand
uaaugucacaccauaugua

SEQ ID NO: 1676298 - RNA, 19 nt, Homo sapiens
  misc_RNA (1)...(19): siRNA sense strand
gaguguagcaggcucauca

SEQ ID NO: 1676299 - RNA, 19 nt, Homo sapiens
  misc_RNA (1)...(19): siRNA sense strand
cuaagagaauagaggaguu

SEQ ID NO: 1676300 - RNA, 19 nt, Homo sapiens
  misc_RNA (1)...(19): siRNA sense strand
ccacaaaaguacuacaaga

SEQ ID NO: 1676301 - RNA, 19 nt, Homo sapiens
  misc_RNA (1)...(19): siRNA sense strand
gaauaaugucacaccauau

SEQ ID NO: 1676302 - RNA, 19 nt, Homo sapiens
  misc_RNA (1)...(19): siRNA sense strand
ggacaguaagcuucgauuc

SEQ ID NO: 1676303 - RNA, 19 nt, Homo sapiens
  misc_RNA (1)...(19): siRNA sense strand
gaagaaguaagaagcaaac

SEQ ID NO: 1676304 - RNA, 19 nt, Homo sapiens
  misc_RNA (1)...(19): siRNA sense strand
uauuggaaaugaaggaguu

SEQ ID NO: 1676305 - RNA, 19 nt, Homo sapiens
  misc_RNA (1)...(19): siRNA sense strand
gcacagcuaagagaauaga

SEQ ID NO: 1676306 - RNA, 19 nt, Homo sapiens
  misc_RNA (1)...(19): siRNA sense strand
gaggaaacacaauuauuac

SEQ ID NO: 1676307 - RNA, 19 nt, Homo sapiens
  misc_RNA (1)...(19): siRNA sense strand
guccugugcuguaaucuuc

SEQ ID NO: 1676308 - RNA, 19 nt, Homo sapiens
  misc_RNA (1)...(19): siRNA sense strand
uaucaucucuauugugcau

SEQ ID NO: 1676309 - RNA, 19 nt, Homo sapiens
  misc_RNA (1)...(19): siRNA sense strand
cuaaagauuguccagauau

SEQ ID NO: 1676310 - RNA, 19 nt, Homo sapiens
  misc_RNA (1)...(19): siRNA sense strand
cuaccaaacagaagacuga

SEQ ID NO: 1676311 - RNA, 19 nt, Homo sapiens
  misc_RNA (1)...(19): siRNA sense strand
uccaugaggugguguacuu

SEQ ID NO: 1676312 - RNA, 19 nt, Homo sapiens
  misc_RNA (1)...(19): siRNA sense strand
guuuugagaugucuucaua

SEQ ID NO: 1676313 - RNA, 19 nt, Homo sapiens
  misc_RNA (1)...(19): siRNA sense strand
cugcauguuuaucauauga

SEQ ID NO: 1676314 - RNA, 19 nt, Homo sapiens
  misc_RNA (1)...(19): siRNA sense strand
gaaaacauccgacgucuac

SEQ ID NO: 1676315 - RNA, 19 nt, Homo sapiens
  misc_RNA (1)...(19): siRNA sense strand
gaaugucacagaucaugau

SEQ ID NO: 1676316 - RNA, 19 nt, Homo sapiens
  misc_RNA (1)...(19): siRNA sense strand
cccaaagaaagacacauua

SEQ ID NO: 1676317 - RNA, 19 nt, Homo sapiens
  misc_RNA (1)...(19): siRNA sense strand
ccucagaagaaaugaauga

SEQ ID NO: 1676318 - RNA, 19 nt, Homo sapiens
  misc_RNA (1)...(19): siRNA sense strand
cgaauugcccuccauacug

SEQ ID NO: 1676319 - RNA, 19 nt, Homo sapiens
  misc_RNA (1)...(19): siRNA sense strand
augaaggaguuaagaagaa

SEQ ID NO: 1676320 - RNA, 19 nt, Homo sapiens
  misc_RNA (1)...(19): siRNA sense strand
ucagaagacagaccucuau

SEQ ID NO: 1676321 - RNA, 19 nt, Homo sapiens
  misc_RNA (1)...(19): siRNA sense strand
guaucaugauuucucaguu

SEQ ID NO: 1676322 - RNA, 19 nt, Homo sapiens
  misc_RNA (1)...(19): siRNA sense strand
uauuacagguucugaccaa

SEQ ID NO: 1676323 - RNA, 19 nt, Homo sapiens
  misc_RNA (1)...(19): siRNA sense strand
cugauugaauuucugcaaa

SEQ ID NO: 1676324 - RNA, 19 nt, Homo sapiens
  misc_RNA (1)...(19): siRNA sense strand
acagaccucuaucaucuuc

SEQ ID NO: 1676325 - RNA, 19 nt, Homo sapiens
  misc_RNA (1)...(19): siRNA sense strand
cuucauaaguucaccucuu

SEQ ID NO: 1676326 - RNA, 19 nt, Homo sapiens
  misc_RNA (1)...(19): siRNA sense strand
augaauuacuuccugguuu

SEQ ID NO: 1676327 - RNA, 19 nt, Homo sapiens
  misc_RNA (1)...(19): siRNA sense strand
uuaaguguccugugcugua

SEQ ID NO: 1676328 - RNA, 19 nt, Homo sapiens
  misc_RNA (1)...(19): siRNA sense strand
caugcaguaucaucucuau

SEQ ID NO: 1676329 - RNA, 19 nt, Homo sapiens
  misc_RNA (1)...(19): siRNA sense strand
aauuauccaugcucgguuu

SEQ ID NO: 1676330 - RNA, 19 nt, Homo sapiens
  misc_RNA (1)...(19): siRNA sense strand
ggaggaaacacaauuauua

SEQ ID NO: 1676331 - RNA, 19 nt, Homo sapiens
  misc_RNA (1)...(19): siRNA sense strand
ggacugcuguguagauaua

SEQ ID NO: 1676332 - RNA, 19 nt, Homo sapiens
  misc_RNA (1)...(19): siRNA sense strand
gaaggaggaaacacaauua

SEQ ID NO: 1676333 - RNA, 19 nt, Homo sapiens
  misc_RNA (1)...(19): siRNA sense strand
gcuaaagauuguccagaua

SEQ ID NO: 1676334 - RNA, 19 nt, Homo sapiens
  misc_RNA (1)...(19): siRNA sense strand
ugagaugucuucauaaguu

SEQ ID NO: 1676335 - RNA, 19 nt, Homo sapiens
  misc_RNA (1)...(19): siRNA sense strand
guaagaagcaaaccaaauu

SEQ ID NO: 1676336 - RNA, 19 nt, Homo sapiens
  misc_RNA (1)...(19): siRNA sense strand
gaacuucauugacugucua

SEQ ID NO: 1676337 - RNA, 19 nt, Homo sapiens
  misc_RNA (1)...(19): siRNA sense strand
guccagauaugaaacauuu

SEQ ID NO: 1676338 - RNA, 19 nt, Homo sapiens
  misc_RNA (1)...(19): siRNA sense strand
aaagaucucucugccaaua

SEQ ID NO: 1676339 - RNA, 19 nt, Homo sapiens
  misc_RNA (1)...(19): siRNA sense strand
gaacugaugaccauacuug

SEQ ID NO: 1676340 - RNA, 19 nt, Homo sapiens
  misc_RNA (1)...(19): siRNA sense strand
cagcacagcuaagagaaua

SEQ ID NO: 1676341 - RNA, 19 nt, Homo sapiens
  misc_RNA (1)...(19): siRNA sense strand
gaaaugaaggaguuaagaa

SEQ ID NO: 1676342 - RNA, 19 nt, Homo sapiens
  misc_RNA (1)...(19): siRNA sense strand
ccucuucucuucccaagua

SEQ ID NO: 1676343 - RNA, 19 nt, Homo sapiens
  misc_RNA (1)...(19): siRNA sense strand
ugacuacgguacucgauaa

SEQ ID NO: 1676344 - RNA, 19 nt, Homo sapiens
  misc_RNA (1)...(19): siRNA sense strand
gucaacaucuccaugaauu

SEQ ID NO: 1676345 - RNA, 19 nt, Homo sapiens
  misc_RNA (1)...(19): siRNA sense strand
agacagaccucuaucaucu

SEQ ID NO: 1676346 - RNA, 19 nt, Homo sapiens
  misc_RNA (1)...(19): siRNA sense strand
gaaguaagaagcaaaccaa

SEQ ID NO: 1676347 - RNA, 19 nt, Homo sapiens
  misc_RNA (1)...(19): siRNA sense strand
uauuagagcuguuucugaa

SEQ ID NO: 1676348 - RNA, 19 nt, Homo sapiens
  misc_RNA (1)...(19): siRNA sense strand
ugucacagaucaugauuug

SEQ ID NO: 1676349 - RNA, 19 nt, Homo sapiens
  misc_RNA (1)...(19): siRNA sense strand
cagaaguccuuauuggaaa

SEQ ID NO: 1676350 - RNA, 19 nt, Homo sapiens
  misc_RNA (1)...(19): siRNA sense strand
ggcaaaggaugaacugaug

SEQ ID NO: 1676351 - RNA, 19 nt, Homo sapiens
  misc_RNA (1)...(19): siRNA sense strand
gaaaagaacauaugggauu

SEQ ID NO: 1676352 - RNA, 19 nt, Homo sapiens
  misc_RNA (1)...(19): siRNA sense strand
ugaaggauauggaaagcuu

SEQ ID NO: 1676353 - RNA, 19 nt, Homo sapiens
  misc_RNA (1)...(19): siRNA sense strand
ucuaaggguugcuuuguuu

SEQ ID NO: 1676354 - RNA, 19 nt, Homo sapiens
  misc_RNA (1)...(19): siRNA sense strand
gacuucagcuuucucuauu

SEQ ID NO: 1676355 - RNA, 19 nt, Homo sapiens
  misc_RNA (1)...(19): siRNA sense strand
ggacuucagcuuucucuau

SEQ ID NO: 1676356 - RNA, 19 nt, Homo sapiens
  misc_RNA (1)...(19): siRNA sense strand
ggaauagccacaucuccua

SEQ ID NO: 1676357 - RNA, 19 nt, Homo sapiens
  misc_RNA (1)...(19): siRNA sense strand
gagaaaauguugugaacuu

SEQ ID NO: 1676358 - RNA, 19 nt, Homo sapiens
  misc_RNA (1)...(19): siRNA sense strand
agacacagccucuccauga

SEQ ID NO: 1676359 - RNA, 19 nt, Homo sapiens
  misc_RNA (1)...(19): siRNA sense strand
caccauauguagucucauu

SEQ ID NO: 1676360 - RNA, 19 nt, Homo sapiens
  misc_RNA (1)...(19): siRNA sense strand
gaccauacuugagaaaugu

SEQ ID NO: 1676361 - RNA, 19 nt, Homo sapiens
  misc_RNA (1)...(19): siRNA sense strand
gcagucaacaucuccauga

SEQ ID NO: 1676362 - RNA, 19 nt, Homo sapiens
  misc_RNA (1)...(19): siRNA sense strand
cauacaaacugcaccuaga

SEQ ID NO: 1676363 - RNA, 19 nt, Homo sapiens
  misc_RNA (1)...(19): siRNA sense strand
gaagacagaccucuaucau

SEQ ID NO: 1676364 - RNA, 19 nt, Homo sapiens
  misc_RNA (1)...(19): siRNA sense strand
uaaagauuguccagauaug

SEQ ID NO: 1676365 - RNA, 19 nt, Homo sapiens
  misc_RNA (1)...(19): siRNA sense strand
gcaguaucaucucuauugu

SEQ ID NO: 1676366 - RNA, 19 nt, Homo sapiens
  misc_RNA (1)...(19): siRNA sense strand
ccaaagaggaggaaagugu

SEQ ID NO: 1676367 - RNA, 19 nt, Homo sapiens
  misc_RNA (1)...(19): siRNA sense strand
uaaguguccugugcuguaa

SEQ ID NO: 1676368 - RNA, 19 nt, Homo sapiens
  misc_RNA (1)...(19): siRNA sense strand
ggaaaugaaggaguuaaga

SEQ ID NO: 1676369 - RNA, 19 nt, Homo sapiens
  misc_RNA (1)...(19): siRNA sense strand
ggaguaugcaucagucuug

SEQ ID NO: 1676370 - RNA, 19 nt, Homo sapiens
  misc_RNA (1)...(19): siRNA sense strand
gaguuaagaagaaguaaga

SEQ ID NO: 1676371 - RNA, 19 nt, Homo sapiens
  misc_RNA (1)...(19): siRNA sense strand
ugaccauacuugagaaaug

SEQ ID NO: 1676372 - RNA, 19 nt, Homo sapiens
  misc_RNA (1)...(19): siRNA sense strand
guaaggagcaccugacuac

SEQ ID NO: 1676373 - RNA, 19 nt, Homo sapiens
  misc_RNA (1)...(19): siRNA sense strand
ccaaagaaagacacauuau

SEQ ID NO: 1676374 - RNA, 19 nt, Homo sapiens
  misc_RNA (1)...(19): siRNA sense strand
ucagaaguccuuauuggaa

SEQ ID NO: 1676375 - RNA, 19 nt, Homo sapiens
  misc_RNA (1)...(19): siRNA sense strand
gaucaugauuugacauucg

SEQ ID NO: 1676376 - RNA, 19 nt, Homo sapiens
  misc_RNA (1)...(19): siRNA sense strand
acagaagacugaccaugug

SEQ ID NO: 1676377 - RNA, 19 nt, Homo sapiens
  misc_RNA (1)...(19): siRNA sense strand
gaucagagaguuguacugu

SEQ ID NO: 1676378 - RNA, 19 nt, Homo sapiens
  misc_RNA (1)...(19): siRNA sense strand
ccaaugagagauauuugaa

SEQ ID NO: 1676379 - RNA, 19 nt, Homo sapiens
  misc_RNA (1)...(19): siRNA sense strand
caugauuucucaguucaaa

SEQ ID NO: 1676380 - RNA, 19 nt, Homo sapiens
  misc_RNA (1)...(19): siRNA sense strand
uaucaugauuucucaguuc

SEQ ID NO: 1676381 - RNA, 19 nt, Homo sapiens
  misc_RNA (1)...(19): siRNA sense strand
guacuacaagacuucauaa

SEQ ID NO: 1676382 - RNA, 19 nt, Homo sapiens
  misc_RNA (1)...(19): siRNA sense strand
gaccauguggcaagacuaa

SEQ ID NO: 1676383 - RNA, 19 nt, Homo sapiens
  misc_RNA (1)...(19): siRNA sense strand
caagaaugaagcacugaaa

SEQ ID NO: 1676384 - RNA, 19 nt, Homo sapiens
  misc_RNA (1)...(19): siRNA sense strand
gagaugucuucauaaguuc

SEQ ID NO: 1676385 - RNA, 19 nt, Homo sapiens
  misc_RNA (1)...(19): siRNA sense strand
caacaucuccaugaauuuc

SEQ ID NO: 1676386 - RNA, 19 nt, Homo sapiens
  misc_RNA (1)...(19): siRNA sense strand
acucaacaauccuuacuau

SEQ ID NO: 1676387 - RNA, 19 nt, Homo sapiens
  misc_RNA (1)...(19): siRNA sense strand
ccacaucuccuauuaucau

SEQ ID NO: 1676388 - RNA, 19 nt, Homo sapiens
  misc_RNA (1)...(19): siRNA sense strand
gcgacuacaagaggaauua

SEQ ID NO: 1676389 - RNA, 19 nt, Homo sapiens
  misc_RNA (1)...(19): siRNA sense strand
gcaaaggaugaacugauga

SEQ ID NO: 1676390 - RNA, 19 nt, Homo sapiens
  misc_RNA (1)...(19): siRNA sense strand
gaugaaaucugaaaaugag

SEQ ID NO: 1676391 - RNA, 19 nt, Homo sapiens
  misc_RNA (1)...(19): siRNA sense strand
aaguugaucucacaguuga

SEQ ID NO: 1676392 - RNA, 19 nt, Homo sapiens
  misc_RNA (1)...(19): siRNA sense strand
caaauuugaaguacucaga

SEQ ID NO: 1676393 - RNA, 19 nt, Homo sapiens
  misc_RNA (1)...(19): siRNA sense strand
uccaaucuuugucuuguaa

SEQ ID NO: 1676394 - RNA, 19 nt, Homo sapiens
  misc_RNA (1)...(19): siRNA sense strand
caaagaggaggaaaguguu

SEQ ID NO: 1676395 - RNA, 19 nt, Homo sapiens
  misc_RNA (1)...(19): siRNA sense strand
cagaagaauucaagagacu

SEQ ID NO: 1676396 - RNA, 19 nt, Homo sapiens
  misc_RNA (1)...(19): siRNA sense strand
ugaaggaggaaacacaauu

SEQ ID NO: 1676397 - RNA, 19 nt, Homo sapiens
  misc_RNA (1)...(19): siRNA sense strand
uaaugucacaccauaugua

SEQ ID NO: 1676398 - RNA, 19 nt, Homo sapiens
  misc_RNA (1)...(19): siRNA sense strand
gaguguagcaggcucauca

SEQ ID NO: 1676399 - RNA, 19 nt, Homo sapiens
  misc_RNA (1)...(19): siRNA sense strand
cuaagagaauagaggaguu

SEQ ID NO: 1676400 - RNA, 19 nt, Homo sapiens
  misc_RNA (1)...(19): siRNA sense strand
ccacaaaaguacuacaaga

SEQ ID NO: 1676401 - RNA, 19 nt, Homo sapiens
  misc_RNA (1)...(19): siRNA sense strand
gaauaaugucacaccauau

SEQ ID NO: 1676402 - RNA, 19 nt, Homo sapiens
  misc_RNA (1)...(19): siRNA sense strand
ggacaguaagcuucgauuc

SEQ ID NO: 1676403 - RNA, 19 nt, Homo sapiens
  misc_RNA (1)...(19): siRNA sense strand
gaagaaguaagaagcaaac

SEQ ID NO: 1676404 - RNA, 19 nt, Homo sapiens
  misc_RNA (1)...(19): siRNA sense strand
uauuggaaaugaaggaguu

SEQ ID NO: 1676405 - RNA, 19 nt, Homo sapiens
  misc_RNA (1)...(19): siRNA sense strand
gcacagcuaagagaauaga

SEQ ID NO: 1676406 - RNA, 19 nt, Homo sapiens
  misc_RNA (1)...(19): siRNA sense strand
gaggaaacacaauuauuac

SEQ ID NO: 1676407 - RNA, 19 nt, Homo sapiens
  misc_RNA (1)...(19): siRNA sense strand
guccugugcuguaaucuuc

SEQ ID NO: 1676408 - RNA, 19 nt, Homo sapiens
  misc_RNA (1)...(19): siRNA sense strand
uaucaucucuauugugcau

SEQ ID NO: 1676409 - RNA, 19 nt, Homo sapiens
  misc_RNA (1)...(19): siRNA sense strand
cuaaagauuguccagauau

SEQ ID NO: 1676410 - RNA, 19 nt, Homo sapiens
  misc_RNA (1)...(19): siRNA sense strand
cuaccaaacagaagacuga

SEQ ID NO: 1676411 - RNA, 19 nt, Homo sapiens
  misc_RNA (1)...(19): siRNA sense strand
uccaugaggugguguacuu

SEQ ID NO: 1676412 - RNA, 19 nt, Homo sapiens
  misc_RNA (1)...(19): siRNA sense strand
guuuugagaugucuucaua

SEQ ID NO: 1676413 - RNA, 19 nt, Homo sapiens
  misc_RNA (1)...(19): siRNA sense strand
cugcauguuuaucauauga

SEQ ID NO: 1676414 - RNA, 19 nt, Homo sapiens
  misc_RNA (1)...(19): siRNA sense strand
gaaaacauccgacgucuac

SEQ ID NO: 1676415 - RNA, 19 nt, Homo sapiens
  misc_RNA (1)...(19): siRNA sense strand
gaaugucacagaucaugau

SEQ ID NO: 1676416 - RNA, 19 nt, Homo sapiens
  misc_RNA (1)...(19): siRNA sense strand
cccaaagaaagacacauua

SEQ ID NO: 1676417 - RNA, 19 nt, Homo sapiens
  misc_RNA (1)...(19): siRNA sense strand
ccucagaagaaaugaauga

SEQ ID NO: 1676418 - RNA, 19 nt, Homo sapiens
  misc_RNA (1)...(19): siRNA sense strand
cgaauugcccuccauacug

SEQ ID NO: 1676419 - RNA, 19 nt, Homo sapiens
  misc_RNA (1)...(19): siRNA sense strand
augaaggaguuaagaagaa

SEQ ID NO: 1676420 - RNA, 19 nt, Homo sapiens
  misc_RNA (1)...(19): siRNA sense strand
ucagaagacagaccucuau

SEQ ID NO: 1676421 - RNA, 19 nt, Homo sapiens
  misc_RNA (1)...(19): siRNA sense strand
guaucaugauuucucaguu

SEQ ID NO: 1676422 - RNA, 19 nt, Homo sapiens
  misc_RNA (1)...(19): siRNA sense strand
uauuacagguucugaccaa

SEQ ID NO: 1676423 - RNA, 19 nt, Homo sapiens
  misc_RNA (1)...(19): siRNA sense strand
cugauugaauuucugcaaa

SEQ ID NO: 1676424 - RNA, 19 nt, Homo sapiens
  misc_RNA (1)...(19): siRNA sense strand
acagaccucuaucaucuuc

SEQ ID NO: 1676425 - RNA, 19 nt, Homo sapiens
  misc_RNA (1)...(19): siRNA sense strand
cuucauaaguucaccucuu

SEQ ID NO: 1676426 - RNA, 19 nt, Homo sapiens
  misc_RNA (1)...(19): siRNA sense strand
augaauuacuuccugguuu

SEQ ID NO: 1676427 - RNA, 19 nt, Homo sapiens
  misc_RNA (1)...(19): siRNA sense strand
uuaaguguccugugcugua

SEQ ID NO: 1676428 - RNA, 19 nt, Homo sapiens
  misc_RNA (1)...(19): siRNA sense strand
caugcaguaucaucucuau

SEQ ID NO: 1676429 - RNA, 19 nt, Homo sapiens
  misc_RNA (1)...(19): siRNA sense strand
aauuauccaugcucgguuu

SEQ ID NO: 1676430 - RNA, 19 nt, Homo sapiens
  misc_RNA (1)...(19): siRNA sense strand
gaaggagaaugacaaauua

SEQ ID NO: 1676431 - RNA, 19 nt, Homo sapiens
  misc_RNA (1)...(19): siRNA sense strand
gaacuuaacucugaaauug

SEQ ID NO: 1676432 - RNA, 19 nt, Homo sapiens
  misc_RNA (1)...(19): siRNA sense strand
gcaaggaucugaauuuguu

SEQ ID NO: 1676433 - RNA, 19 nt, Homo sapiens
  misc_RNA (1)...(19): siRNA sense strand
gaaauggucugcucccaaa

SEQ ID NO: 1676434 - RNA, 19 nt, Homo sapiens
  misc_RNA (1)...(19): siRNA sense strand
gagaacaccuugaugguaa

SEQ ID NO: 1676435 - RNA, 19 nt, Homo sapiens
  misc_RNA (1)...(19): siRNA sense strand
gaaagaagaugcucgaaag

SEQ ID NO: 1676436 - RNA, 19 nt, Homo sapiens
  misc_RNA (1)...(19): siRNA sense strand
gaucaaacaucuaacagaa

SEQ ID NO: 1676437 - RNA, 19 nt, Homo sapiens
  misc_RNA (1)...(19): siRNA sense strand
agaagaaggugcauucaua

SEQ ID NO: 1676438 - RNA, 19 nt, Homo sapiens
  misc_RNA (1)...(19): siRNA sense strand
guucagagcuucauaguuc

SEQ ID NO: 1676439 - RNA, 19 nt, Homo sapiens
  misc_RNA (1)...(19): siRNA sense strand
gagaaagcguuuagaagaa

SEQ ID NO: 1676440 - RNA, 19 nt, Homo sapiens
  misc_RNA (1)...(19): siRNA sense strand
uggaagaucuccuaacuaa

SEQ ID NO: 1676441 - RNA, 19 nt, Homo sapiens
  misc_RNA (1)...(19): siRNA sense strand
caaagaagcuacgagauug

SEQ ID NO: 1676442 - RNA, 19 nt, Homo sapiens
  misc_RNA (1)...(19): siRNA sense strand
gcaaagaagcuacgagauu

SEQ ID NO: 1676443 - RNA, 19 nt, Homo sapiens
  misc_RNA (1)...(19): siRNA sense strand
gcaaugaagugaaugaaag

SEQ ID NO: 1676444 - RNA, 19 nt, Homo sapiens
  misc_RNA (1)...(19): siRNA sense strand
gagauugacucugagauuu

SEQ ID NO: 1676445 - RNA, 19 nt, Homo sapiens
  misc_RNA (1)...(19): siRNA sense strand
gcucaggagugaaggcuua

SEQ ID NO: 1676446 - RNA, 19 nt, Homo sapiens
  misc_RNA (1)...(19): siRNA sense strand
ugagaaggccacauuauua

SEQ ID NO: 1676447 - RNA, 19 nt, Homo sapiens
  misc_RNA (1)...(19): siRNA sense strand
gaaaugaacacccagaaug

SEQ ID NO: 1676448 - RNA, 19 nt, Homo sapiens
  misc_RNA (1)...(19): siRNA sense strand
gaaacaaucaucagacuau

SEQ ID NO: 1676449 - RNA, 19 nt, Homo sapiens
  misc_RNA (1)...(19): siRNA sense strand
gaaaagaaguugcaaaaca

SEQ ID NO: 1676450 - RNA, 19 nt, Homo sapiens
  misc_RNA (1)...(19): siRNA sense strand
ugacaaauaucccauggaa

SEQ ID NO: 1676451 - RNA, 19 nt, Homo sapiens
  misc_RNA (1)...(19): siRNA sense strand
caaacacgauggugacaaa

SEQ ID NO: 1676452 - RNA, 19 nt, Homo sapiens
  misc_RNA (1)...(19): siRNA sense strand
gaagaaggugcauucauaa

SEQ ID NO: 1676453 - RNA, 19 nt, Homo sapiens
  misc_RNA (1)...(19): siRNA sense strand
aaagagaaauugcuacaga

SEQ ID NO: 1676454 - RNA, 19 nt, Homo sapiens
  misc_RNA (1)...(19): siRNA sense strand
uccauaaucugcagaauaa

SEQ ID NO: 1676455 - RNA, 19 nt, Homo sapiens
  misc_RNA (1)...(19): siRNA sense strand
gcuacgagauugacucuga

SEQ ID NO: 1676456 - RNA, 19 nt, Homo sapiens
  misc_RNA (1)...(19): siRNA sense strand
gaaauucgaacuuugagaa

SEQ ID NO: 1676457 - RNA, 19 nt, Homo sapiens
  misc_RNA (1)...(19): siRNA sense strand
cagauacgauucauuaguu

SEQ ID NO: 1676458 - RNA, 19 nt, Homo sapiens
  misc_RNA (1)...(19): siRNA sense strand
gaagaggaccugagagaga

SEQ ID NO: 1676459 - RNA, 19 nt, Homo sapiens
  misc_RNA (1)...(19): siRNA sense strand
gaggaaaccuggagcuuag

SEQ ID NO: 1676460 - RNA, 19 nt, Homo sapiens
  misc_RNA (1)...(19): siRNA sense strand
ggacagugaucagcaaaga

SEQ ID NO: 1676461 - RNA, 19 nt, Homo sapiens
  misc_RNA (1)...(19): siRNA sense strand
ggucaaaucucugcaggaa

SEQ ID NO: 1676462 - RNA, 19 nt, Homo sapiens
  misc_RNA (1)...(19): siRNA sense strand
gcaaaaccaucuucucuaa

SEQ ID NO: 1676463 - RNA, 19 nt, Homo sapiens
  misc_RNA (1)...(19): siRNA sense strand
aaggugaacuuguacauuu

SEQ ID NO: 1676464 - RNA, 19 nt, Homo sapiens
  misc_RNA (1)...(19): siRNA sense strand
gaagcaagauaaugagaca

SEQ ID NO: 1676465 - RNA, 19 nt, Homo sapiens
  misc_RNA (1)...(19): siRNA sense strand
gugcugagcugcuggagaa

SEQ ID NO: 1676466 - RNA, 19 nt, Homo sapiens
  misc_RNA (1)...(19): siRNA sense strand
gaagagcacaggagacuga

SEQ ID NO: 1676467 - RNA, 19 nt, Homo sapiens
  misc_RNA (1)...(19): siRNA sense strand
gaacaugaaggacuuugaa

SEQ ID NO: 1676468 - RNA, 19 nt, Homo sapiens
  misc_RNA (1)...(19): siRNA sense strand
uugaagaacuuaacucuga

SEQ ID NO: 1676469 - RNA, 19 nt, Homo sapiens
  misc_RNA (1)...(19): siRNA sense strand
ucacugaauugaagaaaga

SEQ ID NO: 1676470 - RNA, 19 nt, Homo sapiens
  misc_RNA (1)...(19): siRNA sense strand
guagaagcauuaagaagau

SEQ ID NO: 1676471 - RNA, 19 nt, Homo sapiens
  misc_RNA (1)...(19): siRNA sense strand
gaagagaaaccgaucaaca

SEQ ID NO: 1676472 - RNA, 19 nt, Homo sapiens
  misc_RNA (1)...(19): siRNA sense strand
ucaaaucucugcaggaauc

SEQ ID NO: 1676473 - RNA, 19 nt, Homo sapiens
  misc_RNA (1)...(19): siRNA sense strand
gcucugcgcuugcaacuag

SEQ ID NO: 1676474 - RNA, 19 nt, Homo sapiens
  misc_RNA (1)...(19): siRNA sense strand
uaaaggauccagagauaaa

SEQ ID NO: 1676475 - RNA, 19 nt, Homo sapiens
  misc_RNA (1)...(19): siRNA sense strand
acaaggaaauggacaguga

SEQ ID NO: 1676476 - RNA, 19 nt, Homo sapiens
  misc_RNA (1)...(19): siRNA sense strand
gagaagacaccuaagcaaa

SEQ ID NO: 1676477 - RNA, 19 nt, Homo sapiens
  misc_RNA (1)...(19): siRNA sense strand
gaagaucuccuaacuaaaa

SEQ ID NO: 1676478 - RNA, 19 nt, Homo sapiens
  misc_RNA (1)...(19): siRNA sense strand
gucaagagcugggaacaaa

SEQ ID NO: 1676479 - RNA, 19 nt, Homo sapiens
  misc_RNA (1)...(19): siRNA sense strand
cagaauaaguucagagauc

SEQ ID NO: 1676480 - RNA, 19 nt, Homo sapiens
  misc_RNA (1)...(19): siRNA sense strand
ccaaaugugucagaagaaa

SEQ ID NO: 1676481 - RNA, 19 nt, Homo sapiens
  misc_RNA (1)...(19): siRNA sense strand
gagaaagacagacugauug

SEQ ID NO: 1676482 - RNA, 19 nt, Homo sapiens
  misc_RNA (1)...(19): siRNA sense strand
caaaugagacagaauacuu

SEQ ID NO: 1676483 - RNA, 19 nt, Homo sapiens
  misc_RNA (1)...(19): siRNA sense strand
gcaccuggcugccuagaag

SEQ ID NO: 1676484 - RNA, 19 nt, Homo sapiens
  misc_RNA (1)...(19): siRNA sense strand
uaacagaaaguaccaauca

SEQ ID NO: 1676485 - RNA, 19 nt, Homo sapiens
  misc_RNA (1)...(19): siRNA sense strand
caagugaucaaacaucuaa

SEQ ID NO: 1676486 - RNA, 19 nt, Homo sapiens
  misc_RNA (1)...(19): siRNA sense strand
caacuuaaccuaccaacau

SEQ ID NO: 1676487 - RNA, 19 nt, Homo sapiens
  misc_RNA (1)...(19): siRNA sense strand
gagauaaacagaaggagaa

SEQ ID NO: 1676488 - RNA, 19 nt, Homo sapiens
  misc_RNA (1)...(19): siRNA sense strand
cucaugcgcucucugauua

SEQ ID NO: 1676489 - RNA, 19 nt, Homo sapiens
  misc_RNA (1)...(19): siRNA sense strand
agucuaagauuucagauug

SEQ ID NO: 1676490 - RNA, 19 nt, Homo sapiens
  misc_RNA (1)...(19): siRNA sense strand
ggagaacaccuugauggua

SEQ ID NO: 1676491 - RNA, 19 nt, Homo sapiens
  misc_RNA (1)...(19): siRNA sense strand
gggagagacuggagaagga

SEQ ID NO: 1676492 - RNA, 19 nt, Homo sapiens
  misc_RNA (1)...(19): siRNA sense strand
ugagaaagcguuuagaaga

SEQ ID NO: 1676493 - RNA, 19 nt, Homo sapiens
  misc_RNA (1)...(19): siRNA sense strand
gaacugauggagaggauug

SEQ ID NO: 1676494 - RNA, 19 nt, Homo sapiens
  misc_RNA (1)...(19): siRNA sense strand
agaaagagcaggacaucua

SEQ ID NO: 1676495 - RNA, 19 nt, Homo sapiens
  misc_RNA (1)...(19): siRNA sense strand
gaaagagcaggacaucuau

SEQ ID NO: 1676496 - RNA, 19 nt, Homo sapiens
  misc_RNA (1)...(19): siRNA sense strand
cauuugaucuguuugauuc

SEQ ID NO: 1676497 - RNA, 19 nt, Homo sapiens
  misc_RNA (1)...(19): siRNA sense strand
ggaaagaaugcaacaggaa

SEQ ID NO: 1676498 - RNA, 19 nt, Homo sapiens
  misc_RNA (1)...(19): siRNA sense strand
auuaaaggauccagagaua

SEQ ID NO: 1676499 - RNA, 19 nt, Homo sapiens
  misc_RNA (1)...(19): siRNA sense strand
aauacaagcugcagaagga

SEQ ID NO: 1676500 - RNA, 19 nt, Homo sapiens
  misc_RNA (1)...(19): siRNA sense strand
gcacacggagucuaagauu

SEQ ID NO: 1676501 - RNA, 19 nt, Homo sapiens
  misc_RNA (1)...(19): siRNA sense strand
ucaaacaucuaacagaaag

SEQ ID NO: 1676502 - RNA, 19 nt, Homo sapiens
  misc_RNA (1)...(19): siRNA sense strand
caucaaagccuccaaagca

SEQ ID NO: 1676503 - RNA, 19 nt, Homo sapiens
  misc_RNA (1)...(19): siRNA sense strand
gaaagaaugcaacaggaau

SEQ ID NO: 1676504 - RNA, 19 nt, Homo sapiens
  misc_RNA (1)...(19): siRNA sense strand
ccacugagcaaguuuguga

SEQ ID NO: 1676505 - RNA, 19 nt, Homo sapiens
  misc_RNA (1)...(19): siRNA sense strand
gaaagaaggcagcgagaag

SEQ ID NO: 1676506 - RNA, 19 nt, Homo sapiens
  misc_RNA (1)...(19): siRNA sense strand
gaacacauacaggaaauuc

SEQ ID NO: 1676507 - RNA, 19 nt, Homo sapiens
  misc_RNA (1)...(19): siRNA sense strand
aggaacagcugaaucaaug

SEQ ID NO: 1676508 - RNA, 19 nt, Homo sapiens
  misc_RNA (1)...(19): siRNA sense strand
aaacugagaagacaccuaa

SEQ ID NO: 1676509 - RNA, 19 nt, Homo sapiens
  misc_RNA (1)...(19): siRNA sense strand
aaagagggauaaagccauu

SEQ ID NO: 1676510 - RNA, 19 nt, Homo sapiens
  misc_RNA (1)...(19): siRNA sense strand
ccacugaacauaucuacaa

SEQ ID NO: 1676511 - RNA, 19 nt, Homo sapiens
  misc_RNA (1)...(19): siRNA sense strand
cauggaaagugauaauuca

SEQ ID NO: 1676512 - RNA, 19 nt, Homo sapiens
  misc_RNA (1)...(19): siRNA sense strand
acacgauggugacaaauau

SEQ ID NO: 1676513 - RNA, 19 nt, Homo sapiens
  misc_RNA (1)...(19): siRNA sense strand
agaaggagaaugacaaauu

SEQ ID NO: 1676514 - RNA, 19 nt, Homo sapiens
  misc_RNA (1)...(19): siRNA sense strand
uaucagaauuugcggaaga

SEQ ID NO: 1676515 - RNA, 19 nt, Homo sapiens
  misc_RNA (1)...(19): siRNA sense strand
ggacaucuauacccaucug

SEQ ID NO: 1676516 - RNA, 19 nt, Homo sapiens
  misc_RNA (1)...(19): siRNA sense strand
gagcagaucagcgaaauuc

SEQ ID NO: 1676517 - RNA, 19 nt, Homo sapiens
  misc_RNA (1)...(19): siRNA sense strand
cagcugcucucacagaaug

SEQ ID NO: 1676518 - RNA, 19 nt, Homo sapiens
  misc_RNA (1)...(19): siRNA sense strand
gauugaggaagacaacuua

SEQ ID NO: 1676519 - RNA, 19 nt, Homo sapiens
  misc_RNA (1)...(19): siRNA sense strand
caacagagaggcuaagaag

SEQ ID NO: 1676520 - RNA, 19 nt, Homo sapiens
  misc_RNA (1)...(19): siRNA sense strand
gguuucaaguggaacauuu

SEQ ID NO: 1676521 - RNA, 19 nt, Homo sapiens
  misc_RNA (1)...(19): siRNA sense strand
gcacaaauggagcaucaga

SEQ ID NO: 1676522 - RNA, 19 nt, Homo sapiens
  misc_RNA (1)...(19): siRNA sense strand
ucucaagacuuacuaaugg

SEQ ID NO: 1676523 - RNA, 19 nt, Homo sapiens
  misc_RNA (1)...(19): siRNA sense strand
gaggaugacgagauuaauu

SEQ ID NO: 1676524 - RNA, 19 nt, Homo sapiens
  misc_RNA (1)...(19): siRNA sense strand
gcacagacccaggaauuuc

SEQ ID NO: 1676525 - RNA, 19 nt, Homo sapiens
  misc_RNA (1)...(19): siRNA sense strand
auaaagccauucaggguuu

SEQ ID NO: 1676526 - RNA, 19 nt, Homo sapiens
  misc_RNA (1)...(19): siRNA sense strand
gagcauuaauaccucaaau

SEQ ID NO: 1676527 - RNA, 19 nt, Homo sapiens
  misc_RNA (1)...(19): siRNA sense strand
gaaaggagcaucgaaacca

SEQ ID NO: 1676528 - RNA, 19 nt, Homo sapiens
  misc_RNA (1)...(19): siRNA sense strand
augaaaggcugcagaaaga

SEQ ID NO: 1676529 - RNA, 19 nt, Homo sapiens
  misc_RNA (1)...(19): siRNA sense strand
gcagugaggccauaauuac

SEQ ID NO: 1676530 - RNA, 19 nt, Homo sapiens
  misc_RNA (1)...(19): siRNA sense strand
gcagcaagcuuaguuauaa

SEQ ID NO: 1676531 - RNA, 19 nt, Homo sapiens
  misc_RNA (1)...(19): siRNA sense strand
gaaaccaucuugcaugcua

SEQ ID NO: 1676532 - RNA, 19 nt, Homo sapiens
  misc_RNA (1)...(19): siRNA sense strand
aaaggaaggucaucauauu

SEQ ID NO: 1676533 - RNA, 19 nt, Homo sapiens
  misc_RNA (1)...(19): siRNA sense strand
guuauuaccuggccuauuc

SEQ ID NO: 1676534 - RNA, 19 nt, Homo sapiens
  misc_RNA (1)...(19): siRNA sense strand
caaccugaaugugaacuua

SEQ ID NO: 1676535 - RNA, 19 nt, Homo sapiens
  misc_RNA (1)...(19): siRNA sense strand
gaugagcgguuccagagaa

SEQ ID NO: 1676536 - RNA, 19 nt, Homo sapiens
  misc_RNA (1)...(19): siRNA sense strand
caaaggagcaguacagaga

SEQ ID NO: 1676537 - RNA, 19 nt, Homo sapiens
  misc_RNA (1)...(19): siRNA sense strand
gaagaccucugucguggau

SEQ ID NO: 1676538 - RNA, 19 nt, Homo sapiens
  misc_RNA (1)...(19): siRNA sense strand
guaaugcuccuucaguuaa

SEQ ID NO: 1676539 - RNA, 19 nt, Homo sapiens
  misc_RNA (1)...(19): siRNA sense strand
cagccaaagucgauucuaa

SEQ ID NO: 1676540 - RNA, 19 nt, Homo sapiens
  misc_RNA (1)...(19): siRNA sense strand
gcaccuguguguuugaaga

SEQ ID NO: 1676541 - RNA, 19 nt, Homo sapiens
  misc_RNA (1)...(19): siRNA sense strand
uaaagcaguuccugacuca

SEQ ID NO: 1676542 - RNA, 19 nt, Homo sapiens
  misc_RNA (1)...(19): siRNA sense strand
gcuucuauauuuccaauug

SEQ ID NO: 1676543 - RNA, 19 nt, Homo sapiens
  misc_RNA (1)...(19): siRNA sense strand
gaauccaccugaaguuaca

SEQ ID NO: 1676544 - RNA, 19 nt, Homo sapiens
  misc_RNA (1)...(19): siRNA sense strand
aaaccgaguuccaugcaaa

SEQ ID NO: 1676545 - RNA, 19 nt, Homo sapiens
  misc_RNA (1)...(19): siRNA sense strand
uuaaguaauuccuggauug

SEQ ID NO: 1676546 - RNA, 19 nt, Homo sapiens
  misc_RNA (1)...(19): siRNA sense strand
gcaaacaccugugguaucc

SEQ ID NO: 1676547 - RNA, 19 nt, Homo sapiens
  misc_RNA (1)...(19): siRNA sense strand
ugacagccaugauuacauc

SEQ ID NO: 1676548 - RNA, 19 nt, Homo sapiens
  misc_RNA (1)...(19): siRNA sense strand
gaaaaugacagccaugauu

SEQ ID NO: 1676549 - RNA, 19 nt, Homo sapiens
  misc_RNA (1)...(19): siRNA sense strand
aaaagugccuucucuguaa

SEQ ID NO: 1676550 - RNA, 19 nt, Homo sapiens
  misc_RNA (1)...(19): siRNA sense strand
gaugacaacccggauauug

SEQ ID NO: 1676551 - RNA, 19 nt, Homo sapiens
  misc_RNA (1)...(19): siRNA sense strand
cagccaugauuacaucuuu

SEQ ID NO: 1676552 - RNA, 19 nt, Homo sapiens
  misc_RNA (1)...(19): siRNA sense strand
gaagaccaacucucagaug

SEQ ID NO: 1676553 - RNA, 19 nt, Homo sapiens
  misc_RNA (1)...(19): siRNA sense strand
gaucaagauuguucuacag

SEQ ID NO: 1676554 - RNA, 19 nt, Homo sapiens
  misc_RNA (1)...(19): siRNA sense strand
aaagauucauguucacaga

SEQ ID NO: 1676555 - RNA, 19 nt, Homo sapiens
  misc_RNA (1)...(19): siRNA sense strand
gagccacacuugaaaauga

SEQ ID NO: 1676556 - RNA, 19 nt, Homo sapiens
  misc_RNA (1)...(19): siRNA sense strand
cagaauccaccugaaguua

SEQ ID NO: 1676557 - RNA, 19 nt, Homo sapiens
  misc_RNA (1)...(19): siRNA sense strand
ccuuagagcagcaagcuua

SEQ ID NO: 1676558 - RNA, 19 nt, Homo sapiens
  misc_RNA (1)...(19): siRNA sense strand
gagaaaagauaaccuuaag

SEQ ID NO: 1676559 - RNA, 19 nt, Homo sapiens
  misc_RNA (1)...(19): siRNA sense strand
aagaccaacucucagauga

SEQ ID NO: 1676560 - RNA, 19 nt, Homo sapiens
  misc_RNA (1)...(19): siRNA sense strand
gcaagcuuaguuauaauga

SEQ ID NO: 1676561 - RNA, 19 nt, Homo sapiens
  misc_RNA (1)...(19): siRNA sense strand
gaucugugccugccuuaau

SEQ ID NO: 1676562 - RNA, 19 nt, Homo sapiens
  misc_RNA (1)...(19): siRNA sense strand
ccaaagucgauucuaaauu

SEQ ID NO: 1676563 - RNA, 19 nt, Homo sapiens
  misc_RNA (1)...(19): siRNA sense strand
gagcgguuccagagaagua

SEQ ID NO: 1676564 - RNA, 19 nt, Homo sapiens
  misc_RNA (1)...(19): siRNA sense strand
caucagcccaucucuguug

SEQ ID NO: 1676565 - RNA, 19 nt, Homo sapiens
  misc_RNA (1)...(19): siRNA sense strand
gagcagcaagcuuaguuau

SEQ ID NO: 1676566 - RNA, 19 nt, Homo sapiens
  misc_RNA (1)...(19): siRNA sense strand
ggcuuuagcuaaugcuguu

SEQ ID NO: 1676567 - RNA, 19 nt, Homo sapiens
  misc_RNA (1)...(19): siRNA sense strand
ugauguguuuccuggauuu

SEQ ID NO: 1676568 - RNA, 19 nt, Homo sapiens
  misc_RNA (1)...(19): siRNA sense strand
agauucauguucacagaaa

SEQ ID NO: 1676569 - RNA, 19 nt, Homo sapiens
  misc_RNA (1)...(19): siRNA sense strand
caacccggauauugucugu

SEQ ID NO: 1676570 - RNA, 19 nt, Homo sapiens
  misc_RNA (1)...(19): siRNA sense strand
caugcuggcuuuagcuaau

SEQ ID NO: 1676571 - RNA, 19 nt, Homo sapiens
  misc_RNA (1)...(19): siRNA sense strand
aaagugccuucucuguaaa

SEQ ID NO: 1676572 - RNA, 19 nt, Homo sapiens
  misc_RNA (1)...(19): siRNA sense strand
caucuugcaugcuagaagu

SEQ ID NO: 1676573 - RNA, 19 nt, Homo sapiens
  misc_RNA (1)...(19): siRNA sense strand
cagcaagcuuaguuauaau

SEQ ID NO: 1676574 - RNA, 19 nt, Homo sapiens
  misc_RNA (1)...(19): siRNA sense strand
aaaaugacagccaugauua

SEQ ID NO: 1676575 - RNA, 19 nt, Homo sapiens
  misc_RNA (1)...(19): siRNA sense strand
ggucaucauauuccucaaa

SEQ ID NO: 1676576 - RNA, 19 nt, Homo sapiens
  misc_RNA (1)...(19): siRNA sense strand
guaauuccuggauugcuuu

SEQ ID NO: 1676577 - RNA, 19 nt, Homo sapiens
  misc_RNA (1)...(19): siRNA sense strand
aaguaaugcuccuucaguu

SEQ ID NO: 1676578 - RNA, 19 nt, Homo sapiens
  misc_RNA (1)...(19): siRNA sense strand
ucaguuaacagugaucaaa

SEQ ID NO: 1676579 - RNA, 19 nt, Homo sapiens
  misc_RNA (1)...(19): siRNA sense strand
uacugccucuggacucuua

SEQ ID NO: 1676580 - RNA, 19 nt, Homo sapiens
  misc_RNA (1)...(19): siRNA sense strand
caacccagcaguuucagau

SEQ ID NO: 1676581 - RNA, 19 nt, Homo sapiens
  misc_RNA (1)...(19): siRNA sense strand
ggcaucagcccaucucugu

SEQ ID NO: 1676582 - RNA, 19 nt, Homo sapiens
  misc_RNA (1)...(19): siRNA sense strand
aguaaugcuccuucaguua

SEQ ID NO: 1676583 - RNA, 19 nt, Homo sapiens
  misc_RNA (1)...(19): siRNA sense strand
uaaaaggaaggucaucaua

SEQ ID NO: 1676584 - RNA, 19 nt, Homo sapiens
  misc_RNA (1)...(19): siRNA sense strand
gccaaagucgauucuaaau

SEQ ID NO: 1676585 - RNA, 19 nt, Homo sapiens
  misc_RNA (1)...(19): siRNA sense strand
ccagaauccaccugaaguu

SEQ ID NO: 1676586 - RNA, 19 nt, Homo sapiens
  misc_RNA (1)...(19): siRNA sense strand
uaucucaacccagcaguuu

SEQ ID NO: 1676587 - RNA, 19 nt, Homo sapiens
  misc_RNA (1)...(19): siRNA sense strand
acagccaccuccuuagaau

SEQ ID NO: 1676588 - RNA, 19 nt, Homo sapiens
  misc_RNA (1)...(19): siRNA sense strand
acaauuccuuauucucuca

SEQ ID NO: 1676589 - RNA, 19 nt, Homo sapiens
  misc_RNA (1)...(19): siRNA sense strand
cuuaaguaauuccuggauu

SEQ ID NO: 1676590 - RNA, 19 nt, Homo sapiens
  misc_RNA (1)...(19): siRNA sense strand
gggcaaacaccugugguau

SEQ ID NO: 1676591 - RNA, 19 nt, Homo sapiens
  misc_RNA (1)...(19): siRNA sense strand
gagagaaaagauaaccuua

SEQ ID NO: 1676592 - RNA, 19 nt, Homo sapiens
  misc_RNA (1)...(19): siRNA sense strand
gaaauccuuagaaaucaag

SEQ ID NO: 1676593 - RNA, 19 nt, Homo sapiens
  misc_RNA (1)...(19): siRNA sense strand
cuacagccaccuccuuaga

SEQ ID NO: 1676594 - RNA, 19 nt, Homo sapiens
  misc_RNA (1)...(19): siRNA sense strand
ucacuaguccagaucaugu

SEQ ID NO: 1676595 - RNA, 19 nt, Homo sapiens
  misc_RNA (1)...(19): siRNA sense strand
cgguggacaugcuggcuuu

SEQ ID NO: 1676596 - RNA, 19 nt, Homo sapiens
  misc_RNA (1)...(19): siRNA sense strand
aguaauuccuggauugcuu

SEQ ID NO: 1676597 - RNA, 19 nt, Homo sapiens
  misc_RNA (1)...(19): siRNA sense strand
aagcaguuccugacucauu

SEQ ID NO: 1676598 - RNA, 19 nt, Homo sapiens
  misc_RNA (1)...(19): siRNA sense strand
uagagcagcaagcuuaguu

SEQ ID NO: 1676599 - RNA, 19 nt, Homo sapiens
  misc_RNA (1)...(19): siRNA sense strand
ucucaucgccuccagaauc

SEQ ID NO: 1676600 - RNA, 19 nt, Homo sapiens
  misc_RNA (1)...(19): siRNA sense strand
agcaguuccugacucauuu

SEQ ID NO: 1676601 - RNA, 19 nt, Homo sapiens
  misc_RNA (1)...(19): siRNA sense strand
ucucuuagaaucagccaaa

SEQ ID NO: 1676602 - RNA, 19 nt, Homo sapiens
  misc_RNA (1)...(19): siRNA sense strand
gccuugcauugcuucuaua

SEQ ID NO: 1676603 - RNA, 19 nt, Homo sapiens
  misc_RNA (1)...(19): siRNA sense strand
uguagcaccuguguguuug

SEQ ID NO: 1676604 - RNA, 19 nt, Homo sapiens
  misc_RNA (1)...(19): siRNA sense strand
gacaugcuggcuuuagcua

SEQ ID NO: 1676605 - RNA, 19 nt, Homo sapiens
  misc_RNA (1)...(19): siRNA sense strand
ccugauguguuuccuggau

SEQ ID NO: 1676606 - RNA, 19 nt, Homo sapiens
  misc_RNA (1)...(19): siRNA sense strand
ccgggauacuucuaaaaua

SEQ ID NO: 1676607 - RNA, 19 nt, Homo sapiens
  misc_RNA (1)...(19): siRNA sense strand
agaucaagauuguucuaca

SEQ ID NO: 1676608 - RNA, 19 nt, Homo sapiens
  misc_RNA (1)...(19): siRNA sense strand
cuccuucaguuaacaguga

SEQ ID NO: 1676609 - RNA, 19 nt, Homo sapiens
  misc_RNA (1)...(19): siRNA sense strand
gugaugacaacccggauau

SEQ ID NO: 1676610 - RNA, 19 nt, Homo sapiens
  misc_RNA (1)...(19): siRNA sense strand
ucuggacucuuacagcaau

SEQ ID NO: 1676611 - RNA, 19 nt, Homo sapiens
  misc_RNA (1)...(19): siRNA sense strand
ugccuugcauugcuucuau

SEQ ID NO: 1676612 - RNA, 19 nt, Homo sapiens
  misc_RNA (1)...(19): siRNA sense strand
agaaucagccaaagucgau

SEQ ID NO: 1676613 - RNA, 19 nt, Homo sapiens
  misc_RNA (1)...(19): siRNA sense strand
uagcaccuguguguuugaa

SEQ ID NO: 1676614 - RNA, 19 nt, Homo sapiens
  misc_RNA (1)...(19): siRNA sense strand
ugacucauuucgacaccau

SEQ ID NO: 1676615 - RNA, 19 nt, Homo sapiens
  misc_RNA (1)...(19): siRNA sense strand
gacucuuacagcaauaaua

SEQ ID NO: 1676616 - RNA, 19 nt, Homo sapiens
  misc_RNA (1)...(19): siRNA sense strand
gcaguuucagaucaagauu

SEQ ID NO: 1676617 - RNA, 19 nt, Homo sapiens
  misc_RNA (1)...(19): siRNA sense strand
ggcaaacaccugugguauc

SEQ ID NO: 1676618 - RNA, 19 nt, Homo sapiens
  misc_RNA (1)...(19): siRNA sense strand
guuugaagaccaacucuca

SEQ ID NO: 1676619 - RNA, 19 nt, Homo sapiens
  misc_RNA (1)...(19): siRNA sense strand
uuugaaaacugccgggaua

SEQ ID NO: 1676620 - RNA, 19 nt, Homo sapiens
  misc_RNA (1)...(19): siRNA sense strand
acccggauauugucuguca

SEQ ID NO: 1676621 - RNA, 19 nt, Homo sapiens
  misc_RNA (1)...(19): siRNA sense strand
agagcagcaagcuuaguua

SEQ ID NO: 1676622 - RNA, 19 nt, Homo sapiens
  misc_RNA (1)...(19): siRNA sense strand
ucagaucaagauuguucua

SEQ ID NO: 1676623 - RNA, 19 nt, Homo sapiens
  misc_RNA (1)...(19): siRNA sense strand
ccaauugagagaaaagaua

SEQ ID NO: 1676624 - RNA, 19 nt, Homo sapiens
  misc_RNA (1)...(19): siRNA sense strand
aaggagcaguacagagaug

SEQ ID NO: 1676625 - RNA, 19 nt, Homo sapiens
  misc_RNA (1)...(19): siRNA sense strand
ucuguaaagugggugaaga

SEQ ID NO: 1676626 - RNA, 19 nt, Homo sapiens
  misc_RNA (1)...(19): siRNA sense strand
uggauuugcuugagcuucu

SEQ ID NO: 1676627 - RNA, 19 nt, Homo sapiens
  misc_RNA (1)...(19): siRNA sense strand
agaguuauacaagaaggua

SEQ ID NO: 1676628 - RNA, 19 nt, Homo sapiens
  misc_RNA (1)...(19): siRNA sense strand
acccagcaguuucagauca

SEQ ID NO: 1676629 - RNA, 19 nt, Homo sapiens
  misc_RNA (1)...(19): siRNA sense strand
cuguagcaccuguguguuu

SEQ ID NO: 1676630 - RNA, 19 nt, Homo sapiens
  misc_RNA (1)...(19): siRNA sense strand
gcagcaagcuuaguuauaa

SEQ ID NO: 1676631 - RNA, 19 nt, Homo sapiens
  misc_RNA (1)...(19): siRNA sense strand
gaaaccaucuugcaugcua

SEQ ID NO: 1676632 - RNA, 19 nt, Homo sapiens
  misc_RNA (1)...(19): siRNA sense strand
aaaggaaggucaucauauu

SEQ ID NO: 1676633 - RNA, 19 nt, Homo sapiens
  misc_RNA (1)...(19): siRNA sense strand
guuauuaccuggccuauuc

SEQ ID NO: 1676634 - RNA, 19 nt, Homo sapiens
  misc_RNA (1)...(19): siRNA sense strand
caaccugaaugugaacuua

SEQ ID NO: 1676635 - RNA, 19 nt, Homo sapiens
  misc_RNA (1)...(19): siRNA sense strand
gaugagcgguuccagagaa

SEQ ID NO: 1676636 - RNA, 19 nt, Homo sapiens
  misc_RNA (1)...(19): siRNA sense strand
caaaggagcaguacagaga

SEQ ID NO: 1676637 - RNA, 19 nt, Homo sapiens
  misc_RNA (1)...(19): siRNA sense strand
gaagaccucugucguggau

SEQ ID NO: 1676638 - RNA, 19 nt, Homo sapiens
  misc_RNA (1)...(19): siRNA sense strand
guaaugcuccuucaguuaa

SEQ ID NO: 1676639 - RNA, 19 nt, Homo sapiens
  misc_RNA (1)...(19): siRNA sense strand
cagccaaagucgauucuaa

SEQ ID NO: 1676640 - RNA, 19 nt, Homo sapiens
  misc_RNA (1)...(19): siRNA sense strand
gcaccuguguguuugaaga

SEQ ID NO: 1676641 - RNA, 19 nt, Homo sapiens
  misc_RNA (1)...(19): siRNA sense strand
uaaagcaguuccugacuca

SEQ ID NO: 1676642 - RNA, 19 nt, Homo sapiens
  misc_RNA (1)...(19): siRNA sense strand
gcuucuauauuuccaauug

SEQ ID NO: 1676643 - RNA, 19 nt, Homo sapiens
  misc_RNA (1)...(19): siRNA sense strand
gaauccaccugaaguuaca

SEQ ID NO: 1676644 - RNA, 19 nt, Homo sapiens
  misc_RNA (1)...(19): siRNA sense strand
aaaccgaguuccaugcaaa

SEQ ID NO: 1676645 - RNA, 19 nt, Homo sapiens
  misc_RNA (1)...(19): siRNA sense strand
uuaaguaauuccuggauug

SEQ ID NO: 1676646 - RNA, 19 nt, Homo sapiens
  misc_RNA (1)...(19): siRNA sense strand
gcaaacaccugugguaucc

SEQ ID NO: 1676647 - RNA, 19 nt, Homo sapiens
  misc_RNA (1)...(19): siRNA sense strand
ugacagccaugauuacauc

SEQ ID NO: 1676648 - RNA, 19 nt, Homo sapiens
  misc_RNA (1)...(19): siRNA sense strand
gaaaaugacagccaugauu

SEQ ID NO: 1676649 - RNA, 19 nt, Homo sapiens
  misc_RNA (1)...(19): siRNA sense strand
aaaagugccuucucuguaa

SEQ ID NO: 1676650 - RNA, 19 nt, Homo sapiens
  misc_RNA (1)...(19): siRNA sense strand
gaugacaacccggauauug

SEQ ID NO: 1676651 - RNA, 19 nt, Homo sapiens
  misc_RNA (1)...(19): siRNA sense strand
cagccaugauuacaucuuu

SEQ ID NO: 1676652 - RNA, 19 nt, Homo sapiens
  misc_RNA (1)...(19): siRNA sense strand
gaagaccaacucucagaug

SEQ ID NO: 1676653 - RNA, 19 nt, Homo sapiens
  misc_RNA (1)...(19): siRNA sense strand
gaucaagauuguucuacag

SEQ ID NO: 1676654 - RNA, 19 nt, Homo sapiens
  misc_RNA (1)...(19): siRNA sense strand
aaagauucauguucacaga

SEQ ID NO: 1676655 - RNA, 19 nt, Homo sapiens
  misc_RNA (1)...(19): siRNA sense strand
gagccacacuugaaaauga

SEQ ID NO: 1676656 - RNA, 19 nt, Homo sapiens
  misc_RNA (1)...(19): siRNA sense strand
cagaauccaccugaaguua

SEQ ID NO: 1676657 - RNA, 19 nt, Homo sapiens
  misc_RNA (1)...(19): siRNA sense strand
ccuuagagcagcaagcuua

SEQ ID NO: 1676658 - RNA, 19 nt, Homo sapiens
  misc_RNA (1)...(19): siRNA sense strand
gagaaaagauaaccuuaag

SEQ ID NO: 1676659 - RNA, 19 nt, Homo sapiens
  misc_RNA (1)...(19): siRNA sense strand
aagaccaacucucagauga

SEQ ID NO: 1676660 - RNA, 19 nt, Homo sapiens
  misc_RNA (1)...(19): siRNA sense strand
gcaagcuuaguuauaauga

SEQ ID NO: 1676661 - RNA, 19 nt, Homo sapiens
  misc_RNA (1)...(19): siRNA sense strand
gaucugugccugccuuaau

SEQ ID NO: 1676662 - RNA, 19 nt, Homo sapiens
  misc_RNA (1)...(19): siRNA sense strand
ccaaagucgauucuaaauu

SEQ ID NO: 1676663 - RNA, 19 nt, Homo sapiens
  misc_RNA (1)...(19): siRNA sense strand
gagcgguuccagagaagua

SEQ ID NO: 1676664 - RNA, 19 nt, Homo sapiens
  misc_RNA (1)...(19): siRNA sense strand
caucagcccaucucuguug

SEQ ID NO: 1676665 - RNA, 19 nt, Homo sapiens
  misc_RNA (1)...(19): siRNA sense strand
gagcagcaagcuuaguuau

SEQ ID NO: 1676666 - RNA, 19 nt, Homo sapiens
  misc_RNA (1)...(19): siRNA sense strand
ggcuuuagcuaaugcuguu

SEQ ID NO: 1676667 - RNA, 19 nt, Homo sapiens
  misc_RNA (1)...(19): siRNA sense strand
ugauguguuuccuggauuu

SEQ ID NO: 1676668 - RNA, 19 nt, Homo sapiens
  misc_RNA (1)...(19): siRNA sense strand
agauucauguucacagaaa

SEQ ID NO: 1676669 - RNA, 19 nt, Homo sapiens
  misc_RNA (1)...(19): siRNA sense strand
caacccggauauugucugu

SEQ ID NO: 1676670 - RNA, 19 nt, Homo sapiens
  misc_RNA (1)...(19): siRNA sense strand
caugcuggcuuuagcuaau

SEQ ID NO: 1676671 - RNA, 19 nt, Homo sapiens
  misc_RNA (1)...(19): siRNA sense strand
aaagugccuucucuguaaa

SEQ ID NO: 1676672 - RNA, 19 nt, Homo sapiens
  misc_RNA (1)...(19): siRNA sense strand
caucuugcaugcuagaagu

SEQ ID NO: 1676673 - RNA, 19 nt, Homo sapiens
  misc_RNA (1)...(19): siRNA sense strand
cagcaagcuuaguuauaau

SEQ ID NO: 1676674 - RNA, 19 nt, Homo sapiens
  misc_RNA (1)...(19): siRNA sense strand
aaaaugacagccaugauua

SEQ ID NO: 1676675 - RNA, 19 nt, Homo sapiens
  misc_RNA (1)...(19): siRNA sense strand
ggucaucauauuccucaaa

SEQ ID NO: 1676676 - RNA, 19 nt, Homo sapiens
  misc_RNA (1)...(19): siRNA sense strand
guaauuccuggauugcuuu

SEQ ID NO: 1676677 - RNA, 19 nt, Homo sapiens
  misc_RNA (1)...(19): siRNA sense strand
aaguaaugcuccuucaguu

SEQ ID NO: 1676678 - RNA, 19 nt, Homo sapiens
  misc_RNA (1)...(19): siRNA sense strand
ucaguuaacagugaucaaa

SEQ ID NO: 1676679 - RNA, 19 nt, Homo sapiens
  misc_RNA (1)...(19): siRNA sense strand
uacugccucuggacucuua

SEQ ID NO: 1676680 - RNA, 19 nt, Homo sapiens
  misc_RNA (1)...(19): siRNA sense strand
caacccagcaguuucagau

SEQ ID NO: 1676681 - RNA, 19 nt, Homo sapiens
  misc_RNA (1)...(19): siRNA sense strand
ggcaucagcccaucucugu

SEQ ID NO: 1676682 - RNA, 19 nt, Homo sapiens
  misc_RNA (1)...(19): siRNA sense strand
aguaaugcuccuucaguua

SEQ ID NO: 1676683 - RNA, 19 nt, Homo sapiens
  misc_RNA (1)...(19): siRNA sense strand
uaaaaggaaggucaucaua

SEQ ID NO: 1676684 - RNA, 19 nt, Homo sapiens
  misc_RNA (1)...(19): siRNA sense strand
gccaaagucgauucuaaau

SEQ ID NO: 1676685 - RNA, 19 nt, Homo sapiens
  misc_RNA (1)...(19): siRNA sense strand
ccagaauccaccugaaguu

SEQ ID NO: 1676686 - RNA, 19 nt, Homo sapiens
  misc_RNA (1)...(19): siRNA sense strand
uaucucaacccagcaguuu

SEQ ID NO: 1676687 - RNA, 19 nt, Homo sapiens
  misc_RNA (1)...(19): siRNA sense strand
acagccaccuccuuagaau

SEQ ID NO: 1676688 - RNA, 19 nt, Homo sapiens
  misc_RNA (1)...(19): siRNA sense strand
acaauuccuuauucucuca

SEQ ID NO: 1676689 - RNA, 19 nt, Homo sapiens
  misc_RNA (1)...(19): siRNA sense strand
cuuaaguaauuccuggauu

SEQ ID NO: 1676690 - RNA, 19 nt, Homo sapiens
  misc_RNA (1)...(19): siRNA sense strand
gggcaaacaccugugguau

SEQ ID NO: 1676691 - RNA, 19 nt, Homo sapiens
  misc_RNA (1)...(19): siRNA sense strand
gagagaaaagauaaccuua

SEQ ID NO: 1676692 - RNA, 19 nt, Homo sapiens
  misc_RNA (1)...(19): siRNA sense strand
gaaauccuuagaaaucaag

SEQ ID NO: 1676693 - RNA, 19 nt, Homo sapiens
  misc_RNA (1)...(19): siRNA sense strand
cuacagccaccuccuuaga

SEQ ID NO: 1676694 - RNA, 19 nt, Homo sapiens
  misc_RNA (1)...(19): siRNA sense strand
ucacuaguccagaucaugu

SEQ ID NO: 1676695 - RNA, 19 nt, Homo sapiens
  misc_RNA (1)...(19): siRNA sense strand
cgguggacaugcuggcuuu

SEQ ID NO: 1676696 - RNA, 19 nt, Homo sapiens
  misc_RNA (1)...(19): siRNA sense strand
aguaauuccuggauugcuu

SEQ ID NO: 1676697 - RNA, 19 nt, Homo sapiens
  misc_RNA (1)...(19): siRNA sense strand
aagcaguuccugacucauu

SEQ ID NO: 1676698 - RNA, 19 nt, Homo sapiens
  misc_RNA (1)...(19): siRNA sense strand
uagagcagcaagcuuaguu

SEQ ID NO: 1676699 - RNA, 19 nt, Homo sapiens
  misc_RNA (1)...(19): siRNA sense strand
ucucaucgccuccagaauc

SEQ ID NO: 1676700 - RNA, 19 nt, Homo sapiens
  misc_RNA (1)...(19): siRNA sense strand
agcaguuccugacucauuu

SEQ ID NO: 1676701 - RNA, 19 nt, Homo sapiens
  misc_RNA (1)...(19): siRNA sense strand
ucucuuagaaucagccaaa

SEQ ID NO: 1676702 - RNA, 19 nt, Homo sapiens
  misc_RNA (1)...(19): siRNA sense strand
gccuugcauugcuucuaua

SEQ ID NO: 1676703 - RNA, 19 nt, Homo sapiens
  misc_RNA (1)...(19): siRNA sense strand
uguagcaccuguguguuug

SEQ ID NO: 1676704 - RNA, 19 nt, Homo sapiens
  misc_RNA (1)...(19): siRNA sense strand
gacaugcuggcuuuagcua

SEQ ID NO: 1676705 - RNA, 19 nt, Homo sapiens
  misc_RNA (1)...(19): siRNA sense strand
ccugauguguuuccuggau

SEQ ID NO: 1676706 - RNA, 19 nt, Homo sapiens
  misc_RNA (1)...(19): siRNA sense strand
ccgggauacuucuaaaaua

SEQ ID NO: 1676707 - RNA, 19 nt, Homo sapiens
  misc_RNA (1)...(19): siRNA sense strand
agaucaagauuguucuaca

SEQ ID NO: 1676708 - RNA, 19 nt, Homo sapiens
  misc_RNA (1)...(19): siRNA sense strand
cuccuucaguuaacaguga

SEQ ID NO: 1676709 - RNA, 19 nt, Homo sapiens
  misc_RNA (1)...(19): siRNA sense strand
gugaugacaacccggauau

SEQ ID NO: 1676710 - RNA, 19 nt, Homo sapiens
  misc_RNA (1)...(19): siRNA sense strand
ucuggacucuuacagcaau

SEQ ID NO: 1676711 - RNA, 19 nt, Homo sapiens
  misc_RNA (1)...(19): siRNA sense strand
ugccuugcauugcuucuau

SEQ ID NO: 1676712 - RNA, 19 nt, Homo sapiens
  misc_RNA (1)...(19): siRNA sense strand
agaaucagccaaagucgau

SEQ ID NO: 1676713 - RNA, 19 nt, Homo sapiens
  misc_RNA (1)...(19): siRNA sense strand
uagcaccuguguguuugaa

SEQ ID NO: 1676714 - RNA, 19 nt, Homo sapiens
  misc_RNA (1)...(19): siRNA sense strand
ugacucauuucgacaccau

SEQ ID NO: 1676715 - RNA, 19 nt, Homo sapiens
  misc_RNA (1)...(19): siRNA sense strand
gacucuuacagcaauaaua

SEQ ID NO: 1676716 - RNA, 19 nt, Homo sapiens
  misc_RNA (1)...(19): siRNA sense strand
gcaguuucagaucaagauu

SEQ ID NO: 1676717 - RNA, 19 nt, Homo sapiens
  misc_RNA (1)...(19): siRNA sense strand
ggcaaacaccugugguauc

SEQ ID NO: 1676718 - RNA, 19 nt, Homo sapiens
  misc_RNA (1)...(19): siRNA sense strand
guuugaagaccaacucuca

SEQ ID NO: 1676719 - RNA, 19 nt, Homo sapiens
  misc_RNA (1)...(19): siRNA sense strand
uuugaaaacugccgggaua

SEQ ID NO: 1676720 - RNA, 19 nt, Homo sapiens
  misc_RNA (1)...(19): siRNA sense strand
acccggauauugucuguca

SEQ ID NO: 1676721 - RNA, 19 nt, Homo sapiens
  misc_RNA (1)...(19): siRNA sense strand
agagcagcaagcuuaguua

SEQ ID NO: 1676722 - RNA, 19 nt, Homo sapiens
  misc_RNA (1)...(19): siRNA sense strand
ucagaucaagauuguucua

SEQ ID NO: 1676723 - RNA, 19 nt, Homo sapiens
  misc_RNA (1)...(19): siRNA sense strand
ccaauugagagaaaagaua

SEQ ID NO: 1676724 - RNA, 19 nt, Homo sapiens
  misc_RNA (1)...(19): siRNA sense strand
aaggagcaguacagagaug

SEQ ID NO: 1676725 - RNA, 19 nt, Homo sapiens
  misc_RNA (1)...(19): siRNA sense strand
ucuguaaagugggugaaga

SEQ ID NO: 1676726 - RNA, 19 nt, Homo sapiens
  misc_RNA (1)...(19): siRNA sense strand
uggauuugcuugagcuucu

SEQ ID NO: 1676727 - RNA, 19 nt, Homo sapiens
  misc_RNA (1)...(19): siRNA sense strand
agaguuauacaagaaggua

SEQ ID NO: 1676728 - RNA, 19 nt, Homo sapiens
  misc_RNA (1)...(19): siRNA sense strand
acccagcaguuucagauca

SEQ ID NO: 1676729 - RNA, 19 nt, Homo sapiens
  misc_RNA (1)...(19): siRNA sense strand
cuguagcaccuguguguuu

SEQ ID NO: 1676730 - RNA, 19 nt, Homo sapiens
  misc_RNA (1)...(19): siRNA sense strand
gcagcaagcuuaguuauaa

SEQ ID NO: 1676731 - RNA, 19 nt, Homo sapiens
  misc_RNA (1)...(19): siRNA sense strand
gaaaccaucuugcaugcua

SEQ ID NO: 1676732 - RNA, 19 nt, Homo sapiens
  misc_RNA (1)...(19): siRNA sense strand
aaaggaaggucaucauauu

SEQ ID NO: 1676733 - RNA, 19 nt, Homo sapiens
  misc_RNA (1)...(19): siRNA sense strand
guuauuaccuggccuauuc

SEQ ID NO: 1676734 - RNA, 19 nt, Homo sapiens
  misc_RNA (1)...(19): siRNA sense strand
caaccugaaugugaacuua

SEQ ID NO: 1676735 - RNA, 19 nt, Homo sapiens
  misc_RNA (1)...(19): siRNA sense strand
gaugagcgguuccagagaa

SEQ ID NO: 1676736 - RNA, 19 nt, Homo sapiens
  misc_RNA (1)...(19): siRNA sense strand
caaaggagcaguacagaga

SEQ ID NO: 1676737 - RNA, 19 nt, Homo sapiens
  misc_RNA (1)...(19): siRNA sense strand
gaagaccucugucguggau

SEQ ID NO: 1676738 - RNA, 19 nt, Homo sapiens
  misc_RNA (1)...(19): siRNA sense strand
guaaugcuccuucaguuaa

SEQ ID NO: 1676739 - RNA, 19 nt, Homo sapiens
  misc_RNA (1)...(19): siRNA sense strand
cagccaaagucgauucuaa

SEQ ID NO: 1676740 - RNA, 19 nt, Homo sapiens
  misc_RNA (1)...(19): siRNA sense strand
gcaccuguguguuugaaga

SEQ ID NO: 1676741 - RNA, 19 nt, Homo sapiens
  misc_RNA (1)...(19): siRNA sense strand
uaaagcaguuccugacuca

SEQ ID NO: 1676742 - RNA, 19 nt, Homo sapiens
  misc_RNA (1)...(19): siRNA sense strand
gcuucuauauuuccaauug

SEQ ID NO: 1676743 - RNA, 19 nt, Homo sapiens
  misc_RNA (1)...(19): siRNA sense strand
gaauccaccugaaguuaca

SEQ ID NO: 1676744 - RNA, 19 nt, Homo sapiens
  misc_RNA (1)...(19): siRNA sense strand
aaaccgaguuccaugcaaa

SEQ ID NO: 1676745 - RNA, 19 nt, Homo sapiens
  misc_RNA (1)...(19): siRNA sense strand
uuaaguaauuccuggauug

SEQ ID NO: 1676746 - RNA, 19 nt, Homo sapiens
  misc_RNA (1)...(19): siRNA sense strand
gcaaacaccugugguaucc

SEQ ID NO: 1676747 - RNA, 19 nt, Homo sapiens
  misc_RNA (1)...(19): siRNA sense strand
ugacagccaugauuacauc

SEQ ID NO: 1676748 - RNA, 19 nt, Homo sapiens
  misc_RNA (1)...(19): siRNA sense strand
gaaaaugacagccaugauu

SEQ ID NO: 1676749 - RNA, 19 nt, Homo sapiens
  misc_RNA (1)...(19): siRNA sense strand
aaaagugccuucucuguaa

SEQ ID NO: 1676750 - RNA, 19 nt, Homo sapiens
  misc_RNA (1)...(19): siRNA sense strand
gaugacaacccggauauug

SEQ ID NO: 1676751 - RNA, 19 nt, Homo sapiens
  misc_RNA (1)...(19): siRNA sense strand
cagccaugauuacaucuuu

SEQ ID NO: 1676752 - RNA, 19 nt, Homo sapiens
  misc_RNA (1)...(19): siRNA sense strand
gaagaccaacucucagaug

SEQ ID NO: 1676753 - RNA, 19 nt, Homo sapiens
  misc_RNA (1)...(19): siRNA sense strand
gaucaagauuguucuacag

SEQ ID NO: 1676754 - RNA, 19 nt, Homo sapiens
  misc_RNA (1)...(19): siRNA sense strand
aaagauucauguucacaga

SEQ ID NO: 1676755 - RNA, 19 nt, Homo sapiens
  misc_RNA (1)...(19): siRNA sense strand
gagccacacuugaaaauga

SEQ ID NO: 1676756 - RNA, 19 nt, Homo sapiens
  misc_RNA (1)...(19): siRNA sense strand
cagaauccaccugaaguua

SEQ ID NO: 1676757 - RNA, 19 nt, Homo sapiens
  misc_RNA (1)...(19): siRNA sense strand
ccuuagagcagcaagcuua

SEQ ID NO: 1676758 - RNA, 19 nt, Homo sapiens
  misc_RNA (1)...(19): siRNA sense strand
gagaaaagauaaccuuaag

SEQ ID NO: 1676759 - RNA, 19 nt, Homo sapiens
  misc_RNA (1)...(19): siRNA sense strand
aagaccaacucucagauga

SEQ ID NO: 1676760 - RNA, 19 nt, Homo sapiens
  misc_RNA (1)...(19): siRNA sense strand
gcaagcuuaguuauaauga

SEQ ID NO: 1676761 - RNA, 19 nt, Homo sapiens
  misc_RNA (1)...(19): siRNA sense strand
gaucugugccugccuuaau

SEQ ID NO: 1676762 - RNA, 19 nt, Homo sapiens
  misc_RNA (1)...(19): siRNA sense strand
ccaaagucgauucuaaauu

SEQ ID NO: 1676763 - RNA, 19 nt, Homo sapiens
  misc_RNA (1)...(19): siRNA sense strand
gagcgguuccagagaagua

SEQ ID NO: 1676764 - RNA, 19 nt, Homo sapiens
  misc_RNA (1)...(19): siRNA sense strand
caucagcccaucucuguug

SEQ ID NO: 1676765 - RNA, 19 nt, Homo sapiens
  misc_RNA (1)...(19): siRNA sense strand
gagcagcaagcuuaguuau

SEQ ID NO: 1676766 - RNA, 19 nt, Homo sapiens
  misc_RNA (1)...(19): siRNA sense strand
ggcuuuagcuaaugcuguu

SEQ ID NO: 1676767 - RNA, 19 nt, Homo sapiens
  misc_RNA (1)...(19): siRNA sense strand
ugauguguuuccuggauuu

SEQ ID NO: 1676768 - RNA, 19 nt, Homo sapiens
  misc_RNA (1)...(19): siRNA sense strand
agauucauguucacagaaa

SEQ ID NO: 1676769 - RNA, 19 nt, Homo sapiens
  misc_RNA (1)...(19): siRNA sense strand
caacccggauauugucugu

SEQ ID NO: 1676770 - RNA, 19 nt, Homo sapiens
  misc_RNA (1)...(19): siRNA sense strand
caugcuggcuuuagcuaau

SEQ ID NO: 1676771 - RNA, 19 nt, Homo sapiens
  misc_RNA (1)...(19): siRNA sense strand
aaagugccuucucuguaaa

SEQ ID NO: 1676772 - RNA, 19 nt, Homo sapiens
  misc_RNA (1)...(19): siRNA sense strand
caucuugcaugcuagaagu

SEQ ID NO: 1676773 - RNA, 19 nt, Homo sapiens
  misc_RNA (1)...(19): siRNA sense strand
cagcaagcuuaguuauaau

SEQ ID NO: 1676774 - RNA, 19 nt, Homo sapiens
  misc_RNA (1)...(19): siRNA sense strand
aaaaugacagccaugauua

SEQ ID NO: 1676775 - RNA, 19 nt, Homo sapiens
  misc_RNA (1)...(19): siRNA sense strand
ggucaucauauuccucaaa

SEQ ID NO: 1676776 - RNA, 19 nt, Homo sapiens
  misc_RNA (1)...(19): siRNA sense strand
guaauuccuggauugcuuu

SEQ ID NO: 1676777 - RNA, 19 nt, Homo sapiens
  misc_RNA (1)...(19): siRNA sense strand
aaguaaugcuccuucaguu

SEQ ID NO: 1676778 - RNA, 19 nt, Homo sapiens
  misc_RNA (1)...(19): siRNA sense strand
ucaguuaacagugaucaaa

SEQ ID NO: 1676779 - RNA, 19 nt, Homo sapiens
  misc_RNA (1)...(19): siRNA sense strand
uacugccucuggacucuua

SEQ ID NO: 1676780 - RNA, 19 nt, Homo sapiens
  misc_RNA (1)...(19): siRNA sense strand
caacccagcaguuucagau

SEQ ID NO: 1676781 - RNA, 19 nt, Homo sapiens
  misc_RNA (1)...(19): siRNA sense strand
ggcaucagcccaucucugu

SEQ ID NO: 1676782 - RNA, 19 nt, Homo sapiens
  misc_RNA (1)...(19): siRNA sense strand
aguaaugcuccuucaguua

SEQ ID NO: 1676783 - RNA, 19 nt, Homo sapiens
  misc_RNA (1)...(19): siRNA sense strand
uaaaaggaaggucaucaua

SEQ ID NO: 1676784 - RNA, 19 nt, Homo sapiens
  misc_RNA (1)...(19): siRNA sense strand
gccaaagucgauucuaaau

SEQ ID NO: 1676785 - RNA, 19 nt, Homo sapiens
  misc_RNA (1)...(19): siRNA sense strand
ccagaauccaccugaaguu

SEQ ID NO: 1676786 - RNA, 19 nt, Homo sapiens
  misc_RNA (1)...(19): siRNA sense strand
uaucucaacccagcaguuu

SEQ ID NO: 1676787 - RNA, 19 nt, Homo sapiens
  misc_RNA (1)...(19): siRNA sense strand
acagccaccuccuuagaau

SEQ ID NO: 1676788 - RNA, 19 nt, Homo sapiens
  misc_RNA (1)...(19): siRNA sense strand
acaauuccuuauucucuca

SEQ ID NO: 1676789 - RNA, 19 nt, Homo sapiens
  misc_RNA (1)...(19): siRNA sense strand
cuuaaguaauuccuggauu

SEQ ID NO: 1676790 - RNA, 19 nt, Homo sapiens
  misc_RNA (1)...(19): siRNA sense strand
gggcaaacaccugugguau

SEQ ID NO: 1676791 - RNA, 19 nt, Homo sapiens
  misc_RNA (1)...(19): siRNA sense strand
gagagaaaagauaaccuua

SEQ ID NO: 1676792 - RNA, 19 nt, Homo sapiens
  misc_RNA (1)...(19): siRNA sense strand
gaaauccuuagaaaucaag

SEQ ID NO: 1676793 - RNA, 19 nt, Homo sapiens
  misc_RNA (1)...(19): siRNA sense strand
cuacagccaccuccuuaga

SEQ ID NO: 1676794 - RNA, 19 nt, Homo sapiens
  misc_RNA (1)...(19): siRNA sense strand
ucacuaguccagaucaugu

SEQ ID NO: 1676795 - RNA, 19 nt, Homo sapiens
  misc_RNA (1)...(19): siRNA sense strand
cgguggacaugcuggcuuu

SEQ ID NO: 1676796 - RNA, 19 nt, Homo sapiens
  misc_RNA (1)...(19): siRNA sense strand
aguaauuccuggauugcuu

SEQ ID NO: 1676797 - RNA, 19 nt, Homo sapiens
  misc_RNA (1)...(19): siRNA sense strand
aagcaguuccugacucauu

SEQ ID NO: 1676798 - RNA, 19 nt, Homo sapiens
  misc_RNA (1)...(19): siRNA sense strand
uagagcagcaagcuuaguu

SEQ ID NO: 1676799 - RNA, 19 nt, Homo sapiens
  misc_RNA (1)...(19): siRNA sense strand
ucucaucgccuccagaauc

SEQ ID NO: 1676800 - RNA, 19 nt, Homo sapiens
  misc_RNA (1)...(19): siRNA sense strand
agcaguuccugacucauuu

SEQ ID NO: 1676801 - RNA, 19 nt, Homo sapiens
  misc_RNA (1)...(19): siRNA sense strand
ucucuuagaaucagccaaa

SEQ ID NO: 1676802 - RNA, 19 nt, Homo sapiens
  misc_RNA (1)...(19): siRNA sense strand
gccuugcauugcuucuaua

SEQ ID NO: 1676803 - RNA, 19 nt, Homo sapiens
  misc_RNA (1)...(19): siRNA sense strand
uguagcaccuguguguuug

SEQ ID NO: 1676804 - RNA, 19 nt, Homo sapiens
  misc_RNA (1)...(19): siRNA sense strand
gacaugcuggcuuuagcua

SEQ ID NO: 1676805 - RNA, 19 nt, Homo sapiens
  misc_RNA (1)...(19): siRNA sense strand
ccugauguguuuccuggau

SEQ ID NO: 1676806 - RNA, 19 nt, Homo sapiens
  misc_RNA (1)...(19): siRNA sense strand
ccgggauacuucuaaaaua

SEQ ID NO: 1676807 - RNA, 19 nt, Homo sapiens
  misc_RNA (1)...(19): siRNA sense strand
agaucaagauuguucuaca

SEQ ID NO: 1676808 - RNA, 19 nt, Homo sapiens
  misc_RNA (1)...(19): siRNA sense strand
cuccuucaguuaacaguga

SEQ ID NO: 1676809 - RNA, 19 nt, Homo sapiens
  misc_RNA (1)...(19): siRNA sense strand
gugaugacaacccggauau

SEQ ID NO: 1676810 - RNA, 19 nt, Homo sapiens
  misc_RNA (1)...(19): siRNA sense strand
ucuggacucuuacagcaau

SEQ ID NO: 1676811 - RNA, 19 nt, Homo sapiens
  misc_RNA (1)...(19): siRNA sense strand
ugccuugcauugcuucuau

SEQ ID NO: 1676812 - RNA, 19 nt, Homo sapiens
  misc_RNA (1)...(19): siRNA sense strand
agaaucagccaaagucgau

SEQ ID NO: 1676813 - RNA, 19 nt, Homo sapiens
  misc_RNA (1)...(19): siRNA sense strand
uagcaccuguguguuugaa

SEQ ID NO: 1676814 - RNA, 19 nt, Homo sapiens
  misc_RNA (1)...(19): siRNA sense strand
ugacucauuucgacaccau

SEQ ID NO: 1676815 - RNA, 19 nt, Homo sapiens
  misc_RNA (1)...(19): siRNA sense strand
gacucuuacagcaauaaua

SEQ ID NO: 1676816 - RNA, 19 nt, Homo sapiens
  misc_RNA (1)...(19): siRNA sense strand
gcaguuucagaucaagauu

SEQ ID NO: 1676817 - RNA, 19 nt, Homo sapiens
  misc_RNA (1)...(19): siRNA sense strand
ggcaaacaccugugguauc

SEQ ID NO: 1676818 - RNA, 19 nt, Homo sapiens
  misc_RNA (1)...(19): siRNA sense strand
guuugaagaccaacucuca

SEQ ID NO: 1676819 - RNA, 19 nt, Homo sapiens
  misc_RNA (1)...(19): siRNA sense strand
uuugaaaacugccgggaua

SEQ ID NO: 1676820 - RNA, 19 nt, Homo sapiens
  misc_RNA (1)...(19): siRNA sense strand
acccggauauugucuguca

SEQ ID NO: 1676821 - RNA, 19 nt, Homo sapiens
  misc_RNA (1)...(19): siRNA sense strand
agagcagcaagcuuaguua

SEQ ID NO: 1676822 - RNA, 19 nt, Homo sapiens
  misc_RNA (1)...(19): siRNA sense strand
ucagaucaagauuguucua

SEQ ID NO: 1676823 - RNA, 19 nt, Homo sapiens
  misc_RNA (1)...(19): siRNA sense strand
ccaauugagagaaaagaua

SEQ ID NO: 1676824 - RNA, 19 nt, Homo sapiens
  misc_RNA (1)...(19): siRNA sense strand
aaggagcaguacagagaug

SEQ ID NO: 1676825 - RNA, 19 nt, Homo sapiens
  misc_RNA (1)...(19): siRNA sense strand
ucuguaaagugggugaaga

SEQ ID NO: 1676826 - RNA, 19 nt, Homo sapiens
  misc_RNA (1)...(19): siRNA sense strand
uggauuugcuugagcuucu

SEQ ID NO: 1676827 - RNA, 19 nt, Homo sapiens
  misc_RNA (1)...(19): siRNA sense strand
agaguuauacaagaaggua

SEQ ID NO: 1676828 - RNA, 19 nt, Homo sapiens
  misc_RNA (1)...(19): siRNA sense strand
acccagcaguuucagauca

SEQ ID NO: 1676829 - RNA, 19 nt, Homo sapiens
  misc_RNA (1)...(19): siRNA sense strand
cuguagcaccuguguguuu

SEQ ID NO: 1676830 - RNA, 19 nt, Homo sapiens
  misc_RNA (1)...(19): siRNA sense strand
gaacugacaugcagaggau

SEQ ID NO: 1676831 - RNA, 19 nt, Homo sapiens
  misc_RNA (1)...(19): siRNA sense strand
caacauggccuacaagguu

SEQ ID NO: 1676832 - RNA, 19 nt, Homo sapiens
  misc_RNA (1)...(19): siRNA sense strand
ggaaugcguccaccacaua

SEQ ID NO: 1676833 - RNA, 19 nt, Homo sapiens
  misc_RNA (1)...(19): siRNA sense strand
gaggauagaagauguguug

SEQ ID NO: 1676834 - RNA, 19 nt, Homo sapiens
  misc_RNA (1)...(19): siRNA sense strand
cgagaacacuaaggacauu

SEQ ID NO: 1676835 - RNA, 19 nt, Homo sapiens
  misc_RNA (1)...(19): siRNA sense strand
ugccgcugcuggucuauua

SEQ ID NO: 1676836 - RNA, 19 nt, Homo sapiens
  misc_RNA (1)...(19): siRNA sense strand
aacauggccuacaagguua

SEQ ID NO: 1676837 - RNA, 19 nt, Homo sapiens
  misc_RNA (1)...(19): siRNA sense strand
cuaaggacauucggcugua

SEQ ID NO: 1676838 - RNA, 19 nt, Homo sapiens
  misc_RNA (1)...(19): siRNA sense strand
gggaugagcugggcuacag

SEQ ID NO: 1676839 - RNA, 19 nt, Homo sapiens
  misc_RNA (1)...(19): siRNA sense strand
gcugguagcgagaacacua

SEQ ID NO: 1676840 - RNA, 19 nt, Homo sapiens
  misc_RNA (1)...(19): siRNA sense strand
gcgcagauccgacagaacu

SEQ ID NO: 1676841 - RNA, 19 nt, Homo sapiens
  misc_RNA (1)...(19): siRNA sense strand
gaaugcguccaccacauau

SEQ ID NO: 1676842 - RNA, 19 nt, Homo sapiens
  misc_RNA (1)...(19): siRNA sense strand
ccucaacgccaucaacaug

SEQ ID NO: 1676843 - RNA, 19 nt, Homo sapiens
  misc_RNA (1)...(19): siRNA sense strand
guagcgagaacacuaagga

SEQ ID NO: 1676844 - RNA, 19 nt, Homo sapiens
  misc_RNA (1)...(19): siRNA sense strand
gcagauccgacagaacuga

SEQ ID NO: 1676845 - RNA, 19 nt, Homo sapiens
  misc_RNA (1)...(19): siRNA sense strand
ccgucauccuugucuguua

SEQ ID NO: 1676846 - RNA, 19 nt, Homo sapiens
  misc_RNA (1)...(19): siRNA sense strand
gcaaguccgugcgcaccau

SEQ ID NO: 1676847 - RNA, 19 nt, Homo sapiens
  misc_RNA (1)...(19): siRNA sense strand
gcucuucgcggugcccuuu

SEQ ID NO: 1676848 - RNA, 19 nt, Homo sapiens
  misc_RNA (1)...(19): siRNA sense strand
ccaccuggcugugucugau

SEQ ID NO: 1676849 - RNA, 19 nt, Homo sapiens
  misc_RNA (1)...(19): siRNA sense strand
gcagaggauagaagaugug

SEQ ID NO: 1676850 - RNA, 19 nt, Homo sapiens
  misc_RNA (1)...(19): siRNA sense strand
gcgagaacacuaaggacau

SEQ ID NO: 1676851 - RNA, 19 nt, Homo sapiens
  misc_RNA (1)...(19): siRNA sense strand
ccguggcgcucuacaucuu

SEQ ID NO: 1676852 - RNA, 19 nt, Homo sapiens
  misc_RNA (1)...(19): siRNA sense strand
gggcagcagugaggacucu

SEQ ID NO: 1676853 - RNA, 19 nt, Homo sapiens
  misc_RNA (1)...(19): siRNA sense strand
ggcuacaggugccgcuuca

SEQ ID NO: 1676854 - RNA, 19 nt, Homo sapiens
  misc_RNA (1)...(19): siRNA sense strand
uggaaugacaccaucaaug

SEQ ID NO: 1676855 - RNA, 19 nt, Homo sapiens
  misc_RNA (1)...(19): siRNA sense strand
uaaggacauucggcuguag

SEQ ID NO: 1676856 - RNA, 19 nt, Homo sapiens
  misc_RNA (1)...(19): siRNA sense strand
cgucauccuugucuguuac

SEQ ID NO: 1676857 - RNA, 19 nt, Homo sapiens
  misc_RNA (1)...(19): siRNA sense strand
ugcagaggauagaagaugu

SEQ ID NO: 1676858 - RNA, 19 nt, Homo sapiens
  misc_RNA (1)...(19): siRNA sense strand
gaacugacaugcagaggau

SEQ ID NO: 1676859 - RNA, 19 nt, Homo sapiens
  misc_RNA (1)...(19): siRNA sense strand
caacauggccuacaagguu

SEQ ID NO: 1676860 - RNA, 19 nt, Homo sapiens
  misc_RNA (1)...(19): siRNA sense strand
ggaaugcguccaccacaua

SEQ ID NO: 1676861 - RNA, 19 nt, Homo sapiens
  misc_RNA (1)...(19): siRNA sense strand
gaggauagaagauguguug

SEQ ID NO: 1676862 - RNA, 19 nt, Homo sapiens
  misc_RNA (1)...(19): siRNA sense strand
cgagaacacuaaggacauu

SEQ ID NO: 1676863 - RNA, 19 nt, Homo sapiens
  misc_RNA (1)...(19): siRNA sense strand
ugccgcugcuggucuauua

SEQ ID NO: 1676864 - RNA, 19 nt, Homo sapiens
  misc_RNA (1)...(19): siRNA sense strand
aacauggccuacaagguua

SEQ ID NO: 1676865 - RNA, 19 nt, Homo sapiens
  misc_RNA (1)...(19): siRNA sense strand
cuaaggacauucggcugua

SEQ ID NO: 1676866 - RNA, 19 nt, Homo sapiens
  misc_RNA (1)...(19): siRNA sense strand
gggaugagcugggcuacag

SEQ ID NO: 1676867 - RNA, 19 nt, Homo sapiens
  misc_RNA (1)...(19): siRNA sense strand
gcugguagcgagaacacua

SEQ ID NO: 1676868 - RNA, 19 nt, Homo sapiens
  misc_RNA (1)...(19): siRNA sense strand
gcgcagauccgacagaacu

SEQ ID NO: 1676869 - RNA, 19 nt, Homo sapiens
  misc_RNA (1)...(19): siRNA sense strand
gaaugcguccaccacauau

SEQ ID NO: 1676870 - RNA, 19 nt, Homo sapiens
  misc_RNA (1)...(19): siRNA sense strand
ccucaacgccaucaacaug

SEQ ID NO: 1676871 - RNA, 19 nt, Homo sapiens
  misc_RNA (1)...(19): siRNA sense strand
guagcgagaacacuaagga

SEQ ID NO: 1676872 - RNA, 19 nt, Homo sapiens
  misc_RNA (1)...(19): siRNA sense strand
gcagauccgacagaacuga

SEQ ID NO: 1676873 - RNA, 19 nt, Homo sapiens
  misc_RNA (1)...(19): siRNA sense strand
ccgucauccuugucuguua

SEQ ID NO: 1676874 - RNA, 19 nt, Homo sapiens
  misc_RNA (1)...(19): siRNA sense strand
gcaaguccgugcgcaccau

SEQ ID NO: 1676875 - RNA, 19 nt, Homo sapiens
  misc_RNA (1)...(19): siRNA sense strand
gcucuucgcggugcccuuu

SEQ ID NO: 1676876 - RNA, 19 nt, Homo sapiens
  misc_RNA (1)...(19): siRNA sense strand
ccaccuggcugugucugau

SEQ ID NO: 1676877 - RNA, 19 nt, Homo sapiens
  misc_RNA (1)...(19): siRNA sense strand
gcagaggauagaagaugug

SEQ ID NO: 1676878 - RNA, 19 nt, Homo sapiens
  misc_RNA (1)...(19): siRNA sense strand
gcgagaacacuaaggacau

SEQ ID NO: 1676879 - RNA, 19 nt, Homo sapiens
  misc_RNA (1)...(19): siRNA sense strand
ccguggcgcucuacaucuu

SEQ ID NO: 1676880 - RNA, 19 nt, Homo sapiens
  misc_RNA (1)...(19): siRNA sense strand
gggcagcagugaggacucu

SEQ ID NO: 1676881 - RNA, 19 nt, Homo sapiens
  misc_RNA (1)...(19): siRNA sense strand
ggcuacaggugccgcuuca

SEQ ID NO: 1676882 - RNA, 19 nt, Homo sapiens
  misc_RNA (1)...(19): siRNA sense strand
uggaaugacaccaucaaug

SEQ ID NO: 1676883 - RNA, 19 nt, Homo sapiens
  misc_RNA (1)...(19): siRNA sense strand
uaaggacauucggcuguag

SEQ ID NO: 1676884 - RNA, 19 nt, Homo sapiens
  misc_RNA (1)...(19): siRNA sense strand
cgucauccuugucuguuac

SEQ ID NO: 1676885 - RNA, 19 nt, Homo sapiens
  misc_RNA (1)...(19): siRNA sense strand
ugcagaggauagaagaugu

SEQ ID NO: 1676886 - RNA, 19 nt, Homo sapiens
  misc_RNA (1)...(19): siRNA sense strand
gaacugacaugcagaggau

SEQ ID NO: 1676887 - RNA, 19 nt, Homo sapiens
  misc_RNA (1)...(19): siRNA sense strand
caacauggccuacaagguu

SEQ ID NO: 1676888 - RNA, 19 nt, Homo sapiens
  misc_RNA (1)...(19): siRNA sense strand
ggaaugcguccaccacaua

SEQ ID NO: 1676889 - RNA, 19 nt, Homo sapiens
  misc_RNA (1)...(19): siRNA sense strand
gaggauagaagauguguug

SEQ ID NO: 1676890 - RNA, 19 nt, Homo sapiens
  misc_RNA (1)...(19): siRNA sense strand
cgagaacacuaaggacauu

SEQ ID NO: 1676891 - RNA, 19 nt, Homo sapiens
  misc_RNA (1)...(19): siRNA sense strand
ugccgcugcuggucuauua

SEQ ID NO: 1676892 - RNA, 19 nt, Homo sapiens
  misc_RNA (1)...(19): siRNA sense strand
aacauggccuacaagguua

SEQ ID NO: 1676893 - RNA, 19 nt, Homo sapiens
  misc_RNA (1)...(19): siRNA sense strand
cuaaggacauucggcugua

SEQ ID NO: 1676894 - RNA, 19 nt, Homo sapiens
  misc_RNA (1)...(19): siRNA sense strand
gggaugagcugggcuacag

SEQ ID NO: 1676895 - RNA, 19 nt, Homo sapiens
  misc_RNA (1)...(19): siRNA sense strand
gcugguagcgagaacacua

SEQ ID NO: 1676896 - RNA, 19 nt, Homo sapiens
  misc_RNA (1)...(19): siRNA sense strand
gcgcagauccgacagaacu

SEQ ID NO: 1676897 - RNA, 19 nt, Homo sapiens
  misc_RNA (1)...(19): siRNA sense strand
gaaugcguccaccacauau

SEQ ID NO: 1676898 - RNA, 19 nt, Homo sapiens
  misc_RNA (1)...(19): siRNA sense strand
ccucaacgccaucaacaug

SEQ ID NO: 1676899 - RNA, 19 nt, Homo sapiens
  misc_RNA (1)...(19): siRNA sense strand
guagcgagaacacuaagga

SEQ ID NO: 1676900 - RNA, 19 nt, Homo sapiens
  misc_RNA (1)...(19): siRNA sense strand
gcagauccgacagaacuga

SEQ ID NO: 1676901 - RNA, 19 nt, Homo sapiens
  misc_RNA (1)...(19): siRNA sense strand
ccgucauccuugucuguua

SEQ ID NO: 1676902 - RNA, 19 nt, Homo sapiens
  misc_RNA (1)...(19): siRNA sense strand
gcaaguccgugcgcaccau

SEQ ID NO: 1676903 - RNA, 19 nt, Homo sapiens
  misc_RNA (1)...(19): siRNA sense strand
gcucuucgcggugcccuuu

SEQ ID NO: 1676904 - RNA, 19 nt, Homo sapiens
  misc_RNA (1)...(19): siRNA sense strand
ccaccuggcugugucugau

SEQ ID NO: 1676905 - RNA, 19 nt, Homo sapiens
  misc_RNA (1)...(19): siRNA sense strand
gcagaggauagaagaugug

SEQ ID NO: 1676906 - RNA, 19 nt, Homo sapiens
  misc_RNA (1)...(19): siRNA sense strand
gcgagaacacuaaggacau

SEQ ID NO: 1676907 - RNA, 19 nt, Homo sapiens
  misc_RNA (1)...(19): siRNA sense strand
ccguggcgcucuacaucuu

SEQ ID NO: 1676908 - RNA, 19 nt, Homo sapiens
  misc_RNA (1)...(19): siRNA sense strand
gggcagcagugaggacucu

SEQ ID NO: 1676909 - RNA, 19 nt, Homo sapiens
  misc_RNA (1)...(19): siRNA sense strand
ggcuacaggugccgcuuca

SEQ ID NO: 1676910 - RNA, 19 nt, Homo sapiens
  misc_RNA (1)...(19): siRNA sense strand
uggaaugacaccaucaaug

SEQ ID NO: 1676911 - RNA, 19 nt, Homo sapiens
  misc_RNA (1)...(19): siRNA sense strand
uaaggacauucggcuguag

SEQ ID NO: 1676912 - RNA, 19 nt, Homo sapiens
  misc_RNA (1)...(19): siRNA sense strand
cgucauccuugucuguuac

SEQ ID NO: 1676913 - RNA, 19 nt, Homo sapiens
  misc_RNA (1)...(19): siRNA sense strand
ugcagaggauagaagaugu

SEQ ID NO: 1676914 - RNA, 19 nt, Homo sapiens
  misc_RNA (1)...(19): siRNA sense strand
ggaauggccucccagauuu

SEQ ID NO: 1676915 - RNA, 19 nt, Homo sapiens
  misc_RNA (1)...(19): siRNA sense strand
ggagugaucucaacccuaa

SEQ ID NO: 1676916 - RNA, 19 nt, Homo sapiens
  misc_RNA (1)...(19): siRNA sense strand
gaggauaagucccgucuaa

SEQ ID NO: 1676917 - RNA, 19 nt, Homo sapiens
  misc_RNA (1)...(19): siRNA sense strand
ggaaugggcuguucuccaa

SEQ ID NO: 1676918 - RNA, 19 nt, Homo sapiens
  misc_RNA (1)...(19): siRNA sense strand
ggaaaugguauuagagaua

SEQ ID NO: 1676919 - RNA, 19 nt, Homo sapiens
  misc_RNA (1)...(19): siRNA sense strand
gaacaucgcuguguaugag

SEQ ID NO: 1676920 - RNA, 19 nt, Homo sapiens
  misc_RNA (1)...(19): siRNA sense strand
cuaagcagcucacaacuga

SEQ ID NO: 1676921 - RNA, 19 nt, Homo sapiens
  misc_RNA (1)...(19): siRNA sense strand
caaaugcuguguaagaaga

SEQ ID NO: 1676922 - RNA, 19 nt, Homo sapiens
  misc_RNA (1)...(19): siRNA sense strand
agaaggagcuauuuaggaa

SEQ ID NO: 1676923 - RNA, 19 nt, Homo sapiens
  misc_RNA (1)...(19): siRNA sense strand
gaaggaagcagccaaagau

SEQ ID NO: 1676924 - RNA, 19 nt, Homo sapiens
  misc_RNA (1)...(19): siRNA sense strand
ccaaggaacuggagugauc

SEQ ID NO: 1676925 - RNA, 19 nt, Homo sapiens
  misc_RNA (1)...(19): siRNA sense strand
uugaagaucugagggauua

SEQ ID NO: 1676926 - RNA, 19 nt, Homo sapiens
  misc_RNA (1)...(19): siRNA sense strand
cauguucucuuauaucuug

SEQ ID NO: 1676927 - RNA, 19 nt, Homo sapiens
  misc_RNA (1)...(19): siRNA sense strand
ggaagaagguggagaucag

SEQ ID NO: 1676928 - RNA, 19 nt, Homo sapiens
  misc_RNA (1)...(19): siRNA sense strand
ggaccgagcccacuucaug

SEQ ID NO: 1676929 - RNA, 19 nt, Homo sapiens
  misc_RNA (1)...(19): siRNA sense strand
gaacuggagugaucucaac

SEQ ID NO: 1676930 - RNA, 19 nt, Homo sapiens
  misc_RNA (1)...(19): siRNA sense strand
gaacacaagaagcuacaaa

SEQ ID NO: 1676931 - RNA, 19 nt, Homo sapiens
  misc_RNA (1)...(19): siRNA sense strand
gaagaaggaagcagccaaa

SEQ ID NO: 1676932 - RNA, 19 nt, Homo sapiens
  misc_RNA (1)...(19): siRNA sense strand
ggagugaccuaccugcaau

SEQ ID NO: 1676933 - RNA, 19 nt, Homo sapiens
  misc_RNA (1)...(19): siRNA sense strand
cagaggcgcugcaagagaa

SEQ ID NO: 1676934 - RNA, 19 nt, Homo sapiens
  misc_RNA (1)...(19): siRNA sense strand
gacgaauucuucaccauga

SEQ ID NO: 1676935 - RNA, 19 nt, Homo sapiens
  misc_RNA (1)...(19): siRNA sense strand
ggaaggcugugacaaagca

SEQ ID NO: 1676936 - RNA, 19 nt, Homo sapiens
  misc_RNA (1)...(19): siRNA sense strand
gaagacauccgaaauacca

SEQ ID NO: 1676937 - RNA, 19 nt, Homo sapiens
  misc_RNA (1)...(19): siRNA sense strand
caucaggaguggcauaaau

SEQ ID NO: 1676938 - RNA, 19 nt, Homo sapiens
  misc_RNA (1)...(19): siRNA sense strand
ggauaagucccgucuaaug

SEQ ID NO: 1676939 - RNA, 19 nt, Homo sapiens
  misc_RNA (1)...(19): siRNA sense strand
ucaaagagagcgugaagaa

SEQ ID NO: 1676940 - RNA, 19 nt, Homo sapiens
  misc_RNA (1)...(19): siRNA sense strand
gaaggagauugaagacauc

SEQ ID NO: 1676941 - RNA, 19 nt, Homo sapiens
  misc_RNA (1)...(19): siRNA sense strand
uaagucccgucuaauguuu

SEQ ID NO: 1676942 - RNA, 19 nt, Homo sapiens
  misc_RNA (1)...(19): siRNA sense strand
caagaucccuaaggaguau

SEQ ID NO: 1676943 - RNA, 19 nt, Homo sapiens
  misc_RNA (1)...(19): siRNA sense strand
gagaggagcagucccauca

SEQ ID NO: 1676944 - RNA, 19 nt, Homo sapiens
  misc_RNA (1)...(19): siRNA sense strand
gagcggcacuuccagaaag

SEQ ID NO: 1676945 - RNA, 19 nt, Homo sapiens
  misc_RNA (1)...(19): siRNA sense strand
uguaugaccuggaugagaa

SEQ ID NO: 1676946 - RNA, 19 nt, Homo sapiens
  misc_RNA (1)...(19): siRNA sense strand
gauaagucccgucuaaugu

SEQ ID NO: 1676947 - RNA, 19 nt, Homo sapiens
  misc_RNA (1)...(19): siRNA sense strand
ggacccagcgucaguuuga

SEQ ID NO: 1676948 - RNA, 19 nt, Homo sapiens
  misc_RNA (1)...(19): siRNA sense strand
gccaaaugcuguguaagaa

SEQ ID NO: 1676949 - RNA, 19 nt, Homo sapiens
  misc_RNA (1)...(19): siRNA sense strand
gaaggcagcagcccugguu

SEQ ID NO: 1676950 - RNA, 19 nt, Homo sapiens
  misc_RNA (1)...(19): siRNA sense strand
ggaaugaccaagaauguag

SEQ ID NO: 1676951 - RNA, 19 nt, Homo sapiens
  misc_RNA (1)...(19): siRNA sense strand
guaccuugauggaccguuu

SEQ ID NO: 1676952 - RNA, 19 nt, Homo sapiens
  misc_RNA (1)...(19): siRNA sense strand
ccaaagcuguaccuugaug

SEQ ID NO: 1676953 - RNA, 19 nt, Homo sapiens
  misc_RNA (1)...(19): siRNA sense strand
acccaaagcuguaccuuga

SEQ ID NO: 1676954 - RNA, 19 nt, Homo sapiens
  misc_RNA (1)...(19): siRNA sense strand
gagcugacaugggaggauu

SEQ ID NO: 1676955 - RNA, 19 nt, Homo sapiens
  misc_RNA (1)...(19): siRNA sense strand
gagaaggagcuauuuagga

SEQ ID NO: 1676956 - RNA, 19 nt, Homo sapiens
  misc_RNA (1)...(19): siRNA sense strand
gagcaguucuucucuacca

SEQ ID NO: 1676957 - RNA, 19 nt, Homo sapiens
  misc_RNA (1)...(19): siRNA sense strand
gcauaaauuugagguguca

SEQ ID NO: 1676958 - RNA, 19 nt, Homo sapiens
  misc_RNA (1)...(19): siRNA sense strand
ucagggagaucuacucauc

SEQ ID NO: 1676959 - RNA, 19 nt, Homo sapiens
  misc_RNA (1)...(19): siRNA sense strand
ggagguggaaaugguauua

SEQ ID NO: 1676960 - RNA, 19 nt, Homo sapiens
  misc_RNA (1)...(19): siRNA sense strand
ggaagcagccaaagaugga

SEQ ID NO: 1676961 - RNA, 19 nt, Homo sapiens
  misc_RNA (1)...(19): siRNA sense strand
gaacaaggguuuucaaagc

SEQ ID NO: 1676962 - RNA, 19 nt, Homo sapiens
  misc_RNA (1)...(19): siRNA sense strand
gaccaagaauguagagaag

SEQ ID NO: 1676963 - RNA, 19 nt, Homo sapiens
  misc_RNA (1)...(19): siRNA sense strand
ugacugugcuugacuucuu

SEQ ID NO: 1676964 - RNA, 19 nt, Homo sapiens
  misc_RNA (1)...(19): siRNA sense strand
ccaagaaggagauugaaga

SEQ ID NO: 1676965 - RNA, 19 nt, Homo sapiens
  misc_RNA (1)...(19): siRNA sense strand
ugauccagcugcccacuuu

SEQ ID NO: 1676966 - RNA, 19 nt, Homo sapiens
  misc_RNA (1)...(19): siRNA sense strand
caucauccauggcagcuau

SEQ ID NO: 1676967 - RNA, 19 nt, Homo sapiens
  misc_RNA (1)...(19): siRNA sense strand
cgucuaauguuuaccaugu

SEQ ID NO: 1676968 - RNA, 19 nt, Homo sapiens
  misc_RNA (1)...(19): siRNA sense strand
agaaggagauugaagacau

SEQ ID NO: 1676969 - RNA, 19 nt, Homo sapiens
  misc_RNA (1)...(19): siRNA sense strand
uaugacggcugguuuaaca

SEQ ID NO: 1676970 - RNA, 19 nt, Homo sapiens
  misc_RNA (1)...(19): siRNA sense strand
ggaccaccaugcuauacau

SEQ ID NO: 1676971 - RNA, 19 nt, Homo sapiens
  misc_RNA (1)...(19): siRNA sense strand
acaagaagcuacaaaagaa

SEQ ID NO: 1676972 - RNA, 19 nt, Homo sapiens
  misc_RNA (1)...(19): siRNA sense strand
gcacccugcugcucaagau

SEQ ID NO: 1676973 - RNA, 19 nt, Homo sapiens
  misc_RNA (1)...(19): siRNA sense strand
gaggagcagucccaucauc

SEQ ID NO: 1676974 - RNA, 19 nt, Homo sapiens
  misc_RNA (1)...(19): siRNA sense strand
ggugaccgcuacugguuug

SEQ ID NO: 1676975 - RNA, 19 nt, Homo sapiens
  misc_RNA (1)...(19): siRNA sense strand
gcaccacuaugagaacuuc

SEQ ID NO: 1676976 - RNA, 19 nt, Homo sapiens
  misc_RNA (1)...(19): siRNA sense strand
caucuguguuggcguguuu

SEQ ID NO: 1676977 - RNA, 19 nt, Homo sapiens
  misc_RNA (1)...(19): siRNA sense strand
gaccuggugcugcuguuua

SEQ ID NO: 1676978 - RNA, 19 nt, Homo sapiens
  misc_RNA (1)...(19): siRNA sense strand
ggacggcagcgccaucuau

SEQ ID NO: 1676979 - RNA, 19 nt, Homo sapiens
  misc_RNA (1)...(19): siRNA sense strand
acacagaggcgcugcaaga

SEQ ID NO: 1676980 - RNA, 19 nt, Homo sapiens
  misc_RNA (1)...(19): siRNA sense strand
gcuggucgcuguuaucaac

SEQ ID NO: 1676981 - RNA, 19 nt, Homo sapiens
  misc_RNA (1)...(19): siRNA sense strand
gcgagagacuuuccucaac

SEQ ID NO: 1676982 - RNA, 19 nt, Homo sapiens
  misc_RNA (1)...(19): siRNA sense strand
caaaagaaacucaaagaga

SEQ ID NO: 1676983 - RNA, 19 nt, Homo sapiens
  misc_RNA (1)...(19): siRNA sense strand
gcaauggcugugcuggaua

SEQ ID NO: 1676984 - RNA, 19 nt, Homo sapiens
  misc_RNA (1)...(19): siRNA sense strand
ggacugaagaagagguuug

SEQ ID NO: 1676985 - RNA, 19 nt, Homo sapiens
  misc_RNA (1)...(19): siRNA sense strand
ucaucgagaucuccaacaa

SEQ ID NO: 1676986 - RNA, 19 nt, Homo sapiens
  misc_RNA (1)...(19): siRNA sense strand
ucaagaucccuaaggagua

SEQ ID NO: 1676987 - RNA, 19 nt, Homo sapiens
  misc_RNA (1)...(19): siRNA sense strand
guacccaggaggugaauga

SEQ ID NO: 1676988 - RNA, 19 nt, Homo sapiens
  misc_RNA (1)...(19): siRNA sense strand
uggcugacaucauccaaga

SEQ ID NO: 1676989 - RNA, 19 nt, Homo sapiens
  misc_RNA (1)...(19): siRNA sense strand
ccaacgucuuugugaauga

SEQ ID NO: 1676990 - RNA, 19 nt, Homo sapiens
  misc_RNA (1)...(19): siRNA sense strand
gaacgcauccuggagaucu

SEQ ID NO: 1676991 - RNA, 19 nt, Homo sapiens
  misc_RNA (1)...(19): siRNA sense strand
caacguggccgagauaugg

SEQ ID NO: 1676992 - RNA, 19 nt, Homo sapiens
  misc_RNA (1)...(19): siRNA sense strand
ggcaauggcugugcuggau

SEQ ID NO: 1676993 - RNA, 19 nt, Homo sapiens
  misc_RNA (1)...(19): siRNA sense strand
gacugugcuugacuucuuu

SEQ ID NO: 1676994 - RNA, 19 nt, Homo sapiens
  misc_RNA (1)...(19): siRNA sense strand
gcagcucugugucaaaggu

SEQ ID NO: 1676995 - RNA, 19 nt, Homo sapiens
  misc_RNA (1)...(19): siRNA sense strand
uuaggaaggcugugacaaa

SEQ ID NO: 1676996 - RNA, 19 nt, Homo sapiens
  misc_RNA (1)...(19): siRNA sense strand
gcgagaaggagcuauuuag

SEQ ID NO: 1676997 - RNA, 19 nt, Homo sapiens
  misc_RNA (1)...(19): siRNA sense strand
cuggagugguggccuauuu

SEQ ID NO: 1676998 - RNA, 19 nt, Homo sapiens
  misc_RNA (1)...(19): siRNA sense strand
gagcgagaaggagcuauuu

SEQ ID NO: 1676999 - RNA, 19 nt, Homo sapiens
  misc_RNA (1)...(19): siRNA sense strand
uggugucugugcacauuua

SEQ ID NO: 1677000 - RNA, 19 nt, Homo sapiens
  misc_RNA (1)...(19): siRNA sense strand
ggaguggcauaaauuugag

SEQ ID NO: 1677001 - RNA, 19 nt, Homo sapiens
  misc_RNA (1)...(19): siRNA sense strand
ucaggaguggcauaaauuu

SEQ ID NO: 1677002 - RNA, 19 nt, Homo sapiens
  misc_RNA (1)...(19): siRNA sense strand
cauggcagcuaugcucuga

SEQ ID NO: 1677003 - RNA, 19 nt, Homo sapiens
  misc_RNA (1)...(19): siRNA sense strand
ucuccuucauguucucuua

SEQ ID NO: 1677004 - RNA, 19 nt, Homo sapiens
  misc_RNA (1)...(19): siRNA sense strand
ucacgcagcucugugucaa

SEQ ID NO: 1677005 - RNA, 19 nt, Homo sapiens
  misc_RNA (1)...(19): siRNA sense strand
gaccgcuacugguuugaga

SEQ ID NO: 1677006 - RNA, 19 nt, Homo sapiens
  misc_RNA (1)...(19): siRNA sense strand
ugaccuaccugcaauucca

SEQ ID NO: 1677007 - RNA, 19 nt, Homo sapiens
  misc_RNA (1)...(19): siRNA sense strand
gguccaagcuuccccagaa

SEQ ID NO: 1677008 - RNA, 19 nt, Homo sapiens
  misc_RNA (1)...(19): siRNA sense strand
gaucgugcuuacuacuaug

SEQ ID NO: 1677009 - RNA, 19 nt, Homo sapiens
  misc_RNA (1)...(19): siRNA sense strand
gcccuggacugaagaagag

SEQ ID NO: 1677010 - RNA, 19 nt, Homo sapiens
  misc_RNA (1)...(19): siRNA sense strand
guuuaguucugaagaggaa

SEQ ID NO: 1677011 - RNA, 19 nt, Homo sapiens
  misc_RNA (1)...(19): siRNA sense strand
ugaccaagaauguagagaa

SEQ ID NO: 1677012 - RNA, 19 nt, Homo sapiens
  misc_RNA (1)...(19): siRNA sense strand
gccgcaaccucauaaccuu

SEQ ID NO: 1677013 - RNA, 19 nt, Homo sapiens
  misc_RNA (1)...(19): siRNA sense strand
caacgucuuugugaaugau

SEQ ID NO: 1677014 - RNA, 19 nt, Homo sapiens
  misc_RNA (1)...(19): siRNA sense strand
gagaugauauguuccauug

SEQ ID NO: 1677015 - RNA, 19 nt, Homo sapiens
  misc_RNA (1)...(19): siRNA sense strand
ggaauggacucagaaguau

SEQ ID NO: 1677016 - RNA, 19 nt, Homo sapiens
  misc_RNA (1)...(19): siRNA sense strand
caauccagaugauccuuua

SEQ ID NO: 1677017 - RNA, 19 nt, Homo sapiens
  misc_RNA (1)...(19): siRNA sense strand
gggaauggacucagaagua

SEQ ID NO: 1677018 - RNA, 19 nt, Homo sapiens
  misc_RNA (1)...(19): siRNA sense strand
cagaauagcucgggaaugg

SEQ ID NO: 1677019 - RNA, 19 nt, Homo sapiens
  misc_RNA (1)...(19): siRNA sense strand
gcauuugucuugauauucu

SEQ ID NO: 1677020 - RNA, 19 nt, Homo sapiens
  misc_RNA (1)...(19): siRNA sense strand
cagcauuugucuugauauu

SEQ ID NO: 1677021 - RNA, 19 nt, Homo sapiens
  misc_RNA (1)...(19): siRNA sense strand
caaaugacagucccuauca

SEQ ID NO: 1677022 - RNA, 19 nt, Homo sapiens
  misc_RNA (1)...(19): siRNA sense strand
ucagaaguaugcgauguaa

SEQ ID NO: 1677023 - RNA, 19 nt, Homo sapiens
  misc_RNA (1)...(19): siRNA sense strand
ggcagcauuugucuugaua

SEQ ID NO: 1677024 - RNA, 19 nt, Homo sapiens
  misc_RNA (1)...(19): siRNA sense strand
cuaucaggguggaguauuu

SEQ ID NO: 1677025 - RNA, 19 nt, Homo sapiens
  misc_RNA (1)...(19): siRNA sense strand
gcucgggaauggacucaga

SEQ ID NO: 1677026 - RNA, 19 nt, Homo sapiens
  misc_RNA (1)...(19): siRNA sense strand
aaaguacucuuguccaucu

SEQ ID NO: 1677027 - RNA, 19 nt, Homo sapiens
  misc_RNA (1)...(19): siRNA sense strand
guccaucuguucucuguug

SEQ ID NO: 1677028 - RNA, 19 nt, Homo sapiens
  misc_RNA (1)...(19): siRNA sense strand
caaaacagauagagaaaag

SEQ ID NO: 1677029 - RNA, 19 nt, Homo sapiens
  misc_RNA (1)...(19): siRNA sense strand
gacaauucauuucccaaca

SEQ ID NO: 1677030 - RNA, 19 nt, Homo sapiens
  misc_RNA (1)...(19): siRNA sense strand
ucuguucucuguuguguga

SEQ ID NO: 1677031 - RNA, 19 nt, Homo sapiens
  misc_RNA (1)...(19): siRNA sense strand
caauucauuucccaacaga

SEQ ID NO: 1677032 - RNA, 19 nt, Homo sapiens
  misc_RNA (1)...(19): siRNA sense strand
ggagaugauauguuccauu

SEQ ID NO: 1677033 - RNA, 19 nt, Homo sapiens
  misc_RNA (1)...(19): siRNA sense strand
uguuggagaugauauguuc

SEQ ID NO: 1677034 - RNA, 19 nt, Homo sapiens
  misc_RNA (1)...(19): siRNA sense strand
gauauucuacgaucacagu

SEQ ID NO: 1677035 - RNA, 19 nt, Homo sapiens
  misc_RNA (1)...(19): siRNA sense strand
uuggcaagcuacaauaaug

SEQ ID NO: 1677036 - RNA, 19 nt, Homo sapiens
  misc_RNA (1)...(19): siRNA sense strand
guacucuuguccaucuguu

SEQ ID NO: 1677037 - RNA, 19 nt, Homo sapiens
  misc_RNA (1)...(19): siRNA sense strand
ccaaaugacagucccuauc

SEQ ID NO: 1677038 - RNA, 19 nt, Homo sapiens
  misc_RNA (1)...(19): siRNA sense strand
caucuguucucuguugugu

SEQ ID NO: 1677039 - RNA, 19 nt, Homo sapiens
  misc_RNA (1)...(19): siRNA sense strand
caaaaguacucuuguccau

SEQ ID NO: 1677040 - RNA, 19 nt, Homo sapiens
  misc_RNA (1)...(19): siRNA sense strand
gaaaaguacaacagaauag

SEQ ID NO: 1677041 - RNA, 19 nt, Homo sapiens
  misc_RNA (1)...(19): siRNA sense strand
cagcacuaacuauuucaaa

SEQ ID NO: 1677042 - RNA, 19 nt, Homo sapiens
  misc_RNA (1)...(19): siRNA sense strand
gaauggacucagaaguaug

SEQ ID NO: 1677043 - RNA, 19 nt, Homo sapiens
  misc_RNA (1)...(19): siRNA sense strand
cuccagcacuaacuauuuc

SEQ ID NO: 1677044 - RNA, 19 nt, Homo sapiens
  misc_RNA (1)...(19): siRNA sense strand
ccaauccagaugauccuuu

SEQ ID NO: 1677045 - RNA, 19 nt, Homo sapiens
  misc_RNA (1)...(19): siRNA sense strand
ucuccagcacuaacuauuu

SEQ ID NO: 1677046 - RNA, 19 nt, Homo sapiens
  misc_RNA (1)...(19): siRNA sense strand
cuacaaaacagauagagaa

SEQ ID NO: 1677047 - RNA, 19 nt, Homo sapiens
  misc_RNA (1)...(19): siRNA sense strand
gagaaaaguacaacagaau

SEQ ID NO: 1677048 - RNA, 19 nt, Homo sapiens
  misc_RNA (1)...(19): siRNA sense strand
acaauucauuucccaacag

SEQ ID NO: 1677049 - RNA, 19 nt, Homo sapiens
  misc_RNA (1)...(19): siRNA sense strand
agagaaaaguacaacagaa

SEQ ID NO: 1677050 - RNA, 19 nt, Homo sapiens
  misc_RNA (1)...(19): siRNA sense strand
uggcagcauuugucuugau

SEQ ID NO: 1677051 - RNA, 19 nt, Homo sapiens
  misc_RNA (1)...(19): siRNA sense strand
uccagaugauccuuuagug

SEQ ID NO: 1677052 - RNA, 19 nt, Homo sapiens
  misc_RNA (1)...(19): siRNA sense strand
ggaauggacucagaaguau

SEQ ID NO: 1677053 - RNA, 19 nt, Homo sapiens
  misc_RNA (1)...(19): siRNA sense strand
caauccagaugauccuuua

SEQ ID NO: 1677054 - RNA, 19 nt, Homo sapiens
  misc_RNA (1)...(19): siRNA sense strand
gggaauggacucagaagua

SEQ ID NO: 1677055 - RNA, 19 nt, Homo sapiens
  misc_RNA (1)...(19): siRNA sense strand
cagaauagcucgggaaugg

SEQ ID NO: 1677056 - RNA, 19 nt, Homo sapiens
  misc_RNA (1)...(19): siRNA sense strand
gcauuugucuugauauucu

SEQ ID NO: 1677057 - RNA, 19 nt, Homo sapiens
  misc_RNA (1)...(19): siRNA sense strand
cagcauuugucuugauauu

SEQ ID NO: 1677058 - RNA, 19 nt, Homo sapiens
  misc_RNA (1)...(19): siRNA sense strand
caaaugacagucccuauca

SEQ ID NO: 1677059 - RNA, 19 nt, Homo sapiens
  misc_RNA (1)...(19): siRNA sense strand
ucagaaguaugcgauguaa

SEQ ID NO: 1677060 - RNA, 19 nt, Homo sapiens
  misc_RNA (1)...(19): siRNA sense strand
ggcagcauuugucuugaua

SEQ ID NO: 1677061 - RNA, 19 nt, Homo sapiens
  misc_RNA (1)...(19): siRNA sense strand
cuaucaggguggaguauuu

SEQ ID NO: 1677062 - RNA, 19 nt, Homo sapiens
  misc_RNA (1)...(19): siRNA sense strand
gcucgggaauggacucaga

SEQ ID NO: 1677063 - RNA, 19 nt, Homo sapiens
  misc_RNA (1)...(19): siRNA sense strand
aaaguacucuuguccaucu

SEQ ID NO: 1677064 - RNA, 19 nt, Homo sapiens
  misc_RNA (1)...(19): siRNA sense strand
guccaucuguucucuguug

SEQ ID NO: 1677065 - RNA, 19 nt, Homo sapiens
  misc_RNA (1)...(19): siRNA sense strand
caaaacagauagagaaaag

SEQ ID NO: 1677066 - RNA, 19 nt, Homo sapiens
  misc_RNA (1)...(19): siRNA sense strand
gacaauucauuucccaaca

SEQ ID NO: 1677067 - RNA, 19 nt, Homo sapiens
  misc_RNA (1)...(19): siRNA sense strand
ucuguucucuguuguguga

SEQ ID NO: 1677068 - RNA, 19 nt, Homo sapiens
  misc_RNA (1)...(19): siRNA sense strand
caauucauuucccaacaga

SEQ ID NO: 1677069 - RNA, 19 nt, Homo sapiens
  misc_RNA (1)...(19): siRNA sense strand
gauauucuacgaucacagu

SEQ ID NO: 1677070 - RNA, 19 nt, Homo sapiens
  misc_RNA (1)...(19): siRNA sense strand
guacucuuguccaucuguu

SEQ ID NO: 1677071 - RNA, 19 nt, Homo sapiens
  misc_RNA (1)...(19): siRNA sense strand
uuggcaagcuacaauaaug

SEQ ID NO: 1677072 - RNA, 19 nt, Homo sapiens
  misc_RNA (1)...(19): siRNA sense strand
ccaaaugacagucccuauc

SEQ ID NO: 1677073 - RNA, 19 nt, Homo sapiens
  misc_RNA (1)...(19): siRNA sense strand
caucuguucucuguugugu

SEQ ID NO: 1677074 - RNA, 19 nt, Homo sapiens
  misc_RNA (1)...(19): siRNA sense strand
caaaaguacucuuguccau

SEQ ID NO: 1677075 - RNA, 19 nt, Homo sapiens
  misc_RNA (1)...(19): siRNA sense strand
gaaaaguacaacagaauag

SEQ ID NO: 1677076 - RNA, 19 nt, Homo sapiens
  misc_RNA (1)...(19): siRNA sense strand
cagcacuaacuauuucaaa

SEQ ID NO: 1677077 - RNA, 19 nt, Homo sapiens
  misc_RNA (1)...(19): siRNA sense strand
gaauggacucagaaguaug

SEQ ID NO: 1677078 - RNA, 19 nt, Homo sapiens
  misc_RNA (1)...(19): siRNA sense strand
cuccagcacuaacuauuuc

SEQ ID NO: 1677079 - RNA, 19 nt, Homo sapiens
  misc_RNA (1)...(19): siRNA sense strand
ccaauccagaugauccuuu

SEQ ID NO: 1677080 - RNA, 19 nt, Homo sapiens
  misc_RNA (1)...(19): siRNA sense strand
ucuccagcacuaacuauuu

SEQ ID NO: 1677081 - RNA, 19 nt, Homo sapiens
  misc_RNA (1)...(19): siRNA sense strand
cuacaaaacagauagagaa

SEQ ID NO: 1677082 - RNA, 19 nt, Homo sapiens
  misc_RNA (1)...(19): siRNA sense strand
gagaaaaguacaacagaau

SEQ ID NO: 1677083 - RNA, 19 nt, Homo sapiens
  misc_RNA (1)...(19): siRNA sense strand
acaauucauuucccaacag

SEQ ID NO: 1677084 - RNA, 19 nt, Homo sapiens
  misc_RNA (1)...(19): siRNA sense strand
agagaaaaguacaacagaa

SEQ ID NO: 1677085 - RNA, 19 nt, Homo sapiens
  misc_RNA (1)...(19): siRNA sense strand
uggcagcauuugucuugau

SEQ ID NO: 1677086 - RNA, 19 nt, Homo sapiens
  misc_RNA (1)...(19): siRNA sense strand
uccagaugauccuuuagug

SEQ ID NO: 1677087 - RNA, 19 nt, Homo sapiens
  misc_RNA (1)...(19): siRNA sense strand
gaagaaaugcaauacauga

SEQ ID NO: 1677088 - RNA, 19 nt, Homo sapiens
  misc_RNA (1)...(19): siRNA sense strand
gaaauuagcaggucuugau

SEQ ID NO: 1677089 - RNA, 19 nt, Homo sapiens
  misc_RNA (1)...(19): siRNA sense strand
gaaacuacauaugcagauu

SEQ ID NO: 1677090 - RNA, 19 nt, Homo sapiens
  misc_RNA (1)...(19): siRNA sense strand
gacagaaggugaagaagau

SEQ ID NO: 1677091 - RNA, 19 nt, Homo sapiens
  misc_RNA (1)...(19): siRNA sense strand
gcaaugaauuagccuugaa

SEQ ID NO: 1677092 - RNA, 19 nt, Homo sapiens
  misc_RNA (1)...(19): siRNA sense strand
ugaagaagaugcacaacga

SEQ ID NO: 1677093 - RNA, 19 nt, Homo sapiens
  misc_RNA (1)...(19): siRNA sense strand
ggaagaacagguagaagaa

SEQ ID NO: 1677094 - RNA, 19 nt, Homo sapiens
  misc_RNA (1)...(19): siRNA sense strand
gaagaugcacaacgaaguu

SEQ ID NO: 1677095 - RNA, 19 nt, Homo sapiens
  misc_RNA (1)...(19): siRNA sense strand
caagacagaaggugaagaa

SEQ ID NO: 1677096 - RNA, 19 nt, Homo sapiens
  misc_RNA (1)...(19): siRNA sense strand
caacaagacagaaggugaa

SEQ ID NO: 1677097 - RNA, 19 nt, Homo sapiens
  misc_RNA (1)...(19): siRNA sense strand
gaagaacagguagaagaaa

SEQ ID NO: 1677098 - RNA, 19 nt, Homo sapiens
  misc_RNA (1)...(19): siRNA sense strand
gcaaguggcaacagcaaug

SEQ ID NO: 1677099 - RNA, 19 nt, Homo sapiens
  misc_RNA (1)...(19): siRNA sense strand
gaagaagaugcacaacgaa

SEQ ID NO: 1677100 - RNA, 19 nt, Homo sapiens
  misc_RNA (1)...(19): siRNA sense strand
uggcaacagcaaugaauua

SEQ ID NO: 1677101 - RNA, 19 nt, Homo sapiens
  misc_RNA (1)...(19): siRNA sense strand
aagaacagguagaagaaau

SEQ ID NO: 1677102 - RNA, 19 nt, Homo sapiens
  misc_RNA (1)...(19): siRNA sense strand
gcacaacgaaguucuacag

SEQ ID NO: 1677103 - RNA, 19 nt, Homo sapiens
  misc_RNA (1)...(19): siRNA sense strand
uacaugauauccugguuuc

SEQ ID NO: 1677104 - RNA, 19 nt, Homo sapiens
  misc_RNA (1)...(19): siRNA sense strand
agacagaaggugaagaaga

SEQ ID NO: 1677105 - RNA, 19 nt, Homo sapiens
  misc_RNA (1)...(19): siRNA sense strand
ggaaacuacauaugcagau

SEQ ID NO: 1677106 - RNA, 19 nt, Homo sapiens
  misc_RNA (1)...(19): siRNA sense strand
caaugaauuagccuugaaa

SEQ ID NO: 1677107 - RNA, 19 nt, Homo sapiens
  misc_RNA (1)...(19): siRNA sense strand
guagaagaaaugcaauaca

SEQ ID NO: 1677108 - RNA, 19 nt, Homo sapiens
  misc_RNA (1)...(19): siRNA sense strand
aaauuagcaggucuugaua

SEQ ID NO: 1677109 - RNA, 19 nt, Homo sapiens
  misc_RNA (1)...(19): siRNA sense strand
agcaaaaucugaaagcuaa

SEQ ID NO: 1677110 - RNA, 19 nt, Homo sapiens
  misc_RNA (1)...(19): siRNA sense strand
aggaagaacagguagaaga

SEQ ID NO: 1677111 - RNA, 19 nt, Homo sapiens
  misc_RNA (1)...(19): siRNA sense strand
gaugcacaacgaaguucua

SEQ ID NO: 1677112 - RNA, 19 nt, Homo sapiens
  misc_RNA (1)...(19): siRNA sense strand
gauaucaacaagacagaag

SEQ ID NO: 1677113 - RNA, 19 nt, Homo sapiens
  misc_RNA (1)...(19): siRNA sense strand
gaacagguagaagaaaugc

SEQ ID NO: 1677114 - RNA, 19 nt, Homo sapiens
  misc_RNA (1)...(19): siRNA sense strand
caaguggcaacagcaauga

SEQ ID NO: 1677115 - RNA, 19 nt, Homo sapiens
  misc_RNA (1)...(19): siRNA sense strand
ucaggaagaacagguagaa

SEQ ID NO: 1677116 - RNA, 19 nt, Homo sapiens
  misc_RNA (1)...(19): siRNA sense strand
acagguagaagaaaugcaa

SEQ ID NO: 1677117 - RNA, 19 nt, Homo sapiens
  misc_RNA (1)...(19): siRNA sense strand
agaagaaaugcaauacaug

SEQ ID NO: 1677118 - RNA, 19 nt, Homo sapiens
  misc_RNA (1)...(19): siRNA sense strand
uguggaaacuacauaugca

SEQ ID NO: 1677119 - RNA, 19 nt, Homo sapiens
  misc_RNA (1)...(19): siRNA sense strand
gguagaagaaaugcaauac

SEQ ID NO: 1677120 - RNA, 19 nt, Homo sapiens
  misc_RNA (1)...(19): siRNA sense strand
auuagcaggucuugauauc

SEQ ID NO: 1677121 - RNA, 19 nt, Homo sapiens
  misc_RNA (1)...(19): siRNA sense strand
gagaagcagcaaaaucuga

SEQ ID NO: 1677122 - RNA, 19 nt, Homo sapiens
  misc_RNA (1)...(19): siRNA sense strand
gaagaaaugcaauacauga

SEQ ID NO: 1677123 - RNA, 19 nt, Homo sapiens
  misc_RNA (1)...(19): siRNA sense strand
gaaauuagcaggucuugau

SEQ ID NO: 1677124 - RNA, 19 nt, Homo sapiens
  misc_RNA (1)...(19): siRNA sense strand
gaaacuacauaugcagauu

SEQ ID NO: 1677125 - RNA, 19 nt, Homo sapiens
  misc_RNA (1)...(19): siRNA sense strand
gacagaaggugaagaagau

SEQ ID NO: 1677126 - RNA, 19 nt, Homo sapiens
  misc_RNA (1)...(19): siRNA sense strand
gcaaugaauuagccuugaa

SEQ ID NO: 1677127 - RNA, 19 nt, Homo sapiens
  misc_RNA (1)...(19): siRNA sense strand
ugaagaagaugcacaacga

SEQ ID NO: 1677128 - RNA, 19 nt, Homo sapiens
  misc_RNA (1)...(19): siRNA sense strand
ggaagaacagguagaagaa

SEQ ID NO: 1677129 - RNA, 19 nt, Homo sapiens
  misc_RNA (1)...(19): siRNA sense strand
gaagaugcacaacgaaguu

SEQ ID NO: 1677130 - RNA, 19 nt, Homo sapiens
  misc_RNA (1)...(19): siRNA sense strand
caagacagaaggugaagaa

SEQ ID NO: 1677131 - RNA, 19 nt, Homo sapiens
  misc_RNA (1)...(19): siRNA sense strand
caacaagacagaaggugaa

SEQ ID NO: 1677132 - RNA, 19 nt, Homo sapiens
  misc_RNA (1)...(19): siRNA sense strand
gaagaacagguagaagaaa

SEQ ID NO: 1677133 - RNA, 19 nt, Homo sapiens
  misc_RNA (1)...(19): siRNA sense strand
gcaaguggcaacagcaaug

SEQ ID NO: 1677134 - RNA, 19 nt, Homo sapiens
  misc_RNA (1)...(19): siRNA sense strand
gaagaagaugcacaacgaa

SEQ ID NO: 1677135 - RNA, 19 nt, Homo sapiens
  misc_RNA (1)...(19): siRNA sense strand
uggcaacagcaaugaauua

SEQ ID NO: 1677136 - RNA, 19 nt, Homo sapiens
  misc_RNA (1)...(19): siRNA sense strand
aagaacagguagaagaaau

SEQ ID NO: 1677137 - RNA, 19 nt, Homo sapiens
  misc_RNA (1)...(19): siRNA sense strand
gcacaacgaaguucuacag

SEQ ID NO: 1677138 - RNA, 19 nt, Homo sapiens
  misc_RNA (1)...(19): siRNA sense strand
uacaugauauccugguuuc

SEQ ID NO: 1677139 - RNA, 19 nt, Homo sapiens
  misc_RNA (1)...(19): siRNA sense strand
agacagaaggugaagaaga

SEQ ID NO: 1677140 - RNA, 19 nt, Homo sapiens
  misc_RNA (1)...(19): siRNA sense strand
ggaaacuacauaugcagau

SEQ ID NO: 1677141 - RNA, 19 nt, Homo sapiens
  misc_RNA (1)...(19): siRNA sense strand
caaugaauuagccuugaaa

SEQ ID NO: 1677142 - RNA, 19 nt, Homo sapiens
  misc_RNA (1)...(19): siRNA sense strand
guagaagaaaugcaauaca

SEQ ID NO: 1677143 - RNA, 19 nt, Homo sapiens
  misc_RNA (1)...(19): siRNA sense strand
aaauuagcaggucuugaua

SEQ ID NO: 1677144 - RNA, 19 nt, Homo sapiens
  misc_RNA (1)...(19): siRNA sense strand
agcaaaaucugaaagcuaa

SEQ ID NO: 1677145 - RNA, 19 nt, Homo sapiens
  misc_RNA (1)...(19): siRNA sense strand
aggaagaacagguagaaga

SEQ ID NO: 1677146 - RNA, 19 nt, Homo sapiens
  misc_RNA (1)...(19): siRNA sense strand
gaugcacaacgaaguucua

SEQ ID NO: 1677147 - RNA, 19 nt, Homo sapiens
  misc_RNA (1)...(19): siRNA sense strand
gauaucaacaagacagaag

SEQ ID NO: 1677148 - RNA, 19 nt, Homo sapiens
  misc_RNA (1)...(19): siRNA sense strand
gaacagguagaagaaaugc

SEQ ID NO: 1677149 - RNA, 19 nt, Homo sapiens
  misc_RNA (1)...(19): siRNA sense strand
caaguggcaacagcaauga

SEQ ID NO: 1677150 - RNA, 19 nt, Homo sapiens
  misc_RNA (1)...(19): siRNA sense strand
ucaggaagaacagguagaa

SEQ ID NO: 1677151 - RNA, 19 nt, Homo sapiens
  misc_RNA (1)...(19): siRNA sense strand
acagguagaagaaaugcaa

SEQ ID NO: 1677152 - RNA, 19 nt, Homo sapiens
  misc_RNA (1)...(19): siRNA sense strand
agaagaaaugcaauacaug

SEQ ID NO: 1677153 - RNA, 19 nt, Homo sapiens
  misc_RNA (1)...(19): siRNA sense strand
uguggaaacuacauaugca

SEQ ID NO: 1677154 - RNA, 19 nt, Homo sapiens
  misc_RNA (1)...(19): siRNA sense strand
gguagaagaaaugcaauac

SEQ ID NO: 1677155 - RNA, 19 nt, Homo sapiens
  misc_RNA (1)...(19): siRNA sense strand
auuagcaggucuugauauc

SEQ ID NO: 1677156 - RNA, 19 nt, Homo sapiens
  misc_RNA (1)...(19): siRNA sense strand
gagaagcagcaaaaucuga

SEQ ID NO: 1677157 - RNA, 19 nt, Homo sapiens
  misc_RNA (1)...(19): siRNA sense strand
cagagaagcugguuauaaa

SEQ ID NO: 1677158 - RNA, 19 nt, Homo sapiens
  misc_RNA (1)...(19): siRNA sense strand
cuauugaccugaagaauuu

SEQ ID NO: 1677159 - RNA, 19 nt, Homo sapiens
  misc_RNA (1)...(19): siRNA sense strand
gaagccagcugcucggaaa

SEQ ID NO: 1677160 - RNA, 19 nt, Homo sapiens
  misc_RNA (1)...(19): siRNA sense strand
gaagaaaugaggaaacuau

SEQ ID NO: 1677161 - RNA, 19 nt, Homo sapiens
  misc_RNA (1)...(19): siRNA sense strand
aaugaaggcuugacuauug

SEQ ID NO: 1677162 - RNA, 19 nt, Homo sapiens
  misc_RNA (1)...(19): siRNA sense strand
agagagggcuguagucauu

SEQ ID NO: 1677163 - RNA, 19 nt, Homo sapiens
  misc_RNA (1)...(19): siRNA sense strand
cgacaucacugaggaagaa

SEQ ID NO: 1677164 - RNA, 19 nt, Homo sapiens
  misc_RNA (1)...(19): siRNA sense strand
gaaagcaucaucaacauca

SEQ ID NO: 1677165 - RNA, 19 nt, Homo sapiens
  misc_RNA (1)...(19): siRNA sense strand
ggauggaacuuugggauug

SEQ ID NO: 1677166 - RNA, 19 nt, Homo sapiens
  misc_RNA (1)...(19): siRNA sense strand
ccaacgaacugcuggaaga

SEQ ID NO: 1677167 - RNA, 19 nt, Homo sapiens
  misc_RNA (1)...(19): siRNA sense strand
caagaaagcaucaucaaca

SEQ ID NO: 1677168 - RNA, 19 nt, Homo sapiens
  misc_RNA (1)...(19): siRNA sense strand
gaaaaggcauuguugaguu

SEQ ID NO: 1677169 - RNA, 19 nt, Homo sapiens
  misc_RNA (1)...(19): siRNA sense strand
gugagaagcuggagaugga

SEQ ID NO: 1677170 - RNA, 19 nt, Homo sapiens
  misc_RNA (1)...(19): siRNA sense strand
ugaggaaacuauuugagaa

SEQ ID NO: 1677171 - RNA, 19 nt, Homo sapiens
  misc_RNA (1)...(19): siRNA sense strand
ccaguuagaugaugaagag

SEQ ID NO: 1677172 - RNA, 19 nt, Homo sapiens
  misc_RNA (1)...(19): siRNA sense strand
caaggaggcucgugagaag

SEQ ID NO: 1677173 - RNA, 19 nt, Homo sapiens
  misc_RNA (1)...(19): siRNA sense strand
aaacaaacgucgccgauac

SEQ ID NO: 1677174 - RNA, 19 nt, Homo sapiens
  misc_RNA (1)...(19): siRNA sense strand
aaguggagcuggacaauau

SEQ ID NO: 1677175 - RNA, 19 nt, Homo sapiens
  misc_RNA (1)...(19): siRNA sense strand
uagcggagauugccaaagu

SEQ ID NO: 1677176 - RNA, 19 nt, Homo sapiens
  misc_RNA (1)...(19): siRNA sense strand
gaacuccuccugcauucaa

SEQ ID NO: 1677177 - RNA, 19 nt, Homo sapiens
  misc_RNA (1)...(19): siRNA sense strand
gagagcagccacccagauu

SEQ ID NO: 1677178 - RNA, 19 nt, Homo sapiens
  misc_RNA (1)...(19): siRNA sense strand
uggaagagcugcacaacca

SEQ ID NO: 1677179 - RNA, 19 nt, Homo sapiens
  misc_RNA (1)...(19): siRNA sense strand
caacaggccagcagccaaa

SEQ ID NO: 1677180 - RNA, 19 nt, Homo sapiens
  misc_RNA (1)...(19): siRNA sense strand
gauggaacuuugggauuga

SEQ ID NO: 1677181 - RNA, 19 nt, Homo sapiens
  misc_RNA (1)...(19): siRNA sense strand
gagcagccacccagauuug

SEQ ID NO: 1677182 - RNA, 19 nt, Homo sapiens
  misc_RNA (1)...(19): siRNA sense strand
gaggaaacuauuugagaaa

SEQ ID NO: 1677183 - RNA, 19 nt, Homo sapiens
  misc_RNA (1)...(19): siRNA sense strand
gcagcaagaagaaaugaug

SEQ ID NO: 1677184 - RNA, 19 nt, Homo sapiens
  misc_RNA (1)...(19): siRNA sense strand
gaugaggcgccaagaagaa

SEQ ID NO: 1677185 - RNA, 19 nt, Homo sapiens
  misc_RNA (1)...(19): siRNA sense strand
uucgaaaccuuccucagua

SEQ ID NO: 1677186 - RNA, 19 nt, Homo sapiens
  misc_RNA (1)...(19): siRNA sense strand
caaacaaacgucgccgaua

SEQ ID NO: 1677187 - RNA, 19 nt, Homo sapiens
  misc_RNA (1)...(19): siRNA sense strand
ucauugagauggagaagca

SEQ ID NO: 1677188 - RNA, 19 nt, Homo sapiens
  misc_RNA (1)...(19): siRNA sense strand
aagagggacuuccagagaa

SEQ ID NO: 1677189 - RNA, 19 nt, Homo sapiens
  misc_RNA (1)...(19): siRNA sense strand
gaaaccuuccucaguaugu

SEQ ID NO: 1677190 - RNA, 19 nt, Homo sapiens
  misc_RNA (1)...(19): siRNA sense strand
caaguggaccgcaacauca

SEQ ID NO: 1677191 - RNA, 19 nt, Homo sapiens
  misc_RNA (1)...(19): siRNA sense strand
accaacaacugaacgcuuu

SEQ ID NO: 1677192 - RNA, 19 nt, Homo sapiens
  misc_RNA (1)...(19): siRNA sense strand
ccagcaauuucacaaggaa

SEQ ID NO: 1677193 - RNA, 19 nt, Homo sapiens
  misc_RNA (1)...(19): siRNA sense strand
gcaaaaccauacuccaaga

SEQ ID NO: 1677194 - RNA, 19 nt, Homo sapiens
  misc_RNA (1)...(19): siRNA sense strand
ccauggaccaguuagauga

SEQ ID NO: 1677195 - RNA, 19 nt, Homo sapiens
  misc_RNA (1)...(19): siRNA sense strand
aagaaagcaucaucaacau

SEQ ID NO: 1677196 - RNA, 19 nt, Homo sapiens
  misc_RNA (1)...(19): siRNA sense strand
gaugccggauggaacuuug

SEQ ID NO: 1677197 - RNA, 19 nt, Homo sapiens
  misc_RNA (1)...(19): siRNA sense strand
gcuggaaggcacucauuga

SEQ ID NO: 1677198 - RNA, 19 nt, Homo sapiens
  misc_RNA (1)...(19): siRNA sense strand
ggaagaaaugaggaaacua

SEQ ID NO: 1677199 - RNA, 19 nt, Homo sapiens
  misc_RNA (1)...(19): siRNA sense strand
caaacgucgccgauacuaa

SEQ ID NO: 1677200 - RNA, 19 nt, Homo sapiens
  misc_RNA (1)...(19): siRNA sense strand
gcagcugcgugugcgcuuu

SEQ ID NO: 1677201 - RNA, 19 nt, Homo sapiens
  misc_RNA (1)...(19): siRNA sense strand
aaaccauacuccaagaaag

SEQ ID NO: 1677202 - RNA, 19 nt, Homo sapiens
  misc_RNA (1)...(19): siRNA sense strand
ucgaaaccuuccucaguau

SEQ ID NO: 1677203 - RNA, 19 nt, Homo sapiens
  misc_RNA (1)...(19): siRNA sense strand
gaaaggcaggcgaagucuu

SEQ ID NO: 1677204 - RNA, 19 nt, Homo sapiens
  misc_RNA (1)...(19): siRNA sense strand
guucgaaaccuuccucagu

SEQ ID NO: 1677205 - RNA, 19 nt, Homo sapiens
  misc_RNA (1)...(19): siRNA sense strand
cuaaugagacaggauuuga

SEQ ID NO: 1677206 - RNA, 19 nt, Homo sapiens
  misc_RNA (1)...(19): siRNA sense strand
guagagagggcuguaguca

SEQ ID NO: 1677207 - RNA, 19 nt, Homo sapiens
  misc_RNA (1)...(19): siRNA sense strand
ccaaguggaccgcaacauc

SEQ ID NO: 1677208 - RNA, 19 nt, Homo sapiens
  misc_RNA (1)...(19): siRNA sense strand
cgagagagcaggagauucg

SEQ ID NO: 1677209 - RNA, 19 nt, Homo sapiens
  misc_RNA (1)...(19): siRNA sense strand
ucaaggaggcucgugagaa

SEQ ID NO: 1677210 - RNA, 19 nt, Homo sapiens
  misc_RNA (1)...(19): siRNA sense strand
gcuugacuauugaccugaa

SEQ ID NO: 1677211 - RNA, 19 nt, Homo sapiens
  misc_RNA (1)...(19): siRNA sense strand
gaaaucuuccucccgacau

SEQ ID NO: 1677212 - RNA, 19 nt, Homo sapiens
  misc_RNA (1)...(19): siRNA sense strand
acuauugaccugaagaauu

SEQ ID NO: 1677213 - RNA, 19 nt, Homo sapiens
  misc_RNA (1)...(19): siRNA sense strand
caacgaacugcuggaagaa

SEQ ID NO: 1677214 - RNA, 19 nt, Homo sapiens
  misc_RNA (1)...(19): siRNA sense strand
guggaacuccuccugcauu

SEQ ID NO: 1677215 - RNA, 19 nt, Homo sapiens
  misc_RNA (1)...(19): siRNA sense strand
aaaguggagcuggacaaua

SEQ ID NO: 1677216 - RNA, 19 nt, Homo sapiens
  misc_RNA (1)...(19): siRNA sense strand
ucaggcugcuacaauggaa

SEQ ID NO: 1677217 - RNA, 19 nt, Homo sapiens
  misc_RNA (1)...(19): siRNA sense strand
ggaugggucagauggcuau

SEQ ID NO: 1677218 - RNA, 19 nt, Homo sapiens
  misc_RNA (1)...(19): siRNA sense strand
ugccauagugcaucccuua

SEQ ID NO: 1677219 - RNA, 19 nt, Homo sapiens
  misc_RNA (1)...(19): siRNA sense strand
cauagugcaucccuuacag

SEQ ID NO: 1677220 - RNA, 19 nt, Homo sapiens
  misc_RNA (1)...(19): siRNA sense strand
ggcgacagcaggaaggauu

SEQ ID NO: 1677221 - RNA, 19 nt, Homo sapiens
  misc_RNA (1)...(19): siRNA sense strand
ggcuuuauccgcuuggaaa

SEQ ID NO: 1677222 - RNA, 19 nt, Homo sapiens
  misc_RNA (1)...(19): siRNA sense strand
gcuaaugagacaggauuug

SEQ ID NO: 1677223 - RNA, 19 nt, Homo sapiens
  misc_RNA (1)...(19): siRNA sense strand
ggaaggcccucaggaaaag

SEQ ID NO: 1677224 - RNA, 19 nt, Homo sapiens
  misc_RNA (1)...(19): siRNA sense strand
caaaguggagcuggacaau

SEQ ID NO: 1677225 - RNA, 19 nt, Homo sapiens
  misc_RNA (1)...(19): siRNA sense strand
aaaugaaggcuugacuauu

SEQ ID NO: 1677226 - RNA, 19 nt, Homo sapiens
  misc_RNA (1)...(19): siRNA sense strand
ggaccaguuagaugaugaa

SEQ ID NO: 1677227 - RNA, 19 nt, Homo sapiens
  misc_RNA (1)...(19): siRNA sense strand
gcuccuuugaguaugaaua

SEQ ID NO: 1677228 - RNA, 19 nt, Homo sapiens
  misc_RNA (1)...(19): siRNA sense strand
augaaggcuugacuauuga

SEQ ID NO: 1677229 - RNA, 19 nt, Homo sapiens
  misc_RNA (1)...(19): siRNA sense strand
gagauucggaugggucaga

SEQ ID NO: 1677230 - RNA, 19 nt, Homo sapiens
  misc_RNA (1)...(19): siRNA sense strand
ggaagagcugcacaaccaa

SEQ ID NO: 1677231 - RNA, 19 nt, Homo sapiens
  misc_RNA (1)...(19): siRNA sense strand
ggauggaagagcugcacaa

SEQ ID NO: 1677232 - RNA, 19 nt, Homo sapiens
  misc_RNA (1)...(19): siRNA sense strand
gcgcuggaaggcacucauu

SEQ ID NO: 1677233 - RNA, 19 nt, Homo sapiens
  misc_RNA (1)...(19): siRNA sense strand
gcgcuuugccugccauagu

SEQ ID NO: 1677234 - RNA, 19 nt, Homo sapiens
  misc_RNA (1)...(19): siRNA sense strand
uggaacuccuccugcauuc

SEQ ID NO: 1677235 - RNA, 19 nt, Homo sapiens
  misc_RNA (1)...(19): siRNA sense strand
caaaaugaaggcuugacua

SEQ ID NO: 1677236 - RNA, 19 nt, Homo sapiens
  misc_RNA (1)...(19): siRNA sense strand
ggagcccauggaccaguua

SEQ ID NO: 1677237 - RNA, 19 nt, Homo sapiens
  misc_RNA (1)...(19): siRNA sense strand
ccaaaguggagcuggacaa

SEQ ID NO: 1677238 - RNA, 19 nt, Homo sapiens
  misc_RNA (1)...(19): siRNA sense strand
ccuuacaguucgaaaccuu

SEQ ID NO: 1677239 - RNA, 19 nt, Homo sapiens
  misc_RNA (1)...(19): siRNA sense strand
caucacugaggaagaaaug

SEQ ID NO: 1677240 - RNA, 19 nt, Homo sapiens
  misc_RNA (1)...(19): siRNA sense strand
ccaagaaagcaucaucaac

SEQ ID NO: 1677241 - RNA, 19 nt, Homo sapiens
  misc_RNA (1)...(19): siRNA sense strand
cuggacagaugcagugaag

SEQ ID NO: 1677242 - RNA, 19 nt, Homo sapiens
  misc_RNA (1)...(19): siRNA sense strand
aggaagaaaugaggaaacu

SEQ ID NO: 1677243 - RNA, 19 nt, Homo sapiens
  misc_RNA (1)...(19): siRNA sense strand
ggauugaccccaccaacaa

SEQ ID NO: 1677244 - RNA, 19 nt, Homo sapiens
  misc_RNA (1)...(19): siRNA sense strand
ugaugaggcgccaagaaga

SEQ ID NO: 1677245 - RNA, 19 nt, Homo sapiens
  misc_RNA (1)...(19): siRNA sense strand
aaugagacaggauuugaug

SEQ ID NO: 1677246 - RNA, 19 nt, Homo sapiens
  misc_RNA (1)...(19): siRNA sense strand
uggaccaguuagaugauga

SEQ ID NO: 1677247 - RNA, 19 nt, Homo sapiens
  misc_RNA (1)...(19): siRNA sense strand
aaaccuuccucaguaugug

SEQ ID NO: 1677248 - RNA, 19 nt, Homo sapiens
  misc_RNA (1)...(19): siRNA sense strand
ugacuauugaccugaagaa

SEQ ID NO: 1677249 - RNA, 19 nt, Homo sapiens
  misc_RNA (1)...(19): siRNA sense strand
cucaguauguguccaacga

SEQ ID NO: 1677250 - RNA, 19 nt, Homo sapiens
  misc_RNA (1)...(19): siRNA sense strand
acaaacgucgccgauacua

SEQ ID NO: 1677251 - RNA, 19 nt, Homo sapiens
  misc_RNA (1)...(19): siRNA sense strand
gcaccaggucaugcuaaug

SEQ ID NO: 1677252 - RNA, 19 nt, Homo sapiens
  misc_RNA (1)...(19): siRNA sense strand
agagggcuguagucauugu

SEQ ID NO: 1677253 - RNA, 19 nt, Homo sapiens
  misc_RNA (1)...(19): siRNA sense strand
aauaugccaugcgcuggaa

SEQ ID NO: 1677254 - RNA, 19 nt, Homo sapiens
  misc_RNA (1)...(19): siRNA sense strand
cugcuacaauggaaggaau

SEQ ID NO: 1677255 - RNA, 19 nt, Homo sapiens
  misc_RNA (1)...(19): siRNA sense strand
uggucaggcugcuacaaug

SEQ ID NO: 1677256 - RNA, 19 nt, Homo sapiens
  misc_RNA (1)...(19): siRNA sense strand
uaaugagacaggauuugau

SEQ ID NO: 1677257 - RNA, 19 nt, Homo sapiens
  misc_RNA (1)...(19): siRNA sense strand
gcaaacacgucuuaguaca

SEQ ID NO: 1677258 - RNA, 19 nt, Homo sapiens
  misc_RNA (1)...(19): siRNA sense strand
gcugagauauguauucauc

SEQ ID NO: 1677259 - RNA, 19 nt, Homo sapiens
  misc_RNA (1)...(19): siRNA sense strand
gaacccauauugaaauguc

SEQ ID NO: 1677260 - RNA, 19 nt, Homo sapiens
  misc_RNA (1)...(19): siRNA sense strand
caaagcaaguugacaugug

SEQ ID NO: 1677261 - RNA, 19 nt, Homo sapiens
  misc_RNA (1)...(19): siRNA sense strand
ggacagcugagauauguau

SEQ ID NO: 1677262 - RNA, 19 nt, Homo sapiens
  misc_RNA (1)...(19): siRNA sense strand
ugggaaaucuugugucaga

SEQ ID NO: 1677263 - RNA, 19 nt, Homo sapiens
  misc_RNA (1)...(19): siRNA sense strand
caggacagcugagauaugu

SEQ ID NO: 1677264 - RNA, 19 nt, Homo sapiens
  misc_RNA (1)...(19): siRNA sense strand
agcauuggcuuccagguua

SEQ ID NO: 1677265 - RNA, 19 nt, Homo sapiens
  misc_RNA (1)...(19): siRNA sense strand
uggcaaacacgucuuagua

SEQ ID NO: 1677266 - RNA, 19 nt, Homo sapiens
  misc_RNA (1)...(19): siRNA sense strand
gcuggaacccauauugaaa

SEQ ID NO: 1677267 - RNA, 19 nt, Homo sapiens
  misc_RNA (1)...(19): siRNA sense strand
uggaggaggugaagaagau

SEQ ID NO: 1677268 - RNA, 19 nt, Homo sapiens
  misc_RNA (1)...(19): siRNA sense strand
cagcugagauauguauuca

SEQ ID NO: 1677269 - RNA, 19 nt, Homo sapiens
  misc_RNA (1)...(19): siRNA sense strand
acuauuggcugcauucuag

SEQ ID NO: 1677270 - RNA, 19 nt, Homo sapiens
  misc_RNA (1)...(19): siRNA sense strand
aaacacgucuuaguacaca

SEQ ID NO: 1677271 - RNA, 19 nt, Homo sapiens
  misc_RNA (1)...(19): siRNA sense strand
gauauguauucauccacaa

SEQ ID NO: 1677272 - RNA, 19 nt, Homo sapiens
  misc_RNA (1)...(19): siRNA sense strand
caaguugacauguggcaaa

SEQ ID NO: 1677273 - RNA, 19 nt, Homo sapiens
  misc_RNA (1)...(19): siRNA sense strand
agaucuagcuggacuugga

SEQ ID NO: 1677274 - RNA, 19 nt, Homo sapiens
  misc_RNA (1)...(19): siRNA sense strand
caggcuacguugaagcauu

SEQ ID NO: 1677275 - RNA, 19 nt, Homo sapiens
  misc_RNA (1)...(19): siRNA sense strand
cuucgagucuguugccauu

SEQ ID NO: 1677276 - RNA, 19 nt, Homo sapiens
  misc_RNA (1)...(19): siRNA sense strand
ugagauauguauucaucca

SEQ ID NO: 1677277 - RNA, 19 nt, Homo sapiens
  misc_RNA (1)...(19): siRNA sense strand
ccaagaaggagcccaugga

SEQ ID NO: 1677278 - RNA, 19 nt, Homo sapiens
  misc_RNA (1)...(19): siRNA sense strand
uuccugaucucacaccaaa

SEQ ID NO: 1677279 - RNA, 19 nt, Homo sapiens
  misc_RNA (1)...(19): siRNA sense strand
gucaauuccugaucucaca

SEQ ID NO: 1677280 - RNA, 19 nt, Homo sapiens
  misc_RNA (1)...(19): siRNA sense strand
uuucauaggguuuggcuuu

SEQ ID NO: 1677281 - RNA, 19 nt, Homo sapiens
  misc_RNA (1)...(19): siRNA sense strand
aggcuacguugaagcauug

SEQ ID NO: 1677282 - RNA, 19 nt, Homo sapiens
  misc_RNA (1)...(19): siRNA sense strand
uggaacccauauugaaaug

SEQ ID NO: 1677283 - RNA, 19 nt, Homo sapiens
  misc_RNA (1)...(19): siRNA sense strand
gaggaggugaagaagauga

SEQ ID NO: 1677284 - RNA, 19 nt, Homo sapiens
  misc_RNA (1)...(19): siRNA sense strand
gcauuggcuuccagguuag

SEQ ID NO: 1677285 - RNA, 19 nt, Homo sapiens
  misc_RNA (1)...(19): siRNA sense strand
acaaugcgauaccuuucau

SEQ ID NO: 1677286 - RNA, 19 nt, Homo sapiens
  misc_RNA (1)...(19): siRNA sense strand
ccacaaugcgauaccuuuc

SEQ ID NO: 1677287 - RNA, 19 nt, Homo sapiens
  misc_RNA (1)...(19): siRNA sense strand
uuugggaaaucuuguguca

SEQ ID NO: 1677288 - RNA, 19 nt, Homo sapiens
  misc_RNA (1)...(19): siRNA sense strand
gguuaggccugucaauucc

SEQ ID NO: 1677289 - RNA, 19 nt, Homo sapiens
  misc_RNA (1)...(19): siRNA sense strand
gacuauuggcugcauucua

SEQ ID NO: 1677290 - RNA, 19 nt, Homo sapiens
  misc_RNA (1)...(19): siRNA sense strand
gcacgcaccccaagaagga

SEQ ID NO: 1677291 - RNA, 19 nt, Homo sapiens
  misc_RNA (1)...(19): siRNA sense strand
ggcaaacacgucuuaguac

SEQ ID NO: 1677292 - RNA, 19 nt, Homo sapiens
  misc_RNA (1)...(19): siRNA sense strand
ccaggacagcugagauaug

SEQ ID NO: 1677293 - RNA, 19 nt, Homo sapiens
  misc_RNA (1)...(19): siRNA sense strand
ucacaccaaagcaaguuga

SEQ ID NO: 1677294 - RNA, 19 nt, Homo sapiens
  misc_RNA (1)...(19): siRNA sense strand
ccaaagcaaguugacaugu

SEQ ID NO: 1677295 - RNA, 19 nt, Homo sapiens
  misc_RNA (1)...(19): siRNA sense strand
caaugcgauaccuuucaua

SEQ ID NO: 1677296 - RNA, 19 nt, Homo sapiens
  misc_RNA (1)...(19): siRNA sense strand
ggaggugaagaagaugaaa

SEQ ID NO: 1677297 - RNA, 19 nt, Homo sapiens
  misc_RNA (1)...(19): siRNA sense strand
ggugacuauuggcugcauu

SEQ ID NO: 1677298 - RNA, 19 nt, Homo sapiens
  misc_RNA (1)...(19): siRNA sense strand
caccaaagcaaguugacau

SEQ ID NO: 1677299 - RNA, 19 nt, Homo sapiens
  misc_RNA (1)...(19): siRNA sense strand
gaaaugauguggagauaaa

SEQ ID NO: 1677300 - RNA, 19 nt, Homo sapiens
  misc_RNA (1)...(19): siRNA sense strand
ucagagagauggcacuuua

SEQ ID NO: 1677301 - RNA, 19 nt, Homo sapiens
  misc_RNA (1)...(19): siRNA sense strand
gaaguggaauuucuccuaa

SEQ ID NO: 1677302 - RNA, 19 nt, Homo sapiens
  misc_RNA (1)...(19): siRNA sense strand
cagaauaccuucccucauu

SEQ ID NO: 1677303 - RNA, 19 nt, Homo sapiens
  misc_RNA (1)...(19): siRNA sense strand
caaagaaauuccaagguuu

SEQ ID NO: 1677304 - RNA, 19 nt, Homo sapiens
  misc_RNA (1)...(19): siRNA sense strand
ccaaagaaauuccaagguu

SEQ ID NO: 1677305 - RNA, 19 nt, Homo sapiens
  misc_RNA (1)...(19): siRNA sense strand
gagaggagaguaaguauaa

SEQ ID NO: 1677306 - RNA, 19 nt, Homo sapiens
  misc_RNA (1)...(19): siRNA sense strand
gcaagagguaugcaaauua

SEQ ID NO: 1677307 - RNA, 19 nt, Homo sapiens
  misc_RNA (1)...(19): siRNA sense strand
caacuggacuuuacacgaa

SEQ ID NO: 1677308 - RNA, 19 nt, Homo sapiens
  misc_RNA (1)...(19): siRNA sense strand
gaacaggaaaucaaggaua

SEQ ID NO: 1677309 - RNA, 19 nt, Homo sapiens
  misc_RNA (1)...(19): siRNA sense strand
gaagauagcauuccuuuac

SEQ ID NO: 1677310 - RNA, 19 nt, Homo sapiens
  misc_RNA (1)...(19): siRNA sense strand
gccagaaccuauuuaguaa

SEQ ID NO: 1677311 - RNA, 19 nt, Homo sapiens
  misc_RNA (1)...(19): siRNA sense strand
cgaaagacauuagcagaaa

SEQ ID NO: 1677312 - RNA, 19 nt, Homo sapiens
  misc_RNA (1)...(19): siRNA sense strand
gaaagcaaacaacuucuaa

SEQ ID NO: 1677313 - RNA, 19 nt, Homo sapiens
  misc_RNA (1)...(19): siRNA sense strand
ucaagaacaugccaaagaa

SEQ ID NO: 1677314 - RNA, 19 nt, Homo sapiens
  misc_RNA (1)...(19): siRNA sense strand
ggacagucucuucgaauua

SEQ ID NO: 1677315 - RNA, 19 nt, Homo sapiens
  misc_RNA (1)...(19): siRNA sense strand
gaaggcaaaugaaauuauc

SEQ ID NO: 1677316 - RNA, 19 nt, Homo sapiens
  misc_RNA (1)...(19): siRNA sense strand
gagaguaaguauaagaaug

SEQ ID NO: 1677317 - RNA, 19 nt, Homo sapiens
  misc_RNA (1)...(19): siRNA sense strand
gauaaggaccagcuuguuu

SEQ ID NO: 1677318 - RNA, 19 nt, Homo sapiens
  misc_RNA (1)...(19): siRNA sense strand
gacagucucuucgaauuaa

SEQ ID NO: 1677319 - RNA, 19 nt, Homo sapiens
  misc_RNA (1)...(19): siRNA sense strand
aaacaagcauucucaggaa

SEQ ID NO: 1677320 - RNA, 19 nt, Homo sapiens
  misc_RNA (1)...(19): siRNA sense strand
ggaaaauggugaaaaugua

SEQ ID NO: 1677321 - RNA, 19 nt, Homo sapiens
  misc_RNA (1)...(19): siRNA sense strand
gaaauccuccaucaacaaa

SEQ ID NO: 1677322 - RNA, 19 nt, Homo sapiens
  misc_RNA (1)...(19): siRNA sense strand
agaaaggacuuaguuauuc

SEQ ID NO: 1677323 - RNA, 19 nt, Homo sapiens
  misc_RNA (1)...(19): siRNA sense strand
caagaacaauuagaagcua

SEQ ID NO: 1677324 - RNA, 19 nt, Homo sapiens
  misc_RNA (1)...(19): siRNA sense strand
uuacacaccucucacuaaa

SEQ ID NO: 1677325 - RNA, 19 nt, Homo sapiens
  misc_RNA (1)...(19): siRNA sense strand
ggauaacucaccugcauuu

SEQ ID NO: 1677326 - RNA, 19 nt, Homo sapiens
  misc_RNA (1)...(19): siRNA sense strand
gagaaagcaagauguauug

SEQ ID NO: 1677327 - RNA, 19 nt, Homo sapiens
  misc_RNA (1)...(19): siRNA sense strand
uaaaugugguagagacaaa

SEQ ID NO: 1677328 - RNA, 19 nt, Homo sapiens
  misc_RNA (1)...(19): siRNA sense strand
caagagguaugcaaauuac

SEQ ID NO: 1677329 - RNA, 19 nt, Homo sapiens
  misc_RNA (1)...(19): siRNA sense strand
gcaguuaccaaacaguuaa

SEQ ID NO: 1677330 - RNA, 19 nt, Homo sapiens
  misc_RNA (1)...(19): siRNA sense strand
cagaaaggacuuaguuauu

SEQ ID NO: 1677331 - RNA, 19 nt, Homo sapiens
  misc_RNA (1)...(19): siRNA sense strand
gaaugugguugaugguaga

SEQ ID NO: 1677332 - RNA, 19 nt, Homo sapiens
  misc_RNA (1)...(19): siRNA sense strand
gaacaugccaaagaaauuc

SEQ ID NO: 1677333 - RNA, 19 nt, Homo sapiens
  misc_RNA (1)...(19): siRNA sense strand
gaaaggacuuaguuauucg

SEQ ID NO: 1677334 - RNA, 19 nt, Homo sapiens
  misc_RNA (1)...(19): siRNA sense strand
ccaaauaccugaagaaaag

SEQ ID NO: 1677335 - RNA, 19 nt, Homo sapiens
  misc_RNA (1)...(19): siRNA sense strand
gaagagagaauucuacacu

SEQ ID NO: 1677336 - RNA, 19 nt, Homo sapiens
  misc_RNA (1)...(19): siRNA sense strand
uuagauaaguuacggaaug

SEQ ID NO: 1677337 - RNA, 19 nt, Homo sapiens
  misc_RNA (1)...(19): siRNA sense strand
ggagaggagaguaaguaua

SEQ ID NO: 1677338 - RNA, 19 nt, Homo sapiens
  misc_RNA (1)...(19): siRNA sense strand
ggacucagccagaaccuau

SEQ ID NO: 1677339 - RNA, 19 nt, Homo sapiens
  misc_RNA (1)...(19): siRNA sense strand
aacaggaaaucaaggauaa

SEQ ID NO: 1677340 - RNA, 19 nt, Homo sapiens
  misc_RNA (1)...(19): siRNA sense strand
gaggagaggagaguaagua

SEQ ID NO: 1677341 - RNA, 19 nt, Homo sapiens
  misc_RNA (1)...(19): siRNA sense strand
ucacgugguuaaauaaaga

SEQ ID NO: 1677342 - RNA, 19 nt, Homo sapiens
  misc_RNA (1)...(19): siRNA sense strand
cuucuuagcuuucccacaa

SEQ ID NO: 1677343 - RNA, 19 nt, Homo sapiens
  misc_RNA (1)...(19): siRNA sense strand
uaccuucccucauucgaua

SEQ ID NO: 1677344 - RNA, 19 nt, Homo sapiens
  misc_RNA (1)...(19): siRNA sense strand
gcaggcuguuugaaaugua

SEQ ID NO: 1677345 - RNA, 19 nt, Homo sapiens
  misc_RNA (1)...(19): siRNA sense strand
ggaauuacaagauguugga

SEQ ID NO: 1677346 - RNA, 19 nt, Homo sapiens
  misc_RNA (1)...(19): siRNA sense strand
gaauuucuccuaaccugaa

SEQ ID NO: 1677347 - RNA, 19 nt, Homo sapiens
  misc_RNA (1)...(19): siRNA sense strand
ucacagaaaggacuuaguu

SEQ ID NO: 1677348 - RNA, 19 nt, Homo sapiens
  misc_RNA (1)...(19): siRNA sense strand
caauuagaagcuacaguua

SEQ ID NO: 1677349 - RNA, 19 nt, Homo sapiens
  misc_RNA (1)...(19): siRNA sense strand
caaaaggaauuacaagaug

SEQ ID NO: 1677350 - RNA, 19 nt, Homo sapiens
  misc_RNA (1)...(19): siRNA sense strand
aggcacagguucaauauca

SEQ ID NO: 1677351 - RNA, 19 nt, Homo sapiens
  misc_RNA (1)...(19): siRNA sense strand
uagaagcggcuaauaaaga

SEQ ID NO: 1677352 - RNA, 19 nt, Homo sapiens
  misc_RNA (1)...(19): siRNA sense strand
ggaaaugauguggagauaa

SEQ ID NO: 1677353 - RNA, 19 nt, Homo sapiens
  misc_RNA (1)...(19): siRNA sense strand
ugagaaagcaagauguauu

SEQ ID NO: 1677354 - RNA, 19 nt, Homo sapiens
  misc_RNA (1)...(19): siRNA sense strand
cuaagcaacuggacuuuac

SEQ ID NO: 1677355 - RNA, 19 nt, Homo sapiens
  misc_RNA (1)...(19): siRNA sense strand
cuauuucccugggcaguua

SEQ ID NO: 1677356 - RNA, 19 nt, Homo sapiens
  misc_RNA (1)...(19): siRNA sense strand
uuacauacaucuuccaaac

SEQ ID NO: 1677357 - RNA, 19 nt, Homo sapiens
  misc_RNA (1)...(19): siRNA sense strand
agccagaaccuauuuagua

SEQ ID NO: 1677358 - RNA, 19 nt, Homo sapiens
  misc_RNA (1)...(19): siRNA sense strand
gaauccaaauaccugaaga

SEQ ID NO: 1677359 - RNA, 19 nt, Homo sapiens
  misc_RNA (1)...(19): siRNA sense strand
gcacguuaaucagcuacaa

SEQ ID NO: 1677360 - RNA, 19 nt, Homo sapiens
  misc_RNA (1)...(19): siRNA sense strand
cuaauccaguucacagaaa

SEQ ID NO: 1677361 - RNA, 19 nt, Homo sapiens
  misc_RNA (1)...(19): siRNA sense strand
uagauaaguuacggaauga

SEQ ID NO: 1677362 - RNA, 19 nt, Homo sapiens
  misc_RNA (1)...(19): siRNA sense strand
agagagaauucuacacuag

SEQ ID NO: 1677363 - RNA, 19 nt, Homo sapiens
  misc_RNA (1)...(19): siRNA sense strand
aaaaucagcuagugagaaa

SEQ ID NO: 1677364 - RNA, 19 nt, Homo sapiens
  misc_RNA (1)...(19): siRNA sense strand
gaaagacauuagcagaaaa

SEQ ID NO: 1677365 - RNA, 19 nt, Homo sapiens
  misc_RNA (1)...(19): siRNA sense strand
gagcauuacauacaucuuc

SEQ ID NO: 1677366 - RNA, 19 nt, Homo sapiens
  misc_RNA (1)...(19): siRNA sense strand
acuaggagauguucaguca

SEQ ID NO: 1677367 - RNA, 19 nt, Homo sapiens
  misc_RNA (1)...(19): siRNA sense strand
caagauguauugggaccuu

SEQ ID NO: 1677368 - RNA, 19 nt, Homo sapiens
  misc_RNA (1)...(19): siRNA sense strand
aaagaggcauuugauacaa

SEQ ID NO: 1677369 - RNA, 19 nt, Homo sapiens
  misc_RNA (1)...(19): siRNA sense strand
aagagagaauucuacacua

SEQ ID NO: 1677370 - RNA, 19 nt, Homo sapiens
  misc_RNA (1)...(19): siRNA sense strand
gaggagaguaaguauaaga

SEQ ID NO: 1677371 - RNA, 19 nt, Homo sapiens
  misc_RNA (1)...(19): siRNA sense strand
uggaaaugauguggagaua

SEQ ID NO: 1677372 - RNA, 19 nt, Homo sapiens
  misc_RNA (1)...(19): siRNA sense strand
guauugggaccuucuacua

SEQ ID NO: 1677373 - RNA, 19 nt, Homo sapiens
  misc_RNA (1)...(19): siRNA sense strand
gcaggcacagguucaauau

SEQ ID NO: 1677374 - RNA, 19 nt, Homo sapiens
  misc_RNA (1)...(19): siRNA sense strand
cagcagccuugacaaacaa

SEQ ID NO: 1677375 - RNA, 19 nt, Homo sapiens
  misc_RNA (1)...(19): siRNA sense strand
ucagcaauguacucaagaa

SEQ ID NO: 1677376 - RNA, 19 nt, Homo sapiens
  misc_RNA (1)...(19): siRNA sense strand
gaaaagggaagauagcauu

SEQ ID NO: 1677377 - RNA, 19 nt, Homo sapiens
  misc_RNA (1)...(19): siRNA sense strand
uagaaauccuccaucaaca

SEQ ID NO: 1677378 - RNA, 19 nt, Homo sapiens
  misc_RNA (1)...(19): siRNA sense strand
ugacaaacaagcauucuca

SEQ ID NO: 1677379 - RNA, 19 nt, Homo sapiens
  misc_RNA (1)...(19): siRNA sense strand
cagcagcuauuuuggauaa

SEQ ID NO: 1677380 - RNA, 19 nt, Homo sapiens
  misc_RNA (1)...(19): siRNA sense strand
gauaaguuacggaaugaau

SEQ ID NO: 1677381 - RNA, 19 nt, Homo sapiens
  misc_RNA (1)...(19): siRNA sense strand
acaauuagaagcuacaguu

SEQ ID NO: 1677382 - RNA, 19 nt, Homo sapiens
  misc_RNA (1)...(19): siRNA sense strand
gauacaauccaggaacaaa

SEQ ID NO: 1677383 - RNA, 19 nt, Homo sapiens
  misc_RNA (1)...(19): siRNA sense strand
uggguaaguugaaauugaa

SEQ ID NO: 1677384 - RNA, 19 nt, Homo sapiens
  misc_RNA (1)...(19): siRNA sense strand
caagaacaugccaaagaaa

SEQ ID NO: 1677385 - RNA, 19 nt, Homo sapiens
  misc_RNA (1)...(19): siRNA sense strand
gguaugcaaauuacaagaa

SEQ ID NO: 1677386 - RNA, 19 nt, Homo sapiens
  misc_RNA (1)...(19): siRNA sense strand
gagcaagagguaugcaaau

SEQ ID NO: 1677387 - RNA, 19 nt, Homo sapiens
  misc_RNA (1)...(19): siRNA sense strand
uggacagucucuucgaauu

SEQ ID NO: 1677388 - RNA, 19 nt, Homo sapiens
  misc_RNA (1)...(19): siRNA sense strand
agacuccacuauuagagaa

SEQ ID NO: 1677389 - RNA, 19 nt, Homo sapiens
  misc_RNA (1)...(19): siRNA sense strand
gaaugggcgucacauacag

SEQ ID NO: 1677390 - RNA, 19 nt, Homo sapiens
  misc_RNA (1)...(19): siRNA sense strand
guuaaucagcuacaaacaa

SEQ ID NO: 1677391 - RNA, 19 nt, Homo sapiens
  misc_RNA (1)...(19): siRNA sense strand
ggcaguuaccaaacaguua

SEQ ID NO: 1677392 - RNA, 19 nt, Homo sapiens
  misc_RNA (1)...(19): siRNA sense strand
agaagaaaauggugagaaa

SEQ ID NO: 1677393 - RNA, 19 nt, Homo sapiens
  misc_RNA (1)...(19): siRNA sense strand
gcacauuccagcagcaaca

SEQ ID NO: 1677394 - RNA, 19 nt, Homo sapiens
  misc_RNA (1)...(19): siRNA sense strand
cacagaaaggacuuaguua

SEQ ID NO: 1677395 - RNA, 19 nt, Homo sapiens
  misc_RNA (1)...(19): siRNA sense strand
acagaaaggacuuaguuau

SEQ ID NO: 1677396 - RNA, 19 nt, Homo sapiens
  misc_RNA (1)...(19): siRNA sense strand
ugaagaaagcaaacaacuu

SEQ ID NO: 1677397 - RNA, 19 nt, Homo sapiens
  misc_RNA (1)...(19): siRNA sense strand
uugcucaacugauaaggaa

SEQ ID NO: 1677398 - RNA, 19 nt, Homo sapiens
  misc_RNA (1)...(19): siRNA sense strand
acaaucagaaguggaauuu

SEQ ID NO: 1677399 - RNA, 19 nt, Homo sapiens
  misc_RNA (1)...(19): siRNA sense strand
gaaaugauguggagauaaa

SEQ ID NO: 1677400 - RNA, 19 nt, Homo sapiens
  misc_RNA (1)...(19): siRNA sense strand
ucagagagauggcacuuua

SEQ ID NO: 1677401 - RNA, 19 nt, Homo sapiens
  misc_RNA (1)...(19): siRNA sense strand
gaaguggaauuucuccuaa

SEQ ID NO: 1677402 - RNA, 19 nt, Homo sapiens
  misc_RNA (1)...(19): siRNA sense strand
cagaauaccuucccucauu

SEQ ID NO: 1677403 - RNA, 19 nt, Homo sapiens
  misc_RNA (1)...(19): siRNA sense strand
caaagaaauuccaagguuu

SEQ ID NO: 1677404 - RNA, 19 nt, Homo sapiens
  misc_RNA (1)...(19): siRNA sense strand
ccaaagaaauuccaagguu

SEQ ID NO: 1677405 - RNA, 19 nt, Homo sapiens
  misc_RNA (1)...(19): siRNA sense strand
gagaggagaguaaguauaa

SEQ ID NO: 1677406 - RNA, 19 nt, Homo sapiens
  misc_RNA (1)...(19): siRNA sense strand
gcaagagguaugcaaauua

SEQ ID NO: 1677407 - RNA, 19 nt, Homo sapiens
  misc_RNA (1)...(19): siRNA sense strand
caacuggacuuuacacgaa

SEQ ID NO: 1677408 - RNA, 19 nt, Homo sapiens
  misc_RNA (1)...(19): siRNA sense strand
gaacaggaaaucaaggaua

SEQ ID NO: 1677409 - RNA, 19 nt, Homo sapiens
  misc_RNA (1)...(19): siRNA sense strand
gaagauagcauuccuuuac

SEQ ID NO: 1677410 - RNA, 19 nt, Homo sapiens
  misc_RNA (1)...(19): siRNA sense strand
gccagaaccuauuuaguaa

SEQ ID NO: 1677411 - RNA, 19 nt, Homo sapiens
  misc_RNA (1)...(19): siRNA sense strand
cgaaagacauuagcagaaa

SEQ ID NO: 1677412 - RNA, 19 nt, Homo sapiens
  misc_RNA (1)...(19): siRNA sense strand
gaaagcaaacaacuucuaa

SEQ ID NO: 1677413 - RNA, 19 nt, Homo sapiens
  misc_RNA (1)...(19): siRNA sense strand
ucaagaacaugccaaagaa

SEQ ID NO: 1677414 - RNA, 19 nt, Homo sapiens
  misc_RNA (1)...(19): siRNA sense strand
ggacagucucuucgaauua

SEQ ID NO: 1677415 - RNA, 19 nt, Homo sapiens
  misc_RNA (1)...(19): siRNA sense strand
gaaggcaaaugaaauuauc

SEQ ID NO: 1677416 - RNA, 19 nt, Homo sapiens
  misc_RNA (1)...(19): siRNA sense strand
gagaguaaguauaagaaug

SEQ ID NO: 1677417 - RNA, 19 nt, Homo sapiens
  misc_RNA (1)...(19): siRNA sense strand
gauaaggaccagcuuguuu

SEQ ID NO: 1677418 - RNA, 19 nt, Homo sapiens
  misc_RNA (1)...(19): siRNA sense strand
gacagucucuucgaauuaa

SEQ ID NO: 1677419 - RNA, 19 nt, Homo sapiens
  misc_RNA (1)...(19): siRNA sense strand
aaacaagcauucucaggaa

SEQ ID NO: 1677420 - RNA, 19 nt, Homo sapiens
  misc_RNA (1)...(19): siRNA sense strand
ggaaaauggugaaaaugua

SEQ ID NO: 1677421 - RNA, 19 nt, Homo sapiens
  misc_RNA (1)...(19): siRNA sense strand
gaaauccuccaucaacaaa

SEQ ID NO: 1677422 - RNA, 19 nt, Homo sapiens
  misc_RNA (1)...(19): siRNA sense strand
agaaaggacuuaguuauuc

SEQ ID NO: 1677423 - RNA, 19 nt, Homo sapiens
  misc_RNA (1)...(19): siRNA sense strand
caagaacaauuagaagcua

SEQ ID NO: 1677424 - RNA, 19 nt, Homo sapiens
  misc_RNA (1)...(19): siRNA sense strand
uuacacaccucucacuaaa

SEQ ID NO: 1677425 - RNA, 19 nt, Homo sapiens
  misc_RNA (1)...(19): siRNA sense strand
ggauaacucaccugcauuu

SEQ ID NO: 1677426 - RNA, 19 nt, Homo sapiens
  misc_RNA (1)...(19): siRNA sense strand
gagaaagcaagauguauug

SEQ ID NO: 1677427 - RNA, 19 nt, Homo sapiens
  misc_RNA (1)...(19): siRNA sense strand
uaaaugugguagagacaaa

SEQ ID NO: 1677428 - RNA, 19 nt, Homo sapiens
  misc_RNA (1)...(19): siRNA sense strand
caagagguaugcaaauuac

SEQ ID NO: 1677429 - RNA, 19 nt, Homo sapiens
  misc_RNA (1)...(19): siRNA sense strand
gcaguuaccaaacaguuaa

SEQ ID NO: 1677430 - RNA, 19 nt, Homo sapiens
  misc_RNA (1)...(19): siRNA sense strand
cagaaaggacuuaguuauu

SEQ ID NO: 1677431 - RNA, 19 nt, Homo sapiens
  misc_RNA (1)...(19): siRNA sense strand
gaaugugguugaugguaga

SEQ ID NO: 1677432 - RNA, 19 nt, Homo sapiens
  misc_RNA (1)...(19): siRNA sense strand
gaacaugccaaagaaauuc

SEQ ID NO: 1677433 - RNA, 19 nt, Homo sapiens
  misc_RNA (1)...(19): siRNA sense strand
gaaaggacuuaguuauucg

SEQ ID NO: 1677434 - RNA, 19 nt, Homo sapiens
  misc_RNA (1)...(19): siRNA sense strand
ccaaauaccugaagaaaag

SEQ ID NO: 1677435 - RNA, 19 nt, Homo sapiens
  misc_RNA (1)...(19): siRNA sense strand
gaagagagaauucuacacu

SEQ ID NO: 1677436 - RNA, 19 nt, Homo sapiens
  misc_RNA (1)...(19): siRNA sense strand
uuagauaaguuacggaaug

SEQ ID NO: 1677437 - RNA, 19 nt, Homo sapiens
  misc_RNA (1)...(19): siRNA sense strand
ggagaggagaguaaguaua

SEQ ID NO: 1677438 - RNA, 19 nt, Homo sapiens
  misc_RNA (1)...(19): siRNA sense strand
ggacucagccagaaccuau

SEQ ID NO: 1677439 - RNA, 19 nt, Homo sapiens
  misc_RNA (1)...(19): siRNA sense strand
aacaggaaaucaaggauaa

SEQ ID NO: 1677440 - RNA, 19 nt, Homo sapiens
  misc_RNA (1)...(19): siRNA sense strand
gaggagaggagaguaagua

SEQ ID NO: 1677441 - RNA, 19 nt, Homo sapiens
  misc_RNA (1)...(19): siRNA sense strand
ucacgugguuaaauaaaga

SEQ ID NO: 1677442 - RNA, 19 nt, Homo sapiens
  misc_RNA (1)...(19): siRNA sense strand
cuucuuagcuuucccacaa

SEQ ID NO: 1677443 - RNA, 19 nt, Homo sapiens
  misc_RNA (1)...(19): siRNA sense strand
uaccuucccucauucgaua

SEQ ID NO: 1677444 - RNA, 19 nt, Homo sapiens
  misc_RNA (1)...(19): siRNA sense strand
gcaggcuguuugaaaugua

SEQ ID NO: 1677445 - RNA, 19 nt, Homo sapiens
  misc_RNA (1)...(19): siRNA sense strand
ggaauuacaagauguugga

SEQ ID NO: 1677446 - RNA, 19 nt, Homo sapiens
  misc_RNA (1)...(19): siRNA sense strand
gaauuucuccuaaccugaa

SEQ ID NO: 1677447 - RNA, 19 nt, Homo sapiens
  misc_RNA (1)...(19): siRNA sense strand
ucacagaaaggacuuaguu

SEQ ID NO: 1677448 - RNA, 19 nt, Homo sapiens
  misc_RNA (1)...(19): siRNA sense strand
caauuagaagcuacaguua

SEQ ID NO: 1677449 - RNA, 19 nt, Homo sapiens
  misc_RNA (1)...(19): siRNA sense strand
caaaaggaauuacaagaug

SEQ ID NO: 1677450 - RNA, 19 nt, Homo sapiens
  misc_RNA (1)...(19): siRNA sense strand
aggcacagguucaauauca

SEQ ID NO: 1677451 - RNA, 19 nt, Homo sapiens
  misc_RNA (1)...(19): siRNA sense strand
uagaagcggcuaauaaaga

SEQ ID NO: 1677452 - RNA, 19 nt, Homo sapiens
  misc_RNA (1)...(19): siRNA sense strand
ggaaaugauguggagauaa

SEQ ID NO: 1677453 - RNA, 19 nt, Homo sapiens
  misc_RNA (1)...(19): siRNA sense strand
ugagaaagcaagauguauu

SEQ ID NO: 1677454 - RNA, 19 nt, Homo sapiens
  misc_RNA (1)...(19): siRNA sense strand
cuaagcaacuggacuuuac

SEQ ID NO: 1677455 - RNA, 19 nt, Homo sapiens
  misc_RNA (1)...(19): siRNA sense strand
cuauuucccugggcaguua

SEQ ID NO: 1677456 - RNA, 19 nt, Homo sapiens
  misc_RNA (1)...(19): siRNA sense strand
uuacauacaucuuccaaac

SEQ ID NO: 1677457 - RNA, 19 nt, Homo sapiens
  misc_RNA (1)...(19): siRNA sense strand
agccagaaccuauuuagua

SEQ ID NO: 1677458 - RNA, 19 nt, Homo sapiens
  misc_RNA (1)...(19): siRNA sense strand
gaauccaaauaccugaaga

SEQ ID NO: 1677459 - RNA, 19 nt, Homo sapiens
  misc_RNA (1)...(19): siRNA sense strand
gcacguuaaucagcuacaa

SEQ ID NO: 1677460 - RNA, 19 nt, Homo sapiens
  misc_RNA (1)...(19): siRNA sense strand
cuaauccaguucacagaaa

SEQ ID NO: 1677461 - RNA, 19 nt, Homo sapiens
  misc_RNA (1)...(19): siRNA sense strand
uagauaaguuacggaauga

SEQ ID NO: 1677462 - RNA, 19 nt, Homo sapiens
  misc_RNA (1)...(19): siRNA sense strand
agagagaauucuacacuag

SEQ ID NO: 1677463 - RNA, 19 nt, Homo sapiens
  misc_RNA (1)...(19): siRNA sense strand
aaaaucagcuagugagaaa

SEQ ID NO: 1677464 - RNA, 19 nt, Homo sapiens
  misc_RNA (1)...(19): siRNA sense strand
gaaagacauuagcagaaaa

SEQ ID NO: 1677465 - RNA, 19 nt, Homo sapiens
  misc_RNA (1)...(19): siRNA sense strand
gagcauuacauacaucuuc

SEQ ID NO: 1677466 - RNA, 19 nt, Homo sapiens
  misc_RNA (1)...(19): siRNA sense strand
acuaggagauguucaguca

SEQ ID NO: 1677467 - RNA, 19 nt, Homo sapiens
  misc_RNA (1)...(19): siRNA sense strand
caagauguauugggaccuu

SEQ ID NO: 1677468 - RNA, 19 nt, Homo sapiens
  misc_RNA (1)...(19): siRNA sense strand
aaagaggcauuugauacaa

SEQ ID NO: 1677469 - RNA, 19 nt, Homo sapiens
  misc_RNA (1)...(19): siRNA sense strand
aagagagaauucuacacua

SEQ ID NO: 1677470 - RNA, 19 nt, Homo sapiens
  misc_RNA (1)...(19): siRNA sense strand
gaggagaguaaguauaaga

SEQ ID NO: 1677471 - RNA, 19 nt, Homo sapiens
  misc_RNA (1)...(19): siRNA sense strand
uggaaaugauguggagaua

SEQ ID NO: 1677472 - RNA, 19 nt, Homo sapiens
  misc_RNA (1)...(19): siRNA sense strand
guauugggaccuucuacua

SEQ ID NO: 1677473 - RNA, 19 nt, Homo sapiens
  misc_RNA (1)...(19): siRNA sense strand
gcaggcacagguucaauau

SEQ ID NO: 1677474 - RNA, 19 nt, Homo sapiens
  misc_RNA (1)...(19): siRNA sense strand
cagcagccuugacaaacaa

SEQ ID NO: 1677475 - RNA, 19 nt, Homo sapiens
  misc_RNA (1)...(19): siRNA sense strand
ucagcaauguacucaagaa

SEQ ID NO: 1677476 - RNA, 19 nt, Homo sapiens
  misc_RNA (1)...(19): siRNA sense strand
gaaaagggaagauagcauu

SEQ ID NO: 1677477 - RNA, 19 nt, Homo sapiens
  misc_RNA (1)...(19): siRNA sense strand
uagaaauccuccaucaaca

SEQ ID NO: 1677478 - RNA, 19 nt, Homo sapiens
  misc_RNA (1)...(19): siRNA sense strand
ugacaaacaagcauucuca

SEQ ID NO: 1677479 - RNA, 19 nt, Homo sapiens
  misc_RNA (1)...(19): siRNA sense strand
cagcagcuauuuuggauaa

SEQ ID NO: 1677480 - RNA, 19 nt, Homo sapiens
  misc_RNA (1)...(19): siRNA sense strand
gauaaguuacggaaugaau

SEQ ID NO: 1677481 - RNA, 19 nt, Homo sapiens
  misc_RNA (1)...(19): siRNA sense strand
acaauuagaagcuacaguu

SEQ ID NO: 1677482 - RNA, 19 nt, Homo sapiens
  misc_RNA (1)...(19): siRNA sense strand
gauacaauccaggaacaaa

SEQ ID NO: 1677483 - RNA, 19 nt, Homo sapiens
  misc_RNA (1)...(19): siRNA sense strand
uggguaaguugaaauugaa

SEQ ID NO: 1677484 - RNA, 19 nt, Homo sapiens
  misc_RNA (1)...(19): siRNA sense strand
caagaacaugccaaagaaa

SEQ ID NO: 1677485 - RNA, 19 nt, Homo sapiens
  misc_RNA (1)...(19): siRNA sense strand
gguaugcaaauuacaagaa

SEQ ID NO: 1677486 - RNA, 19 nt, Homo sapiens
  misc_RNA (1)...(19): siRNA sense strand
gagcaagagguaugcaaau

SEQ ID NO: 1677487 - RNA, 19 nt, Homo sapiens
  misc_RNA (1)...(19): siRNA sense strand
uggacagucucuucgaauu

SEQ ID NO: 1677488 - RNA, 19 nt, Homo sapiens
  misc_RNA (1)...(19): siRNA sense strand
agacuccacuauuagagaa

SEQ ID NO: 1677489 - RNA, 19 nt, Homo sapiens
  misc_RNA (1)...(19): siRNA sense strand
gaaugggcgucacauacag

SEQ ID NO: 1677490 - RNA, 19 nt, Homo sapiens
  misc_RNA (1)...(19): siRNA sense strand
guuaaucagcuacaaacaa

SEQ ID NO: 1677491 - RNA, 19 nt, Homo sapiens
  misc_RNA (1)...(19): siRNA sense strand
ggcaguuaccaaacaguua

SEQ ID NO: 1677492 - RNA, 19 nt, Homo sapiens
  misc_RNA (1)...(19): siRNA sense strand
agaagaaaauggugagaaa

SEQ ID NO: 1677493 - RNA, 19 nt, Homo sapiens
  misc_RNA (1)...(19): siRNA sense strand
gcacauuccagcagcaaca

SEQ ID NO: 1677494 - RNA, 19 nt, Homo sapiens
  misc_RNA (1)...(19): siRNA sense strand
cacagaaaggacuuaguua

SEQ ID NO: 1677495 - RNA, 19 nt, Homo sapiens
  misc_RNA (1)...(19): siRNA sense strand
acagaaaggacuuaguuau

SEQ ID NO: 1677496 - RNA, 19 nt, Homo sapiens
  misc_RNA (1)...(19): siRNA sense strand
ugaagaaagcaaacaacuu

SEQ ID NO: 1677497 - RNA, 19 nt, Homo sapiens
  misc_RNA (1)...(19): siRNA sense strand
uugcucaacugauaaggaa

SEQ ID NO: 1677498 - RNA, 19 nt, Homo sapiens
  misc_RNA (1)...(19): siRNA sense strand
acaaucagaaguggaauuu

SEQ ID NO: 1677499 - RNA, 19 nt, Homo sapiens
  misc_RNA (1)...(19): siRNA sense strand
ggacagcgcucucugaaga

SEQ ID NO: 1677500 - RNA, 19 nt, Homo sapiens
  misc_RNA (1)...(19): siRNA sense strand
gaccaaacgucaucaaauu

SEQ ID NO: 1677501 - RNA, 19 nt, Homo sapiens
  misc_RNA (1)...(19): siRNA sense strand
gccagaagcucacgcaguu

SEQ ID NO: 1677502 - RNA, 19 nt, Homo sapiens
  misc_RNA (1)...(19): siRNA sense strand
ggacugcuguggacaagga

SEQ ID NO: 1677503 - RNA, 19 nt, Homo sapiens
  misc_RNA (1)...(19): siRNA sense strand
gagaaggucuuggaggauu

SEQ ID NO: 1677504 - RNA, 19 nt, Homo sapiens
  misc_RNA (1)...(19): siRNA sense strand
gagcagcugucccaguuga

SEQ ID NO: 1677505 - RNA, 19 nt, Homo sapiens
  misc_RNA (1)...(19): siRNA sense strand
guggugaaguuuauuaaga

SEQ ID NO: 1677506 - RNA, 19 nt, Homo sapiens
  misc_RNA (1)...(19): siRNA sense strand
gagcuccuauugucuauca

SEQ ID NO: 1677507 - RNA, 19 nt, Homo sapiens
  misc_RNA (1)...(19): siRNA sense strand
uggagaagcuggugacaga

SEQ ID NO: 1677508 - RNA, 19 nt, Homo sapiens
  misc_RNA (1)...(19): siRNA sense strand
agaggaaccuguggcaaua

SEQ ID NO: 1677509 - RNA, 19 nt, Homo sapiens
  misc_RNA (1)...(19): siRNA sense strand
ggacaccuacucuagauga

SEQ ID NO: 1677510 - RNA, 19 nt, Homo sapiens
  misc_RNA (1)...(19): siRNA sense strand
gccuagaccucuucgcuuu

SEQ ID NO: 1677511 - RNA, 19 nt, Homo sapiens
  misc_RNA (1)...(19): siRNA sense strand
gaaccucaaggaacucuuu

SEQ ID NO: 1677512 - RNA, 19 nt, Homo sapiens
  misc_RNA (1)...(19): siRNA sense strand
gguaccaccuucccucuga

SEQ ID NO: 1677513 - RNA, 19 nt, Homo sapiens
  misc_RNA (1)...(19): siRNA sense strand
gaaucuugcugacuauaca

SEQ ID NO: 1677514 - RNA, 19 nt, Homo sapiens
  misc_RNA (1)...(19): siRNA sense strand
gccgaggacuucacaauca

SEQ ID NO: 1677515 - RNA, 19 nt, Homo sapiens
  misc_RNA (1)...(19): siRNA sense strand
gcugcuggcuggugaaaga

SEQ ID NO: 1677516 - RNA, 19 nt, Homo sapiens
  misc_RNA (1)...(19): siRNA sense strand
gggcuccgauccagaugua

SEQ ID NO: 1677517 - RNA, 19 nt, Homo sapiens
  misc_RNA (1)...(19): siRNA sense strand
ucaaauuguuccugugcua

SEQ ID NO: 1677518 - RNA, 19 nt, Homo sapiens
  misc_RNA (1)...(19): siRNA sense strand
ggucguguguccuggauga

SEQ ID NO: 1677519 - RNA, 19 nt, Homo sapiens
  misc_RNA (1)...(19): siRNA sense strand
gcaagaauaucacuuuccu

SEQ ID NO: 1677520 - RNA, 19 nt, Homo sapiens
  misc_RNA (1)...(19): siRNA sense strand
gauugaggaucccaaacuu

SEQ ID NO: 1677521 - RNA, 19 nt, Homo sapiens
  misc_RNA (1)...(19): siRNA sense strand
cagagauccugguugcuaa

SEQ ID NO: 1677522 - RNA, 19 nt, Homo sapiens
  misc_RNA (1)...(19): siRNA sense strand
acaaggaggugguggugaa

SEQ ID NO: 1677523 - RNA, 19 nt, Homo sapiens
  misc_RNA (1)...(19): siRNA sense strand
ggagaaagcaggucugaac

SEQ ID NO: 1677524 - RNA, 19 nt, Homo sapiens
  misc_RNA (1)...(19): siRNA sense strand
ggagaagauuccagugucu

SEQ ID NO: 1677525 - RNA, 19 nt, Homo sapiens
  misc_RNA (1)...(19): siRNA sense strand
gcagcaagcgacagagaaa

SEQ ID NO: 1677526 - RNA, 19 nt, Homo sapiens
  misc_RNA (1)...(19): siRNA sense strand
caaacgucaucaaauuguu

SEQ ID NO: 1677527 - RNA, 19 nt, Homo sapiens
  misc_RNA (1)...(19): siRNA sense strand
gagaggaaccuguggcaau

SEQ ID NO: 1677528 - RNA, 19 nt, Homo sapiens
  misc_RNA (1)...(19): siRNA sense strand
caccuucccucugagcuua

SEQ ID NO: 1677529 - RNA, 19 nt, Homo sapiens
  misc_RNA (1)...(19): siRNA sense strand
gaacucaugagccuugugu

SEQ ID NO: 1677530 - RNA, 19 nt, Homo sapiens
  misc_RNA (1)...(19): siRNA sense strand
uguacacgcuggucuuuga

SEQ ID NO: 1677531 - RNA, 19 nt, Homo sapiens
  misc_RNA (1)...(19): siRNA sense strand
gccagcacaucccaaagaa

SEQ ID NO: 1677532 - RNA, 19 nt, Homo sapiens
  misc_RNA (1)...(19): siRNA sense strand
gccaauaucaucaagguau

SEQ ID NO: 1677533 - RNA, 19 nt, Homo sapiens
  misc_RNA (1)...(19): siRNA sense strand
gggcaagaauaucacuuuc

SEQ ID NO: 1677534 - RNA, 19 nt, Homo sapiens
  misc_RNA (1)...(19): siRNA sense strand
acauggaccuugcguacaa

SEQ ID NO: 1677535 - RNA, 19 nt, Homo sapiens
  misc_RNA (1)...(19): siRNA sense strand
cgccauaccugguguccaa

SEQ ID NO: 1677536 - RNA, 19 nt, Homo sapiens
  misc_RNA (1)...(19): siRNA sense strand
gaagcucacgcaguucuuu

SEQ ID NO: 1677537 - RNA, 19 nt, Homo sapiens
  misc_RNA (1)...(19): siRNA sense strand
ccaggagguugaugugaau

SEQ ID NO: 1677538 - RNA, 19 nt, Homo sapiens
  misc_RNA (1)...(19): siRNA sense strand
gauggcaggccucucguuu

SEQ ID NO: 1677539 - RNA, 19 nt, Homo sapiens
  misc_RNA (1)...(19): siRNA sense strand
gagaugagauccggaagcu

SEQ ID NO: 1677540 - RNA, 19 nt, Homo sapiens
  misc_RNA (1)...(19): siRNA sense strand
gcacggugguggacaucau

SEQ ID NO: 1677541 - RNA, 19 nt, Homo sapiens
  misc_RNA (1)...(19): siRNA sense strand
gcaggacagcgcucucuga

SEQ ID NO: 1677542 - RNA, 19 nt, Homo sapiens
  misc_RNA (1)...(19): siRNA sense strand
gaggugguggugaaguuua

SEQ ID NO: 1677543 - RNA, 19 nt, Homo sapiens
  misc_RNA (1)...(19): siRNA sense strand
gaaccuguggcaauagaga

SEQ ID NO: 1677544 - RNA, 19 nt, Homo sapiens
  misc_RNA (1)...(19): siRNA sense strand
ucaucaagguauuggauau

SEQ ID NO: 1677545 - RNA, 19 nt, Homo sapiens
  misc_RNA (1)...(19): siRNA sense strand
gacagucucuuugcucauc

SEQ ID NO: 1677546 - RNA, 19 nt, Homo sapiens
  misc_RNA (1)...(19): siRNA sense strand
cgaguaaacaagccagaaa

SEQ ID NO: 1677547 - RNA, 19 nt, Homo sapiens
  misc_RNA (1)...(19): siRNA sense strand
gcacgccaauaucaucaag

SEQ ID NO: 1677548 - RNA, 19 nt, Homo sapiens
  misc_RNA (1)...(19): siRNA sense strand
gggacaugauccaacagaa

SEQ ID NO: 1677549 - RNA, 19 nt, Homo sapiens
  misc_RNA (1)...(19): siRNA sense strand
agauggagcuccuauuguc

SEQ ID NO: 1677550 - RNA, 19 nt, Homo sapiens
  misc_RNA (1)...(19): siRNA sense strand
gcgcugacacuguuugguu

SEQ ID NO: 1677551 - RNA, 19 nt, Homo sapiens
  misc_RNA (1)...(19): siRNA sense strand
ggguggagcacgccaauau

SEQ ID NO: 1677552 - RNA, 19 nt, Homo sapiens
  misc_RNA (1)...(19): siRNA sense strand
cagcacaucccaaagaauc

SEQ ID NO: 1677553 - RNA, 19 nt, Homo sapiens
  misc_RNA (1)...(19): siRNA sense strand
ccaaacgucaucaaauugu

SEQ ID NO: 1677554 - RNA, 19 nt, Homo sapiens
  misc_RNA (1)...(19): siRNA sense strand
aggagcagcugucccaguu

SEQ ID NO: 1677555 - RNA, 19 nt, Homo sapiens
  misc_RNA (1)...(19): siRNA sense strand
ggucugaaccaguggaugu

SEQ ID NO: 1677556 - RNA, 19 nt, Homo sapiens
  misc_RNA (1)...(19): siRNA sense strand
cgcugacacuguuugguua

SEQ ID NO: 1677557 - RNA, 19 nt, Homo sapiens
  misc_RNA (1)...(19): siRNA sense strand
gagcuccugggcaagaaua

SEQ ID NO: 1677558 - RNA, 19 nt, Homo sapiens
  misc_RNA (1)...(19): siRNA sense strand
guaaacaagccagaaagug

SEQ ID NO: 1677559 - RNA, 19 nt, Homo sapiens
  misc_RNA (1)...(19): siRNA sense strand
cuacaucuuccgacaacua

SEQ ID NO: 1677560 - RNA, 19 nt, Homo sapiens
  misc_RNA (1)...(19): siRNA sense strand
acagauggagcuccuauug

SEQ ID NO: 1677561 - RNA, 19 nt, Homo sapiens
  misc_RNA (1)...(19): siRNA sense strand
cccaggagguugaugugaa

SEQ ID NO: 1677562 - RNA, 19 nt, Homo sapiens
  misc_RNA (1)...(19): siRNA sense strand
caguggaugugaagccauu

SEQ ID NO: 1677563 - RNA, 19 nt, Homo sapiens
  misc_RNA (1)...(19): siRNA sense strand
caucaagguauuggauaua

SEQ ID NO: 1677564 - RNA, 19 nt, Homo sapiens
  misc_RNA (1)...(19): siRNA sense strand
cugugaaucuugcugacua

SEQ ID NO: 1677565 - RNA, 19 nt, Homo sapiens
  misc_RNA (1)...(19): siRNA sense strand
ggaccugauuggccagaag

SEQ ID NO: 1677566 - RNA, 19 nt, Homo sapiens
  misc_RNA (1)...(19): siRNA sense strand
acagagauccugguugcua

SEQ ID NO: 1677567 - RNA, 19 nt, Homo sapiens
  misc_RNA (1)...(19): siRNA sense strand
gaccguggaggcugccaua

SEQ ID NO: 1677568 - RNA, 19 nt, Homo sapiens
  misc_RNA (1)...(19): siRNA sense strand
ugggauaccugcgcuugaa

SEQ ID NO: 1677569 - RNA, 19 nt, Homo sapiens
  misc_RNA (1)...(19): siRNA sense strand
caccugagcagaaggaaug

SEQ ID NO: 1677570 - RNA, 19 nt, Homo sapiens
  misc_RNA (1)...(19): siRNA sense strand
aacaggcgcugcccaagga

SEQ ID NO: 1677571 - RNA, 19 nt, Homo sapiens
  misc_RNA (1)...(19): siRNA sense strand
ggacgucggcaaugagagu

SEQ ID NO: 1677572 - RNA, 19 nt, Homo sapiens
  misc_RNA (1)...(19): siRNA sense strand
guacaacagcucauuacag

SEQ ID NO: 1677573 - RNA, 19 nt, Homo sapiens
  misc_RNA (1)...(19): siRNA sense strand
ggccagcacaucccaaaga

SEQ ID NO: 1677574 - RNA, 19 nt, Homo sapiens
  misc_RNA (1)...(19): siRNA sense strand
ccugguugcuaacgacaaa

SEQ ID NO: 1677575 - RNA, 19 nt, Homo sapiens
  misc_RNA (1)...(19): siRNA sense strand
ccagaauauuuguacaagu

SEQ ID NO: 1677576 - RNA, 19 nt, Homo sapiens
  misc_RNA (1)...(19): siRNA sense strand
ggagcacgccaauaucauc

SEQ ID NO: 1677577 - RNA, 19 nt, Homo sapiens
  misc_RNA (1)...(19): siRNA sense strand
gguguccucugagcauuau

SEQ ID NO: 1677578 - RNA, 19 nt, Homo sapiens
  misc_RNA (1)...(19): siRNA sense strand
ggacaugauccaacagaac

SEQ ID NO: 1677579 - RNA, 19 nt, Homo sapiens
  misc_RNA (1)...(19): siRNA sense strand
ggagagcugugugggacau

SEQ ID NO: 1677580 - RNA, 19 nt, Homo sapiens
  misc_RNA (1)...(19): siRNA sense strand
gggcaucugucuggguguu

SEQ ID NO: 1677581 - RNA, 19 nt, Homo sapiens
  misc_RNA (1)...(19): siRNA sense strand
agggagcuguuacuacuga

SEQ ID NO: 1677582 - RNA, 19 nt, Homo sapiens
  misc_RNA (1)...(19): siRNA sense strand
ggugaaguuuauuaagaag

SEQ ID NO: 1677583 - RNA, 19 nt, Homo sapiens
  misc_RNA (1)...(19): siRNA sense strand
gcuucgcgcugacacuguu

SEQ ID NO: 1677584 - RNA, 19 nt, Homo sapiens
  misc_RNA (1)...(19): siRNA sense strand
ccgaggacuucacaaucaa

SEQ ID NO: 1677585 - RNA, 19 nt, Homo sapiens
  misc_RNA (1)...(19): siRNA sense strand
gugguggugaaguuuauua

SEQ ID NO: 1677586 - RNA, 19 nt, Homo sapiens
  misc_RNA (1)...(19): siRNA sense strand
ggaggugguggugaaguuu

SEQ ID NO: 1677587 - RNA, 19 nt, Homo sapiens
  misc_RNA (1)...(19): siRNA sense strand
gacaucaucagccguagug

SEQ ID NO: 1677588 - RNA, 19 nt, Homo sapiens
  misc_RNA (1)...(19): siRNA sense strand
gagcacgccaauaucauca

SEQ ID NO: 1677589 - RNA, 19 nt, Homo sapiens
  misc_RNA (1)...(19): siRNA sense strand
cuuggaggauuguuggauu

SEQ ID NO: 1677590 - RNA, 19 nt, Homo sapiens
  misc_RNA (1)...(19): siRNA sense strand
agaaagcccaggacacguu

SEQ ID NO: 1677591 - RNA, 19 nt, Homo sapiens
  misc_RNA (1)...(19): siRNA sense strand
uggcaggccucucguuugg

SEQ ID NO: 1677592 - RNA, 19 nt, Homo sapiens
  misc_RNA (1)...(19): siRNA sense strand
caccaucaguggccucauc

SEQ ID NO: 1677593 - RNA, 19 nt, Homo sapiens
  misc_RNA (1)...(19): siRNA sense strand
uccggaagcugauggaaag

SEQ ID NO: 1677594 - RNA, 19 nt, Homo sapiens
  misc_RNA (1)...(19): siRNA sense strand
cauaccugguguccaaaga

SEQ ID NO: 1677595 - RNA, 19 nt, Homo sapiens
  misc_RNA (1)...(19): siRNA sense strand
cuagaccucuucgcuuuca

SEQ ID NO: 1677596 - RNA, 19 nt, Homo sapiens
  misc_RNA (1)...(19): siRNA sense strand
gcuuacggcugaguauaca

SEQ ID NO: 1677597 - RNA, 19 nt, Homo sapiens
  misc_RNA (1)...(19): siRNA sense strand
uggcauguguggccugugu

SEQ ID NO: 1677598 - RNA, 19 nt, Homo sapiens
  misc_RNA (1)...(19): siRNA sense strand
gcccagaauauuuguacaa

SEQ ID NO: 1677599 - RNA, 19 nt, Homo sapiens
  misc_RNA (1)...(19): siRNA sense strand
gaacuacugugcagaaauu

SEQ ID NO: 1677600 - RNA, 19 nt, Homo sapiens
  misc_RNA (1)...(19): siRNA sense strand
uaacggagaucuggcauua

SEQ ID NO: 1677601 - RNA, 19 nt, Homo sapiens
  misc_RNA (1)...(19): siRNA sense strand
gcaaacaacuagauuuaga

SEQ ID NO: 1677602 - RNA, 19 nt, Homo sapiens
  misc_RNA (1)...(19): siRNA sense strand
caucagugcucacaaguuu

SEQ ID NO: 1677603 - RNA, 19 nt, Homo sapiens
  misc_RNA (1)...(19): siRNA sense strand
uaacuugucuuccacuaaa

SEQ ID NO: 1677604 - RNA, 19 nt, Homo sapiens
  misc_RNA (1)...(19): siRNA sense strand
ccacuuuccucauuaagaa

SEQ ID NO: 1677605 - RNA, 19 nt, Homo sapiens
  misc_RNA (1)...(19): siRNA sense strand
gguguuaugucucuaguga

SEQ ID NO: 1677606 - RNA, 19 nt, Homo sapiens
  misc_RNA (1)...(19): siRNA sense strand
gugcaaacaacuagauuua

SEQ ID NO: 1677607 - RNA, 19 nt, Homo sapiens
  misc_RNA (1)...(19): siRNA sense strand
ugacugaacugaugaaacu

SEQ ID NO: 1677608 - RNA, 19 nt, Homo sapiens
  misc_RNA (1)...(19): siRNA sense strand
cagaguacccgcuacauaa

SEQ ID NO: 1677609 - RNA, 19 nt, Homo sapiens
  misc_RNA (1)...(19): siRNA sense strand
ccagcacacugaugaacua

SEQ ID NO: 1677610 - RNA, 19 nt, Homo sapiens
  misc_RNA (1)...(19): siRNA sense strand
gcacacugaugaacuacug

SEQ ID NO: 1677611 - RNA, 19 nt, Homo sapiens
  misc_RNA (1)...(19): siRNA sense strand
cagagaggaugauguguuc

SEQ ID NO: 1677612 - RNA, 19 nt, Homo sapiens
  misc_RNA (1)...(19): siRNA sense strand
aagaggagguggccaaguu

SEQ ID NO: 1677613 - RNA, 19 nt, Homo sapiens
  misc_RNA (1)...(19): siRNA sense strand
ggaacuguauucgcuucua

SEQ ID NO: 1677614 - RNA, 19 nt, Homo sapiens
  misc_RNA (1)...(19): siRNA sense strand
gcuggagucuggcuaacuu

SEQ ID NO: 1677615 - RNA, 19 nt, Homo sapiens
  misc_RNA (1)...(19): siRNA sense strand
gaacugaugaaacuagcaa

SEQ ID NO: 1677616 - RNA, 19 nt, Homo sapiens
  misc_RNA (1)...(19): siRNA sense strand
gaacuguauucgcuucuac

SEQ ID NO: 1677617 - RNA, 19 nt, Homo sapiens
  misc_RNA (1)...(19): siRNA sense strand
cagaaauuauugcaaguca

SEQ ID NO: 1677618 - RNA, 19 nt, Homo sapiens
  misc_RNA (1)...(19): siRNA sense strand
gcugccacuuuccucauua

SEQ ID NO: 1677619 - RNA, 19 nt, Homo sapiens
  misc_RNA (1)...(19): siRNA sense strand
cagaugagcuggaguucag

SEQ ID NO: 1677620 - RNA, 19 nt, Homo sapiens
  misc_RNA (1)...(19): siRNA sense strand
caacuagauuuagaacuca

SEQ ID NO: 1677621 - RNA, 19 nt, Homo sapiens
  misc_RNA (1)...(19): siRNA sense strand
ugagaaggguguuaugucu

SEQ ID NO: 1677622 - RNA, 19 nt, Homo sapiens
  misc_RNA (1)...(19): siRNA sense strand
augcuucgcuggaucuaua

SEQ ID NO: 1677623 - RNA, 19 nt, Homo sapiens
  misc_RNA (1)...(19): siRNA sense strand
acaacuagauuuagaacuc

SEQ ID NO: 1677624 - RNA, 19 nt, Homo sapiens
  misc_RNA (1)...(19): siRNA sense strand
gcuaacuugucuuccacua

SEQ ID NO: 1677625 - RNA, 19 nt, Homo sapiens
  misc_RNA (1)...(19): siRNA sense strand
acggagaucuggcauuaga

SEQ ID NO: 1677626 - RNA, 19 nt, Homo sapiens
  misc_RNA (1)...(19): siRNA sense strand
ucaaauccaagacagagua

SEQ ID NO: 1677627 - RNA, 19 nt, Homo sapiens
  misc_RNA (1)...(19): siRNA sense strand
gaugaacuacugugcagaa

SEQ ID NO: 1677628 - RNA, 19 nt, Homo sapiens
  misc_RNA (1)...(19): siRNA sense strand
acacaaaggaauccaaaga

SEQ ID NO: 1677629 - RNA, 19 nt, Homo sapiens
  misc_RNA (1)...(19): siRNA sense strand
gaaacacucagcagaugug

SEQ ID NO: 1677630 - RNA, 19 nt, Homo sapiens
  misc_RNA (1)...(19): siRNA sense strand
ggcuggagcuuguuacaca

SEQ ID NO: 1677631 - RNA, 19 nt, Homo sapiens
  misc_RNA (1)...(19): siRNA sense strand
caaaucgguuucagcuaca

SEQ ID NO: 1677632 - RNA, 19 nt, Homo sapiens
  misc_RNA (1)...(19): siRNA sense strand
gggacgaccugaggaagga

SEQ ID NO: 1677633 - RNA, 19 nt, Homo sapiens
  misc_RNA (1)...(19): siRNA sense strand
ugacaaugcuucgcuggau

SEQ ID NO: 1677634 - RNA, 19 nt, Homo sapiens
  misc_RNA (1)...(19): siRNA sense strand
aagaaacacucagcagaug

SEQ ID NO: 1677635 - RNA, 19 nt, Homo sapiens
  misc_RNA (1)...(19): siRNA sense strand
gugaaugucaggaacugua

SEQ ID NO: 1677636 - RNA, 19 nt, Homo sapiens
  misc_RNA (1)...(19): siRNA sense strand
aagaguggcuggagcuugu

SEQ ID NO: 1677637 - RNA, 19 nt, Homo sapiens
  misc_RNA (1)...(19): siRNA sense strand
acauaaagccaucaaagug

SEQ ID NO: 1677638 - RNA, 19 nt, Homo sapiens
  misc_RNA (1)...(19): siRNA sense strand
acagaguacccgcuacaua

SEQ ID NO: 1677639 - RNA, 19 nt, Homo sapiens
  misc_RNA (1)...(19): siRNA sense strand
gaggauuucagcagcauga

SEQ ID NO: 1677640 - RNA, 19 nt, Homo sapiens
  misc_RNA (1)...(19): siRNA sense strand
cuacugugcagaaauuauu

SEQ ID NO: 1677641 - RNA, 19 nt, Homo sapiens
  misc_RNA (1)...(19): siRNA sense strand
agacaccacugcaccuugu

SEQ ID NO: 1677642 - RNA, 19 nt, Homo sapiens
  misc_RNA (1)...(19): siRNA sense strand
ggacaugguggacaagagu

SEQ ID NO: 1677643 - RNA, 19 nt, Homo sapiens
  misc_RNA (1)...(19): siRNA sense strand
ccaucaaaguggagagaga

SEQ ID NO: 1677644 - RNA, 19 nt, Homo sapiens
  misc_RNA (1)...(19): siRNA sense strand
aaagaaacacucagcagau

SEQ ID NO: 1677645 - RNA, 19 nt, Homo sapiens
  misc_RNA (1)...(19): siRNA sense strand
uguuaugucucuagugaau

SEQ ID NO: 1677646 - RNA, 19 nt, Homo sapiens
  misc_RNA (1)...(19): siRNA sense strand
cacgacgacuggagaguau

SEQ ID NO: 1677647 - RNA, 19 nt, Homo sapiens
  misc_RNA (1)...(19): siRNA sense strand
gacguggucuuccuguauc

SEQ ID NO: 1677648 - RNA, 19 nt, Homo sapiens
  misc_RNA (1)...(19): siRNA sense strand
ucagagaggaugauguguu

SEQ ID NO: 1677649 - RNA, 19 nt, Homo sapiens
  misc_RNA (1)...(19): siRNA sense strand
ugaugaaacuagcaaaucg

SEQ ID NO: 1677650 - RNA, 19 nt, Homo sapiens
  misc_RNA (1)...(19): siRNA sense strand
guucagagaggaugaugug

SEQ ID NO: 1677651 - RNA, 19 nt, Homo sapiens
  misc_RNA (1)...(19): siRNA sense strand
acacucagcagaugugaug

SEQ ID NO: 1677652 - RNA, 19 nt, Homo sapiens
  misc_RNA (1)...(19): siRNA sense strand
cuuguacaguucaaagaaa

SEQ ID NO: 1677653 - RNA, 19 nt, Homo sapiens
  misc_RNA (1)...(19): siRNA sense strand
gaaggguguuaugucucua

SEQ ID NO: 1677654 - RNA, 19 nt, Homo sapiens
  misc_RNA (1)...(19): siRNA sense strand
agaaggguguuaugucucu

SEQ ID NO: 1677655 - RNA, 19 nt, Homo sapiens
  misc_RNA (1)...(19): siRNA sense strand
gcagugcaaacaacuagau

SEQ ID NO: 1677656 - RNA, 19 nt, Homo sapiens
  misc_RNA (1)...(19): siRNA sense strand
ggaccugucagaugcuaau

SEQ ID NO: 1677657 - RNA, 19 nt, Homo sapiens
  misc_RNA (1)...(19): siRNA sense strand
ucacgacgacuggagagua

SEQ ID NO: 1677658 - RNA, 19 nt, Homo sapiens
  misc_RNA (1)...(19): siRNA sense strand
uuaugucucuagugaaugu

SEQ ID NO: 1677659 - RNA, 19 nt, Homo sapiens
  misc_RNA (1)...(19): siRNA sense strand
gaguuggaccugucagaug

SEQ ID NO: 1677660 - RNA, 19 nt, Homo sapiens
  misc_RNA (1)...(19): siRNA sense strand
gaagauguccccgugguaa

SEQ ID NO: 1677661 - RNA, 19 nt, Homo sapiens
  misc_RNA (1)...(19): siRNA sense strand
ucucuuugcugccacuuuc

SEQ ID NO: 1677662 - RNA, 19 nt, Homo sapiens
  misc_RNA (1)...(19): siRNA sense strand
cuacauaaagccaucaaag

SEQ ID NO: 1677663 - RNA, 19 nt, Homo sapiens
  misc_RNA (1)...(19): siRNA sense strand
gagucuggcuaacuugucu

SEQ ID NO: 1677664 - RNA, 19 nt, Homo sapiens
  misc_RNA (1)...(19): siRNA sense strand
gagcaguacagcgaucuga

SEQ ID NO: 1677665 - RNA, 19 nt, Homo sapiens
  misc_RNA (1)...(19): siRNA sense strand
ucuacgagcaggagcagua

SEQ ID NO: 1677666 - RNA, 19 nt, Homo sapiens
  misc_RNA (1)...(19): siRNA sense strand
gcaguacagcgaucugaag

SEQ ID NO: 1677667 - RNA, 19 nt, Homo sapiens
  misc_RNA (1)...(19): siRNA sense strand
cuuguggccuuguacaguu

SEQ ID NO: 1677668 - RNA, 19 nt, Homo sapiens
  misc_RNA (1)...(19): siRNA sense strand
gaugugagaaggguguuau

SEQ ID NO: 1677669 - RNA, 19 nt, Homo sapiens
  misc_RNA (1)...(19): siRNA sense strand
uuacacaaaggaauccaaa

SEQ ID NO: 1677670 - RNA, 19 nt, Homo sapiens
  misc_RNA (1)...(19): siRNA sense strand
cgacgacuggagaguauug

SEQ ID NO: 1677671 - RNA, 19 nt, Homo sapiens
  misc_RNA (1)...(19): siRNA sense strand
uccuguaucugauugaaau

SEQ ID NO: 1677672 - RNA, 19 nt, Homo sapiens
  misc_RNA (1)...(19): siRNA sense strand
gcagaaauuauugcaaguc

SEQ ID NO: 1677673 - RNA, 19 nt, Homo sapiens
  misc_RNA (1)...(19): siRNA sense strand
gaaugucaggaacuguauu

SEQ ID NO: 1677674 - RNA, 19 nt, Homo sapiens
  misc_RNA (1)...(19): siRNA sense strand
agaguacccgcuacauaaa

SEQ ID NO: 1677675 - RNA, 19 nt, Homo sapiens
  misc_RNA (1)...(19): siRNA sense strand
caucaaaguggagagagaa

SEQ ID NO: 1677676 - RNA, 19 nt, Homo sapiens
  misc_RNA (1)...(19): siRNA sense strand
ggagacaccacugcaccuu

SEQ ID NO: 1677677 - RNA, 19 nt, Homo sapiens
  misc_RNA (1)...(19): siRNA sense strand
gaguggcuggagcuuguua

SEQ ID NO: 1677678 - RNA, 19 nt, Homo sapiens
  misc_RNA (1)...(19): siRNA sense strand
augucaagcugcagaagaa

SEQ ID NO: 1677679 - RNA, 19 nt, Homo sapiens
  misc_RNA (1)...(19): siRNA sense strand
ggucuuccuguaucugauu

SEQ ID NO: 1677680 - RNA, 19 nt, Homo sapiens
  misc_RNA (1)...(19): siRNA sense strand
auacagaugagcuggaguu

SEQ ID NO: 1677681 - RNA, 19 nt, Homo sapiens
  misc_RNA (1)...(19): siRNA sense strand
uacauaaagccaucaaagu

SEQ ID NO: 1677682 - RNA, 19 nt, Homo sapiens
  misc_RNA (1)...(19): siRNA sense strand
cuaacuugucuuccacuaa

SEQ ID NO: 1677683 - RNA, 19 nt, Homo sapiens
  misc_RNA (1)...(19): siRNA sense strand
cugccacuuuccucauuaa

SEQ ID NO: 1677684 - RNA, 19 nt, Homo sapiens
  misc_RNA (1)...(19): siRNA sense strand
uaaagaguuggaccuguca

SEQ ID NO: 1677685 - RNA, 19 nt, Homo sapiens
  misc_RNA (1)...(19): siRNA sense strand
gccacuuuccucauuaaga

SEQ ID NO: 1677686 - RNA, 19 nt, Homo sapiens
  misc_RNA (1)...(19): siRNA sense strand
cagcagcgaguccuucauc

SEQ ID NO: 1677687 - RNA, 19 nt, Homo sapiens
  misc_RNA (1)...(19): siRNA sense strand
cugaaugccagcacacuga

SEQ ID NO: 1677688 - RNA, 19 nt, Homo sapiens
  misc_RNA (1)...(19): siRNA sense strand
gaagaggagguggccaagu

SEQ ID NO: 1677689 - RNA, 19 nt, Homo sapiens
  misc_RNA (1)...(19): siRNA sense strand
cagcauaucacagugucuu

SEQ ID NO: 1677690 - RNA, 19 nt, Homo sapiens
  misc_RNA (1)...(19): siRNA sense strand
gaggugacgaugacaaugc

SEQ ID NO: 1677691 - RNA, 19 nt, Homo sapiens
  misc_RNA (1)...(19): siRNA sense strand
caucguggcagaccucuac

SEQ ID NO: 1677692 - RNA, 19 nt, Homo sapiens
  misc_RNA (1)...(19): siRNA sense strand
guaucugauugaaauggau

SEQ ID NO: 1677693 - RNA, 19 nt, Homo sapiens
  misc_RNA (1)...(19): siRNA sense strand
uguaucugauugaaaugga

SEQ ID NO: 1677694 - RNA, 19 nt, Homo sapiens
  misc_RNA (1)...(19): siRNA sense strand
gugagaaggguguuauguc

SEQ ID NO: 1677695 - RNA, 19 nt, Homo sapiens
  misc_RNA (1)...(19): siRNA sense strand
caguacagcgaucugaaga

SEQ ID NO: 1677696 - RNA, 19 nt, Homo sapiens
  misc_RNA (1)...(19): siRNA sense strand
ccacgcugguuagucacaa

SEQ ID NO: 1677697 - RNA, 19 nt, Homo sapiens
  misc_RNA (1)...(19): siRNA sense strand
gaacuacugugcagaaauu

SEQ ID NO: 1677698 - RNA, 19 nt, Homo sapiens
  misc_RNA (1)...(19): siRNA sense strand
uaacggagaucuggcauua

SEQ ID NO: 1677699 - RNA, 19 nt, Homo sapiens
  misc_RNA (1)...(19): siRNA sense strand
gcaaacaacuagauuuaga

SEQ ID NO: 1677700 - RNA, 19 nt, Homo sapiens
  misc_RNA (1)...(19): siRNA sense strand
caucagugcucacaaguuu

SEQ ID NO: 1677701 - RNA, 19 nt, Homo sapiens
  misc_RNA (1)...(19): siRNA sense strand
uaacuugucuuccacuaaa

SEQ ID NO: 1677702 - RNA, 19 nt, Homo sapiens
  misc_RNA (1)...(19): siRNA sense strand
ccacuuuccucauuaagaa

SEQ ID NO: 1677703 - RNA, 19 nt, Homo sapiens
  misc_RNA (1)...(19): siRNA sense strand
gguguuaugucucuaguga

SEQ ID NO: 1677704 - RNA, 19 nt, Homo sapiens
  misc_RNA (1)...(19): siRNA sense strand
gugcaaacaacuagauuua

SEQ ID NO: 1677705 - RNA, 19 nt, Homo sapiens
  misc_RNA (1)...(19): siRNA sense strand
ugacugaacugaugaaacu

SEQ ID NO: 1677706 - RNA, 19 nt, Homo sapiens
  misc_RNA (1)...(19): siRNA sense strand
cagaguacccgcuacauaa

SEQ ID NO: 1677707 - RNA, 19 nt, Homo sapiens
  misc_RNA (1)...(19): siRNA sense strand
ccagcacacugaugaacua

SEQ ID NO: 1677708 - RNA, 19 nt, Homo sapiens
  misc_RNA (1)...(19): siRNA sense strand
gcacacugaugaacuacug

SEQ ID NO: 1677709 - RNA, 19 nt, Homo sapiens
  misc_RNA (1)...(19): siRNA sense strand
cagagaggaugauguguuc

SEQ ID NO: 1677710 - RNA, 19 nt, Homo sapiens
  misc_RNA (1)...(19): siRNA sense strand
aagaggagguggccaaguu

SEQ ID NO: 1677711 - RNA, 19 nt, Homo sapiens
  misc_RNA (1)...(19): siRNA sense strand
ggaacuguauucgcuucua

SEQ ID NO: 1677712 - RNA, 19 nt, Homo sapiens
  misc_RNA (1)...(19): siRNA sense strand
gcuggagucuggcuaacuu

SEQ ID NO: 1677713 - RNA, 19 nt, Homo sapiens
  misc_RNA (1)...(19): siRNA sense strand
gaacugaugaaacuagcaa

SEQ ID NO: 1677714 - RNA, 19 nt, Homo sapiens
  misc_RNA (1)...(19): siRNA sense strand
gaacuguauucgcuucuac

SEQ ID NO: 1677715 - RNA, 19 nt, Homo sapiens
  misc_RNA (1)...(19): siRNA sense strand
cagaaauuauugcaaguca

SEQ ID NO: 1677716 - RNA, 19 nt, Homo sapiens
  misc_RNA (1)...(19): siRNA sense strand
gcugccacuuuccucauua

SEQ ID NO: 1677717 - RNA, 19 nt, Homo sapiens
  misc_RNA (1)...(19): siRNA sense strand
cagaugagcuggaguucag

SEQ ID NO: 1677718 - RNA, 19 nt, Homo sapiens
  misc_RNA (1)...(19): siRNA sense strand
caacuagauuuagaacuca

SEQ ID NO: 1677719 - RNA, 19 nt, Homo sapiens
  misc_RNA (1)...(19): siRNA sense strand
ugagaaggguguuaugucu

SEQ ID NO: 1677720 - RNA, 19 nt, Homo sapiens
  misc_RNA (1)...(19): siRNA sense strand
augcuucgcuggaucuaua

SEQ ID NO: 1677721 - RNA, 19 nt, Homo sapiens
  misc_RNA (1)...(19): siRNA sense strand
acaacuagauuuagaacuc

SEQ ID NO: 1677722 - RNA, 19 nt, Homo sapiens
  misc_RNA (1)...(19): siRNA sense strand
gcuaacuugucuuccacua

SEQ ID NO: 1677723 - RNA, 19 nt, Homo sapiens
  misc_RNA (1)...(19): siRNA sense strand
acggagaucuggcauuaga

SEQ ID NO: 1677724 - RNA, 19 nt, Homo sapiens
  misc_RNA (1)...(19): siRNA sense strand
ucaaauccaagacagagua

SEQ ID NO: 1677725 - RNA, 19 nt, Homo sapiens
  misc_RNA (1)...(19): siRNA sense strand
gaugaacuacugugcagaa

SEQ ID NO: 1677726 - RNA, 19 nt, Homo sapiens
  misc_RNA (1)...(19): siRNA sense strand
acacaaaggaauccaaaga

SEQ ID NO: 1677727 - RNA, 19 nt, Homo sapiens
  misc_RNA (1)...(19): siRNA sense strand
gaaacacucagcagaugug

SEQ ID NO: 1677728 - RNA, 19 nt, Homo sapiens
  misc_RNA (1)...(19): siRNA sense strand
ggcuggagcuuguuacaca

SEQ ID NO: 1677729 - RNA, 19 nt, Homo sapiens
  misc_RNA (1)...(19): siRNA sense strand
caaaucgguuucagcuaca

SEQ ID NO: 1677730 - RNA, 19 nt, Homo sapiens
  misc_RNA (1)...(19): siRNA sense strand
gggacgaccugaggaagga

SEQ ID NO: 1677731 - RNA, 19 nt, Homo sapiens
  misc_RNA (1)...(19): siRNA sense strand
ugacaaugcuucgcuggau

SEQ ID NO: 1677732 - RNA, 19 nt, Homo sapiens
  misc_RNA (1)...(19): siRNA sense strand
aagaaacacucagcagaug

SEQ ID NO: 1677733 - RNA, 19 nt, Homo sapiens
  misc_RNA (1)...(19): siRNA sense strand
gugaaugucaggaacugua

SEQ ID NO: 1677734 - RNA, 19 nt, Homo sapiens
  misc_RNA (1)...(19): siRNA sense strand
aagaguggcuggagcuugu

SEQ ID NO: 1677735 - RNA, 19 nt, Homo sapiens
  misc_RNA (1)...(19): siRNA sense strand
acauaaagccaucaaagug

SEQ ID NO: 1677736 - RNA, 19 nt, Homo sapiens
  misc_RNA (1)...(19): siRNA sense strand
acagaguacccgcuacaua

SEQ ID NO: 1677737 - RNA, 19 nt, Homo sapiens
  misc_RNA (1)...(19): siRNA sense strand
gaggauuucagcagcauga

SEQ ID NO: 1677738 - RNA, 19 nt, Homo sapiens
  misc_RNA (1)...(19): siRNA sense strand
cuacugugcagaaauuauu

SEQ ID NO: 1677739 - RNA, 19 nt, Homo sapiens
  misc_RNA (1)...(19): siRNA sense strand
agacaccacugcaccuugu

SEQ ID NO: 1677740 - RNA, 19 nt, Homo sapiens
  misc_RNA (1)...(19): siRNA sense strand
ggacaugguggacaagagu

SEQ ID NO: 1677741 - RNA, 19 nt, Homo sapiens
  misc_RNA (1)...(19): siRNA sense strand
ccaucaaaguggagagaga

SEQ ID NO: 1677742 - RNA, 19 nt, Homo sapiens
  misc_RNA (1)...(19): siRNA sense strand
aaagaaacacucagcagau

SEQ ID NO: 1677743 - RNA, 19 nt, Homo sapiens
  misc_RNA (1)...(19): siRNA sense strand
uguuaugucucuagugaau

SEQ ID NO: 1677744 - RNA, 19 nt, Homo sapiens
  misc_RNA (1)...(19): siRNA sense strand
cacgacgacuggagaguau

SEQ ID NO: 1677745 - RNA, 19 nt, Homo sapiens
  misc_RNA (1)...(19): siRNA sense strand
gacguggucuuccuguauc

SEQ ID NO: 1677746 - RNA, 19 nt, Homo sapiens
  misc_RNA (1)...(19): siRNA sense strand
ucagagaggaugauguguu

SEQ ID NO: 1677747 - RNA, 19 nt, Homo sapiens
  misc_RNA (1)...(19): siRNA sense strand
ugaugaaacuagcaaaucg

SEQ ID NO: 1677748 - RNA, 19 nt, Homo sapiens
  misc_RNA (1)...(19): siRNA sense strand
guucagagaggaugaugug

SEQ ID NO: 1677749 - RNA, 19 nt, Homo sapiens
  misc_RNA (1)...(19): siRNA sense strand
acacucagcagaugugaug

SEQ ID NO: 1677750 - RNA, 19 nt, Homo sapiens
  misc_RNA (1)...(19): siRNA sense strand
cuuguacaguucaaagaaa

SEQ ID NO: 1677751 - RNA, 19 nt, Homo sapiens
  misc_RNA (1)...(19): siRNA sense strand
gaaggguguuaugucucua

SEQ ID NO: 1677752 - RNA, 19 nt, Homo sapiens
  misc_RNA (1)...(19): siRNA sense strand
agaaggguguuaugucucu

SEQ ID NO: 1677753 - RNA, 19 nt, Homo sapiens
  misc_RNA (1)...(19): siRNA sense strand
gcagugcaaacaacuagau

SEQ ID NO: 1677754 - RNA, 19 nt, Homo sapiens
  misc_RNA (1)...(19): siRNA sense strand
ggaccugucagaugcuaau

SEQ ID NO: 1677755 - RNA, 19 nt, Homo sapiens
  misc_RNA (1)...(19): siRNA sense strand
ucacgacgacuggagagua

SEQ ID NO: 1677756 - RNA, 19 nt, Homo sapiens
  misc_RNA (1)...(19): siRNA sense strand
uuaugucucuagugaaugu

SEQ ID NO: 1677757 - RNA, 19 nt, Homo sapiens
  misc_RNA (1)...(19): siRNA sense strand
gaguuggaccugucagaug

SEQ ID NO: 1677758 - RNA, 19 nt, Homo sapiens
  misc_RNA (1)...(19): siRNA sense strand
gaagauguccccgugguaa

SEQ ID NO: 1677759 - RNA, 19 nt, Homo sapiens
  misc_RNA (1)...(19): siRNA sense strand
ucucuuugcugccacuuuc

SEQ ID NO: 1677760 - RNA, 19 nt, Homo sapiens
  misc_RNA (1)...(19): siRNA sense strand
cuacauaaagccaucaaag

SEQ ID NO: 1677761 - RNA, 19 nt, Homo sapiens
  misc_RNA (1)...(19): siRNA sense strand
gagucuggcuaacuugucu

SEQ ID NO: 1677762 - RNA, 19 nt, Homo sapiens
  misc_RNA (1)...(19): siRNA sense strand
gagcaguacagcgaucuga

SEQ ID NO: 1677763 - RNA, 19 nt, Homo sapiens
  misc_RNA (1)...(19): siRNA sense strand
ucuacgagcaggagcagua

SEQ ID NO: 1677764 - RNA, 19 nt, Homo sapiens
  misc_RNA (1)...(19): siRNA sense strand
gcaguacagcgaucugaag

SEQ ID NO: 1677765 - RNA, 19 nt, Homo sapiens
  misc_RNA (1)...(19): siRNA sense strand
cuuguggccuuguacaguu

SEQ ID NO: 1677766 - RNA, 19 nt, Homo sapiens
  misc_RNA (1)...(19): siRNA sense strand
gaugugagaaggguguuau

SEQ ID NO: 1677767 - RNA, 19 nt, Homo sapiens
  misc_RNA (1)...(19): siRNA sense strand
uuacacaaaggaauccaaa

SEQ ID NO: 1677768 - RNA, 19 nt, Homo sapiens
  misc_RNA (1)...(19): siRNA sense strand
cgacgacuggagaguauug

SEQ ID NO: 1677769 - RNA, 19 nt, Homo sapiens
  misc_RNA (1)...(19): siRNA sense strand
uccuguaucugauugaaau

SEQ ID NO: 1677770 - RNA, 19 nt, Homo sapiens
  misc_RNA (1)...(19): siRNA sense strand
gcagaaauuauugcaaguc

SEQ ID NO: 1677771 - RNA, 19 nt, Homo sapiens
  misc_RNA (1)...(19): siRNA sense strand
gaaugucaggaacuguauu

SEQ ID NO: 1677772 - RNA, 19 nt, Homo sapiens
  misc_RNA (1)...(19): siRNA sense strand
agaguacccgcuacauaaa

SEQ ID NO: 1677773 - RNA, 19 nt, Homo sapiens
  misc_RNA (1)...(19): siRNA sense strand
caucaaaguggagagagaa

SEQ ID NO: 1677774 - RNA, 19 nt, Homo sapiens
  misc_RNA (1)...(19): siRNA sense strand
ggagacaccacugcaccuu

SEQ ID NO: 1677775 - RNA, 19 nt, Homo sapiens
  misc_RNA (1)...(19): siRNA sense strand
gaguggcuggagcuuguua

SEQ ID NO: 1677776 - RNA, 19 nt, Homo sapiens
  misc_RNA (1)...(19): siRNA sense strand
augucaagcugcagaagaa

SEQ ID NO: 1677777 - RNA, 19 nt, Homo sapiens
  misc_RNA (1)...(19): siRNA sense strand
ggucuuccuguaucugauu

SEQ ID NO: 1677778 - RNA, 19 nt, Homo sapiens
  misc_RNA (1)...(19): siRNA sense strand
auacagaugagcuggaguu

SEQ ID NO: 1677779 - RNA, 19 nt, Homo sapiens
  misc_RNA (1)...(19): siRNA sense strand
uacauaaagccaucaaagu

SEQ ID NO: 1677780 - RNA, 19 nt, Homo sapiens
  misc_RNA (1)...(19): siRNA sense strand
cuaacuugucuuccacuaa

SEQ ID NO: 1677781 - RNA, 19 nt, Homo sapiens
  misc_RNA (1)...(19): siRNA sense strand
cugccacuuuccucauuaa

SEQ ID NO: 1677782 - RNA, 19 nt, Homo sapiens
  misc_RNA (1)...(19): siRNA sense strand
uaaagaguuggaccuguca

SEQ ID NO: 1677783 - RNA, 19 nt, Homo sapiens
  misc_RNA (1)...(19): siRNA sense strand
gccacuuuccucauuaaga

SEQ ID NO: 1677784 - RNA, 19 nt, Homo sapiens
  misc_RNA (1)...(19): siRNA sense strand
cagcagcgaguccuucauc

SEQ ID NO: 1677785 - RNA, 19 nt, Homo sapiens
  misc_RNA (1)...(19): siRNA sense strand
cugaaugccagcacacuga

SEQ ID NO: 1677786 - RNA, 19 nt, Homo sapiens
  misc_RNA (1)...(19): siRNA sense strand
gaagaggagguggccaagu

SEQ ID NO: 1677787 - RNA, 19 nt, Homo sapiens
  misc_RNA (1)...(19): siRNA sense strand
cagcauaucacagugucuu

SEQ ID NO: 1677788 - RNA, 19 nt, Homo sapiens
  misc_RNA (1)...(19): siRNA sense strand
gaggugacgaugacaaugc

SEQ ID NO: 1677789 - RNA, 19 nt, Homo sapiens
  misc_RNA (1)...(19): siRNA sense strand
caucguggcagaccucuac

SEQ ID NO: 1677790 - RNA, 19 nt, Homo sapiens
  misc_RNA (1)...(19): siRNA sense strand
guaucugauugaaauggau

SEQ ID NO: 1677791 - RNA, 19 nt, Homo sapiens
  misc_RNA (1)...(19): siRNA sense strand
uguaucugauugaaaugga

SEQ ID NO: 1677792 - RNA, 19 nt, Homo sapiens
  misc_RNA (1)...(19): siRNA sense strand
gugagaaggguguuauguc

SEQ ID NO: 1677793 - RNA, 19 nt, Homo sapiens
  misc_RNA (1)...(19): siRNA sense strand
caguacagcgaucugaaga

SEQ ID NO: 1677794 - RNA, 19 nt, Homo sapiens
  misc_RNA (1)...(19): siRNA sense strand
ccacgcugguuagucacaa

SEQ ID NO: 1677795 - RNA, 19 nt, Homo sapiens
  misc_RNA (1)...(19): siRNA sense strand
gaacugacaugcagaggau

SEQ ID NO: 1677796 - RNA, 19 nt, Homo sapiens
  misc_RNA (1)...(19): siRNA sense strand
caacauggccuacaagguu

SEQ ID NO: 1677797 - RNA, 19 nt, Homo sapiens
  misc_RNA (1)...(19): siRNA sense strand
ggaaugcguccaccacaua

SEQ ID NO: 1677798 - RNA, 19 nt, Homo sapiens
  misc_RNA (1)...(19): siRNA sense strand
gaggauagaagauguguug

SEQ ID NO: 1677799 - RNA, 19 nt, Homo sapiens
  misc_RNA (1)...(19): siRNA sense strand
cgagaacacuaaggacauu

SEQ ID NO: 1677800 - RNA, 19 nt, Homo sapiens
  misc_RNA (1)...(19): siRNA sense strand
ugccgcugcuggucuauua

SEQ ID NO: 1677801 - RNA, 19 nt, Homo sapiens
  misc_RNA (1)...(19): siRNA sense strand
aacauggccuacaagguua

SEQ ID NO: 1677802 - RNA, 19 nt, Homo sapiens
  misc_RNA (1)...(19): siRNA sense strand
cuaaggacauucggcugua

SEQ ID NO: 1677803 - RNA, 19 nt, Homo sapiens
  misc_RNA (1)...(19): siRNA sense strand
gggaugagcugggcuacag

SEQ ID NO: 1677804 - RNA, 19 nt, Homo sapiens
  misc_RNA (1)...(19): siRNA sense strand
gcugguagcgagaacacua

SEQ ID NO: 1677805 - RNA, 19 nt, Homo sapiens
  misc_RNA (1)...(19): siRNA sense strand
gcgcagauccgacagaacu

SEQ ID NO: 1677806 - RNA, 19 nt, Homo sapiens
  misc_RNA (1)...(19): siRNA sense strand
gaaugcguccaccacauau

SEQ ID NO: 1677807 - RNA, 19 nt, Homo sapiens
  misc_RNA (1)...(19): siRNA sense strand
ccucaacgccaucaacaug

SEQ ID NO: 1677808 - RNA, 19 nt, Homo sapiens
  misc_RNA (1)...(19): siRNA sense strand
guagcgagaacacuaagga

SEQ ID NO: 1677809 - RNA, 19 nt, Homo sapiens
  misc_RNA (1)...(19): siRNA sense strand
gcagauccgacagaacuga

SEQ ID NO: 1677810 - RNA, 19 nt, Homo sapiens
  misc_RNA (1)...(19): siRNA sense strand
ccgucauccuugucuguua

SEQ ID NO: 1677811 - RNA, 19 nt, Homo sapiens
  misc_RNA (1)...(19): siRNA sense strand
gcaaguccgugcgcaccau

SEQ ID NO: 1677812 - RNA, 19 nt, Homo sapiens
  misc_RNA (1)...(19): siRNA sense strand
gcucuucgcggugcccuuu

SEQ ID NO: 1677813 - RNA, 19 nt, Homo sapiens
  misc_RNA (1)...(19): siRNA sense strand
ccaccuggcugugucugau

SEQ ID NO: 1677814 - RNA, 19 nt, Homo sapiens
  misc_RNA (1)...(19): siRNA sense strand
gcagaggauagaagaugug

SEQ ID NO: 1677815 - RNA, 19 nt, Homo sapiens
  misc_RNA (1)...(19): siRNA sense strand
gcgagaacacuaaggacau

SEQ ID NO: 1677816 - RNA, 19 nt, Homo sapiens
  misc_RNA (1)...(19): siRNA sense strand
ccguggcgcucuacaucuu

SEQ ID NO: 1677817 - RNA, 19 nt, Homo sapiens
  misc_RNA (1)...(19): siRNA sense strand
gggcagcagugaggacucu

SEQ ID NO: 1677818 - RNA, 19 nt, Homo sapiens
  misc_RNA (1)...(19): siRNA sense strand
ggcuacaggugccgcuuca

SEQ ID NO: 1677819 - RNA, 19 nt, Homo sapiens
  misc_RNA (1)...(19): siRNA sense strand
uggaaugacaccaucaaug

SEQ ID NO: 1677820 - RNA, 19 nt, Homo sapiens
  misc_RNA (1)...(19): siRNA sense strand
uaaggacauucggcuguag

SEQ ID NO: 1677821 - RNA, 19 nt, Homo sapiens
  misc_RNA (1)...(19): siRNA sense strand
cgucauccuugucuguuac

SEQ ID NO: 1677822 - RNA, 19 nt, Homo sapiens
  misc_RNA (1)...(19): siRNA sense strand
ugcagaggauagaagaugu

SEQ ID NO: 1677823 - RNA, 19 nt, Homo sapiens
  misc_RNA (1)...(19): siRNA sense strand
gaacugacaugcagaggau

SEQ ID NO: 1677824 - RNA, 19 nt, Homo sapiens
  misc_RNA (1)...(19): siRNA sense strand
caacauggccuacaagguu

SEQ ID NO: 1677825 - RNA, 19 nt, Homo sapiens
  misc_RNA (1)...(19): siRNA sense strand
ggaaugcguccaccacaua

SEQ ID NO: 1677826 - RNA, 19 nt, Homo sapiens
  misc_RNA (1)...(19): siRNA sense strand
gaggauagaagauguguug

SEQ ID NO: 1677827 - RNA, 19 nt, Homo sapiens
  misc_RNA (1)...(19): siRNA sense strand
cgagaacacuaaggacauu

SEQ ID NO: 1677828 - RNA, 19 nt, Homo sapiens
  misc_RNA (1)...(19): siRNA sense strand
ugccgcugcuggucuauua

SEQ ID NO: 1677829 - RNA, 19 nt, Homo sapiens
  misc_RNA (1)...(19): siRNA sense strand
aacauggccuacaagguua

SEQ ID NO: 1677830 - RNA, 19 nt, Homo sapiens
  misc_RNA (1)...(19): siRNA sense strand
cuaaggacauucggcugua

SEQ ID NO: 1677831 - RNA, 19 nt, Homo sapiens
  misc_RNA (1)...(19): siRNA sense strand
gggaugagcugggcuacag

SEQ ID NO: 1677832 - RNA, 19 nt, Homo sapiens
  misc_RNA (1)...(19): siRNA sense strand
gcugguagcgagaacacua

SEQ ID NO: 1677833 - RNA, 19 nt, Homo sapiens
  misc_RNA (1)...(19): siRNA sense strand
gcgcagauccgacagaacu

SEQ ID NO: 1677834 - RNA, 19 nt, Homo sapiens
  misc_RNA (1)...(19): siRNA sense strand
gaaugcguccaccacauau

SEQ ID NO: 1677835 - RNA, 19 nt, Homo sapiens
  misc_RNA (1)...(19): siRNA sense strand
ccucaacgccaucaacaug

SEQ ID NO: 1677836 - RNA, 19 nt, Homo sapiens
  misc_RNA (1)...(19): siRNA sense strand
guagcgagaacacuaagga

SEQ ID NO: 1677837 - RNA, 19 nt, Homo sapiens
  misc_RNA (1)...(19): siRNA sense strand
gcagauccgacagaacuga

SEQ ID NO: 1677838 - RNA, 19 nt, Homo sapiens
  misc_RNA (1)...(19): siRNA sense strand
ccgucauccuugucuguua

SEQ ID NO: 1677839 - RNA, 19 nt, Homo sapiens
  misc_RNA (1)...(19): siRNA sense strand
gcaaguccgugcgcaccau

SEQ ID NO: 1677840 - RNA, 19 nt, Homo sapiens
  misc_RNA (1)...(19): siRNA sense strand
gcucuucgcggugcccuuu

SEQ ID NO: 1677841 - RNA, 19 nt, Homo sapiens
  misc_RNA (1)...(19): siRNA sense strand
ccaccuggcugugucugau

SEQ ID NO: 1677842 - RNA, 19 nt, Homo sapiens
  misc_RNA (1)...(19): siRNA sense strand
gcagaggauagaagaugug

SEQ ID NO: 1677843 - RNA, 19 nt, Homo sapiens
  misc_RNA (1)...(19): siRNA sense strand
gcgagaacacuaaggacau

SEQ ID NO: 1677844 - RNA, 19 nt, Homo sapiens
  misc_RNA (1)...(19): siRNA sense strand
ccguggcgcucuacaucuu

SEQ ID NO: 1677845 - RNA, 19 nt, Homo sapiens
  misc_RNA (1)...(19): siRNA sense strand
gggcagcagugaggacucu

SEQ ID NO: 1677846 - RNA, 19 nt, Homo sapiens
  misc_RNA (1)...(19): siRNA sense strand
ggcuacaggugccgcuuca

SEQ ID NO: 1677847 - RNA, 19 nt, Homo sapiens
  misc_RNA (1)...(19): siRNA sense strand
uggaaugacaccaucaaug

SEQ ID NO: 1677848 - RNA, 19 nt, Homo sapiens
  misc_RNA (1)...(19): siRNA sense strand
uaaggacauucggcuguag

SEQ ID NO: 1677849 - RNA, 19 nt, Homo sapiens
  misc_RNA (1)...(19): siRNA sense strand
cgucauccuugucuguuac

SEQ ID NO: 1677850 - RNA, 19 nt, Homo sapiens
  misc_RNA (1)...(19): siRNA sense strand
ugcagaggauagaagaugu

SEQ ID NO: 1677851 - RNA, 19 nt, Homo sapiens
  misc_RNA (1)...(19): siRNA sense strand
gaacugacaugcagaggau

SEQ ID NO: 1677852 - RNA, 19 nt, Homo sapiens
  misc_RNA (1)...(19): siRNA sense strand
caacauggccuacaagguu

SEQ ID NO: 1677853 - RNA, 19 nt, Homo sapiens
  misc_RNA (1)...(19): siRNA sense strand
ggaaugcguccaccacaua

SEQ ID NO: 1677854 - RNA, 19 nt, Homo sapiens
  misc_RNA (1)...(19): siRNA sense strand
gaggauagaagauguguug

SEQ ID NO: 1677855 - RNA, 19 nt, Homo sapiens
  misc_RNA (1)...(19): siRNA sense strand
cgagaacacuaaggacauu

SEQ ID NO: 1677856 - RNA, 19 nt, Homo sapiens
  misc_RNA (1)...(19): siRNA sense strand
ugccgcugcuggucuauua

SEQ ID NO: 1677857 - RNA, 19 nt, Homo sapiens
  misc_RNA (1)...(19): siRNA sense strand
aacauggccuacaagguua

SEQ ID NO: 1677858 - RNA, 19 nt, Homo sapiens
  misc_RNA (1)...(19): siRNA sense strand
cuaaggacauucggcugua

SEQ ID NO: 1677859 - RNA, 19 nt, Homo sapiens
  misc_RNA (1)...(19): siRNA sense strand
gggaugagcugggcuacag

SEQ ID NO: 1677860 - RNA, 19 nt, Homo sapiens
  misc_RNA (1)...(19): siRNA sense strand
gcugguagcgagaacacua

SEQ ID NO: 1677861 - RNA, 19 nt, Homo sapiens
  misc_RNA (1)...(19): siRNA sense strand
gcgcagauccgacagaacu

SEQ ID NO: 1677862 - RNA, 19 nt, Homo sapiens
  misc_RNA (1)...(19): siRNA sense strand
gaaugcguccaccacauau

SEQ ID NO: 1677863 - RNA, 19 nt, Homo sapiens
  misc_RNA (1)...(19): siRNA sense strand
ccucaacgccaucaacaug

SEQ ID NO: 1677864 - RNA, 19 nt, Homo sapiens
  misc_RNA (1)...(19): siRNA sense strand
guagcgagaacacuaagga

SEQ ID NO: 1677865 - RNA, 19 nt, Homo sapiens
  misc_RNA (1)...(19): siRNA sense strand
gcagauccgacagaacuga

SEQ ID NO: 1677866 - RNA, 19 nt, Homo sapiens
  misc_RNA (1)...(19): siRNA sense strand
ccgucauccuugucuguua

SEQ ID NO: 1677867 - RNA, 19 nt, Homo sapiens
  misc_RNA (1)...(19): siRNA sense strand
gcaaguccgugcgcaccau

SEQ ID NO: 1677868 - RNA, 19 nt, Homo sapiens
  misc_RNA (1)...(19): siRNA sense strand
gcucuucgcggugcccuuu

SEQ ID NO: 1677869 - RNA, 19 nt, Homo sapiens
  misc_RNA (1)...(19): siRNA sense strand
ccaccuggcugugucugau

SEQ ID NO: 1677870 - RNA, 19 nt, Homo sapiens
  misc_RNA (1)...(19): siRNA sense strand
gcagaggauagaagaugug

SEQ ID NO: 1677871 - RNA, 19 nt, Homo sapiens
  misc_RNA (1)...(19): siRNA sense strand
gcgagaacacuaaggacau

SEQ ID NO: 1677872 - RNA, 19 nt, Homo sapiens
  misc_RNA (1)...(19): siRNA sense strand
ccguggcgcucuacaucuu

SEQ ID NO: 1677873 - RNA, 19 nt, Homo sapiens
  misc_RNA (1)...(19): siRNA sense strand
gggcagcagugaggacucu

SEQ ID NO: 1677874 - RNA, 19 nt, Homo sapiens
  misc_RNA (1)...(19): siRNA sense strand
ggcuacaggugccgcuuca

SEQ ID NO: 1677875 - RNA, 19 nt, Homo sapiens
  misc_RNA (1)...(19): siRNA sense strand
uggaaugacaccaucaaug

SEQ ID NO: 1677876 - RNA, 19 nt, Homo sapiens
  misc_RNA (1)...(19): siRNA sense strand
uaaggacauucggcuguag

SEQ ID NO: 1677877 - RNA, 19 nt, Homo sapiens
  misc_RNA (1)...(19): siRNA sense strand
cgucauccuugucuguuac

SEQ ID NO: 1677878 - RNA, 19 nt, Homo sapiens
  misc_RNA (1)...(19): siRNA sense strand
ugcagaggauagaagaugu

SEQ ID NO: 1677879 - RNA, 19 nt, Homo sapiens
  misc_RNA (1)...(19): siRNA sense strand
ggaagaagcuggugaaugc

SEQ ID NO: 1677880 - RNA, 19 nt, Homo sapiens
  misc_RNA (1)...(19): siRNA sense strand
gaacaagcucauaguauua

SEQ ID NO: 1677881 - RNA, 19 nt, Homo sapiens
  misc_RNA (1)...(19): siRNA sense strand
cagaagcucuccaaauuga

SEQ ID NO: 1677882 - RNA, 19 nt, Homo sapiens
  misc_RNA (1)...(19): siRNA sense strand
ucacagaccuucuacacaa

SEQ ID NO: 1677883 - RNA, 19 nt, Homo sapiens
  misc_RNA (1)...(19): siRNA sense strand
agaacaagcucauaguauu

SEQ ID NO: 1677884 - RNA, 19 nt, Homo sapiens
  misc_RNA (1)...(19): siRNA sense strand
gauaaugauuccuacguau

SEQ ID NO: 1677885 - RNA, 19 nt, Homo sapiens
  misc_RNA (1)...(19): siRNA sense strand
acaaauggaaccaaucuua

SEQ ID NO: 1677886 - RNA, 19 nt, Homo sapiens
  misc_RNA (1)...(19): siRNA sense strand
gaucuuggaugauguuugg

SEQ ID NO: 1677887 - RNA, 19 nt, Homo sapiens
  misc_RNA (1)...(19): siRNA sense strand
caaauggaaccaaucuuaa

SEQ ID NO: 1677888 - RNA, 19 nt, Homo sapiens
  misc_RNA (1)...(19): siRNA sense strand
ccacagaggccaguuguuu

SEQ ID NO: 1677889 - RNA, 19 nt, Homo sapiens
  misc_RNA (1)...(19): siRNA sense strand
aguaauggguccuaaauau

SEQ ID NO: 1677890 - RNA, 19 nt, Homo sapiens
  misc_RNA (1)...(19): siRNA sense strand
agcagaagcucuccaaauu

SEQ ID NO: 1677891 - RNA, 19 nt, Homo sapiens
  misc_RNA (1)...(19): siRNA sense strand
caagacauccuacaucaug

SEQ ID NO: 1677892 - RNA, 19 nt, Homo sapiens
  misc_RNA (1)...(19): siRNA sense strand
acaaugcucuacuacauga

SEQ ID NO: 1677893 - RNA, 19 nt, Homo sapiens
  misc_RNA (1)...(19): siRNA sense strand
caugauuagugauggauuu

SEQ ID NO: 1677894 - RNA, 19 nt, Homo sapiens
  misc_RNA (1)...(19): siRNA sense strand
aaucugggcuucugaugaa

SEQ ID NO: 1677895 - RNA, 19 nt, Homo sapiens
  misc_RNA (1)...(19): siRNA sense strand
gaagcucuccaaauugaaa

SEQ ID NO: 1677896 - RNA, 19 nt, Homo sapiens
  misc_RNA (1)...(19): siRNA sense strand
gcagaagcucuccaaauug

SEQ ID NO: 1677897 - RNA, 19 nt, Homo sapiens
  misc_RNA (1)...(19): siRNA sense strand
cuacaaugcucuacuacau

SEQ ID NO: 1677898 - RNA, 19 nt, Homo sapiens
  misc_RNA (1)...(19): siRNA sense strand
gacaagaguguuacagauu

SEQ ID NO: 1677899 - RNA, 19 nt, Homo sapiens
  misc_RNA (1)...(19): siRNA sense strand
ugaugaaacugcagaaucu

SEQ ID NO: 1677900 - RNA, 19 nt, Homo sapiens
  misc_RNA (1)...(19): siRNA sense strand
cccagaggcuuccacuuaa

SEQ ID NO: 1677901 - RNA, 19 nt, Homo sapiens
  misc_RNA (1)...(19): siRNA sense strand
gagaagcucuggaaaagga

SEQ ID NO: 1677902 - RNA, 19 nt, Homo sapiens
  misc_RNA (1)...(19): siRNA sense strand
agauaaugauuccuacgua

SEQ ID NO: 1677903 - RNA, 19 nt, Homo sapiens
  misc_RNA (1)...(19): siRNA sense strand
ucccagaggcuuccacuua

SEQ ID NO: 1677904 - RNA, 19 nt, Homo sapiens
  misc_RNA (1)...(19): siRNA sense strand
acaagaguguuacagauuc

SEQ ID NO: 1677905 - RNA, 19 nt, Homo sapiens
  misc_RNA (1)...(19): siRNA sense strand
cuacacaaauggaaccaau

SEQ ID NO: 1677906 - RNA, 19 nt, Homo sapiens
  misc_RNA (1)...(19): siRNA sense strand
ccagaacaagcucauagua

SEQ ID NO: 1677907 - RNA, 19 nt, Homo sapiens
  misc_RNA (1)...(19): siRNA sense strand
caugaaggauauaaagauc

SEQ ID NO: 1677908 - RNA, 19 nt, Homo sapiens
  misc_RNA (1)...(19): siRNA sense strand
agacaagaguguuacagau

SEQ ID NO: 1677909 - RNA, 19 nt, Homo sapiens
  misc_RNA (1)...(19): siRNA sense strand
gagacaagaguguuacaga

SEQ ID NO: 1677910 - RNA, 19 nt, Homo sapiens
  misc_RNA (1)...(19): siRNA sense strand
caagaguguuacagauuca

SEQ ID NO: 1677911 - RNA, 19 nt, Homo sapiens
  misc_RNA (1)...(19): siRNA sense strand
guaauggguccuaaauaug

SEQ ID NO: 1677912 - RNA, 19 nt, Homo sapiens
  misc_RNA (1)...(19): siRNA sense strand
caugauggcauuccuguug

SEQ ID NO: 1677913 - RNA, 19 nt, Homo sapiens
  misc_RNA (1)...(19): siRNA sense strand
uggaaccaaucuuaagaaa

SEQ ID NO: 1677914 - RNA, 19 nt, Homo sapiens
  misc_RNA (1)...(19): siRNA sense strand
gaccgucuccgcauucuga

SEQ ID NO: 1677915 - RNA, 19 nt, Homo sapiens
  misc_RNA (1)...(19): siRNA sense strand
ugcagaagcuguuagagau

SEQ ID NO: 1677916 - RNA, 19 nt, Homo sapiens
  misc_RNA (1)...(19): siRNA sense strand
cauaugugacuguggauaa

SEQ ID NO: 1677917 - RNA, 19 nt, Homo sapiens
  misc_RNA (1)...(19): siRNA sense strand
cagaacaagcucauaguau

SEQ ID NO: 1677918 - RNA, 19 nt, Homo sapiens
  misc_RNA (1)...(19): siRNA sense strand
cagaggcuuccacuuaaua

SEQ ID NO: 1677919 - RNA, 19 nt, Homo sapiens
  misc_RNA (1)...(19): siRNA sense strand
agacaaaucugggcuucug

SEQ ID NO: 1677920 - RNA, 19 nt, Homo sapiens
  misc_RNA (1)...(19): siRNA sense strand
cuacguaucauucuacaau

SEQ ID NO: 1677921 - RNA, 19 nt, Homo sapiens
  misc_RNA (1)...(19): siRNA sense strand
uaauggguccuaaauaugu

SEQ ID NO: 1677922 - RNA, 19 nt, Homo sapiens
  misc_RNA (1)...(19): siRNA sense strand
gcauuccuguugucucuuc

SEQ ID NO: 1677923 - RNA, 19 nt, Homo sapiens
  misc_RNA (1)...(19): siRNA sense strand
ucuacuacaugaaggauau

SEQ ID NO: 1677924 - RNA, 19 nt, Homo sapiens
  misc_RNA (1)...(19): siRNA sense strand
cagaagcuguuagagauca

SEQ ID NO: 1677925 - RNA, 19 nt, Homo sapiens
  misc_RNA (1)...(19): siRNA sense strand
ccagaggcuuccacuuaau

SEQ ID NO: 1677926 - RNA, 19 nt, Homo sapiens
  misc_RNA (1)...(19): siRNA sense strand
caaggaagaagcuggugaa

SEQ ID NO: 1677927 - RNA, 19 nt, Homo sapiens
  misc_RNA (1)...(19): siRNA sense strand
cgaaauuguuugcuucaac

SEQ ID NO: 1677928 - RNA, 19 nt, Homo sapiens
  misc_RNA (1)...(19): siRNA sense strand
cagcagaagcucuccaaau

SEQ ID NO: 1677929 - RNA, 19 nt, Homo sapiens
  misc_RNA (1)...(19): siRNA sense strand
ggcuuccacuuaauauuga

SEQ ID NO: 1677930 - RNA, 19 nt, Homo sapiens
  misc_RNA (1)...(19): siRNA sense strand
caaaagcucgaaauuguuu

SEQ ID NO: 1677931 - RNA, 19 nt, Homo sapiens
  misc_RNA (1)...(19): siRNA sense strand
guggauaaucuugguauuu

SEQ ID NO: 1677932 - RNA, 19 nt, Homo sapiens
  misc_RNA (1)...(19): siRNA sense strand
guugaaagcuuuugacagu

SEQ ID NO: 1677933 - RNA, 19 nt, Homo sapiens
  misc_RNA (1)...(19): siRNA sense strand
cacagaccuucuacacaaa

SEQ ID NO: 1677934 - RNA, 19 nt, Homo sapiens
  misc_RNA (1)...(19): siRNA sense strand
uugcugcccuucuccauga

SEQ ID NO: 1677935 - RNA, 19 nt, Homo sapiens
  misc_RNA (1)...(19): siRNA sense strand
caguaauggguccuaaaua

SEQ ID NO: 1677936 - RNA, 19 nt, Homo sapiens
  misc_RNA (1)...(19): siRNA sense strand
gggagugcauuggguuuca

SEQ ID NO: 1677937 - RNA, 19 nt, Homo sapiens
  misc_RNA (1)...(19): siRNA sense strand
aacaauaucagaagaggaa

SEQ ID NO: 1677938 - RNA, 19 nt, Homo sapiens
  misc_RNA (1)...(19): siRNA sense strand
caacagcaaagagcagcua

SEQ ID NO: 1677939 - RNA, 19 nt, Homo sapiens
  misc_RNA (1)...(19): siRNA sense strand
gaagcuggugaaugcaauu

SEQ ID NO: 1677940 - RNA, 19 nt, Homo sapiens
  misc_RNA (1)...(19): siRNA sense strand
aauggguccuaaauaugua

SEQ ID NO: 1677941 - RNA, 19 nt, Homo sapiens
  misc_RNA (1)...(19): siRNA sense strand
caucaagacauccuacauc

SEQ ID NO: 1677942 - RNA, 19 nt, Homo sapiens
  misc_RNA (1)...(19): siRNA sense strand
auucuacaaugcucuacua

SEQ ID NO: 1677943 - RNA, 19 nt, Homo sapiens
  misc_RNA (1)...(19): siRNA sense strand
ugaaacugcagaaucuuug

SEQ ID NO: 1677944 - RNA, 19 nt, Homo sapiens
  misc_RNA (1)...(19): siRNA sense strand
gcaaacacccaaggucucu

SEQ ID NO: 1677945 - RNA, 19 nt, Homo sapiens
  misc_RNA (1)...(19): siRNA sense strand
ucaguaauggguccuaaau

SEQ ID NO: 1677946 - RNA, 19 nt, Homo sapiens
  misc_RNA (1)...(19): siRNA sense strand
cuacaugaaggauauaaag

SEQ ID NO: 1677947 - RNA, 19 nt, Homo sapiens
  misc_RNA (1)...(19): siRNA sense strand
gaguguuacagauucagua

SEQ ID NO: 1677948 - RNA, 19 nt, Homo sapiens
  misc_RNA (1)...(19): siRNA sense strand
ugcaaaagcucgaaauugu

SEQ ID NO: 1677949 - RNA, 19 nt, Homo sapiens
  misc_RNA (1)...(19): siRNA sense strand
cagugucagauucuucuua

SEQ ID NO: 1677950 - RNA, 19 nt, Homo sapiens
  misc_RNA (1)...(19): siRNA sense strand
aaaaggacaucaagacauc

SEQ ID NO: 1677951 - RNA, 19 nt, Homo sapiens
  misc_RNA (1)...(19): siRNA sense strand
ugucagauucuucuuacaa

SEQ ID NO: 1677952 - RNA, 19 nt, Homo sapiens
  misc_RNA (1)...(19): siRNA sense strand
uagagaucauucccuuuua

SEQ ID NO: 1677953 - RNA, 19 nt, Homo sapiens
  misc_RNA (1)...(19): siRNA sense strand
gaaaaggacaucaagacau

SEQ ID NO: 1677954 - RNA, 19 nt, Homo sapiens
  misc_RNA (1)...(19): siRNA sense strand
gcagaagcuguuagagauc

SEQ ID NO: 1677955 - RNA, 19 nt, Homo sapiens
  misc_RNA (1)...(19): siRNA sense strand
uggaucaggaugagaguuu

SEQ ID NO: 1677956 - RNA, 19 nt, Homo sapiens
  misc_RNA (1)...(19): siRNA sense strand
caaauugaaaggugaacca

SEQ ID NO: 1677957 - RNA, 19 nt, Homo sapiens
  misc_RNA (1)...(19): siRNA sense strand
auaugaagaaggcagauuu

SEQ ID NO: 1677958 - RNA, 19 nt, Homo sapiens
  misc_RNA (1)...(19): siRNA sense strand
aucaagacauccuacauca

SEQ ID NO: 1677959 - RNA, 19 nt, Homo sapiens
  misc_RNA (1)...(19): siRNA sense strand
gaugauguuugggacucuu

SEQ ID NO: 1677960 - RNA, 19 nt, Homo sapiens
  misc_RNA (1)...(19): siRNA sense strand
gugcauuggguuucaguug

SEQ ID NO: 1677961 - RNA, 19 nt, Homo sapiens
  misc_RNA (1)...(19): siRNA sense strand
cugcagaagcuguuagaga

SEQ ID NO: 1677962 - RNA, 19 nt, Homo sapiens
  misc_RNA (1)...(19): siRNA sense strand
uggcauuccuguugucucu

SEQ ID NO: 1677963 - RNA, 19 nt, Homo sapiens
  misc_RNA (1)...(19): siRNA sense strand
gcaaaagcucgaaauuguu

SEQ ID NO: 1677964 - RNA, 19 nt, Homo sapiens
  misc_RNA (1)...(19): siRNA sense strand
ugggaagucuguauuagcu

SEQ ID NO: 1677965 - RNA, 19 nt, Homo sapiens
  misc_RNA (1)...(19): siRNA sense strand
gugugaagguggaguacca

SEQ ID NO: 1677966 - RNA, 19 nt, Homo sapiens
  misc_RNA (1)...(19): siRNA sense strand
aggcuuccacuuaauauug

SEQ ID NO: 1677967 - RNA, 19 nt, Homo sapiens
  misc_RNA (1)...(19): siRNA sense strand
gaggcuuccacuuaauauu

SEQ ID NO: 1677968 - RNA, 19 nt, Homo sapiens
  misc_RNA (1)...(19): siRNA sense strand
gcugugggaagucuguauu

SEQ ID NO: 1677969 - RNA, 19 nt, Homo sapiens
  misc_RNA (1)...(19): siRNA sense strand
caaaucugggcuucugaug

SEQ ID NO: 1677970 - RNA, 19 nt, Homo sapiens
  misc_RNA (1)...(19): siRNA sense strand
aauggaaccaaucuuaaga

SEQ ID NO: 1677971 - RNA, 19 nt, Homo sapiens
  misc_RNA (1)...(19): siRNA sense strand
acacaaauggaaccaaucu

SEQ ID NO: 1677972 - RNA, 19 nt, Homo sapiens
  misc_RNA (1)...(19): siRNA sense strand
cagaccuucuacacaaaug

SEQ ID NO: 1677973 - RNA, 19 nt, Homo sapiens
  misc_RNA (1)...(19): siRNA sense strand
uaugaagaaggcagauuug

SEQ ID NO: 1677974 - RNA, 19 nt, Homo sapiens
  misc_RNA (1)...(19): siRNA sense strand
ggaaaaggacaucaagaca

SEQ ID NO: 1677975 - RNA, 19 nt, Homo sapiens
  misc_RNA (1)...(19): siRNA sense strand
aaaucugggcuucugauga

SEQ ID NO: 1677976 - RNA, 19 nt, Homo sapiens
  misc_RNA (1)...(19): siRNA sense strand
agaagcuggugaaugcaau

SEQ ID NO: 1677977 - RNA, 19 nt, Homo sapiens
  misc_RNA (1)...(19): siRNA sense strand
aaauggaaccaaucuuaag

SEQ ID NO: 1677978 - RNA, 19 nt, Homo sapiens
  misc_RNA (1)...(19): siRNA sense strand
caaccagagacaagagugu

SEQ ID NO: 1677979 - RNA, 19 nt, Homo sapiens
  misc_RNA (1)...(19): siRNA sense strand
ggaagaagcuggugaaugc

SEQ ID NO: 1677980 - RNA, 19 nt, Homo sapiens
  misc_RNA (1)...(19): siRNA sense strand
gaacaagcucauaguauua

SEQ ID NO: 1677981 - RNA, 19 nt, Homo sapiens
  misc_RNA (1)...(19): siRNA sense strand
cagaagcucuccaaauuga

SEQ ID NO: 1677982 - RNA, 19 nt, Homo sapiens
  misc_RNA (1)...(19): siRNA sense strand
ucacagaccuucuacacaa

SEQ ID NO: 1677983 - RNA, 19 nt, Homo sapiens
  misc_RNA (1)...(19): siRNA sense strand
agaacaagcucauaguauu

SEQ ID NO: 1677984 - RNA, 19 nt, Homo sapiens
  misc_RNA (1)...(19): siRNA sense strand
gauaaugauuccuacguau

SEQ ID NO: 1677985 - RNA, 19 nt, Homo sapiens
  misc_RNA (1)...(19): siRNA sense strand
acaaauggaaccaaucuua

SEQ ID NO: 1677986 - RNA, 19 nt, Homo sapiens
  misc_RNA (1)...(19): siRNA sense strand
gaucuuggaugauguuugg

SEQ ID NO: 1677987 - RNA, 19 nt, Homo sapiens
  misc_RNA (1)...(19): siRNA sense strand
caaauggaaccaaucuuaa

SEQ ID NO: 1677988 - RNA, 19 nt, Homo sapiens
  misc_RNA (1)...(19): siRNA sense strand
ccacagaggccaguuguuu

SEQ ID NO: 1677989 - RNA, 19 nt, Homo sapiens
  misc_RNA (1)...(19): siRNA sense strand
aguaauggguccuaaauau

SEQ ID NO: 1677990 - RNA, 19 nt, Homo sapiens
  misc_RNA (1)...(19): siRNA sense strand
agcagaagcucuccaaauu

SEQ ID NO: 1677991 - RNA, 19 nt, Homo sapiens
  misc_RNA (1)...(19): siRNA sense strand
caagacauccuacaucaug

SEQ ID NO: 1677992 - RNA, 19 nt, Homo sapiens
  misc_RNA (1)...(19): siRNA sense strand
acaaugcucuacuacauga

SEQ ID NO: 1677993 - RNA, 19 nt, Homo sapiens
  misc_RNA (1)...(19): siRNA sense strand
caugauuagugauggauuu

SEQ ID NO: 1677994 - RNA, 19 nt, Homo sapiens
  misc_RNA (1)...(19): siRNA sense strand
aaucugggcuucugaugaa

SEQ ID NO: 1677995 - RNA, 19 nt, Homo sapiens
  misc_RNA (1)...(19): siRNA sense strand
gaagcucuccaaauugaaa

SEQ ID NO: 1677996 - RNA, 19 nt, Homo sapiens
  misc_RNA (1)...(19): siRNA sense strand
gcagaagcucuccaaauug

SEQ ID NO: 1677997 - RNA, 19 nt, Homo sapiens
  misc_RNA (1)...(19): siRNA sense strand
cuacaaugcucuacuacau

SEQ ID NO: 1677998 - RNA, 19 nt, Homo sapiens
  misc_RNA (1)...(19): siRNA sense strand
gacaagaguguuacagauu

SEQ ID NO: 1677999 - RNA, 19 nt, Homo sapiens
  misc_RNA (1)...(19): siRNA sense strand
ugaugaaacugcagaaucu

SEQ ID NO: 1678000 - RNA, 19 nt, Homo sapiens
  misc_RNA (1)...(19): siRNA sense strand
cccagaggcuuccacuuaa

SEQ ID NO: 1678001 - RNA, 19 nt, Homo sapiens
  misc_RNA (1)...(19): siRNA sense strand
gagaagcucuggaaaagga

SEQ ID NO: 1678002 - RNA, 19 nt, Homo sapiens
  misc_RNA (1)...(19): siRNA sense strand
agauaaugauuccuacgua

SEQ ID NO: 1678003 - RNA, 19 nt, Homo sapiens
  misc_RNA (1)...(19): siRNA sense strand
ucccagaggcuuccacuua

SEQ ID NO: 1678004 - RNA, 19 nt, Homo sapiens
  misc_RNA (1)...(19): siRNA sense strand
acaagaguguuacagauuc

SEQ ID NO: 1678005 - RNA, 19 nt, Homo sapiens
  misc_RNA (1)...(19): siRNA sense strand
cuacacaaauggaaccaau

SEQ ID NO: 1678006 - RNA, 19 nt, Homo sapiens
  misc_RNA (1)...(19): siRNA sense strand
ccagaacaagcucauagua

SEQ ID NO: 1678007 - RNA, 19 nt, Homo sapiens
  misc_RNA (1)...(19): siRNA sense strand
caugaaggauauaaagauc

SEQ ID NO: 1678008 - RNA, 19 nt, Homo sapiens
  misc_RNA (1)...(19): siRNA sense strand
agacaagaguguuacagau

SEQ ID NO: 1678009 - RNA, 19 nt, Homo sapiens
  misc_RNA (1)...(19): siRNA sense strand
gagacaagaguguuacaga

SEQ ID NO: 1678010 - RNA, 19 nt, Homo sapiens
  misc_RNA (1)...(19): siRNA sense strand
caagaguguuacagauuca

SEQ ID NO: 1678011 - RNA, 19 nt, Homo sapiens
  misc_RNA (1)...(19): siRNA sense strand
guaauggguccuaaauaug

SEQ ID NO: 1678012 - RNA, 19 nt, Homo sapiens
  misc_RNA (1)...(19): siRNA sense strand
caugauggcauuccuguug

SEQ ID NO: 1678013 - RNA, 19 nt, Homo sapiens
  misc_RNA (1)...(19): siRNA sense strand
uggaaccaaucuuaagaaa

SEQ ID NO: 1678014 - RNA, 19 nt, Homo sapiens
  misc_RNA (1)...(19): siRNA sense strand
gaccgucuccgcauucuga

SEQ ID NO: 1678015 - RNA, 19 nt, Homo sapiens
  misc_RNA (1)...(19): siRNA sense strand
ugcagaagcuguuagagau

SEQ ID NO: 1678016 - RNA, 19 nt, Homo sapiens
  misc_RNA (1)...(19): siRNA sense strand
cauaugugacuguggauaa

SEQ ID NO: 1678017 - RNA, 19 nt, Homo sapiens
  misc_RNA (1)...(19): siRNA sense strand
cagaacaagcucauaguau

SEQ ID NO: 1678018 - RNA, 19 nt, Homo sapiens
  misc_RNA (1)...(19): siRNA sense strand
cagaggcuuccacuuaaua

SEQ ID NO: 1678019 - RNA, 19 nt, Homo sapiens
  misc_RNA (1)...(19): siRNA sense strand
agacaaaucugggcuucug

SEQ ID NO: 1678020 - RNA, 19 nt, Homo sapiens
  misc_RNA (1)...(19): siRNA sense strand
cuacguaucauucuacaau

SEQ ID NO: 1678021 - RNA, 19 nt, Homo sapiens
  misc_RNA (1)...(19): siRNA sense strand
uaauggguccuaaauaugu

SEQ ID NO: 1678022 - RNA, 19 nt, Homo sapiens
  misc_RNA (1)...(19): siRNA sense strand
gcauuccuguugucucuuc

SEQ ID NO: 1678023 - RNA, 19 nt, Homo sapiens
  misc_RNA (1)...(19): siRNA sense strand
ucuacuacaugaaggauau

SEQ ID NO: 1678024 - RNA, 19 nt, Homo sapiens
  misc_RNA (1)...(19): siRNA sense strand
cagaagcuguuagagauca

SEQ ID NO: 1678025 - RNA, 19 nt, Homo sapiens
  misc_RNA (1)...(19): siRNA sense strand
ccagaggcuuccacuuaau

SEQ ID NO: 1678026 - RNA, 19 nt, Homo sapiens
  misc_RNA (1)...(19): siRNA sense strand
caaggaagaagcuggugaa

SEQ ID NO: 1678027 - RNA, 19 nt, Homo sapiens
  misc_RNA (1)...(19): siRNA sense strand
cgaaauuguuugcuucaac

SEQ ID NO: 1678028 - RNA, 19 nt, Homo sapiens
  misc_RNA (1)...(19): siRNA sense strand
cagcagaagcucuccaaau

SEQ ID NO: 1678029 - RNA, 19 nt, Homo sapiens
  misc_RNA (1)...(19): siRNA sense strand
ggcuuccacuuaauauuga

SEQ ID NO: 1678030 - RNA, 19 nt, Homo sapiens
  misc_RNA (1)...(19): siRNA sense strand
caaaagcucgaaauuguuu

SEQ ID NO: 1678031 - RNA, 19 nt, Homo sapiens
  misc_RNA (1)...(19): siRNA sense strand
guggauaaucuugguauuu

SEQ ID NO: 1678032 - RNA, 19 nt, Homo sapiens
  misc_RNA (1)...(19): siRNA sense strand
guugaaagcuuuugacagu

SEQ ID NO: 1678033 - RNA, 19 nt, Homo sapiens
  misc_RNA (1)...(19): siRNA sense strand
cacagaccuucuacacaaa

SEQ ID NO: 1678034 - RNA, 19 nt, Homo sapiens
  misc_RNA (1)...(19): siRNA sense strand
uugcugcccuucuccauga

SEQ ID NO: 1678035 - RNA, 19 nt, Homo sapiens
  misc_RNA (1)...(19): siRNA sense strand
caguaauggguccuaaaua

SEQ ID NO: 1678036 - RNA, 19 nt, Homo sapiens
  misc_RNA (1)...(19): siRNA sense strand
gggagugcauuggguuuca

SEQ ID NO: 1678037 - RNA, 19 nt, Homo sapiens
  misc_RNA (1)...(19): siRNA sense strand
aacaauaucagaagaggaa

SEQ ID NO: 1678038 - RNA, 19 nt, Homo sapiens
  misc_RNA (1)...(19): siRNA sense strand
caacagcaaagagcagcua

SEQ ID NO: 1678039 - RNA, 19 nt, Homo sapiens
  misc_RNA (1)...(19): siRNA sense strand
gaagcuggugaaugcaauu

SEQ ID NO: 1678040 - RNA, 19 nt, Homo sapiens
  misc_RNA (1)...(19): siRNA sense strand
aauggguccuaaauaugua

SEQ ID NO: 1678041 - RNA, 19 nt, Homo sapiens
  misc_RNA (1)...(19): siRNA sense strand
caucaagacauccuacauc

SEQ ID NO: 1678042 - RNA, 19 nt, Homo sapiens
  misc_RNA (1)...(19): siRNA sense strand
auucuacaaugcucuacua

SEQ ID NO: 1678043 - RNA, 19 nt, Homo sapiens
  misc_RNA (1)...(19): siRNA sense strand
ugaaacugcagaaucuuug

SEQ ID NO: 1678044 - RNA, 19 nt, Homo sapiens
  misc_RNA (1)...(19): siRNA sense strand
gcaaacacccaaggucucu

SEQ ID NO: 1678045 - RNA, 19 nt, Homo sapiens
  misc_RNA (1)...(19): siRNA sense strand
ucaguaauggguccuaaau

SEQ ID NO: 1678046 - RNA, 19 nt, Homo sapiens
  misc_RNA (1)...(19): siRNA sense strand
cuacaugaaggauauaaag

SEQ ID NO: 1678047 - RNA, 19 nt, Homo sapiens
  misc_RNA (1)...(19): siRNA sense strand
gaguguuacagauucagua

SEQ ID NO: 1678048 - RNA, 19 nt, Homo sapiens
  misc_RNA (1)...(19): siRNA sense strand
ugcaaaagcucgaaauugu

SEQ ID NO: 1678049 - RNA, 19 nt, Homo sapiens
  misc_RNA (1)...(19): siRNA sense strand
cagugucagauucuucuua

SEQ ID NO: 1678050 - RNA, 19 nt, Homo sapiens
  misc_RNA (1)...(19): siRNA sense strand
aaaaggacaucaagacauc

SEQ ID NO: 1678051 - RNA, 19 nt, Homo sapiens
  misc_RNA (1)...(19): siRNA sense strand
ugucagauucuucuuacaa

SEQ ID NO: 1678052 - RNA, 19 nt, Homo sapiens
  misc_RNA (1)...(19): siRNA sense strand
uagagaucauucccuuuua

SEQ ID NO: 1678053 - RNA, 19 nt, Homo sapiens
  misc_RNA (1)...(19): siRNA sense strand
gaaaaggacaucaagacau

SEQ ID NO: 1678054 - RNA, 19 nt, Homo sapiens
  misc_RNA (1)...(19): siRNA sense strand
gcagaagcuguuagagauc

SEQ ID NO: 1678055 - RNA, 19 nt, Homo sapiens
  misc_RNA (1)...(19): siRNA sense strand
uggaucaggaugagaguuu

SEQ ID NO: 1678056 - RNA, 19 nt, Homo sapiens
  misc_RNA (1)...(19): siRNA sense strand
caaauugaaaggugaacca

SEQ ID NO: 1678057 - RNA, 19 nt, Homo sapiens
  misc_RNA (1)...(19): siRNA sense strand
auaugaagaaggcagauuu

SEQ ID NO: 1678058 - RNA, 19 nt, Homo sapiens
  misc_RNA (1)...(19): siRNA sense strand
aucaagacauccuacauca

SEQ ID NO: 1678059 - RNA, 19 nt, Homo sapiens
  misc_RNA (1)...(19): siRNA sense strand
gaugauguuugggacucuu

SEQ ID NO: 1678060 - RNA, 19 nt, Homo sapiens
  misc_RNA (1)...(19): siRNA sense strand
gugcauuggguuucaguug

SEQ ID NO: 1678061 - RNA, 19 nt, Homo sapiens
  misc_RNA (1)...(19): siRNA sense strand
cugcagaagcuguuagaga

SEQ ID NO: 1678062 - RNA, 19 nt, Homo sapiens
  misc_RNA (1)...(19): siRNA sense strand
uggcauuccuguugucucu

SEQ ID NO: 1678063 - RNA, 19 nt, Homo sapiens
  misc_RNA (1)...(19): siRNA sense strand
gcaaaagcucgaaauuguu

SEQ ID NO: 1678064 - RNA, 19 nt, Homo sapiens
  misc_RNA (1)...(19): siRNA sense strand
ugggaagucuguauuagcu

SEQ ID NO: 1678065 - RNA, 19 nt, Homo sapiens
  misc_RNA (1)...(19): siRNA sense strand
gugugaagguggaguacca

SEQ ID NO: 1678066 - RNA, 19 nt, Homo sapiens
  misc_RNA (1)...(19): siRNA sense strand
aggcuuccacuuaauauug

SEQ ID NO: 1678067 - RNA, 19 nt, Homo sapiens
  misc_RNA (1)...(19): siRNA sense strand
gaggcuuccacuuaauauu

SEQ ID NO: 1678068 - RNA, 19 nt, Homo sapiens
  misc_RNA (1)...(19): siRNA sense strand
gcugugggaagucuguauu

SEQ ID NO: 1678069 - RNA, 19 nt, Homo sapiens
  misc_RNA (1)...(19): siRNA sense strand
caaaucugggcuucugaug

SEQ ID NO: 1678070 - RNA, 19 nt, Homo sapiens
  misc_RNA (1)...(19): siRNA sense strand
aauggaaccaaucuuaaga

SEQ ID NO: 1678071 - RNA, 19 nt, Homo sapiens
  misc_RNA (1)...(19): siRNA sense strand
acacaaauggaaccaaucu

SEQ ID NO: 1678072 - RNA, 19 nt, Homo sapiens
  misc_RNA (1)...(19): siRNA sense strand
cagaccuucuacacaaaug

SEQ ID NO: 1678073 - RNA, 19 nt, Homo sapiens
  misc_RNA (1)...(19): siRNA sense strand
uaugaagaaggcagauuug

SEQ ID NO: 1678074 - RNA, 19 nt, Homo sapiens
  misc_RNA (1)...(19): siRNA sense strand
ggaaaaggacaucaagaca

SEQ ID NO: 1678075 - RNA, 19 nt, Homo sapiens
  misc_RNA (1)...(19): siRNA sense strand
aaaucugggcuucugauga

SEQ ID NO: 1678076 - RNA, 19 nt, Homo sapiens
  misc_RNA (1)...(19): siRNA sense strand
agaagcuggugaaugcaau

SEQ ID NO: 1678077 - RNA, 19 nt, Homo sapiens
  misc_RNA (1)...(19): siRNA sense strand
aaauggaaccaaucuuaag

SEQ ID NO: 1678078 - RNA, 19 nt, Homo sapiens
  misc_RNA (1)...(19): siRNA sense strand
caaccagagacaagagugu

SEQ ID NO: 1678079 - RNA, 19 nt, Homo sapiens
  misc_RNA (1)...(19): siRNA sense strand
ggaagaagcuggugaaugc

SEQ ID NO: 1678080 - RNA, 19 nt, Homo sapiens
  misc_RNA (1)...(19): siRNA sense strand
gaacaagcucauaguauua

SEQ ID NO: 1678081 - RNA, 19 nt, Homo sapiens
  misc_RNA (1)...(19): siRNA sense strand
cagaagcucuccaaauuga

SEQ ID NO: 1678082 - RNA, 19 nt, Homo sapiens
  misc_RNA (1)...(19): siRNA sense strand
ucacagaccuucuacacaa

SEQ ID NO: 1678083 - RNA, 19 nt, Homo sapiens
  misc_RNA (1)...(19): siRNA sense strand
agaacaagcucauaguauu

SEQ ID NO: 1678084 - RNA, 19 nt, Homo sapiens
  misc_RNA (1)...(19): siRNA sense strand
gauaaugauuccuacguau

SEQ ID NO: 1678085 - RNA, 19 nt, Homo sapiens
  misc_RNA (1)...(19): siRNA sense strand
acaaauggaaccaaucuua

SEQ ID NO: 1678086 - RNA, 19 nt, Homo sapiens
  misc_RNA (1)...(19): siRNA sense strand
gaucuuggaugauguuugg

SEQ ID NO: 1678087 - RNA, 19 nt, Homo sapiens
  misc_RNA (1)...(19): siRNA sense strand
caaauggaaccaaucuuaa

SEQ ID NO: 1678088 - RNA, 19 nt, Homo sapiens
  misc_RNA (1)...(19): siRNA sense strand
ccacagaggccaguuguuu

SEQ ID NO: 1678089 - RNA, 19 nt, Homo sapiens
  misc_RNA (1)...(19): siRNA sense strand
aguaauggguccuaaauau

SEQ ID NO: 1678090 - RNA, 19 nt, Homo sapiens
  misc_RNA (1)...(19): siRNA sense strand
agcagaagcucuccaaauu

SEQ ID NO: 1678091 - RNA, 19 nt, Homo sapiens
  misc_RNA (1)...(19): siRNA sense strand
caagacauccuacaucaug

SEQ ID NO: 1678092 - RNA, 19 nt, Homo sapiens
  misc_RNA (1)...(19): siRNA sense strand
acaaugcucuacuacauga

SEQ ID NO: 1678093 - RNA, 19 nt, Homo sapiens
  misc_RNA (1)...(19): siRNA sense strand
caugauuagugauggauuu

SEQ ID NO: 1678094 - RNA, 19 nt, Homo sapiens
  misc_RNA (1)...(19): siRNA sense strand
aaucugggcuucugaugaa

SEQ ID NO: 1678095 - RNA, 19 nt, Homo sapiens
  misc_RNA (1)...(19): siRNA sense strand
gaagcucuccaaauugaaa

SEQ ID NO: 1678096 - RNA, 19 nt, Homo sapiens
  misc_RNA (1)...(19): siRNA sense strand
gcagaagcucuccaaauug

SEQ ID NO: 1678097 - RNA, 19 nt, Homo sapiens
  misc_RNA (1)...(19): siRNA sense strand
cuacaaugcucuacuacau

SEQ ID NO: 1678098 - RNA, 19 nt, Homo sapiens
  misc_RNA (1)...(19): siRNA sense strand
gacaagaguguuacagauu

SEQ ID NO: 1678099 - RNA, 19 nt, Homo sapiens
  misc_RNA (1)...(19): siRNA sense strand
ugaugaaacugcagaaucu

SEQ ID NO: 1678100 - RNA, 19 nt, Homo sapiens
  misc_RNA (1)...(19): siRNA sense strand
cccagaggcuuccacuuaa

SEQ ID NO: 1678101 - RNA, 19 nt, Homo sapiens
  misc_RNA (1)...(19): siRNA sense strand
gagaagcucuggaaaagga

SEQ ID NO: 1678102 - RNA, 19 nt, Homo sapiens
  misc_RNA (1)...(19): siRNA sense strand
agauaaugauuccuacgua

SEQ ID NO: 1678103 - RNA, 19 nt, Homo sapiens
  misc_RNA (1)...(19): siRNA sense strand
ucccagaggcuuccacuua

SEQ ID NO: 1678104 - RNA, 19 nt, Homo sapiens
  misc_RNA (1)...(19): siRNA sense strand
acaagaguguuacagauuc

SEQ ID NO: 1678105 - RNA, 19 nt, Homo sapiens
  misc_RNA (1)...(19): siRNA sense strand
cuacacaaauggaaccaau

SEQ ID NO: 1678106 - RNA, 19 nt, Homo sapiens
  misc_RNA (1)...(19): siRNA sense strand
ccagaacaagcucauagua

SEQ ID NO: 1678107 - RNA, 19 nt, Homo sapiens
  misc_RNA (1)...(19): siRNA sense strand
caugaaggauauaaagauc

SEQ ID NO: 1678108 - RNA, 19 nt, Homo sapiens
  misc_RNA (1)...(19): siRNA sense strand
agacaagaguguuacagau

SEQ ID NO: 1678109 - RNA, 19 nt, Homo sapiens
  misc_RNA (1)...(19): siRNA sense strand
gagacaagaguguuacaga

SEQ ID NO: 1678110 - RNA, 19 nt, Homo sapiens
  misc_RNA (1)...(19): siRNA sense strand
caagaguguuacagauuca

SEQ ID NO: 1678111 - RNA, 19 nt, Homo sapiens
  misc_RNA (1)...(19): siRNA sense strand
guaauggguccuaaauaug

SEQ ID NO: 1678112 - RNA, 19 nt, Homo sapiens
  misc_RNA (1)...(19): siRNA sense strand
caugauggcauuccuguug

SEQ ID NO: 1678113 - RNA, 19 nt, Homo sapiens
  misc_RNA (1)...(19): siRNA sense strand
uggaaccaaucuuaagaaa

SEQ ID NO: 1678114 - RNA, 19 nt, Homo sapiens
  misc_RNA (1)...(19): siRNA sense strand
gaccgucuccgcauucuga

SEQ ID NO: 1678115 - RNA, 19 nt, Homo sapiens
  misc_RNA (1)...(19): siRNA sense strand
ugcagaagcuguuagagau

SEQ ID NO: 1678116 - RNA, 19 nt, Homo sapiens
  misc_RNA (1)...(19): siRNA sense strand
cauaugugacuguggauaa

SEQ ID NO: 1678117 - RNA, 19 nt, Homo sapiens
  misc_RNA (1)...(19): siRNA sense strand
cagaacaagcucauaguau

SEQ ID NO: 1678118 - RNA, 19 nt, Homo sapiens
  misc_RNA (1)...(19): siRNA sense strand
cagaggcuuccacuuaaua

SEQ ID NO: 1678119 - RNA, 19 nt, Homo sapiens
  misc_RNA (1)...(19): siRNA sense strand
agacaaaucugggcuucug

SEQ ID NO: 1678120 - RNA, 19 nt, Homo sapiens
  misc_RNA (1)...(19): siRNA sense strand
cuacguaucauucuacaau

SEQ ID NO: 1678121 - RNA, 19 nt, Homo sapiens
  misc_RNA (1)...(19): siRNA sense strand
uaauggguccuaaauaugu

SEQ ID NO: 1678122 - RNA, 19 nt, Homo sapiens
  misc_RNA (1)...(19): siRNA sense strand
gcauuccuguugucucuuc

SEQ ID NO: 1678123 - RNA, 19 nt, Homo sapiens
  misc_RNA (1)...(19): siRNA sense strand
ucuacuacaugaaggauau

SEQ ID NO: 1678124 - RNA, 19 nt, Homo sapiens
  misc_RNA (1)...(19): siRNA sense strand
cagaagcuguuagagauca

SEQ ID NO: 1678125 - RNA, 19 nt, Homo sapiens
  misc_RNA (1)...(19): siRNA sense strand
ccagaggcuuccacuuaau

SEQ ID NO: 1678126 - RNA, 19 nt, Homo sapiens
  misc_RNA (1)...(19): siRNA sense strand
caaggaagaagcuggugaa

SEQ ID NO: 1678127 - RNA, 19 nt, Homo sapiens
  misc_RNA (1)...(19): siRNA sense strand
cgaaauuguuugcuucaac

SEQ ID NO: 1678128 - RNA, 19 nt, Homo sapiens
  misc_RNA (1)...(19): siRNA sense strand
cagcagaagcucuccaaau

SEQ ID NO: 1678129 - RNA, 19 nt, Homo sapiens
  misc_RNA (1)...(19): siRNA sense strand
ggcuuccacuuaauauuga

SEQ ID NO: 1678130 - RNA, 19 nt, Homo sapiens
  misc_RNA (1)...(19): siRNA sense strand
caaaagcucgaaauuguuu

SEQ ID NO: 1678131 - RNA, 19 nt, Homo sapiens
  misc_RNA (1)...(19): siRNA sense strand
guggauaaucuugguauuu

SEQ ID NO: 1678132 - RNA, 19 nt, Homo sapiens
  misc_RNA (1)...(19): siRNA sense strand
guugaaagcuuuugacagu

SEQ ID NO: 1678133 - RNA, 19 nt, Homo sapiens
  misc_RNA (1)...(19): siRNA sense strand
cacagaccuucuacacaaa

SEQ ID NO: 1678134 - RNA, 19 nt, Homo sapiens
  misc_RNA (1)...(19): siRNA sense strand
uugcugcccuucuccauga

SEQ ID NO: 1678135 - RNA, 19 nt, Homo sapiens
  misc_RNA (1)...(19): siRNA sense strand
caguaauggguccuaaaua

SEQ ID NO: 1678136 - RNA, 19 nt, Homo sapiens
  misc_RNA (1)...(19): siRNA sense strand
gggagugcauuggguuuca

SEQ ID NO: 1678137 - RNA, 19 nt, Homo sapiens
  misc_RNA (1)...(19): siRNA sense strand
aacaauaucagaagaggaa

SEQ ID NO: 1678138 - RNA, 19 nt, Homo sapiens
  misc_RNA (1)...(19): siRNA sense strand
caacagcaaagagcagcua

SEQ ID NO: 1678139 - RNA, 19 nt, Homo sapiens
  misc_RNA (1)...(19): siRNA sense strand
gaagcuggugaaugcaauu

SEQ ID NO: 1678140 - RNA, 19 nt, Homo sapiens
  misc_RNA (1)...(19): siRNA sense strand
aauggguccuaaauaugua

SEQ ID NO: 1678141 - RNA, 19 nt, Homo sapiens
  misc_RNA (1)...(19): siRNA sense strand
caucaagacauccuacauc

SEQ ID NO: 1678142 - RNA, 19 nt, Homo sapiens
  misc_RNA (1)...(19): siRNA sense strand
auucuacaaugcucuacua

SEQ ID NO: 1678143 - RNA, 19 nt, Homo sapiens
  misc_RNA (1)...(19): siRNA sense strand
ugaaacugcagaaucuuug

SEQ ID NO: 1678144 - RNA, 19 nt, Homo sapiens
  misc_RNA (1)...(19): siRNA sense strand
gcaaacacccaaggucucu

SEQ ID NO: 1678145 - RNA, 19 nt, Homo sapiens
  misc_RNA (1)...(19): siRNA sense strand
ucaguaauggguccuaaau

SEQ ID NO: 1678146 - RNA, 19 nt, Homo sapiens
  misc_RNA (1)...(19): siRNA sense strand
cuacaugaaggauauaaag

SEQ ID NO: 1678147 - RNA, 19 nt, Homo sapiens
  misc_RNA (1)...(19): siRNA sense strand
gaguguuacagauucagua

SEQ ID NO: 1678148 - RNA, 19 nt, Homo sapiens
  misc_RNA (1)...(19): siRNA sense strand
ugcaaaagcucgaaauugu

SEQ ID NO: 1678149 - RNA, 19 nt, Homo sapiens
  misc_RNA (1)...(19): siRNA sense strand
cagugucagauucuucuua

SEQ ID NO: 1678150 - RNA, 19 nt, Homo sapiens
  misc_RNA (1)...(19): siRNA sense strand
aaaaggacaucaagacauc

SEQ ID NO: 1678151 - RNA, 19 nt, Homo sapiens
  misc_RNA (1)...(19): siRNA sense strand
ugucagauucuucuuacaa

SEQ ID NO: 1678152 - RNA, 19 nt, Homo sapiens
  misc_RNA (1)...(19): siRNA sense strand
uagagaucauucccuuuua

SEQ ID NO: 1678153 - RNA, 19 nt, Homo sapiens
  misc_RNA (1)...(19): siRNA sense strand
gaaaaggacaucaagacau

SEQ ID NO: 1678154 - RNA, 19 nt, Homo sapiens
  misc_RNA (1)...(19): siRNA sense strand
gcagaagcuguuagagauc

SEQ ID NO: 1678155 - RNA, 19 nt, Homo sapiens
  misc_RNA (1)...(19): siRNA sense strand
uggaucaggaugagaguuu

SEQ ID NO: 1678156 - RNA, 19 nt, Homo sapiens
  misc_RNA (1)...(19): siRNA sense strand
caaauugaaaggugaacca

SEQ ID NO: 1678157 - RNA, 19 nt, Homo sapiens
  misc_RNA (1)...(19): siRNA sense strand
auaugaagaaggcagauuu

SEQ ID NO: 1678158 - RNA, 19 nt, Homo sapiens
  misc_RNA (1)...(19): siRNA sense strand
aucaagacauccuacauca

SEQ ID NO: 1678159 - RNA, 19 nt, Homo sapiens
  misc_RNA (1)...(19): siRNA sense strand
gaugauguuugggacucuu

SEQ ID NO: 1678160 - RNA, 19 nt, Homo sapiens
  misc_RNA (1)...(19): siRNA sense strand
gugcauuggguuucaguug

SEQ ID NO: 1678161 - RNA, 19 nt, Homo sapiens
  misc_RNA (1)...(19): siRNA sense strand
cugcagaagcuguuagaga

SEQ ID NO: 1678162 - RNA, 19 nt, Homo sapiens
  misc_RNA (1)...(19): siRNA sense strand
uggcauuccuguugucucu

SEQ ID NO: 1678163 - RNA, 19 nt, Homo sapiens
  misc_RNA (1)...(19): siRNA sense strand
gcaaaagcucgaaauuguu

SEQ ID NO: 1678164 - RNA, 19 nt, Homo sapiens
  misc_RNA (1)...(19): siRNA sense strand
ugggaagucuguauuagcu

SEQ ID NO: 1678165 - RNA, 19 nt, Homo sapiens
  misc_RNA (1)...(19): siRNA sense strand
gugugaagguggaguacca

SEQ ID NO: 1678166 - RNA, 19 nt, Homo sapiens
  misc_RNA (1)...(19): siRNA sense strand
aggcuuccacuuaauauug

SEQ ID NO: 1678167 - RNA, 19 nt, Homo sapiens
  misc_RNA (1)...(19): siRNA sense strand
gaggcuuccacuuaauauu

SEQ ID NO: 1678168 - RNA, 19 nt, Homo sapiens
  misc_RNA (1)...(19): siRNA sense strand
gcugugggaagucuguauu

SEQ ID NO: 1678169 - RNA, 19 nt, Homo sapiens
  misc_RNA (1)...(19): siRNA sense strand
caaaucugggcuucugaug

SEQ ID NO: 1678170 - RNA, 19 nt, Homo sapiens
  misc_RNA (1)...(19): siRNA sense strand
aauggaaccaaucuuaaga

SEQ ID NO: 1678171 - RNA, 19 nt, Homo sapiens
  misc_RNA (1)...(19): siRNA sense strand
acacaaauggaaccaaucu

SEQ ID NO: 1678172 - RNA, 19 nt, Homo sapiens
  misc_RNA (1)...(19): siRNA sense strand
cagaccuucuacacaaaug

SEQ ID NO: 1678173 - RNA, 19 nt, Homo sapiens
  misc_RNA (1)...(19): siRNA sense strand
uaugaagaaggcagauuug

SEQ ID NO: 1678174 - RNA, 19 nt, Homo sapiens
  misc_RNA (1)...(19): siRNA sense strand
ggaaaaggacaucaagaca

SEQ ID NO: 1678175 - RNA, 19 nt, Homo sapiens
  misc_RNA (1)...(19): siRNA sense strand
aaaucugggcuucugauga

SEQ ID NO: 1678176 - RNA, 19 nt, Homo sapiens
  misc_RNA (1)...(19): siRNA sense strand
agaagcuggugaaugcaau

SEQ ID NO: 1678177 - RNA, 19 nt, Homo sapiens
  misc_RNA (1)...(19): siRNA sense strand
aaauggaaccaaucuuaag

SEQ ID NO: 1678178 - RNA, 19 nt, Homo sapiens
  misc_RNA (1)...(19): siRNA sense strand
caaccagagacaagagugu

SEQ ID NO: 1678179 - RNA, 19 nt, Homo sapiens
  misc_RNA (1)...(19): siRNA sense strand
ggaagaagcuggugaaugc

SEQ ID NO: 1678180 - RNA, 19 nt, Homo sapiens
  misc_RNA (1)...(19): siRNA sense strand
gaacaagcucauaguauua

SEQ ID NO: 1678181 - RNA, 19 nt, Homo sapiens
  misc_RNA (1)...(19): siRNA sense strand
cagaagcucuccaaauuga

SEQ ID NO: 1678182 - RNA, 19 nt, Homo sapiens
  misc_RNA (1)...(19): siRNA sense strand
ucacagaccuucuacacaa

SEQ ID NO: 1678183 - RNA, 19 nt, Homo sapiens
  misc_RNA (1)...(19): siRNA sense strand
agaacaagcucauaguauu

SEQ ID NO: 1678184 - RNA, 19 nt, Homo sapiens
  misc_RNA (1)...(19): siRNA sense strand
gauaaugauuccuacguau

SEQ ID NO: 1678185 - RNA, 19 nt, Homo sapiens
  misc_RNA (1)...(19): siRNA sense strand
acaaauggaaccaaucuua

SEQ ID NO: 1678186 - RNA, 19 nt, Homo sapiens
  misc_RNA (1)...(19): siRNA sense strand
gaucuuggaugauguuugg

SEQ ID NO: 1678187 - RNA, 19 nt, Homo sapiens
  misc_RNA (1)...(19): siRNA sense strand
caaauggaaccaaucuuaa

SEQ ID NO: 1678188 - RNA, 19 nt, Homo sapiens
  misc_RNA (1)...(19): siRNA sense strand
ccacagaggccaguuguuu

SEQ ID NO: 1678189 - RNA, 19 nt, Homo sapiens
  misc_RNA (1)...(19): siRNA sense strand
aguaauggguccuaaauau

SEQ ID NO: 1678190 - RNA, 19 nt, Homo sapiens
  misc_RNA (1)...(19): siRNA sense strand
agcagaagcucuccaaauu

SEQ ID NO: 1678191 - RNA, 19 nt, Homo sapiens
  misc_RNA (1)...(19): siRNA sense strand
caagacauccuacaucaug

SEQ ID NO: 1678192 - RNA, 19 nt, Homo sapiens
  misc_RNA (1)...(19): siRNA sense strand
acaaugcucuacuacauga

SEQ ID NO: 1678193 - RNA, 19 nt, Homo sapiens
  misc_RNA (1)...(19): siRNA sense strand
caugauuagugauggauuu

SEQ ID NO: 1678194 - RNA, 19 nt, Homo sapiens
  misc_RNA (1)...(19): siRNA sense strand
aaucugggcuucugaugaa

SEQ ID NO: 1678195 - RNA, 19 nt, Homo sapiens
  misc_RNA (1)...(19): siRNA sense strand
gaagcucuccaaauugaaa

SEQ ID NO: 1678196 - RNA, 19 nt, Homo sapiens
  misc_RNA (1)...(19): siRNA sense strand
gcagaagcucuccaaauug

SEQ ID NO: 1678197 - RNA, 19 nt, Homo sapiens
  misc_RNA (1)...(19): siRNA sense strand
cuacaaugcucuacuacau

SEQ ID NO: 1678198 - RNA, 19 nt, Homo sapiens
  misc_RNA (1)...(19): siRNA sense strand
gacaagaguguuacagauu

SEQ ID NO: 1678199 - RNA, 19 nt, Homo sapiens
  misc_RNA (1)...(19): siRNA sense strand
ugaugaaacugcagaaucu

SEQ ID NO: 1678200 - RNA, 19 nt, Homo sapiens
  misc_RNA (1)...(19): siRNA sense strand
cccagaggcuuccacuuaa

SEQ ID NO: 1678201 - RNA, 19 nt, Homo sapiens
  misc_RNA (1)...(19): siRNA sense strand
gagaagcucuggaaaagga

SEQ ID NO: 1678202 - RNA, 19 nt, Homo sapiens
  misc_RNA (1)...(19): siRNA sense strand
agauaaugauuccuacgua

SEQ ID NO: 1678203 - RNA, 19 nt, Homo sapiens
  misc_RNA (1)...(19): siRNA sense strand
ucccagaggcuuccacuua

SEQ ID NO: 1678204 - RNA, 19 nt, Homo sapiens
  misc_RNA (1)...(19): siRNA sense strand
acaagaguguuacagauuc

SEQ ID NO: 1678205 - RNA, 19 nt, Homo sapiens
  misc_RNA (1)...(19): siRNA sense strand
cuacacaaauggaaccaau

SEQ ID NO: 1678206 - RNA, 19 nt, Homo sapiens
  misc_RNA (1)...(19): siRNA sense strand
ccagaacaagcucauagua

SEQ ID NO: 1678207 - RNA, 19 nt, Homo sapiens
  misc_RNA (1)...(19): siRNA sense strand
caugaaggauauaaagauc

SEQ ID NO: 1678208 - RNA, 19 nt, Homo sapiens
  misc_RNA (1)...(19): siRNA sense strand
agacaagaguguuacagau

SEQ ID NO: 1678209 - RNA, 19 nt, Homo sapiens
  misc_RNA (1)...(19): siRNA sense strand
gagacaagaguguuacaga

SEQ ID NO: 1678210 - RNA, 19 nt, Homo sapiens
  misc_RNA (1)...(19): siRNA sense strand
caagaguguuacagauuca

SEQ ID NO: 1678211 - RNA, 19 nt, Homo sapiens
  misc_RNA (1)...(19): siRNA sense strand
guaauggguccuaaauaug

SEQ ID NO: 1678212 - RNA, 19 nt, Homo sapiens
  misc_RNA (1)...(19): siRNA sense strand
caugauggcauuccuguug

SEQ ID NO: 1678213 - RNA, 19 nt, Homo sapiens
  misc_RNA (1)...(19): siRNA sense strand
uggaaccaaucuuaagaaa

SEQ ID NO: 1678214 - RNA, 19 nt, Homo sapiens
  misc_RNA (1)...(19): siRNA sense strand
gaccgucuccgcauucuga

SEQ ID NO: 1678215 - RNA, 19 nt, Homo sapiens
  misc_RNA (1)...(19): siRNA sense strand
ugcagaagcuguuagagau

SEQ ID NO: 1678216 - RNA, 19 nt, Homo sapiens
  misc_RNA (1)...(19): siRNA sense strand
cauaugugacuguggauaa

SEQ ID NO: 1678217 - RNA, 19 nt, Homo sapiens
  misc_RNA (1)...(19): siRNA sense strand
cagaacaagcucauaguau

SEQ ID NO: 1678218 - RNA, 19 nt, Homo sapiens
  misc_RNA (1)...(19): siRNA sense strand
cagaggcuuccacuuaaua

SEQ ID NO: 1678219 - RNA, 19 nt, Homo sapiens
  misc_RNA (1)...(19): siRNA sense strand
agacaaaucugggcuucug

SEQ ID NO: 1678220 - RNA, 19 nt, Homo sapiens
  misc_RNA (1)...(19): siRNA sense strand
cuacguaucauucuacaau

SEQ ID NO: 1678221 - RNA, 19 nt, Homo sapiens
  misc_RNA (1)...(19): siRNA sense strand
uaauggguccuaaauaugu

SEQ ID NO: 1678222 - RNA, 19 nt, Homo sapiens
  misc_RNA (1)...(19): siRNA sense strand
gcauuccuguugucucuuc

SEQ ID NO: 1678223 - RNA, 19 nt, Homo sapiens
  misc_RNA (1)...(19): siRNA sense strand
ucuacuacaugaaggauau

SEQ ID NO: 1678224 - RNA, 19 nt, Homo sapiens
  misc_RNA (1)...(19): siRNA sense strand
cagaagcuguuagagauca

SEQ ID NO: 1678225 - RNA, 19 nt, Homo sapiens
  misc_RNA (1)...(19): siRNA sense strand
ccagaggcuuccacuuaau

SEQ ID NO: 1678226 - RNA, 19 nt, Homo sapiens
  misc_RNA (1)...(19): siRNA sense strand
caaggaagaagcuggugaa

SEQ ID NO: 1678227 - RNA, 19 nt, Homo sapiens
  misc_RNA (1)...(19): siRNA sense strand
cgaaauuguuugcuucaac

SEQ ID NO: 1678228 - RNA, 19 nt, Homo sapiens
  misc_RNA (1)...(19): siRNA sense strand
cagcagaagcucuccaaau

SEQ ID NO: 1678229 - RNA, 19 nt, Homo sapiens
  misc_RNA (1)...(19): siRNA sense strand
ggcuuccacuuaauauuga

SEQ ID NO: 1678230 - RNA, 19 nt, Homo sapiens
  misc_RNA (1)...(19): siRNA sense strand
caaaagcucgaaauuguuu

SEQ ID NO: 1678231 - RNA, 19 nt, Homo sapiens
  misc_RNA (1)...(19): siRNA sense strand
guggauaaucuugguauuu

SEQ ID NO: 1678232 - RNA, 19 nt, Homo sapiens
  misc_RNA (1)...(19): siRNA sense strand
guugaaagcuuuugacagu

SEQ ID NO: 1678233 - RNA, 19 nt, Homo sapiens
  misc_RNA (1)...(19): siRNA sense strand
cacagaccuucuacacaaa

SEQ ID NO: 1678234 - RNA, 19 nt, Homo sapiens
  misc_RNA (1)...(19): siRNA sense strand
uugcugcccuucuccauga

SEQ ID NO: 1678235 - RNA, 19 nt, Homo sapiens
  misc_RNA (1)...(19): siRNA sense strand
caguaauggguccuaaaua

SEQ ID NO: 1678236 - RNA, 19 nt, Homo sapiens
  misc_RNA (1)...(19): siRNA sense strand
gggagugcauuggguuuca

SEQ ID NO: 1678237 - RNA, 19 nt, Homo sapiens
  misc_RNA (1)...(19): siRNA sense strand
aacaauaucagaagaggaa

SEQ ID NO: 1678238 - RNA, 19 nt, Homo sapiens
  misc_RNA (1)...(19): siRNA sense strand
caacagcaaagagcagcua

SEQ ID NO: 1678239 - RNA, 19 nt, Homo sapiens
  misc_RNA (1)...(19): siRNA sense strand
gaagcuggugaaugcaauu

SEQ ID NO: 1678240 - RNA, 19 nt, Homo sapiens
  misc_RNA (1)...(19): siRNA sense strand
aauggguccuaaauaugua

SEQ ID NO: 1678241 - RNA, 19 nt, Homo sapiens
  misc_RNA (1)...(19): siRNA sense strand
caucaagacauccuacauc

SEQ ID NO: 1678242 - RNA, 19 nt, Homo sapiens
  misc_RNA (1)...(19): siRNA sense strand
auucuacaaugcucuacua

SEQ ID NO: 1678243 - RNA, 19 nt, Homo sapiens
  misc_RNA (1)...(19): siRNA sense strand
ugaaacugcagaaucuuug

SEQ ID NO: 1678244 - RNA, 19 nt, Homo sapiens
  misc_RNA (1)...(19): siRNA sense strand
gcaaacacccaaggucucu

SEQ ID NO: 1678245 - RNA, 19 nt, Homo sapiens
  misc_RNA (1)...(19): siRNA sense strand
ucaguaauggguccuaaau

SEQ ID NO: 1678246 - RNA, 19 nt, Homo sapiens
  misc_RNA (1)...(19): siRNA sense strand
cuacaugaaggauauaaag

SEQ ID NO: 1678247 - RNA, 19 nt, Homo sapiens
  misc_RNA (1)...(19): siRNA sense strand
gaguguuacagauucagua

SEQ ID NO: 1678248 - RNA, 19 nt, Homo sapiens
  misc_RNA (1)...(19): siRNA sense strand
ugcaaaagcucgaaauugu

SEQ ID NO: 1678249 - RNA, 19 nt, Homo sapiens
  misc_RNA (1)...(19): siRNA sense strand
cagugucagauucuucuua

SEQ ID NO: 1678250 - RNA, 19 nt, Homo sapiens
  misc_RNA (1)...(19): siRNA sense strand
aaaaggacaucaagacauc

SEQ ID NO: 1678251 - RNA, 19 nt, Homo sapiens
  misc_RNA (1)...(19): siRNA sense strand
ugucagauucuucuuacaa

SEQ ID NO: 1678252 - RNA, 19 nt, Homo sapiens
  misc_RNA (1)...(19): siRNA sense strand
uagagaucauucccuuuua

SEQ ID NO: 1678253 - RNA, 19 nt, Homo sapiens
  misc_RNA (1)...(19): siRNA sense strand
gaaaaggacaucaagacau

SEQ ID NO: 1678254 - RNA, 19 nt, Homo sapiens
  misc_RNA (1)...(19): siRNA sense strand
gcagaagcuguuagagauc

SEQ ID NO: 1678255 - RNA, 19 nt, Homo sapiens
  misc_RNA (1)...(19): siRNA sense strand
uggaucaggaugagaguuu

SEQ ID NO: 1678256 - RNA, 19 nt, Homo sapiens
  misc_RNA (1)...(19): siRNA sense strand
caaauugaaaggugaacca

SEQ ID NO: 1678257 - RNA, 19 nt, Homo sapiens
  misc_RNA (1)...(19): siRNA sense strand
auaugaagaaggcagauuu

SEQ ID NO: 1678258 - RNA, 19 nt, Homo sapiens
  misc_RNA (1)...(19): siRNA sense strand
aucaagacauccuacauca

SEQ ID NO: 1678259 - RNA, 19 nt, Homo sapiens
  misc_RNA (1)...(19): siRNA sense strand
gaugauguuugggacucuu

SEQ ID NO: 1678260 - RNA, 19 nt, Homo sapiens
  misc_RNA (1)...(19): siRNA sense strand
gugcauuggguuucaguug

SEQ ID NO: 1678261 - RNA, 19 nt, Homo sapiens
  misc_RNA (1)...(19): siRNA sense strand
cugcagaagcuguuagaga

SEQ ID NO: 1678262 - RNA, 19 nt, Homo sapiens
  misc_RNA (1)...(19): siRNA sense strand
uggcauuccuguugucucu

SEQ ID NO: 1678263 - RNA, 19 nt, Homo sapiens
  misc_RNA (1)...(19): siRNA sense strand
gcaaaagcucgaaauuguu

SEQ ID NO: 1678264 - RNA, 19 nt, Homo sapiens
  misc_RNA (1)...(19): siRNA sense strand
ugggaagucuguauuagcu

SEQ ID NO: 1678265 - RNA, 19 nt, Homo sapiens
  misc_RNA (1)...(19): siRNA sense strand
gugugaagguggaguacca

SEQ ID NO: 1678266 - RNA, 19 nt, Homo sapiens
  misc_RNA (1)...(19): siRNA sense strand
aggcuuccacuuaauauug

SEQ ID NO: 1678267 - RNA, 19 nt, Homo sapiens
  misc_RNA (1)...(19): siRNA sense strand
gaggcuuccacuuaauauu

SEQ ID NO: 1678268 - RNA, 19 nt, Homo sapiens
  misc_RNA (1)...(19): siRNA sense strand
gcugugggaagucuguauu

SEQ ID NO: 1678269 - RNA, 19 nt, Homo sapiens
  misc_RNA (1)...(19): siRNA sense strand
caaaucugggcuucugaug

SEQ ID NO: 1678270 - RNA, 19 nt, Homo sapiens
  misc_RNA (1)...(19): siRNA sense strand
aauggaaccaaucuuaaga

SEQ ID NO: 1678271 - RNA, 19 nt, Homo sapiens
  misc_RNA (1)...(19): siRNA sense strand
acacaaauggaaccaaucu

SEQ ID NO: 1678272 - RNA, 19 nt, Homo sapiens
  misc_RNA (1)...(19): siRNA sense strand
cagaccuucuacacaaaug

SEQ ID NO: 1678273 - RNA, 19 nt, Homo sapiens
  misc_RNA (1)...(19): siRNA sense strand
uaugaagaaggcagauuug

SEQ ID NO: 1678274 - RNA, 19 nt, Homo sapiens
  misc_RNA (1)...(19): siRNA sense strand
ggaaaaggacaucaagaca

SEQ ID NO: 1678275 - RNA, 19 nt, Homo sapiens
  misc_RNA (1)...(19): siRNA sense strand
aaaucugggcuucugauga

SEQ ID NO: 1678276 - RNA, 19 nt, Homo sapiens
  misc_RNA (1)...(19): siRNA sense strand
agaagcuggugaaugcaau

SEQ ID NO: 1678277 - RNA, 19 nt, Homo sapiens
  misc_RNA (1)...(19): siRNA sense strand
aaauggaaccaaucuuaag

SEQ ID NO: 1678278 - RNA, 19 nt, Homo sapiens
  misc_RNA (1)...(19): siRNA sense strand
caaccagagacaagagugu

SEQ ID NO: 1678279 - RNA, 19 nt, Homo sapiens
  misc_RNA (1)...(19): siRNA sense strand
ggaagaagcuggugaaugc

SEQ ID NO: 1678280 - RNA, 19 nt, Homo sapiens
  misc_RNA (1)...(19): siRNA sense strand
gaacaagcucauaguauua

SEQ ID NO: 1678281 - RNA, 19 nt, Homo sapiens
  misc_RNA (1)...(19): siRNA sense strand
cagaagcucuccaaauuga

SEQ ID NO: 1678282 - RNA, 19 nt, Homo sapiens
  misc_RNA (1)...(19): siRNA sense strand
ucacagaccuucuacacaa

SEQ ID NO: 1678283 - RNA, 19 nt, Homo sapiens
  misc_RNA (1)...(19): siRNA sense strand
agaacaagcucauaguauu

SEQ ID NO: 1678284 - RNA, 19 nt, Homo sapiens
  misc_RNA (1)...(19): siRNA sense strand
gauaaugauuccuacguau

SEQ ID NO: 1678285 - RNA, 19 nt, Homo sapiens
  misc_RNA (1)...(19): siRNA sense strand
acaaauggaaccaaucuua

SEQ ID NO: 1678286 - RNA, 19 nt, Homo sapiens
  misc_RNA (1)...(19): siRNA sense strand
gaucuuggaugauguuugg

SEQ ID NO: 1678287 - RNA, 19 nt, Homo sapiens
  misc_RNA (1)...(19): siRNA sense strand
caaauggaaccaaucuuaa

SEQ ID NO: 1678288 - RNA, 19 nt, Homo sapiens
  misc_RNA (1)...(19): siRNA sense strand
ccacagaggccaguuguuu

SEQ ID NO: 1678289 - RNA, 19 nt, Homo sapiens
  misc_RNA (1)...(19): siRNA sense strand
aguaauggguccuaaauau

SEQ ID NO: 1678290 - RNA, 19 nt, Homo sapiens
  misc_RNA (1)...(19): siRNA sense strand
agcagaagcucuccaaauu

SEQ ID NO: 1678291 - RNA, 19 nt, Homo sapiens
  misc_RNA (1)...(19): siRNA sense strand
caagacauccuacaucaug

SEQ ID NO: 1678292 - RNA, 19 nt, Homo sapiens
  misc_RNA (1)...(19): siRNA sense strand
acaaugcucuacuacauga

SEQ ID NO: 1678293 - RNA, 19 nt, Homo sapiens
  misc_RNA (1)...(19): siRNA sense strand
caugauuagugauggauuu

SEQ ID NO: 1678294 - RNA, 19 nt, Homo sapiens
  misc_RNA (1)...(19): siRNA sense strand
aaucugggcuucugaugaa

SEQ ID NO: 1678295 - RNA, 19 nt, Homo sapiens
  misc_RNA (1)...(19): siRNA sense strand
gaagcucuccaaauugaaa

SEQ ID NO: 1678296 - RNA, 19 nt, Homo sapiens
  misc_RNA (1)...(19): siRNA sense strand
gcagaagcucuccaaauug

SEQ ID NO: 1678297 - RNA, 19 nt, Homo sapiens
  misc_RNA (1)...(19): siRNA sense strand
cuacaaugcucuacuacau

SEQ ID NO: 1678298 - RNA, 19 nt, Homo sapiens
  misc_RNA (1)...(19): siRNA sense strand
gacaagaguguuacagauu

SEQ ID NO: 1678299 - RNA, 19 nt, Homo sapiens
  misc_RNA (1)...(19): siRNA sense strand
ugaugaaacugcagaaucu

SEQ ID NO: 1678300 - RNA, 19 nt, Homo sapiens
  misc_RNA (1)...(19): siRNA sense strand
cccagaggcuuccacuuaa

SEQ ID NO: 1678301 - RNA, 19 nt, Homo sapiens
  misc_RNA (1)...(19): siRNA sense strand
gagaagcucuggaaaagga

SEQ ID NO: 1678302 - RNA, 19 nt, Homo sapiens
  misc_RNA (1)...(19): siRNA sense strand
agauaaugauuccuacgua

SEQ ID NO: 1678303 - RNA, 19 nt, Homo sapiens
  misc_RNA (1)...(19): siRNA sense strand
ucccagaggcuuccacuua

SEQ ID NO: 1678304 - RNA, 19 nt, Homo sapiens
  misc_RNA (1)...(19): siRNA sense strand
acaagaguguuacagauuc

SEQ ID NO: 1678305 - RNA, 19 nt, Homo sapiens
  misc_RNA (1)...(19): siRNA sense strand
cuacacaaauggaaccaau

SEQ ID NO: 1678306 - RNA, 19 nt, Homo sapiens
  misc_RNA (1)...(19): siRNA sense strand
ccagaacaagcucauagua

SEQ ID NO: 1678307 - RNA, 19 nt, Homo sapiens
  misc_RNA (1)...(19): siRNA sense strand
caugaaggauauaaagauc

SEQ ID NO: 1678308 - RNA, 19 nt, Homo sapiens
  misc_RNA (1)...(19): siRNA sense strand
agacaagaguguuacagau

SEQ ID NO: 1678309 - RNA, 19 nt, Homo sapiens
  misc_RNA (1)...(19): siRNA sense strand
gagacaagaguguuacaga

SEQ ID NO: 1678310 - RNA, 19 nt, Homo sapiens
  misc_RNA (1)...(19): siRNA sense strand
caagaguguuacagauuca

SEQ ID NO: 1678311 - RNA, 19 nt, Homo sapiens
  misc_RNA (1)...(19): siRNA sense strand
guaauggguccuaaauaug

SEQ ID NO: 1678312 - RNA, 19 nt, Homo sapiens
  misc_RNA (1)...(19): siRNA sense strand
caugauggcauuccuguug

SEQ ID NO: 1678313 - RNA, 19 nt, Homo sapiens
  misc_RNA (1)...(19): siRNA sense strand
gaccgucuccgcauucuga

SEQ ID NO: 1678314 - RNA, 19 nt, Homo sapiens
  misc_RNA (1)...(19): siRNA sense strand
ugcagaagcuguuagagau

SEQ ID NO: 1678315 - RNA, 19 nt, Homo sapiens
  misc_RNA (1)...(19): siRNA sense strand
cagaacaagcucauaguau

SEQ ID NO: 1678316 - RNA, 19 nt, Homo sapiens
  misc_RNA (1)...(19): siRNA sense strand
cagaggcuuccacuuaaua

SEQ ID NO: 1678317 - RNA, 19 nt, Homo sapiens
  misc_RNA (1)...(19): siRNA sense strand
agacaaaucugggcuucug

SEQ ID NO: 1678318 - RNA, 19 nt, Homo sapiens
  misc_RNA (1)...(19): siRNA sense strand
cuacguaucauucuacaau

SEQ ID NO: 1678319 - RNA, 19 nt, Homo sapiens
  misc_RNA (1)...(19): siRNA sense strand
uaauggguccuaaauaugu

SEQ ID NO: 1678320 - RNA, 19 nt, Homo sapiens
  misc_RNA (1)...(19): siRNA sense strand
gcauuccuguugucucuuc

SEQ ID NO: 1678321 - RNA, 19 nt, Homo sapiens
  misc_RNA (1)...(19): siRNA sense strand
ucuacuacaugaaggauau

SEQ ID NO: 1678322 - RNA, 19 nt, Homo sapiens
  misc_RNA (1)...(19): siRNA sense strand
cagaagcuguuagagauca

SEQ ID NO: 1678323 - RNA, 19 nt, Homo sapiens
  misc_RNA (1)...(19): siRNA sense strand
ccagaggcuuccacuuaau

SEQ ID NO: 1678324 - RNA, 19 nt, Homo sapiens
  misc_RNA (1)...(19): siRNA sense strand
caaggaagaagcuggugaa

SEQ ID NO: 1678325 - RNA, 19 nt, Homo sapiens
  misc_RNA (1)...(19): siRNA sense strand
cgaaauuguuugcuucaac

SEQ ID NO: 1678326 - RNA, 19 nt, Homo sapiens
  misc_RNA (1)...(19): siRNA sense strand
cagcagaagcucuccaaau

SEQ ID NO: 1678327 - RNA, 19 nt, Homo sapiens
  misc_RNA (1)...(19): siRNA sense strand
ggcuuccacuuaauauuga

SEQ ID NO: 1678328 - RNA, 19 nt, Homo sapiens
  misc_RNA (1)...(19): siRNA sense strand
caaaagcucgaaauuguuu

SEQ ID NO: 1678329 - RNA, 19 nt, Homo sapiens
  misc_RNA (1)...(19): siRNA sense strand
guugaaagcuuuugacagu

SEQ ID NO: 1678330 - RNA, 19 nt, Homo sapiens
  misc_RNA (1)...(19): siRNA sense strand
cacagaccuucuacacaaa

SEQ ID NO: 1678331 - RNA, 19 nt, Homo sapiens
  misc_RNA (1)...(19): siRNA sense strand
uugcugcccuucuccauga

SEQ ID NO: 1678332 - RNA, 19 nt, Homo sapiens
  misc_RNA (1)...(19): siRNA sense strand
caguaauggguccuaaaua

SEQ ID NO: 1678333 - RNA, 19 nt, Homo sapiens
  misc_RNA (1)...(19): siRNA sense strand
aacaauaucagaagaggaa

SEQ ID NO: 1678334 - RNA, 19 nt, Homo sapiens
  misc_RNA (1)...(19): siRNA sense strand
caacagcaaagagcagcua

SEQ ID NO: 1678335 - RNA, 19 nt, Homo sapiens
  misc_RNA (1)...(19): siRNA sense strand
gggagugcauuggguuuca

SEQ ID NO: 1678336 - RNA, 19 nt, Homo sapiens
  misc_RNA (1)...(19): siRNA sense strand
auucuacaaugcucuacua

SEQ ID NO: 1678337 - RNA, 19 nt, Homo sapiens
  misc_RNA (1)...(19): siRNA sense strand
aauggguccuaaauaugua

SEQ ID NO: 1678338 - RNA, 19 nt, Homo sapiens
  misc_RNA (1)...(19): siRNA sense strand
caucaagacauccuacauc

SEQ ID NO: 1678339 - RNA, 19 nt, Homo sapiens
  misc_RNA (1)...(19): siRNA sense strand
ugaaacugcagaaucuuug

SEQ ID NO: 1678340 - RNA, 19 nt, Homo sapiens
  misc_RNA (1)...(19): siRNA sense strand
gaagcuggugaaugcaauu

SEQ ID NO: 1678341 - RNA, 19 nt, Homo sapiens
  misc_RNA (1)...(19): siRNA sense strand
gcaaacacccaaggucucu

SEQ ID NO: 1678342 - RNA, 19 nt, Homo sapiens
  misc_RNA (1)...(19): siRNA sense strand
ucaguaauggguccuaaau

SEQ ID NO: 1678343 - RNA, 19 nt, Homo sapiens
  misc_RNA (1)...(19): siRNA sense strand
cuacaugaaggauauaaag

SEQ ID NO: 1678344 - RNA, 19 nt, Homo sapiens
  misc_RNA (1)...(19): siRNA sense strand
gaguguuacagauucagua

SEQ ID NO: 1678345 - RNA, 19 nt, Homo sapiens
  misc_RNA (1)...(19): siRNA sense strand
ugcaaaagcucgaaauugu

SEQ ID NO: 1678346 - RNA, 19 nt, Homo sapiens
  misc_RNA (1)...(19): siRNA sense strand
cagugucagauucuucuua

SEQ ID NO: 1678347 - RNA, 19 nt, Homo sapiens
  misc_RNA (1)...(19): siRNA sense strand
aaaaggacaucaagacauc

SEQ ID NO: 1678348 - RNA, 19 nt, Homo sapiens
  misc_RNA (1)...(19): siRNA sense strand
ugucagauucuucuuacaa

SEQ ID NO: 1678349 - RNA, 19 nt, Homo sapiens
  misc_RNA (1)...(19): siRNA sense strand
gaaaaggacaucaagacau

SEQ ID NO: 1678350 - RNA, 19 nt, Homo sapiens
  misc_RNA (1)...(19): siRNA sense strand
uagagaucauucccuuuua

SEQ ID NO: 1678351 - RNA, 19 nt, Homo sapiens
  misc_RNA (1)...(19): siRNA sense strand
gcagaagcuguuagagauc

SEQ ID NO: 1678352 - RNA, 19 nt, Homo sapiens
  misc_RNA (1)...(19): siRNA sense strand
uggaucaggaugagaguuu

SEQ ID NO: 1678353 - RNA, 19 nt, Homo sapiens
  misc_RNA (1)...(19): siRNA sense strand
caaauugaaaggugaacca

SEQ ID NO: 1678354 - RNA, 19 nt, Homo sapiens
  misc_RNA (1)...(19): siRNA sense strand
auaugaagaaggcagauuu

SEQ ID NO: 1678355 - RNA, 19 nt, Homo sapiens
  misc_RNA (1)...(19): siRNA sense strand
aucaagacauccuacauca

SEQ ID NO: 1678356 - RNA, 19 nt, Homo sapiens
  misc_RNA (1)...(19): siRNA sense strand
gaugauguuugggacucuu

SEQ ID NO: 1678357 - RNA, 19 nt, Homo sapiens
  misc_RNA (1)...(19): siRNA sense strand
gugcauuggguuucaguug

SEQ ID NO: 1678358 - RNA, 19 nt, Homo sapiens
  misc_RNA (1)...(19): siRNA sense strand
cugcagaagcuguuagaga

SEQ ID NO: 1678359 - RNA, 19 nt, Homo sapiens
  misc_RNA (1)...(19): siRNA sense strand
uggcauuccuguugucucu

SEQ ID NO: 1678360 - RNA, 19 nt, Homo sapiens
  misc_RNA (1)...(19): siRNA sense strand
gcaaaagcucgaaauuguu

SEQ ID NO: 1678361 - RNA, 19 nt, Homo sapiens
  misc_RNA (1)...(19): siRNA sense strand
ugggaagucuguauuagcu

SEQ ID NO: 1678362 - RNA, 19 nt, Homo sapiens
  misc_RNA (1)...(19): siRNA sense strand
gugugaagguggaguacca

SEQ ID NO: 1678363 - RNA, 19 nt, Homo sapiens
  misc_RNA (1)...(19): siRNA sense strand
aggcuuccacuuaauauug

SEQ ID NO: 1678364 - RNA, 19 nt, Homo sapiens
  misc_RNA (1)...(19): siRNA sense strand
gaggcuuccacuuaauauu

SEQ ID NO: 1678365 - RNA, 19 nt, Homo sapiens
  misc_RNA (1)...(19): siRNA sense strand
gcugugggaagucuguauu

SEQ ID NO: 1678366 - RNA, 19 nt, Homo sapiens
  misc_RNA (1)...(19): siRNA sense strand
caaaucugggcuucugaug

SEQ ID NO: 1678367 - RNA, 19 nt, Homo sapiens
  misc_RNA (1)...(19): siRNA sense strand
acacaaauggaaccaaucu

SEQ ID NO: 1678368 - RNA, 19 nt, Homo sapiens
  misc_RNA (1)...(19): siRNA sense strand
cagaccuucuacacaaaug

SEQ ID NO: 1678369 - RNA, 19 nt, Homo sapiens
  misc_RNA (1)...(19): siRNA sense strand
uaugaagaaggcagauuug

SEQ ID NO: 1678370 - RNA, 19 nt, Homo sapiens
  misc_RNA (1)...(19): siRNA sense strand
ggaaaaggacaucaagaca

SEQ ID NO: 1678371 - RNA, 19 nt, Homo sapiens
  misc_RNA (1)...(19): siRNA sense strand
aaaucugggcuucugauga

SEQ ID NO: 1678372 - RNA, 19 nt, Homo sapiens
  misc_RNA (1)...(19): siRNA sense strand
guaccacagaggccaguug

SEQ ID NO: 1678373 - RNA, 19 nt, Homo sapiens
  misc_RNA (1)...(19): siRNA sense strand
caaccagagacaagagugu

SEQ ID NO: 1678374 - RNA, 19 nt, Homo sapiens
  misc_RNA (1)...(19): siRNA sense strand
agaagcuggugaaugcaau

SEQ ID NO: 1678375 - RNA, 19 nt, Homo sapiens
  misc_RNA (1)...(19): siRNA sense strand
gaagcuguuagagaucauu

SEQ ID NO: 1678376 - RNA, 19 nt, Homo sapiens
  misc_RNA (1)...(19): siRNA sense strand
gucagauucuucuuacaac

SEQ ID NO: 1678377 - RNA, 19 nt, Homo sapiens
  misc_RNA (1)...(19): siRNA sense strand
gaagaagcgcuuugaggaa

SEQ ID NO: 1678378 - RNA, 19 nt, Homo sapiens
  misc_RNA (1)...(19): siRNA sense strand
gcaauaaguccauggagau

SEQ ID NO: 1678379 - RNA, 19 nt, Homo sapiens
  misc_RNA (1)...(19): siRNA sense strand
ugaagaauguggacaaggu

SEQ ID NO: 1678380 - RNA, 19 nt, Homo sapiens
  misc_RNA (1)...(19): siRNA sense strand
ggcgguaccugcagaugaa

SEQ ID NO: 1678381 - RNA, 19 nt, Homo sapiens
  misc_RNA (1)...(19): siRNA sense strand
ccauggagaucgagguguu

SEQ ID NO: 1678382 - RNA, 19 nt, Homo sapiens
  misc_RNA (1)...(19): siRNA sense strand
ccagugccuucuucaccua

SEQ ID NO: 1678383 - RNA, 19 nt, Homo sapiens
  misc_RNA (1)...(19): siRNA sense strand
gcgcggagaucaccuacac

SEQ ID NO: 1678384 - RNA, 19 nt, Homo sapiens
  misc_RNA (1)...(19): siRNA sense strand
gcaugaccuucacgagcaa

SEQ ID NO: 1678385 - RNA, 19 nt, Homo sapiens
  misc_RNA (1)...(19): siRNA sense strand
gggcgguaccugcagauga

SEQ ID NO: 1678386 - RNA, 19 nt, Homo sapiens
  misc_RNA (1)...(19): siRNA sense strand
ucggugagguggcgcaugu

SEQ ID NO: 1678387 - RNA, 19 nt, Homo sapiens
  misc_RNA (1)...(19): siRNA sense strand
cccugucgcugaagaaugu

SEQ ID NO: 1678388 - RNA, 19 nt, Homo sapiens
  misc_RNA (1)...(19): siRNA sense strand
gcugaagaauguggacaag

SEQ ID NO: 1678389 - RNA, 19 nt, Homo sapiens
  misc_RNA (1)...(19): siRNA sense strand
agaccgaggacgagaagaa

SEQ ID NO: 1678390 - RNA, 19 nt, Homo sapiens
  misc_RNA (1)...(19): siRNA sense strand
gaggcaggcgccaucauca

SEQ ID NO: 1678391 - RNA, 19 nt, Homo sapiens
  misc_RNA (1)...(19): siRNA sense strand
acccagagccgaacacugu

SEQ ID NO: 1678392 - RNA, 19 nt, Homo sapiens
  misc_RNA (1)...(19): siRNA sense strand
ggugccuccuguuguguau

SEQ ID NO: 1678393 - RNA, 19 nt, Homo sapiens
  misc_RNA (1)...(19): siRNA sense strand
ggacgagaagaagcgcuuu

SEQ ID NO: 1678394 - RNA, 19 nt, Homo sapiens
  misc_RNA (1)...(19): siRNA sense strand
gguaugaagcccagaagcu

SEQ ID NO: 1678395 - RNA, 19 nt, Homo sapiens
  misc_RNA (1)...(19): siRNA sense strand
auaaguccauggagaucga

SEQ ID NO: 1678396 - RNA, 19 nt, Homo sapiens
  misc_RNA (1)...(19): siRNA sense strand
acggaggugugaccaugaa

SEQ ID NO: 1678397 - RNA, 19 nt, Homo sapiens
  misc_RNA (1)...(19): siRNA sense strand
gcgcaccgacuuccugucu

SEQ ID NO: 1678398 - RNA, 19 nt, Homo sapiens
  misc_RNA (1)...(19): siRNA sense strand
gacgagaagaagcgcuuug

SEQ ID NO: 1678399 - RNA, 19 nt, Homo sapiens
  misc_RNA (1)...(19): siRNA sense strand
ugaagaauguggacaaggu

SEQ ID NO: 1678400 - RNA, 19 nt, Homo sapiens
  misc_RNA (1)...(19): siRNA sense strand
gcgcggagaucaccuacac

SEQ ID NO: 1678401 - RNA, 19 nt, Homo sapiens
  misc_RNA (1)...(19): siRNA sense strand
ucggugagguggcgcaugu

SEQ ID NO: 1678402 - RNA, 19 nt, Homo sapiens
  misc_RNA (1)...(19): siRNA sense strand
cccugucgcugaagaaugu

SEQ ID NO: 1678403 - RNA, 19 nt, Homo sapiens
  misc_RNA (1)...(19): siRNA sense strand
gcugaagaauguggacaag

SEQ ID NO: 1678404 - RNA, 19 nt, Homo sapiens
  misc_RNA (1)...(19): siRNA sense strand
gaggcaggcgccaucauca

SEQ ID NO: 1678405 - RNA, 19 nt, Homo sapiens
  misc_RNA (1)...(19): siRNA sense strand
acccagagccgaacacugu

SEQ ID NO: 1678406 - RNA, 19 nt, Homo sapiens
  misc_RNA (1)...(19): siRNA sense strand
ggugccuccuguuguguau

SEQ ID NO: 1678407 - RNA, 19 nt, Homo sapiens
  misc_RNA (1)...(19): siRNA sense strand
gguaugaagcccagaagcu

SEQ ID NO: 1678408 - RNA, 19 nt, Homo sapiens
  misc_RNA (1)...(19): siRNA sense strand
acggaggugugaccaugaa

SEQ ID NO: 1678409 - RNA, 19 nt, Homo sapiens
  misc_RNA (1)...(19): siRNA sense strand
gcgcaccgacuuccugucu

SEQ ID NO: 1678410 - RNA, 19 nt, Homo sapiens
  misc_RNA (1)...(19): siRNA sense strand
ugaagaauguggacaaggu

SEQ ID NO: 1678411 - RNA, 19 nt, Homo sapiens
  misc_RNA (1)...(19): siRNA sense strand
gcgcggagaucaccuacac

SEQ ID NO: 1678412 - RNA, 19 nt, Homo sapiens
  misc_RNA (1)...(19): siRNA sense strand
gcaugaccuucacgagcaa

SEQ ID NO: 1678413 - RNA, 19 nt, Homo sapiens
  misc_RNA (1)...(19): siRNA sense strand
ucggugagguggcgcaugu

SEQ ID NO: 1678414 - RNA, 19 nt, Homo sapiens
  misc_RNA (1)...(19): siRNA sense strand
cccugucgcugaagaaugu

SEQ ID NO: 1678415 - RNA, 19 nt, Homo sapiens
  misc_RNA (1)...(19): siRNA sense strand
gcugaagaauguggacaag

SEQ ID NO: 1678416 - RNA, 19 nt, Homo sapiens
  misc_RNA (1)...(19): siRNA sense strand
gaggcaggcgccaucauca

SEQ ID NO: 1678417 - RNA, 19 nt, Homo sapiens
  misc_RNA (1)...(19): siRNA sense strand
acccagagccgaacacugu

SEQ ID NO: 1678418 - RNA, 19 nt, Homo sapiens
  misc_RNA (1)...(19): siRNA sense strand
ggugccuccuguuguguau

SEQ ID NO: 1678419 - RNA, 19 nt, Homo sapiens
  misc_RNA (1)...(19): siRNA sense strand
gguaugaagcccagaagcu

SEQ ID NO: 1678420 - RNA, 19 nt, Homo sapiens
  misc_RNA (1)...(19): siRNA sense strand
acggaggugugaccaugaa

SEQ ID NO: 1678421 - RNA, 19 nt, Homo sapiens
  misc_RNA (1)...(19): siRNA sense strand
gcgcaccgacuuccugucu

SEQ ID NO: 1678422 - RNA, 19 nt, Homo sapiens
  misc_RNA (1)...(19): siRNA sense strand
gaagaagcgcuuugaggaa

SEQ ID NO: 1678423 - RNA, 19 nt, Homo sapiens
  misc_RNA (1)...(19): siRNA sense strand
gcaauaaguccauggagau

SEQ ID NO: 1678424 - RNA, 19 nt, Homo sapiens
  misc_RNA (1)...(19): siRNA sense strand
ugaagaauguggacaaggu

SEQ ID NO: 1678425 - RNA, 19 nt, Homo sapiens
  misc_RNA (1)...(19): siRNA sense strand
ggcgguaccugcagaugaa

SEQ ID NO: 1678426 - RNA, 19 nt, Homo sapiens
  misc_RNA (1)...(19): siRNA sense strand
ccauggagaucgagguguu

SEQ ID NO: 1678427 - RNA, 19 nt, Homo sapiens
  misc_RNA (1)...(19): siRNA sense strand
ccagugccuucuucaccua

SEQ ID NO: 1678428 - RNA, 19 nt, Homo sapiens
  misc_RNA (1)...(19): siRNA sense strand
gcgcggagaucaccuacac

SEQ ID NO: 1678429 - RNA, 19 nt, Homo sapiens
  misc_RNA (1)...(19): siRNA sense strand
gcaugaccuucacgagcaa

SEQ ID NO: 1678430 - RNA, 19 nt, Homo sapiens
  misc_RNA (1)...(19): siRNA sense strand
gggcgguaccugcagauga

SEQ ID NO: 1678431 - RNA, 19 nt, Homo sapiens
  misc_RNA (1)...(19): siRNA sense strand
ucggugagguggcgcaugu

SEQ ID NO: 1678432 - RNA, 19 nt, Homo sapiens
  misc_RNA (1)...(19): siRNA sense strand
cccugucgcugaagaaugu

SEQ ID NO: 1678433 - RNA, 19 nt, Homo sapiens
  misc_RNA (1)...(19): siRNA sense strand
gcugaagaauguggacaag

SEQ ID NO: 1678434 - RNA, 19 nt, Homo sapiens
  misc_RNA (1)...(19): siRNA sense strand
agaccgaggacgagaagaa

SEQ ID NO: 1678435 - RNA, 19 nt, Homo sapiens
  misc_RNA (1)...(19): siRNA sense strand
gaggcaggcgccaucauca

SEQ ID NO: 1678436 - RNA, 19 nt, Homo sapiens
  misc_RNA (1)...(19): siRNA sense strand
acccagagccgaacacugu

SEQ ID NO: 1678437 - RNA, 19 nt, Homo sapiens
  misc_RNA (1)...(19): siRNA sense strand
ggugccuccuguuguguau

SEQ ID NO: 1678438 - RNA, 19 nt, Homo sapiens
  misc_RNA (1)...(19): siRNA sense strand
ggacgagaagaagcgcuuu

SEQ ID NO: 1678439 - RNA, 19 nt, Homo sapiens
  misc_RNA (1)...(19): siRNA sense strand
gguaugaagcccagaagcu

SEQ ID NO: 1678440 - RNA, 19 nt, Homo sapiens
  misc_RNA (1)...(19): siRNA sense strand
auaaguccauggagaucga

SEQ ID NO: 1678441 - RNA, 19 nt, Homo sapiens
  misc_RNA (1)...(19): siRNA sense strand
acggaggugugaccaugaa

SEQ ID NO: 1678442 - RNA, 19 nt, Homo sapiens
  misc_RNA (1)...(19): siRNA sense strand
gcgcaccgacuuccugucu

SEQ ID NO: 1678443 - RNA, 19 nt, Homo sapiens
  misc_RNA (1)...(19): siRNA sense strand
gacgagaagaagcgcuuug

SEQ ID NO: 1678444 - RNA, 19 nt, Homo sapiens
  misc_RNA (1)...(19): siRNA sense strand
gaagaagcgcuuugaggaa

SEQ ID NO: 1678445 - RNA, 19 nt, Homo sapiens
  misc_RNA (1)...(19): siRNA sense strand
gcaauaaguccauggagau

SEQ ID NO: 1678446 - RNA, 19 nt, Homo sapiens
  misc_RNA (1)...(19): siRNA sense strand
ugaagaauguggacaaggu

SEQ ID NO: 1678447 - RNA, 19 nt, Homo sapiens
  misc_RNA (1)...(19): siRNA sense strand
ggcgguaccugcagaugaa

SEQ ID NO: 1678448 - RNA, 19 nt, Homo sapiens
  misc_RNA (1)...(19): siRNA sense strand
ccauggagaucgagguguu

SEQ ID NO: 1678449 - RNA, 19 nt, Homo sapiens
  misc_RNA (1)...(19): siRNA sense strand
ccagugccuucuucaccua

SEQ ID NO: 1678450 - RNA, 19 nt, Homo sapiens
  misc_RNA (1)...(19): siRNA sense strand
gcgcggagaucaccuacac

SEQ ID NO: 1678451 - RNA, 19 nt, Homo sapiens
  misc_RNA (1)...(19): siRNA sense strand
gcaugaccuucacgagcaa

SEQ ID NO: 1678452 - RNA, 19 nt, Homo sapiens
  misc_RNA (1)...(19): siRNA sense strand
gggcgguaccugcagauga

SEQ ID NO: 1678453 - RNA, 19 nt, Homo sapiens
  misc_RNA (1)...(19): siRNA sense strand
ucggugagguggcgcaugu

SEQ ID NO: 1678454 - RNA, 19 nt, Homo sapiens
  misc_RNA (1)...(19): siRNA sense strand
cccugucgcugaagaaugu

SEQ ID NO: 1678455 - RNA, 19 nt, Homo sapiens
  misc_RNA (1)...(19): siRNA sense strand
gcugaagaauguggacaag

SEQ ID NO: 1678456 - RNA, 19 nt, Homo sapiens
  misc_RNA (1)...(19): siRNA sense strand
agaccgaggacgagaagaa

SEQ ID NO: 1678457 - RNA, 19 nt, Homo sapiens
  misc_RNA (1)...(19): siRNA sense strand
gaggcaggcgccaucauca

SEQ ID NO: 1678458 - RNA, 19 nt, Homo sapiens
  misc_RNA (1)...(19): siRNA sense strand
acccagagccgaacacugu

SEQ ID NO: 1678459 - RNA, 19 nt, Homo sapiens
  misc_RNA (1)...(19): siRNA sense strand
ggugccuccuguuguguau

SEQ ID NO: 1678460 - RNA, 19 nt, Homo sapiens
  misc_RNA (1)...(19): siRNA sense strand
ggacgagaagaagcgcuuu

SEQ ID NO: 1678461 - RNA, 19 nt, Homo sapiens
  misc_RNA (1)...(19): siRNA sense strand
gguaugaagcccagaagcu

SEQ ID NO: 1678462 - RNA, 19 nt, Homo sapiens
  misc_RNA (1)...(19): siRNA sense strand
auaaguccauggagaucga

SEQ ID NO: 1678463 - RNA, 19 nt, Homo sapiens
  misc_RNA (1)...(19): siRNA sense strand
acggaggugugaccaugaa

SEQ ID NO: 1678464 - RNA, 19 nt, Homo sapiens
  misc_RNA (1)...(19): siRNA sense strand
gcgcaccgacuuccugucu

SEQ ID NO: 1678465 - RNA, 19 nt, Homo sapiens
  misc_RNA (1)...(19): siRNA sense strand
gacgagaagaagcgcuuug

SEQ ID NO: 1678466 - RNA, 19 nt, Homo sapiens
  misc_RNA (1)...(19): siRNA sense strand
gaagaagcgcuuugaggaa

SEQ ID NO: 1678467 - RNA, 19 nt, Homo sapiens
  misc_RNA (1)...(19): siRNA sense strand
gcaauaaguccauggagau

SEQ ID NO: 1678468 - RNA, 19 nt, Homo sapiens
  misc_RNA (1)...(19): siRNA sense strand
ugaagaauguggacaaggu

SEQ ID NO: 1678469 - RNA, 19 nt, Homo sapiens
  misc_RNA (1)...(19): siRNA sense strand
ggcgguaccugcagaugaa

SEQ ID NO: 1678470 - RNA, 19 nt, Homo sapiens
  misc_RNA (1)...(19): siRNA sense strand
ccauggagaucgagguguu

SEQ ID NO: 1678471 - RNA, 19 nt, Homo sapiens
  misc_RNA (1)...(19): siRNA sense strand
ccagugccuucuucaccua

SEQ ID NO: 1678472 - RNA, 19 nt, Homo sapiens
  misc_RNA (1)...(19): siRNA sense strand
gcgcggagaucaccuacac

SEQ ID NO: 1678473 - RNA, 19 nt, Homo sapiens
  misc_RNA (1)...(19): siRNA sense strand
gcaugaccuucacgagcaa

SEQ ID NO: 1678474 - RNA, 19 nt, Homo sapiens
  misc_RNA (1)...(19): siRNA sense strand
gggcgguaccugcagauga

SEQ ID NO: 1678475 - RNA, 19 nt, Homo sapiens
  misc_RNA (1)...(19): siRNA sense strand
ucggugagguggcgcaugu

SEQ ID NO: 1678476 - RNA, 19 nt, Homo sapiens
  misc_RNA (1)...(19): siRNA sense strand
cccugucgcugaagaaugu

SEQ ID NO: 1678477 - RNA, 19 nt, Homo sapiens
  misc_RNA (1)...(19): siRNA sense strand
gcugaagaauguggacaag

SEQ ID NO: 1678478 - RNA, 19 nt, Homo sapiens
  misc_RNA (1)...(19): siRNA sense strand
agaccgaggacgagaagaa

SEQ ID NO: 1678479 - RNA, 19 nt, Homo sapiens
  misc_RNA (1)...(19): siRNA sense strand
gaggcaggcgccaucauca

SEQ ID NO: 1678480 - RNA, 19 nt, Homo sapiens
  misc_RNA (1)...(19): siRNA sense strand
acccagagccgaacacugu

SEQ ID NO: 1678481 - RNA, 19 nt, Homo sapiens
  misc_RNA (1)...(19): siRNA sense strand
ggugccuccuguuguguau

SEQ ID NO: 1678482 - RNA, 19 nt, Homo sapiens
  misc_RNA (1)...(19): siRNA sense strand
ggacgagaagaagcgcuuu

SEQ ID NO: 1678483 - RNA, 19 nt, Homo sapiens
  misc_RNA (1)...(19): siRNA sense strand
gguaugaagcccagaagcu

SEQ ID NO: 1678484 - RNA, 19 nt, Homo sapiens
  misc_RNA (1)...(19): siRNA sense strand
auaaguccauggagaucga

SEQ ID NO: 1678485 - RNA, 19 nt, Homo sapiens
  misc_RNA (1)...(19): siRNA sense strand
acggaggugugaccaugaa

SEQ ID NO: 1678486 - RNA, 19 nt, Homo sapiens
  misc_RNA (1)...(19): siRNA sense strand
gcgcaccgacuuccugucu

SEQ ID NO: 1678487 - RNA, 19 nt, Homo sapiens
  misc_RNA (1)...(19): siRNA sense strand
gacgagaagaagcgcuuug

SEQ ID NO: 1678488 - RNA, 19 nt, Homo sapiens
  misc_RNA (1)...(19): siRNA sense strand
gaagaagcgcuuugaggaa

SEQ ID NO: 1678489 - RNA, 19 nt, Homo sapiens
  misc_RNA (1)...(19): siRNA sense strand
gcaauaaguccauggagau

SEQ ID NO: 1678490 - RNA, 19 nt, Homo sapiens
  misc_RNA (1)...(19): siRNA sense strand
ugaagaauguggacaaggu

SEQ ID NO: 1678491 - RNA, 19 nt, Homo sapiens
  misc_RNA (1)...(19): siRNA sense strand
ggcgguaccugcagaugaa

SEQ ID NO: 1678492 - RNA, 19 nt, Homo sapiens
  misc_RNA (1)...(19): siRNA sense strand
ccauggagaucgagguguu

SEQ ID NO: 1678493 - RNA, 19 nt, Homo sapiens
  misc_RNA (1)...(19): siRNA sense strand
ccagugccuucuucaccua

SEQ ID NO: 1678494 - RNA, 19 nt, Homo sapiens
  misc_RNA (1)...(19): siRNA sense strand
gcgcggagaucaccuacac

SEQ ID NO: 1678495 - RNA, 19 nt, Homo sapiens
  misc_RNA (1)...(19): siRNA sense strand
gcaugaccuucacgagcaa

SEQ ID NO: 1678496 - RNA, 19 nt, Homo sapiens
  misc_RNA (1)...(19): siRNA sense strand
gggcgguaccugcagauga

SEQ ID NO: 1678497 - RNA, 19 nt, Homo sapiens
  misc_RNA (1)...(19): siRNA sense strand
ucggugagguggcgcaugu

SEQ ID NO: 1678498 - RNA, 19 nt, Homo sapiens
  misc_RNA (1)...(19): siRNA sense strand
cccugucgcugaagaaugu

SEQ ID NO: 1678499 - RNA, 19 nt, Homo sapiens
  misc_RNA (1)...(19): siRNA sense strand
gcugaagaauguggacaag

SEQ ID NO: 1678500 - RNA, 19 nt, Homo sapiens
  misc_RNA (1)...(19): siRNA sense strand
agaccgaggacgagaagaa

SEQ ID NO: 1678501 - RNA, 19 nt, Homo sapiens
  misc_RNA (1)...(19): siRNA sense strand
gaggcaggcgccaucauca

SEQ ID NO: 1678502 - RNA, 19 nt, Homo sapiens
  misc_RNA (1)...(19): siRNA sense strand
acccagagccgaacacugu

SEQ ID NO: 1678503 - RNA, 19 nt, Homo sapiens
  misc_RNA (1)...(19): siRNA sense strand
ggugccuccuguuguguau

SEQ ID NO: 1678504 - RNA, 19 nt, Homo sapiens
  misc_RNA (1)...(19): siRNA sense strand
ggacgagaagaagcgcuuu

SEQ ID NO: 1678505 - RNA, 19 nt, Homo sapiens
  misc_RNA (1)...(19): siRNA sense strand
gguaugaagcccagaagcu

SEQ ID NO: 1678506 - RNA, 19 nt, Homo sapiens
  misc_RNA (1)...(19): siRNA sense strand
auaaguccauggagaucga

SEQ ID NO: 1678507 - RNA, 19 nt, Homo sapiens
  misc_RNA (1)...(19): siRNA sense strand
acggaggugugaccaugaa

SEQ ID NO: 1678508 - RNA, 19 nt, Homo sapiens
  misc_RNA (1)...(19): siRNA sense strand
gcgcaccgacuuccugucu

SEQ ID NO: 1678509 - RNA, 19 nt, Homo sapiens
  misc_RNA (1)...(19): siRNA sense strand
gacgagaagaagcgcuuug

SEQ ID NO: 1678510 - RNA, 19 nt, Homo sapiens
  misc_RNA (1)...(19): siRNA sense strand
ugaagaauguggacaaggu

SEQ ID NO: 1678511 - RNA, 19 nt, Homo sapiens
  misc_RNA (1)...(19): siRNA sense strand
gcgcggagaucaccuacac

SEQ ID NO: 1678512 - RNA, 19 nt, Homo sapiens
  misc_RNA (1)...(19): siRNA sense strand
ucggugagguggcgcaugu

SEQ ID NO: 1678513 - RNA, 19 nt, Homo sapiens
  misc_RNA (1)...(19): siRNA sense strand
cccugucgcugaagaaugu

SEQ ID NO: 1678514 - RNA, 19 nt, Homo sapiens
  misc_RNA (1)...(19): siRNA sense strand
gcugaagaauguggacaag

SEQ ID NO: 1678515 - RNA, 19 nt, Homo sapiens
  misc_RNA (1)...(19): siRNA sense strand
gaggcaggcgccaucauca

SEQ ID NO: 1678516 - RNA, 19 nt, Homo sapiens
  misc_RNA (1)...(19): siRNA sense strand
acccagagccgaacacugu

SEQ ID NO: 1678517 - RNA, 19 nt, Homo sapiens
  misc_RNA (1)...(19): siRNA sense strand
ggugccuccuguuguguau

SEQ ID NO: 1678518 - RNA, 19 nt, Homo sapiens
  misc_RNA (1)...(19): siRNA sense strand
gguaugaagcccagaagcu

SEQ ID NO: 1678519 - RNA, 19 nt, Homo sapiens
  misc_RNA (1)...(19): siRNA sense strand
acggaggugugaccaugaa

SEQ ID NO: 1678520 - RNA, 19 nt, Homo sapiens
  misc_RNA (1)...(19): siRNA sense strand
gcgcaccgacuuccugucu

SEQ ID NO: 1678521 - RNA, 19 nt, Homo sapiens
  misc_RNA (1)...(19): siRNA sense strand
ugaagaauguggacaaggu

SEQ ID NO: 1678522 - RNA, 19 nt, Homo sapiens
  misc_RNA (1)...(19): siRNA sense strand
gcgcggagaucaccuacac

SEQ ID NO: 1678523 - RNA, 19 nt, Homo sapiens
  misc_RNA (1)...(19): siRNA sense strand
gcaugaccuucacgagcaa

SEQ ID NO: 1678524 - RNA, 19 nt, Homo sapiens
  misc_RNA (1)...(19): siRNA sense strand
ucggugagguggcgcaugu

SEQ ID NO: 1678525 - RNA, 19 nt, Homo sapiens
  misc_RNA (1)...(19): siRNA sense strand
cccugucgcugaagaaugu

SEQ ID NO: 1678526 - RNA, 19 nt, Homo sapiens
  misc_RNA (1)...(19): siRNA sense strand
gcugaagaauguggacaag

SEQ ID NO: 1678527 - RNA, 19 nt, Homo sapiens
  misc_RNA (1)...(19): siRNA sense strand
gaggcaggcgccaucauca

SEQ ID NO: 1678528 - RNA, 19 nt, Homo sapiens
  misc_RNA (1)...(19): siRNA sense strand
acccagagccgaacacugu

SEQ ID NO: 1678529 - RNA, 19 nt, Homo sapiens
  misc_RNA (1)...(19): siRNA sense strand
ggugccuccuguuguguau

SEQ ID NO: 1678530 - RNA, 19 nt, Homo sapiens
  misc_RNA (1)...(19): siRNA sense strand
gguaugaagcccagaagcu

SEQ ID NO: 1678531 - RNA, 19 nt, Homo sapiens
  misc_RNA (1)...(19): siRNA sense strand
acggaggugugaccaugaa

SEQ ID NO: 1678532 - RNA, 19 nt, Homo sapiens
  misc_RNA (1)...(19): siRNA sense strand
gcgcaccgacuuccugucu

SEQ ID NO: 1678533 - RNA, 19 nt, Homo sapiens
  misc_RNA (1)...(19): siRNA sense strand
gaagaagcgcuuugaggaa

SEQ ID NO: 1678534 - RNA, 19 nt, Homo sapiens
  misc_RNA (1)...(19): siRNA sense strand
gcaauaaguccauggagau

SEQ ID NO: 1678535 - RNA, 19 nt, Homo sapiens
  misc_RNA (1)...(19): siRNA sense strand
ugaagaauguggacaaggu

SEQ ID NO: 1678536 - RNA, 19 nt, Homo sapiens
  misc_RNA (1)...(19): siRNA sense strand
ggcgguaccugcagaugaa

SEQ ID NO: 1678537 - RNA, 19 nt, Homo sapiens
  misc_RNA (1)...(19): siRNA sense strand
ccauggagaucgagguguu

SEQ ID NO: 1678538 - RNA, 19 nt, Homo sapiens
  misc_RNA (1)...(19): siRNA sense strand
ccagugccuucuucaccua

SEQ ID NO: 1678539 - RNA, 19 nt, Homo sapiens
  misc_RNA (1)...(19): siRNA sense strand
gcgcggagaucaccuacac

SEQ ID NO: 1678540 - RNA, 19 nt, Homo sapiens
  misc_RNA (1)...(19): siRNA sense strand
gcaugaccuucacgagcaa

SEQ ID NO: 1678541 - RNA, 19 nt, Homo sapiens
  misc_RNA (1)...(19): siRNA sense strand
gggcgguaccugcagauga

SEQ ID NO: 1678542 - RNA, 19 nt, Homo sapiens
  misc_RNA (1)...(19): siRNA sense strand
ucggugagguggcgcaugu

SEQ ID NO: 1678543 - RNA, 19 nt, Homo sapiens
  misc_RNA (1)...(19): siRNA sense strand
cccugucgcugaagaaugu

SEQ ID NO: 1678544 - RNA, 19 nt, Homo sapiens
  misc_RNA (1)...(19): siRNA sense strand
gcugaagaauguggacaag

SEQ ID NO: 1678545 - RNA, 19 nt, Homo sapiens
  misc_RNA (1)...(19): siRNA sense strand
agaccgaggacgagaagaa

SEQ ID NO: 1678546 - RNA, 19 nt, Homo sapiens
  misc_RNA (1)...(19): siRNA sense strand
gaggcaggcgccaucauca

SEQ ID NO: 1678547 - RNA, 19 nt, Homo sapiens
  misc_RNA (1)...(19): siRNA sense strand
acccagagccgaacacugu

SEQ ID NO: 1678548 - RNA, 19 nt, Homo sapiens
  misc_RNA (1)...(19): siRNA sense strand
ggugccuccuguuguguau

SEQ ID NO: 1678549 - RNA, 19 nt, Homo sapiens
  misc_RNA (1)...(19): siRNA sense strand
ggacgagaagaagcgcuuu

SEQ ID NO: 1678550 - RNA, 19 nt, Homo sapiens
  misc_RNA (1)...(19): siRNA sense strand
gguaugaagcccagaagcu

SEQ ID NO: 1678551 - RNA, 19 nt, Homo sapiens
  misc_RNA (1)...(19): siRNA sense strand
auaaguccauggagaucga

SEQ ID NO: 1678552 - RNA, 19 nt, Homo sapiens
  misc_RNA (1)...(19): siRNA sense strand
acggaggugugaccaugaa

SEQ ID NO: 1678553 - RNA, 19 nt, Homo sapiens
  misc_RNA (1)...(19): siRNA sense strand
gcgcaccgacuuccugucu

SEQ ID NO: 1678554 - RNA, 19 nt, Homo sapiens
  misc_RNA (1)...(19): siRNA sense strand
gacgagaagaagcgcuuug

SEQ ID NO: 1678555 - RNA, 19 nt, Homo sapiens
  misc_RNA (1)...(19): siRNA sense strand
gaagaagcgcuuugaggaa

SEQ ID NO: 1678556 - RNA, 19 nt, Homo sapiens
  misc_RNA (1)...(19): siRNA sense strand
gcaauaaguccauggagau

SEQ ID NO: 1678557 - RNA, 19 nt, Homo sapiens
  misc_RNA (1)...(19): siRNA sense strand
ugaagaauguggacaaggu

SEQ ID NO: 1678558 - RNA, 19 nt, Homo sapiens
  misc_RNA (1)...(19): siRNA sense strand
ggcgguaccugcagaugaa

SEQ ID NO: 1678559 - RNA, 19 nt, Homo sapiens
  misc_RNA (1)...(19): siRNA sense strand
ccauggagaucgagguguu

SEQ ID NO: 1678560 - RNA, 19 nt, Homo sapiens
  misc_RNA (1)...(19): siRNA sense strand
ccagugccuucuucaccua

SEQ ID NO: 1678561 - RNA, 19 nt, Homo sapiens
  misc_RNA (1)...(19): siRNA sense strand
gcgcggagaucaccuacac

SEQ ID NO: 1678562 - RNA, 19 nt, Homo sapiens
  misc_RNA (1)...(19): siRNA sense strand
gcaugaccuucacgagcaa

SEQ ID NO: 1678563 - RNA, 19 nt, Homo sapiens
  misc_RNA (1)...(19): siRNA sense strand
gggcgguaccugcagauga

SEQ ID NO: 1678564 - RNA, 19 nt, Homo sapiens
  misc_RNA (1)...(19): siRNA sense strand
ucggugagguggcgcaugu

SEQ ID NO: 1678565 - RNA, 19 nt, Homo sapiens
  misc_RNA (1)...(19): siRNA sense strand
cccugucgcugaagaaugu

SEQ ID NO: 1678566 - RNA, 19 nt, Homo sapiens
  misc_RNA (1)...(19): siRNA sense strand
gcugaagaauguggacaag

SEQ ID NO: 1678567 - RNA, 19 nt, Homo sapiens
  misc_RNA (1)...(19): siRNA sense strand
agaccgaggacgagaagaa

SEQ ID NO: 1678568 - RNA, 19 nt, Homo sapiens
  misc_RNA (1)...(19): siRNA sense strand
gaggcaggcgccaucauca

SEQ ID NO: 1678569 - RNA, 19 nt, Homo sapiens
  misc_RNA (1)...(19): siRNA sense strand
acccagagccgaacacugu

SEQ ID NO: 1678570 - RNA, 19 nt, Homo sapiens
  misc_RNA (1)...(19): siRNA sense strand
ggugccuccuguuguguau

SEQ ID NO: 1678571 - RNA, 19 nt, Homo sapiens
  misc_RNA (1)...(19): siRNA sense strand
ggacgagaagaagcgcuuu

SEQ ID NO: 1678572 - RNA, 19 nt, Homo sapiens
  misc_RNA (1)...(19): siRNA sense strand
gguaugaagcccagaagcu

SEQ ID NO: 1678573 - RNA, 19 nt, Homo sapiens
  misc_RNA (1)...(19): siRNA sense strand
auaaguccauggagaucga

SEQ ID NO: 1678574 - RNA, 19 nt, Homo sapiens
  misc_RNA (1)...(19): siRNA sense strand
acggaggugugaccaugaa

SEQ ID NO: 1678575 - RNA, 19 nt, Homo sapiens
  misc_RNA (1)...(19): siRNA sense strand
gcgcaccgacuuccugucu

SEQ ID NO: 1678576 - RNA, 19 nt, Homo sapiens
  misc_RNA (1)...(19): siRNA sense strand
gacgagaagaagcgcuuug

SEQ ID NO: 1678577 - RNA, 19 nt, Homo sapiens
  misc_RNA (1)...(19): siRNA sense strand
gaagaagcgcuuugaggaa

SEQ ID NO: 1678578 - RNA, 19 nt, Homo sapiens
  misc_RNA (1)...(19): siRNA sense strand
gcaauaaguccauggagau

SEQ ID NO: 1678579 - RNA, 19 nt, Homo sapiens
  misc_RNA (1)...(19): siRNA sense strand
ugaagaauguggacaaggu

SEQ ID NO: 1678580 - RNA, 19 nt, Homo sapiens
  misc_RNA (1)...(19): siRNA sense strand
ggcgguaccugcagaugaa

SEQ ID NO: 1678581 - RNA, 19 nt, Homo sapiens
  misc_RNA (1)...(19): siRNA sense strand
ccauggagaucgagguguu

SEQ ID NO: 1678582 - RNA, 19 nt, Homo sapiens
  misc_RNA (1)...(19): siRNA sense strand
ccagugccuucuucaccua

SEQ ID NO: 1678583 - RNA, 19 nt, Homo sapiens
  misc_RNA (1)...(19): siRNA sense strand
gcgcggagaucaccuacac

SEQ ID NO: 1678584 - RNA, 19 nt, Homo sapiens
  misc_RNA (1)...(19): siRNA sense strand
gcaugaccuucacgagcaa

SEQ ID NO: 1678585 - RNA, 19 nt, Homo sapiens
  misc_RNA (1)...(19): siRNA sense strand
gggcgguaccugcagauga

SEQ ID NO: 1678586 - RNA, 19 nt, Homo sapiens
  misc_RNA (1)...(19): siRNA sense strand
ucggugagguggcgcaugu

SEQ ID NO: 1678587 - RNA, 19 nt, Homo sapiens
  misc_RNA (1)...(19): siRNA sense strand
cccugucgcugaagaaugu

SEQ ID NO: 1678588 - RNA, 19 nt, Homo sapiens
  misc_RNA (1)...(19): siRNA sense strand
gcugaagaauguggacaag

SEQ ID NO: 1678589 - RNA, 19 nt, Homo sapiens
  misc_RNA (1)...(19): siRNA sense strand
agaccgaggacgagaagaa

SEQ ID NO: 1678590 - RNA, 19 nt, Homo sapiens
  misc_RNA (1)...(19): siRNA sense strand
gaggcaggcgccaucauca

SEQ ID NO: 1678591 - RNA, 19 nt, Homo sapiens
  misc_RNA (1)...(19): siRNA sense strand
acccagagccgaacacugu

SEQ ID NO: 1678592 - RNA, 19 nt, Homo sapiens
  misc_RNA (1)...(19): siRNA sense strand
ggugccuccuguuguguau

SEQ ID NO: 1678593 - RNA, 19 nt, Homo sapiens
  misc_RNA (1)...(19): siRNA sense strand
ggacgagaagaagcgcuuu

SEQ ID NO: 1678594 - RNA, 19 nt, Homo sapiens
  misc_RNA (1)...(19): siRNA sense strand
gguaugaagcccagaagcu

SEQ ID NO: 1678595 - RNA, 19 nt, Homo sapiens
  misc_RNA (1)...(19): siRNA sense strand
auaaguccauggagaucga

SEQ ID NO: 1678596 - RNA, 19 nt, Homo sapiens
  misc_RNA (1)...(19): siRNA sense strand
acggaggugugaccaugaa

SEQ ID NO: 1678597 - RNA, 19 nt, Homo sapiens
  misc_RNA (1)...(19): siRNA sense strand
gcgcaccgacuuccugucu

SEQ ID NO: 1678598 - RNA, 19 nt, Homo sapiens
  misc_RNA (1)...(19): siRNA sense strand
gacgagaagaagcgcuuug

SEQ ID NO: 1678599 - RNA, 19 nt, Homo sapiens
  misc_RNA (1)...(19): siRNA sense strand
gaagaagcgcuuugaggaa

SEQ ID NO: 1678600 - RNA, 19 nt, Homo sapiens
  misc_RNA (1)...(19): siRNA sense strand
gcaauaaguccauggagau

SEQ ID NO: 1678601 - RNA, 19 nt, Homo sapiens
  misc_RNA (1)...(19): siRNA sense strand
ugaagaauguggacaaggu

SEQ ID NO: 1678602 - RNA, 19 nt, Homo sapiens
  misc_RNA (1)...(19): siRNA sense strand
ggcgguaccugcagaugaa

SEQ ID NO: 1678603 - RNA, 19 nt, Homo sapiens
  misc_RNA (1)...(19): siRNA sense strand
ccauggagaucgagguguu

SEQ ID NO: 1678604 - RNA, 19 nt, Homo sapiens
  misc_RNA (1)...(19): siRNA sense strand
ccagugccuucuucaccua

SEQ ID NO: 1678605 - RNA, 19 nt, Homo sapiens
  misc_RNA (1)...(19): siRNA sense strand
gcgcggagaucaccuacac

SEQ ID NO: 1678606 - RNA, 19 nt, Homo sapiens
  misc_RNA (1)...(19): siRNA sense strand
gcaugaccuucacgagcaa

SEQ ID NO: 1678607 - RNA, 19 nt, Homo sapiens
  misc_RNA (1)...(19): siRNA sense strand
gggcgguaccugcagauga

SEQ ID NO: 1678608 - RNA, 19 nt, Homo sapiens
  misc_RNA (1)...(19): siRNA sense strand
ucggugagguggcgcaugu

SEQ ID NO: 1678609 - RNA, 19 nt, Homo sapiens
  misc_RNA (1)...(19): siRNA sense strand
cccugucgcugaagaaugu

SEQ ID NO: 1678610 - RNA, 19 nt, Homo sapiens
  misc_RNA (1)...(19): siRNA sense strand
gcugaagaauguggacaag

SEQ ID NO: 1678611 - RNA, 19 nt, Homo sapiens
  misc_RNA (1)...(19): siRNA sense strand
agaccgaggacgagaagaa

SEQ ID NO: 1678612 - RNA, 19 nt, Homo sapiens
  misc_RNA (1)...(19): siRNA sense strand
gaggcaggcgccaucauca

SEQ ID NO: 1678613 - RNA, 19 nt, Homo sapiens
  misc_RNA (1)...(19): siRNA sense strand
acccagagccgaacacugu

SEQ ID NO: 1678614 - RNA, 19 nt, Homo sapiens
  misc_RNA (1)...(19): siRNA sense strand
ggugccuccuguuguguau

SEQ ID NO: 1678615 - RNA, 19 nt, Homo sapiens
  misc_RNA (1)...(19): siRNA sense strand
ggacgagaagaagcgcuuu

SEQ ID NO: 1678616 - RNA, 19 nt, Homo sapiens
  misc_RNA (1)...(19): siRNA sense strand
gguaugaagcccagaagcu

SEQ ID NO: 1678617 - RNA, 19 nt, Homo sapiens
  misc_RNA (1)...(19): siRNA sense strand
auaaguccauggagaucga

SEQ ID NO: 1678618 - RNA, 19 nt, Homo sapiens
  misc_RNA (1)...(19): siRNA sense strand
acggaggugugaccaugaa

SEQ ID NO: 1678619 - RNA, 19 nt, Homo sapiens
  misc_RNA (1)...(19): siRNA sense strand
gcgcaccgacuuccugucu

SEQ ID NO: 1678620 - RNA, 19 nt, Homo sapiens
  misc_RNA (1)...(19): siRNA sense strand
gacgagaagaagcgcuuug

SEQ ID NO: 1678621 - RNA, 19 nt, Homo sapiens
  misc_RNA (1)...(19): siRNA sense strand
ugaagaauguggacaaggu

SEQ ID NO: 1678622 - RNA, 19 nt, Homo sapiens
  misc_RNA (1)...(19): siRNA sense strand
gcgcggagaucaccuacac

SEQ ID NO: 1678623 - RNA, 19 nt, Homo sapiens
  misc_RNA (1)...(19): siRNA sense strand
ucggugagguggcgcaugu

SEQ ID NO: 1678624 - RNA, 19 nt, Homo sapiens
  misc_RNA (1)...(19): siRNA sense strand
cccugucgcugaagaaugu

SEQ ID NO: 1678625 - RNA, 19 nt, Homo sapiens
  misc_RNA (1)...(19): siRNA sense strand
gcugaagaauguggacaag

SEQ ID NO: 1678626 - RNA, 19 nt, Homo sapiens
  misc_RNA (1)...(19): siRNA sense strand
gaggcaggcgccaucauca

SEQ ID NO: 1678627 - RNA, 19 nt, Homo sapiens
  misc_RNA (1)...(19): siRNA sense strand
acccagagccgaacacugu

SEQ ID NO: 1678628 - RNA, 19 nt, Homo sapiens
  misc_RNA (1)...(19): siRNA sense strand
ggugccuccuguuguguau

SEQ ID NO: 1678629 - RNA, 19 nt, Homo sapiens
  misc_RNA (1)...(19): siRNA sense strand
gguaugaagcccagaagcu

SEQ ID NO: 1678630 - RNA, 19 nt, Homo sapiens
  misc_RNA (1)...(19): siRNA sense strand
acggaggugugaccaugaa

SEQ ID NO: 1678631 - RNA, 19 nt, Homo sapiens
  misc_RNA (1)...(19): siRNA sense strand
gcgcaccgacuuccugucu

SEQ ID NO: 1678632 - RNA, 19 nt, Homo sapiens
  misc_RNA (1)...(19): siRNA sense strand
ugaagaauguggacaaggu

SEQ ID NO: 1678633 - RNA, 19 nt, Homo sapiens
  misc_RNA (1)...(19): siRNA sense strand
gcgcggagaucaccuacac

SEQ ID NO: 1678634 - RNA, 19 nt, Homo sapiens
  misc_RNA (1)...(19): siRNA sense strand
gcaugaccuucacgagcaa

SEQ ID NO: 1678635 - RNA, 19 nt, Homo sapiens
  misc_RNA (1)...(19): siRNA sense strand
ucggugagguggcgcaugu

SEQ ID NO: 1678636 - RNA, 19 nt, Homo sapiens
  misc_RNA (1)...(19): siRNA sense strand
cccugucgcugaagaaugu

SEQ ID NO: 1678637 - RNA, 19 nt, Homo sapiens
  misc_RNA (1)...(19): siRNA sense strand
gcugaagaauguggacaag

SEQ ID NO: 1678638 - RNA, 19 nt, Homo sapiens
  misc_RNA (1)...(19): siRNA sense strand
gaggcaggcgccaucauca

SEQ ID NO: 1678639 - RNA, 19 nt, Homo sapiens
  misc_RNA (1)...(19): siRNA sense strand
acccagagccgaacacugu

SEQ ID NO: 1678640 - RNA, 19 nt, Homo sapiens
  misc_RNA (1)...(19): siRNA sense strand
ggugccuccuguuguguau

SEQ ID NO: 1678641 - RNA, 19 nt, Homo sapiens
  misc_RNA (1)...(19): siRNA sense strand
gguaugaagcccagaagcu

SEQ ID NO: 1678642 - RNA, 19 nt, Homo sapiens
  misc_RNA (1)...(19): siRNA sense strand
acggaggugugaccaugaa

SEQ ID NO: 1678643 - RNA, 19 nt, Homo sapiens
  misc_RNA (1)...(19): siRNA sense strand
gcgcaccgacuuccugucu

SEQ ID NO: 1678644 - RNA, 19 nt, Homo sapiens
  misc_RNA (1)...(19): siRNA sense strand
gaagaagcgcuuugaggaa

SEQ ID NO: 1678645 - RNA, 19 nt, Homo sapiens
  misc_RNA (1)...(19): siRNA sense strand
gcaauaaguccauggagau

SEQ ID NO: 1678646 - RNA, 19 nt, Homo sapiens
  misc_RNA (1)...(19): siRNA sense strand
ugaagaauguggacaaggu

SEQ ID NO: 1678647 - RNA, 19 nt, Homo sapiens
  misc_RNA (1)...(19): siRNA sense strand
ggcgguaccugcagaugaa

SEQ ID NO: 1678648 - RNA, 19 nt, Homo sapiens
  misc_RNA (1)...(19): siRNA sense strand
ccauggagaucgagguguu

SEQ ID NO: 1678649 - RNA, 19 nt, Homo sapiens
  misc_RNA (1)...(19): siRNA sense strand
ccagugccuucuucaccua

SEQ ID NO: 1678650 - RNA, 19 nt, Homo sapiens
  misc_RNA (1)...(19): siRNA sense strand
gcgcggagaucaccuacac

SEQ ID NO: 1678651 - RNA, 19 nt, Homo sapiens
  misc_RNA (1)...(19): siRNA sense strand
gcaugaccuucacgagcaa

SEQ ID NO: 1678652 - RNA, 19 nt, Homo sapiens
  misc_RNA (1)...(19): siRNA sense strand
gggcgguaccugcagauga

SEQ ID NO: 1678653 - RNA, 19 nt, Homo sapiens
  misc_RNA (1)...(19): siRNA sense strand
ucggugagguggcgcaugu

SEQ ID NO: 1678654 - RNA, 19 nt, Homo sapiens
  misc_RNA (1)...(19): siRNA sense strand
cccugucgcugaagaaugu

SEQ ID NO: 1678655 - RNA, 19 nt, Homo sapiens
  misc_RNA (1)...(19): siRNA sense strand
gcugaagaauguggacaag

SEQ ID NO: 1678656 - RNA, 19 nt, Homo sapiens
  misc_RNA (1)...(19): siRNA sense strand
agaccgaggacgagaagaa

SEQ ID NO: 1678657 - RNA, 19 nt, Homo sapiens
  misc_RNA (1)...(19): siRNA sense strand
gaggcaggcgccaucauca

SEQ ID NO: 1678658 - RNA, 19 nt, Homo sapiens
  misc_RNA (1)...(19): siRNA sense strand
acccagagccgaacacugu

SEQ ID NO: 1678659 - RNA, 19 nt, Homo sapiens
  misc_RNA (1)...(19): siRNA sense strand
ggugccuccuguuguguau

SEQ ID NO: 1678660 - RNA, 19 nt, Homo sapiens
  misc_RNA (1)...(19): siRNA sense strand
ggacgagaagaagcgcuuu

SEQ ID NO: 1678661 - RNA, 19 nt, Homo sapiens
  misc_RNA (1)...(19): siRNA sense strand
gguaugaagcccagaagcu

SEQ ID NO: 1678662 - RNA, 19 nt, Homo sapiens
  misc_RNA (1)...(19): siRNA sense strand
auaaguccauggagaucga

SEQ ID NO: 1678663 - RNA, 19 nt, Homo sapiens
  misc_RNA (1)...(19): siRNA sense strand
acggaggugugaccaugaa

SEQ ID NO: 1678664 - RNA, 19 nt, Homo sapiens
  misc_RNA (1)...(19): siRNA sense strand
gcgcaccgacuuccugucu

SEQ ID NO: 1678665 - RNA, 19 nt, Homo sapiens
  misc_RNA (1)...(19): siRNA sense strand
gacgagaagaagcgcuuug

SEQ ID NO: 1678666 - RNA, 19 nt, Homo sapiens
  misc_RNA (1)...(19): siRNA sense strand
gaagaagcgcuuugaggaa

SEQ ID NO: 1678667 - RNA, 19 nt, Homo sapiens
  misc_RNA (1)...(19): siRNA sense strand
gcaauaaguccauggagau

SEQ ID NO: 1678668 - RNA, 19 nt, Homo sapiens
  misc_RNA (1)...(19): siRNA sense strand
ugaagaauguggacaaggu

SEQ ID NO: 1678669 - RNA, 19 nt, Homo sapiens
  misc_RNA (1)...(19): siRNA sense strand
ggcgguaccugcagaugaa

SEQ ID NO: 1678670 - RNA, 19 nt, Homo sapiens
  misc_RNA (1)...(19): siRNA sense strand
ccauggagaucgagguguu

SEQ ID NO: 1678671 - RNA, 19 nt, Homo sapiens
  misc_RNA (1)...(19): siRNA sense strand
ccagugccuucuucaccua

SEQ ID NO: 1678672 - RNA, 19 nt, Homo sapiens
  misc_RNA (1)...(19): siRNA sense strand
gcgcggagaucaccuacac

SEQ ID NO: 1678673 - RNA, 19 nt, Homo sapiens
  misc_RNA (1)...(19): siRNA sense strand
gcaugaccuucacgagcaa

SEQ ID NO: 1678674 - RNA, 19 nt, Homo sapiens
  misc_RNA (1)...(19): siRNA sense strand
gggcgguaccugcagauga

SEQ ID NO: 1678675 - RNA, 19 nt, Homo sapiens
  misc_RNA (1)...(19): siRNA sense strand
ucggugagguggcgcaugu

SEQ ID NO: 1678676 - RNA, 19 nt, Homo sapiens
  misc_RNA (1)...(19): siRNA sense strand
cccugucgcugaagaaugu

SEQ ID NO: 1678677 - RNA, 19 nt, Homo sapiens
  misc_RNA (1)...(19): siRNA sense strand
gcugaagaauguggacaag

SEQ ID NO: 1678678 - RNA, 19 nt, Homo sapiens
  misc_RNA (1)...(19): siRNA sense strand
agaccgaggacgagaagaa

SEQ ID NO: 1678679 - RNA, 19 nt, Homo sapiens
  misc_RNA (1)...(19): siRNA sense strand
gaggcaggcgccaucauca

SEQ ID NO: 1678680 - RNA, 19 nt, Homo sapiens
  misc_RNA (1)...(19): siRNA sense strand
acccagagccgaacacugu

SEQ ID NO: 1678681 - RNA, 19 nt, Homo sapiens
  misc_RNA (1)...(19): siRNA sense strand
ggugccuccuguuguguau

SEQ ID NO: 1678682 - RNA, 19 nt, Homo sapiens
  misc_RNA (1)...(19): siRNA sense strand
ggacgagaagaagcgcuuu

SEQ ID NO: 1678683 - RNA, 19 nt, Homo sapiens
  misc_RNA (1)...(19): siRNA sense strand
gguaugaagcccagaagcu

SEQ ID NO: 1678684 - RNA, 19 nt, Homo sapiens
  misc_RNA (1)...(19): siRNA sense strand
auaaguccauggagaucga

SEQ ID NO: 1678685 - RNA, 19 nt, Homo sapiens
  misc_RNA (1)...(19): siRNA sense strand
acggaggugugaccaugaa

SEQ ID NO: 1678686 - RNA, 19 nt, Homo sapiens
  misc_RNA (1)...(19): siRNA sense strand
gcgcaccgacuuccugucu

SEQ ID NO: 1678687 - RNA, 19 nt, Homo sapiens
  misc_RNA (1)...(19): siRNA sense strand
gacgagaagaagcgcuuug

SEQ ID NO: 1678688 - RNA, 19 nt, Homo sapiens
  misc_RNA (1)...(19): siRNA sense strand
gaagaagcgcuuugaggaa

SEQ ID NO: 1678689 - RNA, 19 nt, Homo sapiens
  misc_RNA (1)...(19): siRNA sense strand
gcaauaaguccauggagau

SEQ ID NO: 1678690 - RNA, 19 nt, Homo sapiens
  misc_RNA (1)...(19): siRNA sense strand
ugaagaauguggacaaggu

SEQ ID NO: 1678691 - RNA, 19 nt, Homo sapiens
  misc_RNA (1)...(19): siRNA sense strand
ggcgguaccugcagaugaa

SEQ ID NO: 1678692 - RNA, 19 nt, Homo sapiens
  misc_RNA (1)...(19): siRNA sense strand
ccauggagaucgagguguu

SEQ ID NO: 1678693 - RNA, 19 nt, Homo sapiens
  misc_RNA (1)...(19): siRNA sense strand
ccagugccuucuucaccua

SEQ ID NO: 1678694 - RNA, 19 nt, Homo sapiens
  misc_RNA (1)...(19): siRNA sense strand
gcgcggagaucaccuacac

SEQ ID NO: 1678695 - RNA, 19 nt, Homo sapiens
  misc_RNA (1)...(19): siRNA sense strand
gcaugaccuucacgagcaa

SEQ ID NO: 1678696 - RNA, 19 nt, Homo sapiens
  misc_RNA (1)...(19): siRNA sense strand
gggcgguaccugcagauga

SEQ ID NO: 1678697 - RNA, 19 nt, Homo sapiens
  misc_RNA (1)...(19): siRNA sense strand
ucggugagguggcgcaugu

SEQ ID NO: 1678698 - RNA, 19 nt, Homo sapiens
  misc_RNA (1)...(19): siRNA sense strand
cccugucgcugaagaaugu

SEQ ID NO: 1678699 - RNA, 19 nt, Homo sapiens
  misc_RNA (1)...(19): siRNA sense strand
gcugaagaauguggacaag

SEQ ID NO: 1678700 - RNA, 19 nt, Homo sapiens
  misc_RNA (1)...(19): siRNA sense strand
agaccgaggacgagaagaa

SEQ ID NO: 1678701 - RNA, 19 nt, Homo sapiens
  misc_RNA (1)...(19): siRNA sense strand
gaggcaggcgccaucauca

SEQ ID NO: 1678702 - RNA, 19 nt, Homo sapiens
  misc_RNA (1)...(19): siRNA sense strand
acccagagccgaacacugu

SEQ ID NO: 1678703 - RNA, 19 nt, Homo sapiens
  misc_RNA (1)...(19): siRNA sense strand
ggugccuccuguuguguau

SEQ ID NO: 1678704 - RNA, 19 nt, Homo sapiens
  misc_RNA (1)...(19): siRNA sense strand
ggacgagaagaagcgcuuu

SEQ ID NO: 1678705 - RNA, 19 nt, Homo sapiens
  misc_RNA (1)...(19): siRNA sense strand
gguaugaagcccagaagcu

SEQ ID NO: 1678706 - RNA, 19 nt, Homo sapiens
  misc_RNA (1)...(19): siRNA sense strand
auaaguccauggagaucga

SEQ ID NO: 1678707 - RNA, 19 nt, Homo sapiens
  misc_RNA (1)...(19): siRNA sense strand
acggaggugugaccaugaa

SEQ ID NO: 1678708 - RNA, 19 nt, Homo sapiens
  misc_RNA (1)...(19): siRNA sense strand
gcgcaccgacuuccugucu

SEQ ID NO: 1678709 - RNA, 19 nt, Homo sapiens
  misc_RNA (1)...(19): siRNA sense strand
gacgagaagaagcgcuuug

SEQ ID NO: 1678710 - RNA, 19 nt, Homo sapiens
  misc_RNA (1)...(19): siRNA sense strand
gaagaagcgcuuugaggaa

SEQ ID NO: 1678711 - RNA, 19 nt, Homo sapiens
  misc_RNA (1)...(19): siRNA sense strand
gcaauaaguccauggagau

SEQ ID NO: 1678712 - RNA, 19 nt, Homo sapiens
  misc_RNA (1)...(19): siRNA sense strand
ugaagaauguggacaaggu

SEQ ID NO: 1678713 - RNA, 19 nt, Homo sapiens
  misc_RNA (1)...(19): siRNA sense strand
ggcgguaccugcagaugaa

SEQ ID NO: 1678714 - RNA, 19 nt, Homo sapiens
  misc_RNA (1)...(19): siRNA sense strand
ccauggagaucgagguguu

SEQ ID NO: 1678715 - RNA, 19 nt, Homo sapiens
  misc_RNA (1)...(19): siRNA sense strand
ccagugccuucuucaccua

SEQ ID NO: 1678716 - RNA, 19 nt, Homo sapiens
  misc_RNA (1)...(19): siRNA sense strand
gcgcggagaucaccuacac

SEQ ID NO: 1678717 - RNA, 19 nt, Homo sapiens
  misc_RNA (1)...(19): siRNA sense strand
gcaugaccuucacgagcaa

SEQ ID NO: 1678718 - RNA, 19 nt, Homo sapiens
  misc_RNA (1)...(19): siRNA sense strand
gggcgguaccugcagauga

SEQ ID NO: 1678719 - RNA, 19 nt, Homo sapiens
  misc_RNA (1)...(19): siRNA sense strand
ucggugagguggcgcaugu

SEQ ID NO: 1678720 - RNA, 19 nt, Homo sapiens
  misc_RNA (1)...(19): siRNA sense strand
cccugucgcugaagaaugu

SEQ ID NO: 1678721 - RNA, 19 nt, Homo sapiens
  misc_RNA (1)...(19): siRNA sense strand
gcugaagaauguggacaag

SEQ ID NO: 1678722 - RNA, 19 nt, Homo sapiens
  misc_RNA (1)...(19): siRNA sense strand
agaccgaggacgagaagaa

SEQ ID NO: 1678723 - RNA, 19 nt, Homo sapiens
  misc_RNA (1)...(19): siRNA sense strand
gaggcaggcgccaucauca

SEQ ID NO: 1678724 - RNA, 19 nt, Homo sapiens
  misc_RNA (1)...(19): siRNA sense strand
acccagagccgaacacugu

SEQ ID NO: 1678725 - RNA, 19 nt, Homo sapiens
  misc_RNA (1)...(19): siRNA sense strand
ggugccuccuguuguguau

SEQ ID NO: 1678726 - RNA, 19 nt, Homo sapiens
  misc_RNA (1)...(19): siRNA sense strand
ggacgagaagaagcgcuuu

SEQ ID NO: 1678727 - RNA, 19 nt, Homo sapiens
  misc_RNA (1)...(19): siRNA sense strand
gguaugaagcccagaagcu

SEQ ID NO: 1678728 - RNA, 19 nt, Homo sapiens
  misc_RNA (1)...(19): siRNA sense strand
auaaguccauggagaucga

SEQ ID NO: 1678729 - RNA, 19 nt, Homo sapiens
  misc_RNA (1)...(19): siRNA sense strand
acggaggugugaccaugaa

SEQ ID NO: 1678730 - RNA, 19 nt, Homo sapiens
  misc_RNA (1)...(19): siRNA sense strand
gcgcaccgacuuccugucu

SEQ ID NO: 1678731 - RNA, 19 nt, Homo sapiens
  misc_RNA (1)...(19): siRNA sense strand
gacgagaagaagcgcuuug

SEQ ID NO: 1678732 - RNA, 19 nt, Homo sapiens
  misc_RNA (1)...(19): siRNA sense strand
ugaagaauguggacaaggu

SEQ ID NO: 1678733 - RNA, 19 nt, Homo sapiens
  misc_RNA (1)...(19): siRNA sense strand
gcgcggagaucaccuacac

SEQ ID NO: 1678734 - RNA, 19 nt, Homo sapiens
  misc_RNA (1)...(19): siRNA sense strand
ucggugagguggcgcaugu

SEQ ID NO: 1678735 - RNA, 19 nt, Homo sapiens
  misc_RNA (1)...(19): siRNA sense strand
cccugucgcugaagaaugu

SEQ ID NO: 1678736 - RNA, 19 nt, Homo sapiens
  misc_RNA (1)...(19): siRNA sense strand
gcugaagaauguggacaag

SEQ ID NO: 1678737 - RNA, 19 nt, Homo sapiens
  misc_RNA (1)...(19): siRNA sense strand
gaggcaggcgccaucauca

SEQ ID NO: 1678738 - RNA, 19 nt, Homo sapiens
  misc_RNA (1)...(19): siRNA sense strand
acccagagccgaacacugu

SEQ ID NO: 1678739 - RNA, 19 nt, Homo sapiens
  misc_RNA (1)...(19): siRNA sense strand
ggugccuccuguuguguau

SEQ ID NO: 1678740 - RNA, 19 nt, Homo sapiens
  misc_RNA (1)...(19): siRNA sense strand
gguaugaagcccagaagcu

SEQ ID NO: 1678741 - RNA, 19 nt, Homo sapiens
  misc_RNA (1)...(19): siRNA sense strand
acggaggugugaccaugaa

SEQ ID NO: 1678742 - RNA, 19 nt, Homo sapiens
  misc_RNA (1)...(19): siRNA sense strand
gcgcaccgacuuccugucu

SEQ ID NO: 1678743 - RNA, 19 nt, Homo sapiens
  misc_RNA (1)...(19): siRNA sense strand
ugaagaauguggacaaggu

SEQ ID NO: 1678744 - RNA, 19 nt, Homo sapiens
  misc_RNA (1)...(19): siRNA sense strand
gcgcggagaucaccuacac

SEQ ID NO: 1678745 - RNA, 19 nt, Homo sapiens
  misc_RNA (1)...(19): siRNA sense strand
gcaugaccuucacgagcaa

SEQ ID NO: 1678746 - RNA, 19 nt, Homo sapiens
  misc_RNA (1)...(19): siRNA sense strand
ucggugagguggcgcaugu

SEQ ID NO: 1678747 - RNA, 19 nt, Homo sapiens
  misc_RNA (1)...(19): siRNA sense strand
cccugucgcugaagaaugu

SEQ ID NO: 1678748 - RNA, 19 nt, Homo sapiens
  misc_RNA (1)...(19): siRNA sense strand
gcugaagaauguggacaag

SEQ ID NO: 1678749 - RNA, 19 nt, Homo sapiens
  misc_RNA (1)...(19): siRNA sense strand
gaggcaggcgccaucauca

SEQ ID NO: 1678750 - RNA, 19 nt, Homo sapiens
  misc_RNA (1)...(19): siRNA sense strand
acccagagccgaacacugu

SEQ ID NO: 1678751 - RNA, 19 nt, Homo sapiens
  misc_RNA (1)...(19): siRNA sense strand
ggugccuccuguuguguau

SEQ ID NO: 1678752 - RNA, 19 nt, Homo sapiens
  misc_RNA (1)...(19): siRNA sense strand
gguaugaagcccagaagcu

SEQ ID NO: 1678753 - RNA, 19 nt, Homo sapiens
  misc_RNA (1)...(19): siRNA sense strand
acggaggugugaccaugaa

SEQ ID NO: 1678754 - RNA, 19 nt, Homo sapiens
  misc_RNA (1)...(19): siRNA sense strand
gcgcaccgacuuccugucu

SEQ ID NO: 1678755 - RNA, 19 nt, Homo sapiens
  misc_RNA (1)...(19): siRNA sense strand
gaagaagcgcuuugaggaa

SEQ ID NO: 1678756 - RNA, 19 nt, Homo sapiens
  misc_RNA (1)...(19): siRNA sense strand
gcaauaaguccauggagau

SEQ ID NO: 1678757 - RNA, 19 nt, Homo sapiens
  misc_RNA (1)...(19): siRNA sense strand
ugaagaauguggacaaggu

SEQ ID NO: 1678758 - RNA, 19 nt, Homo sapiens
  misc_RNA (1)...(19): siRNA sense strand
ggcgguaccugcagaugaa

SEQ ID NO: 1678759 - RNA, 19 nt, Homo sapiens
  misc_RNA (1)...(19): siRNA sense strand
ccauggagaucgagguguu

SEQ ID NO: 1678760 - RNA, 19 nt, Homo sapiens
  misc_RNA (1)...(19): siRNA sense strand
ccagugccuucuucaccua

SEQ ID NO: 1678761 - RNA, 19 nt, Homo sapiens
  misc_RNA (1)...(19): siRNA sense strand
gcgcggagaucaccuacac

SEQ ID NO: 1678762 - RNA, 19 nt, Homo sapiens
  misc_RNA (1)...(19): siRNA sense strand
gcaugaccuucacgagcaa

SEQ ID NO: 1678763 - RNA, 19 nt, Homo sapiens
  misc_RNA (1)...(19): siRNA sense strand
gggcgguaccugcagauga

SEQ ID NO: 1678764 - RNA, 19 nt, Homo sapiens
  misc_RNA (1)...(19): siRNA sense strand
ucggugagguggcgcaugu

SEQ ID NO: 1678765 - RNA, 19 nt, Homo sapiens
  misc_RNA (1)...(19): siRNA sense strand
cccugucgcugaagaaugu

SEQ ID NO: 1678766 - RNA, 19 nt, Homo sapiens
  misc_RNA (1)...(19): siRNA sense strand
gcugaagaauguggacaag

SEQ ID NO: 1678767 - RNA, 19 nt, Homo sapiens
  misc_RNA (1)...(19): siRNA sense strand
agaccgaggacgagaagaa

SEQ ID NO: 1678768 - RNA, 19 nt, Homo sapiens
  misc_RNA (1)...(19): siRNA sense strand
gaggcaggcgccaucauca

SEQ ID NO: 1678769 - RNA, 19 nt, Homo sapiens
  misc_RNA (1)...(19): siRNA sense strand
acccagagccgaacacugu

SEQ ID NO: 1678770 - RNA, 19 nt, Homo sapiens
  misc_RNA (1)...(19): siRNA sense strand
ggugccuccuguuguguau

SEQ ID NO: 1678771 - RNA, 19 nt, Homo sapiens
  misc_RNA (1)...(19): siRNA sense strand
ggacgagaagaagcgcuuu

SEQ ID NO: 1678772 - RNA, 19 nt, Homo sapiens
  misc_RNA (1)...(19): siRNA sense strand
gguaugaagcccagaagcu

SEQ ID NO: 1678773 - RNA, 19 nt, Homo sapiens
  misc_RNA (1)...(19): siRNA sense strand
auaaguccauggagaucga

SEQ ID NO: 1678774 - RNA, 19 nt, Homo sapiens
  misc_RNA (1)...(19): siRNA sense strand
acggaggugugaccaugaa

SEQ ID NO: 1678775 - RNA, 19 nt, Homo sapiens
  misc_RNA (1)...(19): siRNA sense strand
gcgcaccgacuuccugucu

SEQ ID NO: 1678776 - RNA, 19 nt, Homo sapiens
  misc_RNA (1)...(19): siRNA sense strand
gacgagaagaagcgcuuug

SEQ ID NO: 1678777 - RNA, 19 nt, Homo sapiens
  misc_RNA (1)...(19): siRNA sense strand
gaagaagcgcuuugaggaa

SEQ ID NO: 1678778 - RNA, 19 nt, Homo sapiens
  misc_RNA (1)...(19): siRNA sense strand
gcaauaaguccauggagau

SEQ ID NO: 1678779 - RNA, 19 nt, Homo sapiens
  misc_RNA (1)...(19): siRNA sense strand
ugaagaauguggacaaggu

SEQ ID NO: 1678780 - RNA, 19 nt, Homo sapiens
  misc_RNA (1)...(19): siRNA sense strand
ggcgguaccugcagaugaa

SEQ ID NO: 1678781 - RNA, 19 nt, Homo sapiens
  misc_RNA (1)...(19): siRNA sense strand
ccauggagaucgagguguu

SEQ ID NO: 1678782 - RNA, 19 nt, Homo sapiens
  misc_RNA (1)...(19): siRNA sense strand
ccagugccuucuucaccua

SEQ ID NO: 1678783 - RNA, 19 nt, Homo sapiens
  misc_RNA (1)...(19): siRNA sense strand
gcgcggagaucaccuacac

SEQ ID NO: 1678784 - RNA, 19 nt, Homo sapiens
  misc_RNA (1)...(19): siRNA sense strand
gcaugaccuucacgagcaa

SEQ ID NO: 1678785 - RNA, 19 nt, Homo sapiens
  misc_RNA (1)...(19): siRNA sense strand
gggcgguaccugcagauga

SEQ ID NO: 1678786 - RNA, 19 nt, Homo sapiens
  misc_RNA (1)...(19): siRNA sense strand
ucggugagguggcgcaugu

SEQ ID NO: 1678787 - RNA, 19 nt, Homo sapiens
  misc_RNA (1)...(19): siRNA sense strand
cccugucgcugaagaaugu

SEQ ID NO: 1678788 - RNA, 19 nt, Homo sapiens
  misc_RNA (1)...(19): siRNA sense strand
gcugaagaauguggacaag

SEQ ID NO: 1678789 - RNA, 19 nt, Homo sapiens
  misc_RNA (1)...(19): siRNA sense strand
agaccgaggacgagaagaa

SEQ ID NO: 1678790 - RNA, 19 nt, Homo sapiens
  misc_RNA (1)...(19): siRNA sense strand
gaggcaggcgccaucauca

SEQ ID NO: 1678791 - RNA, 19 nt, Homo sapiens
  misc_RNA (1)...(19): siRNA sense strand
acccagagccgaacacugu

SEQ ID NO: 1678792 - RNA, 19 nt, Homo sapiens
  misc_RNA (1)...(19): siRNA sense strand
ggugccuccuguuguguau

SEQ ID NO: 1678793 - RNA, 19 nt, Homo sapiens
  misc_RNA (1)...(19): siRNA sense strand
ggacgagaagaagcgcuuu

SEQ ID NO: 1678794 - RNA, 19 nt, Homo sapiens
  misc_RNA (1)...(19): siRNA sense strand
gguaugaagcccagaagcu

SEQ ID NO: 1678795 - RNA, 19 nt, Homo sapiens
  misc_RNA (1)...(19): siRNA sense strand
auaaguccauggagaucga

SEQ ID NO: 1678796 - RNA, 19 nt, Homo sapiens
  misc_RNA (1)...(19): siRNA sense strand
acggaggugugaccaugaa

SEQ ID NO: 1678797 - RNA, 19 nt, Homo sapiens
  misc_RNA (1)...(19): siRNA sense strand
gcgcaccgacuuccugucu

SEQ ID NO: 1678798 - RNA, 19 nt, Homo sapiens
  misc_RNA (1)...(19): siRNA sense strand
gacgagaagaagcgcuuug

SEQ ID NO: 1678799 - RNA, 19 nt, Homo sapiens
  misc_RNA (1)...(19): siRNA sense strand
gaagaagcgcuuugaggaa

SEQ ID NO: 1678800 - RNA, 19 nt, Homo sapiens
  misc_RNA (1)...(19): siRNA sense strand
gcaauaaguccauggagau

SEQ ID NO: 1678801 - RNA, 19 nt, Homo sapiens
  misc_RNA (1)...(19): siRNA sense strand
ugaagaauguggacaaggu

SEQ ID NO: 1678802 - RNA, 19 nt, Homo sapiens
  misc_RNA (1)...(19): siRNA sense strand
ggcgguaccugcagaugaa

SEQ ID NO: 1678803 - RNA, 19 nt, Homo sapiens
  misc_RNA (1)...(19): siRNA sense strand
ccauggagaucgagguguu

SEQ ID NO: 1678804 - RNA, 19 nt, Homo sapiens
  misc_RNA (1)...(19): siRNA sense strand
ccagugccuucuucaccua

SEQ ID NO: 1678805 - RNA, 19 nt, Homo sapiens
  misc_RNA (1)...(19): siRNA sense strand
gcgcggagaucaccuacac

SEQ ID NO: 1678806 - RNA, 19 nt, Homo sapiens
  misc_RNA (1)...(19): siRNA sense strand
gcaugaccuucacgagcaa

SEQ ID NO: 1678807 - RNA, 19 nt, Homo sapiens
  misc_RNA (1)...(19): siRNA sense strand
gggcgguaccugcagauga

SEQ ID NO: 1678808 - RNA, 19 nt, Homo sapiens
  misc_RNA (1)...(19): siRNA sense strand
ucggugagguggcgcaugu

SEQ ID NO: 1678809 - RNA, 19 nt, Homo sapiens
  misc_RNA (1)...(19): siRNA sense strand
cccugucgcugaagaaugu

SEQ ID NO: 1678810 - RNA, 19 nt, Homo sapiens
  misc_RNA (1)...(19): siRNA sense strand
gcugaagaauguggacaag

SEQ ID NO: 1678811 - RNA, 19 nt, Homo sapiens
  misc_RNA (1)...(19): siRNA sense strand
agaccgaggacgagaagaa

SEQ ID NO: 1678812 - RNA, 19 nt, Homo sapiens
  misc_RNA (1)...(19): siRNA sense strand
gaggcaggcgccaucauca

SEQ ID NO: 1678813 - RNA, 19 nt, Homo sapiens
  misc_RNA (1)...(19): siRNA sense strand
acccagagccgaacacugu

SEQ ID NO: 1678814 - RNA, 19 nt, Homo sapiens
  misc_RNA (1)...(19): siRNA sense strand
ggugccuccuguuguguau

SEQ ID NO: 1678815 - RNA, 19 nt, Homo sapiens
  misc_RNA (1)...(19): siRNA sense strand
ggacgagaagaagcgcuuu

SEQ ID NO: 1678816 - RNA, 19 nt, Homo sapiens
  misc_RNA (1)...(19): siRNA sense strand
gguaugaagcccagaagcu

SEQ ID NO: 1678817 - RNA, 19 nt, Homo sapiens
  misc_RNA (1)...(19): siRNA sense strand
auaaguccauggagaucga

SEQ ID NO: 1678818 - RNA, 19 nt, Homo sapiens
  misc_RNA (1)...(19): siRNA sense strand
acggaggugugaccaugaa

SEQ ID NO: 1678819 - RNA, 19 nt, Homo sapiens
  misc_RNA (1)...(19): siRNA sense strand
gcgcaccgacuuccugucu

SEQ ID NO: 1678820 - RNA, 19 nt, Homo sapiens
  misc_RNA (1)...(19): siRNA sense strand
gacgagaagaagcgcuuug

SEQ ID NO: 1678821 - RNA, 19 nt, Homo sapiens
  misc_RNA (1)...(19): siRNA sense strand
gaagaagcgcuuugaggaa

SEQ ID NO: 1678822 - RNA, 19 nt, Homo sapiens
  misc_RNA (1)...(19): siRNA sense strand
gcaauaaguccauggagau

SEQ ID NO: 1678823 - RNA, 19 nt, Homo sapiens
  misc_RNA (1)...(19): siRNA sense strand
ugaagaauguggacaaggu

SEQ ID NO: 1678824 - RNA, 19 nt, Homo sapiens
  misc_RNA (1)...(19): siRNA sense strand
ggcgguaccugcagaugaa

SEQ ID NO: 1678825 - RNA, 19 nt, Homo sapiens
  misc_RNA (1)...(19): siRNA sense strand
ccauggagaucgagguguu

SEQ ID NO: 1678826 - RNA, 19 nt, Homo sapiens
  misc_RNA (1)...(19): siRNA sense strand
ccagugccuucuucaccua

SEQ ID NO: 1678827 - RNA, 19 nt, Homo sapiens
  misc_RNA (1)...(19): siRNA sense strand
gcgcggagaucaccuacac

SEQ ID NO: 1678828 - RNA, 19 nt, Homo sapiens
  misc_RNA (1)...(19): siRNA sense strand
gcaugaccuucacgagcaa

SEQ ID NO: 1678829 - RNA, 19 nt, Homo sapiens
  misc_RNA (1)...(19): siRNA sense strand
gggcgguaccugcagauga

SEQ ID NO: 1678830 - RNA, 19 nt, Homo sapiens
  misc_RNA (1)...(19): siRNA sense strand
ucggugagguggcgcaugu

SEQ ID NO: 1678831 - RNA, 19 nt, Homo sapiens
  misc_RNA (1)...(19): siRNA sense strand
cccugucgcugaagaaugu

SEQ ID NO: 1678832 - RNA, 19 nt, Homo sapiens
  misc_RNA (1)...(19): siRNA sense strand
gcugaagaauguggacaag

SEQ ID NO: 1678833 - RNA, 19 nt, Homo sapiens
  misc_RNA (1)...(19): siRNA sense strand
agaccgaggacgagaagaa

SEQ ID NO: 1678834 - RNA, 19 nt, Homo sapiens
  misc_RNA (1)...(19): siRNA sense strand
gaggcaggcgccaucauca

SEQ ID NO: 1678835 - RNA, 19 nt, Homo sapiens
  misc_RNA (1)...(19): siRNA sense strand
acccagagccgaacacugu

SEQ ID NO: 1678836 - RNA, 19 nt, Homo sapiens
  misc_RNA (1)...(19): siRNA sense strand
ggugccuccuguuguguau

SEQ ID NO: 1678837 - RNA, 19 nt, Homo sapiens
  misc_RNA (1)...(19): siRNA sense strand
ggacgagaagaagcgcuuu

SEQ ID NO: 1678838 - RNA, 19 nt, Homo sapiens
  misc_RNA (1)...(19): siRNA sense strand
gguaugaagcccagaagcu

SEQ ID NO: 1678839 - RNA, 19 nt, Homo sapiens
  misc_RNA (1)...(19): siRNA sense strand
auaaguccauggagaucga

SEQ ID NO: 1678840 - RNA, 19 nt, Homo sapiens
  misc_RNA (1)...(19): siRNA sense strand
acggaggugugaccaugaa

SEQ ID NO: 1678841 - RNA, 19 nt, Homo sapiens
  misc_RNA (1)...(19): siRNA sense strand
gcgcaccgacuuccugucu

SEQ ID NO: 1678842 - RNA, 19 nt, Homo sapiens
  misc_RNA (1)...(19): siRNA sense strand
gacgagaagaagcgcuuug

SEQ ID NO: 1678843 - RNA, 19 nt, Homo sapiens
  misc_RNA (1)...(19): siRNA sense strand
ugaagaauguggacaaggu

SEQ ID NO: 1678844 - RNA, 19 nt, Homo sapiens
  misc_RNA (1)...(19): siRNA sense strand
gcgcggagaucaccuacac

SEQ ID NO: 1678845 - RNA, 19 nt, Homo sapiens
  misc_RNA (1)...(19): siRNA sense strand
ucggugagguggcgcaugu

SEQ ID NO: 1678846 - RNA, 19 nt, Homo sapiens
  misc_RNA (1)...(19): siRNA sense strand
cccugucgcugaagaaugu

SEQ ID NO: 1678847 - RNA, 19 nt, Homo sapiens
  misc_RNA (1)...(19): siRNA sense strand
gcugaagaauguggacaag

SEQ ID NO: 1678848 - RNA, 19 nt, Homo sapiens
  misc_RNA (1)...(19): siRNA sense strand
gaggcaggcgccaucauca

SEQ ID NO: 1678849 - RNA, 19 nt, Homo sapiens
  misc_RNA (1)...(19): siRNA sense strand
acccagagccgaacacugu

SEQ ID NO: 1678850 - RNA, 19 nt, Homo sapiens
  misc_RNA (1)...(19): siRNA sense strand
ggugccuccuguuguguau

SEQ ID NO: 1678851 - RNA, 19 nt, Homo sapiens
  misc_RNA (1)...(19): siRNA sense strand
gguaugaagcccagaagcu

SEQ ID NO: 1678852 - RNA, 19 nt, Homo sapiens
  misc_RNA (1)...(19): siRNA sense strand
acggaggugugaccaugaa

SEQ ID NO: 1678853 - RNA, 19 nt, Homo sapiens
  misc_RNA (1)...(19): siRNA sense strand
gcgcaccgacuuccugucu

SEQ ID NO: 1678854 - RNA, 19 nt, Homo sapiens
  misc_RNA (1)...(19): siRNA sense strand
ugaagaauguggacaaggu

SEQ ID NO: 1678855 - RNA, 19 nt, Homo sapiens
  misc_RNA (1)...(19): siRNA sense strand
gcgcggagaucaccuacac

SEQ ID NO: 1678856 - RNA, 19 nt, Homo sapiens
  misc_RNA (1)...(19): siRNA sense strand
gcaugaccuucacgagcaa

SEQ ID NO: 1678857 - RNA, 19 nt, Homo sapiens
  misc_RNA (1)...(19): siRNA sense strand
ucggugagguggcgcaugu

SEQ ID NO: 1678858 - RNA, 19 nt, Homo sapiens
  misc_RNA (1)...(19): siRNA sense strand
cccugucgcugaagaaugu

SEQ ID NO: 1678859 - RNA, 19 nt, Homo sapiens
  misc_RNA (1)...(19): siRNA sense strand
gcugaagaauguggacaag

SEQ ID NO: 1678860 - RNA, 19 nt, Homo sapiens
  misc_RNA (1)...(19): siRNA sense strand
gaggcaggcgccaucauca

SEQ ID NO: 1678861 - RNA, 19 nt, Homo sapiens
  misc_RNA (1)...(19): siRNA sense strand
acccagagccgaacacugu

SEQ ID NO: 1678862 - RNA, 19 nt, Homo sapiens
  misc_RNA (1)...(19): siRNA sense strand
ggugccuccuguuguguau

SEQ ID NO: 1678863 - RNA, 19 nt, Homo sapiens
  misc_RNA (1)...(19): siRNA sense strand
gguaugaagcccagaagcu

SEQ ID NO: 1678864 - RNA, 19 nt, Homo sapiens
  misc_RNA (1)...(19): siRNA sense strand
acggaggugugaccaugaa

SEQ ID NO: 1678865 - RNA, 19 nt, Homo sapiens
  misc_RNA (1)...(19): siRNA sense strand
gcgcaccgacuuccugucu

SEQ ID NO: 1678866 - RNA, 19 nt, Homo sapiens
  misc_RNA (1)...(19): siRNA sense strand
gaagaagcgcuuugaggaa

SEQ ID NO: 1678867 - RNA, 19 nt, Homo sapiens
  misc_RNA (1)...(19): siRNA sense strand
gcaauaaguccauggagau

SEQ ID NO: 1678868 - RNA, 19 nt, Homo sapiens
  misc_RNA (1)...(19): siRNA sense strand
ugaagaauguggacaaggu

SEQ ID NO: 1678869 - RNA, 19 nt, Homo sapiens
  misc_RNA (1)...(19): siRNA sense strand
ggcgguaccugcagaugaa

SEQ ID NO: 1678870 - RNA, 19 nt, Homo sapiens
  misc_RNA (1)...(19): siRNA sense strand
ccauggagaucgagguguu

SEQ ID NO: 1678871 - RNA, 19 nt, Homo sapiens
  misc_RNA (1)...(19): siRNA sense strand
ccagugccuucuucaccua

SEQ ID NO: 1678872 - RNA, 19 nt, Homo sapiens
  misc_RNA (1)...(19): siRNA sense strand
gcgcggagaucaccuacac

SEQ ID NO: 1678873 - RNA, 19 nt, Homo sapiens
  misc_RNA (1)...(19): siRNA sense strand
gcaugaccuucacgagcaa

SEQ ID NO: 1678874 - RNA, 19 nt, Homo sapiens
  misc_RNA (1)...(19): siRNA sense strand
gggcgguaccugcagauga

SEQ ID NO: 1678875 - RNA, 19 nt, Homo sapiens
  misc_RNA (1)...(19): siRNA sense strand
ucggugagguggcgcaugu

SEQ ID NO: 1678876 - RNA, 19 nt, Homo sapiens
  misc_RNA (1)...(19): siRNA sense strand
cccugucgcugaagaaugu

SEQ ID NO: 1678877 - RNA, 19 nt, Homo sapiens
  misc_RNA (1)...(19): siRNA sense strand
gcugaagaauguggacaag

SEQ ID NO: 1678878 - RNA, 19 nt, Homo sapiens
  misc_RNA (1)...(19): siRNA sense strand
agaccgaggacgagaagaa

SEQ ID NO: 1678879 - RNA, 19 nt, Homo sapiens
  misc_RNA (1)...(19): siRNA sense strand
gaggcaggcgccaucauca

SEQ ID NO: 1678880 - RNA, 19 nt, Homo sapiens
  misc_RNA (1)...(19): siRNA sense strand
acccagagccgaacacugu

SEQ ID NO: 1678881 - RNA, 19 nt, Homo sapiens
  misc_RNA (1)...(19): siRNA sense strand
ggugccuccuguuguguau

SEQ ID NO: 1678882 - RNA, 19 nt, Homo sapiens
  misc_RNA (1)...(19): siRNA sense strand
ggacgagaagaagcgcuuu

SEQ ID NO: 1678883 - RNA, 19 nt, Homo sapiens
  misc_RNA (1)...(19): siRNA sense strand
gguaugaagcccagaagcu

SEQ ID NO: 1678884 - RNA, 19 nt, Homo sapiens
  misc_RNA (1)...(19): siRNA sense strand
auaaguccauggagaucga

SEQ ID NO: 1678885 - RNA, 19 nt, Homo sapiens
  misc_RNA (1)...(19): siRNA sense strand
acggaggugugaccaugaa

SEQ ID NO: 1678886 - RNA, 19 nt, Homo sapiens
  misc_RNA (1)...(19): siRNA sense strand
gcgcaccgacuuccugucu

SEQ ID NO: 1678887 - RNA, 19 nt, Homo sapiens
  misc_RNA (1)...(19): siRNA sense strand
gacgagaagaagcgcuuug

SEQ ID NO: 1678888 - RNA, 19 nt, Homo sapiens
  misc_RNA (1)...(19): siRNA sense strand
gaagaagcgcuuugaggaa

SEQ ID NO: 1678889 - RNA, 19 nt, Homo sapiens
  misc_RNA (1)...(19): siRNA sense strand
gcaauaaguccauggagau

SEQ ID NO: 1678890 - RNA, 19 nt, Homo sapiens
  misc_RNA (1)...(19): siRNA sense strand
ugaagaauguggacaaggu

SEQ ID NO: 1678891 - RNA, 19 nt, Homo sapiens
  misc_RNA (1)...(19): siRNA sense strand
ggcgguaccugcagaugaa

SEQ ID NO: 1678892 - RNA, 19 nt, Homo sapiens
  misc_RNA (1)...(19): siRNA sense strand
ccauggagaucgagguguu

SEQ ID NO: 1678893 - RNA, 19 nt, Homo sapiens
  misc_RNA (1)...(19): siRNA sense strand
ccagugccuucuucaccua

SEQ ID NO: 1678894 - RNA, 19 nt, Homo sapiens
  misc_RNA (1)...(19): siRNA sense strand
gcgcggagaucaccuacac

SEQ ID NO: 1678895 - RNA, 19 nt, Homo sapiens
  misc_RNA (1)...(19): siRNA sense strand
gcaugaccuucacgagcaa

SEQ ID NO: 1678896 - RNA, 19 nt, Homo sapiens
  misc_RNA (1)...(19): siRNA sense strand
gggcgguaccugcagauga

SEQ ID NO: 1678897 - RNA, 19 nt, Homo sapiens
  misc_RNA (1)...(19): siRNA sense strand
ucggugagguggcgcaugu

SEQ ID NO: 1678898 - RNA, 19 nt, Homo sapiens
  misc_RNA (1)...(19): siRNA sense strand
cccugucgcugaagaaugu

SEQ ID NO: 1678899 - RNA, 19 nt, Homo sapiens
  misc_RNA (1)...(19): siRNA sense strand
gcugaagaauguggacaag

SEQ ID NO: 1678900 - RNA, 19 nt, Homo sapiens
  misc_RNA (1)...(19): siRNA sense strand
agaccgaggacgagaagaa

SEQ ID NO: 1678901 - RNA, 19 nt, Homo sapiens
  misc_RNA (1)...(19): siRNA sense strand
gaggcaggcgccaucauca

SEQ ID NO: 1678902 - RNA, 19 nt, Homo sapiens
  misc_RNA (1)...(19): siRNA sense strand
acccagagccgaacacugu

SEQ ID NO: 1678903 - RNA, 19 nt, Homo sapiens
  misc_RNA (1)...(19): siRNA sense strand
ggugccuccuguuguguau

SEQ ID NO: 1678904 - RNA, 19 nt, Homo sapiens
  misc_RNA (1)...(19): siRNA sense strand
ggacgagaagaagcgcuuu

SEQ ID NO: 1678905 - RNA, 19 nt, Homo sapiens
  misc_RNA (1)...(19): siRNA sense strand
gguaugaagcccagaagcu

SEQ ID NO: 1678906 - RNA, 19 nt, Homo sapiens
  misc_RNA (1)...(19): siRNA sense strand
auaaguccauggagaucga

SEQ ID NO: 1678907 - RNA, 19 nt, Homo sapiens
  misc_RNA (1)...(19): siRNA sense strand
acggaggugugaccaugaa

SEQ ID NO: 1678908 - RNA, 19 nt, Homo sapiens
  misc_RNA (1)...(19): siRNA sense strand
gcgcaccgacuuccugucu

SEQ ID NO: 1678909 - RNA, 19 nt, Homo sapiens
  misc_RNA (1)...(19): siRNA sense strand
gacgagaagaagcgcuuug

SEQ ID NO: 1678910 - RNA, 19 nt, Homo sapiens
  misc_RNA (1)...(19): siRNA sense strand
gaagaagcgcuuugaggaa

SEQ ID NO: 1678911 - RNA, 19 nt, Homo sapiens
  misc_RNA (1)...(19): siRNA sense strand
gcaauaaguccauggagau

SEQ ID NO: 1678912 - RNA, 19 nt, Homo sapiens
  misc_RNA (1)...(19): siRNA sense strand
ugaagaauguggacaaggu

SEQ ID NO: 1678913 - RNA, 19 nt, Homo sapiens
  misc_RNA (1)...(19): siRNA sense strand
ggcgguaccugcagaugaa

SEQ ID NO: 1678914 - RNA, 19 nt, Homo sapiens
  misc_RNA (1)...(19): siRNA sense strand
ccauggagaucgagguguu

SEQ ID NO: 1678915 - RNA, 19 nt, Homo sapiens
  misc_RNA (1)...(19): siRNA sense strand
ccagugccuucuucaccua

SEQ ID NO: 1678916 - RNA, 19 nt, Homo sapiens
  misc_RNA (1)...(19): siRNA sense strand
gcgcggagaucaccuacac

SEQ ID NO: 1678917 - RNA, 19 nt, Homo sapiens
  misc_RNA (1)...(19): siRNA sense strand
gcaugaccuucacgagcaa

SEQ ID NO: 1678918 - RNA, 19 nt, Homo sapiens
  misc_RNA (1)...(19): siRNA sense strand
gggcgguaccugcagauga

SEQ ID NO: 1678919 - RNA, 19 nt, Homo sapiens
  misc_RNA (1)...(19): siRNA sense strand
ucggugagguggcgcaugu

SEQ ID NO: 1678920 - RNA, 19 nt, Homo sapiens
  misc_RNA (1)...(19): siRNA sense strand
cccugucgcugaagaaugu

SEQ ID NO: 1678921 - RNA, 19 nt, Homo sapiens
  misc_RNA (1)...(19): siRNA sense strand
gcugaagaauguggacaag

SEQ ID NO: 1678922 - RNA, 19 nt, Homo sapiens
  misc_RNA (1)...(19): siRNA sense strand
agaccgaggacgagaagaa

SEQ ID NO: 1678923 - RNA, 19 nt, Homo sapiens
  misc_RNA (1)...(19): siRNA sense strand
gaggcaggcgccaucauca

SEQ ID NO: 1678924 - RNA, 19 nt, Homo sapiens
  misc_RNA (1)...(19): siRNA sense strand
acccagagccgaacacugu

SEQ ID NO: 1678925 - RNA, 19 nt, Homo sapiens
  misc_RNA (1)...(19): siRNA sense strand
ggugccuccuguuguguau

SEQ ID NO: 1678926 - RNA, 19 nt, Homo sapiens
  misc_RNA (1)...(19): siRNA sense strand
ggacgagaagaagcgcuuu

SEQ ID NO: 1678927 - RNA, 19 nt, Homo sapiens
  misc_RNA (1)...(19): siRNA sense strand
gguaugaagcccagaagcu

SEQ ID NO: 1678928 - RNA, 19 nt, Homo sapiens
  misc_RNA (1)...(19): siRNA sense strand
auaaguccauggagaucga

SEQ ID NO: 1678929 - RNA, 19 nt, Homo sapiens
  misc_RNA (1)...(19): siRNA sense strand
acggaggugugaccaugaa

SEQ ID NO: 1678930 - RNA, 19 nt, Homo sapiens
  misc_RNA (1)...(19): siRNA sense strand
gcgcaccgacuuccugucu

SEQ ID NO: 1678931 - RNA, 19 nt, Homo sapiens
  misc_RNA (1)...(19): siRNA sense strand
gacgagaagaagcgcuuug

SEQ ID NO: 1678932 - RNA, 19 nt, Homo sapiens
  misc_RNA (1)...(19): siRNA sense strand
ggaagaagcuggugaaugc

SEQ ID NO: 1678933 - RNA, 19 nt, Homo sapiens
  misc_RNA (1)...(19): siRNA sense strand
gaacaagcucauaguauua

SEQ ID NO: 1678934 - RNA, 19 nt, Homo sapiens
  misc_RNA (1)...(19): siRNA sense strand
cagaagcucuccaaauuga

SEQ ID NO: 1678935 - RNA, 19 nt, Homo sapiens
  misc_RNA (1)...(19): siRNA sense strand
ucacagaccuucuacacaa

SEQ ID NO: 1678936 - RNA, 19 nt, Homo sapiens
  misc_RNA (1)...(19): siRNA sense strand
agaacaagcucauaguauu

SEQ ID NO: 1678937 - RNA, 19 nt, Homo sapiens
  misc_RNA (1)...(19): siRNA sense strand
gauaaugauuccuacguau

SEQ ID NO: 1678938 - RNA, 19 nt, Homo sapiens
  misc_RNA (1)...(19): siRNA sense strand
acaaauggaaccaaucuua

SEQ ID NO: 1678939 - RNA, 19 nt, Homo sapiens
  misc_RNA (1)...(19): siRNA sense strand
gaucuuggaugauguuugg

SEQ ID NO: 1678940 - RNA, 19 nt, Homo sapiens
  misc_RNA (1)...(19): siRNA sense strand
caaauggaaccaaucuuaa

SEQ ID NO: 1678941 - RNA, 19 nt, Homo sapiens
  misc_RNA (1)...(19): siRNA sense strand
ccacagaggccaguuguuu

SEQ ID NO: 1678942 - RNA, 19 nt, Homo sapiens
  misc_RNA (1)...(19): siRNA sense strand
aguaauggguccuaaauau

SEQ ID NO: 1678943 - RNA, 19 nt, Homo sapiens
  misc_RNA (1)...(19): siRNA sense strand
agcagaagcucuccaaauu

SEQ ID NO: 1678944 - RNA, 19 nt, Homo sapiens
  misc_RNA (1)...(19): siRNA sense strand
caagacauccuacaucaug

SEQ ID NO: 1678945 - RNA, 19 nt, Homo sapiens
  misc_RNA (1)...(19): siRNA sense strand
acaaugcucuacuacauga

SEQ ID NO: 1678946 - RNA, 19 nt, Homo sapiens
  misc_RNA (1)...(19): siRNA sense strand
caugauuagugauggauuu

SEQ ID NO: 1678947 - RNA, 19 nt, Homo sapiens
  misc_RNA (1)...(19): siRNA sense strand
aaucugggcuucugaugaa

SEQ ID NO: 1678948 - RNA, 19 nt, Homo sapiens
  misc_RNA (1)...(19): siRNA sense strand
gaagcucuccaaauugaaa

SEQ ID NO: 1678949 - RNA, 19 nt, Homo sapiens
  misc_RNA (1)...(19): siRNA sense strand
gcagaagcucuccaaauug

SEQ ID NO: 1678950 - RNA, 19 nt, Homo sapiens
  misc_RNA (1)...(19): siRNA sense strand
cuacaaugcucuacuacau

SEQ ID NO: 1678951 - RNA, 19 nt, Homo sapiens
  misc_RNA (1)...(19): siRNA sense strand
gacaagaguguuacagauu

SEQ ID NO: 1678952 - RNA, 19 nt, Homo sapiens
  misc_RNA (1)...(19): siRNA sense strand
ugaugaaacugcagaaucu

SEQ ID NO: 1678953 - RNA, 19 nt, Homo sapiens
  misc_RNA (1)...(19): siRNA sense strand
cccagaggcuuccacuuaa

SEQ ID NO: 1678954 - RNA, 19 nt, Homo sapiens
  misc_RNA (1)...(19): siRNA sense strand
gagaagcucuggaaaagga

SEQ ID NO: 1678955 - RNA, 19 nt, Homo sapiens
  misc_RNA (1)...(19): siRNA sense strand
agauaaugauuccuacgua

SEQ ID NO: 1678956 - RNA, 19 nt, Homo sapiens
  misc_RNA (1)...(19): siRNA sense strand
ucccagaggcuuccacuua

SEQ ID NO: 1678957 - RNA, 19 nt, Homo sapiens
  misc_RNA (1)...(19): siRNA sense strand
acaagaguguuacagauuc

SEQ ID NO: 1678958 - RNA, 19 nt, Homo sapiens
  misc_RNA (1)...(19): siRNA sense strand
cuacacaaauggaaccaau

SEQ ID NO: 1678959 - RNA, 19 nt, Homo sapiens
  misc_RNA (1)...(19): siRNA sense strand
ccagaacaagcucauagua

SEQ ID NO: 1678960 - RNA, 19 nt, Homo sapiens
  misc_RNA (1)...(19): siRNA sense strand
caugaaggauauaaagauc

SEQ ID NO: 1678961 - RNA, 19 nt, Homo sapiens
  misc_RNA (1)...(19): siRNA sense strand
agacaagaguguuacagau

SEQ ID NO: 1678962 - RNA, 19 nt, Homo sapiens
  misc_RNA (1)...(19): siRNA sense strand
gagacaagaguguuacaga

SEQ ID NO: 1678963 - RNA, 19 nt, Homo sapiens
  misc_RNA (1)...(19): siRNA sense strand
caagaguguuacagauuca

SEQ ID NO: 1678964 - RNA, 19 nt, Homo sapiens
  misc_RNA (1)...(19): siRNA sense strand
guaauggguccuaaauaug

SEQ ID NO: 1678965 - RNA, 19 nt, Homo sapiens
  misc_RNA (1)...(19): siRNA sense strand
caugauggcauuccuguug

SEQ ID NO: 1678966 - RNA, 19 nt, Homo sapiens
  misc_RNA (1)...(19): siRNA sense strand
uggaaccaaucuuaagaaa

SEQ ID NO: 1678967 - RNA, 19 nt, Homo sapiens
  misc_RNA (1)...(19): siRNA sense strand
gaccgucuccgcauucuga

SEQ ID NO: 1678968 - RNA, 19 nt, Homo sapiens
  misc_RNA (1)...(19): siRNA sense strand
ugcagaagcuguuagagau

SEQ ID NO: 1678969 - RNA, 19 nt, Homo sapiens
  misc_RNA (1)...(19): siRNA sense strand
cauaugugacuguggauaa

SEQ ID NO: 1678970 - RNA, 19 nt, Homo sapiens
  misc_RNA (1)...(19): siRNA sense strand
cagaacaagcucauaguau

SEQ ID NO: 1678971 - RNA, 19 nt, Homo sapiens
  misc_RNA (1)...(19): siRNA sense strand
cagaggcuuccacuuaaua

SEQ ID NO: 1678972 - RNA, 19 nt, Homo sapiens
  misc_RNA (1)...(19): siRNA sense strand
agacaaaucugggcuucug

SEQ ID NO: 1678973 - RNA, 19 nt, Homo sapiens
  misc_RNA (1)...(19): siRNA sense strand
cuacguaucauucuacaau

SEQ ID NO: 1678974 - RNA, 19 nt, Homo sapiens
  misc_RNA (1)...(19): siRNA sense strand
uaauggguccuaaauaugu

SEQ ID NO: 1678975 - RNA, 19 nt, Homo sapiens
  misc_RNA (1)...(19): siRNA sense strand
gcauuccuguugucucuuc

SEQ ID NO: 1678976 - RNA, 19 nt, Homo sapiens
  misc_RNA (1)...(19): siRNA sense strand
ucuacuacaugaaggauau

SEQ ID NO: 1678977 - RNA, 19 nt, Homo sapiens
  misc_RNA (1)...(19): siRNA sense strand
cagaagcuguuagagauca

SEQ ID NO: 1678978 - RNA, 19 nt, Homo sapiens
  misc_RNA (1)...(19): siRNA sense strand
ccagaggcuuccacuuaau

SEQ ID NO: 1678979 - RNA, 19 nt, Homo sapiens
  misc_RNA (1)...(19): siRNA sense strand
caaggaagaagcuggugaa

SEQ ID NO: 1678980 - RNA, 19 nt, Homo sapiens
  misc_RNA (1)...(19): siRNA sense strand
cgaaauuguuugcuucaac

SEQ ID NO: 1678981 - RNA, 19 nt, Homo sapiens
  misc_RNA (1)...(19): siRNA sense strand
cagcagaagcucuccaaau

SEQ ID NO: 1678982 - RNA, 19 nt, Homo sapiens
  misc_RNA (1)...(19): siRNA sense strand
ggcuuccacuuaauauuga

SEQ ID NO: 1678983 - RNA, 19 nt, Homo sapiens
  misc_RNA (1)...(19): siRNA sense strand
caaaagcucgaaauuguuu

SEQ ID NO: 1678984 - RNA, 19 nt, Homo sapiens
  misc_RNA (1)...(19): siRNA sense strand
guggauaaucuugguauuu

SEQ ID NO: 1678985 - RNA, 19 nt, Homo sapiens
  misc_RNA (1)...(19): siRNA sense strand
guugaaagcuuuugacagu

SEQ ID NO: 1678986 - RNA, 19 nt, Homo sapiens
  misc_RNA (1)...(19): siRNA sense strand
cacagaccuucuacacaaa

SEQ ID NO: 1678987 - RNA, 19 nt, Homo sapiens
  misc_RNA (1)...(19): siRNA sense strand
uugcugcccuucuccauga

SEQ ID NO: 1678988 - RNA, 19 nt, Homo sapiens
  misc_RNA (1)...(19): siRNA sense strand
caguaauggguccuaaaua

SEQ ID NO: 1678989 - RNA, 19 nt, Homo sapiens
  misc_RNA (1)...(19): siRNA sense strand
gggagugcauuggguuuca

SEQ ID NO: 1678990 - RNA, 19 nt, Homo sapiens
  misc_RNA (1)...(19): siRNA sense strand
aacaauaucagaagaggaa

SEQ ID NO: 1678991 - RNA, 19 nt, Homo sapiens
  misc_RNA (1)...(19): siRNA sense strand
caacagcaaagagcagcua

SEQ ID NO: 1678992 - RNA, 19 nt, Homo sapiens
  misc_RNA (1)...(19): siRNA sense strand
gaagcuggugaaugcaauu

SEQ ID NO: 1678993 - RNA, 19 nt, Homo sapiens
  misc_RNA (1)...(19): siRNA sense strand
aauggguccuaaauaugua

SEQ ID NO: 1678994 - RNA, 19 nt, Homo sapiens
  misc_RNA (1)...(19): siRNA sense strand
caucaagacauccuacauc

SEQ ID NO: 1678995 - RNA, 19 nt, Homo sapiens
  misc_RNA (1)...(19): siRNA sense strand
auucuacaaugcucuacua

SEQ ID NO: 1678996 - RNA, 19 nt, Homo sapiens
  misc_RNA (1)...(19): siRNA sense strand
ugaaacugcagaaucuuug

SEQ ID NO: 1678997 - RNA, 19 nt, Homo sapiens
  misc_RNA (1)...(19): siRNA sense strand
gcaaacacccaaggucucu

SEQ ID NO: 1678998 - RNA, 19 nt, Homo sapiens
  misc_RNA (1)...(19): siRNA sense strand
ucaguaauggguccuaaau

SEQ ID NO: 1678999 - RNA, 19 nt, Homo sapiens
  misc_RNA (1)...(19): siRNA sense strand
cuacaugaaggauauaaag

SEQ ID NO: 1679000 - RNA, 19 nt, Homo sapiens
  misc_RNA (1)...(19): siRNA sense strand
gaguguuacagauucagua

SEQ ID NO: 1679001 - RNA, 19 nt, Homo sapiens
  misc_RNA (1)...(19): siRNA sense strand
ugcaaaagcucgaaauugu

SEQ ID NO: 1679002 - RNA, 19 nt, Homo sapiens
  misc_RNA (1)...(19): siRNA sense strand
cagugucagauucuucuua

SEQ ID NO: 1679003 - RNA, 19 nt, Homo sapiens
  misc_RNA (1)...(19): siRNA sense strand
aaaaggacaucaagacauc

SEQ ID NO: 1679004 - RNA, 19 nt, Homo sapiens
  misc_RNA (1)...(19): siRNA sense strand
ugucagauucuucuuacaa

SEQ ID NO: 1679005 - RNA, 19 nt, Homo sapiens
  misc_RNA (1)...(19): siRNA sense strand
uagagaucauucccuuuua

SEQ ID NO: 1679006 - RNA, 19 nt, Homo sapiens
  misc_RNA (1)...(19): siRNA sense strand
gaaaaggacaucaagacau

SEQ ID NO: 1679007 - RNA, 19 nt, Homo sapiens
  misc_RNA (1)...(19): siRNA sense strand
gcagaagcuguuagagauc

SEQ ID NO: 1679008 - RNA, 19 nt, Homo sapiens
  misc_RNA (1)...(19): siRNA sense strand
uggaucaggaugagaguuu

SEQ ID NO: 1679009 - RNA, 19 nt, Homo sapiens
  misc_RNA (1)...(19): siRNA sense strand
caaauugaaaggugaacca

SEQ ID NO: 1679010 - RNA, 19 nt, Homo sapiens
  misc_RNA (1)...(19): siRNA sense strand
auaugaagaaggcagauuu

SEQ ID NO: 1679011 - RNA, 19 nt, Homo sapiens
  misc_RNA (1)...(19): siRNA sense strand
aucaagacauccuacauca

SEQ ID NO: 1679012 - RNA, 19 nt, Homo sapiens
  misc_RNA (1)...(19): siRNA sense strand
gaugauguuugggacucuu

SEQ ID NO: 1679013 - RNA, 19 nt, Homo sapiens
  misc_RNA (1)...(19): siRNA sense strand
gugcauuggguuucaguug

SEQ ID NO: 1679014 - RNA, 19 nt, Homo sapiens
  misc_RNA (1)...(19): siRNA sense strand
cugcagaagcuguuagaga

SEQ ID NO: 1679015 - RNA, 19 nt, Homo sapiens
  misc_RNA (1)...(19): siRNA sense strand
uggcauuccuguugucucu

SEQ ID NO: 1679016 - RNA, 19 nt, Homo sapiens
  misc_RNA (1)...(19): siRNA sense strand
gcaaaagcucgaaauuguu

SEQ ID NO: 1679017 - RNA, 19 nt, Homo sapiens
  misc_RNA (1)...(19): siRNA sense strand
ugggaagucuguauuagcu

SEQ ID NO: 1679018 - RNA, 19 nt, Homo sapiens
  misc_RNA (1)...(19): siRNA sense strand
gugugaagguggaguacca

SEQ ID NO: 1679019 - RNA, 19 nt, Homo sapiens
  misc_RNA (1)...(19): siRNA sense strand
aggcuuccacuuaauauug

SEQ ID NO: 1679020 - RNA, 19 nt, Homo sapiens
  misc_RNA (1)...(19): siRNA sense strand
gaggcuuccacuuaauauu

SEQ ID NO: 1679021 - RNA, 19 nt, Homo sapiens
  misc_RNA (1)...(19): siRNA sense strand
gcugugggaagucuguauu

SEQ ID NO: 1679022 - RNA, 19 nt, Homo sapiens
  misc_RNA (1)...(19): siRNA sense strand
caaaucugggcuucugaug

SEQ ID NO: 1679023 - RNA, 19 nt, Homo sapiens
  misc_RNA (1)...(19): siRNA sense strand
aauggaaccaaucuuaaga

SEQ ID NO: 1679024 - RNA, 19 nt, Homo sapiens
  misc_RNA (1)...(19): siRNA sense strand
acacaaauggaaccaaucu

SEQ ID NO: 1679025 - RNA, 19 nt, Homo sapiens
  misc_RNA (1)...(19): siRNA sense strand
cagaccuucuacacaaaug

SEQ ID NO: 1679026 - RNA, 19 nt, Homo sapiens
  misc_RNA (1)...(19): siRNA sense strand
uaugaagaaggcagauuug

SEQ ID NO: 1679027 - RNA, 19 nt, Homo sapiens
  misc_RNA (1)...(19): siRNA sense strand
ggaaaaggacaucaagaca

SEQ ID NO: 1679028 - RNA, 19 nt, Homo sapiens
  misc_RNA (1)...(19): siRNA sense strand
aaaucugggcuucugauga

SEQ ID NO: 1679029 - RNA, 19 nt, Homo sapiens
  misc_RNA (1)...(19): siRNA sense strand
agaagcuggugaaugcaau

SEQ ID NO: 1679030 - RNA, 19 nt, Homo sapiens
  misc_RNA (1)...(19): siRNA sense strand
aaauggaaccaaucuuaag

SEQ ID NO: 1679031 - RNA, 19 nt, Homo sapiens
  misc_RNA (1)...(19): siRNA sense strand
caaccagagacaagagugu

SEQ ID NO: 1679032 - RNA, 19 nt, Homo sapiens
  misc_RNA (1)...(19): siRNA sense strand
ggaagaagcuggugaaugc

SEQ ID NO: 1679033 - RNA, 19 nt, Homo sapiens
  misc_RNA (1)...(19): siRNA sense strand
gaacaagcucauaguauua

SEQ ID NO: 1679034 - RNA, 19 nt, Homo sapiens
  misc_RNA (1)...(19): siRNA sense strand
cagaagcucuccaaauuga

SEQ ID NO: 1679035 - RNA, 19 nt, Homo sapiens
  misc_RNA (1)...(19): siRNA sense strand
ucacagaccuucuacacaa

SEQ ID NO: 1679036 - RNA, 19 nt, Homo sapiens
  misc_RNA (1)...(19): siRNA sense strand
agaacaagcucauaguauu

SEQ ID NO: 1679037 - RNA, 19 nt, Homo sapiens
  misc_RNA (1)...(19): siRNA sense strand
gauaaugauuccuacguau

SEQ ID NO: 1679038 - RNA, 19 nt, Homo sapiens
  misc_RNA (1)...(19): siRNA sense strand
acaaauggaaccaaucuua

SEQ ID NO: 1679039 - RNA, 19 nt, Homo sapiens
  misc_RNA (1)...(19): siRNA sense strand
gaucuuggaugauguuugg

SEQ ID NO: 1679040 - RNA, 19 nt, Homo sapiens
  misc_RNA (1)...(19): siRNA sense strand
caaauggaaccaaucuuaa

SEQ ID NO: 1679041 - RNA, 19 nt, Homo sapiens
  misc_RNA (1)...(19): siRNA sense strand
ccacagaggccaguuguuu

SEQ ID NO: 1679042 - RNA, 19 nt, Homo sapiens
  misc_RNA (1)...(19): siRNA sense strand
aguaauggguccuaaauau

SEQ ID NO: 1679043 - RNA, 19 nt, Homo sapiens
  misc_RNA (1)...(19): siRNA sense strand
agcagaagcucuccaaauu

SEQ ID NO: 1679044 - RNA, 19 nt, Homo sapiens
  misc_RNA (1)...(19): siRNA sense strand
caagacauccuacaucaug

SEQ ID NO: 1679045 - RNA, 19 nt, Homo sapiens
  misc_RNA (1)...(19): siRNA sense strand
acaaugcucuacuacauga

SEQ ID NO: 1679046 - RNA, 19 nt, Homo sapiens
  misc_RNA (1)...(19): siRNA sense strand
caugauuagugauggauuu

SEQ ID NO: 1679047 - RNA, 19 nt, Homo sapiens
  misc_RNA (1)...(19): siRNA sense strand
aaucugggcuucugaugaa

SEQ ID NO: 1679048 - RNA, 19 nt, Homo sapiens
  misc_RNA (1)...(19): siRNA sense strand
gaagcucuccaaauugaaa

SEQ ID NO: 1679049 - RNA, 19 nt, Homo sapiens
  misc_RNA (1)...(19): siRNA sense strand
gcagaagcucuccaaauug

SEQ ID NO: 1679050 - RNA, 19 nt, Homo sapiens
  misc_RNA (1)...(19): siRNA sense strand
cuacaaugcucuacuacau

SEQ ID NO: 1679051 - RNA, 19 nt, Homo sapiens
  misc_RNA (1)...(19): siRNA sense strand
gacaagaguguuacagauu

SEQ ID NO: 1679052 - RNA, 19 nt, Homo sapiens
  misc_RNA (1)...(19): siRNA sense strand
ugaugaaacugcagaaucu

SEQ ID NO: 1679053 - RNA, 19 nt, Homo sapiens
  misc_RNA (1)...(19): siRNA sense strand
cccagaggcuuccacuuaa

SEQ ID NO: 1679054 - RNA, 19 nt, Homo sapiens
  misc_RNA (1)...(19): siRNA sense strand
gagaagcucuggaaaagga

SEQ ID NO: 1679055 - RNA, 19 nt, Homo sapiens
  misc_RNA (1)...(19): siRNA sense strand
agauaaugauuccuacgua

SEQ ID NO: 1679056 - RNA, 19 nt, Homo sapiens
  misc_RNA (1)...(19): siRNA sense strand
ucccagaggcuuccacuua

SEQ ID NO: 1679057 - RNA, 19 nt, Homo sapiens
  misc_RNA (1)...(19): siRNA sense strand
acaagaguguuacagauuc

SEQ ID NO: 1679058 - RNA, 19 nt, Homo sapiens
  misc_RNA (1)...(19): siRNA sense strand
cuacacaaauggaaccaau

SEQ ID NO: 1679059 - RNA, 19 nt, Homo sapiens
  misc_RNA (1)...(19): siRNA sense strand
ccagaacaagcucauagua

SEQ ID NO: 1679060 - RNA, 19 nt, Homo sapiens
  misc_RNA (1)...(19): siRNA sense strand
caugaaggauauaaagauc

SEQ ID NO: 1679061 - RNA, 19 nt, Homo sapiens
  misc_RNA (1)...(19): siRNA sense strand
agacaagaguguuacagau

SEQ ID NO: 1679062 - RNA, 19 nt, Homo sapiens
  misc_RNA (1)...(19): siRNA sense strand
gagacaagaguguuacaga

SEQ ID NO: 1679063 - RNA, 19 nt, Homo sapiens
  misc_RNA (1)...(19): siRNA sense strand
caagaguguuacagauuca

SEQ ID NO: 1679064 - RNA, 19 nt, Homo sapiens
  misc_RNA (1)...(19): siRNA sense strand
guaauggguccuaaauaug

SEQ ID NO: 1679065 - RNA, 19 nt, Homo sapiens
  misc_RNA (1)...(19): siRNA sense strand
caugauggcauuccuguug

SEQ ID NO: 1679066 - RNA, 19 nt, Homo sapiens
  misc_RNA (1)...(19): siRNA sense strand
uggaaccaaucuuaagaaa

SEQ ID NO: 1679067 - RNA, 19 nt, Homo sapiens
  misc_RNA (1)...(19): siRNA sense strand
gaccgucuccgcauucuga

SEQ ID NO: 1679068 - RNA, 19 nt, Homo sapiens
  misc_RNA (1)...(19): siRNA sense strand
ugcagaagcuguuagagau

SEQ ID NO: 1679069 - RNA, 19 nt, Homo sapiens
  misc_RNA (1)...(19): siRNA sense strand
cauaugugacuguggauaa

SEQ ID NO: 1679070 - RNA, 19 nt, Homo sapiens
  misc_RNA (1)...(19): siRNA sense strand
cagaacaagcucauaguau

SEQ ID NO: 1679071 - RNA, 19 nt, Homo sapiens
  misc_RNA (1)...(19): siRNA sense strand
cagaggcuuccacuuaaua

SEQ ID NO: 1679072 - RNA, 19 nt, Homo sapiens
  misc_RNA (1)...(19): siRNA sense strand
agacaaaucugggcuucug

SEQ ID NO: 1679073 - RNA, 19 nt, Homo sapiens
  misc_RNA (1)...(19): siRNA sense strand
cuacguaucauucuacaau

SEQ ID NO: 1679074 - RNA, 19 nt, Homo sapiens
  misc_RNA (1)...(19): siRNA sense strand
uaauggguccuaaauaugu

SEQ ID NO: 1679075 - RNA, 19 nt, Homo sapiens
  misc_RNA (1)...(19): siRNA sense strand
gcauuccuguugucucuuc

SEQ ID NO: 1679076 - RNA, 19 nt, Homo sapiens
  misc_RNA (1)...(19): siRNA sense strand
ucuacuacaugaaggauau

SEQ ID NO: 1679077 - RNA, 19 nt, Homo sapiens
  misc_RNA (1)...(19): siRNA sense strand
cagaagcuguuagagauca

SEQ ID NO: 1679078 - RNA, 19 nt, Homo sapiens
  misc_RNA (1)...(19): siRNA sense strand
ccagaggcuuccacuuaau

SEQ ID NO: 1679079 - RNA, 19 nt, Homo sapiens
  misc_RNA (1)...(19): siRNA sense strand
caaggaagaagcuggugaa

SEQ ID NO: 1679080 - RNA, 19 nt, Homo sapiens
  misc_RNA (1)...(19): siRNA sense strand
cgaaauuguuugcuucaac

SEQ ID NO: 1679081 - RNA, 19 nt, Homo sapiens
  misc_RNA (1)...(19): siRNA sense strand
cagcagaagcucuccaaau

SEQ ID NO: 1679082 - RNA, 19 nt, Homo sapiens
  misc_RNA (1)...(19): siRNA sense strand
ggcuuccacuuaauauuga

SEQ ID NO: 1679083 - RNA, 19 nt, Homo sapiens
  misc_RNA (1)...(19): siRNA sense strand
caaaagcucgaaauuguuu

SEQ ID NO: 1679084 - RNA, 19 nt, Homo sapiens
  misc_RNA (1)...(19): siRNA sense strand
guggauaaucuugguauuu

SEQ ID NO: 1679085 - RNA, 19 nt, Homo sapiens
  misc_RNA (1)...(19): siRNA sense strand
guugaaagcuuuugacagu

SEQ ID NO: 1679086 - RNA, 19 nt, Homo sapiens
  misc_RNA (1)...(19): siRNA sense strand
cacagaccuucuacacaaa

SEQ ID NO: 1679087 - RNA, 19 nt, Homo sapiens
  misc_RNA (1)...(19): siRNA sense strand
uugcugcccuucuccauga

SEQ ID NO: 1679088 - RNA, 19 nt, Homo sapiens
  misc_RNA (1)...(19): siRNA sense strand
caguaauggguccuaaaua

SEQ ID NO: 1679089 - RNA, 19 nt, Homo sapiens
  misc_RNA (1)...(19): siRNA sense strand
gggagugcauuggguuuca

SEQ ID NO: 1679090 - RNA, 19 nt, Homo sapiens
  misc_RNA (1)...(19): siRNA sense strand
aacaauaucagaagaggaa

SEQ ID NO: 1679091 - RNA, 19 nt, Homo sapiens
  misc_RNA (1)...(19): siRNA sense strand
caacagcaaagagcagcua

SEQ ID NO: 1679092 - RNA, 19 nt, Homo sapiens
  misc_RNA (1)...(19): siRNA sense strand
gaagcuggugaaugcaauu

SEQ ID NO: 1679093 - RNA, 19 nt, Homo sapiens
  misc_RNA (1)...(19): siRNA sense strand
aauggguccuaaauaugua

SEQ ID NO: 1679094 - RNA, 19 nt, Homo sapiens
  misc_RNA (1)...(19): siRNA sense strand
caucaagacauccuacauc

SEQ ID NO: 1679095 - RNA, 19 nt, Homo sapiens
  misc_RNA (1)...(19): siRNA sense strand
auucuacaaugcucuacua

SEQ ID NO: 1679096 - RNA, 19 nt, Homo sapiens
  misc_RNA (1)...(19): siRNA sense strand
ugaaacugcagaaucuuug

SEQ ID NO: 1679097 - RNA, 19 nt, Homo sapiens
  misc_RNA (1)...(19): siRNA sense strand
gcaaacacccaaggucucu

SEQ ID NO: 1679098 - RNA, 19 nt, Homo sapiens
  misc_RNA (1)...(19): siRNA sense strand
ucaguaauggguccuaaau

SEQ ID NO: 1679099 - RNA, 19 nt, Homo sapiens
  misc_RNA (1)...(19): siRNA sense strand
cuacaugaaggauauaaag

SEQ ID NO: 1679100 - RNA, 19 nt, Homo sapiens
  misc_RNA (1)...(19): siRNA sense strand
gaguguuacagauucagua

SEQ ID NO: 1679101 - RNA, 19 nt, Homo sapiens
  misc_RNA (1)...(19): siRNA sense strand
ugcaaaagcucgaaauugu

SEQ ID NO: 1679102 - RNA, 19 nt, Homo sapiens
  misc_RNA (1)...(19): siRNA sense strand
cagugucagauucuucuua

SEQ ID NO: 1679103 - RNA, 19 nt, Homo sapiens
  misc_RNA (1)...(19): siRNA sense strand
aaaaggacaucaagacauc

SEQ ID NO: 1679104 - RNA, 19 nt, Homo sapiens
  misc_RNA (1)...(19): siRNA sense strand
ugucagauucuucuuacaa

SEQ ID NO: 1679105 - RNA, 19 nt, Homo sapiens
  misc_RNA (1)...(19): siRNA sense strand
uagagaucauucccuuuua

SEQ ID NO: 1679106 - RNA, 19 nt, Homo sapiens
  misc_RNA (1)...(19): siRNA sense strand
gaaaaggacaucaagacau

SEQ ID NO: 1679107 - RNA, 19 nt, Homo sapiens
  misc_RNA (1)...(19): siRNA sense strand
gcagaagcuguuagagauc

SEQ ID NO: 1679108 - RNA, 19 nt, Homo sapiens
  misc_RNA (1)...(19): siRNA sense strand
uggaucaggaugagaguuu

SEQ ID NO: 1679109 - RNA, 19 nt, Homo sapiens
  misc_RNA (1)...(19): siRNA sense strand
caaauugaaaggugaacca

SEQ ID NO: 1679110 - RNA, 19 nt, Homo sapiens
  misc_RNA (1)...(19): siRNA sense strand
auaugaagaaggcagauuu

SEQ ID NO: 1679111 - RNA, 19 nt, Homo sapiens
  misc_RNA (1)...(19): siRNA sense strand
aucaagacauccuacauca

SEQ ID NO: 1679112 - RNA, 19 nt, Homo sapiens
  misc_RNA (1)...(19): siRNA sense strand
gaugauguuugggacucuu

SEQ ID NO: 1679113 - RNA, 19 nt, Homo sapiens
  misc_RNA (1)...(19): siRNA sense strand
gugcauuggguuucaguug

SEQ ID NO: 1679114 - RNA, 19 nt, Homo sapiens
  misc_RNA (1)...(19): siRNA sense strand
cugcagaagcuguuagaga

SEQ ID NO: 1679115 - RNA, 19 nt, Homo sapiens
  misc_RNA (1)...(19): siRNA sense strand
uggcauuccuguugucucu

SEQ ID NO: 1679116 - RNA, 19 nt, Homo sapiens
  misc_RNA (1)...(19): siRNA sense strand
gcaaaagcucgaaauuguu

SEQ ID NO: 1679117 - RNA, 19 nt, Homo sapiens
  misc_RNA (1)...(19): siRNA sense strand
ugggaagucuguauuagcu

SEQ ID NO: 1679118 - RNA, 19 nt, Homo sapiens
  misc_RNA (1)...(19): siRNA sense strand
gugugaagguggaguacca

SEQ ID NO: 1679119 - RNA, 19 nt, Homo sapiens
  misc_RNA (1)...(19): siRNA sense strand
aggcuuccacuuaauauug

SEQ ID NO: 1679120 - RNA, 19 nt, Homo sapiens
  misc_RNA (1)...(19): siRNA sense strand
gaggcuuccacuuaauauu

SEQ ID NO: 1679121 - RNA, 19 nt, Homo sapiens
  misc_RNA (1)...(19): siRNA sense strand
gcugugggaagucuguauu

SEQ ID NO: 1679122 - RNA, 19 nt, Homo sapiens
  misc_RNA (1)...(19): siRNA sense strand
caaaucugggcuucugaug

SEQ ID NO: 1679123 - RNA, 19 nt, Homo sapiens
  misc_RNA (1)...(19): siRNA sense strand
aauggaaccaaucuuaaga

SEQ ID NO: 1679124 - RNA, 19 nt, Homo sapiens
  misc_RNA (1)...(19): siRNA sense strand
acacaaauggaaccaaucu

SEQ ID NO: 1679125 - RNA, 19 nt, Homo sapiens
  misc_RNA (1)...(19): siRNA sense strand
cagaccuucuacacaaaug

SEQ ID NO: 1679126 - RNA, 19 nt, Homo sapiens
  misc_RNA (1)...(19): siRNA sense strand
uaugaagaaggcagauuug

SEQ ID NO: 1679127 - RNA, 19 nt, Homo sapiens
  misc_RNA (1)...(19): siRNA sense strand
ggaaaaggacaucaagaca

SEQ ID NO: 1679128 - RNA, 19 nt, Homo sapiens
  misc_RNA (1)...(19): siRNA sense strand
aaaucugggcuucugauga

SEQ ID NO: 1679129 - RNA, 19 nt, Homo sapiens
  misc_RNA (1)...(19): siRNA sense strand
agaagcuggugaaugcaau

SEQ ID NO: 1679130 - RNA, 19 nt, Homo sapiens
  misc_RNA (1)...(19): siRNA sense strand
aaauggaaccaaucuuaag

SEQ ID NO: 1679131 - RNA, 19 nt, Homo sapiens
  misc_RNA (1)...(19): siRNA sense strand
caaccagagacaagagugu

SEQ ID NO: 1679132 - RNA, 19 nt, Homo sapiens
  misc_RNA (1)...(19): siRNA sense strand
ggaagaagcuggugaaugc

SEQ ID NO: 1679133 - RNA, 19 nt, Homo sapiens
  misc_RNA (1)...(19): siRNA sense strand
gaacaagcucauaguauua

SEQ ID NO: 1679134 - RNA, 19 nt, Homo sapiens
  misc_RNA (1)...(19): siRNA sense strand
cagaagcucuccaaauuga

SEQ ID NO: 1679135 - RNA, 19 nt, Homo sapiens
  misc_RNA (1)...(19): siRNA sense strand
ucacagaccuucuacacaa

SEQ ID NO: 1679136 - RNA, 19 nt, Homo sapiens
  misc_RNA (1)...(19): siRNA sense strand
agaacaagcucauaguauu

SEQ ID NO: 1679137 - RNA, 19 nt, Homo sapiens
  misc_RNA (1)...(19): siRNA sense strand
gauaaugauuccuacguau

SEQ ID NO: 1679138 - RNA, 19 nt, Homo sapiens
  misc_RNA (1)...(19): siRNA sense strand
acaaauggaaccaaucuua

SEQ ID NO: 1679139 - RNA, 19 nt, Homo sapiens
  misc_RNA (1)...(19): siRNA sense strand
gaucuuggaugauguuugg

SEQ ID NO: 1679140 - RNA, 19 nt, Homo sapiens
  misc_RNA (1)...(19): siRNA sense strand
caaauggaaccaaucuuaa

SEQ ID NO: 1679141 - RNA, 19 nt, Homo sapiens
  misc_RNA (1)...(19): siRNA sense strand
ccacagaggccaguuguuu

SEQ ID NO: 1679142 - RNA, 19 nt, Homo sapiens
  misc_RNA (1)...(19): siRNA sense strand
aguaauggguccuaaauau

SEQ ID NO: 1679143 - RNA, 19 nt, Homo sapiens
  misc_RNA (1)...(19): siRNA sense strand
agcagaagcucuccaaauu

SEQ ID NO: 1679144 - RNA, 19 nt, Homo sapiens
  misc_RNA (1)...(19): siRNA sense strand
caagacauccuacaucaug

SEQ ID NO: 1679145 - RNA, 19 nt, Homo sapiens
  misc_RNA (1)...(19): siRNA sense strand
acaaugcucuacuacauga

SEQ ID NO: 1679146 - RNA, 19 nt, Homo sapiens
  misc_RNA (1)...(19): siRNA sense strand
caugauuagugauggauuu

SEQ ID NO: 1679147 - RNA, 19 nt, Homo sapiens
  misc_RNA (1)...(19): siRNA sense strand
aaucugggcuucugaugaa

SEQ ID NO: 1679148 - RNA, 19 nt, Homo sapiens
  misc_RNA (1)...(19): siRNA sense strand
gaagcucuccaaauugaaa

SEQ ID NO: 1679149 - RNA, 19 nt, Homo sapiens
  misc_RNA (1)...(19): siRNA sense strand
gcagaagcucuccaaauug

SEQ ID NO: 1679150 - RNA, 19 nt, Homo sapiens
  misc_RNA (1)...(19): siRNA sense strand
cuacaaugcucuacuacau

SEQ ID NO: 1679151 - RNA, 19 nt, Homo sapiens
  misc_RNA (1)...(19): siRNA sense strand
gacaagaguguuacagauu

SEQ ID NO: 1679152 - RNA, 19 nt, Homo sapiens
  misc_RNA (1)...(19): siRNA sense strand
ugaugaaacugcagaaucu

SEQ ID NO: 1679153 - RNA, 19 nt, Homo sapiens
  misc_RNA (1)...(19): siRNA sense strand
cccagaggcuuccacuuaa

SEQ ID NO: 1679154 - RNA, 19 nt, Homo sapiens
  misc_RNA (1)...(19): siRNA sense strand
gagaagcucuggaaaagga

SEQ ID NO: 1679155 - RNA, 19 nt, Homo sapiens
  misc_RNA (1)...(19): siRNA sense strand
agauaaugauuccuacgua

SEQ ID NO: 1679156 - RNA, 19 nt, Homo sapiens
  misc_RNA (1)...(19): siRNA sense strand
ucccagaggcuuccacuua

SEQ ID NO: 1679157 - RNA, 19 nt, Homo sapiens
  misc_RNA (1)...(19): siRNA sense strand
acaagaguguuacagauuc

SEQ ID NO: 1679158 - RNA, 19 nt, Homo sapiens
  misc_RNA (1)...(19): siRNA sense strand
cuacacaaauggaaccaau

SEQ ID NO: 1679159 - RNA, 19 nt, Homo sapiens
  misc_RNA (1)...(19): siRNA sense strand
ccagaacaagcucauagua

SEQ ID NO: 1679160 - RNA, 19 nt, Homo sapiens
  misc_RNA (1)...(19): siRNA sense strand
caugaaggauauaaagauc

SEQ ID NO: 1679161 - RNA, 19 nt, Homo sapiens
  misc_RNA (1)...(19): siRNA sense strand
agacaagaguguuacagau

SEQ ID NO: 1679162 - RNA, 19 nt, Homo sapiens
  misc_RNA (1)...(19): siRNA sense strand
gagacaagaguguuacaga

SEQ ID NO: 1679163 - RNA, 19 nt, Homo sapiens
  misc_RNA (1)...(19): siRNA sense strand
caagaguguuacagauuca

SEQ ID NO: 1679164 - RNA, 19 nt, Homo sapiens
  misc_RNA (1)...(19): siRNA sense strand
guaauggguccuaaauaug

SEQ ID NO: 1679165 - RNA, 19 nt, Homo sapiens
  misc_RNA (1)...(19): siRNA sense strand
caugauggcauuccuguug

SEQ ID NO: 1679166 - RNA, 19 nt, Homo sapiens
  misc_RNA (1)...(19): siRNA sense strand
uggaaccaaucuuaagaaa

SEQ ID NO: 1679167 - RNA, 19 nt, Homo sapiens
  misc_RNA (1)...(19): siRNA sense strand
gaccgucuccgcauucuga

SEQ ID NO: 1679168 - RNA, 19 nt, Homo sapiens
  misc_RNA (1)...(19): siRNA sense strand
ugcagaagcuguuagagau

SEQ ID NO: 1679169 - RNA, 19 nt, Homo sapiens
  misc_RNA (1)...(19): siRNA sense strand
cauaugugacuguggauaa

SEQ ID NO: 1679170 - RNA, 19 nt, Homo sapiens
  misc_RNA (1)...(19): siRNA sense strand
cagaacaagcucauaguau

SEQ ID NO: 1679171 - RNA, 19 nt, Homo sapiens
  misc_RNA (1)...(19): siRNA sense strand
cagaggcuuccacuuaaua

SEQ ID NO: 1679172 - RNA, 19 nt, Homo sapiens
  misc_RNA (1)...(19): siRNA sense strand
agacaaaucugggcuucug

SEQ ID NO: 1679173 - RNA, 19 nt, Homo sapiens
  misc_RNA (1)...(19): siRNA sense strand
cuacguaucauucuacaau

SEQ ID NO: 1679174 - RNA, 19 nt, Homo sapiens
  misc_RNA (1)...(19): siRNA sense strand
uaauggguccuaaauaugu

SEQ ID NO: 1679175 - RNA, 19 nt, Homo sapiens
  misc_RNA (1)...(19): siRNA sense strand
gcauuccuguugucucuuc

SEQ ID NO: 1679176 - RNA, 19 nt, Homo sapiens
  misc_RNA (1)...(19): siRNA sense strand
ucuacuacaugaaggauau

SEQ ID NO: 1679177 - RNA, 19 nt, Homo sapiens
  misc_RNA (1)...(19): siRNA sense strand
cagaagcuguuagagauca

SEQ ID NO: 1679178 - RNA, 19 nt, Homo sapiens
  misc_RNA (1)...(19): siRNA sense strand
ccagaggcuuccacuuaau

SEQ ID NO: 1679179 - RNA, 19 nt, Homo sapiens
  misc_RNA (1)...(19): siRNA sense strand
caaggaagaagcuggugaa

SEQ ID NO: 1679180 - RNA, 19 nt, Homo sapiens
  misc_RNA (1)...(19): siRNA sense strand
cgaaauuguuugcuucaac

SEQ ID NO: 1679181 - RNA, 19 nt, Homo sapiens
  misc_RNA (1)...(19): siRNA sense strand
cagcagaagcucuccaaau

SEQ ID NO: 1679182 - RNA, 19 nt, Homo sapiens
  misc_RNA (1)...(19): siRNA sense strand
ggcuuccacuuaauauuga

SEQ ID NO: 1679183 - RNA, 19 nt, Homo sapiens
  misc_RNA (1)...(19): siRNA sense strand
caaaagcucgaaauuguuu

SEQ ID NO: 1679184 - RNA, 19 nt, Homo sapiens
  misc_RNA (1)...(19): siRNA sense strand
guggauaaucuugguauuu

SEQ ID NO: 1679185 - RNA, 19 nt, Homo sapiens
  misc_RNA (1)...(19): siRNA sense strand
guugaaagcuuuugacagu

SEQ ID NO: 1679186 - RNA, 19 nt, Homo sapiens
  misc_RNA (1)...(19): siRNA sense strand
cacagaccuucuacacaaa

SEQ ID NO: 1679187 - RNA, 19 nt, Homo sapiens
  misc_RNA (1)...(19): siRNA sense strand
uugcugcccuucuccauga

SEQ ID NO: 1679188 - RNA, 19 nt, Homo sapiens
  misc_RNA (1)...(19): siRNA sense strand
caguaauggguccuaaaua

SEQ ID NO: 1679189 - RNA, 19 nt, Homo sapiens
  misc_RNA (1)...(19): siRNA sense strand
gggagugcauuggguuuca

SEQ ID NO: 1679190 - RNA, 19 nt, Homo sapiens
  misc_RNA (1)...(19): siRNA sense strand
aacaauaucagaagaggaa

SEQ ID NO: 1679191 - RNA, 19 nt, Homo sapiens
  misc_RNA (1)...(19): siRNA sense strand
caacagcaaagagcagcua

SEQ ID NO: 1679192 - RNA, 19 nt, Homo sapiens
  misc_RNA (1)...(19): siRNA sense strand
gaagcuggugaaugcaauu

SEQ ID NO: 1679193 - RNA, 19 nt, Homo sapiens
  misc_RNA (1)...(19): siRNA sense strand
aauggguccuaaauaugua

SEQ ID NO: 1679194 - RNA, 19 nt, Homo sapiens
  misc_RNA (1)...(19): siRNA sense strand
caucaagacauccuacauc

SEQ ID NO: 1679195 - RNA, 19 nt, Homo sapiens
  misc_RNA (1)...(19): siRNA sense strand
auucuacaaugcucuacua

SEQ ID NO: 1679196 - RNA, 19 nt, Homo sapiens
  misc_RNA (1)...(19): siRNA sense strand
ugaaacugcagaaucuuug

SEQ ID NO: 1679197 - RNA, 19 nt, Homo sapiens
  misc_RNA (1)...(19): siRNA sense strand
gcaaacacccaaggucucu

SEQ ID NO: 1679198 - RNA, 19 nt, Homo sapiens
  misc_RNA (1)...(19): siRNA sense strand
ucaguaauggguccuaaau

SEQ ID NO: 1679199 - RNA, 19 nt, Homo sapiens
  misc_RNA (1)...(19): siRNA sense strand
cuacaugaaggauauaaag

SEQ ID NO: 1679200 - RNA, 19 nt, Homo sapiens
  misc_RNA (1)...(19): siRNA sense strand
gaguguuacagauucagua

SEQ ID NO: 1679201 - RNA, 19 nt, Homo sapiens
  misc_RNA (1)...(19): siRNA sense strand
ugcaaaagcucgaaauugu

SEQ ID NO: 1679202 - RNA, 19 nt, Homo sapiens
  misc_RNA (1)...(19): siRNA sense strand
cagugucagauucuucuua

SEQ ID NO: 1679203 - RNA, 19 nt, Homo sapiens
  misc_RNA (1)...(19): siRNA sense strand
aaaaggacaucaagacauc

SEQ ID NO: 1679204 - RNA, 19 nt, Homo sapiens
  misc_RNA (1)...(19): siRNA sense strand
ugucagauucuucuuacaa

SEQ ID NO: 1679205 - RNA, 19 nt, Homo sapiens
  misc_RNA (1)...(19): siRNA sense strand
uagagaucauucccuuuua

SEQ ID NO: 1679206 - RNA, 19 nt, Homo sapiens
  misc_RNA (1)...(19): siRNA sense strand
gaaaaggacaucaagacau

SEQ ID NO: 1679207 - RNA, 19 nt, Homo sapiens
  misc_RNA (1)...(19): siRNA sense strand
gcagaagcuguuagagauc

SEQ ID NO: 1679208 - RNA, 19 nt, Homo sapiens
  misc_RNA (1)...(19): siRNA sense strand
uggaucaggaugagaguuu

SEQ ID NO: 1679209 - RNA, 19 nt, Homo sapiens
  misc_RNA (1)...(19): siRNA sense strand
caaauugaaaggugaacca

SEQ ID NO: 1679210 - RNA, 19 nt, Homo sapiens
  misc_RNA (1)...(19): siRNA sense strand
auaugaagaaggcagauuu

SEQ ID NO: 1679211 - RNA, 19 nt, Homo sapiens
  misc_RNA (1)...(19): siRNA sense strand
aucaagacauccuacauca

SEQ ID NO: 1679212 - RNA, 19 nt, Homo sapiens
  misc_RNA (1)...(19): siRNA sense strand
gaugauguuugggacucuu

SEQ ID NO: 1679213 - RNA, 19 nt, Homo sapiens
  misc_RNA (1)...(19): siRNA sense strand
gugcauuggguuucaguug

SEQ ID NO: 1679214 - RNA, 19 nt, Homo sapiens
  misc_RNA (1)...(19): siRNA sense strand
cugcagaagcuguuagaga

SEQ ID NO: 1679215 - RNA, 19 nt, Homo sapiens
  misc_RNA (1)...(19): siRNA sense strand
uggcauuccuguugucucu

SEQ ID NO: 1679216 - RNA, 19 nt, Homo sapiens
  misc_RNA (1)...(19): siRNA sense strand
gcaaaagcucgaaauuguu

SEQ ID NO: 1679217 - RNA, 19 nt, Homo sapiens
  misc_RNA (1)...(19): siRNA sense strand
ugggaagucuguauuagcu

SEQ ID NO: 1679218 - RNA, 19 nt, Homo sapiens
  misc_RNA (1)...(19): siRNA sense strand
gugugaagguggaguacca

SEQ ID NO: 1679219 - RNA, 19 nt, Homo sapiens
  misc_RNA (1)...(19): siRNA sense strand
aggcuuccacuuaauauug

SEQ ID NO: 1679220 - RNA, 19 nt, Homo sapiens
  misc_RNA (1)...(19): siRNA sense strand
gaggcuuccacuuaauauu

SEQ ID NO: 1679221 - RNA, 19 nt, Homo sapiens
  misc_RNA (1)...(19): siRNA sense strand
gcugugggaagucuguauu

SEQ ID NO: 1679222 - RNA, 19 nt, Homo sapiens
  misc_RNA (1)...(19): siRNA sense strand
caaaucugggcuucugaug

SEQ ID NO: 1679223 - RNA, 19 nt, Homo sapiens
  misc_RNA (1)...(19): siRNA sense strand
aauggaaccaaucuuaaga

SEQ ID NO: 1679224 - RNA, 19 nt, Homo sapiens
  misc_RNA (1)...(19): siRNA sense strand
acacaaauggaaccaaucu

SEQ ID NO: 1679225 - RNA, 19 nt, Homo sapiens
  misc_RNA (1)...(19): siRNA sense strand
cagaccuucuacacaaaug

SEQ ID NO: 1679226 - RNA, 19 nt, Homo sapiens
  misc_RNA (1)...(19): siRNA sense strand
uaugaagaaggcagauuug

SEQ ID NO: 1679227 - RNA, 19 nt, Homo sapiens
  misc_RNA (1)...(19): siRNA sense strand
ggaaaaggacaucaagaca

SEQ ID NO: 1679228 - RNA, 19 nt, Homo sapiens
  misc_RNA (1)...(19): siRNA sense strand
aaaucugggcuucugauga

SEQ ID NO: 1679229 - RNA, 19 nt, Homo sapiens
  misc_RNA (1)...(19): siRNA sense strand
agaagcuggugaaugcaau

SEQ ID NO: 1679230 - RNA, 19 nt, Homo sapiens
  misc_RNA (1)...(19): siRNA sense strand
aaauggaaccaaucuuaag

SEQ ID NO: 1679231 - RNA, 19 nt, Homo sapiens
  misc_RNA (1)...(19): siRNA sense strand
caaccagagacaagagugu

SEQ ID NO: 1679232 - RNA, 19 nt, Homo sapiens
  misc_RNA (1)...(19): siRNA sense strand
ggaagaagcuggugaaugc

SEQ ID NO: 1679233 - RNA, 19 nt, Homo sapiens
  misc_RNA (1)...(19): siRNA sense strand
gaacaagcucauaguauua

SEQ ID NO: 1679234 - RNA, 19 nt, Homo sapiens
  misc_RNA (1)...(19): siRNA sense strand
cagaagcucuccaaauuga

SEQ ID NO: 1679235 - RNA, 19 nt, Homo sapiens
  misc_RNA (1)...(19): siRNA sense strand
ucacagaccuucuacacaa

SEQ ID NO: 1679236 - RNA, 19 nt, Homo sapiens
  misc_RNA (1)...(19): siRNA sense strand
agaacaagcucauaguauu

SEQ ID NO: 1679237 - RNA, 19 nt, Homo sapiens
  misc_RNA (1)...(19): siRNA sense strand
gauaaugauuccuacguau

SEQ ID NO: 1679238 - RNA, 19 nt, Homo sapiens
  misc_RNA (1)...(19): siRNA sense strand
acaaauggaaccaaucuua

SEQ ID NO: 1679239 - RNA, 19 nt, Homo sapiens
  misc_RNA (1)...(19): siRNA sense strand
gaucuuggaugauguuugg

SEQ ID NO: 1679240 - RNA, 19 nt, Homo sapiens
  misc_RNA (1)...(19): siRNA sense strand
caaauggaaccaaucuuaa

SEQ ID NO: 1679241 - RNA, 19 nt, Homo sapiens
  misc_RNA (1)...(19): siRNA sense strand
ccacagaggccaguuguuu

SEQ ID NO: 1679242 - RNA, 19 nt, Homo sapiens
  misc_RNA (1)...(19): siRNA sense strand
aguaauggguccuaaauau

SEQ ID NO: 1679243 - RNA, 19 nt, Homo sapiens
  misc_RNA (1)...(19): siRNA sense strand
agcagaagcucuccaaauu

SEQ ID NO: 1679244 - RNA, 19 nt, Homo sapiens
  misc_RNA (1)...(19): siRNA sense strand
caagacauccuacaucaug

SEQ ID NO: 1679245 - RNA, 19 nt, Homo sapiens
  misc_RNA (1)...(19): siRNA sense strand
acaaugcucuacuacauga

SEQ ID NO: 1679246 - RNA, 19 nt, Homo sapiens
  misc_RNA (1)...(19): siRNA sense strand
caugauuagugauggauuu

SEQ ID NO: 1679247 - RNA, 19 nt, Homo sapiens
  misc_RNA (1)...(19): siRNA sense strand
aaucugggcuucugaugaa

SEQ ID NO: 1679248 - RNA, 19 nt, Homo sapiens
  misc_RNA (1)...(19): siRNA sense strand
gaagcucuccaaauugaaa

SEQ ID NO: 1679249 - RNA, 19 nt, Homo sapiens
  misc_RNA (1)...(19): siRNA sense strand
gcagaagcucuccaaauug

SEQ ID NO: 1679250 - RNA, 19 nt, Homo sapiens
  misc_RNA (1)...(19): siRNA sense strand
cuacaaugcucuacuacau

SEQ ID NO: 1679251 - RNA, 19 nt, Homo sapiens
  misc_RNA (1)...(19): siRNA sense strand
gacaagaguguuacagauu

SEQ ID NO: 1679252 - RNA, 19 nt, Homo sapiens
  misc_RNA (1)...(19): siRNA sense strand
ugaugaaacugcagaaucu

SEQ ID NO: 1679253 - RNA, 19 nt, Homo sapiens
  misc_RNA (1)...(19): siRNA sense strand
cccagaggcuuccacuuaa

SEQ ID NO: 1679254 - RNA, 19 nt, Homo sapiens
  misc_RNA (1)...(19): siRNA sense strand
gagaagcucuggaaaagga

SEQ ID NO: 1679255 - RNA, 19 nt, Homo sapiens
  misc_RNA (1)...(19): siRNA sense strand
agauaaugauuccuacgua

SEQ ID NO: 1679256 - RNA, 19 nt, Homo sapiens
  misc_RNA (1)...(19): siRNA sense strand
ucccagaggcuuccacuua

SEQ ID NO: 1679257 - RNA, 19 nt, Homo sapiens
  misc_RNA (1)...(19): siRNA sense strand
acaagaguguuacagauuc

SEQ ID NO: 1679258 - RNA, 19 nt, Homo sapiens
  misc_RNA (1)...(19): siRNA sense strand
cuacacaaauggaaccaau

SEQ ID NO: 1679259 - RNA, 19 nt, Homo sapiens
  misc_RNA (1)...(19): siRNA sense strand
ccagaacaagcucauagua

SEQ ID NO: 1679260 - RNA, 19 nt, Homo sapiens
  misc_RNA (1)...(19): siRNA sense strand
caugaaggauauaaagauc

SEQ ID NO: 1679261 - RNA, 19 nt, Homo sapiens
  misc_RNA (1)...(19): siRNA sense strand
agacaagaguguuacagau

SEQ ID NO: 1679262 - RNA, 19 nt, Homo sapiens
  misc_RNA (1)...(19): siRNA sense strand
gagacaagaguguuacaga

SEQ ID NO: 1679263 - RNA, 19 nt, Homo sapiens
  misc_RNA (1)...(19): siRNA sense strand
caagaguguuacagauuca

SEQ ID NO: 1679264 - RNA, 19 nt, Homo sapiens
  misc_RNA (1)...(19): siRNA sense strand
guaauggguccuaaauaug

SEQ ID NO: 1679265 - RNA, 19 nt, Homo sapiens
  misc_RNA (1)...(19): siRNA sense strand
caugauggcauuccuguug

SEQ ID NO: 1679266 - RNA, 19 nt, Homo sapiens
  misc_RNA (1)...(19): siRNA sense strand
uggaaccaaucuuaagaaa

SEQ ID NO: 1679267 - RNA, 19 nt, Homo sapiens
  misc_RNA (1)...(19): siRNA sense strand
gaccgucuccgcauucuga

SEQ ID NO: 1679268 - RNA, 19 nt, Homo sapiens
  misc_RNA (1)...(19): siRNA sense strand
ugcagaagcuguuagagau

SEQ ID NO: 1679269 - RNA, 19 nt, Homo sapiens
  misc_RNA (1)...(19): siRNA sense strand
cauaugugacuguggauaa

SEQ ID NO: 1679270 - RNA, 19 nt, Homo sapiens
  misc_RNA (1)...(19): siRNA sense strand
cagaacaagcucauaguau

SEQ ID NO: 1679271 - RNA, 19 nt, Homo sapiens
  misc_RNA (1)...(19): siRNA sense strand
cagaggcuuccacuuaaua

SEQ ID NO: 1679272 - RNA, 19 nt, Homo sapiens
  misc_RNA (1)...(19): siRNA sense strand
agacaaaucugggcuucug

SEQ ID NO: 1679273 - RNA, 19 nt, Homo sapiens
  misc_RNA (1)...(19): siRNA sense strand
cuacguaucauucuacaau

SEQ ID NO: 1679274 - RNA, 19 nt, Homo sapiens
  misc_RNA (1)...(19): siRNA sense strand
uaauggguccuaaauaugu

SEQ ID NO: 1679275 - RNA, 19 nt, Homo sapiens
  misc_RNA (1)...(19): siRNA sense strand
gcauuccuguugucucuuc

SEQ ID NO: 1679276 - RNA, 19 nt, Homo sapiens
  misc_RNA (1)...(19): siRNA sense strand
ucuacuacaugaaggauau

SEQ ID NO: 1679277 - RNA, 19 nt, Homo sapiens
  misc_RNA (1)...(19): siRNA sense strand
cagaagcuguuagagauca

SEQ ID NO: 1679278 - RNA, 19 nt, Homo sapiens
  misc_RNA (1)...(19): siRNA sense strand
ccagaggcuuccacuuaau

SEQ ID NO: 1679279 - RNA, 19 nt, Homo sapiens
  misc_RNA (1)...(19): siRNA sense strand
caaggaagaagcuggugaa

SEQ ID NO: 1679280 - RNA, 19 nt, Homo sapiens
  misc_RNA (1)...(19): siRNA sense strand
cgaaauuguuugcuucaac

SEQ ID NO: 1679281 - RNA, 19 nt, Homo sapiens
  misc_RNA (1)...(19): siRNA sense strand
cagcagaagcucuccaaau

SEQ ID NO: 1679282 - RNA, 19 nt, Homo sapiens
  misc_RNA (1)...(19): siRNA sense strand
ggcuuccacuuaauauuga

SEQ ID NO: 1679283 - RNA, 19 nt, Homo sapiens
  misc_RNA (1)...(19): siRNA sense strand
caaaagcucgaaauuguuu

SEQ ID NO: 1679284 - RNA, 19 nt, Homo sapiens
  misc_RNA (1)...(19): siRNA sense strand
guggauaaucuugguauuu

SEQ ID NO: 1679285 - RNA, 19 nt, Homo sapiens
  misc_RNA (1)...(19): siRNA sense strand
guugaaagcuuuugacagu

SEQ ID NO: 1679286 - RNA, 19 nt, Homo sapiens
  misc_RNA (1)...(19): siRNA sense strand
cacagaccuucuacacaaa

SEQ ID NO: 1679287 - RNA, 19 nt, Homo sapiens
  misc_RNA (1)...(19): siRNA sense strand
uugcugcccuucuccauga

SEQ ID NO: 1679288 - RNA, 19 nt, Homo sapiens
  misc_RNA (1)...(19): siRNA sense strand
caguaauggguccuaaaua

SEQ ID NO: 1679289 - RNA, 19 nt, Homo sapiens
  misc_RNA (1)...(19): siRNA sense strand
gggagugcauuggguuuca

SEQ ID NO: 1679290 - RNA, 19 nt, Homo sapiens
  misc_RNA (1)...(19): siRNA sense strand
aacaauaucagaagaggaa

SEQ ID NO: 1679291 - RNA, 19 nt, Homo sapiens
  misc_RNA (1)...(19): siRNA sense strand
caacagcaaagagcagcua

SEQ ID NO: 1679292 - RNA, 19 nt, Homo sapiens
  misc_RNA (1)...(19): siRNA sense strand
gaagcuggugaaugcaauu

SEQ ID NO: 1679293 - RNA, 19 nt, Homo sapiens
  misc_RNA (1)...(19): siRNA sense strand
aauggguccuaaauaugua

SEQ ID NO: 1679294 - RNA, 19 nt, Homo sapiens
  misc_RNA (1)...(19): siRNA sense strand
caucaagacauccuacauc

SEQ ID NO: 1679295 - RNA, 19 nt, Homo sapiens
  misc_RNA (1)...(19): siRNA sense strand
auucuacaaugcucuacua

SEQ ID NO: 1679296 - RNA, 19 nt, Homo sapiens
  misc_RNA (1)...(19): siRNA sense strand
ugaaacugcagaaucuuug

SEQ ID NO: 1679297 - RNA, 19 nt, Homo sapiens
  misc_RNA (1)...(19): siRNA sense strand
gcaaacacccaaggucucu

SEQ ID NO: 1679298 - RNA, 19 nt, Homo sapiens
  misc_RNA (1)...(19): siRNA sense strand
ucaguaauggguccuaaau

SEQ ID NO: 1679299 - RNA, 19 nt, Homo sapiens
  misc_RNA (1)...(19): siRNA sense strand
cuacaugaaggauauaaag

SEQ ID NO: 1679300 - RNA, 19 nt, Homo sapiens
  misc_RNA (1)...(19): siRNA sense strand
gaguguuacagauucagua

SEQ ID NO: 1679301 - RNA, 19 nt, Homo sapiens
  misc_RNA (1)...(19): siRNA sense strand
ugcaaaagcucgaaauugu

SEQ ID NO: 1679302 - RNA, 19 nt, Homo sapiens
  misc_RNA (1)...(19): siRNA sense strand
cagugucagauucuucuua

SEQ ID NO: 1679303 - RNA, 19 nt, Homo sapiens
  misc_RNA (1)...(19): siRNA sense strand
aaaaggacaucaagacauc

SEQ ID NO: 1679304 - RNA, 19 nt, Homo sapiens
  misc_RNA (1)...(19): siRNA sense strand
ugucagauucuucuuacaa

SEQ ID NO: 1679305 - RNA, 19 nt, Homo sapiens
  misc_RNA (1)...(19): siRNA sense strand
uagagaucauucccuuuua

SEQ ID NO: 1679306 - RNA, 19 nt, Homo sapiens
  misc_RNA (1)...(19): siRNA sense strand
gaaaaggacaucaagacau

SEQ ID NO: 1679307 - RNA, 19 nt, Homo sapiens
  misc_RNA (1)...(19): siRNA sense strand
gcagaagcuguuagagauc

SEQ ID NO: 1679308 - RNA, 19 nt, Homo sapiens
  misc_RNA (1)...(19): siRNA sense strand
uggaucaggaugagaguuu

SEQ ID NO: 1679309 - RNA, 19 nt, Homo sapiens
  misc_RNA (1)...(19): siRNA sense strand
caaauugaaaggugaacca

SEQ ID NO: 1679310 - RNA, 19 nt, Homo sapiens
  misc_RNA (1)...(19): siRNA sense strand
auaugaagaaggcagauuu

SEQ ID NO: 1679311 - RNA, 19 nt, Homo sapiens
  misc_RNA (1)...(19): siRNA sense strand
aucaagacauccuacauca

SEQ ID NO: 1679312 - RNA, 19 nt, Homo sapiens
  misc_RNA (1)...(19): siRNA sense strand
gaugauguuugggacucuu

SEQ ID NO: 1679313 - RNA, 19 nt, Homo sapiens
  misc_RNA (1)...(19): siRNA sense strand
gugcauuggguuucaguug

SEQ ID NO: 1679314 - RNA, 19 nt, Homo sapiens
  misc_RNA (1)...(19): siRNA sense strand
cugcagaagcuguuagaga

SEQ ID NO: 1679315 - RNA, 19 nt, Homo sapiens
  misc_RNA (1)...(19): siRNA sense strand
uggcauuccuguugucucu

SEQ ID NO: 1679316 - RNA, 19 nt, Homo sapiens
  misc_RNA (1)...(19): siRNA sense strand
gcaaaagcucgaaauuguu

SEQ ID NO: 1679317 - RNA, 19 nt, Homo sapiens
  misc_RNA (1)...(19): siRNA sense strand
ugggaagucuguauuagcu

SEQ ID NO: 1679318 - RNA, 19 nt, Homo sapiens
  misc_RNA (1)...(19): siRNA sense strand
gugugaagguggaguacca

SEQ ID NO: 1679319 - RNA, 19 nt, Homo sapiens
  misc_RNA (1)...(19): siRNA sense strand
aggcuuccacuuaauauug

SEQ ID NO: 1679320 - RNA, 19 nt, Homo sapiens
  misc_RNA (1)...(19): siRNA sense strand
gaggcuuccacuuaauauu

SEQ ID NO: 1679321 - RNA, 19 nt, Homo sapiens
  misc_RNA (1)...(19): siRNA sense strand
gcugugggaagucuguauu

SEQ ID NO: 1679322 - RNA, 19 nt, Homo sapiens
  misc_RNA (1)...(19): siRNA sense strand
caaaucugggcuucugaug

SEQ ID NO: 1679323 - RNA, 19 nt, Homo sapiens
  misc_RNA (1)...(19): siRNA sense strand
aauggaaccaaucuuaaga

SEQ ID NO: 1679324 - RNA, 19 nt, Homo sapiens
  misc_RNA (1)...(19): siRNA sense strand
acacaaauggaaccaaucu

SEQ ID NO: 1679325 - RNA, 19 nt, Homo sapiens
  misc_RNA (1)...(19): siRNA sense strand
cagaccuucuacacaaaug

SEQ ID NO: 1679326 - RNA, 19 nt, Homo sapiens
  misc_RNA (1)...(19): siRNA sense strand
uaugaagaaggcagauuug

SEQ ID NO: 1679327 - RNA, 19 nt, Homo sapiens
  misc_RNA (1)...(19): siRNA sense strand
ggaaaaggacaucaagaca

SEQ ID NO: 1679328 - RNA, 19 nt, Homo sapiens
  misc_RNA (1)...(19): siRNA sense strand
aaaucugggcuucugauga

SEQ ID NO: 1679329 - RNA, 19 nt, Homo sapiens
  misc_RNA (1)...(19): siRNA sense strand
agaagcuggugaaugcaau

SEQ ID NO: 1679330 - RNA, 19 nt, Homo sapiens
  misc_RNA (1)...(19): siRNA sense strand
aaauggaaccaaucuuaag

SEQ ID NO: 1679331 - RNA, 19 nt, Homo sapiens
  misc_RNA (1)...(19): siRNA sense strand
caaccagagacaagagugu

SEQ ID NO: 1679332 - RNA, 19 nt, Homo sapiens
  misc_RNA (1)...(19): siRNA sense strand
ggaagaagcuggugaaugc

SEQ ID NO: 1679333 - RNA, 19 nt, Homo sapiens
  misc_RNA (1)...(19): siRNA sense strand
gaacaagcucauaguauua

SEQ ID NO: 1679334 - RNA, 19 nt, Homo sapiens
  misc_RNA (1)...(19): siRNA sense strand
cagaagcucuccaaauuga

SEQ ID NO: 1679335 - RNA, 19 nt, Homo sapiens
  misc_RNA (1)...(19): siRNA sense strand
ucacagaccuucuacacaa

SEQ ID NO: 1679336 - RNA, 19 nt, Homo sapiens
  misc_RNA (1)...(19): siRNA sense strand
agaacaagcucauaguauu

SEQ ID NO: 1679337 - RNA, 19 nt, Homo sapiens
  misc_RNA (1)...(19): siRNA sense strand
gauaaugauuccuacguau

SEQ ID NO: 1679338 - RNA, 19 nt, Homo sapiens
  misc_RNA (1)...(19): siRNA sense strand
acaaauggaaccaaucuua

SEQ ID NO: 1679339 - RNA, 19 nt, Homo sapiens
  misc_RNA (1)...(19): siRNA sense strand
gaucuuggaugauguuugg

SEQ ID NO: 1679340 - RNA, 19 nt, Homo sapiens
  misc_RNA (1)...(19): siRNA sense strand
caaauggaaccaaucuuaa

SEQ ID NO: 1679341 - RNA, 19 nt, Homo sapiens
  misc_RNA (1)...(19): siRNA sense strand
ccacagaggccaguuguuu

SEQ ID NO: 1679342 - RNA, 19 nt, Homo sapiens
  misc_RNA (1)...(19): siRNA sense strand
aguaauggguccuaaauau

SEQ ID NO: 1679343 - RNA, 19 nt, Homo sapiens
  misc_RNA (1)...(19): siRNA sense strand
agcagaagcucuccaaauu

SEQ ID NO: 1679344 - RNA, 19 nt, Homo sapiens
  misc_RNA (1)...(19): siRNA sense strand
caagacauccuacaucaug

SEQ ID NO: 1679345 - RNA, 19 nt, Homo sapiens
  misc_RNA (1)...(19): siRNA sense strand
acaaugcucuacuacauga

SEQ ID NO: 1679346 - RNA, 19 nt, Homo sapiens
  misc_RNA (1)...(19): siRNA sense strand
caugauuagugauggauuu

SEQ ID NO: 1679347 - RNA, 19 nt, Homo sapiens
  misc_RNA (1)...(19): siRNA sense strand
aaucugggcuucugaugaa

SEQ ID NO: 1679348 - RNA, 19 nt, Homo sapiens
  misc_RNA (1)...(19): siRNA sense strand
gaagcucuccaaauugaaa

SEQ ID NO: 1679349 - RNA, 19 nt, Homo sapiens
  misc_RNA (1)...(19): siRNA sense strand
gcagaagcucuccaaauug

SEQ ID NO: 1679350 - RNA, 19 nt, Homo sapiens
  misc_RNA (1)...(19): siRNA sense strand
cuacaaugcucuacuacau

SEQ ID NO: 1679351 - RNA, 19 nt, Homo sapiens
  misc_RNA (1)...(19): siRNA sense strand
gacaagaguguuacagauu

SEQ ID NO: 1679352 - RNA, 19 nt, Homo sapiens
  misc_RNA (1)...(19): siRNA sense strand
ugaugaaacugcagaaucu

SEQ ID NO: 1679353 - RNA, 19 nt, Homo sapiens
  misc_RNA (1)...(19): siRNA sense strand
cccagaggcuuccacuuaa

SEQ ID NO: 1679354 - RNA, 19 nt, Homo sapiens
  misc_RNA (1)...(19): siRNA sense strand
gagaagcucuggaaaagga

SEQ ID NO: 1679355 - RNA, 19 nt, Homo sapiens
  misc_RNA (1)...(19): siRNA sense strand
agauaaugauuccuacgua

SEQ ID NO: 1679356 - RNA, 19 nt, Homo sapiens
  misc_RNA (1)...(19): siRNA sense strand
ucccagaggcuuccacuua

SEQ ID NO: 1679357 - RNA, 19 nt, Homo sapiens
  misc_RNA (1)...(19): siRNA sense strand
acaagaguguuacagauuc

SEQ ID NO: 1679358 - RNA, 19 nt, Homo sapiens
  misc_RNA (1)...(19): siRNA sense strand
cuacacaaauggaaccaau

SEQ ID NO: 1679359 - RNA, 19 nt, Homo sapiens
  misc_RNA (1)...(19): siRNA sense strand
ccagaacaagcucauagua

SEQ ID NO: 1679360 - RNA, 19 nt, Homo sapiens
  misc_RNA (1)...(19): siRNA sense strand
caugaaggauauaaagauc

SEQ ID NO: 1679361 - RNA, 19 nt, Homo sapiens
  misc_RNA (1)...(19): siRNA sense strand
agacaagaguguuacagau

SEQ ID NO: 1679362 - RNA, 19 nt, Homo sapiens
  misc_RNA (1)...(19): siRNA sense strand
gagacaagaguguuacaga

SEQ ID NO: 1679363 - RNA, 19 nt, Homo sapiens
  misc_RNA (1)...(19): siRNA sense strand
caagaguguuacagauuca

SEQ ID NO: 1679364 - RNA, 19 nt, Homo sapiens
  misc_RNA (1)...(19): siRNA sense strand
guaauggguccuaaauaug

SEQ ID NO: 1679365 - RNA, 19 nt, Homo sapiens
  misc_RNA (1)...(19): siRNA sense strand
caugauggcauuccuguug

SEQ ID NO: 1679366 - RNA, 19 nt, Homo sapiens
  misc_RNA (1)...(19): siRNA sense strand
gaccgucuccgcauucuga

SEQ ID NO: 1679367 - RNA, 19 nt, Homo sapiens
  misc_RNA (1)...(19): siRNA sense strand
ugcagaagcuguuagagau

SEQ ID NO: 1679368 - RNA, 19 nt, Homo sapiens
  misc_RNA (1)...(19): siRNA sense strand
cagaacaagcucauaguau

SEQ ID NO: 1679369 - RNA, 19 nt, Homo sapiens
  misc_RNA (1)...(19): siRNA sense strand
cagaggcuuccacuuaaua

SEQ ID NO: 1679370 - RNA, 19 nt, Homo sapiens
  misc_RNA (1)...(19): siRNA sense strand
agacaaaucugggcuucug

SEQ ID NO: 1679371 - RNA, 19 nt, Homo sapiens
  misc_RNA (1)...(19): siRNA sense strand
cuacguaucauucuacaau

SEQ ID NO: 1679372 - RNA, 19 nt, Homo sapiens
  misc_RNA (1)...(19): siRNA sense strand
uaauggguccuaaauaugu

SEQ ID NO: 1679373 - RNA, 19 nt, Homo sapiens
  misc_RNA (1)...(19): siRNA sense strand
gcauuccuguugucucuuc

SEQ ID NO: 1679374 - RNA, 19 nt, Homo sapiens
  misc_RNA (1)...(19): siRNA sense strand
ucuacuacaugaaggauau

SEQ ID NO: 1679375 - RNA, 19 nt, Homo sapiens
  misc_RNA (1)...(19): siRNA sense strand
cagaagcuguuagagauca

SEQ ID NO: 1679376 - RNA, 19 nt, Homo sapiens
  misc_RNA (1)...(19): siRNA sense strand
ccagaggcuuccacuuaau

SEQ ID NO: 1679377 - RNA, 19 nt, Homo sapiens
  misc_RNA (1)...(19): siRNA sense strand
caaggaagaagcuggugaa

SEQ ID NO: 1679378 - RNA, 19 nt, Homo sapiens
  misc_RNA (1)...(19): siRNA sense strand
cgaaauuguuugcuucaac

SEQ ID NO: 1679379 - RNA, 19 nt, Homo sapiens
  misc_RNA (1)...(19): siRNA sense strand
cagcagaagcucuccaaau

SEQ ID NO: 1679380 - RNA, 19 nt, Homo sapiens
  misc_RNA (1)...(19): siRNA sense strand
ggcuuccacuuaauauuga

SEQ ID NO: 1679381 - RNA, 19 nt, Homo sapiens
  misc_RNA (1)...(19): siRNA sense strand
caaaagcucgaaauuguuu

SEQ ID NO: 1679382 - RNA, 19 nt, Homo sapiens
  misc_RNA (1)...(19): siRNA sense strand
guugaaagcuuuugacagu

SEQ ID NO: 1679383 - RNA, 19 nt, Homo sapiens
  misc_RNA (1)...(19): siRNA sense strand
cacagaccuucuacacaaa

SEQ ID NO: 1679384 - RNA, 19 nt, Homo sapiens
  misc_RNA (1)...(19): siRNA sense strand
uugcugcccuucuccauga

SEQ ID NO: 1679385 - RNA, 19 nt, Homo sapiens
  misc_RNA (1)...(19): siRNA sense strand
caguaauggguccuaaaua

SEQ ID NO: 1679386 - RNA, 19 nt, Homo sapiens
  misc_RNA (1)...(19): siRNA sense strand
aacaauaucagaagaggaa

SEQ ID NO: 1679387 - RNA, 19 nt, Homo sapiens
  misc_RNA (1)...(19): siRNA sense strand
caacagcaaagagcagcua

SEQ ID NO: 1679388 - RNA, 19 nt, Homo sapiens
  misc_RNA (1)...(19): siRNA sense strand
gggagugcauuggguuuca

SEQ ID NO: 1679389 - RNA, 19 nt, Homo sapiens
  misc_RNA (1)...(19): siRNA sense strand
auucuacaaugcucuacua

SEQ ID NO: 1679390 - RNA, 19 nt, Homo sapiens
  misc_RNA (1)...(19): siRNA sense strand
aauggguccuaaauaugua

SEQ ID NO: 1679391 - RNA, 19 nt, Homo sapiens
  misc_RNA (1)...(19): siRNA sense strand
caucaagacauccuacauc

SEQ ID NO: 1679392 - RNA, 19 nt, Homo sapiens
  misc_RNA (1)...(19): siRNA sense strand
ugaaacugcagaaucuuug

SEQ ID NO: 1679393 - RNA, 19 nt, Homo sapiens
  misc_RNA (1)...(19): siRNA sense strand
gaagcuggugaaugcaauu

SEQ ID NO: 1679394 - RNA, 19 nt, Homo sapiens
  misc_RNA (1)...(19): siRNA sense strand
gcaaacacccaaggucucu

SEQ ID NO: 1679395 - RNA, 19 nt, Homo sapiens
  misc_RNA (1)...(19): siRNA sense strand
ucaguaauggguccuaaau

SEQ ID NO: 1679396 - RNA, 19 nt, Homo sapiens
  misc_RNA (1)...(19): siRNA sense strand
cuacaugaaggauauaaag

SEQ ID NO: 1679397 - RNA, 19 nt, Homo sapiens
  misc_RNA (1)...(19): siRNA sense strand
gaguguuacagauucagua

SEQ ID NO: 1679398 - RNA, 19 nt, Homo sapiens
  misc_RNA (1)...(19): siRNA sense strand
ugcaaaagcucgaaauugu

SEQ ID NO: 1679399 - RNA, 19 nt, Homo sapiens
  misc_RNA (1)...(19): siRNA sense strand
cagugucagauucuucuua

SEQ ID NO: 1679400 - RNA, 19 nt, Homo sapiens
  misc_RNA (1)...(19): siRNA sense strand
aaaaggacaucaagacauc

SEQ ID NO: 1679401 - RNA, 19 nt, Homo sapiens
  misc_RNA (1)...(19): siRNA sense strand
ugucagauucuucuuacaa

SEQ ID NO: 1679402 - RNA, 19 nt, Homo sapiens
  misc_RNA (1)...(19): siRNA sense strand
gaaaaggacaucaagacau

SEQ ID NO: 1679403 - RNA, 19 nt, Homo sapiens
  misc_RNA (1)...(19): siRNA sense strand
uagagaucauucccuuuua

SEQ ID NO: 1679404 - RNA, 19 nt, Homo sapiens
  misc_RNA (1)...(19): siRNA sense strand
gcagaagcuguuagagauc

SEQ ID NO: 1679405 - RNA, 19 nt, Homo sapiens
  misc_RNA (1)...(19): siRNA sense strand
uggaucaggaugagaguuu

SEQ ID NO: 1679406 - RNA, 19 nt, Homo sapiens
  misc_RNA (1)...(19): siRNA sense strand
caaauugaaaggugaacca

SEQ ID NO: 1679407 - RNA, 19 nt, Homo sapiens
  misc_RNA (1)...(19): siRNA sense strand
auaugaagaaggcagauuu

SEQ ID NO: 1679408 - RNA, 19 nt, Homo sapiens
  misc_RNA (1)...(19): siRNA sense strand
aucaagacauccuacauca

SEQ ID NO: 1679409 - RNA, 19 nt, Homo sapiens
  misc_RNA (1)...(19): siRNA sense strand
gaugauguuugggacucuu

SEQ ID NO: 1679410 - RNA, 19 nt, Homo sapiens
  misc_RNA (1)...(19): siRNA sense strand
gugcauuggguuucaguug

SEQ ID NO: 1679411 - RNA, 19 nt, Homo sapiens
  misc_RNA (1)...(19): siRNA sense strand
cugcagaagcuguuagaga

SEQ ID NO: 1679412 - RNA, 19 nt, Homo sapiens
  misc_RNA (1)...(19): siRNA sense strand
uggcauuccuguugucucu

SEQ ID NO: 1679413 - RNA, 19 nt, Homo sapiens
  misc_RNA (1)...(19): siRNA sense strand
gcaaaagcucgaaauuguu

SEQ ID NO: 1679414 - RNA, 19 nt, Homo sapiens
  misc_RNA (1)...(19): siRNA sense strand
ugggaagucuguauuagcu

SEQ ID NO: 1679415 - RNA, 19 nt, Homo sapiens
  misc_RNA (1)...(19): siRNA sense strand
gugugaagguggaguacca

SEQ ID NO: 1679416 - RNA, 19 nt, Homo sapiens
  misc_RNA (1)...(19): siRNA sense strand
aggcuuccacuuaauauug

SEQ ID NO: 1679417 - RNA, 19 nt, Homo sapiens
  misc_RNA (1)...(19): siRNA sense strand
gaggcuuccacuuaauauu

SEQ ID NO: 1679418 - RNA, 19 nt, Homo sapiens
  misc_RNA (1)...(19): siRNA sense strand
gcugugggaagucuguauu

SEQ ID NO: 1679419 - RNA, 19 nt, Homo sapiens
  misc_RNA (1)...(19): siRNA sense strand
caaaucugggcuucugaug

SEQ ID NO: 1679420 - RNA, 19 nt, Homo sapiens
  misc_RNA (1)...(19): siRNA sense strand
acacaaauggaaccaaucu

SEQ ID NO: 1679421 - RNA, 19 nt, Homo sapiens
  misc_RNA (1)...(19): siRNA sense strand
cagaccuucuacacaaaug

SEQ ID NO: 1679422 - RNA, 19 nt, Homo sapiens
  misc_RNA (1)...(19): siRNA sense strand
uaugaagaaggcagauuug

SEQ ID NO: 1679423 - RNA, 19 nt, Homo sapiens
  misc_RNA (1)...(19): siRNA sense strand
ggaaaaggacaucaagaca

SEQ ID NO: 1679424 - RNA, 19 nt, Homo sapiens
  misc_RNA (1)...(19): siRNA sense strand
aaaucugggcuucugauga

SEQ ID NO: 1679425 - RNA, 19 nt, Homo sapiens
  misc_RNA (1)...(19): siRNA sense strand
guaccacagaggccaguug

SEQ ID NO: 1679426 - RNA, 19 nt, Homo sapiens
  misc_RNA (1)...(19): siRNA sense strand
caaccagagacaagagugu

SEQ ID NO: 1679427 - RNA, 19 nt, Homo sapiens
  misc_RNA (1)...(19): siRNA sense strand
agaagcuggugaaugcaau

SEQ ID NO: 1679428 - RNA, 19 nt, Homo sapiens
  misc_RNA (1)...(19): siRNA sense strand
gaagcuguuagagaucauu

SEQ ID NO: 1679429 - RNA, 19 nt, Homo sapiens
  misc_RNA (1)...(19): siRNA sense strand
gucagauucuucuuacaac

SEQ ID NO: 1679430 - RNA, 19 nt, Homo sapiens
  misc_RNA (1)...(19): siRNA sense strand
ggaagaagcuggugaaugc

SEQ ID NO: 1679431 - RNA, 19 nt, Homo sapiens
  misc_RNA (1)...(19): siRNA sense strand
gaacaagcucauaguauua

SEQ ID NO: 1679432 - RNA, 19 nt, Homo sapiens
  misc_RNA (1)...(19): siRNA sense strand
cagaagcucuccaaauuga

SEQ ID NO: 1679433 - RNA, 19 nt, Homo sapiens
  misc_RNA (1)...(19): siRNA sense strand
ucacagaccuucuacacaa

SEQ ID NO: 1679434 - RNA, 19 nt, Homo sapiens
  misc_RNA (1)...(19): siRNA sense strand
agaacaagcucauaguauu

SEQ ID NO: 1679435 - RNA, 19 nt, Homo sapiens
  misc_RNA (1)...(19): siRNA sense strand
gauaaugauuccuacguau

SEQ ID NO: 1679436 - RNA, 19 nt, Homo sapiens
  misc_RNA (1)...(19): siRNA sense strand
acaaauggaaccaaucuua

SEQ ID NO: 1679437 - RNA, 19 nt, Homo sapiens
  misc_RNA (1)...(19): siRNA sense strand
gaucuuggaugauguuugg

SEQ ID NO: 1679438 - RNA, 19 nt, Homo sapiens
  misc_RNA (1)...(19): siRNA sense strand
caaauggaaccaaucuuaa

SEQ ID NO: 1679439 - RNA, 19 nt, Homo sapiens
  misc_RNA (1)...(19): siRNA sense strand
ccacagaggccaguuguuu

SEQ ID NO: 1679440 - RNA, 19 nt, Homo sapiens
  misc_RNA (1)...(19): siRNA sense strand
aguaauggguccuaaauau

SEQ ID NO: 1679441 - RNA, 19 nt, Homo sapiens
  misc_RNA (1)...(19): siRNA sense strand
agcagaagcucuccaaauu

SEQ ID NO: 1679442 - RNA, 19 nt, Homo sapiens
  misc_RNA (1)...(19): siRNA sense strand
caagacauccuacaucaug

SEQ ID NO: 1679443 - RNA, 19 nt, Homo sapiens
  misc_RNA (1)...(19): siRNA sense strand
acaaugcucuacuacauga

SEQ ID NO: 1679444 - RNA, 19 nt, Homo sapiens
  misc_RNA (1)...(19): siRNA sense strand
caugauuagugauggauuu

SEQ ID NO: 1679445 - RNA, 19 nt, Homo sapiens
  misc_RNA (1)...(19): siRNA sense strand
aaucugggcuucugaugaa

SEQ ID NO: 1679446 - RNA, 19 nt, Homo sapiens
  misc_RNA (1)...(19): siRNA sense strand
gaagcucuccaaauugaaa

SEQ ID NO: 1679447 - RNA, 19 nt, Homo sapiens
  misc_RNA (1)...(19): siRNA sense strand
gcagaagcucuccaaauug

SEQ ID NO: 1679448 - RNA, 19 nt, Homo sapiens
  misc_RNA (1)...(19): siRNA sense strand
cuacaaugcucuacuacau

SEQ ID NO: 1679449 - RNA, 19 nt, Homo sapiens
  misc_RNA (1)...(19): siRNA sense strand
gacaagaguguuacagauu

SEQ ID NO: 1679450 - RNA, 19 nt, Homo sapiens
  misc_RNA (1)...(19): siRNA sense strand
ugaugaaacugcagaaucu

SEQ ID NO: 1679451 - RNA, 19 nt, Homo sapiens
  misc_RNA (1)...(19): siRNA sense strand
cccagaggcuuccacuuaa

SEQ ID NO: 1679452 - RNA, 19 nt, Homo sapiens
  misc_RNA (1)...(19): siRNA sense strand
gagaagcucuggaaaagga

SEQ ID NO: 1679453 - RNA, 19 nt, Homo sapiens
  misc_RNA (1)...(19): siRNA sense strand
agauaaugauuccuacgua

SEQ ID NO: 1679454 - RNA, 19 nt, Homo sapiens
  misc_RNA (1)...(19): siRNA sense strand
ucccagaggcuuccacuua

SEQ ID NO: 1679455 - RNA, 19 nt, Homo sapiens
  misc_RNA (1)...(19): siRNA sense strand
acaagaguguuacagauuc

SEQ ID NO: 1679456 - RNA, 19 nt, Homo sapiens
  misc_RNA (1)...(19): siRNA sense strand
cuacacaaauggaaccaau

SEQ ID NO: 1679457 - RNA, 19 nt, Homo sapiens
  misc_RNA (1)...(19): siRNA sense strand
ccagaacaagcucauagua

SEQ ID NO: 1679458 - RNA, 19 nt, Homo sapiens
  misc_RNA (1)...(19): siRNA sense strand
caugaaggauauaaagauc

SEQ ID NO: 1679459 - RNA, 19 nt, Homo sapiens
  misc_RNA (1)...(19): siRNA sense strand
agacaagaguguuacagau

SEQ ID NO: 1679460 - RNA, 19 nt, Homo sapiens
  misc_RNA (1)...(19): siRNA sense strand
gagacaagaguguuacaga

SEQ ID NO: 1679461 - RNA, 19 nt, Homo sapiens
  misc_RNA (1)...(19): siRNA sense strand
caagaguguuacagauuca

SEQ ID NO: 1679462 - RNA, 19 nt, Homo sapiens
  misc_RNA (1)...(19): siRNA sense strand
guaauggguccuaaauaug

SEQ ID NO: 1679463 - RNA, 19 nt, Homo sapiens
  misc_RNA (1)...(19): siRNA sense strand
caugauggcauuccuguug

SEQ ID NO: 1679464 - RNA, 19 nt, Homo sapiens
  misc_RNA (1)...(19): siRNA sense strand
uggaaccaaucuuaagaaa

SEQ ID NO: 1679465 - RNA, 19 nt, Homo sapiens
  misc_RNA (1)...(19): siRNA sense strand
gaccgucuccgcauucuga

SEQ ID NO: 1679466 - RNA, 19 nt, Homo sapiens
  misc_RNA (1)...(19): siRNA sense strand
ugcagaagcuguuagagau

SEQ ID NO: 1679467 - RNA, 19 nt, Homo sapiens
  misc_RNA (1)...(19): siRNA sense strand
cauaugugacuguggauaa

SEQ ID NO: 1679468 - RNA, 19 nt, Homo sapiens
  misc_RNA (1)...(19): siRNA sense strand
cagaacaagcucauaguau

SEQ ID NO: 1679469 - RNA, 19 nt, Homo sapiens
  misc_RNA (1)...(19): siRNA sense strand
cagaggcuuccacuuaaua

SEQ ID NO: 1679470 - RNA, 19 nt, Homo sapiens
  misc_RNA (1)...(19): siRNA sense strand
agacaaaucugggcuucug

SEQ ID NO: 1679471 - RNA, 19 nt, Homo sapiens
  misc_RNA (1)...(19): siRNA sense strand
cuacguaucauucuacaau

SEQ ID NO: 1679472 - RNA, 19 nt, Homo sapiens
  misc_RNA (1)...(19): siRNA sense strand
uaauggguccuaaauaugu

SEQ ID NO: 1679473 - RNA, 19 nt, Homo sapiens
  misc_RNA (1)...(19): siRNA sense strand
gcauuccuguugucucuuc

SEQ ID NO: 1679474 - RNA, 19 nt, Homo sapiens
  misc_RNA (1)...(19): siRNA sense strand
ucuacuacaugaaggauau

SEQ ID NO: 1679475 - RNA, 19 nt, Homo sapiens
  misc_RNA (1)...(19): siRNA sense strand
cagaagcuguuagagauca

SEQ ID NO: 1679476 - RNA, 19 nt, Homo sapiens
  misc_RNA (1)...(19): siRNA sense strand
ccagaggcuuccacuuaau

SEQ ID NO: 1679477 - RNA, 19 nt, Homo sapiens
  misc_RNA (1)...(19): siRNA sense strand
caaggaagaagcuggugaa

SEQ ID NO: 1679478 - RNA, 19 nt, Homo sapiens
  misc_RNA (1)...(19): siRNA sense strand
cgaaauuguuugcuucaac

SEQ ID NO: 1679479 - RNA, 19 nt, Homo sapiens
  misc_RNA (1)...(19): siRNA sense strand
cagcagaagcucuccaaau

SEQ ID NO: 1679480 - RNA, 19 nt, Homo sapiens
  misc_RNA (1)...(19): siRNA sense strand
ggcuuccacuuaauauuga

SEQ ID NO: 1679481 - RNA, 19 nt, Homo sapiens
  misc_RNA (1)...(19): siRNA sense strand
caaaagcucgaaauuguuu

SEQ ID NO: 1679482 - RNA, 19 nt, Homo sapiens
  misc_RNA (1)...(19): siRNA sense strand
guggauaaucuugguauuu

SEQ ID NO: 1679483 - RNA, 19 nt, Homo sapiens
  misc_RNA (1)...(19): siRNA sense strand
guugaaagcuuuugacagu

SEQ ID NO: 1679484 - RNA, 19 nt, Homo sapiens
  misc_RNA (1)...(19): siRNA sense strand
cacagaccuucuacacaaa

SEQ ID NO: 1679485 - RNA, 19 nt, Homo sapiens
  misc_RNA (1)...(19): siRNA sense strand
uugcugcccuucuccauga

SEQ ID NO: 1679486 - RNA, 19 nt, Homo sapiens
  misc_RNA (1)...(19): siRNA sense strand
caguaauggguccuaaaua

SEQ ID NO: 1679487 - RNA, 19 nt, Homo sapiens
  misc_RNA (1)...(19): siRNA sense strand
gggagugcauuggguuuca

SEQ ID NO: 1679488 - RNA, 19 nt, Homo sapiens
  misc_RNA (1)...(19): siRNA sense strand
aacaauaucagaagaggaa

SEQ ID NO: 1679489 - RNA, 19 nt, Homo sapiens
  misc_RNA (1)...(19): siRNA sense strand
caacagcaaagagcagcua

SEQ ID NO: 1679490 - RNA, 19 nt, Homo sapiens
  misc_RNA (1)...(19): siRNA sense strand
gaagcuggugaaugcaauu

SEQ ID NO: 1679491 - RNA, 19 nt, Homo sapiens
  misc_RNA (1)...(19): siRNA sense strand
aauggguccuaaauaugua

SEQ ID NO: 1679492 - RNA, 19 nt, Homo sapiens
  misc_RNA (1)...(19): siRNA sense strand
caucaagacauccuacauc

SEQ ID NO: 1679493 - RNA, 19 nt, Homo sapiens
  misc_RNA (1)...(19): siRNA sense strand
auucuacaaugcucuacua

SEQ ID NO: 1679494 - RNA, 19 nt, Homo sapiens
  misc_RNA (1)...(19): siRNA sense strand
ugaaacugcagaaucuuug

SEQ ID NO: 1679495 - RNA, 19 nt, Homo sapiens
  misc_RNA (1)...(19): siRNA sense strand
gcaaacacccaaggucucu

SEQ ID NO: 1679496 - RNA, 19 nt, Homo sapiens
  misc_RNA (1)...(19): siRNA sense strand
ucaguaauggguccuaaau

SEQ ID NO: 1679497 - RNA, 19 nt, Homo sapiens
  misc_RNA (1)...(19): siRNA sense strand
cuacaugaaggauauaaag

SEQ ID NO: 1679498 - RNA, 19 nt, Homo sapiens
  misc_RNA (1)...(19): siRNA sense strand
gaguguuacagauucagua

SEQ ID NO: 1679499 - RNA, 19 nt, Homo sapiens
  misc_RNA (1)...(19): siRNA sense strand
ugcaaaagcucgaaauugu

SEQ ID NO: 1679500 - RNA, 19 nt, Homo sapiens
  misc_RNA (1)...(19): siRNA sense strand
cagugucagauucuucuua

SEQ ID NO: 1679501 - RNA, 19 nt, Homo sapiens
  misc_RNA (1)...(19): siRNA sense strand
aaaaggacaucaagacauc

SEQ ID NO: 1679502 - RNA, 19 nt, Homo sapiens
  misc_RNA (1)...(19): siRNA sense strand
ugucagauucuucuuacaa

SEQ ID NO: 1679503 - RNA, 19 nt, Homo sapiens
  misc_RNA (1)...(19): siRNA sense strand
uagagaucauucccuuuua

SEQ ID NO: 1679504 - RNA, 19 nt, Homo sapiens
  misc_RNA (1)...(19): siRNA sense strand
gaaaaggacaucaagacau

SEQ ID NO: 1679505 - RNA, 19 nt, Homo sapiens
  misc_RNA (1)...(19): siRNA sense strand
gcagaagcuguuagagauc

SEQ ID NO: 1679506 - RNA, 19 nt, Homo sapiens
  misc_RNA (1)...(19): siRNA sense strand
uggaucaggaugagaguuu

SEQ ID NO: 1679507 - RNA, 19 nt, Homo sapiens
  misc_RNA (1)...(19): siRNA sense strand
caaauugaaaggugaacca

SEQ ID NO: 1679508 - RNA, 19 nt, Homo sapiens
  misc_RNA (1)...(19): siRNA sense strand
auaugaagaaggcagauuu

SEQ ID NO: 1679509 - RNA, 19 nt, Homo sapiens
  misc_RNA (1)...(19): siRNA sense strand
aucaagacauccuacauca

SEQ ID NO: 1679510 - RNA, 19 nt, Homo sapiens
  misc_RNA (1)...(19): siRNA sense strand
gaugauguuugggacucuu

SEQ ID NO: 1679511 - RNA, 19 nt, Homo sapiens
  misc_RNA (1)...(19): siRNA sense strand
gugcauuggguuucaguug

SEQ ID NO: 1679512 - RNA, 19 nt, Homo sapiens
  misc_RNA (1)...(19): siRNA sense strand
cugcagaagcuguuagaga

SEQ ID NO: 1679513 - RNA, 19 nt, Homo sapiens
  misc_RNA (1)...(19): siRNA sense strand
uggcauuccuguugucucu

SEQ ID NO: 1679514 - RNA, 19 nt, Homo sapiens
  misc_RNA (1)...(19): siRNA sense strand
gcaaaagcucgaaauuguu

SEQ ID NO: 1679515 - RNA, 19 nt, Homo sapiens
  misc_RNA (1)...(19): siRNA sense strand
ugggaagucuguauuagcu

SEQ ID NO: 1679516 - RNA, 19 nt, Homo sapiens
  misc_RNA (1)...(19): siRNA sense strand
gugugaagguggaguacca

SEQ ID NO: 1679517 - RNA, 19 nt, Homo sapiens
  misc_RNA (1)...(19): siRNA sense strand
aggcuuccacuuaauauug

SEQ ID NO: 1679518 - RNA, 19 nt, Homo sapiens
  misc_RNA (1)...(19): siRNA sense strand
gaggcuuccacuuaauauu

SEQ ID NO: 1679519 - RNA, 19 nt, Homo sapiens
  misc_RNA (1)...(19): siRNA sense strand
gcugugggaagucuguauu

SEQ ID NO: 1679520 - RNA, 19 nt, Homo sapiens
  misc_RNA (1)...(19): siRNA sense strand
caaaucugggcuucugaug

SEQ ID NO: 1679521 - RNA, 19 nt, Homo sapiens
  misc_RNA (1)...(19): siRNA sense strand
aauggaaccaaucuuaaga

SEQ ID NO: 1679522 - RNA, 19 nt, Homo sapiens
  misc_RNA (1)...(19): siRNA sense strand
acacaaauggaaccaaucu

SEQ ID NO: 1679523 - RNA, 19 nt, Homo sapiens
  misc_RNA (1)...(19): siRNA sense strand
cagaccuucuacacaaaug

SEQ ID NO: 1679524 - RNA, 19 nt, Homo sapiens
  misc_RNA (1)...(19): siRNA sense strand
uaugaagaaggcagauuug

SEQ ID NO: 1679525 - RNA, 19 nt, Homo sapiens
  misc_RNA (1)...(19): siRNA sense strand
ggaaaaggacaucaagaca

SEQ ID NO: 1679526 - RNA, 19 nt, Homo sapiens
  misc_RNA (1)...(19): siRNA sense strand
aaaucugggcuucugauga

SEQ ID NO: 1679527 - RNA, 19 nt, Homo sapiens
  misc_RNA (1)...(19): siRNA sense strand
agaagcuggugaaugcaau

SEQ ID NO: 1679528 - RNA, 19 nt, Homo sapiens
  misc_RNA (1)...(19): siRNA sense strand
aaauggaaccaaucuuaag

SEQ ID NO: 1679529 - RNA, 19 nt, Homo sapiens
  misc_RNA (1)...(19): siRNA sense strand
caaccagagacaagagugu

SEQ ID NO: 1679530 - RNA, 19 nt, Homo sapiens
  misc_RNA (1)...(19): siRNA sense strand
ggaagaagcuggugaaugc

SEQ ID NO: 1679531 - RNA, 19 nt, Homo sapiens
  misc_RNA (1)...(19): siRNA sense strand
gaacaagcucauaguauua

SEQ ID NO: 1679532 - RNA, 19 nt, Homo sapiens
  misc_RNA (1)...(19): siRNA sense strand
cagaagcucuccaaauuga

SEQ ID NO: 1679533 - RNA, 19 nt, Homo sapiens
  misc_RNA (1)...(19): siRNA sense strand
ucacagaccuucuacacaa

SEQ ID NO: 1679534 - RNA, 19 nt, Homo sapiens
  misc_RNA (1)...(19): siRNA sense strand
agaacaagcucauaguauu

SEQ ID NO: 1679535 - RNA, 19 nt, Homo sapiens
  misc_RNA (1)...(19): siRNA sense strand
gauaaugauuccuacguau

SEQ ID NO: 1679536 - RNA, 19 nt, Homo sapiens
  misc_RNA (1)...(19): siRNA sense strand
acaaauggaaccaaucuua

SEQ ID NO: 1679537 - RNA, 19 nt, Homo sapiens
  misc_RNA (1)...(19): siRNA sense strand
gaucuuggaugauguuugg

SEQ ID NO: 1679538 - RNA, 19 nt, Homo sapiens
  misc_RNA (1)...(19): siRNA sense strand
caaauggaaccaaucuuaa

SEQ ID NO: 1679539 - RNA, 19 nt, Homo sapiens
  misc_RNA (1)...(19): siRNA sense strand
ccacagaggccaguuguuu

SEQ ID NO: 1679540 - RNA, 19 nt, Homo sapiens
  misc_RNA (1)...(19): siRNA sense strand
aguaauggguccuaaauau

SEQ ID NO: 1679541 - RNA, 19 nt, Homo sapiens
  misc_RNA (1)...(19): siRNA sense strand
agcagaagcucuccaaauu

SEQ ID NO: 1679542 - RNA, 19 nt, Homo sapiens
  misc_RNA (1)...(19): siRNA sense strand
caagacauccuacaucaug

SEQ ID NO: 1679543 - RNA, 19 nt, Homo sapiens
  misc_RNA (1)...(19): siRNA sense strand
acaaugcucuacuacauga

SEQ ID NO: 1679544 - RNA, 19 nt, Homo sapiens
  misc_RNA (1)...(19): siRNA sense strand
caugauuagugauggauuu

SEQ ID NO: 1679545 - RNA, 19 nt, Homo sapiens
  misc_RNA (1)...(19): siRNA sense strand
aaucugggcuucugaugaa

SEQ ID NO: 1679546 - RNA, 19 nt, Homo sapiens
  misc_RNA (1)...(19): siRNA sense strand
gaagcucuccaaauugaaa

SEQ ID NO: 1679547 - RNA, 19 nt, Homo sapiens
  misc_RNA (1)...(19): siRNA sense strand
gcagaagcucuccaaauug

SEQ ID NO: 1679548 - RNA, 19 nt, Homo sapiens
  misc_RNA (1)...(19): siRNA sense strand
cuacaaugcucuacuacau

SEQ ID NO: 1679549 - RNA, 19 nt, Homo sapiens
  misc_RNA (1)...(19): siRNA sense strand
gacaagaguguuacagauu

SEQ ID NO: 1679550 - RNA, 19 nt, Homo sapiens
  misc_RNA (1)...(19): siRNA sense strand
ugaugaaacugcagaaucu

SEQ ID NO: 1679551 - RNA, 19 nt, Homo sapiens
  misc_RNA (1)...(19): siRNA sense strand
cccagaggcuuccacuuaa

SEQ ID NO: 1679552 - RNA, 19 nt, Homo sapiens
  misc_RNA (1)...(19): siRNA sense strand
gagaagcucuggaaaagga

SEQ ID NO: 1679553 - RNA, 19 nt, Homo sapiens
  misc_RNA (1)...(19): siRNA sense strand
agauaaugauuccuacgua

SEQ ID NO: 1679554 - RNA, 19 nt, Homo sapiens
  misc_RNA (1)...(19): siRNA sense strand
ucccagaggcuuccacuua

SEQ ID NO: 1679555 - RNA, 19 nt, Homo sapiens
  misc_RNA (1)...(19): siRNA sense strand
acaagaguguuacagauuc

SEQ ID NO: 1679556 - RNA, 19 nt, Homo sapiens
  misc_RNA (1)...(19): siRNA sense strand
cuacacaaauggaaccaau

SEQ ID NO: 1679557 - RNA, 19 nt, Homo sapiens
  misc_RNA (1)...(19): siRNA sense strand
ccagaacaagcucauagua

SEQ ID NO: 1679558 - RNA, 19 nt, Homo sapiens
  misc_RNA (1)...(19): siRNA sense strand
caugaaggauauaaagauc

SEQ ID NO: 1679559 - RNA, 19 nt, Homo sapiens
  misc_RNA (1)...(19): siRNA sense strand
agacaagaguguuacagau

SEQ ID NO: 1679560 - RNA, 19 nt, Homo sapiens
  misc_RNA (1)...(19): siRNA sense strand
gagacaagaguguuacaga

SEQ ID NO: 1679561 - RNA, 19 nt, Homo sapiens
  misc_RNA (1)...(19): siRNA sense strand
caagaguguuacagauuca

SEQ ID NO: 1679562 - RNA, 19 nt, Homo sapiens
  misc_RNA (1)...(19): siRNA sense strand
guaauggguccuaaauaug

SEQ ID NO: 1679563 - RNA, 19 nt, Homo sapiens
  misc_RNA (1)...(19): siRNA sense strand
caugauggcauuccuguug

SEQ ID NO: 1679564 - RNA, 19 nt, Homo sapiens
  misc_RNA (1)...(19): siRNA sense strand
uggaaccaaucuuaagaaa

SEQ ID NO: 1679565 - RNA, 19 nt, Homo sapiens
  misc_RNA (1)...(19): siRNA sense strand
gaccgucuccgcauucuga

SEQ ID NO: 1679566 - RNA, 19 nt, Homo sapiens
  misc_RNA (1)...(19): siRNA sense strand
ugcagaagcuguuagagau

SEQ ID NO: 1679567 - RNA, 19 nt, Homo sapiens
  misc_RNA (1)...(19): siRNA sense strand
cauaugugacuguggauaa

SEQ ID NO: 1679568 - RNA, 19 nt, Homo sapiens
  misc_RNA (1)...(19): siRNA sense strand
cagaacaagcucauaguau

SEQ ID NO: 1679569 - RNA, 19 nt, Homo sapiens
  misc_RNA (1)...(19): siRNA sense strand
cagaggcuuccacuuaaua

SEQ ID NO: 1679570 - RNA, 19 nt, Homo sapiens
  misc_RNA (1)...(19): siRNA sense strand
agacaaaucugggcuucug

SEQ ID NO: 1679571 - RNA, 19 nt, Homo sapiens
  misc_RNA (1)...(19): siRNA sense strand
cuacguaucauucuacaau

SEQ ID NO: 1679572 - RNA, 19 nt, Homo sapiens
  misc_RNA (1)...(19): siRNA sense strand
uaauggguccuaaauaugu

SEQ ID NO: 1679573 - RNA, 19 nt, Homo sapiens
  misc_RNA (1)...(19): siRNA sense strand
gcauuccuguugucucuuc

SEQ ID NO: 1679574 - RNA, 19 nt, Homo sapiens
  misc_RNA (1)...(19): siRNA sense strand
ucuacuacaugaaggauau

SEQ ID NO: 1679575 - RNA, 19 nt, Homo sapiens
  misc_RNA (1)...(19): siRNA sense strand
cagaagcuguuagagauca

SEQ ID NO: 1679576 - RNA, 19 nt, Homo sapiens
  misc_RNA (1)...(19): siRNA sense strand
ccagaggcuuccacuuaau

SEQ ID NO: 1679577 - RNA, 19 nt, Homo sapiens
  misc_RNA (1)...(19): siRNA sense strand
caaggaagaagcuggugaa

SEQ ID NO: 1679578 - RNA, 19 nt, Homo sapiens
  misc_RNA (1)...(19): siRNA sense strand
cgaaauuguuugcuucaac

SEQ ID NO: 1679579 - RNA, 19 nt, Homo sapiens
  misc_RNA (1)...(19): siRNA sense strand
cagcagaagcucuccaaau

SEQ ID NO: 1679580 - RNA, 19 nt, Homo sapiens
  misc_RNA (1)...(19): siRNA sense strand
ggcuuccacuuaauauuga

SEQ ID NO: 1679581 - RNA, 19 nt, Homo sapiens
  misc_RNA (1)...(19): siRNA sense strand
caaaagcucgaaauuguuu

SEQ ID NO: 1679582 - RNA, 19 nt, Homo sapiens
  misc_RNA (1)...(19): siRNA sense strand
guggauaaucuugguauuu

SEQ ID NO: 1679583 - RNA, 19 nt, Homo sapiens
  misc_RNA (1)...(19): siRNA sense strand
guugaaagcuuuugacagu

SEQ ID NO: 1679584 - RNA, 19 nt, Homo sapiens
  misc_RNA (1)...(19): siRNA sense strand
cacagaccuucuacacaaa

SEQ ID NO: 1679585 - RNA, 19 nt, Homo sapiens
  misc_RNA (1)...(19): siRNA sense strand
uugcugcccuucuccauga

SEQ ID NO: 1679586 - RNA, 19 nt, Homo sapiens
  misc_RNA (1)...(19): siRNA sense strand
caguaauggguccuaaaua

SEQ ID NO: 1679587 - RNA, 19 nt, Homo sapiens
  misc_RNA (1)...(19): siRNA sense strand
gggagugcauuggguuuca

SEQ ID NO: 1679588 - RNA, 19 nt, Homo sapiens
  misc_RNA (1)...(19): siRNA sense strand
aacaauaucagaagaggaa

SEQ ID NO: 1679589 - RNA, 19 nt, Homo sapiens
  misc_RNA (1)...(19): siRNA sense strand
caacagcaaagagcagcua

SEQ ID NO: 1679590 - RNA, 19 nt, Homo sapiens
  misc_RNA (1)...(19): siRNA sense strand
gaagcuggugaaugcaauu

SEQ ID NO: 1679591 - RNA, 19 nt, Homo sapiens
  misc_RNA (1)...(19): siRNA sense strand
aauggguccuaaauaugua

SEQ ID NO: 1679592 - RNA, 19 nt, Homo sapiens
  misc_RNA (1)...(19): siRNA sense strand
caucaagacauccuacauc

SEQ ID NO: 1679593 - RNA, 19 nt, Homo sapiens
  misc_RNA (1)...(19): siRNA sense strand
auucuacaaugcucuacua

SEQ ID NO: 1679594 - RNA, 19 nt, Homo sapiens
  misc_RNA (1)...(19): siRNA sense strand
ugaaacugcagaaucuuug

SEQ ID NO: 1679595 - RNA, 19 nt, Homo sapiens
  misc_RNA (1)...(19): siRNA sense strand
gcaaacacccaaggucucu

SEQ ID NO: 1679596 - RNA, 19 nt, Homo sapiens
  misc_RNA (1)...(19): siRNA sense strand
ucaguaauggguccuaaau

SEQ ID NO: 1679597 - RNA, 19 nt, Homo sapiens
  misc_RNA (1)...(19): siRNA sense strand
cuacaugaaggauauaaag

SEQ ID NO: 1679598 - RNA, 19 nt, Homo sapiens
  misc_RNA (1)...(19): siRNA sense strand
gaguguuacagauucagua

SEQ ID NO: 1679599 - RNA, 19 nt, Homo sapiens
  misc_RNA (1)...(19): siRNA sense strand
ugcaaaagcucgaaauugu

SEQ ID NO: 1679600 - RNA, 19 nt, Homo sapiens
  misc_RNA (1)...(19): siRNA sense strand
cagugucagauucuucuua

SEQ ID NO: 1679601 - RNA, 19 nt, Homo sapiens
  misc_RNA (1)...(19): siRNA sense strand
aaaaggacaucaagacauc

SEQ ID NO: 1679602 - RNA, 19 nt, Homo sapiens
  misc_RNA (1)...(19): siRNA sense strand
ugucagauucuucuuacaa

SEQ ID NO: 1679603 - RNA, 19 nt, Homo sapiens
  misc_RNA (1)...(19): siRNA sense strand
uagagaucauucccuuuua

SEQ ID NO: 1679604 - RNA, 19 nt, Homo sapiens
  misc_RNA (1)...(19): siRNA sense strand
gaaaaggacaucaagacau

SEQ ID NO: 1679605 - RNA, 19 nt, Homo sapiens
  misc_RNA (1)...(19): siRNA sense strand
gcagaagcuguuagagauc

SEQ ID NO: 1679606 - RNA, 19 nt, Homo sapiens
  misc_RNA (1)...(19): siRNA sense strand
uggaucaggaugagaguuu

SEQ ID NO: 1679607 - RNA, 19 nt, Homo sapiens
  misc_RNA (1)...(19): siRNA sense strand
caaauugaaaggugaacca

SEQ ID NO: 1679608 - RNA, 19 nt, Homo sapiens
  misc_RNA (1)...(19): siRNA sense strand
auaugaagaaggcagauuu

SEQ ID NO: 1679609 - RNA, 19 nt, Homo sapiens
  misc_RNA (1)...(19): siRNA sense strand
aucaagacauccuacauca

SEQ ID NO: 1679610 - RNA, 19 nt, Homo sapiens
  misc_RNA (1)...(19): siRNA sense strand
gaugauguuugggacucuu

SEQ ID NO: 1679611 - RNA, 19 nt, Homo sapiens
  misc_RNA (1)...(19): siRNA sense strand
gugcauuggguuucaguug

SEQ ID NO: 1679612 - RNA, 19 nt, Homo sapiens
  misc_RNA (1)...(19): siRNA sense strand
cugcagaagcuguuagaga

SEQ ID NO: 1679613 - RNA, 19 nt, Homo sapiens
  misc_RNA (1)...(19): siRNA sense strand
uggcauuccuguugucucu

SEQ ID NO: 1679614 - RNA, 19 nt, Homo sapiens
  misc_RNA (1)...(19): siRNA sense strand
gcaaaagcucgaaauuguu

SEQ ID NO: 1679615 - RNA, 19 nt, Homo sapiens
  misc_RNA (1)...(19): siRNA sense strand
ugggaagucuguauuagcu

SEQ ID NO: 1679616 - RNA, 19 nt, Homo sapiens
  misc_RNA (1)...(19): siRNA sense strand
gugugaagguggaguacca

SEQ ID NO: 1679617 - RNA, 19 nt, Homo sapiens
  misc_RNA (1)...(19): siRNA sense strand
aggcuuccacuuaauauug

SEQ ID NO: 1679618 - RNA, 19 nt, Homo sapiens
  misc_RNA (1)...(19): siRNA sense strand
gaggcuuccacuuaauauu

SEQ ID NO: 1679619 - RNA, 19 nt, Homo sapiens
  misc_RNA (1)...(19): siRNA sense strand
gcugugggaagucuguauu

SEQ ID NO: 1679620 - RNA, 19 nt, Homo sapiens
  misc_RNA (1)...(19): siRNA sense strand
caaaucugggcuucugaug

SEQ ID NO: 1679621 - RNA, 19 nt, Homo sapiens
  misc_RNA (1)...(19): siRNA sense strand
aauggaaccaaucuuaaga

SEQ ID NO: 1679622 - RNA, 19 nt, Homo sapiens
  misc_RNA (1)...(19): siRNA sense strand
acacaaauggaaccaaucu

SEQ ID NO: 1679623 - RNA, 19 nt, Homo sapiens
  misc_RNA (1)...(19): siRNA sense strand
cagaccuucuacacaaaug

SEQ ID NO: 1679624 - RNA, 19 nt, Homo sapiens
  misc_RNA (1)...(19): siRNA sense strand
uaugaagaaggcagauuug

SEQ ID NO: 1679625 - RNA, 19 nt, Homo sapiens
  misc_RNA (1)...(19): siRNA sense strand
ggaaaaggacaucaagaca

SEQ ID NO: 1679626 - RNA, 19 nt, Homo sapiens
  misc_RNA (1)...(19): siRNA sense strand
aaaucugggcuucugauga

SEQ ID NO: 1679627 - RNA, 19 nt, Homo sapiens
  misc_RNA (1)...(19): siRNA sense strand
agaagcuggugaaugcaau

SEQ ID NO: 1679628 - RNA, 19 nt, Homo sapiens
  misc_RNA (1)...(19): siRNA sense strand
aaauggaaccaaucuuaag

SEQ ID NO: 1679629 - RNA, 19 nt, Homo sapiens
  misc_RNA (1)...(19): siRNA sense strand
caaccagagacaagagugu

SEQ ID NO: 1679630 - RNA, 19 nt, Homo sapiens
  misc_RNA (1)...(19): siRNA sense strand
ggaagaagcuggugaaugc

SEQ ID NO: 1679631 - RNA, 19 nt, Homo sapiens
  misc_RNA (1)...(19): siRNA sense strand
gaacaagcucauaguauua

SEQ ID NO: 1679632 - RNA, 19 nt, Homo sapiens
  misc_RNA (1)...(19): siRNA sense strand
cagaagcucuccaaauuga

SEQ ID NO: 1679633 - RNA, 19 nt, Homo sapiens
  misc_RNA (1)...(19): siRNA sense strand
ucacagaccuucuacacaa

SEQ ID NO: 1679634 - RNA, 19 nt, Homo sapiens
  misc_RNA (1)...(19): siRNA sense strand
agaacaagcucauaguauu

SEQ ID NO: 1679635 - RNA, 19 nt, Homo sapiens
  misc_RNA (1)...(19): siRNA sense strand
gauaaugauuccuacguau

SEQ ID NO: 1679636 - RNA, 19 nt, Homo sapiens
  misc_RNA (1)...(19): siRNA sense strand
acaaauggaaccaaucuua

SEQ ID NO: 1679637 - RNA, 19 nt, Homo sapiens
  misc_RNA (1)...(19): siRNA sense strand
gaucuuggaugauguuugg

SEQ ID NO: 1679638 - RNA, 19 nt, Homo sapiens
  misc_RNA (1)...(19): siRNA sense strand
caaauggaaccaaucuuaa

SEQ ID NO: 1679639 - RNA, 19 nt, Homo sapiens
  misc_RNA (1)...(19): siRNA sense strand
ccacagaggccaguuguuu

SEQ ID NO: 1679640 - RNA, 19 nt, Homo sapiens
  misc_RNA (1)...(19): siRNA sense strand
aguaauggguccuaaauau

SEQ ID NO: 1679641 - RNA, 19 nt, Homo sapiens
  misc_RNA (1)...(19): siRNA sense strand
agcagaagcucuccaaauu

SEQ ID NO: 1679642 - RNA, 19 nt, Homo sapiens
  misc_RNA (1)...(19): siRNA sense strand
caagacauccuacaucaug

SEQ ID NO: 1679643 - RNA, 19 nt, Homo sapiens
  misc_RNA (1)...(19): siRNA sense strand
acaaugcucuacuacauga

SEQ ID NO: 1679644 - RNA, 19 nt, Homo sapiens
  misc_RNA (1)...(19): siRNA sense strand
caugauuagugauggauuu

SEQ ID NO: 1679645 - RNA, 19 nt, Homo sapiens
  misc_RNA (1)...(19): siRNA sense strand
aaucugggcuucugaugaa

SEQ ID NO: 1679646 - RNA, 19 nt, Homo sapiens
  misc_RNA (1)...(19): siRNA sense strand
gaagcucuccaaauugaaa

SEQ ID NO: 1679647 - RNA, 19 nt, Homo sapiens
  misc_RNA (1)...(19): siRNA sense strand
gcagaagcucuccaaauug

SEQ ID NO: 1679648 - RNA, 19 nt, Homo sapiens
  misc_RNA (1)...(19): siRNA sense strand
cuacaaugcucuacuacau

SEQ ID NO: 1679649 - RNA, 19 nt, Homo sapiens
  misc_RNA (1)...(19): siRNA sense strand
gacaagaguguuacagauu

SEQ ID NO: 1679650 - RNA, 19 nt, Homo sapiens
  misc_RNA (1)...(19): siRNA sense strand
ugaugaaacugcagaaucu

SEQ ID NO: 1679651 - RNA, 19 nt, Homo sapiens
  misc_RNA (1)...(19): siRNA sense strand
cccagaggcuuccacuuaa

SEQ ID NO: 1679652 - RNA, 19 nt, Homo sapiens
  misc_RNA (1)...(19): siRNA sense strand
gagaagcucuggaaaagga

SEQ ID NO: 1679653 - RNA, 19 nt, Homo sapiens
  misc_RNA (1)...(19): siRNA sense strand
agauaaugauuccuacgua

SEQ ID NO: 1679654 - RNA, 19 nt, Homo sapiens
  misc_RNA (1)...(19): siRNA sense strand
ucccagaggcuuccacuua

SEQ ID NO: 1679655 - RNA, 19 nt, Homo sapiens
  misc_RNA (1)...(19): siRNA sense strand
acaagaguguuacagauuc

SEQ ID NO: 1679656 - RNA, 19 nt, Homo sapiens
  misc_RNA (1)...(19): siRNA sense strand
cuacacaaauggaaccaau

SEQ ID NO: 1679657 - RNA, 19 nt, Homo sapiens
  misc_RNA (1)...(19): siRNA sense strand
ccagaacaagcucauagua

SEQ ID NO: 1679658 - RNA, 19 nt, Homo sapiens
  misc_RNA (1)...(19): siRNA sense strand
caugaaggauauaaagauc

SEQ ID NO: 1679659 - RNA, 19 nt, Homo sapiens
  misc_RNA (1)...(19): siRNA sense strand
agacaagaguguuacagau

SEQ ID NO: 1679660 - RNA, 19 nt, Homo sapiens
  misc_RNA (1)...(19): siRNA sense strand
gagacaagaguguuacaga

SEQ ID NO: 1679661 - RNA, 19 nt, Homo sapiens
  misc_RNA (1)...(19): siRNA sense strand
caagaguguuacagauuca

SEQ ID NO: 1679662 - RNA, 19 nt, Homo sapiens
  misc_RNA (1)...(19): siRNA sense strand
guaauggguccuaaauaug

SEQ ID NO: 1679663 - RNA, 19 nt, Homo sapiens
  misc_RNA (1)...(19): siRNA sense strand
caugauggcauuccuguug

SEQ ID NO: 1679664 - RNA, 19 nt, Homo sapiens
  misc_RNA (1)...(19): siRNA sense strand
uggaaccaaucuuaagaaa

SEQ ID NO: 1679665 - RNA, 19 nt, Homo sapiens
  misc_RNA (1)...(19): siRNA sense strand
gaccgucuccgcauucuga

SEQ ID NO: 1679666 - RNA, 19 nt, Homo sapiens
  misc_RNA (1)...(19): siRNA sense strand
ugcagaagcuguuagagau

SEQ ID NO: 1679667 - RNA, 19 nt, Homo sapiens
  misc_RNA (1)...(19): siRNA sense strand
cauaugugacuguggauaa

SEQ ID NO: 1679668 - RNA, 19 nt, Homo sapiens
  misc_RNA (1)...(19): siRNA sense strand
cagaacaagcucauaguau

SEQ ID NO: 1679669 - RNA, 19 nt, Homo sapiens
  misc_RNA (1)...(19): siRNA sense strand
cagaggcuuccacuuaaua

SEQ ID NO: 1679670 - RNA, 19 nt, Homo sapiens
  misc_RNA (1)...(19): siRNA sense strand
agacaaaucugggcuucug

SEQ ID NO: 1679671 - RNA, 19 nt, Homo sapiens
  misc_RNA (1)...(19): siRNA sense strand
cuacguaucauucuacaau

SEQ ID NO: 1679672 - RNA, 19 nt, Homo sapiens
  misc_RNA (1)...(19): siRNA sense strand
uaauggguccuaaauaugu

SEQ ID NO: 1679673 - RNA, 19 nt, Homo sapiens
  misc_RNA (1)...(19): siRNA sense strand
gcauuccuguugucucuuc

SEQ ID NO: 1679674 - RNA, 19 nt, Homo sapiens
  misc_RNA (1)...(19): siRNA sense strand
ucuacuacaugaaggauau

SEQ ID NO: 1679675 - RNA, 19 nt, Homo sapiens
  misc_RNA (1)...(19): siRNA sense strand
cagaagcuguuagagauca

SEQ ID NO: 1679676 - RNA, 19 nt, Homo sapiens
  misc_RNA (1)...(19): siRNA sense strand
ccagaggcuuccacuuaau

SEQ ID NO: 1679677 - RNA, 19 nt, Homo sapiens
  misc_RNA (1)...(19): siRNA sense strand
caaggaagaagcuggugaa

SEQ ID NO: 1679678 - RNA, 19 nt, Homo sapiens
  misc_RNA (1)...(19): siRNA sense strand
cgaaauuguuugcuucaac

SEQ ID NO: 1679679 - RNA, 19 nt, Homo sapiens
  misc_RNA (1)...(19): siRNA sense strand
cagcagaagcucuccaaau

SEQ ID NO: 1679680 - RNA, 19 nt, Homo sapiens
  misc_RNA (1)...(19): siRNA sense strand
ggcuuccacuuaauauuga

SEQ ID NO: 1679681 - RNA, 19 nt, Homo sapiens
  misc_RNA (1)...(19): siRNA sense strand
caaaagcucgaaauuguuu

SEQ ID NO: 1679682 - RNA, 19 nt, Homo sapiens
  misc_RNA (1)...(19): siRNA sense strand
guggauaaucuugguauuu

SEQ ID NO: 1679683 - RNA, 19 nt, Homo sapiens
  misc_RNA (1)...(19): siRNA sense strand
guugaaagcuuuugacagu

SEQ ID NO: 1679684 - RNA, 19 nt, Homo sapiens
  misc_RNA (1)...(19): siRNA sense strand
cacagaccuucuacacaaa

SEQ ID NO: 1679685 - RNA, 19 nt, Homo sapiens
  misc_RNA (1)...(19): siRNA sense strand
uugcugcccuucuccauga

SEQ ID NO: 1679686 - RNA, 19 nt, Homo sapiens
  misc_RNA (1)...(19): siRNA sense strand
caguaauggguccuaaaua

SEQ ID NO: 1679687 - RNA, 19 nt, Homo sapiens
  misc_RNA (1)...(19): siRNA sense strand
gggagugcauuggguuuca

SEQ ID NO: 1679688 - RNA, 19 nt, Homo sapiens
  misc_RNA (1)...(19): siRNA sense strand
aacaauaucagaagaggaa

SEQ ID NO: 1679689 - RNA, 19 nt, Homo sapiens
  misc_RNA (1)...(19): siRNA sense strand
caacagcaaagagcagcua

SEQ ID NO: 1679690 - RNA, 19 nt, Homo sapiens
  misc_RNA (1)...(19): siRNA sense strand
gaagcuggugaaugcaauu

SEQ ID NO: 1679691 - RNA, 19 nt, Homo sapiens
  misc_RNA (1)...(19): siRNA sense strand
aauggguccuaaauaugua

SEQ ID NO: 1679692 - RNA, 19 nt, Homo sapiens
  misc_RNA (1)...(19): siRNA sense strand
caucaagacauccuacauc

SEQ ID NO: 1679693 - RNA, 19 nt, Homo sapiens
  misc_RNA (1)...(19): siRNA sense strand
auucuacaaugcucuacua

SEQ ID NO: 1679694 - RNA, 19 nt, Homo sapiens
  misc_RNA (1)...(19): siRNA sense strand
ugaaacugcagaaucuuug

SEQ ID NO: 1679695 - RNA, 19 nt, Homo sapiens
  misc_RNA (1)...(19): siRNA sense strand
gcaaacacccaaggucucu

SEQ ID NO: 1679696 - RNA, 19 nt, Homo sapiens
  misc_RNA (1)...(19): siRNA sense strand
ucaguaauggguccuaaau

SEQ ID NO: 1679697 - RNA, 19 nt, Homo sapiens
  misc_RNA (1)...(19): siRNA sense strand
cuacaugaaggauauaaag

SEQ ID NO: 1679698 - RNA, 19 nt, Homo sapiens
  misc_RNA (1)...(19): siRNA sense strand
gaguguuacagauucagua

SEQ ID NO: 1679699 - RNA, 19 nt, Homo sapiens
  misc_RNA (1)...(19): siRNA sense strand
ugcaaaagcucgaaauugu

SEQ ID NO: 1679700 - RNA, 19 nt, Homo sapiens
  misc_RNA (1)...(19): siRNA sense strand
cagugucagauucuucuua

SEQ ID NO: 1679701 - RNA, 19 nt, Homo sapiens
  misc_RNA (1)...(19): siRNA sense strand
aaaaggacaucaagacauc

SEQ ID NO: 1679702 - RNA, 19 nt, Homo sapiens
  misc_RNA (1)...(19): siRNA sense strand
ugucagauucuucuuacaa

SEQ ID NO: 1679703 - RNA, 19 nt, Homo sapiens
  misc_RNA (1)...(19): siRNA sense strand
uagagaucauucccuuuua

SEQ ID NO: 1679704 - RNA, 19 nt, Homo sapiens
  misc_RNA (1)...(19): siRNA sense strand
gaaaaggacaucaagacau

SEQ ID NO: 1679705 - RNA, 19 nt, Homo sapiens
  misc_RNA (1)...(19): siRNA sense strand
gcagaagcuguuagagauc

SEQ ID NO: 1679706 - RNA, 19 nt, Homo sapiens
  misc_RNA (1)...(19): siRNA sense strand
uggaucaggaugagaguuu

SEQ ID NO: 1679707 - RNA, 19 nt, Homo sapiens
  misc_RNA (1)...(19): siRNA sense strand
caaauugaaaggugaacca

SEQ ID NO: 1679708 - RNA, 19 nt, Homo sapiens
  misc_RNA (1)...(19): siRNA sense strand
auaugaagaaggcagauuu

SEQ ID NO: 1679709 - RNA, 19 nt, Homo sapiens
  misc_RNA (1)...(19): siRNA sense strand
aucaagacauccuacauca

SEQ ID NO: 1679710 - RNA, 19 nt, Homo sapiens
  misc_RNA (1)...(19): siRNA sense strand
gaugauguuugggacucuu

SEQ ID NO: 1679711 - RNA, 19 nt, Homo sapiens
  misc_RNA (1)...(19): siRNA sense strand
gugcauuggguuucaguug

SEQ ID NO: 1679712 - RNA, 19 nt, Homo sapiens
  misc_RNA (1)...(19): siRNA sense strand
cugcagaagcuguuagaga

SEQ ID NO: 1679713 - RNA, 19 nt, Homo sapiens
  misc_RNA (1)...(19): siRNA sense strand
uggcauuccuguugucucu

SEQ ID NO: 1679714 - RNA, 19 nt, Homo sapiens
  misc_RNA (1)...(19): siRNA sense strand
gcaaaagcucgaaauuguu

SEQ ID NO: 1679715 - RNA, 19 nt, Homo sapiens
  misc_RNA (1)...(19): siRNA sense strand
ugggaagucuguauuagcu

SEQ ID NO: 1679716 - RNA, 19 nt, Homo sapiens
  misc_RNA (1)...(19): siRNA sense strand
gugugaagguggaguacca

SEQ ID NO: 1679717 - RNA, 19 nt, Homo sapiens
  misc_RNA (1)...(19): siRNA sense strand
aggcuuccacuuaauauug

SEQ ID NO: 1679718 - RNA, 19 nt, Homo sapiens
  misc_RNA (1)...(19): siRNA sense strand
gaggcuuccacuuaauauu

SEQ ID NO: 1679719 - RNA, 19 nt, Homo sapiens
  misc_RNA (1)...(19): siRNA sense strand
gcugugggaagucuguauu

SEQ ID NO: 1679720 - RNA, 19 nt, Homo sapiens
  misc_RNA (1)...(19): siRNA sense strand
caaaucugggcuucugaug

SEQ ID NO: 1679721 - RNA, 19 nt, Homo sapiens
  misc_RNA (1)...(19): siRNA sense strand
aauggaaccaaucuuaaga

SEQ ID NO: 1679722 - RNA, 19 nt, Homo sapiens
  misc_RNA (1)...(19): siRNA sense strand
acacaaauggaaccaaucu

SEQ ID NO: 1679723 - RNA, 19 nt, Homo sapiens
  misc_RNA (1)...(19): siRNA sense strand
cagaccuucuacacaaaug

SEQ ID NO: 1679724 - RNA, 19 nt, Homo sapiens
  misc_RNA (1)...(19): siRNA sense strand
uaugaagaaggcagauuug

SEQ ID NO: 1679725 - RNA, 19 nt, Homo sapiens
  misc_RNA (1)...(19): siRNA sense strand
ggaaaaggacaucaagaca

SEQ ID NO: 1679726 - RNA, 19 nt, Homo sapiens
  misc_RNA (1)...(19): siRNA sense strand
aaaucugggcuucugauga

SEQ ID NO: 1679727 - RNA, 19 nt, Homo sapiens
  misc_RNA (1)...(19): siRNA sense strand
agaagcuggugaaugcaau

SEQ ID NO: 1679728 - RNA, 19 nt, Homo sapiens
  misc_RNA (1)...(19): siRNA sense strand
aaauggaaccaaucuuaag

SEQ ID NO: 1679729 - RNA, 19 nt, Homo sapiens
  misc_RNA (1)...(19): siRNA sense strand
caaccagagacaagagugu

SEQ ID NO: 1679730 - RNA, 19 nt, Homo sapiens
  misc_RNA (1)...(19): siRNA sense strand
ggaagaagcuggugaaugc

SEQ ID NO: 1679731 - RNA, 19 nt, Homo sapiens
  misc_RNA (1)...(19): siRNA sense strand
gaacaagcucauaguauua

SEQ ID NO: 1679732 - RNA, 19 nt, Homo sapiens
  misc_RNA (1)...(19): siRNA sense strand
cagaagcucuccaaauuga

SEQ ID NO: 1679733 - RNA, 19 nt, Homo sapiens
  misc_RNA (1)...(19): siRNA sense strand
ucacagaccuucuacacaa

SEQ ID NO: 1679734 - RNA, 19 nt, Homo sapiens
  misc_RNA (1)...(19): siRNA sense strand
agaacaagcucauaguauu

SEQ ID NO: 1679735 - RNA, 19 nt, Homo sapiens
  misc_RNA (1)...(19): siRNA sense strand
gauaaugauuccuacguau

SEQ ID NO: 1679736 - RNA, 19 nt, Homo sapiens
  misc_RNA (1)...(19): siRNA sense strand
acaaauggaaccaaucuua

SEQ ID NO: 1679737 - RNA, 19 nt, Homo sapiens
  misc_RNA (1)...(19): siRNA sense strand
gaucuuggaugauguuugg

SEQ ID NO: 1679738 - RNA, 19 nt, Homo sapiens
  misc_RNA (1)...(19): siRNA sense strand
caaauggaaccaaucuuaa

SEQ ID NO: 1679739 - RNA, 19 nt, Homo sapiens
  misc_RNA (1)...(19): siRNA sense strand
ccacagaggccaguuguuu

SEQ ID NO: 1679740 - RNA, 19 nt, Homo sapiens
  misc_RNA (1)...(19): siRNA sense strand
aguaauggguccuaaauau

SEQ ID NO: 1679741 - RNA, 19 nt, Homo sapiens
  misc_RNA (1)...(19): siRNA sense strand
agcagaagcucuccaaauu

SEQ ID NO: 1679742 - RNA, 19 nt, Homo sapiens
  misc_RNA (1)...(19): siRNA sense strand
caagacauccuacaucaug

SEQ ID NO: 1679743 - RNA, 19 nt, Homo sapiens
  misc_RNA (1)...(19): siRNA sense strand
acaaugcucuacuacauga

SEQ ID NO: 1679744 - RNA, 19 nt, Homo sapiens
  misc_RNA (1)...(19): siRNA sense strand
caugauuagugauggauuu

SEQ ID NO: 1679745 - RNA, 19 nt, Homo sapiens
  misc_RNA (1)...(19): siRNA sense strand
aaucugggcuucugaugaa

SEQ ID NO: 1679746 - RNA, 19 nt, Homo sapiens
  misc_RNA (1)...(19): siRNA sense strand
gaagcucuccaaauugaaa

SEQ ID NO: 1679747 - RNA, 19 nt, Homo sapiens
  misc_RNA (1)...(19): siRNA sense strand
gcagaagcucuccaaauug

SEQ ID NO: 1679748 - RNA, 19 nt, Homo sapiens
  misc_RNA (1)...(19): siRNA sense strand
cuacaaugcucuacuacau

SEQ ID NO: 1679749 - RNA, 19 nt, Homo sapiens
  misc_RNA (1)...(19): siRNA sense strand
gacaagaguguuacagauu

SEQ ID NO: 1679750 - RNA, 19 nt, Homo sapiens
  misc_RNA (1)...(19): siRNA sense strand
ugaugaaacugcagaaucu

SEQ ID NO: 1679751 - RNA, 19 nt, Homo sapiens
  misc_RNA (1)...(19): siRNA sense strand
cccagaggcuuccacuuaa

SEQ ID NO: 1679752 - RNA, 19 nt, Homo sapiens
  misc_RNA (1)...(19): siRNA sense strand
gagaagcucuggaaaagga

SEQ ID NO: 1679753 - RNA, 19 nt, Homo sapiens
  misc_RNA (1)...(19): siRNA sense strand
agauaaugauuccuacgua

SEQ ID NO: 1679754 - RNA, 19 nt, Homo sapiens
  misc_RNA (1)...(19): siRNA sense strand
ucccagaggcuuccacuua

SEQ ID NO: 1679755 - RNA, 19 nt, Homo sapiens
  misc_RNA (1)...(19): siRNA sense strand
acaagaguguuacagauuc

SEQ ID NO: 1679756 - RNA, 19 nt, Homo sapiens
  misc_RNA (1)...(19): siRNA sense strand
cuacacaaauggaaccaau

SEQ ID NO: 1679757 - RNA, 19 nt, Homo sapiens
  misc_RNA (1)...(19): siRNA sense strand
ccagaacaagcucauagua

SEQ ID NO: 1679758 - RNA, 19 nt, Homo sapiens
  misc_RNA (1)...(19): siRNA sense strand
caugaaggauauaaagauc

SEQ ID NO: 1679759 - RNA, 19 nt, Homo sapiens
  misc_RNA (1)...(19): siRNA sense strand
agacaagaguguuacagau

SEQ ID NO: 1679760 - RNA, 19 nt, Homo sapiens
  misc_RNA (1)...(19): siRNA sense strand
gagacaagaguguuacaga

SEQ ID NO: 1679761 - RNA, 19 nt, Homo sapiens
  misc_RNA (1)...(19): siRNA sense strand
caagaguguuacagauuca

SEQ ID NO: 1679762 - RNA, 19 nt, Homo sapiens
  misc_RNA (1)...(19): siRNA sense strand
guaauggguccuaaauaug

SEQ ID NO: 1679763 - RNA, 19 nt, Homo sapiens
  misc_RNA (1)...(19): siRNA sense strand
caugauggcauuccuguug

SEQ ID NO: 1679764 - RNA, 19 nt, Homo sapiens
  misc_RNA (1)...(19): siRNA sense strand
uggaaccaaucuuaagaaa

SEQ ID NO: 1679765 - RNA, 19 nt, Homo sapiens
  misc_RNA (1)...(19): siRNA sense strand
gaccgucuccgcauucuga

SEQ ID NO: 1679766 - RNA, 19 nt, Homo sapiens
  misc_RNA (1)...(19): siRNA sense strand
ugcagaagcuguuagagau

SEQ ID NO: 1679767 - RNA, 19 nt, Homo sapiens
  misc_RNA (1)...(19): siRNA sense strand
cauaugugacuguggauaa

SEQ ID NO: 1679768 - RNA, 19 nt, Homo sapiens
  misc_RNA (1)...(19): siRNA sense strand
cagaacaagcucauaguau

SEQ ID NO: 1679769 - RNA, 19 nt, Homo sapiens
  misc_RNA (1)...(19): siRNA sense strand
cagaggcuuccacuuaaua

SEQ ID NO: 1679770 - RNA, 19 nt, Homo sapiens
  misc_RNA (1)...(19): siRNA sense strand
agacaaaucugggcuucug

SEQ ID NO: 1679771 - RNA, 19 nt, Homo sapiens
  misc_RNA (1)...(19): siRNA sense strand
cuacguaucauucuacaau

SEQ ID NO: 1679772 - RNA, 19 nt, Homo sapiens
  misc_RNA (1)...(19): siRNA sense strand
uaauggguccuaaauaugu

SEQ ID NO: 1679773 - RNA, 19 nt, Homo sapiens
  misc_RNA (1)...(19): siRNA sense strand
gcauuccuguugucucuuc

SEQ ID NO: 1679774 - RNA, 19 nt, Homo sapiens
  misc_RNA (1)...(19): siRNA sense strand
ucuacuacaugaaggauau

SEQ ID NO: 1679775 - RNA, 19 nt, Homo sapiens
  misc_RNA (1)...(19): siRNA sense strand
cagaagcuguuagagauca

SEQ ID NO: 1679776 - RNA, 19 nt, Homo sapiens
  misc_RNA (1)...(19): siRNA sense strand
ccagaggcuuccacuuaau

SEQ ID NO: 1679777 - RNA, 19 nt, Homo sapiens
  misc_RNA (1)...(19): siRNA sense strand
caaggaagaagcuggugaa

SEQ ID NO: 1679778 - RNA, 19 nt, Homo sapiens
  misc_RNA (1)...(19): siRNA sense strand
cgaaauuguuugcuucaac

SEQ ID NO: 1679779 - RNA, 19 nt, Homo sapiens
  misc_RNA (1)...(19): siRNA sense strand
cagcagaagcucuccaaau

SEQ ID NO: 1679780 - RNA, 19 nt, Homo sapiens
  misc_RNA (1)...(19): siRNA sense strand
ggcuuccacuuaauauuga

SEQ ID NO: 1679781 - RNA, 19 nt, Homo sapiens
  misc_RNA (1)...(19): siRNA sense strand
caaaagcucgaaauuguuu

SEQ ID NO: 1679782 - RNA, 19 nt, Homo sapiens
  misc_RNA (1)...(19): siRNA sense strand
guggauaaucuugguauuu

SEQ ID NO: 1679783 - RNA, 19 nt, Homo sapiens
  misc_RNA (1)...(19): siRNA sense strand
guugaaagcuuuugacagu

SEQ ID NO: 1679784 - RNA, 19 nt, Homo sapiens
  misc_RNA (1)...(19): siRNA sense strand
cacagaccuucuacacaaa

SEQ ID NO: 1679785 - RNA, 19 nt, Homo sapiens
  misc_RNA (1)...(19): siRNA sense strand
uugcugcccuucuccauga

SEQ ID NO: 1679786 - RNA, 19 nt, Homo sapiens
  misc_RNA (1)...(19): siRNA sense strand
caguaauggguccuaaaua

SEQ ID NO: 1679787 - RNA, 19 nt, Homo sapiens
  misc_RNA (1)...(19): siRNA sense strand
gggagugcauuggguuuca

SEQ ID NO: 1679788 - RNA, 19 nt, Homo sapiens
  misc_RNA (1)...(19): siRNA sense strand
aacaauaucagaagaggaa

SEQ ID NO: 1679789 - RNA, 19 nt, Homo sapiens
  misc_RNA (1)...(19): siRNA sense strand
caacagcaaagagcagcua

SEQ ID NO: 1679790 - RNA, 19 nt, Homo sapiens
  misc_RNA (1)...(19): siRNA sense strand
gaagcuggugaaugcaauu

SEQ ID NO: 1679791 - RNA, 19 nt, Homo sapiens
  misc_RNA (1)...(19): siRNA sense strand
aauggguccuaaauaugua

SEQ ID NO: 1679792 - RNA, 19 nt, Homo sapiens
  misc_RNA (1)...(19): siRNA sense strand
caucaagacauccuacauc

SEQ ID NO: 1679793 - RNA, 19 nt, Homo sapiens
  misc_RNA (1)...(19): siRNA sense strand
auucuacaaugcucuacua

SEQ ID NO: 1679794 - RNA, 19 nt, Homo sapiens
  misc_RNA (1)...(19): siRNA sense strand
ugaaacugcagaaucuuug

SEQ ID NO: 1679795 - RNA, 19 nt, Homo sapiens
  misc_RNA (1)...(19): siRNA sense strand
gcaaacacccaaggucucu

SEQ ID NO: 1679796 - RNA, 19 nt, Homo sapiens
  misc_RNA (1)...(19): siRNA sense strand
ucaguaauggguccuaaau

SEQ ID NO: 1679797 - RNA, 19 nt, Homo sapiens
  misc_RNA (1)...(19): siRNA sense strand
cuacaugaaggauauaaag

SEQ ID NO: 1679798 - RNA, 19 nt, Homo sapiens
  misc_RNA (1)...(19): siRNA sense strand
gaguguuacagauucagua

SEQ ID NO: 1679799 - RNA, 19 nt, Homo sapiens
  misc_RNA (1)...(19): siRNA sense strand
ugcaaaagcucgaaauugu

SEQ ID NO: 1679800 - RNA, 19 nt, Homo sapiens
  misc_RNA (1)...(19): siRNA sense strand
cagugucagauucuucuua

SEQ ID NO: 1679801 - RNA, 19 nt, Homo sapiens
  misc_RNA (1)...(19): siRNA sense strand
aaaaggacaucaagacauc

SEQ ID NO: 1679802 - RNA, 19 nt, Homo sapiens
  misc_RNA (1)...(19): siRNA sense strand
ugucagauucuucuuacaa

SEQ ID NO: 1679803 - RNA, 19 nt, Homo sapiens
  misc_RNA (1)...(19): siRNA sense strand
uagagaucauucccuuuua

SEQ ID NO: 1679804 - RNA, 19 nt, Homo sapiens
  misc_RNA (1)...(19): siRNA sense strand
gaaaaggacaucaagacau

SEQ ID NO: 1679805 - RNA, 19 nt, Homo sapiens
  misc_RNA (1)...(19): siRNA sense strand
gcagaagcuguuagagauc

SEQ ID NO: 1679806 - RNA, 19 nt, Homo sapiens
  misc_RNA (1)...(19): siRNA sense strand
uggaucaggaugagaguuu

SEQ ID NO: 1679807 - RNA, 19 nt, Homo sapiens
  misc_RNA (1)...(19): siRNA sense strand
caaauugaaaggugaacca

SEQ ID NO: 1679808 - RNA, 19 nt, Homo sapiens
  misc_RNA (1)...(19): siRNA sense strand
auaugaagaaggcagauuu

SEQ ID NO: 1679809 - RNA, 19 nt, Homo sapiens
  misc_RNA (1)...(19): siRNA sense strand
aucaagacauccuacauca

SEQ ID NO: 1679810 - RNA, 19 nt, Homo sapiens
  misc_RNA (1)...(19): siRNA sense strand
gaugauguuugggacucuu

SEQ ID NO: 1679811 - RNA, 19 nt, Homo sapiens
  misc_RNA (1)...(19): siRNA sense strand
gugcauuggguuucaguug

SEQ ID NO: 1679812 - RNA, 19 nt, Homo sapiens
  misc_RNA (1)...(19): siRNA sense strand
cugcagaagcuguuagaga

SEQ ID NO: 1679813 - RNA, 19 nt, Homo sapiens
  misc_RNA (1)...(19): siRNA sense strand
uggcauuccuguugucucu

SEQ ID NO: 1679814 - RNA, 19 nt, Homo sapiens
  misc_RNA (1)...(19): siRNA sense strand
gcaaaagcucgaaauuguu

SEQ ID NO: 1679815 - RNA, 19 nt, Homo sapiens
  misc_RNA (1)...(19): siRNA sense strand
ugggaagucuguauuagcu

SEQ ID NO: 1679816 - RNA, 19 nt, Homo sapiens
  misc_RNA (1)...(19): siRNA sense strand
gugugaagguggaguacca

SEQ ID NO: 1679817 - RNA, 19 nt, Homo sapiens
  misc_RNA (1)...(19): siRNA sense strand
aggcuuccacuuaauauug

SEQ ID NO: 1679818 - RNA, 19 nt, Homo sapiens
  misc_RNA (1)...(19): siRNA sense strand
gaggcuuccacuuaauauu

SEQ ID NO: 1679819 - RNA, 19 nt, Homo sapiens
  misc_RNA (1)...(19): siRNA sense strand
gcugugggaagucuguauu

SEQ ID NO: 1679820 - RNA, 19 nt, Homo sapiens
  misc_RNA (1)...(19): siRNA sense strand
caaaucugggcuucugaug

SEQ ID NO: 1679821 - RNA, 19 nt, Homo sapiens
  misc_RNA (1)...(19): siRNA sense strand
aauggaaccaaucuuaaga

SEQ ID NO: 1679822 - RNA, 19 nt, Homo sapiens
  misc_RNA (1)...(19): siRNA sense strand
acacaaauggaaccaaucu

SEQ ID NO: 1679823 - RNA, 19 nt, Homo sapiens
  misc_RNA (1)...(19): siRNA sense strand
cagaccuucuacacaaaug

SEQ ID NO: 1679824 - RNA, 19 nt, Homo sapiens
  misc_RNA (1)...(19): siRNA sense strand
uaugaagaaggcagauuug

SEQ ID NO: 1679825 - RNA, 19 nt, Homo sapiens
  misc_RNA (1)...(19): siRNA sense strand
ggaaaaggacaucaagaca

SEQ ID NO: 1679826 - RNA, 19 nt, Homo sapiens
  misc_RNA (1)...(19): siRNA sense strand
aaaucugggcuucugauga

SEQ ID NO: 1679827 - RNA, 19 nt, Homo sapiens
  misc_RNA (1)...(19): siRNA sense strand
agaagcuggugaaugcaau

SEQ ID NO: 1679828 - RNA, 19 nt, Homo sapiens
  misc_RNA (1)...(19): siRNA sense strand
aaauggaaccaaucuuaag

SEQ ID NO: 1679829 - RNA, 19 nt, Homo sapiens
  misc_RNA (1)...(19): siRNA sense strand
caaccagagacaagagugu

SEQ ID NO: 1679830 - RNA, 19 nt, Homo sapiens
  misc_RNA (1)...(19): siRNA sense strand
ggaagaagcuggugaaugc

SEQ ID NO: 1679831 - RNA, 19 nt, Homo sapiens
  misc_RNA (1)...(19): siRNA sense strand
gaacaagcucauaguauua

SEQ ID NO: 1679832 - RNA, 19 nt, Homo sapiens
  misc_RNA (1)...(19): siRNA sense strand
cagaagcucuccaaauuga

SEQ ID NO: 1679833 - RNA, 19 nt, Homo sapiens
  misc_RNA (1)...(19): siRNA sense strand
ucacagaccuucuacacaa

SEQ ID NO: 1679834 - RNA, 19 nt, Homo sapiens
  misc_RNA (1)...(19): siRNA sense strand
agaacaagcucauaguauu

SEQ ID NO: 1679835 - RNA, 19 nt, Homo sapiens
  misc_RNA (1)...(19): siRNA sense strand
gauaaugauuccuacguau

SEQ ID NO: 1679836 - RNA, 19 nt, Homo sapiens
  misc_RNA (1)...(19): siRNA sense strand
acaaauggaaccaaucuua

SEQ ID NO: 1679837 - RNA, 19 nt, Homo sapiens
  misc_RNA (1)...(19): siRNA sense strand
gaucuuggaugauguuugg

SEQ ID NO: 1679838 - RNA, 19 nt, Homo sapiens
  misc_RNA (1)...(19): siRNA sense strand
caaauggaaccaaucuuaa

SEQ ID NO: 1679839 - RNA, 19 nt, Homo sapiens
  misc_RNA (1)...(19): siRNA sense strand
ccacagaggccaguuguuu

SEQ ID NO: 1679840 - RNA, 19 nt, Homo sapiens
  misc_RNA (1)...(19): siRNA sense strand
aguaauggguccuaaauau

SEQ ID NO: 1679841 - RNA, 19 nt, Homo sapiens
  misc_RNA (1)...(19): siRNA sense strand
agcagaagcucuccaaauu

SEQ ID NO: 1679842 - RNA, 19 nt, Homo sapiens
  misc_RNA (1)...(19): siRNA sense strand
caagacauccuacaucaug

SEQ ID NO: 1679843 - RNA, 19 nt, Homo sapiens
  misc_RNA (1)...(19): siRNA sense strand
acaaugcucuacuacauga

SEQ ID NO: 1679844 - RNA, 19 nt, Homo sapiens
  misc_RNA (1)...(19): siRNA sense strand
caugauuagugauggauuu

SEQ ID NO: 1679845 - RNA, 19 nt, Homo sapiens
  misc_RNA (1)...(19): siRNA sense strand
aaucugggcuucugaugaa

SEQ ID NO: 1679846 - RNA, 19 nt, Homo sapiens
  misc_RNA (1)...(19): siRNA sense strand
gaagcucuccaaauugaaa

SEQ ID NO: 1679847 - RNA, 19 nt, Homo sapiens
  misc_RNA (1)...(19): siRNA sense strand
gcagaagcucuccaaauug

SEQ ID NO: 1679848 - RNA, 19 nt, Homo sapiens
  misc_RNA (1)...(19): siRNA sense strand
cuacaaugcucuacuacau

SEQ ID NO: 1679849 - RNA, 19 nt, Homo sapiens
  misc_RNA (1)...(19): siRNA sense strand
gacaagaguguuacagauu

SEQ ID NO: 1679850 - RNA, 19 nt, Homo sapiens
  misc_RNA (1)...(19): siRNA sense strand
ugaugaaacugcagaaucu

SEQ ID NO: 1679851 - RNA, 19 nt, Homo sapiens
  misc_RNA (1)...(19): siRNA sense strand
cccagaggcuuccacuuaa

SEQ ID NO: 1679852 - RNA, 19 nt, Homo sapiens
  misc_RNA (1)...(19): siRNA sense strand
gagaagcucuggaaaagga

SEQ ID NO: 1679853 - RNA, 19 nt, Homo sapiens
  misc_RNA (1)...(19): siRNA sense strand
agauaaugauuccuacgua

SEQ ID NO: 1679854 - RNA, 19 nt, Homo sapiens
  misc_RNA (1)...(19): siRNA sense strand
ucccagaggcuuccacuua

SEQ ID NO: 1679855 - RNA, 19 nt, Homo sapiens
  misc_RNA (1)...(19): siRNA sense strand
acaagaguguuacagauuc

SEQ ID NO: 1679856 - RNA, 19 nt, Homo sapiens
  misc_RNA (1)...(19): siRNA sense strand
cuacacaaauggaaccaau

SEQ ID NO: 1679857 - RNA, 19 nt, Homo sapiens
  misc_RNA (1)...(19): siRNA sense strand
ccagaacaagcucauagua

SEQ ID NO: 1679858 - RNA, 19 nt, Homo sapiens
  misc_RNA (1)...(19): siRNA sense strand
caugaaggauauaaagauc

SEQ ID NO: 1679859 - RNA, 19 nt, Homo sapiens
  misc_RNA (1)...(19): siRNA sense strand
agacaagaguguuacagau

SEQ ID NO: 1679860 - RNA, 19 nt, Homo sapiens
  misc_RNA (1)...(19): siRNA sense strand
gagacaagaguguuacaga

SEQ ID NO: 1679861 - RNA, 19 nt, Homo sapiens
  misc_RNA (1)...(19): siRNA sense strand
caagaguguuacagauuca

SEQ ID NO: 1679862 - RNA, 19 nt, Homo sapiens
  misc_RNA (1)...(19): siRNA sense strand
guaauggguccuaaauaug

SEQ ID NO: 1679863 - RNA, 19 nt, Homo sapiens
  misc_RNA (1)...(19): siRNA sense strand
caugauggcauuccuguug

SEQ ID NO: 1679864 - RNA, 19 nt, Homo sapiens
  misc_RNA (1)...(19): siRNA sense strand
gaccgucuccgcauucuga

SEQ ID NO: 1679865 - RNA, 19 nt, Homo sapiens
  misc_RNA (1)...(19): siRNA sense strand
ugcagaagcuguuagagau

SEQ ID NO: 1679866 - RNA, 19 nt, Homo sapiens
  misc_RNA (1)...(19): siRNA sense strand
cagaacaagcucauaguau

SEQ ID NO: 1679867 - RNA, 19 nt, Homo sapiens
  misc_RNA (1)...(19): siRNA sense strand
cagaggcuuccacuuaaua

SEQ ID NO: 1679868 - RNA, 19 nt, Homo sapiens
  misc_RNA (1)...(19): siRNA sense strand
agacaaaucugggcuucug

SEQ ID NO: 1679869 - RNA, 19 nt, Homo sapiens
  misc_RNA (1)...(19): siRNA sense strand
cuacguaucauucuacaau

SEQ ID NO: 1679870 - RNA, 19 nt, Homo sapiens
  misc_RNA (1)...(19): siRNA sense strand
uaauggguccuaaauaugu

SEQ ID NO: 1679871 - RNA, 19 nt, Homo sapiens
  misc_RNA (1)...(19): siRNA sense strand
gcauuccuguugucucuuc

SEQ ID NO: 1679872 - RNA, 19 nt, Homo sapiens
  misc_RNA (1)...(19): siRNA sense strand
ucuacuacaugaaggauau

SEQ ID NO: 1679873 - RNA, 19 nt, Homo sapiens
  misc_RNA (1)...(19): siRNA sense strand
cagaagcuguuagagauca

SEQ ID NO: 1679874 - RNA, 19 nt, Homo sapiens
  misc_RNA (1)...(19): siRNA sense strand
ccagaggcuuccacuuaau

SEQ ID NO: 1679875 - RNA, 19 nt, Homo sapiens
  misc_RNA (1)...(19): siRNA sense strand
caaggaagaagcuggugaa

SEQ ID NO: 1679876 - RNA, 19 nt, Homo sapiens
  misc_RNA (1)...(19): siRNA sense strand
cgaaauuguuugcuucaac

SEQ ID NO: 1679877 - RNA, 19 nt, Homo sapiens
  misc_RNA (1)...(19): siRNA sense strand
cagcagaagcucuccaaau

SEQ ID NO: 1679878 - RNA, 19 nt, Homo sapiens
  misc_RNA (1)...(19): siRNA sense strand
ggcuuccacuuaauauuga

SEQ ID NO: 1679879 - RNA, 19 nt, Homo sapiens
  misc_RNA (1)...(19): siRNA sense strand
caaaagcucgaaauuguuu

SEQ ID NO: 1679880 - RNA, 19 nt, Homo sapiens
  misc_RNA (1)...(19): siRNA sense strand
guugaaagcuuuugacagu

SEQ ID NO: 1679881 - RNA, 19 nt, Homo sapiens
  misc_RNA (1)...(19): siRNA sense strand
cacagaccuucuacacaaa

SEQ ID NO: 1679882 - RNA, 19 nt, Homo sapiens
  misc_RNA (1)...(19): siRNA sense strand
uugcugcccuucuccauga

SEQ ID NO: 1679883 - RNA, 19 nt, Homo sapiens
  misc_RNA (1)...(19): siRNA sense strand
caguaauggguccuaaaua

SEQ ID NO: 1679884 - RNA, 19 nt, Homo sapiens
  misc_RNA (1)...(19): siRNA sense strand
aacaauaucagaagaggaa

SEQ ID NO: 1679885 - RNA, 19 nt, Homo sapiens
  misc_RNA (1)...(19): siRNA sense strand
caacagcaaagagcagcua

SEQ ID NO: 1679886 - RNA, 19 nt, Homo sapiens
  misc_RNA (1)...(19): siRNA sense strand
gggagugcauuggguuuca

SEQ ID NO: 1679887 - RNA, 19 nt, Homo sapiens
  misc_RNA (1)...(19): siRNA sense strand
auucuacaaugcucuacua

SEQ ID NO: 1679888 - RNA, 19 nt, Homo sapiens
  misc_RNA (1)...(19): siRNA sense strand
aauggguccuaaauaugua

SEQ ID NO: 1679889 - RNA, 19 nt, Homo sapiens
  misc_RNA (1)...(19): siRNA sense strand
caucaagacauccuacauc

SEQ ID NO: 1679890 - RNA, 19 nt, Homo sapiens
  misc_RNA (1)...(19): siRNA sense strand
ugaaacugcagaaucuuug

SEQ ID NO: 1679891 - RNA, 19 nt, Homo sapiens
  misc_RNA (1)...(19): siRNA sense strand
gaagcuggugaaugcaauu

SEQ ID NO: 1679892 - RNA, 19 nt, Homo sapiens
  misc_RNA (1)...(19): siRNA sense strand
gcaaacacccaaggucucu

SEQ ID NO: 1679893 - RNA, 19 nt, Homo sapiens
  misc_RNA (1)...(19): siRNA sense strand
ucaguaauggguccuaaau

SEQ ID NO: 1679894 - RNA, 19 nt, Homo sapiens
  misc_RNA (1)...(19): siRNA sense strand
cuacaugaaggauauaaag

SEQ ID NO: 1679895 - RNA, 19 nt, Homo sapiens
  misc_RNA (1)...(19): siRNA sense strand
gaguguuacagauucagua

SEQ ID NO: 1679896 - RNA, 19 nt, Homo sapiens
  misc_RNA (1)...(19): siRNA sense strand
ugcaaaagcucgaaauugu

SEQ ID NO: 1679897 - RNA, 19 nt, Homo sapiens
  misc_RNA (1)...(19): siRNA sense strand
cagugucagauucuucuua

SEQ ID NO: 1679898 - RNA, 19 nt, Homo sapiens
  misc_RNA (1)...(19): siRNA sense strand
aaaaggacaucaagacauc

SEQ ID NO: 1679899 - RNA, 19 nt, Homo sapiens
  misc_RNA (1)...(19): siRNA sense strand
ugucagauucuucuuacaa

SEQ ID NO: 1679900 - RNA, 19 nt, Homo sapiens
  misc_RNA (1)...(19): siRNA sense strand
gaaaaggacaucaagacau

SEQ ID NO: 1679901 - RNA, 19 nt, Homo sapiens
  misc_RNA (1)...(19): siRNA sense strand
uagagaucauucccuuuua

SEQ ID NO: 1679902 - RNA, 19 nt, Homo sapiens
  misc_RNA (1)...(19): siRNA sense strand
gcagaagcuguuagagauc

SEQ ID NO: 1679903 - RNA, 19 nt, Homo sapiens
  misc_RNA (1)...(19): siRNA sense strand
uggaucaggaugagaguuu

SEQ ID NO: 1679904 - RNA, 19 nt, Homo sapiens
  misc_RNA (1)...(19): siRNA sense strand
caaauugaaaggugaacca

SEQ ID NO: 1679905 - RNA, 19 nt, Homo sapiens
  misc_RNA (1)...(19): siRNA sense strand
auaugaagaaggcagauuu

SEQ ID NO: 1679906 - RNA, 19 nt, Homo sapiens
  misc_RNA (1)...(19): siRNA sense strand
aucaagacauccuacauca

SEQ ID NO: 1679907 - RNA, 19 nt, Homo sapiens
  misc_RNA (1)...(19): siRNA sense strand
gaugauguuugggacucuu

SEQ ID NO: 1679908 - RNA, 19 nt, Homo sapiens
  misc_RNA (1)...(19): siRNA sense strand
gugcauuggguuucaguug

SEQ ID NO: 1679909 - RNA, 19 nt, Homo sapiens
  misc_RNA (1)...(19): siRNA sense strand
cugcagaagcuguuagaga

SEQ ID NO: 1679910 - RNA, 19 nt, Homo sapiens
  misc_RNA (1)...(19): siRNA sense strand
uggcauuccuguugucucu

SEQ ID NO: 1679911 - RNA, 19 nt, Homo sapiens
  misc_RNA (1)...(19): siRNA sense strand
gcaaaagcucgaaauuguu

SEQ ID NO: 1679912 - RNA, 19 nt, Homo sapiens
  misc_RNA (1)...(19): siRNA sense strand
ugggaagucuguauuagcu

SEQ ID NO: 1679913 - RNA, 19 nt, Homo sapiens
  misc_RNA (1)...(19): siRNA sense strand
gugugaagguggaguacca

SEQ ID NO: 1679914 - RNA, 19 nt, Homo sapiens
  misc_RNA (1)...(19): siRNA sense strand
aggcuuccacuuaauauug

SEQ ID NO: 1679915 - RNA, 19 nt, Homo sapiens
  misc_RNA (1)...(19): siRNA sense strand
gaggcuuccacuuaauauu

SEQ ID NO: 1679916 - RNA, 19 nt, Homo sapiens
  misc_RNA (1)...(19): siRNA sense strand
gcugugggaagucuguauu

SEQ ID NO: 1679917 - RNA, 19 nt, Homo sapiens
  misc_RNA (1)...(19): siRNA sense strand
caaaucugggcuucugaug

SEQ ID NO: 1679918 - RNA, 19 nt, Homo sapiens
  misc_RNA (1)...(19): siRNA sense strand
acacaaauggaaccaaucu

SEQ ID NO: 1679919 - RNA, 19 nt, Homo sapiens
  misc_RNA (1)...(19): siRNA sense strand
cagaccuucuacacaaaug

SEQ ID NO: 1679920 - RNA, 19 nt, Homo sapiens
  misc_RNA (1)...(19): siRNA sense strand
uaugaagaaggcagauuug

SEQ ID NO: 1679921 - RNA, 19 nt, Homo sapiens
  misc_RNA (1)...(19): siRNA sense strand
ggaaaaggacaucaagaca

SEQ ID NO: 1679922 - RNA, 19 nt, Homo sapiens
  misc_RNA (1)...(19): siRNA sense strand
aaaucugggcuucugauga

SEQ ID NO: 1679923 - RNA, 19 nt, Homo sapiens
  misc_RNA (1)...(19): siRNA sense strand
guaccacagaggccaguug

SEQ ID NO: 1679924 - RNA, 19 nt, Homo sapiens
  misc_RNA (1)...(19): siRNA sense strand
caaccagagacaagagugu

SEQ ID NO: 1679925 - RNA, 19 nt, Homo sapiens
  misc_RNA (1)...(19): siRNA sense strand
agaagcuggugaaugcaau

SEQ ID NO: 1679926 - RNA, 19 nt, Homo sapiens
  misc_RNA (1)...(19): siRNA sense strand
gaagcuguuagagaucauu

SEQ ID NO: 1679927 - RNA, 19 nt, Homo sapiens
  misc_RNA (1)...(19): siRNA sense strand
gucagauucuucuuacaac

SEQ ID NO: 1679928 - RNA, 19 nt, Homo sapiens
  misc_RNA (1)...(19): siRNA sense strand
gcagugcuacuacgucuuc

SEQ ID NO: 1679929 - RNA, 19 nt, Homo sapiens
  misc_RNA (1)...(19): siRNA sense strand
ucaacaagaucaccuucuc

SEQ ID NO: 1679930 - RNA, 19 nt, Homo sapiens
  misc_RNA (1)...(19): siRNA sense strand
ggcacacggucaacaagau

SEQ ID NO: 1679931 - RNA, 19 nt, Homo sapiens
  misc_RNA (1)...(19): siRNA sense strand
ggaaguacgccagcagcuu

SEQ ID NO: 1679932 - RNA, 19 nt, Homo sapiens
  misc_RNA (1)...(19): siRNA sense strand
cgaccaaggccuauacagu

SEQ ID NO: 1679933 - RNA, 19 nt, Homo sapiens
  misc_RNA (1)...(19): siRNA sense strand
ccagugggacuucggauca

SEQ ID NO: 1679934 - RNA, 19 nt, Homo sapiens
  misc_RNA (1)...(19): siRNA sense strand
gcacacggucaacaagauc

SEQ ID NO: 1679935 - RNA, 19 nt, Homo sapiens
  misc_RNA (1)...(19): siRNA sense strand
gcagagugaagggagcaaa

SEQ ID NO: 1679936 - RNA, 19 nt, Homo sapiens
  misc_RNA (1)...(19): siRNA sense strand
ggggaucucugcagcaauc

SEQ ID NO: 1679937 - RNA, 19 nt, Homo sapiens
  misc_RNA (1)...(19): siRNA sense strand
gcagugcuacuacgucuuc

SEQ ID NO: 1679938 - RNA, 19 nt, Homo sapiens
  misc_RNA (1)...(19): siRNA sense strand
ucaacaagaucaccuucuc

SEQ ID NO: 1679939 - RNA, 19 nt, Homo sapiens
  misc_RNA (1)...(19): siRNA sense strand
ggcacacggucaacaagau

SEQ ID NO: 1679940 - RNA, 19 nt, Homo sapiens
  misc_RNA (1)...(19): siRNA sense strand
ggaaguacgccagcagcuu

SEQ ID NO: 1679941 - RNA, 19 nt, Homo sapiens
  misc_RNA (1)...(19): siRNA sense strand
cgaccaaggccuauacagu

SEQ ID NO: 1679942 - RNA, 19 nt, Homo sapiens
  misc_RNA (1)...(19): siRNA sense strand
ccagugggacuucggauca

SEQ ID NO: 1679943 - RNA, 19 nt, Homo sapiens
  misc_RNA (1)...(19): siRNA sense strand
gcacacggucaacaagauc

SEQ ID NO: 1679944 - RNA, 19 nt, Homo sapiens
  misc_RNA (1)...(19): siRNA sense strand
gcagagugaagggagcaaa

SEQ ID NO: 1679945 - RNA, 19 nt, Homo sapiens
  misc_RNA (1)...(19): siRNA sense strand
ggggaucucugcagcaauc

SEQ ID NO: 1679946 - RNA, 19 nt, Homo sapiens
  misc_RNA (1)...(19): siRNA sense strand
gcagugcuacuacgucuuc

SEQ ID NO: 1679947 - RNA, 19 nt, Homo sapiens
  misc_RNA (1)...(19): siRNA sense strand
ucaacaagaucaccuucuc

SEQ ID NO: 1679948 - RNA, 19 nt, Homo sapiens
  misc_RNA (1)...(19): siRNA sense strand
ggcacacggucaacaagau

SEQ ID NO: 1679949 - RNA, 19 nt, Homo sapiens
  misc_RNA (1)...(19): siRNA sense strand
ggaaguacgccagcagcuu

SEQ ID NO: 1679950 - RNA, 19 nt, Homo sapiens
  misc_RNA (1)...(19): siRNA sense strand
cgaccaaggccuauacagu

SEQ ID NO: 1679951 - RNA, 19 nt, Homo sapiens
  misc_RNA (1)...(19): siRNA sense strand
ccagugggacuucggauca

SEQ ID NO: 1679952 - RNA, 19 nt, Homo sapiens
  misc_RNA (1)...(19): siRNA sense strand
gcacacggucaacaagauc

SEQ ID NO: 1679953 - RNA, 19 nt, Homo sapiens
  misc_RNA (1)...(19): siRNA sense strand
gcagagugaagggagcaaa

SEQ ID NO: 1679954 - RNA, 19 nt, Homo sapiens
  misc_RNA (1)...(19): siRNA sense strand
ggggaucucugcagcaauc

SEQ ID NO: 1679955 - RNA, 19 nt, Homo sapiens
  misc_RNA (1)...(19): siRNA sense strand
gaaugaagauuuccgauau

SEQ ID NO: 1679956 - RNA, 19 nt, Homo sapiens
  misc_RNA (1)...(19): siRNA sense strand
ggaagugaguggaaucuag

SEQ ID NO: 1679957 - RNA, 19 nt, Homo sapiens
  misc_RNA (1)...(19): siRNA sense strand
cgauauggcuacucuuauu

SEQ ID NO: 1679958 - RNA, 19 nt, Homo sapiens
  misc_RNA (1)...(19): siRNA sense strand
gaucuugagugcaguccua

SEQ ID NO: 1679959 - RNA, 19 nt, Homo sapiens
  misc_RNA (1)...(19): siRNA sense strand
gagcugcugccuucauuua

SEQ ID NO: 1679960 - RNA, 19 nt, Homo sapiens
  misc_RNA (1)...(19): siRNA sense strand
gauauggcuacucuuauua

SEQ ID NO: 1679961 - RNA, 19 nt, Homo sapiens
  misc_RNA (1)...(19): siRNA sense strand
gcucuugggugucuggauu

SEQ ID NO: 1679962 - RNA, 19 nt, Homo sapiens
  misc_RNA (1)...(19): siRNA sense strand
ggagaauguucccaaccaa

SEQ ID NO: 1679963 - RNA, 19 nt, Homo sapiens
  misc_RNA (1)...(19): siRNA sense strand
ucagaaggcuacaccuaug

SEQ ID NO: 1679964 - RNA, 19 nt, Homo sapiens
  misc_RNA (1)...(19): siRNA sense strand
gaacagccgacagugauga

SEQ ID NO: 1679965 - RNA, 19 nt, Homo sapiens
  misc_RNA (1)...(19): siRNA sense strand
agaaggaaauguuggaagu

SEQ ID NO: 1679966 - RNA, 19 nt, Homo sapiens
  misc_RNA (1)...(19): siRNA sense strand
gaaaagagaccagaaggaa

SEQ ID NO: 1679967 - RNA, 19 nt, Homo sapiens
  misc_RNA (1)...(19): siRNA sense strand
aaagagaccagaaggaaau

SEQ ID NO: 1679968 - RNA, 19 nt, Homo sapiens
  misc_RNA (1)...(19): siRNA sense strand
gagaauguucccaaccaaa

SEQ ID NO: 1679969 - RNA, 19 nt, Homo sapiens
  misc_RNA (1)...(19): siRNA sense strand
agccaucgcugcccucaaa

SEQ ID NO: 1679970 - RNA, 19 nt, Homo sapiens
  misc_RNA (1)...(19): siRNA sense strand
aaggaaauguuggaaguga

SEQ ID NO: 1679971 - RNA, 19 nt, Homo sapiens
  misc_RNA (1)...(19): siRNA sense strand
gggaacagccgacagugau

SEQ ID NO: 1679972 - RNA, 19 nt, Homo sapiens
  misc_RNA (1)...(19): siRNA sense strand
ggaaauguuggaagugagu

SEQ ID NO: 1679973 - RNA, 19 nt, Homo sapiens
  misc_RNA (1)...(19): siRNA sense strand
gaaacggggugguacauac

SEQ ID NO: 1679974 - RNA, 19 nt, Homo sapiens
  misc_RNA (1)...(19): siRNA sense strand
gagaccagaaggaaauguu

SEQ ID NO: 1679975 - RNA, 19 nt, Homo sapiens
  misc_RNA (1)...(19): siRNA sense strand
gaaggaaauguuggaagug

SEQ ID NO: 1679976 - RNA, 19 nt, Homo sapiens
  misc_RNA (1)...(19): siRNA sense strand
uggagcugcugccuucauu

SEQ ID NO: 1679977 - RNA, 19 nt, Homo sapiens
  misc_RNA (1)...(19): siRNA sense strand
aaugaagauuuccgauaug

SEQ ID NO: 1679978 - RNA, 19 nt, Homo sapiens
  misc_RNA (1)...(19): siRNA sense strand
uccgauauggcuacucuua

SEQ ID NO: 1679979 - RNA, 19 nt, Homo sapiens
  misc_RNA (1)...(19): siRNA sense strand
uggcuacucuuauuacaac

SEQ ID NO: 1679980 - RNA, 19 nt, Homo sapiens
  misc_RNA (1)...(19): siRNA sense strand
gucagaaggcuacaccuau

SEQ ID NO: 1679981 - RNA, 19 nt, Homo sapiens
  misc_RNA (1)...(19): siRNA sense strand
ggaacagccgacagugaug

SEQ ID NO: 1679982 - RNA, 19 nt, Homo sapiens
  misc_RNA (1)...(19): siRNA sense strand
uggcuguacugcuggagaa

SEQ ID NO: 1679983 - RNA, 19 nt, Homo sapiens
  misc_RNA (1)...(19): siRNA sense strand
gcacauccaccaggagucu

SEQ ID NO: 1679984 - RNA, 19 nt, Homo sapiens
  misc_RNA (1)...(19): siRNA sense strand
ggagcugcugccuucauuu

SEQ ID NO: 1679985 - RNA, 19 nt, Homo sapiens
  misc_RNA (1)...(19): siRNA sense strand
uggagaauguucccaacca

SEQ ID NO: 1679986 - RNA, 19 nt, Homo sapiens
  misc_RNA (1)...(19): siRNA sense strand
gcugaggacucugcuaacg

SEQ ID NO: 1679987 - RNA, 19 nt, Homo sapiens
  misc_RNA (1)...(19): siRNA sense strand
guaccuccuucauggacau

SEQ ID NO: 1679988 - RNA, 19 nt, Homo sapiens
  misc_RNA (1)...(19): siRNA sense strand
cugcugaggacucugcuaa

SEQ ID NO: 1679989 - RNA, 19 nt, Homo sapiens
  misc_RNA (1)...(19): siRNA sense strand
guacugcuggagaauguuc

SEQ ID NO: 1679990 - RNA, 19 nt, Homo sapiens
  misc_RNA (1)...(19): siRNA sense strand
cuacucuuauuacaacagu

SEQ ID NO: 1679991 - RNA, 19 nt, Homo sapiens
  misc_RNA (1)...(19): siRNA sense strand
ggaaaagagaccagaagga

SEQ ID NO: 1679992 - RNA, 19 nt, Homo sapiens
  misc_RNA (1)...(19): siRNA sense strand
gccaugcucuugggugucu

SEQ ID NO: 1679993 - RNA, 19 nt, Homo sapiens
  misc_RNA (1)...(19): siRNA sense strand
caucgcugcccucaaacuu

SEQ ID NO: 1679994 - RNA, 19 nt, Homo sapiens
  misc_RNA (1)...(19): siRNA sense strand
gaauguucccaaccaaagg

SEQ ID NO: 1679995 - RNA, 19 nt, Homo sapiens
  misc_RNA (1)...(19): siRNA sense strand
uauggcuacucuuauuaca

SEQ ID NO: 1679996 - RNA, 19 nt, Homo sapiens
  misc_RNA (1)...(19): siRNA sense strand
cagaaggcuacaccuaugu

SEQ ID NO: 1679997 - RNA, 19 nt, Homo sapiens
  misc_RNA (1)...(19): siRNA sense strand
agucagaaggcuacaccua

SEQ ID NO: 1679998 - RNA, 19 nt, Homo sapiens
  misc_RNA (1)...(19): siRNA sense strand
gaaaugauguagaggcuua

SEQ ID NO: 1679999 - RNA, 19 nt, Homo sapiens
  misc_RNA (1)...(19): siRNA sense strand
gaacaggaaaugacaauua

SEQ ID NO: 1680000 - RNA, 19 nt, Homo sapiens
  misc_RNA (1)...(19): siRNA sense strand
gcacaucacuggcagagaa

SEQ ID NO: 1680001 - RNA, 19 nt, Homo sapiens
  misc_RNA (1)...(19): siRNA sense strand
caaaauagcugaaaccuuu

SEQ ID NO: 1680002 - RNA, 19 nt, Homo sapiens
  misc_RNA (1)...(19): siRNA sense strand
caagagaggacuagaaaua

SEQ ID NO: 1680003 - RNA, 19 nt, Homo sapiens
  misc_RNA (1)...(19): siRNA sense strand
gaagacaggauucaacuuu

SEQ ID NO: 1680004 - RNA, 19 nt, Homo sapiens
  misc_RNA (1)...(19): siRNA sense strand
gagaggaacuggcccaaau

SEQ ID NO: 1680005 - RNA, 19 nt, Homo sapiens
  misc_RNA (1)...(19): siRNA sense strand
gaacugagguccaaaauag

SEQ ID NO: 1680006 - RNA, 19 nt, Homo sapiens
  misc_RNA (1)...(19): siRNA sense strand
gaaagagaagguacuguuu

SEQ ID NO: 1680007 - RNA, 19 nt, Homo sapiens
  misc_RNA (1)...(19): siRNA sense strand
gcagagaacugagguccaa

SEQ ID NO: 1680008 - RNA, 19 nt, Homo sapiens
  misc_RNA (1)...(19): siRNA sense strand
agacauagcuaaccagaca

SEQ ID NO: 1680009 - RNA, 19 nt, Homo sapiens
  misc_RNA (1)...(19): siRNA sense strand
gaagucagcaacaaagaaa

SEQ ID NO: 1680010 - RNA, 19 nt, Homo sapiens
  misc_RNA (1)...(19): siRNA sense strand
ggaaagagaagguacuguu

SEQ ID NO: 1680011 - RNA, 19 nt, Homo sapiens
  misc_RNA (1)...(19): siRNA sense strand
guuggacgcugacaaauau

SEQ ID NO: 1680012 - RNA, 19 nt, Homo sapiens
  misc_RNA (1)...(19): siRNA sense strand
ggaauagccuugccauguc

SEQ ID NO: 1680013 - RNA, 19 nt, Homo sapiens
  misc_RNA (1)...(19): siRNA sense strand
guaccuauccuauguagaa

SEQ ID NO: 1680014 - RNA, 19 nt, Homo sapiens
  misc_RNA (1)...(19): siRNA sense strand
ucaaugagauacuggaaga

SEQ ID NO: 1680015 - RNA, 19 nt, Homo sapiens
  misc_RNA (1)...(19): siRNA sense strand
gaaaugacaccguacuuag

SEQ ID NO: 1680016 - RNA, 19 nt, Homo sapiens
  misc_RNA (1)...(19): siRNA sense strand
cagaguaccuauccuaugu

SEQ ID NO: 1680017 - RNA, 19 nt, Homo sapiens
  misc_RNA (1)...(19): siRNA sense strand
ucuggaagaugaagaaauu

SEQ ID NO: 1680018 - RNA, 19 nt, Homo sapiens
  misc_RNA (1)...(19): siRNA sense strand
ccucagauguggugguuaa

SEQ ID NO: 1680019 - RNA, 19 nt, Homo sapiens
  misc_RNA (1)...(19): siRNA sense strand
caucaaaaguggacaauuu

SEQ ID NO: 1680020 - RNA, 19 nt, Homo sapiens
  misc_RNA (1)...(19): siRNA sense strand
agacagaggccgucaauga

SEQ ID NO: 1680021 - RNA, 19 nt, Homo sapiens
  misc_RNA (1)...(19): siRNA sense strand
gaacuggcccaaauaagga

SEQ ID NO: 1680022 - RNA, 19 nt, Homo sapiens
  misc_RNA (1)...(19): siRNA sense strand
gcugaaaccuuuggacuuc

SEQ ID NO: 1680023 - RNA, 19 nt, Homo sapiens
  misc_RNA (1)...(19): siRNA sense strand
cgacaaccgucaagaaagu

SEQ ID NO: 1680024 - RNA, 19 nt, Homo sapiens
  misc_RNA (1)...(19): siRNA sense strand
uguagaggcuuaugaguau

SEQ ID NO: 1680025 - RNA, 19 nt, Homo sapiens
  misc_RNA (1)...(19): siRNA sense strand
gaaauugugggaaagagaa

SEQ ID NO: 1680026 - RNA, 19 nt, Homo sapiens
  misc_RNA (1)...(19): siRNA sense strand
gaagguacuguuucuaaga

SEQ ID NO: 1680027 - RNA, 19 nt, Homo sapiens
  misc_RNA (1)...(19): siRNA sense strand
gcucagcaauccucagaug

SEQ ID NO: 1680028 - RNA, 19 nt, Homo sapiens
  misc_RNA (1)...(19): siRNA sense strand
agacuagaaugcugugaaa

SEQ ID NO: 1680029 - RNA, 19 nt, Homo sapiens
  misc_RNA (1)...(19): siRNA sense strand
gaucaugcggccacucaua

SEQ ID NO: 1680030 - RNA, 19 nt, Homo sapiens
  misc_RNA (1)...(19): siRNA sense strand
gcuaugggauaucaugaga

SEQ ID NO: 1680031 - RNA, 19 nt, Homo sapiens
  misc_RNA (1)...(19): siRNA sense strand
ggaaaacccuugaagaaca

SEQ ID NO: 1680032 - RNA, 19 nt, Homo sapiens
  misc_RNA (1)...(19): siRNA sense strand
acucaacucuggaagauga

SEQ ID NO: 1680033 - RNA, 19 nt, Homo sapiens
  misc_RNA (1)...(19): siRNA sense strand
ggaaaccuccauauacaga

SEQ ID NO: 1680034 - RNA, 19 nt, Homo sapiens
  misc_RNA (1)...(19): siRNA sense strand
gaaacuaucacaguggaaa

SEQ ID NO: 1680035 - RNA, 19 nt, Homo sapiens
  misc_RNA (1)...(19): siRNA sense strand
aagaaaagcccuuauguua

SEQ ID NO: 1680036 - RNA, 19 nt, Homo sapiens
  misc_RNA (1)...(19): siRNA sense strand
gcaaagagagcagcagaga

SEQ ID NO: 1680037 - RNA, 19 nt, Homo sapiens
  misc_RNA (1)...(19): siRNA sense strand
gaggaacuggcccaaauaa

SEQ ID NO: 1680038 - RNA, 19 nt, Homo sapiens
  misc_RNA (1)...(19): siRNA sense strand
gaacaaggcguggcucaca

SEQ ID NO: 1680039 - RNA, 19 nt, Homo sapiens
  misc_RNA (1)...(19): siRNA sense strand
ggaagucagcaacaaagaa

SEQ ID NO: 1680040 - RNA, 19 nt, Homo sapiens
  misc_RNA (1)...(19): siRNA sense strand
cagauguggugguuaaaug

SEQ ID NO: 1680041 - RNA, 19 nt, Homo sapiens
  misc_RNA (1)...(19): siRNA sense strand
caaggcacgucagcucuuu

SEQ ID NO: 1680042 - RNA, 19 nt, Homo sapiens
  misc_RNA (1)...(19): siRNA sense strand
aaaguugguuuggcauuaa

SEQ ID NO: 1680043 - RNA, 19 nt, Homo sapiens
  misc_RNA (1)...(19): siRNA sense strand
agaaaugacaccguacuua

SEQ ID NO: 1680044 - RNA, 19 nt, Homo sapiens
  misc_RNA (1)...(19): siRNA sense strand
ggaaaacauugaccgauug

SEQ ID NO: 1680045 - RNA, 19 nt, Homo sapiens
  misc_RNA (1)...(19): siRNA sense strand
gcccagaaaugcuuuaaaa

SEQ ID NO: 1680046 - RNA, 19 nt, Homo sapiens
  misc_RNA (1)...(19): siRNA sense strand
cgauggugcuugaacuaaa

SEQ ID NO: 1680047 - RNA, 19 nt, Homo sapiens
  misc_RNA (1)...(19): siRNA sense strand
ggaacuggcccaaauaagg

SEQ ID NO: 1680048 - RNA, 19 nt, Homo sapiens
  misc_RNA (1)...(19): siRNA sense strand
uauguuagcuaugggauau

SEQ ID NO: 1680049 - RNA, 19 nt, Homo sapiens
  misc_RNA (1)...(19): siRNA sense strand
uaagaagcaacuacaacua

SEQ ID NO: 1680050 - RNA, 19 nt, Homo sapiens
  misc_RNA (1)...(19): siRNA sense strand
gcacgucagcucuuuaaag

SEQ ID NO: 1680051 - RNA, 19 nt, Homo sapiens
  misc_RNA (1)...(19): siRNA sense strand
gaauagccuugccaugucu

SEQ ID NO: 1680052 - RNA, 19 nt, Homo sapiens
  misc_RNA (1)...(19): siRNA sense strand
acaggcagaucaaucagaa

SEQ ID NO: 1680053 - RNA, 19 nt, Homo sapiens
  misc_RNA (1)...(19): siRNA sense strand
gacuagaaauacuggcaaa

SEQ ID NO: 1680054 - RNA, 19 nt, Homo sapiens
  misc_RNA (1)...(19): siRNA sense strand
gcaacuacaacuagggaaa

SEQ ID NO: 1680055 - RNA, 19 nt, Homo sapiens
  misc_RNA (1)...(19): siRNA sense strand
ggaaugccuugaugaugca

SEQ ID NO: 1680056 - RNA, 19 nt, Homo sapiens
  misc_RNA (1)...(19): siRNA sense strand
gauauagugugguguuacu

SEQ ID NO: 1680057 - RNA, 19 nt, Homo sapiens
  misc_RNA (1)...(19): siRNA sense strand
gaaaagcccuuauguuagc

SEQ ID NO: 1680058 - RNA, 19 nt, Homo sapiens
  misc_RNA (1)...(19): siRNA sense strand
gagacccgauugcacauca

SEQ ID NO: 1680059 - RNA, 19 nt, Homo sapiens
  misc_RNA (1)...(19): siRNA sense strand
aaagagagcagcagagaca

SEQ ID NO: 1680060 - RNA, 19 nt, Homo sapiens
  misc_RNA (1)...(19): siRNA sense strand
ugacucaacucuggaagau

SEQ ID NO: 1680061 - RNA, 19 nt, Homo sapiens
  misc_RNA (1)...(19): siRNA sense strand
gaaaacccuugaagaacaa

SEQ ID NO: 1680062 - RNA, 19 nt, Homo sapiens
  misc_RNA (1)...(19): siRNA sense strand
gcagaguaccuauccuaug

SEQ ID NO: 1680063 - RNA, 19 nt, Homo sapiens
  misc_RNA (1)...(19): siRNA sense strand
acgaagacauggagacaga

SEQ ID NO: 1680064 - RNA, 19 nt, Homo sapiens
  misc_RNA (1)...(19): siRNA sense strand
caagggauccgaaacuauc

SEQ ID NO: 1680065 - RNA, 19 nt, Homo sapiens
  misc_RNA (1)...(19): siRNA sense strand
ggaaauugugggaaagaga

SEQ ID NO: 1680066 - RNA, 19 nt, Homo sapiens
  misc_RNA (1)...(19): siRNA sense strand
gguaauagaagaaauacgu

SEQ ID NO: 1680067 - RNA, 19 nt, Homo sapiens
  misc_RNA (1)...(19): siRNA sense strand
gagagcugcuggacacagu

SEQ ID NO: 1680068 - RNA, 19 nt, Homo sapiens
  misc_RNA (1)...(19): siRNA sense strand
ggagacagaggccgucaau

SEQ ID NO: 1680069 - RNA, 19 nt, Homo sapiens
  misc_RNA (1)...(19): siRNA sense strand
gugguuaaaugauuccaau

SEQ ID NO: 1680070 - RNA, 19 nt, Homo sapiens
  misc_RNA (1)...(19): siRNA sense strand
gcuaagcaguacucugaca

SEQ ID NO: 1680071 - RNA, 19 nt, Homo sapiens
  misc_RNA (1)...(19): siRNA sense strand
cagcuggaaugccuugaug

SEQ ID NO: 1680072 - RNA, 19 nt, Homo sapiens
  misc_RNA (1)...(19): siRNA sense strand
uagaaauacuggcaaagag

SEQ ID NO: 1680073 - RNA, 19 nt, Homo sapiens
  misc_RNA (1)...(19): siRNA sense strand
gaaagaaaagcccuuaugu

SEQ ID NO: 1680074 - RNA, 19 nt, Homo sapiens
  misc_RNA (1)...(19): siRNA sense strand
gaguaccuauccuauguag

SEQ ID NO: 1680075 - RNA, 19 nt, Homo sapiens
  misc_RNA (1)...(19): siRNA sense strand
caugcggccacucauauua

SEQ ID NO: 1680076 - RNA, 19 nt, Homo sapiens
  misc_RNA (1)...(19): siRNA sense strand
aaaaggaaauugugggaaa

SEQ ID NO: 1680077 - RNA, 19 nt, Homo sapiens
  misc_RNA (1)...(19): siRNA sense strand
caggaaaugacaauuauag

SEQ ID NO: 1680078 - RNA, 19 nt, Homo sapiens
  misc_RNA (1)...(19): siRNA sense strand
gcuuaugaguaucuuaaca

SEQ ID NO: 1680079 - RNA, 19 nt, Homo sapiens
  misc_RNA (1)...(19): siRNA sense strand
ucagagacugguccacaua

SEQ ID NO: 1680080 - RNA, 19 nt, Homo sapiens
  misc_RNA (1)...(19): siRNA sense strand
caaauucagaggaccaaga

SEQ ID NO: 1680081 - RNA, 19 nt, Homo sapiens
  misc_RNA (1)...(19): siRNA sense strand
agagacugguccacauaaa

SEQ ID NO: 1680082 - RNA, 19 nt, Homo sapiens
  misc_RNA (1)...(19): siRNA sense strand
gaccaagagaggacuagaa

SEQ ID NO: 1680083 - RNA, 19 nt, Homo sapiens
  misc_RNA (1)...(19): siRNA sense strand
gaaaauaggaagucagcaa

SEQ ID NO: 1680084 - RNA, 19 nt, Homo sapiens
  misc_RNA (1)...(19): siRNA sense strand
caacagacgaagacaugga

SEQ ID NO: 1680085 - RNA, 19 nt, Homo sapiens
  misc_RNA (1)...(19): siRNA sense strand
caaauaaggaaggaggaaa

SEQ ID NO: 1680086 - RNA, 19 nt, Homo sapiens
  misc_RNA (1)...(19): siRNA sense strand
aagacaggauucaacuuug

SEQ ID NO: 1680087 - RNA, 19 nt, Homo sapiens
  misc_RNA (1)...(19): siRNA sense strand
aaaaguugguuuggcauua

SEQ ID NO: 1680088 - RNA, 19 nt, Homo sapiens
  misc_RNA (1)...(19): siRNA sense strand
aaaccuccauauacagaug

SEQ ID NO: 1680089 - RNA, 19 nt, Homo sapiens
  misc_RNA (1)...(19): siRNA sense strand
gacaaauauuucugugagu

SEQ ID NO: 1680090 - RNA, 19 nt, Homo sapiens
  misc_RNA (1)...(19): siRNA sense strand
uaugggauaucaugagaag

SEQ ID NO: 1680091 - RNA, 19 nt, Homo sapiens
  misc_RNA (1)...(19): siRNA sense strand
gaagaggacgcgaggaaaa

SEQ ID NO: 1680092 - RNA, 19 nt, Homo sapiens
  misc_RNA (1)...(19): siRNA sense strand
gcccuuauguuagcuaugg

SEQ ID NO: 1680093 - RNA, 19 nt, Homo sapiens
  misc_RNA (1)...(19): siRNA sense strand
uagaagaaauacguugcaa

SEQ ID NO: 1680094 - RNA, 19 nt, Homo sapiens
  misc_RNA (1)...(19): siRNA sense strand
ggaagacaggauucaacuu

SEQ ID NO: 1680095 - RNA, 19 nt, Homo sapiens
  misc_RNA (1)...(19): siRNA sense strand
guacauggguuuugaugca

SEQ ID NO: 1680096 - RNA, 19 nt, Homo sapiens
  misc_RNA (1)...(19): siRNA sense strand
aauaggaagucagcaacaa

SEQ ID NO: 1680097 - RNA, 19 nt, Homo sapiens
  misc_RNA (1)...(19): siRNA sense strand
ugagauacuggaagacauu

SEQ ID NO: 1680098 - RNA, 19 nt, Homo sapiens
  misc_RNA (1)...(19): siRNA sense strand
gaagagguuugaugaaauc

SEQ ID NO: 1680099 - RNA, 19 nt, Homo sapiens
  misc_RNA (1)...(19): siRNA sense strand
gugaagagguuugaugaaa

SEQ ID NO: 1680100 - RNA, 19 nt, Homo sapiens
  misc_RNA (1)...(19): siRNA sense strand
gggcaagccuguugucugu

SEQ ID NO: 1680101 - RNA, 19 nt, Homo sapiens
  misc_RNA (1)...(19): siRNA sense strand
gcaucaagaucaucagcaa

SEQ ID NO: 1680102 - RNA, 19 nt, Homo sapiens
  misc_RNA (1)...(19): siRNA sense strand
ggacacggcaucaagauca

SEQ ID NO: 1680103 - RNA, 19 nt, Homo sapiens
  misc_RNA (1)...(19): siRNA sense strand
guggagagcuuugcagguu

SEQ ID NO: 1680104 - RNA, 19 nt, Homo sapiens
  misc_RNA (1)...(19): siRNA sense strand
ugaagagguuugaugaaau

SEQ ID NO: 1680105 - RNA, 19 nt, Homo sapiens
  misc_RNA (1)...(19): siRNA sense strand
gaaggacacggcaucaaga

SEQ ID NO: 1680106 - RNA, 19 nt, Homo sapiens
  misc_RNA (1)...(19): siRNA sense strand
gcucagaagaugaugauug

SEQ ID NO: 1680107 - RNA, 19 nt, Homo sapiens
  misc_RNA (1)...(19): siRNA sense strand
gaacauugcgcgacucaac

SEQ ID NO: 1680108 - RNA, 19 nt, Homo sapiens
  misc_RNA (1)...(19): siRNA sense strand
ggaaggacacggcaucaag

SEQ ID NO: 1680109 - RNA, 19 nt, Homo sapiens
  misc_RNA (1)...(19): siRNA sense strand
caucgucuuugccuccuuu

SEQ ID NO: 1680110 - RNA, 19 nt, Homo sapiens
  misc_RNA (1)...(19): siRNA sense strand
ggaccuaggcaucgagauc

SEQ ID NO: 1680111 - RNA, 19 nt, Homo sapiens
  misc_RNA (1)...(19): siRNA sense strand
uuggagaccuggugauugu

SEQ ID NO: 1680112 - RNA, 19 nt, Homo sapiens
  misc_RNA (1)...(19): siRNA sense strand
gcgugaagagguuugauga

SEQ ID NO: 1680113 - RNA, 19 nt, Homo sapiens
  misc_RNA (1)...(19): siRNA sense strand
ggugagcgacggcaucaug

SEQ ID NO: 1680114 - RNA, 19 nt, Homo sapiens
  misc_RNA (1)...(19): siRNA sense strand
acgaaggcgugaagagguu

SEQ ID NO: 1680115 - RNA, 19 nt, Homo sapiens
  misc_RNA (1)...(19): siRNA sense strand
uggaagcggugaagaugca

SEQ ID NO: 1680116 - RNA, 19 nt, Homo sapiens
  misc_RNA (1)...(19): siRNA sense strand
cucagaagaugaugauugg

SEQ ID NO: 1680117 - RNA, 19 nt, Homo sapiens
  misc_RNA (1)...(19): siRNA sense strand
uggagagcaugauuaccaa

SEQ ID NO: 1680118 - RNA, 19 nt, Homo sapiens
  misc_RNA (1)...(19): siRNA sense strand
aggcagaggccgcagugua

SEQ ID NO: 1680119 - RNA, 19 nt, Homo sapiens
  misc_RNA (1)...(19): siRNA sense strand
gggcagagacaagcgaugu

SEQ ID NO: 1680120 - RNA, 19 nt, Homo sapiens
  misc_RNA (1)...(19): siRNA sense strand
caacgagggcagagacaag

SEQ ID NO: 1680121 - RNA, 19 nt, Homo sapiens
  misc_RNA (1)...(19): siRNA sense strand
gaucccagcagagaagguu

SEQ ID NO: 1680122 - RNA, 19 nt, Homo sapiens
  misc_RNA (1)...(19): siRNA sense strand
cgcaguaccagcaucauug

SEQ ID NO: 1680123 - RNA, 19 nt, Homo sapiens
  misc_RNA (1)...(19): siRNA sense strand
gauugggcgcugcaacuug

SEQ ID NO: 1680124 - RNA, 19 nt, Homo sapiens
  misc_RNA (1)...(19): siRNA sense strand
ccaucgcccuggacaccaa

SEQ ID NO: 1680125 - RNA, 19 nt, Homo sapiens
  misc_RNA (1)...(19): siRNA sense strand
cugggcagaugauguagau

SEQ ID NO: 1680126 - RNA, 19 nt, Homo sapiens
  misc_RNA (1)...(19): siRNA sense strand
ggaaguggagcuggugaag

SEQ ID NO: 1680127 - RNA, 19 nt, Homo sapiens
  misc_RNA (1)...(19): siRNA sense strand
caacaucaugcgggugcua

SEQ ID NO: 1680128 - RNA, 19 nt, Homo sapiens
  misc_RNA (1)...(19): siRNA sense strand
cgagaucccagcagagaag

SEQ ID NO: 1680129 - RNA, 19 nt, Homo sapiens
  misc_RNA (1)...(19): siRNA sense strand
caucaagaucaucagcaaa

SEQ ID NO: 1680130 - RNA, 19 nt, Homo sapiens
  misc_RNA (1)...(19): siRNA sense strand
gacacggcaucaagaucau

SEQ ID NO: 1680131 - RNA, 19 nt, Homo sapiens
  misc_RNA (1)...(19): siRNA sense strand
ggguggacaucgucuuugc

SEQ ID NO: 1680132 - RNA, 19 nt, Homo sapiens
  misc_RNA (1)...(19): siRNA sense strand
gaggugagcgacggcauca

SEQ ID NO: 1680133 - RNA, 19 nt, Homo sapiens
  misc_RNA (1)...(19): siRNA sense strand
gaaggcgugaagagguuug

SEQ ID NO: 1680134 - RNA, 19 nt, Homo sapiens
  misc_RNA (1)...(19): siRNA sense strand
ggaacaccucugccuacug

SEQ ID NO: 1680135 - RNA, 19 nt, Homo sapiens
  misc_RNA (1)...(19): siRNA sense strand
gaagagguuugaugaaauc

SEQ ID NO: 1680136 - RNA, 19 nt, Homo sapiens
  misc_RNA (1)...(19): siRNA sense strand
gugaagagguuugaugaaa

SEQ ID NO: 1680137 - RNA, 19 nt, Homo sapiens
  misc_RNA (1)...(19): siRNA sense strand
gggcaagccuguugucugu

SEQ ID NO: 1680138 - RNA, 19 nt, Homo sapiens
  misc_RNA (1)...(19): siRNA sense strand
gcaucaagaucaucagcaa

SEQ ID NO: 1680139 - RNA, 19 nt, Homo sapiens
  misc_RNA (1)...(19): siRNA sense strand
ggacacggcaucaagauca

SEQ ID NO: 1680140 - RNA, 19 nt, Homo sapiens
  misc_RNA (1)...(19): siRNA sense strand
guggagagcuuugcagguu

SEQ ID NO: 1680141 - RNA, 19 nt, Homo sapiens
  misc_RNA (1)...(19): siRNA sense strand
ugaagagguuugaugaaau

SEQ ID NO: 1680142 - RNA, 19 nt, Homo sapiens
  misc_RNA (1)...(19): siRNA sense strand
gaaggacacggcaucaaga

SEQ ID NO: 1680143 - RNA, 19 nt, Homo sapiens
  misc_RNA (1)...(19): siRNA sense strand
gcucagaagaugaugauug

SEQ ID NO: 1680144 - RNA, 19 nt, Homo sapiens
  misc_RNA (1)...(19): siRNA sense strand
gaacauugcgcgacucaac

SEQ ID NO: 1680145 - RNA, 19 nt, Homo sapiens
  misc_RNA (1)...(19): siRNA sense strand
ggaaggacacggcaucaag

SEQ ID NO: 1680146 - RNA, 19 nt, Homo sapiens
  misc_RNA (1)...(19): siRNA sense strand
caucgucuuugccuccuuu

SEQ ID NO: 1680147 - RNA, 19 nt, Homo sapiens
  misc_RNA (1)...(19): siRNA sense strand
ggaccuaggcaucgagauc

SEQ ID NO: 1680148 - RNA, 19 nt, Homo sapiens
  misc_RNA (1)...(19): siRNA sense strand
uuggagaccuggugauugu

SEQ ID NO: 1680149 - RNA, 19 nt, Homo sapiens
  misc_RNA (1)...(19): siRNA sense strand
gcgugaagagguuugauga

SEQ ID NO: 1680150 - RNA, 19 nt, Homo sapiens
  misc_RNA (1)...(19): siRNA sense strand
ggugagcgacggcaucaug

SEQ ID NO: 1680151 - RNA, 19 nt, Homo sapiens
  misc_RNA (1)...(19): siRNA sense strand
acgaaggcgugaagagguu

SEQ ID NO: 1680152 - RNA, 19 nt, Homo sapiens
  misc_RNA (1)...(19): siRNA sense strand
uggaagcggugaagaugca

SEQ ID NO: 1680153 - RNA, 19 nt, Homo sapiens
  misc_RNA (1)...(19): siRNA sense strand
cucagaagaugaugauugg

SEQ ID NO: 1680154 - RNA, 19 nt, Homo sapiens
  misc_RNA (1)...(19): siRNA sense strand
uggagagcaugauuaccaa

SEQ ID NO: 1680155 - RNA, 19 nt, Homo sapiens
  misc_RNA (1)...(19): siRNA sense strand
aggcagaggccgcagugua

SEQ ID NO: 1680156 - RNA, 19 nt, Homo sapiens
  misc_RNA (1)...(19): siRNA sense strand
gggcagagacaagcgaugu

SEQ ID NO: 1680157 - RNA, 19 nt, Homo sapiens
  misc_RNA (1)...(19): siRNA sense strand
caacgagggcagagacaag

SEQ ID NO: 1680158 - RNA, 19 nt, Homo sapiens
  misc_RNA (1)...(19): siRNA sense strand
gaucccagcagagaagguu

SEQ ID NO: 1680159 - RNA, 19 nt, Homo sapiens
  misc_RNA (1)...(19): siRNA sense strand
cgcaguaccagcaucauug

SEQ ID NO: 1680160 - RNA, 19 nt, Homo sapiens
  misc_RNA (1)...(19): siRNA sense strand
gauugggcgcugcaacuug

SEQ ID NO: 1680161 - RNA, 19 nt, Homo sapiens
  misc_RNA (1)...(19): siRNA sense strand
ccaucgcccuggacaccaa

SEQ ID NO: 1680162 - RNA, 19 nt, Homo sapiens
  misc_RNA (1)...(19): siRNA sense strand
cugggcagaugauguagau

SEQ ID NO: 1680163 - RNA, 19 nt, Homo sapiens
  misc_RNA (1)...(19): siRNA sense strand
ggaaguggagcuggugaag

SEQ ID NO: 1680164 - RNA, 19 nt, Homo sapiens
  misc_RNA (1)...(19): siRNA sense strand
caacaucaugcgggugcua

SEQ ID NO: 1680165 - RNA, 19 nt, Homo sapiens
  misc_RNA (1)...(19): siRNA sense strand
cgagaucccagcagagaag

SEQ ID NO: 1680166 - RNA, 19 nt, Homo sapiens
  misc_RNA (1)...(19): siRNA sense strand
caucaagaucaucagcaaa

SEQ ID NO: 1680167 - RNA, 19 nt, Homo sapiens
  misc_RNA (1)...(19): siRNA sense strand
gacacggcaucaagaucau

SEQ ID NO: 1680168 - RNA, 19 nt, Homo sapiens
  misc_RNA (1)...(19): siRNA sense strand
ggguggacaucgucuuugc

SEQ ID NO: 1680169 - RNA, 19 nt, Homo sapiens
  misc_RNA (1)...(19): siRNA sense strand
gaggugagcgacggcauca

SEQ ID NO: 1680170 - RNA, 19 nt, Homo sapiens
  misc_RNA (1)...(19): siRNA sense strand
gaaggcgugaagagguuug

SEQ ID NO: 1680171 - RNA, 19 nt, Homo sapiens
  misc_RNA (1)...(19): siRNA sense strand
ggaacaccucugccuacug

SEQ ID NO: 1680172 - RNA, 19 nt, Homo sapiens
  misc_RNA (1)...(19): siRNA sense strand
gcaagaagguaacgucauu

SEQ ID NO: 1680173 - RNA, 19 nt, Homo sapiens
  misc_RNA (1)...(19): siRNA sense strand
gaacugacaugggaagauu

SEQ ID NO: 1680174 - RNA, 19 nt, Homo sapiens
  misc_RNA (1)...(19): siRNA sense strand
ggaaugggcuguucuccaa

SEQ ID NO: 1680175 - RNA, 19 nt, Homo sapiens
  misc_RNA (1)...(19): siRNA sense strand
gaacaucgcuguguaugag

SEQ ID NO: 1680176 - RNA, 19 nt, Homo sapiens
  misc_RNA (1)...(19): siRNA sense strand
ggacuuccaucgccucauu

SEQ ID NO: 1680177 - RNA, 19 nt, Homo sapiens
  misc_RNA (1)...(19): siRNA sense strand
gaagaaauccgaaauacca

SEQ ID NO: 1680178 - RNA, 19 nt, Homo sapiens
  misc_RNA (1)...(19): siRNA sense strand
gcagcgacauugagacuga

SEQ ID NO: 1680179 - RNA, 19 nt, Homo sapiens
  misc_RNA (1)...(19): siRNA sense strand
cagcaucucuuucauguuc

SEQ ID NO: 1680180 - RNA, 19 nt, Homo sapiens
  misc_RNA (1)...(19): siRNA sense strand
agaaggagauugaagaaau

SEQ ID NO: 1680181 - RNA, 19 nt, Homo sapiens
  misc_RNA (1)...(19): siRNA sense strand
caucauccaugguagcuuu

SEQ ID NO: 1680182 - RNA, 19 nt, Homo sapiens
  misc_RNA (1)...(19): siRNA sense strand
ggaagaagguggagaucag

SEQ ID NO: 1680183 - RNA, 19 nt, Homo sapiens
  misc_RNA (1)...(19): siRNA sense strand
caucguccuugaacaauuu

SEQ ID NO: 1680184 - RNA, 19 nt, Homo sapiens
  misc_RNA (1)...(19): siRNA sense strand
gcacucugcugcucaagau

SEQ ID NO: 1680185 - RNA, 19 nt, Homo sapiens
  misc_RNA (1)...(19): siRNA sense strand
ggaggugccugaagucauc

SEQ ID NO: 1680186 - RNA, 19 nt, Homo sapiens
  misc_RNA (1)...(19): siRNA sense strand
gaaccggagucuauucaca

SEQ ID NO: 1680187 - RNA, 19 nt, Homo sapiens
  misc_RNA (1)...(19): siRNA sense strand
gaggaaaagucucgccuua

SEQ ID NO: 1680188 - RNA, 19 nt, Homo sapiens
  misc_RNA (1)...(19): siRNA sense strand
ggaaaagucucgccuuaug

SEQ ID NO: 1680189 - RNA, 19 nt, Homo sapiens
  misc_RNA (1)...(19): siRNA sense strand
ugacagaugugccagauac

SEQ ID NO: 1680190 - RNA, 19 nt, Homo sapiens
  misc_RNA (1)...(19): siRNA sense strand
ggagagggccuacuacuac

SEQ ID NO: 1680191 - RNA, 19 nt, Homo sapiens
  misc_RNA (1)...(19): siRNA sense strand
acaaagugcugaagaugug

SEQ ID NO: 1680192 - RNA, 19 nt, Homo sapiens
  misc_RNA (1)...(19): siRNA sense strand
ggacccagcgucaguuuga

SEQ ID NO: 1680193 - RNA, 19 nt, Homo sapiens
  misc_RNA (1)...(19): siRNA sense strand
gcuaucacgugcuuucaga

SEQ ID NO: 1680194 - RNA, 19 nt, Homo sapiens
  misc_RNA (1)...(19): siRNA sense strand
ccaaagcuguaccuugaug

SEQ ID NO: 1680195 - RNA, 19 nt, Homo sapiens
  misc_RNA (1)...(19): siRNA sense strand
acccaaagcuguaccuuga

SEQ ID NO: 1680196 - RNA, 19 nt, Homo sapiens
  misc_RNA (1)...(19): siRNA sense strand
gaugagagcagcugugaca

SEQ ID NO: 1680197 - RNA, 19 nt, Homo sapiens
  misc_RNA (1)...(19): siRNA sense strand
ccagauacccaaagcugua

SEQ ID NO: 1680198 - RNA, 19 nt, Homo sapiens
  misc_RNA (1)...(19): siRNA sense strand
ccaagaaggagauugaaga

SEQ ID NO: 1680199 - RNA, 19 nt, Homo sapiens
  misc_RNA (1)...(19): siRNA sense strand
gccagcaucucuuucaugu

SEQ ID NO: 1680200 - RNA, 19 nt, Homo sapiens
  misc_RNA (1)...(19): siRNA sense strand
cauggaagcuuuggaaugg

SEQ ID NO: 1680201 - RNA, 19 nt, Homo sapiens
  misc_RNA (1)...(19): siRNA sense strand
gcagauccgugugguagau

SEQ ID NO: 1680202 - RNA, 19 nt, Homo sapiens
  misc_RNA (1)...(19): siRNA sense strand
ccacuaugcuguacaucug

SEQ ID NO: 1680203 - RNA, 19 nt, Homo sapiens
  misc_RNA (1)...(19): siRNA sense strand
ggaccacuaugcuguacau

SEQ ID NO: 1680204 - RNA, 19 nt, Homo sapiens
  misc_RNA (1)...(19): siRNA sense strand
gcucuagcauggacacuuc

SEQ ID NO: 1680205 - RNA, 19 nt, Homo sapiens
  misc_RNA (1)...(19): siRNA sense strand
ggacaaggaggaacugaca

SEQ ID NO: 1680206 - RNA, 19 nt, Homo sapiens
  misc_RNA (1)...(19): siRNA sense strand
caagaaggagauugaagaa

SEQ ID NO: 1680207 - RNA, 19 nt, Homo sapiens
  misc_RNA (1)...(19): siRNA sense strand
gcugccaaguguucuguaa

SEQ ID NO: 1680208 - RNA, 19 nt, Homo sapiens
  misc_RNA (1)...(19): siRNA sense strand
cguccucucuugccucuuu

SEQ ID NO: 1680209 - RNA, 19 nt, Homo sapiens
  misc_RNA (1)...(19): siRNA sense strand
gugcugcccuuccagagaa

SEQ ID NO: 1680210 - RNA, 19 nt, Homo sapiens
  misc_RNA (1)...(19): siRNA sense strand
ggugaccgcuacugguuug

SEQ ID NO: 1680211 - RNA, 19 nt, Homo sapiens
  misc_RNA (1)...(19): siRNA sense strand
ggacggcagcgccaucuau

SEQ ID NO: 1680212 - RNA, 19 nt, Homo sapiens
  misc_RNA (1)...(19): siRNA sense strand
ucacuucucccaccauuau

SEQ ID NO: 1680213 - RNA, 19 nt, Homo sapiens
  misc_RNA (1)...(19): siRNA sense strand
gaccuggugcugcuguuua

SEQ ID NO: 1680214 - RNA, 19 nt, Homo sapiens
  misc_RNA (1)...(19): siRNA sense strand
ggacuuauccuggcuagag

SEQ ID NO: 1680215 - RNA, 19 nt, Homo sapiens
  misc_RNA (1)...(19): siRNA sense strand
ggucaucaaucggaacuca

SEQ ID NO: 1680216 - RNA, 19 nt, Homo sapiens
  misc_RNA (1)...(19): siRNA sense strand
aaucggaacucaagugucu

SEQ ID NO: 1680217 - RNA, 19 nt, Homo sapiens
  misc_RNA (1)...(19): siRNA sense strand
gauccuggccaucauguau

SEQ ID NO: 1680218 - RNA, 19 nt, Homo sapiens
  misc_RNA (1)...(19): siRNA sense strand
gagauucggcggagguuug

SEQ ID NO: 1680219 - RNA, 19 nt, Homo sapiens
  misc_RNA (1)...(19): siRNA sense strand
gcuggucgcuguuaucaac

SEQ ID NO: 1680220 - RNA, 19 nt, Homo sapiens
  misc_RNA (1)...(19): siRNA sense strand
gagaaaccgcacaguguug

SEQ ID NO: 1680221 - RNA, 19 nt, Homo sapiens
  misc_RNA (1)...(19): siRNA sense strand
gccauguggugaaugugua

SEQ ID NO: 1680222 - RNA, 19 nt, Homo sapiens
  misc_RNA (1)...(19): siRNA sense strand
guacgacuuugaugggaau

SEQ ID NO: 1680223 - RNA, 19 nt, Homo sapiens
  misc_RNA (1)...(19): siRNA sense strand
gcauggaagcuuuggaaug

SEQ ID NO: 1680224 - RNA, 19 nt, Homo sapiens
  misc_RNA (1)...(19): siRNA sense strand
gcgagaggaccauguguug

SEQ ID NO: 1680225 - RNA, 19 nt, Homo sapiens
  misc_RNA (1)...(19): siRNA sense strand
cagcaucuccucagaguuc

SEQ ID NO: 1680226 - RNA, 19 nt, Homo sapiens
  misc_RNA (1)...(19): siRNA sense strand
ucaucgagaucuccaacaa

SEQ ID NO: 1680227 - RNA, 19 nt, Homo sapiens
  misc_RNA (1)...(19): siRNA sense strand
gcacaucacacgggcauca

SEQ ID NO: 1680228 - RNA, 19 nt, Homo sapiens
  misc_RNA (1)...(19): siRNA sense strand
gagagguggaggagaauga

SEQ ID NO: 1680229 - RNA, 19 nt, Homo sapiens
  misc_RNA (1)...(19): siRNA sense strand
uugaagaugugcgggauuu

SEQ ID NO: 1680230 - RNA, 19 nt, Homo sapiens
  misc_RNA (1)...(19): siRNA sense strand
gcauaaguuugagguguca

SEQ ID NO: 1680231 - RNA, 19 nt, Homo sapiens
  misc_RNA (1)...(19): siRNA sense strand
cgugggaggugcagcgauu

SEQ ID NO: 1680232 - RNA, 19 nt, Homo sapiens
  misc_RNA (1)...(19): siRNA sense strand
gcagccagcaucucuuuca

SEQ ID NO: 1680233 - RNA, 19 nt, Homo sapiens
  misc_RNA (1)...(19): siRNA sense strand
ccggagcaaugacacugua

SEQ ID NO: 1680234 - RNA, 19 nt, Homo sapiens
  misc_RNA (1)...(19): siRNA sense strand
ugccaaguguucuguaaga

SEQ ID NO: 1680235 - RNA, 19 nt, Homo sapiens
  misc_RNA (1)...(19): siRNA sense strand
cggcgagccuccuacauca

SEQ ID NO: 1680236 - RNA, 19 nt, Homo sapiens
  misc_RNA (1)...(19): siRNA sense strand
ucacgcagcucugugucaa

SEQ ID NO: 1680237 - RNA, 19 nt, Homo sapiens
  misc_RNA (1)...(19): siRNA sense strand
gcaccaucguccuugaaca

SEQ ID NO: 1680238 - RNA, 19 nt, Homo sapiens
  misc_RNA (1)...(19): siRNA sense strand
gaccgcuacugguuugaga

SEQ ID NO: 1680239 - RNA, 19 nt, Homo sapiens
  misc_RNA (1)...(19): siRNA sense strand
ccuacaaagugcugaagau

SEQ ID NO: 1680240 - RNA, 19 nt, Homo sapiens
  misc_RNA (1)...(19): siRNA sense strand
caccaggaguggcauaagu

SEQ ID NO: 1680241 - RNA, 19 nt, Homo sapiens
  misc_RNA (1)...(19): siRNA sense strand
cagcagccagcaucucuuu

SEQ ID NO: 1680242 - RNA, 19 nt, Homo sapiens
  misc_RNA (1)...(19): siRNA sense strand
cagcugcccuguacaacca

SEQ ID NO: 1680243 - RNA, 19 nt, Homo sapiens
  misc_RNA (1)...(19): siRNA sense strand
ugagaaaccgcacaguguu

SEQ ID NO: 1680244 - RNA, 19 nt, Homo sapiens
  misc_RNA (1)...(19): siRNA sense strand
ccaucguccuugaacaauu

SEQ ID NO: 1680245 - RNA, 19 nt, Homo sapiens
  misc_RNA (1)...(19): siRNA sense strand
gagcacccaagccuacaaa

SEQ ID NO: 1680246 - RNA, 19 nt, Homo sapiens
  misc_RNA (1)...(19): siRNA sense strand
uccgagagguggaggagaa

SEQ ID NO: 1680247 - RNA, 19 nt, Homo sapiens
  misc_RNA (1)...(19): siRNA sense strand
ggugacagaugugccagau

SEQ ID NO: 1680248 - RNA, 19 nt, Homo sapiens
  misc_RNA (1)...(19): siRNA sense strand
gcgagaaaccuuccucaac

SEQ ID NO: 1680249 - RNA, 19 nt, Homo sapiens
  misc_RNA (1)...(19): siRNA sense strand
cggcggagguuuggcaaga

SEQ ID NO: 1680250 - RNA, 19 nt, Homo sapiens
  misc_RNA (1)...(19): siRNA sense strand
ggguggaggugccugaagu

SEQ ID NO: 1680251 - RNA, 19 nt, Homo sapiens
  misc_RNA (1)...(19): siRNA sense strand
ugggaggcauggaagcuuu

SEQ ID NO: 1680252 - RNA, 19 nt, Homo sapiens
  misc_RNA (1)...(19): siRNA sense strand
gcacccaagccuacaaagu

SEQ ID NO: 1680253 - RNA, 19 nt, Homo sapiens
  misc_RNA (1)...(19): siRNA sense strand
cacccaagccuacaaagug

SEQ ID NO: 1680254 - RNA, 19 nt, Homo sapiens
  misc_RNA (1)...(19): siRNA sense strand
ccaggaguggcauaaguuu

SEQ ID NO: 1680255 - RNA, 19 nt, Homo sapiens
  misc_RNA (1)...(19): siRNA sense strand
gaagaugugcgggauuucu

SEQ ID NO: 1680256 - RNA, 19 nt, Homo sapiens
  misc_RNA (1)...(19): siRNA sense strand
gccgcaaccucaucaccuu

SEQ ID NO: 1680257 - RNA, 19 nt, Homo sapiens
  misc_RNA (1)...(19): siRNA sense strand
ugagauccuucaucgagau

SEQ ID NO: 1680258 - RNA, 19 nt, Homo sapiens
  misc_RNA (1)...(19): siRNA sense strand
gcucagugccuggauuguu

SEQ ID NO: 1680259 - RNA, 19 nt, Homo sapiens
  misc_RNA (1)...(19): siRNA sense strand
caucguccucacagucuua

SEQ ID NO: 1680260 - RNA, 19 nt, Homo sapiens
  misc_RNA (1)...(19): siRNA sense strand
ugccugaagucaucaagga

SEQ ID NO: 1680261 - RNA, 19 nt, Homo sapiens
  misc_RNA (1)...(19): siRNA sense strand
cgccuuauguuccgcaugu

SEQ ID NO: 1680262 - RNA, 19 nt, Homo sapiens
  misc_RNA (1)...(19): siRNA sense strand
cucagugccuggauuguug

SEQ ID NO: 1680263 - RNA, 19 nt, Homo sapiens
  misc_RNA (1)...(19): siRNA sense strand
ccagaacaucgcuguguau

SEQ ID NO: 1680264 - RNA, 19 nt, Homo sapiens
  misc_RNA (1)...(19): siRNA sense strand
guggcuggcugacaucauc

SEQ ID NO: 1680265 - RNA, 19 nt, Homo sapiens
  misc_RNA (1)...(19): siRNA sense strand
gaggugcagcgauuugaug

SEQ ID NO: 1680266 - RNA, 19 nt, Homo sapiens
  misc_RNA (1)...(19): siRNA sense strand
ggccaucauguaugucuuu

SEQ ID NO: 1680267 - RNA, 19 nt, Homo sapiens
  misc_RNA (1)...(19): siRNA sense strand
ccucuuuccuggccucuuc

SEQ ID NO: 1680268 - RNA, 19 nt, Homo sapiens
  misc_RNA (1)...(19): siRNA sense strand
cgacauugagacugaguug

SEQ ID NO: 1680269 - RNA, 19 nt, Homo sapiens
  misc_RNA (1)...(19): siRNA sense strand
gaccuuagcaacaccaucu

SEQ ID NO: 1680270 - RNA, 19 nt, Homo sapiens
  misc_RNA (1)...(19): siRNA sense strand
ggcaggcgcugguggaaaa

SEQ ID NO: 1680271 - RNA, 19 nt, Homo sapiens
  misc_RNA (1)...(19): siRNA sense strand
gcugagcagggccgaguuu

SEQ ID NO: 1680272 - RNA, 19 nt, Homo sapiens
  misc_RNA (1)...(19): siRNA sense strand
gcaagaagguaacgucauu

SEQ ID NO: 1680273 - RNA, 19 nt, Homo sapiens
  misc_RNA (1)...(19): siRNA sense strand
gaacugacaugggaagauu

SEQ ID NO: 1680274 - RNA, 19 nt, Homo sapiens
  misc_RNA (1)...(19): siRNA sense strand
ggaaugggcuguucuccaa

SEQ ID NO: 1680275 - RNA, 19 nt, Homo sapiens
  misc_RNA (1)...(19): siRNA sense strand
gaacaucgcuguguaugag

SEQ ID NO: 1680276 - RNA, 19 nt, Homo sapiens
  misc_RNA (1)...(19): siRNA sense strand
ggacuuccaucgccucauu

SEQ ID NO: 1680277 - RNA, 19 nt, Homo sapiens
  misc_RNA (1)...(19): siRNA sense strand
gaagaaauccgaaauacca

SEQ ID NO: 1680278 - RNA, 19 nt, Homo sapiens
  misc_RNA (1)...(19): siRNA sense strand
gcagcgacauugagacuga

SEQ ID NO: 1680279 - RNA, 19 nt, Homo sapiens
  misc_RNA (1)...(19): siRNA sense strand
cagcaucucuuucauguuc

SEQ ID NO: 1680280 - RNA, 19 nt, Homo sapiens
  misc_RNA (1)...(19): siRNA sense strand
agaaggagauugaagaaau

SEQ ID NO: 1680281 - RNA, 19 nt, Homo sapiens
  misc_RNA (1)...(19): siRNA sense strand
caucauccaugguagcuuu

SEQ ID NO: 1680282 - RNA, 19 nt, Homo sapiens
  misc_RNA (1)...(19): siRNA sense strand
ggaagaagguggagaucag

SEQ ID NO: 1680283 - RNA, 19 nt, Homo sapiens
  misc_RNA (1)...(19): siRNA sense strand
caucguccuugaacaauuu

SEQ ID NO: 1680284 - RNA, 19 nt, Homo sapiens
  misc_RNA (1)...(19): siRNA sense strand
gcacucugcugcucaagau

SEQ ID NO: 1680285 - RNA, 19 nt, Homo sapiens
  misc_RNA (1)...(19): siRNA sense strand
ggaggugccugaagucauc

SEQ ID NO: 1680286 - RNA, 19 nt, Homo sapiens
  misc_RNA (1)...(19): siRNA sense strand
gaaccggagucuauucaca

SEQ ID NO: 1680287 - RNA, 19 nt, Homo sapiens
  misc_RNA (1)...(19): siRNA sense strand
gaggaaaagucucgccuua

SEQ ID NO: 1680288 - RNA, 19 nt, Homo sapiens
  misc_RNA (1)...(19): siRNA sense strand
ggaaaagucucgccuuaug

SEQ ID NO: 1680289 - RNA, 19 nt, Homo sapiens
  misc_RNA (1)...(19): siRNA sense strand
ugacagaugugccagauac

SEQ ID NO: 1680290 - RNA, 19 nt, Homo sapiens
  misc_RNA (1)...(19): siRNA sense strand
ggagagggccuacuacuac

SEQ ID NO: 1680291 - RNA, 19 nt, Homo sapiens
  misc_RNA (1)...(19): siRNA sense strand
acaaagugcugaagaugug

SEQ ID NO: 1680292 - RNA, 19 nt, Homo sapiens
  misc_RNA (1)...(19): siRNA sense strand
ggacccagcgucaguuuga

SEQ ID NO: 1680293 - RNA, 19 nt, Homo sapiens
  misc_RNA (1)...(19): siRNA sense strand
gcuaucacgugcuuucaga

SEQ ID NO: 1680294 - RNA, 19 nt, Homo sapiens
  misc_RNA (1)...(19): siRNA sense strand
ccaaagcuguaccuugaug

SEQ ID NO: 1680295 - RNA, 19 nt, Homo sapiens
  misc_RNA (1)...(19): siRNA sense strand
acccaaagcuguaccuuga

SEQ ID NO: 1680296 - RNA, 19 nt, Homo sapiens
  misc_RNA (1)...(19): siRNA sense strand
gaugagagcagcugugaca

SEQ ID NO: 1680297 - RNA, 19 nt, Homo sapiens
  misc_RNA (1)...(19): siRNA sense strand
ccagauacccaaagcugua

SEQ ID NO: 1680298 - RNA, 19 nt, Homo sapiens
  misc_RNA (1)...(19): siRNA sense strand
ccaagaaggagauugaaga

SEQ ID NO: 1680299 - RNA, 19 nt, Homo sapiens
  misc_RNA (1)...(19): siRNA sense strand
gccagcaucucuuucaugu

SEQ ID NO: 1680300 - RNA, 19 nt, Homo sapiens
  misc_RNA (1)...(19): siRNA sense strand
cauggaagcuuuggaaugg

SEQ ID NO: 1680301 - RNA, 19 nt, Homo sapiens
  misc_RNA (1)...(19): siRNA sense strand
gcagauccgugugguagau

SEQ ID NO: 1680302 - RNA, 19 nt, Homo sapiens
  misc_RNA (1)...(19): siRNA sense strand
ccacuaugcuguacaucug

SEQ ID NO: 1680303 - RNA, 19 nt, Homo sapiens
  misc_RNA (1)...(19): siRNA sense strand
ggaccacuaugcuguacau

SEQ ID NO: 1680304 - RNA, 19 nt, Homo sapiens
  misc_RNA (1)...(19): siRNA sense strand
gcucuagcauggacacuuc

SEQ ID NO: 1680305 - RNA, 19 nt, Homo sapiens
  misc_RNA (1)...(19): siRNA sense strand
ggacaaggaggaacugaca

SEQ ID NO: 1680306 - RNA, 19 nt, Homo sapiens
  misc_RNA (1)...(19): siRNA sense strand
caagaaggagauugaagaa

SEQ ID NO: 1680307 - RNA, 19 nt, Homo sapiens
  misc_RNA (1)...(19): siRNA sense strand
gcugccaaguguucuguaa

SEQ ID NO: 1680308 - RNA, 19 nt, Homo sapiens
  misc_RNA (1)...(19): siRNA sense strand
cguccucucuugccucuuu

SEQ ID NO: 1680309 - RNA, 19 nt, Homo sapiens
  misc_RNA (1)...(19): siRNA sense strand
gugcugcccuuccagagaa

SEQ ID NO: 1680310 - RNA, 19 nt, Homo sapiens
  misc_RNA (1)...(19): siRNA sense strand
ggugaccgcuacugguuug

SEQ ID NO: 1680311 - RNA, 19 nt, Homo sapiens
  misc_RNA (1)...(19): siRNA sense strand
ggacggcagcgccaucuau

SEQ ID NO: 1680312 - RNA, 19 nt, Homo sapiens
  misc_RNA (1)...(19): siRNA sense strand
ucacuucucccaccauuau

SEQ ID NO: 1680313 - RNA, 19 nt, Homo sapiens
  misc_RNA (1)...(19): siRNA sense strand
gaccuggugcugcuguuua

SEQ ID NO: 1680314 - RNA, 19 nt, Homo sapiens
  misc_RNA (1)...(19): siRNA sense strand
ggacuuauccuggcuagag

SEQ ID NO: 1680315 - RNA, 19 nt, Homo sapiens
  misc_RNA (1)...(19): siRNA sense strand
ggucaucaaucggaacuca

SEQ ID NO: 1680316 - RNA, 19 nt, Homo sapiens
  misc_RNA (1)...(19): siRNA sense strand
aaucggaacucaagugucu

SEQ ID NO: 1680317 - RNA, 19 nt, Homo sapiens
  misc_RNA (1)...(19): siRNA sense strand
gauccuggccaucauguau

SEQ ID NO: 1680318 - RNA, 19 nt, Homo sapiens
  misc_RNA (1)...(19): siRNA sense strand
gagauucggcggagguuug

SEQ ID NO: 1680319 - RNA, 19 nt, Homo sapiens
  misc_RNA (1)...(19): siRNA sense strand
gcuggucgcuguuaucaac

SEQ ID NO: 1680320 - RNA, 19 nt, Homo sapiens
  misc_RNA (1)...(19): siRNA sense strand
gagaaaccgcacaguguug

SEQ ID NO: 1680321 - RNA, 19 nt, Homo sapiens
  misc_RNA (1)...(19): siRNA sense strand
gccauguggugaaugugua

SEQ ID NO: 1680322 - RNA, 19 nt, Homo sapiens
  misc_RNA (1)...(19): siRNA sense strand
guacgacuuugaugggaau

SEQ ID NO: 1680323 - RNA, 19 nt, Homo sapiens
  misc_RNA (1)...(19): siRNA sense strand
gcauggaagcuuuggaaug

SEQ ID NO: 1680324 - RNA, 19 nt, Homo sapiens
  misc_RNA (1)...(19): siRNA sense strand
gcgagaggaccauguguug

SEQ ID NO: 1680325 - RNA, 19 nt, Homo sapiens
  misc_RNA (1)...(19): siRNA sense strand
cagcaucuccucagaguuc

SEQ ID NO: 1680326 - RNA, 19 nt, Homo sapiens
  misc_RNA (1)...(19): siRNA sense strand
ucaucgagaucuccaacaa

SEQ ID NO: 1680327 - RNA, 19 nt, Homo sapiens
  misc_RNA (1)...(19): siRNA sense strand
gcacaucacacgggcauca

SEQ ID NO: 1680328 - RNA, 19 nt, Homo sapiens
  misc_RNA (1)...(19): siRNA sense strand
gagagguggaggagaauga

SEQ ID NO: 1680329 - RNA, 19 nt, Homo sapiens
  misc_RNA (1)...(19): siRNA sense strand
uugaagaugugcgggauuu

SEQ ID NO: 1680330 - RNA, 19 nt, Homo sapiens
  misc_RNA (1)...(19): siRNA sense strand
gcauaaguuugagguguca

SEQ ID NO: 1680331 - RNA, 19 nt, Homo sapiens
  misc_RNA (1)...(19): siRNA sense strand
cgugggaggugcagcgauu

SEQ ID NO: 1680332 - RNA, 19 nt, Homo sapiens
  misc_RNA (1)...(19): siRNA sense strand
gcagccagcaucucuuuca

SEQ ID NO: 1680333 - RNA, 19 nt, Homo sapiens
  misc_RNA (1)...(19): siRNA sense strand
ccggagcaaugacacugua

SEQ ID NO: 1680334 - RNA, 19 nt, Homo sapiens
  misc_RNA (1)...(19): siRNA sense strand
ugccaaguguucuguaaga

SEQ ID NO: 1680335 - RNA, 19 nt, Homo sapiens
  misc_RNA (1)...(19): siRNA sense strand
cggcgagccuccuacauca

SEQ ID NO: 1680336 - RNA, 19 nt, Homo sapiens
  misc_RNA (1)...(19): siRNA sense strand
ucacgcagcucugugucaa

SEQ ID NO: 1680337 - RNA, 19 nt, Homo sapiens
  misc_RNA (1)...(19): siRNA sense strand
gcaccaucguccuugaaca

SEQ ID NO: 1680338 - RNA, 19 nt, Homo sapiens
  misc_RNA (1)...(19): siRNA sense strand
gaccgcuacugguuugaga

SEQ ID NO: 1680339 - RNA, 19 nt, Homo sapiens
  misc_RNA (1)...(19): siRNA sense strand
ccuacaaagugcugaagau

SEQ ID NO: 1680340 - RNA, 19 nt, Homo sapiens
  misc_RNA (1)...(19): siRNA sense strand
caccaggaguggcauaagu

SEQ ID NO: 1680341 - RNA, 19 nt, Homo sapiens
  misc_RNA (1)...(19): siRNA sense strand
cagcagccagcaucucuuu

SEQ ID NO: 1680342 - RNA, 19 nt, Homo sapiens
  misc_RNA (1)...(19): siRNA sense strand
cagcugcccuguacaacca

SEQ ID NO: 1680343 - RNA, 19 nt, Homo sapiens
  misc_RNA (1)...(19): siRNA sense strand
ugagaaaccgcacaguguu

SEQ ID NO: 1680344 - RNA, 19 nt, Homo sapiens
  misc_RNA (1)...(19): siRNA sense strand
ccaucguccuugaacaauu

SEQ ID NO: 1680345 - RNA, 19 nt, Homo sapiens
  misc_RNA (1)...(19): siRNA sense strand
gagcacccaagccuacaaa

SEQ ID NO: 1680346 - RNA, 19 nt, Homo sapiens
  misc_RNA (1)...(19): siRNA sense strand
uccgagagguggaggagaa

SEQ ID NO: 1680347 - RNA, 19 nt, Homo sapiens
  misc_RNA (1)...(19): siRNA sense strand
ggugacagaugugccagau

SEQ ID NO: 1680348 - RNA, 19 nt, Homo sapiens
  misc_RNA (1)...(19): siRNA sense strand
gcgagaaaccuuccucaac

SEQ ID NO: 1680349 - RNA, 19 nt, Homo sapiens
  misc_RNA (1)...(19): siRNA sense strand
cggcggagguuuggcaaga

SEQ ID NO: 1680350 - RNA, 19 nt, Homo sapiens
  misc_RNA (1)...(19): siRNA sense strand
ggguggaggugccugaagu

SEQ ID NO: 1680351 - RNA, 19 nt, Homo sapiens
  misc_RNA (1)...(19): siRNA sense strand
ugggaggcauggaagcuuu

SEQ ID NO: 1680352 - RNA, 19 nt, Homo sapiens
  misc_RNA (1)...(19): siRNA sense strand
gcacccaagccuacaaagu

SEQ ID NO: 1680353 - RNA, 19 nt, Homo sapiens
  misc_RNA (1)...(19): siRNA sense strand
cacccaagccuacaaagug

SEQ ID NO: 1680354 - RNA, 19 nt, Homo sapiens
  misc_RNA (1)...(19): siRNA sense strand
ccaggaguggcauaaguuu

SEQ ID NO: 1680355 - RNA, 19 nt, Homo sapiens
  misc_RNA (1)...(19): siRNA sense strand
gaagaugugcgggauuucu

SEQ ID NO: 1680356 - RNA, 19 nt, Homo sapiens
  misc_RNA (1)...(19): siRNA sense strand
gccgcaaccucaucaccuu

SEQ ID NO: 1680357 - RNA, 19 nt, Homo sapiens
  misc_RNA (1)...(19): siRNA sense strand
ugagauccuucaucgagau

SEQ ID NO: 1680358 - RNA, 19 nt, Homo sapiens
  misc_RNA (1)...(19): siRNA sense strand
gcucagugccuggauuguu

SEQ ID NO: 1680359 - RNA, 19 nt, Homo sapiens
  misc_RNA (1)...(19): siRNA sense strand
caucguccucacagucuua

SEQ ID NO: 1680360 - RNA, 19 nt, Homo sapiens
  misc_RNA (1)...(19): siRNA sense strand
ugccugaagucaucaagga

SEQ ID NO: 1680361 - RNA, 19 nt, Homo sapiens
  misc_RNA (1)...(19): siRNA sense strand
cgccuuauguuccgcaugu

SEQ ID NO: 1680362 - RNA, 19 nt, Homo sapiens
  misc_RNA (1)...(19): siRNA sense strand
cucagugccuggauuguug

SEQ ID NO: 1680363 - RNA, 19 nt, Homo sapiens
  misc_RNA (1)...(19): siRNA sense strand
ccagaacaucgcuguguau

SEQ ID NO: 1680364 - RNA, 19 nt, Homo sapiens
  misc_RNA (1)...(19): siRNA sense strand
guggcuggcugacaucauc

SEQ ID NO: 1680365 - RNA, 19 nt, Homo sapiens
  misc_RNA (1)...(19): siRNA sense strand
gaggugcagcgauuugaug

SEQ ID NO: 1680366 - RNA, 19 nt, Homo sapiens
  misc_RNA (1)...(19): siRNA sense strand
ggccaucauguaugucuuu

SEQ ID NO: 1680367 - RNA, 19 nt, Homo sapiens
  misc_RNA (1)...(19): siRNA sense strand
ccucuuuccuggccucuuc

SEQ ID NO: 1680368 - RNA, 19 nt, Homo sapiens
  misc_RNA (1)...(19): siRNA sense strand
cgacauugagacugaguug

SEQ ID NO: 1680369 - RNA, 19 nt, Homo sapiens
  misc_RNA (1)...(19): siRNA sense strand
gaccuuagcaacaccaucu

SEQ ID NO: 1680370 - RNA, 19 nt, Homo sapiens
  misc_RNA (1)...(19): siRNA sense strand
ggcaggcgcugguggaaaa

SEQ ID NO: 1680371 - RNA, 19 nt, Homo sapiens
  misc_RNA (1)...(19): siRNA sense strand
gcugagcagggccgaguuu

SEQ ID NO: 1680372 - RNA, 19 nt, Homo sapiens
  misc_RNA (1)...(19): siRNA sense strand
ggaagaagauccugcagaa

SEQ ID NO: 1680373 - RNA, 19 nt, Homo sapiens
  misc_RNA (1)...(19): siRNA sense strand
caaagcaaaugucaucaaa

SEQ ID NO: 1680374 - RNA, 19 nt, Homo sapiens
  misc_RNA (1)...(19): siRNA sense strand
ucacaggccucaucauuga

SEQ ID NO: 1680375 - RNA, 19 nt, Homo sapiens
  misc_RNA (1)...(19): siRNA sense strand
gcucugggaugcacauuau

SEQ ID NO: 1680376 - RNA, 19 nt, Homo sapiens
  misc_RNA (1)...(19): siRNA sense strand
gcuaugaccuggcagagau

SEQ ID NO: 1680377 - RNA, 19 nt, Homo sapiens
  misc_RNA (1)...(19): siRNA sense strand
gaacugaggagacaccaau

SEQ ID NO: 1680378 - RNA, 19 nt, Homo sapiens
  misc_RNA (1)...(19): siRNA sense strand
ggacauagagagaggaaau

SEQ ID NO: 1680379 - RNA, 19 nt, Homo sapiens
  misc_RNA (1)...(19): siRNA sense strand
ggaugcacauuauugaaga

SEQ ID NO: 1680380 - RNA, 19 nt, Homo sapiens
  misc_RNA (1)...(19): siRNA sense strand
ggaaaucgaggcugugaga

SEQ ID NO: 1680381 - RNA, 19 nt, Homo sapiens
  misc_RNA (1)...(19): siRNA sense strand
gcucaaugaugcggaguuu

SEQ ID NO: 1680382 - RNA, 19 nt, Homo sapiens
  misc_RNA (1)...(19): siRNA sense strand
gcacauuauugaagagaca

SEQ ID NO: 1680383 - RNA, 19 nt, Homo sapiens
  misc_RNA (1)...(19): siRNA sense strand
cggcugagcugaccaaugg

SEQ ID NO: 1680384 - RNA, 19 nt, Homo sapiens
  misc_RNA (1)...(19): siRNA sense strand
gcaggacccuauauggaau

SEQ ID NO: 1680385 - RNA, 19 nt, Homo sapiens
  misc_RNA (1)...(19): siRNA sense strand
gagcaacaauggaguacca

SEQ ID NO: 1680386 - RNA, 19 nt, Homo sapiens
  misc_RNA (1)...(19): siRNA sense strand
gauccaggcugucuuugca

SEQ ID NO: 1680387 - RNA, 19 nt, Homo sapiens
  misc_RNA (1)...(19): siRNA sense strand
gcagagcaacaauggagua

SEQ ID NO: 1680388 - RNA, 19 nt, Homo sapiens
  misc_RNA (1)...(19): siRNA sense strand
gcucguguaucacagauuc

SEQ ID NO: 1680389 - RNA, 19 nt, Homo sapiens
  misc_RNA (1)...(19): siRNA sense strand
gaggagacaccaaugcauu

SEQ ID NO: 1680390 - RNA, 19 nt, Homo sapiens
  misc_RNA (1)...(19): siRNA sense strand
agaagauccugcagaagaa

SEQ ID NO: 1680391 - RNA, 19 nt, Homo sapiens
  misc_RNA (1)...(19): siRNA sense strand
gcuggcaccugaugugaga

SEQ ID NO: 1680392 - RNA, 19 nt, Homo sapiens
  misc_RNA (1)...(19): siRNA sense strand
gcaaagcaaaugucaucaa

SEQ ID NO: 1680393 - RNA, 19 nt, Homo sapiens
  misc_RNA (1)...(19): siRNA sense strand
ggagaaguguccuuaugac

SEQ ID NO: 1680394 - RNA, 19 nt, Homo sapiens
  misc_RNA (1)...(19): siRNA sense strand
gaauggcaauagcuaugug

SEQ ID NO: 1680395 - RNA, 19 nt, Homo sapiens
  misc_RNA (1)...(19): siRNA sense strand
aagaagauccugcagaaga

SEQ ID NO: 1680396 - RNA, 19 nt, Homo sapiens
  misc_RNA (1)...(19): siRNA sense strand
cgucucaucugccacauuc

SEQ ID NO: 1680397 - RNA, 19 nt, Homo sapiens
  misc_RNA (1)...(19): siRNA sense strand
gaugugagacugcucuaug

SEQ ID NO: 1680398 - RNA, 19 nt, Homo sapiens
  misc_RNA (1)...(19): siRNA sense strand
ccuaugaccugcucuuucu

SEQ ID NO: 1680399 - RNA, 19 nt, Homo sapiens
  misc_RNA (1)...(19): siRNA sense strand
gaggugcccuguucucucu

SEQ ID NO: 1680400 - RNA, 19 nt, Homo sapiens
  misc_RNA (1)...(19): siRNA sense strand
gggcagcugucuccagauc

SEQ ID NO: 1680401 - RNA, 19 nt, Homo sapiens
  misc_RNA (1)...(19): siRNA sense strand
cggccuggcucguguauca

SEQ ID NO: 1680402 - RNA, 19 nt, Homo sapiens
  misc_RNA (1)...(19): siRNA sense strand
gcacagcuggcaccugaug

SEQ ID NO: 1680403 - RNA, 19 nt, Homo sapiens
  misc_RNA (1)...(19): siRNA sense strand
ggaugaauggcaauagcua

SEQ ID NO: 1680404 - RNA, 19 nt, Homo sapiens
  misc_RNA (1)...(19): siRNA sense strand
gcagcugucuccagaucau

SEQ ID NO: 1680405 - RNA, 19 nt, Homo sapiens
  misc_RNA (1)...(19): siRNA sense strand
ggacuuccuuccugaaagc

SEQ ID NO: 1680406 - RNA, 19 nt, Homo sapiens
  misc_RNA (1)...(19): siRNA sense strand
cuacacagccacuagguau

SEQ ID NO: 1680407 - RNA, 19 nt, Homo sapiens
  misc_RNA (1)...(19): siRNA sense strand
ugugagagcagcagggaua

SEQ ID NO: 1680408 - RNA, 19 nt, Homo sapiens
  misc_RNA (1)...(19): siRNA sense strand
aagcaggacagcacugaua

SEQ ID NO: 1680409 - RNA, 19 nt, Homo sapiens
  misc_RNA (1)...(19): siRNA sense strand
caagguguacuacuucuuc

SEQ ID NO: 1680410 - RNA, 19 nt, Homo sapiens
  misc_RNA (1)...(19): siRNA sense strand
ggaagcaggacagcacuga

SEQ ID NO: 1680411 - RNA, 19 nt, Homo sapiens
  misc_RNA (1)...(19): siRNA sense strand
ucaaugaugcggaguuugu

SEQ ID NO: 1680412 - RNA, 19 nt, Homo sapiens
  misc_RNA (1)...(19): siRNA sense strand
gacccuauauggaauacca

SEQ ID NO: 1680413 - RNA, 19 nt, Homo sapiens
  misc_RNA (1)...(19): siRNA sense strand
gaagaugagggugaugaug

SEQ ID NO: 1680414 - RNA, 19 nt, Homo sapiens
  misc_RNA (1)...(19): siRNA sense strand
ggagugcuuuaaccaugug

SEQ ID NO: 1680415 - RNA, 19 nt, Homo sapiens
  misc_RNA (1)...(19): siRNA sense strand
gaggaugaauggcaauagc

SEQ ID NO: 1680416 - RNA, 19 nt, Homo sapiens
  misc_RNA (1)...(19): siRNA sense strand
ccagagaugcaaagcaaau

SEQ ID NO: 1680417 - RNA, 19 nt, Homo sapiens
  misc_RNA (1)...(19): siRNA sense strand
aagaugagggugaugauga

SEQ ID NO: 1680418 - RNA, 19 nt, Homo sapiens
  misc_RNA (1)...(19): siRNA sense strand
ccuccucccuccucuaugu

SEQ ID NO: 1680419 - RNA, 19 nt, Homo sapiens
  misc_RNA (1)...(19): siRNA sense strand
uggcaacuauggcugcuau

SEQ ID NO: 1680420 - RNA, 19 nt, Homo sapiens
  misc_RNA (1)...(19): siRNA sense strand
gaggaaaucgaggcuguga

SEQ ID NO: 1680421 - RNA, 19 nt, Homo sapiens
  misc_RNA (1)...(19): siRNA sense strand
ccugaaagcccgucucauc

SEQ ID NO: 1680422 - RNA, 19 nt, Homo sapiens
  misc_RNA (1)...(19): siRNA sense strand
ccagugcagugggugauga

SEQ ID NO: 1680423 - RNA, 19 nt, Homo sapiens
  misc_RNA (1)...(19): siRNA sense strand
gcccagaacuacucaacac

SEQ ID NO: 1680424 - RNA, 19 nt, Homo sapiens
  misc_RNA (1)...(19): siRNA sense strand
ucucagugccaacgacaua

SEQ ID NO: 1680425 - RNA, 19 nt, Homo sapiens
  misc_RNA (1)...(19): siRNA sense strand
gauacaggacauagagaga

SEQ ID NO: 1680426 - RNA, 19 nt, Homo sapiens
  misc_RNA (1)...(19): siRNA sense strand
gcacugauacaggacauag

SEQ ID NO: 1680427 - RNA, 19 nt, Homo sapiens
  misc_RNA (1)...(19): siRNA sense strand
guaaaguugcacccacuga

SEQ ID NO: 1680428 - RNA, 19 nt, Homo sapiens
  misc_RNA (1)...(19): siRNA sense strand
ccugagaacugaggagaca

SEQ ID NO: 1680429 - RNA, 19 nt, Homo sapiens
  misc_RNA (1)...(19): siRNA sense strand
ugagcacaguggcaacuau

SEQ ID NO: 1680430 - RNA, 19 nt, Homo sapiens
  misc_RNA (1)...(19): siRNA sense strand
cuagucaucucucuauugc

SEQ ID NO: 1680431 - RNA, 19 nt, Homo sapiens
  misc_RNA (1)...(19): siRNA sense strand
ugacaagguguacuacuuc

SEQ ID NO: 1680432 - RNA, 19 nt, Homo sapiens
  misc_RNA (1)...(19): siRNA sense strand
gacaagguguacuacuucu

SEQ ID NO: 1680433 - RNA, 19 nt, Homo sapiens
  misc_RNA (1)...(19): siRNA sense strand
acacagccacuagguauga

SEQ ID NO: 1680434 - RNA, 19 nt, Homo sapiens
  misc_RNA (1)...(19): siRNA sense strand
gaugaauggcaauagcuau

SEQ ID NO: 1680435 - RNA, 19 nt, Homo sapiens
  misc_RNA (1)...(19): siRNA sense strand
gagcacaguggcaacuaug

SEQ ID NO: 1680436 - RNA, 19 nt, Homo sapiens
  misc_RNA (1)...(19): siRNA sense strand
cacccacacucccugagaa

SEQ ID NO: 1680437 - RNA, 19 nt, Homo sapiens
  misc_RNA (1)...(19): siRNA sense strand
cuucacaggccucaucauu

SEQ ID NO: 1680438 - RNA, 19 nt, Homo sapiens
  misc_RNA (1)...(19): siRNA sense strand
guggacgggcugcugguua

SEQ ID NO: 1680439 - RNA, 19 nt, Homo sapiens
  misc_RNA (1)...(19): siRNA sense strand
gcagagauccaggcugucu

SEQ ID NO: 1680440 - RNA, 19 nt, Homo sapiens
  misc_RNA (1)...(19): siRNA sense strand
gugaugaugacaaggugua

SEQ ID NO: 1680441 - RNA, 19 nt, Homo sapiens
  misc_RNA (1)...(19): siRNA sense strand
ucaauucuacccaccucua

SEQ ID NO: 1680442 - RNA, 19 nt, Homo sapiens
  misc_RNA (1)...(19): siRNA sense strand
ggaagaugagggugaugau

SEQ ID NO: 1680443 - RNA, 19 nt, Homo sapiens
  misc_RNA (1)...(19): siRNA sense strand
cugcuggaccuaccuauga

SEQ ID NO: 1680444 - RNA, 19 nt, Homo sapiens
  misc_RNA (1)...(19): siRNA sense strand
ucagccaucugccgcuaug

SEQ ID NO: 1680445 - RNA, 19 nt, Homo sapiens
  misc_RNA (1)...(19): siRNA sense strand
caauagcuaugugcuucug

SEQ ID NO: 1680446 - RNA, 19 nt, Homo sapiens
  misc_RNA (1)...(19): siRNA sense strand
gggaugcacauuauugaag

SEQ ID NO: 1680447 - RNA, 19 nt, Homo sapiens
  misc_RNA (1)...(19): siRNA sense strand
agagauccaggcugucuuu

SEQ ID NO: 1680448 - RNA, 19 nt, Homo sapiens
  misc_RNA (1)...(19): siRNA sense strand
cacacucccugagaacuga

SEQ ID NO: 1680449 - RNA, 19 nt, Homo sapiens
  misc_RNA (1)...(19): siRNA sense strand
aaucuagucaucucucuau

SEQ ID NO: 1680450 - RNA, 19 nt, Homo sapiens
  misc_RNA (1)...(19): siRNA sense strand
guguaucacagauucauug

SEQ ID NO: 1680451 - RNA, 19 nt, Homo sapiens
  misc_RNA (1)...(19): siRNA sense strand
caaccagacggagugcuuu

SEQ ID NO: 1680452 - RNA, 19 nt, Homo sapiens
  misc_RNA (1)...(19): siRNA sense strand
gaccugggagggaagaaga

SEQ ID NO: 1680453 - RNA, 19 nt, Homo sapiens
  misc_RNA (1)...(19): siRNA sense strand
augacaagguguacuacuu

SEQ ID NO: 1680454 - RNA, 19 nt, Homo sapiens
  misc_RNA (1)...(19): siRNA sense strand
gaagaagauccugcagaag

SEQ ID NO: 1680455 - RNA, 19 nt, Homo sapiens
  misc_RNA (1)...(19): siRNA sense strand
gagacugcucuaugugcua

SEQ ID NO: 1680456 - RNA, 19 nt, Homo sapiens
  misc_RNA (1)...(19): siRNA sense strand
cggagugcuuuaaccaugu

SEQ ID NO: 1680457 - RNA, 19 nt, Homo sapiens
  misc_RNA (1)...(19): siRNA sense strand
uggcugcuaugccgaggaa

SEQ ID NO: 1680458 - RNA, 19 nt, Homo sapiens
  misc_RNA (1)...(19): siRNA sense strand
gagauggggcucacaaaga

SEQ ID NO: 1680459 - RNA, 19 nt, Homo sapiens
  misc_RNA (1)...(19): siRNA sense strand
gacagucucaggccagugu

SEQ ID NO: 1680460 - RNA, 19 nt, Homo sapiens
  misc_RNA (1)...(19): siRNA sense strand
cugcuggccuccuauaguc

SEQ ID NO: 1680461 - RNA, 19 nt, Homo sapiens
  misc_RNA (1)...(19): siRNA sense strand
gcaacauacgcuacacaca

SEQ ID NO: 1680462 - RNA, 19 nt, Homo sapiens
  misc_RNA (1)...(19): siRNA sense strand
cugcagcggcucaauucua

SEQ ID NO: 1680463 - RNA, 19 nt, Homo sapiens
  misc_RNA (1)...(19): siRNA sense strand
gugcagugggugaugauga

SEQ ID NO: 1680464 - RNA, 19 nt, Homo sapiens
  misc_RNA (1)...(19): siRNA sense strand
ugaaagcccgucucaucug

SEQ ID NO: 1680465 - RNA, 19 nt, Homo sapiens
  misc_RNA (1)...(19): siRNA sense strand
ccuuguggcuacucaaugg

SEQ ID NO: 1680466 - RNA, 19 nt, Homo sapiens
  misc_RNA (1)...(19): siRNA sense strand
gcagcagccaccaccauag

SEQ ID NO: 1680467 - RNA, 19 nt, Homo sapiens
  misc_RNA (1)...(19): siRNA sense strand
aaaguugcacccacugaug

SEQ ID NO: 1680468 - RNA, 19 nt, Homo sapiens
  misc_RNA (1)...(19): siRNA sense strand
ugcaggacccuauauggaa

SEQ ID NO: 1680469 - RNA, 19 nt, Homo sapiens
  misc_RNA (1)...(19): siRNA sense strand
gguaugaauuccggagcau

SEQ ID NO: 1680470 - RNA, 19 nt, Homo sapiens
  misc_RNA (1)...(19): siRNA sense strand
agaggaagaugagggugau

SEQ ID NO: 1680471 - RNA, 19 nt, Homo sapiens
  misc_RNA (1)...(19): siRNA sense strand
uaaaguugcacccacugau

SEQ ID NO: 1680472 - RNA, 19 nt, Homo sapiens
  misc_RNA (1)...(19): siRNA sense strand
caacagagcuuuacaacau

SEQ ID NO: 1680473 - RNA, 19 nt, Homo sapiens
  misc_RNA (1)...(19): siRNA sense strand
ccacaugugucacuucauu

SEQ ID NO: 1680474 - RNA, 19 nt, Homo sapiens
  misc_RNA (1)...(19): siRNA sense strand
ccaacuaucucuguuuauu

SEQ ID NO: 1680475 - RNA, 19 nt, Homo sapiens
  misc_RNA (1)...(19): siRNA sense strand
ggagaagacuauccuugga

SEQ ID NO: 1680476 - RNA, 19 nt, Homo sapiens
  misc_RNA (1)...(19): siRNA sense strand
gucaaugucuccauggaua

SEQ ID NO: 1680477 - RNA, 19 nt, Homo sapiens
  misc_RNA (1)...(19): siRNA sense strand
caucauagccuaccucaug

SEQ ID NO: 1680478 - RNA, 19 nt, Homo sapiens
  misc_RNA (1)...(19): siRNA sense strand
ccacaaaacucuccagauu

SEQ ID NO: 1680479 - RNA, 19 nt, Homo sapiens
  misc_RNA (1)...(19): siRNA sense strand
ccagauucuucccuucuua

SEQ ID NO: 1680480 - RNA, 19 nt, Homo sapiens
  misc_RNA (1)...(19): siRNA sense strand
gagauuccaucacaaacau

SEQ ID NO: 1680481 - RNA, 19 nt, Homo sapiens
  misc_RNA (1)...(19): siRNA sense strand
acaaaacucuccagauuaa

SEQ ID NO: 1680482 - RNA, 19 nt, Homo sapiens
  misc_RNA (1)...(19): siRNA sense strand
aaucaaagcccaugucaau

SEQ ID NO: 1680483 - RNA, 19 nt, Homo sapiens
  misc_RNA (1)...(19): siRNA sense strand
ggucuucguuggcaauuuc

SEQ ID NO: 1680484 - RNA, 19 nt, Homo sapiens
  misc_RNA (1)...(19): siRNA sense strand
caaaugggaguaugacgaa

SEQ ID NO: 1680485 - RNA, 19 nt, Homo sapiens
  misc_RNA (1)...(19): siRNA sense strand
gggccuaugucaagaagug

SEQ ID NO: 1680486 - RNA, 19 nt, Homo sapiens
  misc_RNA (1)...(19): siRNA sense strand
ggauguccguuccaaaugg

SEQ ID NO: 1680487 - RNA, 19 nt, Homo sapiens
  misc_RNA (1)...(19): siRNA sense strand
uagccuaccucaugcauag

SEQ ID NO: 1680488 - RNA, 19 nt, Homo sapiens
  misc_RNA (1)...(19): siRNA sense strand
caacuaucucuguuuauug

SEQ ID NO: 1680489 - RNA, 19 nt, Homo sapiens
  misc_RNA (1)...(19): siRNA sense strand
ucaaagcccaugucaaugu

SEQ ID NO: 1680490 - RNA, 19 nt, Homo sapiens
  misc_RNA (1)...(19): siRNA sense strand
cagaaggacuugaaaauca

SEQ ID NO: 1680491 - RNA, 19 nt, Homo sapiens
  misc_RNA (1)...(19): siRNA sense strand
ggaacuggaugcauuucag

SEQ ID NO: 1680492 - RNA, 19 nt, Homo sapiens
  misc_RNA (1)...(19): siRNA sense strand
cagcagcacccuggagaua

SEQ ID NO: 1680493 - RNA, 19 nt, Homo sapiens
  misc_RNA (1)...(19): siRNA sense strand
ggagauuccaucacaaaca

SEQ ID NO: 1680494 - RNA, 19 nt, Homo sapiens
  misc_RNA (1)...(19): siRNA sense strand
gaaguacugcgugguguau

SEQ ID NO: 1680495 - RNA, 19 nt, Homo sapiens
  misc_RNA (1)...(19): siRNA sense strand
gguaucagccgcaguugug

SEQ ID NO: 1680496 - RNA, 19 nt, Homo sapiens
  misc_RNA (1)...(19): siRNA sense strand
caaagcccaugucaauguc

SEQ ID NO: 1680497 - RNA, 19 nt, Homo sapiens
  misc_RNA (1)...(19): siRNA sense strand
caccuuggcucugucauuc

SEQ ID NO: 1680498 - RNA, 19 nt, Homo sapiens
  misc_RNA (1)...(19): siRNA sense strand
gcagcacccuggagauacu

SEQ ID NO: 1680499 - RNA, 19 nt, Homo sapiens
  misc_RNA (1)...(19): siRNA sense strand
gcacauccggauagaagau

SEQ ID NO: 1680500 - RNA, 19 nt, Homo sapiens
  misc_RNA (1)...(19): siRNA sense strand
cucaggaacuggaugcauu

SEQ ID NO: 1680501 - RNA, 19 nt, Homo sapiens
  misc_RNA (1)...(19): siRNA sense strand
gacgaaagccaugugauca

SEQ ID NO: 1680502 - RNA, 19 nt, Homo sapiens
  misc_RNA (1)...(19): siRNA sense strand
gcagagguccugggccuau

SEQ ID NO: 1680503 - RNA, 19 nt, Homo sapiens
  misc_RNA (1)...(19): siRNA sense strand
uggaugcauuucagccaua

SEQ ID NO: 1680504 - RNA, 19 nt, Homo sapiens
  misc_RNA (1)...(19): siRNA sense strand
caucauggauccgcucuac

SEQ ID NO: 1680505 - RNA, 19 nt, Homo sapiens
  misc_RNA (1)...(19): siRNA sense strand
aacaacauguguccaaauc

SEQ ID NO: 1680506 - RNA, 19 nt, Homo sapiens
  misc_RNA (1)...(19): siRNA sense strand
gaaccaacagagcuuuaca

SEQ ID NO: 1680507 - RNA, 19 nt, Homo sapiens
  misc_RNA (1)...(19): siRNA sense strand
gcucugucauucugaucuu

SEQ ID NO: 1680508 - RNA, 19 nt, Homo sapiens
  misc_RNA (1)...(19): siRNA sense strand
uaacagaccccaacuaucu

SEQ ID NO: 1680509 - RNA, 19 nt, Homo sapiens
  misc_RNA (1)...(19): siRNA sense strand
guaacgagcagaccuugca

SEQ ID NO: 1680510 - RNA, 19 nt, Homo sapiens
  misc_RNA (1)...(19): siRNA sense strand
uuuacaacauccugaauca

SEQ ID NO: 1680511 - RNA, 19 nt, Homo sapiens
  misc_RNA (1)...(19): siRNA sense strand
ugacgaaagccaugugauc

SEQ ID NO: 1680512 - RNA, 19 nt, Homo sapiens
  misc_RNA (1)...(19): siRNA sense strand
cgaaagccaugugaucacu

SEQ ID NO: 1680513 - RNA, 19 nt, Homo sapiens
  misc_RNA (1)...(19): siRNA sense strand
agacuauccuuggagauuc

SEQ ID NO: 1680514 - RNA, 19 nt, Homo sapiens
  misc_RNA (1)...(19): siRNA sense strand
gugaaccaacagagcuuua

SEQ ID NO: 1680515 - RNA, 19 nt, Homo sapiens
  misc_RNA (1)...(19): siRNA sense strand
caguugugccgccaucaua

SEQ ID NO: 1680516 - RNA, 19 nt, Homo sapiens
  misc_RNA (1)...(19): siRNA sense strand
ucaggaacuggaugcauuu

SEQ ID NO: 1680517 - RNA, 19 nt, Homo sapiens
  misc_RNA (1)...(19): siRNA sense strand
cugacaagcuucugcacau

SEQ ID NO: 1680518 - RNA, 19 nt, Homo sapiens
  misc_RNA (1)...(19): siRNA sense strand
aguacugcgugguguauga

SEQ ID NO: 1680519 - RNA, 19 nt, Homo sapiens
  misc_RNA (1)...(19): siRNA sense strand
agaugaugaugaugauuca

SEQ ID NO: 1680520 - RNA, 19 nt, Homo sapiens
  misc_RNA (1)...(19): siRNA sense strand
cccuggagauacucuuaaa

SEQ ID NO: 1680521 - RNA, 19 nt, Homo sapiens
  misc_RNA (1)...(19): siRNA sense strand
aaacaacauguguccaaau

SEQ ID NO: 1680522 - RNA, 19 nt, Homo sapiens
  misc_RNA (1)...(19): siRNA sense strand
ggugauggcaaagaucuug

SEQ ID NO: 1680523 - RNA, 19 nt, Homo sapiens
  misc_RNA (1)...(19): siRNA sense strand
ggaccuggagugugugaag

SEQ ID NO: 1680524 - RNA, 19 nt, Homo sapiens
  misc_RNA (1)...(19): siRNA sense strand
ugacaagcuucugcacauc

SEQ ID NO: 1680525 - RNA, 19 nt, Homo sapiens
  misc_RNA (1)...(19): siRNA sense strand
ugauggugauggcaaagau

SEQ ID NO: 1680526 - RNA, 19 nt, Homo sapiens
  misc_RNA (1)...(19): siRNA sense strand
ugaaguacugcguggugua

SEQ ID NO: 1680527 - RNA, 19 nt, Homo sapiens
  misc_RNA (1)...(19): siRNA sense strand
cacaaaacucuccagauua

SEQ ID NO: 1680528 - RNA, 19 nt, Homo sapiens
  misc_RNA (1)...(19): siRNA sense strand
uggaaugggagaagacuau

SEQ ID NO: 1680529 - RNA, 19 nt, Homo sapiens
  misc_RNA (1)...(19): siRNA sense strand
ccccaacuaucucuguuua

SEQ ID NO: 1680530 - RNA, 19 nt, Homo sapiens
  misc_RNA (1)...(19): siRNA sense strand
ugugaucacugcccuucga

SEQ ID NO: 1680531 - RNA, 19 nt, Homo sapiens
  misc_RNA (1)...(19): siRNA sense strand
cgccacaugugucacuuca

SEQ ID NO: 1680532 - RNA, 19 nt, Homo sapiens
  misc_RNA (1)...(19): siRNA sense strand
gaccuggagugugugaagu

SEQ ID NO: 1680533 - RNA, 19 nt, Homo sapiens
  misc_RNA (1)...(19): siRNA sense strand
aagaugaugaugaugauuc

SEQ ID NO: 1680534 - RNA, 19 nt, Homo sapiens
  misc_RNA (1)...(19): siRNA sense strand
uggagugugugaaguacug

SEQ ID NO: 1680535 - RNA, 19 nt, Homo sapiens
  misc_RNA (1)...(19): siRNA sense strand
aacuaucucuguuuauugg

SEQ ID NO: 1680536 - RNA, 19 nt, Homo sapiens
  misc_RNA (1)...(19): siRNA sense strand
ucauggauccgcucuacug

SEQ ID NO: 1680537 - RNA, 19 nt, Homo sapiens
  misc_RNA (1)...(19): siRNA sense strand
aagacuauccuuggagauu

SEQ ID NO: 1680538 - RNA, 19 nt, Homo sapiens
  misc_RNA (1)...(19): siRNA sense strand
ccuaccucaugcauaguaa

SEQ ID NO: 1680539 - RNA, 19 nt, Homo sapiens
  misc_RNA (1)...(19): siRNA sense strand
gccuaccucaugcauagua

SEQ ID NO: 1680540 - RNA, 19 nt, Homo sapiens
  misc_RNA (1)...(19): siRNA sense strand
ucaccuuggcucugucauu

SEQ ID NO: 1680541 - RNA, 19 nt, Homo sapiens
  misc_RNA (1)...(19): siRNA sense strand
guuccaaaugggaguauga

SEQ ID NO: 1680542 - RNA, 19 nt, Homo sapiens
  misc_RNA (1)...(19): siRNA sense strand
aggcgaugcugacaagcuu

SEQ ID NO: 1680543 - RNA, 19 nt, Homo sapiens
  misc_RNA (1)...(19): siRNA sense strand
ccaagauucagaaggacuu

SEQ ID NO: 1680544 - RNA, 19 nt, Homo sapiens
  misc_RNA (1)...(19): siRNA sense strand
cacccuggagauacucuua

SEQ ID NO: 1680545 - RNA, 19 nt, Homo sapiens
  misc_RNA (1)...(19): siRNA sense strand
gaagacuauccuuggagau

SEQ ID NO: 1680546 - RNA, 19 nt, Homo sapiens
  misc_RNA (1)...(19): siRNA sense strand
ccaacagagcuuuacaaca

SEQ ID NO: 1680547 - RNA, 19 nt, Homo sapiens
  misc_RNA (1)...(19): siRNA sense strand
ugaugaugauucagacucu

SEQ ID NO: 1680548 - RNA, 19 nt, Homo sapiens
  misc_RNA (1)...(19): siRNA sense strand
acugcgugguguaugauaa

SEQ ID NO: 1680549 - RNA, 19 nt, Homo sapiens
  misc_RNA (1)...(19): siRNA sense strand
caucacaaacaucauggau

SEQ ID NO: 1680550 - RNA, 19 nt, Homo sapiens
  misc_RNA (1)...(19): siRNA sense strand
gauuccaucacaaacauca

SEQ ID NO: 1680551 - RNA, 19 nt, Homo sapiens
  misc_RNA (1)...(19): siRNA sense strand
acaugugucacuucauuga

SEQ ID NO: 1680552 - RNA, 19 nt, Homo sapiens
  misc_RNA (1)...(19): siRNA sense strand
ucaggcacguaccacuuuc

SEQ ID NO: 1680553 - RNA, 19 nt, Homo sapiens
  misc_RNA (1)...(19): siRNA sense strand
cuguggaccuggagugugu

SEQ ID NO: 1680554 - RNA, 19 nt, Homo sapiens
  misc_RNA (1)...(19): siRNA sense strand
ggaugcauuucagccauac

SEQ ID NO: 1680555 - RNA, 19 nt, Homo sapiens
  misc_RNA (1)...(19): siRNA sense strand
gcaguugugccgccaucau

SEQ ID NO: 1680556 - RNA, 19 nt, Homo sapiens
  misc_RNA (1)...(19): siRNA sense strand
gaagagguuugaugaaauc

SEQ ID NO: 1680557 - RNA, 19 nt, Homo sapiens
  misc_RNA (1)...(19): siRNA sense strand
gugaagagguuugaugaaa

SEQ ID NO: 1680558 - RNA, 19 nt, Homo sapiens
  misc_RNA (1)...(19): siRNA sense strand
gggcaagccuguugucugu

SEQ ID NO: 1680559 - RNA, 19 nt, Homo sapiens
  misc_RNA (1)...(19): siRNA sense strand
gcaucaagaucaucagcaa

SEQ ID NO: 1680560 - RNA, 19 nt, Homo sapiens
  misc_RNA (1)...(19): siRNA sense strand
ggacacggcaucaagauca

SEQ ID NO: 1680561 - RNA, 19 nt, Homo sapiens
  misc_RNA (1)...(19): siRNA sense strand
guggagagcuuugcagguu

SEQ ID NO: 1680562 - RNA, 19 nt, Homo sapiens
  misc_RNA (1)...(19): siRNA sense strand
ugaagagguuugaugaaau

SEQ ID NO: 1680563 - RNA, 19 nt, Homo sapiens
  misc_RNA (1)...(19): siRNA sense strand
gaaggacacggcaucaaga

SEQ ID NO: 1680564 - RNA, 19 nt, Homo sapiens
  misc_RNA (1)...(19): siRNA sense strand
gcucagaagaugaugauug

SEQ ID NO: 1680565 - RNA, 19 nt, Homo sapiens
  misc_RNA (1)...(19): siRNA sense strand
gaacauugcgcgacucaac

SEQ ID NO: 1680566 - RNA, 19 nt, Homo sapiens
  misc_RNA (1)...(19): siRNA sense strand
ggaaggacacggcaucaag

SEQ ID NO: 1680567 - RNA, 19 nt, Homo sapiens
  misc_RNA (1)...(19): siRNA sense strand
caucgucuuugccuccuuu

SEQ ID NO: 1680568 - RNA, 19 nt, Homo sapiens
  misc_RNA (1)...(19): siRNA sense strand
ggaccuaggcaucgagauc

SEQ ID NO: 1680569 - RNA, 19 nt, Homo sapiens
  misc_RNA (1)...(19): siRNA sense strand
uuggagaccuggugauugu

SEQ ID NO: 1680570 - RNA, 19 nt, Homo sapiens
  misc_RNA (1)...(19): siRNA sense strand
gcgugaagagguuugauga

SEQ ID NO: 1680571 - RNA, 19 nt, Homo sapiens
  misc_RNA (1)...(19): siRNA sense strand
ggugagcgacggcaucaug

SEQ ID NO: 1680572 - RNA, 19 nt, Homo sapiens
  misc_RNA (1)...(19): siRNA sense strand
acgaaggcgugaagagguu

SEQ ID NO: 1680573 - RNA, 19 nt, Homo sapiens
  misc_RNA (1)...(19): siRNA sense strand
uggaagcggugaagaugca

SEQ ID NO: 1680574 - RNA, 19 nt, Homo sapiens
  misc_RNA (1)...(19): siRNA sense strand
cucagaagaugaugauugg

SEQ ID NO: 1680575 - RNA, 19 nt, Homo sapiens
  misc_RNA (1)...(19): siRNA sense strand
uggagagcaugauuaccaa

SEQ ID NO: 1680576 - RNA, 19 nt, Homo sapiens
  misc_RNA (1)...(19): siRNA sense strand
aggcagaggccgcagugua

SEQ ID NO: 1680577 - RNA, 19 nt, Homo sapiens
  misc_RNA (1)...(19): siRNA sense strand
gggcagagacaagcgaugu

SEQ ID NO: 1680578 - RNA, 19 nt, Homo sapiens
  misc_RNA (1)...(19): siRNA sense strand
caacgagggcagagacaag

SEQ ID NO: 1680579 - RNA, 19 nt, Homo sapiens
  misc_RNA (1)...(19): siRNA sense strand
gaucccagcagagaagguu

SEQ ID NO: 1680580 - RNA, 19 nt, Homo sapiens
  misc_RNA (1)...(19): siRNA sense strand
cgcaguaccagcaucauug

SEQ ID NO: 1680581 - RNA, 19 nt, Homo sapiens
  misc_RNA (1)...(19): siRNA sense strand
gauugggcgcugcaacuug

SEQ ID NO: 1680582 - RNA, 19 nt, Homo sapiens
  misc_RNA (1)...(19): siRNA sense strand
ccaucgcccuggacaccaa

SEQ ID NO: 1680583 - RNA, 19 nt, Homo sapiens
  misc_RNA (1)...(19): siRNA sense strand
cugggcagaugauguagau

SEQ ID NO: 1680584 - RNA, 19 nt, Homo sapiens
  misc_RNA (1)...(19): siRNA sense strand
ggaaguggagcuggugaag

SEQ ID NO: 1680585 - RNA, 19 nt, Homo sapiens
  misc_RNA (1)...(19): siRNA sense strand
caacaucaugcgggugcua

SEQ ID NO: 1680586 - RNA, 19 nt, Homo sapiens
  misc_RNA (1)...(19): siRNA sense strand
cgagaucccagcagagaag

SEQ ID NO: 1680587 - RNA, 19 nt, Homo sapiens
  misc_RNA (1)...(19): siRNA sense strand
caucaagaucaucagcaaa

SEQ ID NO: 1680588 - RNA, 19 nt, Homo sapiens
  misc_RNA (1)...(19): siRNA sense strand
gacacggcaucaagaucau

SEQ ID NO: 1680589 - RNA, 19 nt, Homo sapiens
  misc_RNA (1)...(19): siRNA sense strand
ggguggacaucgucuuugc

SEQ ID NO: 1680590 - RNA, 19 nt, Homo sapiens
  misc_RNA (1)...(19): siRNA sense strand
gaggugagcgacggcauca

SEQ ID NO: 1680591 - RNA, 19 nt, Homo sapiens
  misc_RNA (1)...(19): siRNA sense strand
gaaggcgugaagagguuug

SEQ ID NO: 1680592 - RNA, 19 nt, Homo sapiens
  misc_RNA (1)...(19): siRNA sense strand
ggaacaccucugccuacug

SEQ ID NO: 1680593 - RNA, 19 nt, Homo sapiens
  misc_RNA (1)...(19): siRNA sense strand
gaagagguuugaugaaauc

SEQ ID NO: 1680594 - RNA, 19 nt, Homo sapiens
  misc_RNA (1)...(19): siRNA sense strand
gugaagagguuugaugaaa

SEQ ID NO: 1680595 - RNA, 19 nt, Homo sapiens
  misc_RNA (1)...(19): siRNA sense strand
gggcaagccuguugucugu

SEQ ID NO: 1680596 - RNA, 19 nt, Homo sapiens
  misc_RNA (1)...(19): siRNA sense strand
gcaucaagaucaucagcaa

SEQ ID NO: 1680597 - RNA, 19 nt, Homo sapiens
  misc_RNA (1)...(19): siRNA sense strand
ggacacggcaucaagauca

SEQ ID NO: 1680598 - RNA, 19 nt, Homo sapiens
  misc_RNA (1)...(19): siRNA sense strand
guggagagcuuugcagguu

SEQ ID NO: 1680599 - RNA, 19 nt, Homo sapiens
  misc_RNA (1)...(19): siRNA sense strand
ugaagagguuugaugaaau

SEQ ID NO: 1680600 - RNA, 19 nt, Homo sapiens
  misc_RNA (1)...(19): siRNA sense strand
gaaggacacggcaucaaga

SEQ ID NO: 1680601 - RNA, 19 nt, Homo sapiens
  misc_RNA (1)...(19): siRNA sense strand
gcucagaagaugaugauug

SEQ ID NO: 1680602 - RNA, 19 nt, Homo sapiens
  misc_RNA (1)...(19): siRNA sense strand
gaacauugcgcgacucaac

SEQ ID NO: 1680603 - RNA, 19 nt, Homo sapiens
  misc_RNA (1)...(19): siRNA sense strand
ggaaggacacggcaucaag

SEQ ID NO: 1680604 - RNA, 19 nt, Homo sapiens
  misc_RNA (1)...(19): siRNA sense strand
caucgucuuugccuccuuu

SEQ ID NO: 1680605 - RNA, 19 nt, Homo sapiens
  misc_RNA (1)...(19): siRNA sense strand
ggaccuaggcaucgagauc

SEQ ID NO: 1680606 - RNA, 19 nt, Homo sapiens
  misc_RNA (1)...(19): siRNA sense strand
uuggagaccuggugauugu

SEQ ID NO: 1680607 - RNA, 19 nt, Homo sapiens
  misc_RNA (1)...(19): siRNA sense strand
gcgugaagagguuugauga

SEQ ID NO: 1680608 - RNA, 19 nt, Homo sapiens
  misc_RNA (1)...(19): siRNA sense strand
ggugagcgacggcaucaug

SEQ ID NO: 1680609 - RNA, 19 nt, Homo sapiens
  misc_RNA (1)...(19): siRNA sense strand
acgaaggcgugaagagguu

SEQ ID NO: 1680610 - RNA, 19 nt, Homo sapiens
  misc_RNA (1)...(19): siRNA sense strand
uggaagcggugaagaugca

SEQ ID NO: 1680611 - RNA, 19 nt, Homo sapiens
  misc_RNA (1)...(19): siRNA sense strand
cucagaagaugaugauugg

SEQ ID NO: 1680612 - RNA, 19 nt, Homo sapiens
  misc_RNA (1)...(19): siRNA sense strand
uggagagcaugauuaccaa

SEQ ID NO: 1680613 - RNA, 19 nt, Homo sapiens
  misc_RNA (1)...(19): siRNA sense strand
aggcagaggccgcagugua

SEQ ID NO: 1680614 - RNA, 19 nt, Homo sapiens
  misc_RNA (1)...(19): siRNA sense strand
gggcagagacaagcgaugu

SEQ ID NO: 1680615 - RNA, 19 nt, Homo sapiens
  misc_RNA (1)...(19): siRNA sense strand
caacgagggcagagacaag

SEQ ID NO: 1680616 - RNA, 19 nt, Homo sapiens
  misc_RNA (1)...(19): siRNA sense strand
gaucccagcagagaagguu

SEQ ID NO: 1680617 - RNA, 19 nt, Homo sapiens
  misc_RNA (1)...(19): siRNA sense strand
cgcaguaccagcaucauug

SEQ ID NO: 1680618 - RNA, 19 nt, Homo sapiens
  misc_RNA (1)...(19): siRNA sense strand
gauugggcgcugcaacuug

SEQ ID NO: 1680619 - RNA, 19 nt, Homo sapiens
  misc_RNA (1)...(19): siRNA sense strand
ccaucgcccuggacaccaa

SEQ ID NO: 1680620 - RNA, 19 nt, Homo sapiens
  misc_RNA (1)...(19): siRNA sense strand
cugggcagaugauguagau

SEQ ID NO: 1680621 - RNA, 19 nt, Homo sapiens
  misc_RNA (1)...(19): siRNA sense strand
ggaaguggagcuggugaag

SEQ ID NO: 1680622 - RNA, 19 nt, Homo sapiens
  misc_RNA (1)...(19): siRNA sense strand
caacaucaugcgggugcua

SEQ ID NO: 1680623 - RNA, 19 nt, Homo sapiens
  misc_RNA (1)...(19): siRNA sense strand
cgagaucccagcagagaag

SEQ ID NO: 1680624 - RNA, 19 nt, Homo sapiens
  misc_RNA (1)...(19): siRNA sense strand
caucaagaucaucagcaaa

SEQ ID NO: 1680625 - RNA, 19 nt, Homo sapiens
  misc_RNA (1)...(19): siRNA sense strand
gacacggcaucaagaucau

SEQ ID NO: 1680626 - RNA, 19 nt, Homo sapiens
  misc_RNA (1)...(19): siRNA sense strand
ggguggacaucgucuuugc

SEQ ID NO: 1680627 - RNA, 19 nt, Homo sapiens
  misc_RNA (1)...(19): siRNA sense strand
gaggugagcgacggcauca

SEQ ID NO: 1680628 - RNA, 19 nt, Homo sapiens
  misc_RNA (1)...(19): siRNA sense strand
gaaggcgugaagagguuug

SEQ ID NO: 1680629 - RNA, 19 nt, Homo sapiens
  misc_RNA (1)...(19): siRNA sense strand
ggaacaccucugccuacug

SEQ ID NO: 1680630 - RNA, 19 nt, Homo sapiens
  misc_RNA (1)...(19): siRNA sense strand
gaagaaccaucaggaagua

SEQ ID NO: 1680631 - RNA, 19 nt, Homo sapiens
  misc_RNA (1)...(19): siRNA sense strand
gacaagaaauccacaaaca

SEQ ID NO: 1680632 - RNA, 19 nt, Homo sapiens
  misc_RNA (1)...(19): siRNA sense strand
caucagagcugcggauuug

SEQ ID NO: 1680633 - RNA, 19 nt, Homo sapiens
  misc_RNA (1)...(19): siRNA sense strand
gcagaaagaggacauauca

SEQ ID NO: 1680634 - RNA, 19 nt, Homo sapiens
  misc_RNA (1)...(19): siRNA sense strand
gcgacaaggugcagaaaga

SEQ ID NO: 1680635 - RNA, 19 nt, Homo sapiens
  misc_RNA (1)...(19): siRNA sense strand
cugcggauuugccgaauua

SEQ ID NO: 1680636 - RNA, 19 nt, Homo sapiens
  misc_RNA (1)...(19): siRNA sense strand
ggacauaucagugguguuc

SEQ ID NO: 1680637 - RNA, 19 nt, Homo sapiens
  misc_RNA (1)...(19): siRNA sense strand
gcagcgagccauugccuuu

SEQ ID NO: 1680638 - RNA, 19 nt, Homo sapiens
  misc_RNA (1)...(19): siRNA sense strand
caagaaauccacaaacaca

SEQ ID NO: 1680639 - RNA, 19 nt, Homo sapiens
  misc_RNA (1)...(19): siRNA sense strand
gcgaggagcucuacuugcu

SEQ ID NO: 1680640 - RNA, 19 nt, Homo sapiens
  misc_RNA (1)...(19): siRNA sense strand
gcccgucuaugacaagaaa

SEQ ID NO: 1680641 - RNA, 19 nt, Homo sapiens
  misc_RNA (1)...(19): siRNA sense strand
gccagacccugacuucuuc

SEQ ID NO: 1680642 - RNA, 19 nt, Homo sapiens
  misc_RNA (1)...(19): siRNA sense strand
gaaauccacaaacacauca

SEQ ID NO: 1680643 - RNA, 19 nt, Homo sapiens
  misc_RNA (1)...(19): siRNA sense strand
gcacagaugaauuggagau

SEQ ID NO: 1680644 - RNA, 19 nt, Homo sapiens
  misc_RNA (1)...(19): siRNA sense strand
gcuacggcguggacaagaa

SEQ ID NO: 1680645 - RNA, 19 nt, Homo sapiens
  misc_RNA (1)...(19): siRNA sense strand
gauugaggcugccauugag

SEQ ID NO: 1680646 - RNA, 19 nt, Homo sapiens
  misc_RNA (1)...(19): siRNA sense strand
ccaucgagcuccgggauug

SEQ ID NO: 1680647 - RNA, 19 nt, Homo sapiens
  misc_RNA (1)...(19): siRNA sense strand
gagcaaacggcggaagaaa

SEQ ID NO: 1680648 - RNA, 19 nt, Homo sapiens
  misc_RNA (1)...(19): siRNA sense strand
caggagcacagaugaauug

SEQ ID NO: 1680649 - RNA, 19 nt, Homo sapiens
  misc_RNA (1)...(19): siRNA sense strand
ugaggaagaaggagauuga

SEQ ID NO: 1680650 - RNA, 19 nt, Homo sapiens
  misc_RNA (1)...(19): siRNA sense strand
acgaguacaucaaggagaa

SEQ ID NO: 1680651 - RNA, 19 nt, Homo sapiens
  misc_RNA (1)...(19): siRNA sense strand
acgaggaccuggagauugu

SEQ ID NO: 1680652 - RNA, 19 nt, Homo sapiens
  misc_RNA (1)...(19): siRNA sense strand
ccauugagcggaagauuca

SEQ ID NO: 1680653 - RNA, 19 nt, Homo sapiens
  misc_RNA (1)...(19): siRNA sense strand
gaucaucgacgaguacauc

SEQ ID NO: 1680654 - RNA, 19 nt, Homo sapiens
  misc_RNA (1)...(19): siRNA sense strand
agaaagaggacauaucagu

SEQ ID NO: 1680655 - RNA, 19 nt, Homo sapiens
  misc_RNA (1)...(19): siRNA sense strand
ggagauugaggcugccauu

SEQ ID NO: 1680656 - RNA, 19 nt, Homo sapiens
  misc_RNA (1)...(19): siRNA sense strand
gagagcaaacggcggaaga

SEQ ID NO: 1680657 - RNA, 19 nt, Homo sapiens
  misc_RNA (1)...(19): siRNA sense strand
cacugacacuggacucgua

SEQ ID NO: 1680658 - RNA, 19 nt, Homo sapiens
  misc_RNA (1)...(19): siRNA sense strand
ugaagaaccaucaggaagu

SEQ ID NO: 1680659 - RNA, 19 nt, Homo sapiens
  misc_RNA (1)...(19): siRNA sense strand
guaccugccucgcgaccau

SEQ ID NO: 1680660 - RNA, 19 nt, Homo sapiens
  misc_RNA (1)...(19): siRNA sense strand
ccagauugccauuguguuc

SEQ ID NO: 1680661 - RNA, 19 nt, Homo sapiens
  misc_RNA (1)...(19): siRNA sense strand
acagaugaauuggagauca

SEQ ID NO: 1680662 - RNA, 19 nt, Homo sapiens
  misc_RNA (1)...(19): siRNA sense strand
cgacgugcaccgccagauu

SEQ ID NO: 1680663 - RNA, 19 nt, Homo sapiens
  misc_RNA (1)...(19): siRNA sense strand
ucacggagcagcccaagca

SEQ ID NO: 1680664 - RNA, 19 nt, Homo sapiens
  misc_RNA (1)...(19): siRNA sense strand
ggauuugccgaauuaacaa

SEQ ID NO: 1680665 - RNA, 19 nt, Homo sapiens
  misc_RNA (1)...(19): siRNA sense strand
gacgugcaccgccagauug

SEQ ID NO: 1680666 - RNA, 19 nt, Homo sapiens
  misc_RNA (1)...(19): siRNA sense strand
agauugaggcugccauuga

SEQ ID NO: 1680667 - RNA, 19 nt, Homo sapiens
  misc_RNA (1)...(19): siRNA sense strand
uuuccgagcccgucuauga

SEQ ID NO: 1680668 - RNA, 19 nt, Homo sapiens
  misc_RNA (1)...(19): siRNA sense strand
uggagaucaucgacgagua

SEQ ID NO: 1680669 - RNA, 19 nt, Homo sapiens
  misc_RNA (1)...(19): siRNA sense strand
ggagaucaucgacgaguac

SEQ ID NO: 1680670 - RNA, 19 nt, Homo sapiens
  misc_RNA (1)...(19): siRNA sense strand
gcugcggauuugccgaauu

SEQ ID NO: 1680671 - RNA, 19 nt, Homo sapiens
  misc_RNA (1)...(19): siRNA sense strand
gggaaggucgggcugacuu

SEQ ID NO: 1680672 - RNA, 19 nt, Homo sapiens
  misc_RNA (1)...(19): siRNA sense strand
gaagauucaacugggcauu

SEQ ID NO: 1680673 - RNA, 19 nt, Homo sapiens
  misc_RNA (1)...(19): siRNA sense strand
cggauuugccgaauuaaca

SEQ ID NO: 1680674 - RNA, 19 nt, Homo sapiens
  misc_RNA (1)...(19): siRNA sense strand
gccacacgcuagcgcuguu

SEQ ID NO: 1680675 - RNA, 19 nt, Homo sapiens
  misc_RNA (1)...(19): siRNA sense strand
gagcccgucuaugacaaga

SEQ ID NO: 1680676 - RNA, 19 nt, Homo sapiens
  misc_RNA (1)...(19): siRNA sense strand
ucaggaaguagacaugaau

SEQ ID NO: 1680677 - RNA, 19 nt, Homo sapiens
  misc_RNA (1)...(19): siRNA sense strand
ccaggagcacagaugaauu

SEQ ID NO: 1680678 - RNA, 19 nt, Homo sapiens
  misc_RNA (1)...(19): siRNA sense strand
ggaccagcagggacagaug

SEQ ID NO: 1680679 - RNA, 19 nt, Homo sapiens
  misc_RNA (1)...(19): siRNA sense strand
gagauugaggcugccauug

SEQ ID NO: 1680680 - RNA, 19 nt, Homo sapiens
  misc_RNA (1)...(19): siRNA sense strand
cuacgaggaccuggagauu

SEQ ID NO: 1680681 - RNA, 19 nt, Homo sapiens
  misc_RNA (1)...(19): siRNA sense strand
agauugccauuguguucaa

SEQ ID NO: 1680682 - RNA, 19 nt, Homo sapiens
  misc_RNA (1)...(19): siRNA sense strand
caucaggaaguagacauga

SEQ ID NO: 1680683 - RNA, 19 nt, Homo sapiens
  misc_RNA (1)...(19): siRNA sense strand
agccauugccuuucacgua

SEQ ID NO: 1680684 - RNA, 19 nt, Homo sapiens
  misc_RNA (1)...(19): siRNA sense strand
gccauugagcggaagauuc

SEQ ID NO: 1680685 - RNA, 19 nt, Homo sapiens
  misc_RNA (1)...(19): siRNA sense strand
agaaauccacaaacacauc

SEQ ID NO: 1680686 - RNA, 19 nt, Homo sapiens
  misc_RNA (1)...(19): siRNA sense strand
cugccugccugguguggaa

SEQ ID NO: 1680687 - RNA, 19 nt, Homo sapiens
  misc_RNA (1)...(19): siRNA sense strand
ugccagacccugacuucuu

SEQ ID NO: 1680688 - RNA, 19 nt, Homo sapiens
  misc_RNA (1)...(19): siRNA sense strand
gaaaugggauggcaaagaa

SEQ ID NO: 1680689 - RNA, 19 nt, Homo sapiens
  misc_RNA (1)...(19): siRNA sense strand
ggagaagaguuugaugaaa

SEQ ID NO: 1680690 - RNA, 19 nt, Homo sapiens
  misc_RNA (1)...(19): siRNA sense strand
gaacuuugaugaguacaug

SEQ ID NO: 1680691 - RNA, 19 nt, Homo sapiens
  misc_RNA (1)...(19): siRNA sense strand
gaccaacagucagaacuuu

SEQ ID NO: 1680692 - RNA, 19 nt, Homo sapiens
  misc_RNA (1)...(19): siRNA sense strand
caacgguaauuaucaguca

SEQ ID NO: 1680693 - RNA, 19 nt, Homo sapiens
  misc_RNA (1)...(19): siRNA sense strand
guaauuaucagucaagaag

SEQ ID NO: 1680694 - RNA, 19 nt, Homo sapiens
  misc_RNA (1)...(19): siRNA sense strand
gucagaacuuugaugagua

SEQ ID NO: 1680695 - RNA, 19 nt, Homo sapiens
  misc_RNA (1)...(19): siRNA sense strand
ugaaaccacugcagaugau

SEQ ID NO: 1680696 - RNA, 19 nt, Homo sapiens
  misc_RNA (1)...(19): siRNA sense strand
ggaaaugugaccaaaccaa

SEQ ID NO: 1680697 - RNA, 19 nt, Homo sapiens
  misc_RNA (1)...(19): siRNA sense strand
gggagaagaguuugaugaa

SEQ ID NO: 1680698 - RNA, 19 nt, Homo sapiens
  misc_RNA (1)...(19): siRNA sense strand
gaugauagaaacuguaagu

SEQ ID NO: 1680699 - RNA, 19 nt, Homo sapiens
  misc_RNA (1)...(19): siRNA sense strand
gaacacggagauuaguuuc

SEQ ID NO: 1680700 - RNA, 19 nt, Homo sapiens
  misc_RNA (1)...(19): siRNA sense strand
uagccuggauggagacaaa

SEQ ID NO: 1680701 - RNA, 19 nt, Homo sapiens
  misc_RNA (1)...(19): siRNA sense strand
ucaggacucucagcacauu

SEQ ID NO: 1680702 - RNA, 19 nt, Homo sapiens
  misc_RNA (1)...(19): siRNA sense strand
gcagaugauagaaacugua

SEQ ID NO: 1680703 - RNA, 19 nt, Homo sapiens
  misc_RNA (1)...(19): siRNA sense strand
gaccaaaccaacgguaauu

SEQ ID NO: 1680704 - RNA, 19 nt, Homo sapiens
  misc_RNA (1)...(19): siRNA sense strand
ucaagaaggagacaaagug

SEQ ID NO: 1680705 - RNA, 19 nt, Homo sapiens
  misc_RNA (1)...(19): siRNA sense strand
ccaaaccaacgguaauuau

SEQ ID NO: 1680706 - RNA, 19 nt, Homo sapiens
  misc_RNA (1)...(19): siRNA sense strand
ggugggaaaugugaccaaa

SEQ ID NO: 1680707 - RNA, 19 nt, Homo sapiens
  misc_RNA (1)...(19): siRNA sense strand
cagaugauagaaacuguaa

SEQ ID NO: 1680708 - RNA, 19 nt, Homo sapiens
  misc_RNA (1)...(19): siRNA sense strand
gaugaaaccacugcagaug

SEQ ID NO: 1680709 - RNA, 19 nt, Homo sapiens
  misc_RNA (1)...(19): siRNA sense strand
ucaagaacacggagauuag

SEQ ID NO: 1680710 - RNA, 19 nt, Homo sapiens
  misc_RNA (1)...(19): siRNA sense strand
ccaacagucagaacuuuga

SEQ ID NO: 1680711 - RNA, 19 nt, Homo sapiens
  misc_RNA (1)...(19): siRNA sense strand
gaaaccacugcagaugaua

SEQ ID NO: 1680712 - RNA, 19 nt, Homo sapiens
  misc_RNA (1)...(19): siRNA sense strand
aaaccaacgguaauuauca

SEQ ID NO: 1680713 - RNA, 19 nt, Homo sapiens
  misc_RNA (1)...(19): siRNA sense strand
ccacugcagaugauagaaa

SEQ ID NO: 1680714 - RNA, 19 nt, Homo sapiens
  misc_RNA (1)...(19): siRNA sense strand
gagacaaaguggucaucag

SEQ ID NO: 1680715 - RNA, 19 nt, Homo sapiens
  misc_RNA (1)...(19): siRNA sense strand
gauggcaaagaaacaaauu

SEQ ID NO: 1680716 - RNA, 19 nt, Homo sapiens
  misc_RNA (1)...(19): siRNA sense strand
gaaacuguaagucuguugu

SEQ ID NO: 1680717 - RNA, 19 nt, Homo sapiens
  misc_RNA (1)...(19): siRNA sense strand
ccuggaagcugaccaacag

SEQ ID NO: 1680718 - RNA, 19 nt, Homo sapiens
  misc_RNA (1)...(19): siRNA sense strand
ucagaacuuugaugaguac

SEQ ID NO: 1680719 - RNA, 19 nt, Homo sapiens
  misc_RNA (1)...(19): siRNA sense strand
agucagaacuuugaugagu

SEQ ID NO: 1680720 - RNA, 19 nt, Homo sapiens
  misc_RNA (1)...(19): siRNA sense strand
caaaccaacgguaauuauc

SEQ ID NO: 1680721 - RNA, 19 nt, Homo sapiens
  misc_RNA (1)...(19): siRNA sense strand
aacuguaagucuguuguua

SEQ ID NO: 1680722 - RNA, 19 nt, Homo sapiens
  misc_RNA (1)...(19): siRNA sense strand
gcuguucgccacuaugaga

SEQ ID NO: 1680723 - RNA, 19 nt, Homo sapiens
  misc_RNA (1)...(19): siRNA sense strand
guggaggcuuucugugcua

SEQ ID NO: 1680724 - RNA, 19 nt, Homo sapiens
  misc_RNA (1)...(19): siRNA sense strand
aauuaucagucaagaagga

SEQ ID NO: 1680725 - RNA, 19 nt, Homo sapiens
  misc_RNA (1)...(19): siRNA sense strand
agaacacggagauuaguuu

SEQ ID NO: 1680726 - RNA, 19 nt, Homo sapiens
  misc_RNA (1)...(19): siRNA sense strand
cuaggcaggugggaaaugu

SEQ ID NO: 1680727 - RNA, 19 nt, Homo sapiens
  misc_RNA (1)...(19): siRNA sense strand
caaacuuguucacauacag

SEQ ID NO: 1680728 - RNA, 19 nt, Homo sapiens
  misc_RNA (1)...(19): siRNA sense strand
acagucagaacuuugauga

SEQ ID NO: 1680729 - RNA, 19 nt, Homo sapiens
  misc_RNA (1)...(19): siRNA sense strand
acagaaaugggauggcaaa

SEQ ID NO: 1680730 - RNA, 19 nt, Homo sapiens
  misc_RNA (1)...(19): siRNA sense strand
ggagacaaaguggucauca

SEQ ID NO: 1680731 - RNA, 19 nt, Homo sapiens
  misc_RNA (1)...(19): siRNA sense strand
ccagcugggagaagaguuu

SEQ ID NO: 1680732 - RNA, 19 nt, Homo sapiens
  misc_RNA (1)...(19): siRNA sense strand
acacggagauuaguuucca

SEQ ID NO: 1680733 - RNA, 19 nt, Homo sapiens
  misc_RNA (1)...(19): siRNA sense strand
agaaaugggauggcaaaga

SEQ ID NO: 1680734 - RNA, 19 nt, Homo sapiens
  misc_RNA (1)...(19): siRNA sense strand
gguaauuaucagucaagaa

SEQ ID NO: 1680735 - RNA, 19 nt, Homo sapiens
  misc_RNA (1)...(19): siRNA sense strand
ggauggcaaagaaacaaau

SEQ ID NO: 1680736 - RNA, 19 nt, Homo sapiens
  misc_RNA (1)...(19): siRNA sense strand
ugauagaaacuguaagucu

SEQ ID NO: 1680737 - RNA, 19 nt, Homo sapiens
  misc_RNA (1)...(19): siRNA sense strand
uucaagaacacggagauua

SEQ ID NO: 1680738 - RNA, 19 nt, Homo sapiens
  misc_RNA (1)...(19): siRNA sense strand
caagaacacggagauuagu

SEQ ID NO: 1680739 - RNA, 19 nt, Homo sapiens
  misc_RNA (1)...(19): siRNA sense strand
guuaugacccuuacuuuug

SEQ ID NO: 1680740 - RNA, 19 nt, Homo sapiens
  misc_RNA (1)...(19): siRNA sense strand
uagaaacuguaagucuguu

SEQ ID NO: 1680741 - RNA, 19 nt, Homo sapiens
  misc_RNA (1)...(19): siRNA sense strand
gggauggcaaagaaacaaa

SEQ ID NO: 1680742 - RNA, 19 nt, Homo sapiens
  misc_RNA (1)...(19): siRNA sense strand
ugggagaagaguuugauga

SEQ ID NO: 1680743 - RNA, 19 nt, Homo sapiens
  misc_RNA (1)...(19): siRNA sense strand
gaaauuaaggauggcaaaa

SEQ ID NO: 1680744 - RNA, 19 nt, Homo sapiens
  misc_RNA (1)...(19): siRNA sense strand
ugaccaaaccaacgguaau

SEQ ID NO: 1680745 - RNA, 19 nt, Homo sapiens
  misc_RNA (1)...(19): siRNA sense strand
aaacuuguucacauacaga

SEQ ID NO: 1680746 - RNA, 19 nt, Homo sapiens
  misc_RNA (1)...(19): siRNA sense strand
gcucuaggcgugggcuuug

SEQ ID NO: 1680747 - RNA, 19 nt, Homo sapiens
  misc_RNA (1)...(19): siRNA sense strand
agaaauuaaggauggcaaa

SEQ ID NO: 1680748 - RNA, 19 nt, Homo sapiens
  misc_RNA (1)...(19): siRNA sense strand
acucucagcacauucaaga

SEQ ID NO: 1680749 - RNA, 19 nt, Homo sapiens
  misc_RNA (1)...(19): siRNA sense strand
gugaccaaaccaacgguaa

SEQ ID NO: 1680750 - RNA, 19 nt, Homo sapiens
  misc_RNA (1)...(19): siRNA sense strand
aaacuguaagucuguuguu

SEQ ID NO: 1680751 - RNA, 19 nt, Homo sapiens
  misc_RNA (1)...(19): siRNA sense strand
guacaugccacgauuguuu

SEQ ID NO: 1680752 - RNA, 19 nt, Homo sapiens
  misc_RNA (1)...(19): siRNA sense strand
cagcaucuauuaccacuga

SEQ ID NO: 1680753 - RNA, 19 nt, Homo sapiens
  misc_RNA (1)...(19): siRNA sense strand
caugagcgcugccguccua

SEQ ID NO: 1680754 - RNA, 19 nt, Homo sapiens
  misc_RNA (1)...(19): siRNA sense strand
ugauguuccuguugucuua

SEQ ID NO: 1680755 - RNA, 19 nt, Homo sapiens
  misc_RNA (1)...(19): siRNA sense strand
ccuguugucuuacuuguuu

SEQ ID NO: 1680756 - RNA, 19 nt, Homo sapiens
  misc_RNA (1)...(19): siRNA sense strand
acaaguacaugccacgauu

SEQ ID NO: 1680757 - RNA, 19 nt, Homo sapiens
  misc_RNA (1)...(19): siRNA sense strand
cccaagaauuuacuacauu

SEQ ID NO: 1680758 - RNA, 19 nt, Homo sapiens
  misc_RNA (1)...(19): siRNA sense strand
gcugauauuuggguucuug

SEQ ID NO: 1680759 - RNA, 19 nt, Homo sapiens
  misc_RNA (1)...(19): siRNA sense strand
aaggaugggugauguaugu

SEQ ID NO: 1680760 - RNA, 19 nt, Homo sapiens
  misc_RNA (1)...(19): siRNA sense strand
gcaaggaugggugauguau

SEQ ID NO: 1680761 - RNA, 19 nt, Homo sapiens
  misc_RNA (1)...(19): siRNA sense strand
gguagccgccacccacaua

SEQ ID NO: 1680762 - RNA, 19 nt, Homo sapiens
  misc_RNA (1)...(19): siRNA sense strand
ccacuggcauccuguacau

SEQ ID NO: 1680763 - RNA, 19 nt, Homo sapiens
  misc_RNA (1)...(19): siRNA sense strand
gagcugauauuuggguucu

SEQ ID NO: 1680764 - RNA, 19 nt, Homo sapiens
  misc_RNA (1)...(19): siRNA sense strand
ugucuuacuuguuuggauu

SEQ ID NO: 1680765 - RNA, 19 nt, Homo sapiens
  misc_RNA (1)...(19): siRNA sense strand
ucgcucaccucguuucuca

SEQ ID NO: 1680766 - RNA, 19 nt, Homo sapiens
  misc_RNA (1)...(19): siRNA sense strand
ccacgcugcucuacauucu

SEQ ID NO: 1680767 - RNA, 19 nt, Homo sapiens
  misc_RNA (1)...(19): siRNA sense strand
cugcuggacccaagaauuu

SEQ ID NO: 1680768 - RNA, 19 nt, Homo sapiens
  misc_RNA (1)...(19): siRNA sense strand
gcgcugccguccuacaagu

SEQ ID NO: 1680769 - RNA, 19 nt, Homo sapiens
  misc_RNA (1)...(19): siRNA sense strand
ggaccacuggcauccugua

SEQ ID NO: 1680770 - RNA, 19 nt, Homo sapiens
  misc_RNA (1)...(19): siRNA sense strand
gagcgcugccguccuacaa

SEQ ID NO: 1680771 - RNA, 19 nt, Homo sapiens
  misc_RNA (1)...(19): siRNA sense strand
gaaacugcuggacccaaga

SEQ ID NO: 1680772 - RNA, 19 nt, Homo sapiens
  misc_RNA (1)...(19): siRNA sense strand
ccucguuucucaucuccuu

SEQ ID NO: 1680773 - RNA, 19 nt, Homo sapiens
  misc_RNA (1)...(19): siRNA sense strand
ugcccgagcugauauuugg

SEQ ID NO: 1680774 - RNA, 19 nt, Homo sapiens
  misc_RNA (1)...(19): siRNA sense strand
caaguacaugccacgauug

SEQ ID NO: 1680775 - RNA, 19 nt, Homo sapiens
  misc_RNA (1)...(19): siRNA sense strand
gcucaccucguuucucauc

SEQ ID NO: 1680776 - RNA, 19 nt, Homo sapiens
  misc_RNA (1)...(19): siRNA sense strand
cugcaaggaugggugaugu

SEQ ID NO: 1680777 - RNA, 19 nt, Homo sapiens
  misc_RNA (1)...(19): siRNA sense strand
ucgccacgcugcucuacau

SEQ ID NO: 1680778 - RNA, 19 nt, Homo sapiens
  misc_RNA (1)...(19): siRNA sense strand
augccacgauuguuucuga

SEQ ID NO: 1680779 - RNA, 19 nt, Homo sapiens
  misc_RNA (1)...(19): siRNA sense strand
gacccaagaauuuacuaca

SEQ ID NO: 1680780 - RNA, 19 nt, Homo sapiens
  misc_RNA (1)...(19): siRNA sense strand
uuugaauccuggagaguuc

SEQ ID NO: 1680781 - RNA, 19 nt, Homo sapiens
  misc_RNA (1)...(19): siRNA sense strand
aaacugcuggacccaagaa

SEQ ID NO: 1680782 - RNA, 19 nt, Homo sapiens
  misc_RNA (1)...(19): siRNA sense strand
acccaagaauuuacuacau

SEQ ID NO: 1680783 - RNA, 19 nt, Homo sapiens
  misc_RNA (1)...(19): siRNA sense strand
gaaauaagccuaagagaga

SEQ ID NO: 1680784 - RNA, 19 nt, Homo sapiens
  misc_RNA (1)...(19): siRNA sense strand
gauggugacuucuaugaaa

SEQ ID NO: 1680785 - RNA, 19 nt, Homo sapiens
  misc_RNA (1)...(19): siRNA sense strand
gaacguguaugcagaugga

SEQ ID NO: 1680786 - RNA, 19 nt, Homo sapiens
  misc_RNA (1)...(19): siRNA sense strand
gcacuggguucuaaucuuc

SEQ ID NO: 1680787 - RNA, 19 nt, Homo sapiens
  misc_RNA (1)...(19): siRNA sense strand
gaacaucccagcuguggaa

SEQ ID NO: 1680788 - RNA, 19 nt, Homo sapiens
  misc_RNA (1)...(19): siRNA sense strand
ccagugagauagaaaguga

SEQ ID NO: 1680789 - RNA, 19 nt, Homo sapiens
  misc_RNA (1)...(19): siRNA sense strand
caacagagcgggaaauaag

SEQ ID NO: 1680790 - RNA, 19 nt, Homo sapiens
  misc_RNA (1)...(19): siRNA sense strand
gaaaugggauaugcugcaa

SEQ ID NO: 1680791 - RNA, 19 nt, Homo sapiens
  misc_RNA (1)...(19): siRNA sense strand
ccaagauggugacuucuau

SEQ ID NO: 1680792 - RNA, 19 nt, Homo sapiens
  misc_RNA (1)...(19): siRNA sense strand
gaaaagacagccagcauuu

SEQ ID NO: 1680793 - RNA, 19 nt, Homo sapiens
  misc_RNA (1)...(19): siRNA sense strand
guaugcagauggaaaggaa

SEQ ID NO: 1680794 - RNA, 19 nt, Homo sapiens
  misc_RNA (1)...(19): siRNA sense strand
gagcaagagaugaaagaaa

SEQ ID NO: 1680795 - RNA, 19 nt, Homo sapiens
  misc_RNA (1)...(19): siRNA sense strand
ggagacaacagaaggaaau

SEQ ID NO: 1680796 - RNA, 19 nt, Homo sapiens
  misc_RNA (1)...(19): siRNA sense strand
gaaguagcagcaucuguga

SEQ ID NO: 1680797 - RNA, 19 nt, Homo sapiens
  misc_RNA (1)...(19): siRNA sense strand
ggagugggccuauaugaag

SEQ ID NO: 1680798 - RNA, 19 nt, Homo sapiens
  misc_RNA (1)...(19): siRNA sense strand
gauagaaagugagcaagag

SEQ ID NO: 1680799 - RNA, 19 nt, Homo sapiens
  misc_RNA (1)...(19): siRNA sense strand
gaggguguauccugcauca

SEQ ID NO: 1680800 - RNA, 19 nt, Homo sapiens
  misc_RNA (1)...(19): siRNA sense strand
ugaaagaaaugggauaugc

SEQ ID NO: 1680801 - RNA, 19 nt, Homo sapiens
  misc_RNA (1)...(19): siRNA sense strand
gcaacagagcgggaaauaa

SEQ ID NO: 1680802 - RNA, 19 nt, Homo sapiens
  misc_RNA (1)...(19): siRNA sense strand
gaggagucuucguccgaua

SEQ ID NO: 1680803 - RNA, 19 nt, Homo sapiens
  misc_RNA (1)...(19): siRNA sense strand
ggaagcaccugugguugca

SEQ ID NO: 1680804 - RNA, 19 nt, Homo sapiens
  misc_RNA (1)...(19): siRNA sense strand
aggaggaacucaagaggaa

SEQ ID NO: 1680805 - RNA, 19 nt, Homo sapiens
  misc_RNA (1)...(19): siRNA sense strand
agcaagagaugaaagaaau

SEQ ID NO: 1680806 - RNA, 19 nt, Homo sapiens
  misc_RNA (1)...(19): siRNA sense strand
gaaagugagcaagagauga

SEQ ID NO: 1680807 - RNA, 19 nt, Homo sapiens
  misc_RNA (1)...(19): siRNA sense strand
gggccuauaugaaguagca

SEQ ID NO: 1680808 - RNA, 19 nt, Homo sapiens
  misc_RNA (1)...(19): siRNA sense strand
caacagaaggaaauaacug

SEQ ID NO: 1680809 - RNA, 19 nt, Homo sapiens
  misc_RNA (1)...(19): siRNA sense strand
gguguauccugcaucauca

SEQ ID NO: 1680810 - RNA, 19 nt, Homo sapiens
  misc_RNA (1)...(19): siRNA sense strand
uggguaaguuccagccuaa

SEQ ID NO: 1680811 - RNA, 19 nt, Homo sapiens
  misc_RNA (1)...(19): siRNA sense strand
gagcgggaaauaagccuaa

SEQ ID NO: 1680812 - RNA, 19 nt, Homo sapiens
  misc_RNA (1)...(19): siRNA sense strand
aaagugagcaagagaugaa

SEQ ID NO: 1680813 - RNA, 19 nt, Homo sapiens
  misc_RNA (1)...(19): siRNA sense strand
gaugaaagaaaugggauau

SEQ ID NO: 1680814 - RNA, 19 nt, Homo sapiens
  misc_RNA (1)...(19): siRNA sense strand
acgcugaucugcccuguca

SEQ ID NO: 1680815 - RNA, 19 nt, Homo sapiens
  misc_RNA (1)...(19): siRNA sense strand
gagacaacagaaggaaaua

SEQ ID NO: 1680816 - RNA, 19 nt, Homo sapiens
  misc_RNA (1)...(19): siRNA sense strand
cagauggagugggccuaua

SEQ ID NO: 1680817 - RNA, 19 nt, Homo sapiens
  misc_RNA (1)...(19): siRNA sense strand
gaaggguuaugaggaugga

SEQ ID NO: 1680818 - RNA, 19 nt, Homo sapiens
  misc_RNA (1)...(19): siRNA sense strand
uugcagcacuggguucuaa

SEQ ID NO: 1680819 - RNA, 19 nt, Homo sapiens
  misc_RNA (1)...(19): siRNA sense strand
uaaggcagguggugaacgu

SEQ ID NO: 1680820 - RNA, 19 nt, Homo sapiens
  misc_RNA (1)...(19): siRNA sense strand
ggcagguggugaacgugua

SEQ ID NO: 1680821 - RNA, 19 nt, Homo sapiens
  misc_RNA (1)...(19): siRNA sense strand
cagcaucugugaucaugag

SEQ ID NO: 1680822 - RNA, 19 nt, Homo sapiens
  misc_RNA (1)...(19): siRNA sense strand
gcaagagaugaaagaaaug

SEQ ID NO: 1680823 - RNA, 19 nt, Homo sapiens
  misc_RNA (1)...(19): siRNA sense strand
cgagggagaacuucgauuc

SEQ ID NO: 1680824 - RNA, 19 nt, Homo sapiens
  misc_RNA (1)...(19): siRNA sense strand
gagugggccuauaugaagu

SEQ ID NO: 1680825 - RNA, 19 nt, Homo sapiens
  misc_RNA (1)...(19): siRNA sense strand
ggagccaguuacuucuugu

SEQ ID NO: 1680826 - RNA, 19 nt, Homo sapiens
  misc_RNA (1)...(19): siRNA sense strand
gaaagaaaugggauaugcu

SEQ ID NO: 1680827 - RNA, 19 nt, Homo sapiens
  misc_RNA (1)...(19): siRNA sense strand
uuuccaagauggugacuuc

SEQ ID NO: 1680828 - RNA, 19 nt, Homo sapiens
  misc_RNA (1)...(19): siRNA sense strand
cggagccaguuacuucuug

SEQ ID NO: 1680829 - RNA, 19 nt, Homo sapiens
  misc_RNA (1)...(19): siRNA sense strand
ggaaaagacagccagcauu

SEQ ID NO: 1680830 - RNA, 19 nt, Homo sapiens
  misc_RNA (1)...(19): siRNA sense strand
caaguucccuggcuuuccu

SEQ ID NO: 1680831 - RNA, 19 nt, Homo sapiens
  misc_RNA (1)...(19): siRNA sense strand
ggaaaggaaguggaagaca

SEQ ID NO: 1680832 - RNA, 19 nt, Homo sapiens
  misc_RNA (1)...(19): siRNA sense strand
aaugggauaugcugcaaca

SEQ ID NO: 1680833 - RNA, 19 nt, Homo sapiens
  misc_RNA (1)...(19): siRNA sense strand
ugagauagaaagugagcaa

SEQ ID NO: 1680834 - RNA, 19 nt, Homo sapiens
  misc_RNA (1)...(19): siRNA sense strand
gcagauggagugggccuau

SEQ ID NO: 1680835 - RNA, 19 nt, Homo sapiens
  misc_RNA (1)...(19): siRNA sense strand
cugcucaacuuucaugucu

SEQ ID NO: 1680836 - RNA, 19 nt, Homo sapiens
  misc_RNA (1)...(19): siRNA sense strand
caucccagcuguggaagca

SEQ ID NO: 1680837 - RNA, 19 nt, Homo sapiens
  misc_RNA (1)...(19): siRNA sense strand
gacaacagaaggaaauaac

SEQ ID NO: 1680838 - RNA, 19 nt, Homo sapiens
  misc_RNA (1)...(19): siRNA sense strand
agacaacagaaggaaauaa

SEQ ID NO: 1680839 - RNA, 19 nt, Homo sapiens
  misc_RNA (1)...(19): siRNA sense strand
agugaaggguuaugaggau

SEQ ID NO: 1680840 - RNA, 19 nt, Homo sapiens
  misc_RNA (1)...(19): siRNA sense strand
ucaugucucccuccucuug

SEQ ID NO: 1680841 - RNA, 19 nt, Homo sapiens
  misc_RNA (1)...(19): siRNA sense strand
ggguguauccugcaucauc

SEQ ID NO: 1680842 - RNA, 19 nt, Homo sapiens
  misc_RNA (1)...(19): siRNA sense strand
guagcagcaucugugauca

SEQ ID NO: 1680843 - RNA, 19 nt, Homo sapiens
  misc_RNA (1)...(19): siRNA sense strand
gcagguggugaacguguau

SEQ ID NO: 1680844 - RNA, 19 nt, Homo sapiens
  misc_RNA (1)...(19): siRNA sense strand
gggaaauaagccuaagaga

SEQ ID NO: 1680845 - RNA, 19 nt, Homo sapiens
  misc_RNA (1)...(19): siRNA sense strand
aagauggugacuucuauga

SEQ ID NO: 1680846 - RNA, 19 nt, Homo sapiens
  misc_RNA (1)...(19): siRNA sense strand
caagagaugaaagaaaugg

SEQ ID NO: 1680847 - RNA, 19 nt, Homo sapiens
  misc_RNA (1)...(19): siRNA sense strand
acgucgaagugaaggguua

SEQ ID NO: 1680848 - RNA, 19 nt, Homo sapiens
  misc_RNA (1)...(19): siRNA sense strand
ccucugacaguggaaagua

SEQ ID NO: 1680849 - RNA, 19 nt, Homo sapiens
  misc_RNA (1)...(19): siRNA sense strand
gugagcaagagaugaaaga

SEQ ID NO: 1680850 - RNA, 19 nt, Homo sapiens
  misc_RNA (1)...(19): siRNA sense strand
agaaagugagcaagagaug

SEQ ID NO: 1680851 - RNA, 19 nt, Homo sapiens
  misc_RNA (1)...(19): siRNA sense strand
caagauggugacuucuaug

SEQ ID NO: 1680852 - RNA, 19 nt, Homo sapiens
  misc_RNA (1)...(19): siRNA sense strand
ugggauaugcugcaacaga

SEQ ID NO: 1680853 - RNA, 19 nt, Homo sapiens
  misc_RNA (1)...(19): siRNA sense strand
agauagaaagugagcaaga

SEQ ID NO: 1680854 - RNA, 19 nt, Homo sapiens
  misc_RNA (1)...(19): siRNA sense strand
gcagcacuggguucuaauc

SEQ ID NO: 1680855 - RNA, 19 nt, Homo sapiens
  misc_RNA (1)...(19): siRNA sense strand
cuucguccgauaccaauaa

SEQ ID NO: 1680856 - RNA, 19 nt, Homo sapiens
  misc_RNA (1)...(19): siRNA sense strand
ggaggaacucaagaggaaa

SEQ ID NO: 1680857 - RNA, 19 nt, Homo sapiens
  misc_RNA (1)...(19): siRNA sense strand
gauggagugggccuauaug

SEQ ID NO: 1680858 - RNA, 19 nt, Homo sapiens
  misc_RNA (1)...(19): siRNA sense strand
uguggaagcaccugugguu

SEQ ID NO: 1680859 - RNA, 19 nt, Homo sapiens
  misc_RNA (1)...(19): siRNA sense strand
uggagugggccuauaugaa

SEQ ID NO: 1680860 - RNA, 19 nt, Homo sapiens
  misc_RNA (1)...(19): siRNA sense strand
gggaggguguauccugcau

SEQ ID NO: 1680861 - RNA, 19 nt, Homo sapiens
  misc_RNA (1)...(19): siRNA sense strand
ugcaacagagcgggaaaua

SEQ ID NO: 1680862 - RNA, 19 nt, Homo sapiens
  misc_RNA (1)...(19): siRNA sense strand
cgccggagccaguuacuuc

SEQ ID NO: 1680863 - RNA, 19 nt, Homo sapiens
  misc_RNA (1)...(19): siRNA sense strand
ggaaagggcuguaauuaua

SEQ ID NO: 1680864 - RNA, 19 nt, Homo sapiens
  misc_RNA (1)...(19): siRNA sense strand
gggaauggcuccaauuaua

SEQ ID NO: 1680865 - RNA, 19 nt, Homo sapiens
  misc_RNA (1)...(19): siRNA sense strand
gagaaagccuucagucaua

SEQ ID NO: 1680866 - RNA, 19 nt, Homo sapiens
  misc_RNA (1)...(19): siRNA sense strand
ggaaagggcuucagucaga

SEQ ID NO: 1680867 - RNA, 19 nt, Homo sapiens
  misc_RNA (1)...(19): siRNA sense strand
ggaaagggcuucagucaga

SEQ ID NO: 1680868 - RNA, 19 nt, Homo sapiens
  misc_RNA (1)...(19): siRNA sense strand
gaucauaccuucagaguca

SEQ ID NO: 1680869 - RNA, 19 nt, Homo sapiens
  misc_RNA (1)...(19): siRNA sense strand
gagaaugucuuuaaucaga

SEQ ID NO: 1680870 - RNA, 19 nt, Homo sapiens
  misc_RNA (1)...(19): siRNA sense strand
ggagaaagaccauauauau

SEQ ID NO: 1680871 - RNA, 19 nt, Homo sapiens
  misc_RNA (1)...(19): siRNA sense strand
gcacaacauuuaugagaaa

SEQ ID NO: 1680872 - RNA, 19 nt, Homo sapiens
  misc_RNA (1)...(19): siRNA sense strand
gagaaacuauacacagaua

SEQ ID NO: 1680873 - RNA, 19 nt, Homo sapiens
  misc_RNA (1)...(19): siRNA sense strand
gagaagcccuauccaugua

SEQ ID NO: 1680874 - RNA, 19 nt, Homo sapiens
  misc_RNA (1)...(19): siRNA sense strand
gggaagggcuuuagucaga

SEQ ID NO: 1680875 - RNA, 19 nt, Homo sapiens
  misc_RNA (1)...(19): siRNA sense strand
gaagauaucaugaagguau

SEQ ID NO: 1680876 - RNA, 19 nt, Homo sapiens
  misc_RNA (1)...(19): siRNA sense strand
gagagaaaccuuauaaaug

SEQ ID NO: 1680877 - RNA, 19 nt, Homo sapiens
  misc_RNA (1)...(19): siRNA sense strand
gcuuagaccuuaauaguau

SEQ ID NO: 1680878 - RNA, 19 nt, Homo sapiens
  misc_RNA (1)...(19): siRNA sense strand
gagcucaggucuucucauu

SEQ ID NO: 1680879 - RNA, 19 nt, Homo sapiens
  misc_RNA (1)...(19): siRNA sense strand
gagaagauaucaugaaggu

SEQ ID NO: 1680880 - RNA, 19 nt, Homo sapiens
  misc_RNA (1)...(19): siRNA sense strand
gguaagaguuucagucaga

SEQ ID NO: 1680881 - RNA, 19 nt, Homo sapiens
  misc_RNA (1)...(19): siRNA sense strand
ggcaaagguuucaaucaua

SEQ ID NO: 1680882 - RNA, 19 nt, Homo sapiens
  misc_RNA (1)...(19): siRNA sense strand
agucauagcuuagaccuua

SEQ ID NO: 1680883 - RNA, 19 nt, Homo sapiens
  misc_RNA (1)...(19): siRNA sense strand
ggagagaaaccuuauaaau

SEQ ID NO: 1680884 - RNA, 19 nt, Homo sapiens
  misc_RNA (1)...(19): siRNA sense strand
gcaaagguuucaaucauag

SEQ ID NO: 1680885 - RNA, 19 nt, Homo sapiens
  misc_RNA (1)...(19): siRNA sense strand
cgucagaccuggcaacaaa

SEQ ID NO: 1680886 - RNA, 19 nt, Homo sapiens
  misc_RNA (1)...(19): siRNA sense strand
guacaaaggguuucaguga

SEQ ID NO: 1680887 - RNA, 19 nt, Homo sapiens
  misc_RNA (1)...(19): siRNA sense strand
gguaaaggcuucaguaagg

SEQ ID NO: 1680888 - RNA, 19 nt, Homo sapiens
  misc_RNA (1)...(19): siRNA sense strand
ggagaaaccaugcaaaugu

SEQ ID NO: 1680889 - RNA, 19 nt, Homo sapiens
  misc_RNA (1)...(19): siRNA sense strand
cagagaaucuacacagaaa

SEQ ID NO: 1680890 - RNA, 19 nt, Homo sapiens
  misc_RNA (1)...(19): siRNA sense strand
gcucaggucuucucauuca

SEQ ID NO: 1680891 - RNA, 19 nt, Homo sapiens
  misc_RNA (1)...(19): siRNA sense strand
gagagaagaugauauugag

SEQ ID NO: 1680892 - RNA, 19 nt, Homo sapiens
  misc_RNA (1)...(19): siRNA sense strand
caucaaagaguccauagua

SEQ ID NO: 1680893 - RNA, 19 nt, Homo sapiens
  misc_RNA (1)...(19): siRNA sense strand
ggacagaagccauacaaau

SEQ ID NO: 1680894 - RNA, 19 nt, Homo sapiens
  misc_RNA (1)...(19): siRNA sense strand
gaauggcuccaauuauaua

SEQ ID NO: 1680895 - RNA, 19 nt, Homo sapiens
  misc_RNA (1)...(19): siRNA sense strand
aguaacagcuucagccaua

SEQ ID NO: 1680896 - RNA, 19 nt, Homo sapiens
  misc_RNA (1)...(19): siRNA sense strand
gagaaaccaugcaaaugug

SEQ ID NO: 1680897 - RNA, 19 nt, Homo sapiens
  misc_RNA (1)...(19): siRNA sense strand
gagagaaaccauacaaaug

SEQ ID NO: 1680898 - RNA, 19 nt, Homo sapiens
  misc_RNA (1)...(19): siRNA sense strand
gagagaaaccauacaaaug

SEQ ID NO: 1680899 - RNA, 19 nt, Homo sapiens
  misc_RNA (1)...(19): siRNA sense strand
ccaaaggguucauguggaa

SEQ ID NO: 1680900 - RNA, 19 nt, Homo sapiens
  misc_RNA (1)...(19): siRNA sense strand
gaagaauucucaguugcaa

SEQ ID NO: 1680901 - RNA, 19 nt, Homo sapiens
  misc_RNA (1)...(19): siRNA sense strand
ggagagaaaccauacaaau

SEQ ID NO: 1680902 - RNA, 19 nt, Homo sapiens
  misc_RNA (1)...(19): siRNA sense strand
ggagagaaaccauacaaau

SEQ ID NO: 1680903 - RNA, 19 nt, Homo sapiens
  misc_RNA (1)...(19): siRNA sense strand
gaauaccaguucagauuuc

SEQ ID NO: 1680904 - RNA, 19 nt, Homo sapiens
  misc_RNA (1)...(19): siRNA sense strand
ggaauaccaguucagauuu

SEQ ID NO: 1680905 - RNA, 19 nt, Homo sapiens
  misc_RNA (1)...(19): siRNA sense strand
agagaaaccuuauaaaugc

SEQ ID NO: 1680906 - RNA, 19 nt, Homo sapiens
  misc_RNA (1)...(19): siRNA sense strand
gagagaagccauaccaaug

SEQ ID NO: 1680907 - RNA, 19 nt, Homo sapiens
  misc_RNA (1)...(19): siRNA sense strand
gagaagaugauauugagaa

SEQ ID NO: 1680908 - RNA, 19 nt, Homo sapiens
  misc_RNA (1)...(19): siRNA sense strand
gacagaagccauacaaaug

SEQ ID NO: 1680909 - RNA, 19 nt, Homo sapiens
  misc_RNA (1)...(19): siRNA sense strand
ucaguuggcucucacauca

SEQ ID NO: 1680910 - RNA, 19 nt, Homo sapiens
  misc_RNA (1)...(19): siRNA sense strand
aguaaggccucaacacuuu

SEQ ID NO: 1680911 - RNA, 19 nt, Homo sapiens
  misc_RNA (1)...(19): siRNA sense strand
gcucaaaacuuaaagauca

SEQ ID NO: 1680912 - RNA, 19 nt, Homo sapiens
  misc_RNA (1)...(19): siRNA sense strand
caggugagauguccuauag

SEQ ID NO: 1680913 - RNA, 19 nt, Homo sapiens
  misc_RNA (1)...(19): siRNA sense strand
gagaugugaugcuggagaa

SEQ ID NO: 1680914 - RNA, 19 nt, Homo sapiens
  misc_RNA (1)...(19): siRNA sense strand
ccuauaggcacaacauuua

SEQ ID NO: 1680915 - RNA, 19 nt, Homo sapiens
  misc_RNA (1)...(19): siRNA sense strand
ggaauggcuccaauuauau

SEQ ID NO: 1680916 - RNA, 19 nt, Homo sapiens
  misc_RNA (1)...(19): siRNA sense strand
gagaaaccauacaaaugug

SEQ ID NO: 1680917 - RNA, 19 nt, Homo sapiens
  misc_RNA (1)...(19): siRNA sense strand
gagaaaccauacaaaugug

SEQ ID NO: 1680918 - RNA, 19 nt, Homo sapiens
  misc_RNA (1)...(19): siRNA sense strand
aaucaggagucaauucaaa

SEQ ID NO: 1680919 - RNA, 19 nt, Homo sapiens
  misc_RNA (1)...(19): siRNA sense strand
gagugaaaccguauaaaug

SEQ ID NO: 1680920 - RNA, 19 nt, Homo sapiens
  misc_RNA (1)...(19): siRNA sense strand
cuaaggaacaaccauauaa

SEQ ID NO: 1680921 - RNA, 19 nt, Homo sapiens
  misc_RNA (1)...(19): siRNA sense strand
aaucagaguucaugucuuc

SEQ ID NO: 1680922 - RNA, 19 nt, Homo sapiens
  misc_RNA (1)...(19): siRNA sense strand
ggagaagcccuauccaugu

SEQ ID NO: 1680923 - RNA, 19 nt, Homo sapiens
  misc_RNA (1)...(19): siRNA sense strand
agagauggauguucaggaa

SEQ ID NO: 1680924 - RNA, 19 nt, Homo sapiens
  misc_RNA (1)...(19): siRNA sense strand
auacaaaugugaugcaugu

SEQ ID NO: 1680925 - RNA, 19 nt, Homo sapiens
  misc_RNA (1)...(19): siRNA sense strand
cagcuucagccauaauuua

SEQ ID NO: 1680926 - RNA, 19 nt, Homo sapiens
  misc_RNA (1)...(19): siRNA sense strand
uauaaacgcuaugugugua

SEQ ID NO: 1680927 - RNA, 19 nt, Homo sapiens
  misc_RNA (1)...(19): siRNA sense strand
cugaaagagucacauaauu

SEQ ID NO: 1680928 - RNA, 19 nt, Homo sapiens
  misc_RNA (1)...(19): siRNA sense strand
ggagaguauucaggaagua

SEQ ID NO: 1680929 - RNA, 19 nt, Homo sapiens
  misc_RNA (1)...(19): siRNA sense strand
ggaaggaagaaucaacaaa

SEQ ID NO: 1680930 - RNA, 19 nt, Homo sapiens
  misc_RNA (1)...(19): siRNA sense strand
gagcuuuccucccgucaga

SEQ ID NO: 1680931 - RNA, 19 nt, Homo sapiens
  misc_RNA (1)...(19): siRNA sense strand
acaaaggguuucagugaga

SEQ ID NO: 1680932 - RNA, 19 nt, Homo sapiens
  misc_RNA (1)...(19): siRNA sense strand
ucacaaugauaaacuggaa

SEQ ID NO: 1680933 - RNA, 19 nt, Homo sapiens
  misc_RNA (1)...(19): siRNA sense strand
gagggaaaccauacaaaug

SEQ ID NO: 1680934 - RNA, 19 nt, Homo sapiens
  misc_RNA (1)...(19): siRNA sense strand
gagagcauaucuucaaggu

SEQ ID NO: 1680935 - RNA, 19 nt, Homo sapiens
  misc_RNA (1)...(19): siRNA sense strand
acacagauauagaguaugg

SEQ ID NO: 1680936 - RNA, 19 nt, Homo sapiens
  misc_RNA (1)...(19): siRNA sense strand
aagagaaacuauacacaga

SEQ ID NO: 1680937 - RNA, 19 nt, Homo sapiens
  misc_RNA (1)...(19): siRNA sense strand
ugagagagaagaugauauu

SEQ ID NO: 1680938 - RNA, 19 nt, Homo sapiens
  misc_RNA (1)...(19): siRNA sense strand
gaaaagccuucaguaauga

SEQ ID NO: 1680939 - RNA, 19 nt, Homo sapiens
  misc_RNA (1)...(19): siRNA sense strand
gggaagcccuauacauaca

SEQ ID NO: 1680940 - RNA, 19 nt, Homo sapiens
  misc_RNA (1)...(19): siRNA sense strand
ggagggaaaccauacaaau

SEQ ID NO: 1680941 - RNA, 19 nt, Homo sapiens
  misc_RNA (1)...(19): siRNA sense strand
gauauagaguauggaaaga

SEQ ID NO: 1680942 - RNA, 19 nt, Homo sapiens
  misc_RNA (1)...(19): siRNA sense strand
guggaaagggcuguaauua

SEQ ID NO: 1680943 - RNA, 19 nt, Homo sapiens
  misc_RNA (1)...(19): siRNA sense strand
gaaagggcuguaauuauag

SEQ ID NO: 1680944 - RNA, 19 nt, Homo sapiens
  misc_RNA (1)...(19): siRNA sense strand
gagaaucuacacagaaaug

SEQ ID NO: 1680945 - RNA, 19 nt, Homo sapiens
  misc_RNA (1)...(19): siRNA sense strand
gguaaggguuuccguugga

SEQ ID NO: 1680946 - RNA, 19 nt, Homo sapiens
  misc_RNA (1)...(19): siRNA sense strand
guauaaaugugagaugugu

SEQ ID NO: 1680947 - RNA, 19 nt, Homo sapiens
  misc_RNA (1)...(19): siRNA sense strand
gagaagccauaccaaugug

SEQ ID NO: 1680948 - RNA, 19 nt, Homo sapiens
  misc_RNA (1)...(19): siRNA sense strand
ggagagaagccauaccaau

SEQ ID NO: 1680949 - RNA, 19 nt, Homo sapiens
  misc_RNA (1)...(19): siRNA sense strand
ggguucaguuggagcuuua

SEQ ID NO: 1680950 - RNA, 19 nt, Homo sapiens
  misc_RNA (1)...(19): siRNA sense strand
gcaaauguggugaauaugg

SEQ ID NO: 1680951 - RNA, 19 nt, Homo sapiens
  misc_RNA (1)...(19): siRNA sense strand
caguguagaugucagcaaa

SEQ ID NO: 1680952 - RNA, 19 nt, Homo sapiens
  misc_RNA (1)...(19): siRNA sense strand
cuauaaaugugaacagugu

SEQ ID NO: 1680953 - RNA, 19 nt, Homo sapiens
  misc_RNA (1)...(19): siRNA sense strand
gaggagaaaccaugcaaau

SEQ ID NO: 1680954 - RNA, 19 nt, Homo sapiens
  misc_RNA (1)...(19): siRNA sense strand
ggagggcacaucauucuug

SEQ ID NO: 1680955 - RNA, 19 nt, Homo sapiens
  misc_RNA (1)...(19): siRNA sense strand
caucagagaguccacacua

SEQ ID NO: 1680956 - RNA, 19 nt, Homo sapiens
  misc_RNA (1)...(19): siRNA sense strand
ucagagagcauaucuucaa

SEQ ID NO: 1680957 - RNA, 19 nt, Homo sapiens
  misc_RNA (1)...(19): siRNA sense strand
cggcaaagguuucaaucau

SEQ ID NO: 1680958 - RNA, 19 nt, Homo sapiens
  misc_RNA (1)...(19): siRNA sense strand
ggcacaacauuuaugagaa

SEQ ID NO: 1680959 - RNA, 19 nt, Homo sapiens
  misc_RNA (1)...(19): siRNA sense strand
caaauguggugaauauggu

SEQ ID NO: 1680960 - RNA, 19 nt, Homo sapiens
  misc_RNA (1)...(19): siRNA sense strand
augcaaauguggugaauau

SEQ ID NO: 1680961 - RNA, 19 nt, Homo sapiens
  misc_RNA (1)...(19): siRNA sense strand
caaagaguccauaguagug

SEQ ID NO: 1680962 - RNA, 19 nt, Homo sapiens
  misc_RNA (1)...(19): siRNA sense strand
ccauaguagugauaaauuc

SEQ ID NO: 1680963 - RNA, 19 nt, Homo sapiens
  misc_RNA (1)...(19): siRNA sense strand
guacuugacugccgagauc

SEQ ID NO: 1680964 - RNA, 19 nt, Homo sapiens
  misc_RNA (1)...(19): siRNA sense strand
guacugcugcccaagaaga

SEQ ID NO: 1680965 - RNA, 19 nt, Homo sapiens
  misc_RNA (1)...(19): siRNA sense strand
caagaagacgcgcaucauc

SEQ ID NO: 1680966 - RNA, 19 nt, Homo sapiens
  misc_RNA (1)...(19): siRNA sense strand
ccgcggugcucgaguacuu

SEQ ID NO: 1680967 - RNA, 19 nt, Homo sapiens
  misc_RNA (1)...(19): siRNA sense strand
caacauccaggccguacug

SEQ ID NO: 1680968 - RNA, 19 nt, Homo sapiens
  misc_RNA (1)...(19): siRNA sense strand
ccguacugcugcccaagaa

SEQ ID NO: 1680969 - RNA, 19 nt, Homo sapiens
  misc_RNA (1)...(19): siRNA sense strand
gcaacgacgaggagcucaa

SEQ ID NO: 1680970 - RNA, 19 nt, Homo sapiens
  misc_RNA (1)...(19): siRNA sense strand
agacggagagccaccacaa

SEQ ID NO: 1680971 - RNA, 19 nt, Homo sapiens
  misc_RNA (1)...(19): siRNA sense strand
cgacgaggagcucaacaag

SEQ ID NO: 1680972 - RNA, 19 nt, Homo sapiens
  misc_RNA (1)...(19): siRNA sense strand
caaggccaagggcaaguga

SEQ ID NO: 1680973 - RNA, 19 nt, Homo sapiens
  misc_RNA (1)...(19): siRNA sense strand
ggaguuaguucaccauauu

SEQ ID NO: 1680974 - RNA, 19 nt, Homo sapiens
  misc_RNA (1)...(19): siRNA sense strand
caacaugggcuuccucuuu

SEQ ID NO: 1680975 - RNA, 19 nt, Homo sapiens
  misc_RNA (1)...(19): siRNA sense strand
gaucaggucuccagaguag

SEQ ID NO: 1680976 - RNA, 19 nt, Homo sapiens
  misc_RNA (1)...(19): siRNA sense strand
cagaguagauccugaaaug

SEQ ID NO: 1680977 - RNA, 19 nt, Homo sapiens
  misc_RNA (1)...(19): siRNA sense strand
gaaaugaggauccguuuua

SEQ ID NO: 1680978 - RNA, 19 nt, Homo sapiens
  misc_RNA (1)...(19): siRNA sense strand
gagggacucuucugcauau

SEQ ID NO: 1680979 - RNA, 19 nt, Homo sapiens
  misc_RNA (1)...(19): siRNA sense strand
gaccuaugcugaugucaug

SEQ ID NO: 1680980 - RNA, 19 nt, Homo sapiens
  misc_RNA (1)...(19): siRNA sense strand
gagaggagucggccuauug

SEQ ID NO: 1680981 - RNA, 19 nt, Homo sapiens
  misc_RNA (1)...(19): siRNA sense strand
uggaggaacucaucacuau

SEQ ID NO: 1680982 - RNA, 19 nt, Homo sapiens
  misc_RNA (1)...(19): siRNA sense strand
ggaaugauggaaaccuuaa

SEQ ID NO: 1680983 - RNA, 19 nt, Homo sapiens
  misc_RNA (1)...(19): siRNA sense strand
ccaagaggcagaugugauu

SEQ ID NO: 1680984 - RNA, 19 nt, Homo sapiens
  misc_RNA (1)...(19): siRNA sense strand
gagagaaaaugguagauau

SEQ ID NO: 1680985 - RNA, 19 nt, Homo sapiens
  misc_RNA (1)...(19): siRNA sense strand
gcuacugcauuguuccuuu

SEQ ID NO: 1680986 - RNA, 19 nt, Homo sapiens
  misc_RNA (1)...(19): siRNA sense strand
gauauucaagagaagcuua

SEQ ID NO: 1680987 - RNA, 19 nt, Homo sapiens
  misc_RNA (1)...(19): siRNA sense strand
ggagaggagucggccuauu

SEQ ID NO: 1680988 - RNA, 19 nt, Homo sapiens
  misc_RNA (1)...(19): siRNA sense strand
ggucagaauguuaauaguu

SEQ ID NO: 1680989 - RNA, 19 nt, Homo sapiens
  misc_RNA (1)...(19): siRNA sense strand
gauagccugguccaucuua

SEQ ID NO: 1680990 - RNA, 19 nt, Homo sapiens
  misc_RNA (1)...(19): siRNA sense strand
gcgaggcugugacaacaug

SEQ ID NO: 1680991 - RNA, 19 nt, Homo sapiens
  misc_RNA (1)...(19): siRNA sense strand
gauggaggaugucaauaac

SEQ ID NO: 1680992 - RNA, 19 nt, Homo sapiens
  misc_RNA (1)...(19): siRNA sense strand
cuuaaagccuugaagacaa

SEQ ID NO: 1680993 - RNA, 19 nt, Homo sapiens
  misc_RNA (1)...(19): siRNA sense strand
aaggugaucuucccugaug

SEQ ID NO: 1680994 - RNA, 19 nt, Homo sapiens
  misc_RNA (1)...(19): siRNA sense strand
ccuauugccuccauucuag

SEQ ID NO: 1680995 - RNA, 19 nt, Homo sapiens
  misc_RNA (1)...(19): siRNA sense strand
gacgagaccuaugcugaug

SEQ ID NO: 1680996 - RNA, 19 nt, Homo sapiens
  misc_RNA (1)...(19): siRNA sense strand
gcagcugauucaugagaga

SEQ ID NO: 1680997 - RNA, 19 nt, Homo sapiens
  misc_RNA (1)...(19): siRNA sense strand
gaguuaguucaccauauua

SEQ ID NO: 1680998 - RNA, 19 nt, Homo sapiens
  misc_RNA (1)...(19): siRNA sense strand
gggacuaugugcuggugaa

SEQ ID NO: 1680999 - RNA, 19 nt, Homo sapiens
  misc_RNA (1)...(19): siRNA sense strand
ggacgagaccuaugcugau

SEQ ID NO: 1681000 - RNA, 19 nt, Homo sapiens
  misc_RNA (1)...(19): siRNA sense strand
ggacucuucugcauauugc

SEQ ID NO: 1681001 - RNA, 19 nt, Homo sapiens
  misc_RNA (1)...(19): siRNA sense strand
aacaugggcuuccucuuug

SEQ ID NO: 1681002 - RNA, 19 nt, Homo sapiens
  misc_RNA (1)...(19): siRNA sense strand
caaucucagucguggcuuu

SEQ ID NO: 1681003 - RNA, 19 nt, Homo sapiens
  misc_RNA (1)...(19): siRNA sense strand
gcuuuaccaccaacuauaa

SEQ ID NO: 1681004 - RNA, 19 nt, Homo sapiens
  misc_RNA (1)...(19): siRNA sense strand
agauggaggaugucaauaa

SEQ ID NO: 1681005 - RNA, 19 nt, Homo sapiens
  misc_RNA (1)...(19): siRNA sense strand
caacagagagaaaauggua

SEQ ID NO: 1681006 - RNA, 19 nt, Homo sapiens
  misc_RNA (1)...(19): siRNA sense strand
gaggaacucaucacuaucu

SEQ ID NO: 1681007 - RNA, 19 nt, Homo sapiens
  misc_RNA (1)...(19): siRNA sense strand
gaccaucuggaaccguuua

SEQ ID NO: 1681008 - RNA, 19 nt, Homo sapiens
  misc_RNA (1)...(19): siRNA sense strand
caggaaugauggaaaccuu

SEQ ID NO: 1681009 - RNA, 19 nt, Homo sapiens
  misc_RNA (1)...(19): siRNA sense strand
cgauuucauugcuggcuuu

SEQ ID NO: 1681010 - RNA, 19 nt, Homo sapiens
  misc_RNA (1)...(19): siRNA sense strand
gaguagauccugaaaugag

SEQ ID NO: 1681011 - RNA, 19 nt, Homo sapiens
  misc_RNA (1)...(19): siRNA sense strand
gcugccagaugaaugugaa

SEQ ID NO: 1681012 - RNA, 19 nt, Homo sapiens
  misc_RNA (1)...(19): siRNA sense strand
augcagagauggaggaugu

SEQ ID NO: 1681013 - RNA, 19 nt, Homo sapiens
  misc_RNA (1)...(19): siRNA sense strand
aagcuuauguggaguuagu

SEQ ID NO: 1681014 - RNA, 19 nt, Homo sapiens
  misc_RNA (1)...(19): siRNA sense strand
gcaaggaggacuucguuuu

SEQ ID NO: 1681015 - RNA, 19 nt, Homo sapiens
  misc_RNA (1)...(19): siRNA sense strand
gaugugauucuccuuguca

SEQ ID NO: 1681016 - RNA, 19 nt, Homo sapiens
  misc_RNA (1)...(19): siRNA sense strand
agaagcuuauguggaguua

SEQ ID NO: 1681017 - RNA, 19 nt, Homo sapiens
  misc_RNA (1)...(19): siRNA sense strand
gaggggauauucaagagaa

SEQ ID NO: 1681018 - RNA, 19 nt, Homo sapiens
  misc_RNA (1)...(19): siRNA sense strand
cagaugugauucuccuugu

SEQ ID NO: 1681019 - RNA, 19 nt, Homo sapiens
  misc_RNA (1)...(19): siRNA sense strand
gacaacauguguagcuacu

SEQ ID NO: 1681020 - RNA, 19 nt, Homo sapiens
  misc_RNA (1)...(19): siRNA sense strand
ccaacgugcugcucucucu

SEQ ID NO: 1681021 - RNA, 19 nt, Homo sapiens
  misc_RNA (1)...(19): siRNA sense strand
gugacaacauguguagcua

SEQ ID NO: 1681022 - RNA, 19 nt, Homo sapiens
  misc_RNA (1)...(19): siRNA sense strand
guaaacgcucugccacuga

SEQ ID NO: 1681023 - RNA, 19 nt, Homo sapiens
  misc_RNA (1)...(19): siRNA sense strand
gacagaagacacgggcaua

SEQ ID NO: 1681024 - RNA, 19 nt, Homo sapiens
  misc_RNA (1)...(19): siRNA sense strand
ggaaguucaguacaacaug

SEQ ID NO: 1681025 - RNA, 19 nt, Homo sapiens
  misc_RNA (1)...(19): siRNA sense strand
gagaagcuuauguggaguu

SEQ ID NO: 1681026 - RNA, 19 nt, Homo sapiens
  misc_RNA (1)...(19): siRNA sense strand
gaagacacgggcauaucau

SEQ ID NO: 1681027 - RNA, 19 nt, Homo sapiens
  misc_RNA (1)...(19): siRNA sense strand
ugagggacucuucugcaua

SEQ ID NO: 1681028 - RNA, 19 nt, Homo sapiens
  misc_RNA (1)...(19): siRNA sense strand
gggcauaucauaggcugaa

SEQ ID NO: 1681029 - RNA, 19 nt, Homo sapiens
  misc_RNA (1)...(19): siRNA sense strand
uagaggaagugaagaagcu

SEQ ID NO: 1681030 - RNA, 19 nt, Homo sapiens
  misc_RNA (1)...(19): siRNA sense strand
aggaugaugucccggaaga

SEQ ID NO: 1681031 - RNA, 19 nt, Homo sapiens
  misc_RNA (1)...(19): siRNA sense strand
ccucagcagcgauuucauu

SEQ ID NO: 1681032 - RNA, 19 nt, Homo sapiens
  misc_RNA (1)...(19): siRNA sense strand
gaagcagccguguguugga

SEQ ID NO: 1681033 - RNA, 19 nt, Homo sapiens
  misc_RNA (1)...(19): siRNA sense strand
uugcucaucuucuggauca

SEQ ID NO: 1681034 - RNA, 19 nt, Homo sapiens
  misc_RNA (1)...(19): siRNA sense strand
gaggaagugaagaagcuuu

SEQ ID NO: 1681035 - RNA, 19 nt, Homo sapiens
  misc_RNA (1)...(19): siRNA sense strand
cuacugcauuguuccuuuc

SEQ ID NO: 1681036 - RNA, 19 nt, Homo sapiens
  misc_RNA (1)...(19): siRNA sense strand
acuaugugcuggugaagau

SEQ ID NO: 1681037 - RNA, 19 nt, Homo sapiens
  misc_RNA (1)...(19): siRNA sense strand
agaagacacgggcauauca

SEQ ID NO: 1681038 - RNA, 19 nt, Homo sapiens
  misc_RNA (1)...(19): siRNA sense strand
ggaucaggucuccagagua

SEQ ID NO: 1681039 - RNA, 19 nt, Homo sapiens
  misc_RNA (1)...(19): siRNA sense strand
ucugaggauuggaauucua

SEQ ID NO: 1681040 - RNA, 19 nt, Homo sapiens
  misc_RNA (1)...(19): siRNA sense strand
ccugguccaucuuacagaa

SEQ ID NO: 1681041 - RNA, 19 nt, Homo sapiens
  misc_RNA (1)...(19): siRNA sense strand
ggaccaguaaccuccaaga

SEQ ID NO: 1681042 - RNA, 19 nt, Homo sapiens
  misc_RNA (1)...(19): siRNA sense strand
ggcuuuaccaccaacuaua

SEQ ID NO: 1681043 - RNA, 19 nt, Homo sapiens
  misc_RNA (1)...(19): siRNA sense strand
gugcagugccuaccaaucu

SEQ ID NO: 1681044 - RNA, 19 nt, Homo sapiens
  misc_RNA (1)...(19): siRNA sense strand
aagaucaccucagccaguu

SEQ ID NO: 1681045 - RNA, 19 nt, Homo sapiens
  misc_RNA (1)...(19): siRNA sense strand
gagauggaggaugucaaua

SEQ ID NO: 1681046 - RNA, 19 nt, Homo sapiens
  misc_RNA (1)...(19): siRNA sense strand
guacccaguuggugcuagu

SEQ ID NO: 1681047 - RNA, 19 nt, Homo sapiens
  misc_RNA (1)...(19): siRNA sense strand
cgagaccuaugcugauguc

SEQ ID NO: 1681048 - RNA, 19 nt, Homo sapiens
  misc_RNA (1)...(19): siRNA sense strand
ggaagaucacguccagaca

SEQ ID NO: 1681049 - RNA, 19 nt, Homo sapiens
  misc_RNA (1)...(19): siRNA sense strand
guggugagacggaggaaga

SEQ ID NO: 1681050 - RNA, 19 nt, Homo sapiens
  misc_RNA (1)...(19): siRNA sense strand
gccagaugaaugugaauga

SEQ ID NO: 1681051 - RNA, 19 nt, Homo sapiens
  misc_RNA (1)...(19): siRNA sense strand
uggaguuaguucaccauau

SEQ ID NO: 1681052 - RNA, 19 nt, Homo sapiens
  misc_RNA (1)...(19): siRNA sense strand
gggacucuucugcauauug

SEQ ID NO: 1681053 - RNA, 19 nt, Homo sapiens
  misc_RNA (1)...(19): siRNA sense strand
cuugucacaugcucuauca

SEQ ID NO: 1681054 - RNA, 19 nt, Homo sapiens
  misc_RNA (1)...(19): siRNA sense strand
auguguagcuacugcauug

SEQ ID NO: 1681055 - RNA, 19 nt, Homo sapiens
  misc_RNA (1)...(19): siRNA sense strand
gcagagauggaggauguca

SEQ ID NO: 1681056 - RNA, 19 nt, Homo sapiens
  misc_RNA (1)...(19): siRNA sense strand
ggaacucaucacuaucuuc

SEQ ID NO: 1681057 - RNA, 19 nt, Homo sapiens
  misc_RNA (1)...(19): siRNA sense strand
acagugcagugccuaccaa

SEQ ID NO: 1681058 - RNA, 19 nt, Homo sapiens
  misc_RNA (1)...(19): siRNA sense strand
auucggagguccaguucaa

SEQ ID NO: 1681059 - RNA, 19 nt, Homo sapiens
  misc_RNA (1)...(19): siRNA sense strand
cgucugccuuugugucaau

SEQ ID NO: 1681060 - RNA, 19 nt, Homo sapiens
  misc_RNA (1)...(19): siRNA sense strand
aagacacgggcauaucaua

SEQ ID NO: 1681061 - RNA, 19 nt, Homo sapiens
  misc_RNA (1)...(19): siRNA sense strand
ggauuuuccugaugagguu

SEQ ID NO: 1681062 - RNA, 19 nt, Homo sapiens
  misc_RNA (1)...(19): siRNA sense strand
gccuauugccuccauucua

SEQ ID NO: 1681063 - RNA, 19 nt, Homo sapiens
  misc_RNA (1)...(19): siRNA sense strand
gcugugacaacauguguag

SEQ ID NO: 1681064 - RNA, 19 nt, Homo sapiens
  misc_RNA (1)...(19): siRNA sense strand
agagauggaggaugucaau

SEQ ID NO: 1681065 - RNA, 19 nt, Homo sapiens
  misc_RNA (1)...(19): siRNA sense strand
gggaaguucaguacaacau

SEQ ID NO: 1681066 - RNA, 19 nt, Homo sapiens
  misc_RNA (1)...(19): siRNA sense strand
acaauucggagguccaguu

SEQ ID NO: 1681067 - RNA, 19 nt, Homo sapiens
  misc_RNA (1)...(19): siRNA sense strand
uccgggaaguucaguacaa

SEQ ID NO: 1681068 - RNA, 19 nt, Homo sapiens
  misc_RNA (1)...(19): siRNA sense strand
uggaagggcucaguaaacg

SEQ ID NO: 1681069 - RNA, 19 nt, Homo sapiens
  misc_RNA (1)...(19): siRNA sense strand
ugaugucccggaagaggua

SEQ ID NO: 1681070 - RNA, 19 nt, Homo sapiens
  misc_RNA (1)...(19): siRNA sense strand
cauaucauaggcugaagga

SEQ ID NO: 1681071 - RNA, 19 nt, Homo sapiens
  misc_RNA (1)...(19): siRNA sense strand
gccuacagcaugagacaga

SEQ ID NO: 1681072 - RNA, 19 nt, Homo sapiens
  misc_RNA (1)...(19): siRNA sense strand
ugauucuccuugucacaug

SEQ ID NO: 1681073 - RNA, 19 nt, Homo sapiens
  misc_RNA (1)...(19): siRNA sense strand
ggaguuaguucaccauauu

SEQ ID NO: 1681074 - RNA, 19 nt, Homo sapiens
  misc_RNA (1)...(19): siRNA sense strand
caacaugggcuuccucuuu

SEQ ID NO: 1681075 - RNA, 19 nt, Homo sapiens
  misc_RNA (1)...(19): siRNA sense strand
gaucaggucuccagaguag

SEQ ID NO: 1681076 - RNA, 19 nt, Homo sapiens
  misc_RNA (1)...(19): siRNA sense strand
cagaguagauccugaaaug

SEQ ID NO: 1681077 - RNA, 19 nt, Homo sapiens
  misc_RNA (1)...(19): siRNA sense strand
gaaaugaggauccguuuua

SEQ ID NO: 1681078 - RNA, 19 nt, Homo sapiens
  misc_RNA (1)...(19): siRNA sense strand
gagggacucuucugcauau

SEQ ID NO: 1681079 - RNA, 19 nt, Homo sapiens
  misc_RNA (1)...(19): siRNA sense strand
gaccuaugcugaugucaug

SEQ ID NO: 1681080 - RNA, 19 nt, Homo sapiens
  misc_RNA (1)...(19): siRNA sense strand
gagaggagucggccuauug

SEQ ID NO: 1681081 - RNA, 19 nt, Homo sapiens
  misc_RNA (1)...(19): siRNA sense strand
uggaggaacucaucacuau

SEQ ID NO: 1681082 - RNA, 19 nt, Homo sapiens
  misc_RNA (1)...(19): siRNA sense strand
ggaaugauggaaaccuuaa

SEQ ID NO: 1681083 - RNA, 19 nt, Homo sapiens
  misc_RNA (1)...(19): siRNA sense strand
ccaagaggcagaugugauu

SEQ ID NO: 1681084 - RNA, 19 nt, Homo sapiens
  misc_RNA (1)...(19): siRNA sense strand
caugauggaugaacuucuu

SEQ ID NO: 1681085 - RNA, 19 nt, Homo sapiens
  misc_RNA (1)...(19): siRNA sense strand
ggauggagcucggaaggau

SEQ ID NO: 1681086 - RNA, 19 nt, Homo sapiens
  misc_RNA (1)...(19): siRNA sense strand
gcuacugcauuguuccuuu

SEQ ID NO: 1681087 - RNA, 19 nt, Homo sapiens
  misc_RNA (1)...(19): siRNA sense strand
gagagaaaaugguagauau

SEQ ID NO: 1681088 - RNA, 19 nt, Homo sapiens
  misc_RNA (1)...(19): siRNA sense strand
ccaccucccuaucucauga

SEQ ID NO: 1681089 - RNA, 19 nt, Homo sapiens
  misc_RNA (1)...(19): siRNA sense strand
gauauucaagagaagcuua

SEQ ID NO: 1681090 - RNA, 19 nt, Homo sapiens
  misc_RNA (1)...(19): siRNA sense strand
ggagaggagucggccuauu

SEQ ID NO: 1681091 - RNA, 19 nt, Homo sapiens
  misc_RNA (1)...(19): siRNA sense strand
ggucagaauguuaauaguu

SEQ ID NO: 1681092 - RNA, 19 nt, Homo sapiens
  misc_RNA (1)...(19): siRNA sense strand
gauagccugguccaucuua

SEQ ID NO: 1681093 - RNA, 19 nt, Homo sapiens
  misc_RNA (1)...(19): siRNA sense strand
gcgaggcugugacaacaug

SEQ ID NO: 1681094 - RNA, 19 nt, Homo sapiens
  misc_RNA (1)...(19): siRNA sense strand
gauggaggaugucaauaac

SEQ ID NO: 1681095 - RNA, 19 nt, Homo sapiens
  misc_RNA (1)...(19): siRNA sense strand
cuuaaagccuugaagacaa

SEQ ID NO: 1681096 - RNA, 19 nt, Homo sapiens
  misc_RNA (1)...(19): siRNA sense strand
aaggugaucuucccugaug

SEQ ID NO: 1681097 - RNA, 19 nt, Homo sapiens
  misc_RNA (1)...(19): siRNA sense strand
ccuauugccuccauucuag

SEQ ID NO: 1681098 - RNA, 19 nt, Homo sapiens
  misc_RNA (1)...(19): siRNA sense strand
gacgagaccuaugcugaug

SEQ ID NO: 1681099 - RNA, 19 nt, Homo sapiens
  misc_RNA (1)...(19): siRNA sense strand
ggaagacccaccucccuau

SEQ ID NO: 1681100 - RNA, 19 nt, Homo sapiens
  misc_RNA (1)...(19): siRNA sense strand
gcagcugauucaugagaga

SEQ ID NO: 1681101 - RNA, 19 nt, Homo sapiens
  misc_RNA (1)...(19): siRNA sense strand
gaguuaguucaccauauua

SEQ ID NO: 1681102 - RNA, 19 nt, Homo sapiens
  misc_RNA (1)...(19): siRNA sense strand
gggacuaugugcuggugaa

SEQ ID NO: 1681103 - RNA, 19 nt, Homo sapiens
  misc_RNA (1)...(19): siRNA sense strand
ggacgagaccuaugcugau

SEQ ID NO: 1681104 - RNA, 19 nt, Homo sapiens
  misc_RNA (1)...(19): siRNA sense strand
ggacucuucugcauauugc

SEQ ID NO: 1681105 - RNA, 19 nt, Homo sapiens
  misc_RNA (1)...(19): siRNA sense strand
aacaugggcuuccucuuug

SEQ ID NO: 1681106 - RNA, 19 nt, Homo sapiens
  misc_RNA (1)...(19): siRNA sense strand
caaucucagucguggcuuu

SEQ ID NO: 1681107 - RNA, 19 nt, Homo sapiens
  misc_RNA (1)...(19): siRNA sense strand
gcuuuaccaccaacuauaa

SEQ ID NO: 1681108 - RNA, 19 nt, Homo sapiens
  misc_RNA (1)...(19): siRNA sense strand
agauggaggaugucaauaa

SEQ ID NO: 1681109 - RNA, 19 nt, Homo sapiens
  misc_RNA (1)...(19): siRNA sense strand
caacagagagaaaauggua

SEQ ID NO: 1681110 - RNA, 19 nt, Homo sapiens
  misc_RNA (1)...(19): siRNA sense strand
gaggaacucaucacuaucu

SEQ ID NO: 1681111 - RNA, 19 nt, Homo sapiens
  misc_RNA (1)...(19): siRNA sense strand
ggaccgacuuuucaacauu

SEQ ID NO: 1681112 - RNA, 19 nt, Homo sapiens
  misc_RNA (1)...(19): siRNA sense strand
gaccaucuggaaccguuua

SEQ ID NO: 1681113 - RNA, 19 nt, Homo sapiens
  misc_RNA (1)...(19): siRNA sense strand
caggaaugauggaaaccuu

SEQ ID NO: 1681114 - RNA, 19 nt, Homo sapiens
  misc_RNA (1)...(19): siRNA sense strand
cgauuucauugcuggcuuu

SEQ ID NO: 1681115 - RNA, 19 nt, Homo sapiens
  misc_RNA (1)...(19): siRNA sense strand
gaguagauccugaaaugag

SEQ ID NO: 1681116 - RNA, 19 nt, Homo sapiens
  misc_RNA (1)...(19): siRNA sense strand
gcugccagaugaaugugaa

SEQ ID NO: 1681117 - RNA, 19 nt, Homo sapiens
  misc_RNA (1)...(19): siRNA sense strand
augcagagauggaggaugu

SEQ ID NO: 1681118 - RNA, 19 nt, Homo sapiens
  misc_RNA (1)...(19): siRNA sense strand
aagcuuauguggaguuagu

SEQ ID NO: 1681119 - RNA, 19 nt, Homo sapiens
  misc_RNA (1)...(19): siRNA sense strand
gcaaggaggacuucguuuu

SEQ ID NO: 1681120 - RNA, 19 nt, Homo sapiens
  misc_RNA (1)...(19): siRNA sense strand
gaugugauucuccuuguca

SEQ ID NO: 1681121 - RNA, 19 nt, Homo sapiens
  misc_RNA (1)...(19): siRNA sense strand
agaagcuuauguggaguua

SEQ ID NO: 1681122 - RNA, 19 nt, Homo sapiens
  misc_RNA (1)...(19): siRNA sense strand
gaggggauauucaagagaa

SEQ ID NO: 1681123 - RNA, 19 nt, Homo sapiens
  misc_RNA (1)...(19): siRNA sense strand
cagaugugauucuccuugu

SEQ ID NO: 1681124 - RNA, 19 nt, Homo sapiens
  misc_RNA (1)...(19): siRNA sense strand
gacaacauguguagcuacu

SEQ ID NO: 1681125 - RNA, 19 nt, Homo sapiens
  misc_RNA (1)...(19): siRNA sense strand
ccaacgugcugcucucucu

SEQ ID NO: 1681126 - RNA, 19 nt, Homo sapiens
  misc_RNA (1)...(19): siRNA sense strand
gugacaacauguguagcua

SEQ ID NO: 1681127 - RNA, 19 nt, Homo sapiens
  misc_RNA (1)...(19): siRNA sense strand
guaaacgcucugccacuga

SEQ ID NO: 1681128 - RNA, 19 nt, Homo sapiens
  misc_RNA (1)...(19): siRNA sense strand
gacagaagacacgggcaua

SEQ ID NO: 1681129 - RNA, 19 nt, Homo sapiens
  misc_RNA (1)...(19): siRNA sense strand
ggaaguucaguacaacaug

SEQ ID NO: 1681130 - RNA, 19 nt, Homo sapiens
  misc_RNA (1)...(19): siRNA sense strand
gagaagcuuauguggaguu

SEQ ID NO: 1681131 - RNA, 19 nt, Homo sapiens
  misc_RNA (1)...(19): siRNA sense strand
gaagacacgggcauaucau

SEQ ID NO: 1681132 - RNA, 19 nt, Homo sapiens
  misc_RNA (1)...(19): siRNA sense strand
ugagggacucuucugcaua

SEQ ID NO: 1681133 - RNA, 19 nt, Homo sapiens
  misc_RNA (1)...(19): siRNA sense strand
gggcauaucauaggcugaa

SEQ ID NO: 1681134 - RNA, 19 nt, Homo sapiens
  misc_RNA (1)...(19): siRNA sense strand
uagaggaagugaagaagcu

SEQ ID NO: 1681135 - RNA, 19 nt, Homo sapiens
  misc_RNA (1)...(19): siRNA sense strand
aggaugaugucccggaaga

SEQ ID NO: 1681136 - RNA, 19 nt, Homo sapiens
  misc_RNA (1)...(19): siRNA sense strand
ccucagcagcgauuucauu

SEQ ID NO: 1681137 - RNA, 19 nt, Homo sapiens
  misc_RNA (1)...(19): siRNA sense strand
gaagcagccguguguugga

SEQ ID NO: 1681138 - RNA, 19 nt, Homo sapiens
  misc_RNA (1)...(19): siRNA sense strand
uugcucaucuucuggauca

SEQ ID NO: 1681139 - RNA, 19 nt, Homo sapiens
  misc_RNA (1)...(19): siRNA sense strand
gaggaagugaagaagcuuu

SEQ ID NO: 1681140 - RNA, 19 nt, Homo sapiens
  misc_RNA (1)...(19): siRNA sense strand
cuacugcauuguuccuuuc

SEQ ID NO: 1681141 - RNA, 19 nt, Homo sapiens
  misc_RNA (1)...(19): siRNA sense strand
acuaugugcuggugaagau

SEQ ID NO: 1681142 - RNA, 19 nt, Homo sapiens
  misc_RNA (1)...(19): siRNA sense strand
agaagacacgggcauauca

SEQ ID NO: 1681143 - RNA, 19 nt, Homo sapiens
  misc_RNA (1)...(19): siRNA sense strand
ggaucaggucuccagagua

SEQ ID NO: 1681144 - RNA, 19 nt, Homo sapiens
  misc_RNA (1)...(19): siRNA sense strand
ucugaggauuggaauucua

SEQ ID NO: 1681145 - RNA, 19 nt, Homo sapiens
  misc_RNA (1)...(19): siRNA sense strand
ccugguccaucuuacagaa

SEQ ID NO: 1681146 - RNA, 19 nt, Homo sapiens
  misc_RNA (1)...(19): siRNA sense strand
ggaccaguaaccuccaaga

SEQ ID NO: 1681147 - RNA, 19 nt, Homo sapiens
  misc_RNA (1)...(19): siRNA sense strand
ggcuuuaccaccaacuaua

SEQ ID NO: 1681148 - RNA, 19 nt, Homo sapiens
  misc_RNA (1)...(19): siRNA sense strand
gaccgacuuuucaacauuu

SEQ ID NO: 1681149 - RNA, 19 nt, Homo sapiens
  misc_RNA (1)...(19): siRNA sense strand
gaagacccaccucccuauc

SEQ ID NO: 1681150 - RNA, 19 nt, Homo sapiens
  misc_RNA (1)...(19): siRNA sense strand
aagaucaccucagccaguu

SEQ ID NO: 1681151 - RNA, 19 nt, Homo sapiens
  misc_RNA (1)...(19): siRNA sense strand
gagauggaggaugucaaua

SEQ ID NO: 1681152 - RNA, 19 nt, Homo sapiens
  misc_RNA (1)...(19): siRNA sense strand
guacccaguuggugcuagu

SEQ ID NO: 1681153 - RNA, 19 nt, Homo sapiens
  misc_RNA (1)...(19): siRNA sense strand
gugcagugccuaccaaucu

SEQ ID NO: 1681154 - RNA, 19 nt, Homo sapiens
  misc_RNA (1)...(19): siRNA sense strand
gccagaugaaugugaauga

SEQ ID NO: 1681155 - RNA, 19 nt, Homo sapiens
  misc_RNA (1)...(19): siRNA sense strand
ggaagaucacguccagaca

SEQ ID NO: 1681156 - RNA, 19 nt, Homo sapiens
  misc_RNA (1)...(19): siRNA sense strand
guggugagacggaggaaga

SEQ ID NO: 1681157 - RNA, 19 nt, Homo sapiens
  misc_RNA (1)...(19): siRNA sense strand
cgagaccuaugcugauguc

SEQ ID NO: 1681158 - RNA, 19 nt, Homo sapiens
  misc_RNA (1)...(19): siRNA sense strand
uggaguuaguucaccauau

SEQ ID NO: 1681159 - RNA, 19 nt, Homo sapiens
  misc_RNA (1)...(19): siRNA sense strand
gggacucuucugcauauug

SEQ ID NO: 1681160 - RNA, 19 nt, Homo sapiens
  misc_RNA (1)...(19): siRNA sense strand
cuugucacaugcucuauca

SEQ ID NO: 1681161 - RNA, 19 nt, Homo sapiens
  misc_RNA (1)...(19): siRNA sense strand
auguguagcuacugcauug

SEQ ID NO: 1681162 - RNA, 19 nt, Homo sapiens
  misc_RNA (1)...(19): siRNA sense strand
gcagagauggaggauguca

SEQ ID NO: 1681163 - RNA, 19 nt, Homo sapiens
  misc_RNA (1)...(19): siRNA sense strand
ggaacucaucacuaucuuc

SEQ ID NO: 1681164 - RNA, 19 nt, Homo sapiens
  misc_RNA (1)...(19): siRNA sense strand
acagugcagugccuaccaa

SEQ ID NO: 1681165 - RNA, 19 nt, Homo sapiens
  misc_RNA (1)...(19): siRNA sense strand
auucggagguccaguucaa

SEQ ID NO: 1681166 - RNA, 19 nt, Homo sapiens
  misc_RNA (1)...(19): siRNA sense strand
cgucugccuuugugucaau

SEQ ID NO: 1681167 - RNA, 19 nt, Homo sapiens
  misc_RNA (1)...(19): siRNA sense strand
aagacacgggcauaucaua

SEQ ID NO: 1681168 - RNA, 19 nt, Homo sapiens
  misc_RNA (1)...(19): siRNA sense strand
ggauuuuccugaugagguu

SEQ ID NO: 1681169 - RNA, 19 nt, Homo sapiens
  misc_RNA (1)...(19): siRNA sense strand
gccuauugccuccauucua

SEQ ID NO: 1681170 - RNA, 19 nt, Homo sapiens
  misc_RNA (1)...(19): siRNA sense strand
acaauucggagguccaguu

SEQ ID NO: 1681171 - RNA, 19 nt, Homo sapiens
  misc_RNA (1)...(19): siRNA sense strand
agagauggaggaugucaau

SEQ ID NO: 1681172 - RNA, 19 nt, Homo sapiens
  misc_RNA (1)...(19): siRNA sense strand
gggaaguucaguacaacau

SEQ ID NO: 1681173 - RNA, 19 nt, Homo sapiens
  misc_RNA (1)...(19): siRNA sense strand
ggaagcaccucaacaaccu

SEQ ID NO: 1681174 - RNA, 19 nt, Homo sapiens
  misc_RNA (1)...(19): siRNA sense strand
ucaacaaccuccugaacug

SEQ ID NO: 1681175 - RNA, 19 nt, Homo sapiens
  misc_RNA (1)...(19): siRNA sense strand
cuggugaacucgacauuga

SEQ ID NO: 1681176 - RNA, 19 nt, Homo sapiens
  misc_RNA (1)...(19): siRNA sense strand
ggaguuucauuccaagcuu

SEQ ID NO: 1681177 - RNA, 19 nt, Homo sapiens
  misc_RNA (1)...(19): siRNA sense strand
cugaagaggccgugaauga

SEQ ID NO: 1681178 - RNA, 19 nt, Homo sapiens
  misc_RNA (1)...(19): siRNA sense strand
agacgugccucgcgaguuc

SEQ ID NO: 1681179 - RNA, 19 nt, Homo sapiens
  misc_RNA (1)...(19): siRNA sense strand
gcccaccacuuccgagaug

SEQ ID NO: 1681180 - RNA, 19 nt, Homo sapiens
  misc_RNA (1)...(19): siRNA sense strand
gcaaagcgcacgagcucau

SEQ ID NO: 1681181 - RNA, 19 nt, Homo sapiens
  misc_RNA (1)...(19): siRNA sense strand
gaacggcagcagccacuca

SEQ ID NO: 1681182 - RNA, 19 nt, Homo sapiens
  misc_RNA (1)...(19): siRNA sense strand
cccaacggcuucagcaaug

SEQ ID NO: 1681183 - RNA, 19 nt, Homo sapiens
  misc_RNA (1)...(19): siRNA sense strand
ccaaagagaacgggucaga

SEQ ID NO: 1681184 - RNA, 19 nt, Homo sapiens
  misc_RNA (1)...(19): siRNA sense strand
ucgaggaguuucauuccaa

SEQ ID NO: 1681185 - RNA, 19 nt, Homo sapiens
  misc_RNA (1)...(19): siRNA sense strand
ugucggagcugcagaaagc

SEQ ID NO: 1681186 - RNA, 19 nt, Homo sapiens
  misc_RNA (1)...(19): siRNA sense strand
cauugacgaucgaggaguu

SEQ ID NO: 1681187 - RNA, 19 nt, Homo sapiens
  misc_RNA (1)...(19): siRNA sense strand
aagaagugaucgaccacaa

SEQ ID NO: 1681188 - RNA, 19 nt, Homo sapiens
  misc_RNA (1)...(19): siRNA sense strand
ccaguggacaggaaagcua

SEQ ID NO: 1681189 - RNA, 19 nt, Homo sapiens
  misc_RNA (1)...(19): siRNA sense strand
ccgaagggccucagcuaga

SEQ ID NO: 1681190 - RNA, 19 nt, Homo sapiens
  misc_RNA (1)...(19): siRNA sense strand
cuacgugccugaggacauc

SEQ ID NO: 1681191 - RNA, 19 nt, Homo sapiens
  misc_RNA (1)...(19): siRNA sense strand
gagcgugagugggcagaag

SEQ ID NO: 1681192 - RNA, 19 nt, Homo sapiens
  misc_RNA (1)...(19): siRNA sense strand
gggcggaaagccagugaga

SEQ ID NO: 1681193 - RNA, 19 nt, Homo sapiens
  misc_RNA (1)...(19): siRNA sense strand
cgaagggccucagcuagac

SEQ ID NO: 1681194 - RNA, 19 nt, Homo sapiens
  misc_RNA (1)...(19): siRNA sense strand
ucaggaggccaccaacuuc

SEQ ID NO: 1681195 - RNA, 19 nt, Homo sapiens
  misc_RNA (1)...(19): siRNA sense strand
cgacaggaccaaagagaac

SEQ ID NO: 1681196 - RNA, 19 nt, Homo sapiens
  misc_RNA (1)...(19): siRNA sense strand
uacuggaagucaacgagaa

SEQ ID NO: 1681197 - RNA, 19 nt, Homo sapiens
  misc_RNA (1)...(19): siRNA sense strand
ugaacugcaucauggacau

SEQ ID NO: 1681198 - RNA, 19 nt, Homo sapiens
  misc_RNA (1)...(19): siRNA sense strand
guacuuggcccagcaugag

SEQ ID NO: 1681199 - RNA, 19 nt, Homo sapiens
  misc_RNA (1)...(19): siRNA sense strand
gaagcaucaccacgugugu

SEQ ID NO: 1681200 - RNA, 19 nt, Homo sapiens
  misc_RNA (1)...(19): siRNA sense strand
gagcugcuacuggaaguca

SEQ ID NO: 1681201 - RNA, 19 nt, Homo sapiens
  misc_RNA (1)...(19): siRNA sense strand
ucaccaacagccaucaaug

SEQ ID NO: 1681202 - RNA, 19 nt, Homo sapiens
  misc_RNA (1)...(19): siRNA sense strand
cagagcugcuacuggaagu

SEQ ID NO: 1681203 - RNA, 19 nt, Homo sapiens
  misc_RNA (1)...(19): siRNA sense strand
cagcagccacucaccaaca

SEQ ID NO: 1681204 - RNA, 19 nt, Homo sapiens
  misc_RNA (1)...(19): siRNA sense strand
cugaggacaucuggaggaa

SEQ ID NO: 1681205 - RNA, 19 nt, Homo sapiens
  misc_RNA (1)...(19): siRNA sense strand
agcgagagcugcuggaacu

SEQ ID NO: 1681206 - RNA, 19 nt, Homo sapiens
  misc_RNA (1)...(19): siRNA sense strand
ggaagcaccucaacaaccu

SEQ ID NO: 1681207 - RNA, 19 nt, Homo sapiens
  misc_RNA (1)...(19): siRNA sense strand
ucaacaaccuccugaacug

SEQ ID NO: 1681208 - RNA, 19 nt, Homo sapiens
  misc_RNA (1)...(19): siRNA sense strand
cuggugaacucgacauuga

SEQ ID NO: 1681209 - RNA, 19 nt, Homo sapiens
  misc_RNA (1)...(19): siRNA sense strand
ggaguuucauuccaagcuu

SEQ ID NO: 1681210 - RNA, 19 nt, Homo sapiens
  misc_RNA (1)...(19): siRNA sense strand
cugaagaggccgugaauga

SEQ ID NO: 1681211 - RNA, 19 nt, Homo sapiens
  misc_RNA (1)...(19): siRNA sense strand
agacgugccucgcgaguuc

SEQ ID NO: 1681212 - RNA, 19 nt, Homo sapiens
  misc_RNA (1)...(19): siRNA sense strand
gcccaccacuuccgagaug

SEQ ID NO: 1681213 - RNA, 19 nt, Homo sapiens
  misc_RNA (1)...(19): siRNA sense strand
gcaaagcgcacgagcucau

SEQ ID NO: 1681214 - RNA, 19 nt, Homo sapiens
  misc_RNA (1)...(19): siRNA sense strand
cccaacggcuucagcaaug

SEQ ID NO: 1681215 - RNA, 19 nt, Homo sapiens
  misc_RNA (1)...(19): siRNA sense strand
gaacggcagcagccacuca

SEQ ID NO: 1681216 - RNA, 19 nt, Homo sapiens
  misc_RNA (1)...(19): siRNA sense strand
ccaaagagaacgggucaga

SEQ ID NO: 1681217 - RNA, 19 nt, Homo sapiens
  misc_RNA (1)...(19): siRNA sense strand
ucgaggaguuucauuccaa

SEQ ID NO: 1681218 - RNA, 19 nt, Homo sapiens
  misc_RNA (1)...(19): siRNA sense strand
ugucggagcugcagaaagc

SEQ ID NO: 1681219 - RNA, 19 nt, Homo sapiens
  misc_RNA (1)...(19): siRNA sense strand
cauugacgaucgaggaguu

SEQ ID NO: 1681220 - RNA, 19 nt, Homo sapiens
  misc_RNA (1)...(19): siRNA sense strand
aagaagugaucgaccacaa

SEQ ID NO: 1681221 - RNA, 19 nt, Homo sapiens
  misc_RNA (1)...(19): siRNA sense strand
ccgaagggccucagcuaga

SEQ ID NO: 1681222 - RNA, 19 nt, Homo sapiens
  misc_RNA (1)...(19): siRNA sense strand
cuacgugccugaggacauc

SEQ ID NO: 1681223 - RNA, 19 nt, Homo sapiens
  misc_RNA (1)...(19): siRNA sense strand
gagcgugagugggcagaag

SEQ ID NO: 1681224 - RNA, 19 nt, Homo sapiens
  misc_RNA (1)...(19): siRNA sense strand
gggcggaaagccagugaga

SEQ ID NO: 1681225 - RNA, 19 nt, Homo sapiens
  misc_RNA (1)...(19): siRNA sense strand
cgaagggccucagcuagac

SEQ ID NO: 1681226 - RNA, 19 nt, Homo sapiens
  misc_RNA (1)...(19): siRNA sense strand
ucaggaggccaccaacuuc

SEQ ID NO: 1681227 - RNA, 19 nt, Homo sapiens
  misc_RNA (1)...(19): siRNA sense strand
cgacaggaccaaagagaac

SEQ ID NO: 1681228 - RNA, 19 nt, Homo sapiens
  misc_RNA (1)...(19): siRNA sense strand
uacuggaagucaacgagaa

SEQ ID NO: 1681229 - RNA, 19 nt, Homo sapiens
  misc_RNA (1)...(19): siRNA sense strand
ugaacugcaucauggacau

SEQ ID NO: 1681230 - RNA, 19 nt, Homo sapiens
  misc_RNA (1)...(19): siRNA sense strand
guacuuggcccagcaugag

SEQ ID NO: 1681231 - RNA, 19 nt, Homo sapiens
  misc_RNA (1)...(19): siRNA sense strand
gaagcaucaccacgugugu

SEQ ID NO: 1681232 - RNA, 19 nt, Homo sapiens
  misc_RNA (1)...(19): siRNA sense strand
gagcugcuacuggaaguca

SEQ ID NO: 1681233 - RNA, 19 nt, Homo sapiens
  misc_RNA (1)...(19): siRNA sense strand
ucaccaacagccaucaaug

SEQ ID NO: 1681234 - RNA, 19 nt, Homo sapiens
  misc_RNA (1)...(19): siRNA sense strand
cagagcugcuacuggaagu

SEQ ID NO: 1681235 - RNA, 19 nt, Homo sapiens
  misc_RNA (1)...(19): siRNA sense strand
cugaggacaucuggaggaa

SEQ ID NO: 1681236 - RNA, 19 nt, Homo sapiens
  misc_RNA (1)...(19): siRNA sense strand
cagcagccacucaccaaca

SEQ ID NO: 1681237 - RNA, 19 nt, Homo sapiens
  misc_RNA (1)...(19): siRNA sense strand
agcgagagcugcuggaacu

SEQ ID NO: 1681238 - RNA, 19 nt, Homo sapiens
  misc_RNA (1)...(19): siRNA sense strand
ggaaaucauucuucacgua

SEQ ID NO: 1681239 - RNA, 19 nt, Homo sapiens
  misc_RNA (1)...(19): siRNA sense strand
ucuaugaucucuccaguaa

SEQ ID NO: 1681240 - RNA, 19 nt, Homo sapiens
  misc_RNA (1)...(19): siRNA sense strand
caaagaugcucugcgguuu

SEQ ID NO: 1681241 - RNA, 19 nt, Homo sapiens
  misc_RNA (1)...(19): siRNA sense strand
uaugaucucuccaguaaau

SEQ ID NO: 1681242 - RNA, 19 nt, Homo sapiens
  misc_RNA (1)...(19): siRNA sense strand
gcacggaugugaagagcau

SEQ ID NO: 1681243 - RNA, 19 nt, Homo sapiens
  misc_RNA (1)...(19): siRNA sense strand
gaggagcucuacacgaaga

SEQ ID NO: 1681244 - RNA, 19 nt, Homo sapiens
  misc_RNA (1)...(19): siRNA sense strand
ggacguaccgggcuuccua

SEQ ID NO: 1681245 - RNA, 19 nt, Homo sapiens
  misc_RNA (1)...(19): siRNA sense strand
uggaggagcucuacacgaa

SEQ ID NO: 1681246 - RNA, 19 nt, Homo sapiens
  misc_RNA (1)...(19): siRNA sense strand
caacagaucaagggaauga

SEQ ID NO: 1681247 - RNA, 19 nt, Homo sapiens
  misc_RNA (1)...(19): siRNA sense strand
gaaaccacgcguccuacua

SEQ ID NO: 1681248 - RNA, 19 nt, Homo sapiens
  misc_RNA (1)...(19): siRNA sense strand
caaaggaaacaauugaaga

SEQ ID NO: 1681249 - RNA, 19 nt, Homo sapiens
  misc_RNA (1)...(19): siRNA sense strand
ggcaucagcugacacuuca

SEQ ID NO: 1681250 - RNA, 19 nt, Homo sapiens
  misc_RNA (1)...(19): siRNA sense strand
ugaagauguugaagaaaug

SEQ ID NO: 1681251 - RNA, 19 nt, Homo sapiens
  misc_RNA (1)...(19): siRNA sense strand
ucacguaguuagacagaug

SEQ ID NO: 1681252 - RNA, 19 nt, Homo sapiens
  misc_RNA (1)...(19): siRNA sense strand
cgaagaaguuguggcauca

SEQ ID NO: 1681253 - RNA, 19 nt, Homo sapiens
  misc_RNA (1)...(19): siRNA sense strand
gcagugauccuguguaaaa

SEQ ID NO: 1681254 - RNA, 19 nt, Homo sapiens
  misc_RNA (1)...(19): siRNA sense strand
ggaaaagacucgugagaag

SEQ ID NO: 1681255 - RNA, 19 nt, Homo sapiens
  misc_RNA (1)...(19): siRNA sense strand
gauggucucauuaagcuuu

SEQ ID NO: 1681256 - RNA, 19 nt, Homo sapiens
  misc_RNA (1)...(19): siRNA sense strand
gacaaacgaguccacauga

SEQ ID NO: 1681257 - RNA, 19 nt, Homo sapiens
  misc_RNA (1)...(19): siRNA sense strand
ugaaugagguggagcuucu

SEQ ID NO: 1681258 - RNA, 19 nt, Homo sapiens
  misc_RNA (1)...(19): siRNA sense strand
gaccggcaguggcugauug

SEQ ID NO: 1681259 - RNA, 19 nt, Homo sapiens
  misc_RNA (1)...(19): siRNA sense strand
acagaugacugauccuaau

SEQ ID NO: 1681260 - RNA, 19 nt, Homo sapiens
  misc_RNA (1)...(19): siRNA sense strand
cuucaacaguggcaacgua

SEQ ID NO: 1681261 - RNA, 19 nt, Homo sapiens
  misc_RNA (1)...(19): siRNA sense strand
gcaccaggcccaugacauc

SEQ ID NO: 1681262 - RNA, 19 nt, Homo sapiens
  misc_RNA (1)...(19): siRNA sense strand
gaugacugauccuaaugug

SEQ ID NO: 1681263 - RNA, 19 nt, Homo sapiens
  misc_RNA (1)...(19): siRNA sense strand
aggcagugauccuguguaa

SEQ ID NO: 1681264 - RNA, 19 nt, Homo sapiens
  misc_RNA (1)...(19): siRNA sense strand
uaauguggcucuuacuuuu

SEQ ID NO: 1681265 - RNA, 19 nt, Homo sapiens
  misc_RNA (1)...(19): siRNA sense strand
cacuucaggugcuugauuu

SEQ ID NO: 1681266 - RNA, 19 nt, Homo sapiens
  misc_RNA (1)...(19): siRNA sense strand
cuaauguggcucuuacuuu

SEQ ID NO: 1681267 - RNA, 19 nt, Homo sapiens
  misc_RNA (1)...(19): siRNA sense strand
ccacgcguccuacuacaaa

SEQ ID NO: 1681268 - RNA, 19 nt, Homo sapiens
  misc_RNA (1)...(19): siRNA sense strand
caaccuuccuggugugaca

SEQ ID NO: 1681269 - RNA, 19 nt, Homo sapiens
  misc_RNA (1)...(19): siRNA sense strand
ucacacgaccugccaauca

SEQ ID NO: 1681270 - RNA, 19 nt, Homo sapiens
  misc_RNA (1)...(19): siRNA sense strand
caaaagugcuaaaaucaca

SEQ ID NO: 1681271 - RNA, 19 nt, Homo sapiens
  misc_RNA (1)...(19): siRNA sense strand
gacagaugacugauccuaa

SEQ ID NO: 1681272 - RNA, 19 nt, Homo sapiens
  misc_RNA (1)...(19): siRNA sense strand
ucacagucguuucuaugau

SEQ ID NO: 1681273 - RNA, 19 nt, Homo sapiens
  misc_RNA (1)...(19): siRNA sense strand
aggaaacaauugaagaugu

SEQ ID NO: 1681274 - RNA, 19 nt, Homo sapiens
  misc_RNA (1)...(19): siRNA sense strand
cccaugacauccucaccua

SEQ ID NO: 1681275 - RNA, 19 nt, Homo sapiens
  misc_RNA (1)...(19): siRNA sense strand
gauccuaauguggcucuua

SEQ ID NO: 1681276 - RNA, 19 nt, Homo sapiens
  misc_RNA (1)...(19): siRNA sense strand
ccagcagccugauuuagca

SEQ ID NO: 1681277 - RNA, 19 nt, Homo sapiens
  misc_RNA (1)...(19): siRNA sense strand
caauugaagauguugaaga

SEQ ID NO: 1681278 - RNA, 19 nt, Homo sapiens
  misc_RNA (1)...(19): siRNA sense strand
acagacaacucacuuuuga

SEQ ID NO: 1681279 - RNA, 19 nt, Homo sapiens
  misc_RNA (1)...(19): siRNA sense strand
ugaaggaccgccuggaguu

SEQ ID NO: 1681280 - RNA, 19 nt, Homo sapiens
  misc_RNA (1)...(19): siRNA sense strand
aaucauucuucacguaguu

SEQ ID NO: 1681281 - RNA, 19 nt, Homo sapiens
  misc_RNA (1)...(19): siRNA sense strand
gggccagcagccugauuua

SEQ ID NO: 1681282 - RNA, 19 nt, Homo sapiens
  misc_RNA (1)...(19): siRNA sense strand
gccaaucacagacaacuca

SEQ ID NO: 1681283 - RNA, 19 nt, Homo sapiens
  misc_RNA (1)...(19): siRNA sense strand
cacagucguuucuaugauc

SEQ ID NO: 1681284 - RNA, 19 nt, Homo sapiens
  misc_RNA (1)...(19): siRNA sense strand
gaaauugccaaaagugcua

SEQ ID NO: 1681285 - RNA, 19 nt, Homo sapiens
  misc_RNA (1)...(19): siRNA sense strand
gugagaaggugaaaaguag

SEQ ID NO: 1681286 - RNA, 19 nt, Homo sapiens
  misc_RNA (1)...(19): siRNA sense strand
ugcaacagaucaagggaau

SEQ ID NO: 1681287 - RNA, 19 nt, Homo sapiens
  misc_RNA (1)...(19): siRNA sense strand
gaggaaaauucaguuguug

SEQ ID NO: 1681288 - RNA, 19 nt, Homo sapiens
  misc_RNA (1)...(19): siRNA sense strand
gguucacagucguuucuau

SEQ ID NO: 1681289 - RNA, 19 nt, Homo sapiens
  misc_RNA (1)...(19): siRNA sense strand
gguuacaaaggaaacaauu

SEQ ID NO: 1681290 - RNA, 19 nt, Homo sapiens
  misc_RNA (1)...(19): siRNA sense strand
gcaauuggagcucuaaaau

SEQ ID NO: 1681291 - RNA, 19 nt, Homo sapiens
  misc_RNA (1)...(19): siRNA sense strand
acaacucacuuuugaagaa

SEQ ID NO: 1681292 - RNA, 19 nt, Homo sapiens
  misc_RNA (1)...(19): siRNA sense strand
aagaaaugcucaacaaccu

SEQ ID NO: 1681293 - RNA, 19 nt, Homo sapiens
  misc_RNA (1)...(19): siRNA sense strand
gaaggaccgccuggaguuc

SEQ ID NO: 1681294 - RNA, 19 nt, Homo sapiens
  misc_RNA (1)...(19): siRNA sense strand
gaagaaauugccaaaagug

SEQ ID NO: 1681295 - RNA, 19 nt, Homo sapiens
  misc_RNA (1)...(19): siRNA sense strand
ugaggaaaauucaguuguu

SEQ ID NO: 1681296 - RNA, 19 nt, Homo sapiens
  misc_RNA (1)...(19): siRNA sense strand
guuacaaaggaaacaauug

SEQ ID NO: 1681297 - RNA, 19 nt, Homo sapiens
  misc_RNA (1)...(19): siRNA sense strand
gcuggugaaaggcaguaua

SEQ ID NO: 1681298 - RNA, 19 nt, Homo sapiens
  misc_RNA (1)...(19): siRNA sense strand
caacucacuuuugaagaaa

SEQ ID NO: 1681299 - RNA, 19 nt, Homo sapiens
  misc_RNA (1)...(19): siRNA sense strand
caacaguggcaacguagag

SEQ ID NO: 1681300 - RNA, 19 nt, Homo sapiens
  misc_RNA (1)...(19): siRNA sense strand
guucacagucguuucuaug

SEQ ID NO: 1681301 - RNA, 19 nt, Homo sapiens
  misc_RNA (1)...(19): siRNA sense strand
agacagaugacugauccua

SEQ ID NO: 1681302 - RNA, 19 nt, Homo sapiens
  misc_RNA (1)...(19): siRNA sense strand
uagacgagguggacaaacg

SEQ ID NO: 1681303 - RNA, 19 nt, Homo sapiens
  misc_RNA (1)...(19): siRNA sense strand
guauagacgagguggacaa

SEQ ID NO: 1681304 - RNA, 19 nt, Homo sapiens
  misc_RNA (1)...(19): siRNA sense strand
ggugaaaggcaguauagac

SEQ ID NO: 1681305 - RNA, 19 nt, Homo sapiens
  misc_RNA (1)...(19): siRNA sense strand
acacuucaggugcuugauu

SEQ ID NO: 1681306 - RNA, 19 nt, Homo sapiens
  misc_RNA (1)...(19): siRNA sense strand
ugaagaaauugccaaaagu

SEQ ID NO: 1681307 - RNA, 19 nt, Homo sapiens
  misc_RNA (1)...(19): siRNA sense strand
gcugauugacacccucuau

SEQ ID NO: 1681308 - RNA, 19 nt, Homo sapiens
  misc_RNA (1)...(19): siRNA sense strand
cuacagguuacaaaggaaa

SEQ ID NO: 1681309 - RNA, 19 nt, Homo sapiens
  misc_RNA (1)...(19): siRNA sense strand
ccuacagguuacaaaggaa

SEQ ID NO: 1681310 - RNA, 19 nt, Homo sapiens
  misc_RNA (1)...(19): siRNA sense strand
ucggaaaccacgcguccua

SEQ ID NO: 1681311 - RNA, 19 nt, Homo sapiens
  misc_RNA (1)...(19): siRNA sense strand
acaaaggaaacaauugaag

SEQ ID NO: 1681312 - RNA, 19 nt, Homo sapiens
  misc_RNA (1)...(19): siRNA sense strand
ccuaauguggcucuuacuu

SEQ ID NO: 1681313 - RNA, 19 nt, Homo sapiens
  misc_RNA (1)...(19): siRNA sense strand
ucguggaaaucauucuuca

SEQ ID NO: 1681314 - RNA, 19 nt, Homo sapiens
  misc_RNA (1)...(19): siRNA sense strand
ucacagacaacucacuuuu

SEQ ID NO: 1681315 - RNA, 19 nt, Homo sapiens
  misc_RNA (1)...(19): siRNA sense strand
uggagucccugaggaauac

SEQ ID NO: 1681316 - RNA, 19 nt, Homo sapiens
  misc_RNA (1)...(19): siRNA sense strand
cuggagucccugaggaaua

SEQ ID NO: 1681317 - RNA, 19 nt, Homo sapiens
  misc_RNA (1)...(19): siRNA sense strand
aaaccacgcguccuacuac

SEQ ID NO: 1681318 - RNA, 19 nt, Homo sapiens
  misc_RNA (1)...(19): siRNA sense strand
ggaaaccacgcguccuacu

SEQ ID NO: 1681319 - RNA, 19 nt, Homo sapiens
  misc_RNA (1)...(19): siRNA sense strand
aaucacagacaacucacuu

SEQ ID NO: 1681320 - RNA, 19 nt, Homo sapiens
  misc_RNA (1)...(19): siRNA sense strand
gcucuacacgaagaaguug

SEQ ID NO: 1681321 - RNA, 19 nt, Homo sapiens
  misc_RNA (1)...(19): siRNA sense strand
uggagcuucuggugaugaa

SEQ ID NO: 1681322 - RNA, 19 nt, Homo sapiens
  misc_RNA (1)...(19): siRNA sense strand
ggaaaucauucuucacgua

SEQ ID NO: 1681323 - RNA, 19 nt, Homo sapiens
  misc_RNA (1)...(19): siRNA sense strand
ucuaugaucucuccaguaa

SEQ ID NO: 1681324 - RNA, 19 nt, Homo sapiens
  misc_RNA (1)...(19): siRNA sense strand
caaagaugcucugcgguuu

SEQ ID NO: 1681325 - RNA, 19 nt, Homo sapiens
  misc_RNA (1)...(19): siRNA sense strand
uaugaucucuccaguaaau

SEQ ID NO: 1681326 - RNA, 19 nt, Homo sapiens
  misc_RNA (1)...(19): siRNA sense strand
gcacggaugugaagagcau

SEQ ID NO: 1681327 - RNA, 19 nt, Homo sapiens
  misc_RNA (1)...(19): siRNA sense strand
caacagaucaagggaauga

SEQ ID NO: 1681328 - RNA, 19 nt, Homo sapiens
  misc_RNA (1)...(19): siRNA sense strand
gaaaccacgcguccuacua

SEQ ID NO: 1681329 - RNA, 19 nt, Homo sapiens
  misc_RNA (1)...(19): siRNA sense strand
caaaggaaacaauugaaga

SEQ ID NO: 1681330 - RNA, 19 nt, Homo sapiens
  misc_RNA (1)...(19): siRNA sense strand
ucacguaguuagacagaug

SEQ ID NO: 1681331 - RNA, 19 nt, Homo sapiens
  misc_RNA (1)...(19): siRNA sense strand
ugaagauguugaagaaaug

SEQ ID NO: 1681332 - RNA, 19 nt, Homo sapiens
  misc_RNA (1)...(19): siRNA sense strand
gcagugauccuguguaaaa

SEQ ID NO: 1681333 - RNA, 19 nt, Homo sapiens
  misc_RNA (1)...(19): siRNA sense strand
ggaaaagacucgugagaag

SEQ ID NO: 1681334 - RNA, 19 nt, Homo sapiens
  misc_RNA (1)...(19): siRNA sense strand
acagaugacugauccuaau

SEQ ID NO: 1681335 - RNA, 19 nt, Homo sapiens
  misc_RNA (1)...(19): siRNA sense strand
gacaaacgaguccacauga

SEQ ID NO: 1681336 - RNA, 19 nt, Homo sapiens
  misc_RNA (1)...(19): siRNA sense strand
ugaaugagguggagcuucu

SEQ ID NO: 1681337 - RNA, 19 nt, Homo sapiens
  misc_RNA (1)...(19): siRNA sense strand
gaccggcaguggcugauug

SEQ ID NO: 1681338 - RNA, 19 nt, Homo sapiens
  misc_RNA (1)...(19): siRNA sense strand
cuucaacaguggcaacgua

SEQ ID NO: 1681339 - RNA, 19 nt, Homo sapiens
  misc_RNA (1)...(19): siRNA sense strand
gcaccaggcccaugacauc

SEQ ID NO: 1681340 - RNA, 19 nt, Homo sapiens
  misc_RNA (1)...(19): siRNA sense strand
gaugacugauccuaaugug

SEQ ID NO: 1681341 - RNA, 19 nt, Homo sapiens
  misc_RNA (1)...(19): siRNA sense strand
aggcagugauccuguguaa

SEQ ID NO: 1681342 - RNA, 19 nt, Homo sapiens
  misc_RNA (1)...(19): siRNA sense strand
uaauguggcucuuacuuuu

SEQ ID NO: 1681343 - RNA, 19 nt, Homo sapiens
  misc_RNA (1)...(19): siRNA sense strand
cuaauguggcucuuacuuu

SEQ ID NO: 1681344 - RNA, 19 nt, Homo sapiens
  misc_RNA (1)...(19): siRNA sense strand
ccacgcguccuacuacaaa

SEQ ID NO: 1681345 - RNA, 19 nt, Homo sapiens
  misc_RNA (1)...(19): siRNA sense strand
caaccuuccuggugugaca

SEQ ID NO: 1681346 - RNA, 19 nt, Homo sapiens
  misc_RNA (1)...(19): siRNA sense strand
ucacacgaccugccaauca

SEQ ID NO: 1681347 - RNA, 19 nt, Homo sapiens
  misc_RNA (1)...(19): siRNA sense strand
caaaagugcuaaaaucaca

SEQ ID NO: 1681348 - RNA, 19 nt, Homo sapiens
  misc_RNA (1)...(19): siRNA sense strand
gacagaugacugauccuaa

SEQ ID NO: 1681349 - RNA, 19 nt, Homo sapiens
  misc_RNA (1)...(19): siRNA sense strand
ucacagucguuucuaugau

SEQ ID NO: 1681350 - RNA, 19 nt, Homo sapiens
  misc_RNA (1)...(19): siRNA sense strand
aggaaacaauugaagaugu

SEQ ID NO: 1681351 - RNA, 19 nt, Homo sapiens
  misc_RNA (1)...(19): siRNA sense strand
cccaugacauccucaccua

SEQ ID NO: 1681352 - RNA, 19 nt, Homo sapiens
  misc_RNA (1)...(19): siRNA sense strand
gauccuaauguggcucuua

SEQ ID NO: 1681353 - RNA, 19 nt, Homo sapiens
  misc_RNA (1)...(19): siRNA sense strand
ccagcagccugauuuagca

SEQ ID NO: 1681354 - RNA, 19 nt, Homo sapiens
  misc_RNA (1)...(19): siRNA sense strand
caauugaagauguugaaga

SEQ ID NO: 1681355 - RNA, 19 nt, Homo sapiens
  misc_RNA (1)...(19): siRNA sense strand
acagacaacucacuuuuga

SEQ ID NO: 1681356 - RNA, 19 nt, Homo sapiens
  misc_RNA (1)...(19): siRNA sense strand
ugaaggaccgccuggaguu

SEQ ID NO: 1681357 - RNA, 19 nt, Homo sapiens
  misc_RNA (1)...(19): siRNA sense strand
aaucauucuucacguaguu

SEQ ID NO: 1681358 - RNA, 19 nt, Homo sapiens
  misc_RNA (1)...(19): siRNA sense strand
gggccagcagccugauuua

SEQ ID NO: 1681359 - RNA, 19 nt, Homo sapiens
  misc_RNA (1)...(19): siRNA sense strand
gccaaucacagacaacuca

SEQ ID NO: 1681360 - RNA, 19 nt, Homo sapiens
  misc_RNA (1)...(19): siRNA sense strand
cacagucguuucuaugauc

SEQ ID NO: 1681361 - RNA, 19 nt, Homo sapiens
  misc_RNA (1)...(19): siRNA sense strand
gaaauugccaaaagugcua

SEQ ID NO: 1681362 - RNA, 19 nt, Homo sapiens
  misc_RNA (1)...(19): siRNA sense strand
gugagaaggugaaaaguag

SEQ ID NO: 1681363 - RNA, 19 nt, Homo sapiens
  misc_RNA (1)...(19): siRNA sense strand
ugcaacagaucaagggaau

SEQ ID NO: 1681364 - RNA, 19 nt, Homo sapiens
  misc_RNA (1)...(19): siRNA sense strand
gaggaaaauucaguuguug

SEQ ID NO: 1681365 - RNA, 19 nt, Homo sapiens
  misc_RNA (1)...(19): siRNA sense strand
gguucacagucguuucuau

SEQ ID NO: 1681366 - RNA, 19 nt, Homo sapiens
  misc_RNA (1)...(19): siRNA sense strand
gguuacaaaggaaacaauu

SEQ ID NO: 1681367 - RNA, 19 nt, Homo sapiens
  misc_RNA (1)...(19): siRNA sense strand
gcaauuggagcucuaaaau

SEQ ID NO: 1681368 - RNA, 19 nt, Homo sapiens
  misc_RNA (1)...(19): siRNA sense strand
acaacucacuuuugaagaa

SEQ ID NO: 1681369 - RNA, 19 nt, Homo sapiens
  misc_RNA (1)...(19): siRNA sense strand
aagaaaugcucaacaaccu

SEQ ID NO: 1681370 - RNA, 19 nt, Homo sapiens
  misc_RNA (1)...(19): siRNA sense strand
gaaggaccgccuggaguuc

SEQ ID NO: 1681371 - RNA, 19 nt, Homo sapiens
  misc_RNA (1)...(19): siRNA sense strand
gaagaaauugccaaaagug

SEQ ID NO: 1681372 - RNA, 19 nt, Homo sapiens
  misc_RNA (1)...(19): siRNA sense strand
ugaggaaaauucaguuguu

SEQ ID NO: 1681373 - RNA, 19 nt, Homo sapiens
  misc_RNA (1)...(19): siRNA sense strand
guuacaaaggaaacaauug

SEQ ID NO: 1681374 - RNA, 19 nt, Homo sapiens
  misc_RNA (1)...(19): siRNA sense strand
gcuggugaaaggcaguaua

SEQ ID NO: 1681375 - RNA, 19 nt, Homo sapiens
  misc_RNA (1)...(19): siRNA sense strand
caacucacuuuugaagaaa

SEQ ID NO: 1681376 - RNA, 19 nt, Homo sapiens
  misc_RNA (1)...(19): siRNA sense strand
caacaguggcaacguagag

SEQ ID NO: 1681377 - RNA, 19 nt, Homo sapiens
  misc_RNA (1)...(19): siRNA sense strand
guucacagucguuucuaug

SEQ ID NO: 1681378 - RNA, 19 nt, Homo sapiens
  misc_RNA (1)...(19): siRNA sense strand
agacagaugacugauccua

SEQ ID NO: 1681379 - RNA, 19 nt, Homo sapiens
  misc_RNA (1)...(19): siRNA sense strand
uagacgagguggacaaacg

SEQ ID NO: 1681380 - RNA, 19 nt, Homo sapiens
  misc_RNA (1)...(19): siRNA sense strand
guauagacgagguggacaa

SEQ ID NO: 1681381 - RNA, 19 nt, Homo sapiens
  misc_RNA (1)...(19): siRNA sense strand
ggugaaaggcaguauagac

SEQ ID NO: 1681382 - RNA, 19 nt, Homo sapiens
  misc_RNA (1)...(19): siRNA sense strand
ugaagaaauugccaaaagu

SEQ ID NO: 1681383 - RNA, 19 nt, Homo sapiens
  misc_RNA (1)...(19): siRNA sense strand
gcugauugacacccucuau

SEQ ID NO: 1681384 - RNA, 19 nt, Homo sapiens
  misc_RNA (1)...(19): siRNA sense strand
cuacagguuacaaaggaaa

SEQ ID NO: 1681385 - RNA, 19 nt, Homo sapiens
  misc_RNA (1)...(19): siRNA sense strand
ccuacagguuacaaaggaa

SEQ ID NO: 1681386 - RNA, 19 nt, Homo sapiens
  misc_RNA (1)...(19): siRNA sense strand
ucggaaaccacgcguccua

SEQ ID NO: 1681387 - RNA, 19 nt, Homo sapiens
  misc_RNA (1)...(19): siRNA sense strand
acaaaggaaacaauugaag

SEQ ID NO: 1681388 - RNA, 19 nt, Homo sapiens
  misc_RNA (1)...(19): siRNA sense strand
ccuaauguggcucuuacuu

SEQ ID NO: 1681389 - RNA, 19 nt, Homo sapiens
  misc_RNA (1)...(19): siRNA sense strand
ucacagacaacucacuuuu

SEQ ID NO: 1681390 - RNA, 19 nt, Homo sapiens
  misc_RNA (1)...(19): siRNA sense strand
ucguggaaaucauucuuca

SEQ ID NO: 1681391 - RNA, 19 nt, Homo sapiens
  misc_RNA (1)...(19): siRNA sense strand
uggagucccugaggaauac

SEQ ID NO: 1681392 - RNA, 19 nt, Homo sapiens
  misc_RNA (1)...(19): siRNA sense strand
cuggagucccugaggaaua

SEQ ID NO: 1681393 - RNA, 19 nt, Homo sapiens
  misc_RNA (1)...(19): siRNA sense strand
aaaccacgcguccuacuac

SEQ ID NO: 1681394 - RNA, 19 nt, Homo sapiens
  misc_RNA (1)...(19): siRNA sense strand
ggaaaccacgcguccuacu

SEQ ID NO: 1681395 - RNA, 19 nt, Homo sapiens
  misc_RNA (1)...(19): siRNA sense strand
aaucacagacaacucacuu

SEQ ID NO: 1681396 - RNA, 19 nt, Homo sapiens
  misc_RNA (1)...(19): siRNA sense strand
uggagcuucuggugaugaa

SEQ ID NO: 1681397 - RNA, 19 nt, Homo sapiens
  misc_RNA (1)...(19): siRNA sense strand
gacaugacccucaauauuu

SEQ ID NO: 1681398 - RNA, 19 nt, Homo sapiens
  misc_RNA (1)...(19): siRNA sense strand
ggagauacuuucagaagga

SEQ ID NO: 1681399 - RNA, 19 nt, Homo sapiens
  misc_RNA (1)...(19): siRNA sense strand
gaagaagugaggcaaauuu

SEQ ID NO: 1681400 - RNA, 19 nt, Homo sapiens
  misc_RNA (1)...(19): siRNA sense strand
gaagacaugacccucaaua

SEQ ID NO: 1681401 - RNA, 19 nt, Homo sapiens
  misc_RNA (1)...(19): siRNA sense strand
gacaagaggucuagcaagu

SEQ ID NO: 1681402 - RNA, 19 nt, Homo sapiens
  misc_RNA (1)...(19): siRNA sense strand
gaaguuauuucaucuacag

SEQ ID NO: 1681403 - RNA, 19 nt, Homo sapiens
  misc_RNA (1)...(19): siRNA sense strand
ggcagcaucuuguuucuga

SEQ ID NO: 1681404 - RNA, 19 nt, Homo sapiens
  misc_RNA (1)...(19): siRNA sense strand
acaaagaucuggacaacuc

SEQ ID NO: 1681405 - RNA, 19 nt, Homo sapiens
  misc_RNA (1)...(19): siRNA sense strand
acgaguaccugcgaaguua

SEQ ID NO: 1681406 - RNA, 19 nt, Homo sapiens
  misc_RNA (1)...(19): siRNA sense strand
ccguguacauguucaauuu

SEQ ID NO: 1681407 - RNA, 19 nt, Homo sapiens
  misc_RNA (1)...(19): siRNA sense strand
caagacgggcuuccaguuu

SEQ ID NO: 1681408 - RNA, 19 nt, Homo sapiens
  misc_RNA (1)...(19): siRNA sense strand
agacaugacccucaauauu

SEQ ID NO: 1681409 - RNA, 19 nt, Homo sapiens
  misc_RNA (1)...(19): siRNA sense strand
caagaggucuagcaagucu

SEQ ID NO: 1681410 - RNA, 19 nt, Homo sapiens
  misc_RNA (1)...(19): siRNA sense strand
acaaaaccaucaccuguua

SEQ ID NO: 1681411 - RNA, 19 nt, Homo sapiens
  misc_RNA (1)...(19): siRNA sense strand
ugagagcuuugauuuacaa

SEQ ID NO: 1681412 - RNA, 19 nt, Homo sapiens
  misc_RNA (1)...(19): siRNA sense strand
gaucuucuacuacuucaau

SEQ ID NO: 1681413 - RNA, 19 nt, Homo sapiens
  misc_RNA (1)...(19): siRNA sense strand
gugaagacaugacccucaa

SEQ ID NO: 1681414 - RNA, 19 nt, Homo sapiens
  misc_RNA (1)...(19): siRNA sense strand
caaugugugcuuucaauga

SEQ ID NO: 1681415 - RNA, 19 nt, Homo sapiens
  misc_RNA (1)...(19): siRNA sense strand
ucugggcuguuacggauua

SEQ ID NO: 1681416 - RNA, 19 nt, Homo sapiens
  misc_RNA (1)...(19): siRNA sense strand
cugcagagguucaucuuuc

SEQ ID NO: 1681417 - RNA, 19 nt, Homo sapiens
  misc_RNA (1)...(19): siRNA sense strand
uguguaaacugcagagguu

SEQ ID NO: 1681418 - RNA, 19 nt, Homo sapiens
  misc_RNA (1)...(19): siRNA sense strand
gcgaaguuauuucaucuac

SEQ ID NO: 1681419 - RNA, 19 nt, Homo sapiens
  misc_RNA (1)...(19): siRNA sense strand
uagaagaagugaggcaaau

SEQ ID NO: 1681420 - RNA, 19 nt, Homo sapiens
  misc_RNA (1)...(19): siRNA sense strand
agaagaaugcgaucuguau

SEQ ID NO: 1681421 - RNA, 19 nt, Homo sapiens
  misc_RNA (1)...(19): siRNA sense strand
uaccugaguucaagcagaa

SEQ ID NO: 1681422 - RNA, 19 nt, Homo sapiens
  misc_RNA (1)...(19): siRNA sense strand
cuggacaacucuccucuga

SEQ ID NO: 1681423 - RNA, 19 nt, Homo sapiens
  misc_RNA (1)...(19): siRNA sense strand
gugcugguguggcucauug

SEQ ID NO: 1681424 - RNA, 19 nt, Homo sapiens
  misc_RNA (1)...(19): siRNA sense strand
gcaucuccguguacauguu

SEQ ID NO: 1681425 - RNA, 19 nt, Homo sapiens
  misc_RNA (1)...(19): siRNA sense strand
ggcgggagauacuuucaga

SEQ ID NO: 1681426 - RNA, 19 nt, Homo sapiens
  misc_RNA (1)...(19): siRNA sense strand
ugugagagcuuugauuuac

SEQ ID NO: 1681427 - RNA, 19 nt, Homo sapiens
  misc_RNA (1)...(19): siRNA sense strand
gauuaauugugagagcuuu

SEQ ID NO: 1681428 - RNA, 19 nt, Homo sapiens
  misc_RNA (1)...(19): siRNA sense strand
ugccagcccugaucuucua

SEQ ID NO: 1681429 - RNA, 19 nt, Homo sapiens
  misc_RNA (1)...(19): siRNA sense strand
caagcagaauggagauaca

SEQ ID NO: 1681430 - RNA, 19 nt, Homo sapiens
  misc_RNA (1)...(19): siRNA sense strand
uuacaaagaucuggacaac

SEQ ID NO: 1681431 - RNA, 19 nt, Homo sapiens
  misc_RNA (1)...(19): siRNA sense strand
aaagaagaaugcgaucugu

SEQ ID NO: 1681432 - RNA, 19 nt, Homo sapiens
  misc_RNA (1)...(19): siRNA sense strand
gaagaaugcgaucuguauc

SEQ ID NO: 1681433 - RNA, 19 nt, Homo sapiens
  misc_RNA (1)...(19): siRNA sense strand
acaaggaaagcuucuagaa

SEQ ID NO: 1681434 - RNA, 19 nt, Homo sapiens
  misc_RNA (1)...(19): siRNA sense strand
gcaacagcguggccaucug

SEQ ID NO: 1681435 - RNA, 19 nt, Homo sapiens
  misc_RNA (1)...(19): siRNA sense strand
gcccugaucuucuacuacu

SEQ ID NO: 1681436 - RNA, 19 nt, Homo sapiens
  misc_RNA (1)...(19): siRNA sense strand
gggcuguuacggauuaauu

SEQ ID NO: 1681437 - RNA, 19 nt, Homo sapiens
  misc_RNA (1)...(19): siRNA sense strand
uguuacggauuaauuguga

SEQ ID NO: 1681438 - RNA, 19 nt, Homo sapiens
  misc_RNA (1)...(19): siRNA sense strand
ccacguaucaggugacaag

SEQ ID NO: 1681439 - RNA, 19 nt, Homo sapiens
  misc_RNA (1)...(19): siRNA sense strand
gcaaugugugcuuucaaug

SEQ ID NO: 1681440 - RNA, 19 nt, Homo sapiens
  misc_RNA (1)...(19): siRNA sense strand
gcaucuuguuucugacaug

SEQ ID NO: 1681441 - RNA, 19 nt, Homo sapiens
  misc_RNA (1)...(19): siRNA sense strand
gacgaguaccugcgaaguu

SEQ ID NO: 1681442 - RNA, 19 nt, Homo sapiens
  misc_RNA (1)...(19): siRNA sense strand
cagcccugaucuucuacua

SEQ ID NO: 1681443 - RNA, 19 nt, Homo sapiens
  misc_RNA (1)...(19): siRNA sense strand
agguucaucuuucauguga

SEQ ID NO: 1681444 - RNA, 19 nt, Homo sapiens
  misc_RNA (1)...(19): siRNA sense strand
ccacaaggaaagcuucuag

SEQ ID NO: 1681445 - RNA, 19 nt, Homo sapiens
  misc_RNA (1)...(19): siRNA sense strand
ccaagacgggcuuccaguu

SEQ ID NO: 1681446 - RNA, 19 nt, Homo sapiens
  misc_RNA (1)...(19): siRNA sense strand
ggguuuaugccacguauca

SEQ ID NO: 1681447 - RNA, 19 nt, Homo sapiens
  misc_RNA (1)...(19): siRNA sense strand
gaguaccugcgaaguuauu

SEQ ID NO: 1681448 - RNA, 19 nt, Homo sapiens
  misc_RNA (1)...(19): siRNA sense strand
caaauuugcaauccaagag

SEQ ID NO: 1681449 - RNA, 19 nt, Homo sapiens
  misc_RNA (1)...(19): siRNA sense strand
gugagagcuuugauuuaca

SEQ ID NO: 1681450 - RNA, 19 nt, Homo sapiens
  misc_RNA (1)...(19): siRNA sense strand
cgaaguuauuucaucuaca

SEQ ID NO: 1681451 - RNA, 19 nt, Homo sapiens
  misc_RNA (1)...(19): siRNA sense strand
guguacauguucaauuugg

SEQ ID NO: 1681452 - RNA, 19 nt, Homo sapiens
  misc_RNA (1)...(19): siRNA sense strand
uauuucaucuacagcaugu

SEQ ID NO: 1681453 - RNA, 19 nt, Homo sapiens
  misc_RNA (1)...(19): siRNA sense strand
agacgggcuuccaguuuua

SEQ ID NO: 1681454 - RNA, 19 nt, Homo sapiens
  misc_RNA (1)...(19): siRNA sense strand
acaugacccucaauauuuu

SEQ ID NO: 1681455 - RNA, 19 nt, Homo sapiens
  misc_RNA (1)...(19): siRNA sense strand
gggaugccauguguaaacu

SEQ ID NO: 1681456 - RNA, 19 nt, Homo sapiens
  misc_RNA (1)...(19): siRNA sense strand
ggauuaauugugagagcuu

SEQ ID NO: 1681457 - RNA, 19 nt, Homo sapiens
  misc_RNA (1)...(19): siRNA sense strand
ccugcgaaguuauuucauc

SEQ ID NO: 1681458 - RNA, 19 nt, Homo sapiens
  misc_RNA (1)...(19): siRNA sense strand
agagguucaucuuucaugu

SEQ ID NO: 1681459 - RNA, 19 nt, Homo sapiens
  misc_RNA (1)...(19): siRNA sense strand
aagaagaaugcgaucugua

SEQ ID NO: 1681460 - RNA, 19 nt, Homo sapiens
  misc_RNA (1)...(19): siRNA sense strand
ucaaugacaggguuuaugc

SEQ ID NO: 1681461 - RNA, 19 nt, Homo sapiens
  misc_RNA (1)...(19): siRNA sense strand
ugaaaacgaugaacuugag

SEQ ID NO: 1681462 - RNA, 19 nt, Homo sapiens
  misc_RNA (1)...(19): siRNA sense strand
aagaaugcgaucuguauca

SEQ ID NO: 1681463 - RNA, 19 nt, Homo sapiens
  misc_RNA (1)...(19): siRNA sense strand
ucuagcaagucucaacagu

SEQ ID NO: 1681464 - RNA, 19 nt, Homo sapiens
  misc_RNA (1)...(19): siRNA sense strand
gucuacaucuugguauuca

SEQ ID NO: 1681465 - RNA, 19 nt, Homo sapiens
  misc_RNA (1)...(19): siRNA sense strand
aagaagugaggcaaauuug

SEQ ID NO: 1681466 - RNA, 19 nt, Homo sapiens
  misc_RNA (1)...(19): siRNA sense strand
caggguuuaugccacguau

SEQ ID NO: 1681467 - RNA, 19 nt, Homo sapiens
  misc_RNA (1)...(19): siRNA sense strand
ugcagagguucaucuuuca

SEQ ID NO: 1681468 - RNA, 19 nt, Homo sapiens
  misc_RNA (1)...(19): siRNA sense strand
cuagaagaagugaggcaaa

SEQ ID NO: 1681469 - RNA, 19 nt, Homo sapiens
  misc_RNA (1)...(19): siRNA sense strand
ugucuuacaucccuuucca

SEQ ID NO: 1681470 - RNA, 19 nt, Homo sapiens
  misc_RNA (1)...(19): siRNA sense strand
guuauuucaucuacagcau

SEQ ID NO: 1681471 - RNA, 19 nt, Homo sapiens
  misc_RNA (1)...(19): siRNA sense strand
gagguucaucuuucaugug

SEQ ID NO: 1681472 - RNA, 19 nt, Homo sapiens
  misc_RNA (1)...(19): siRNA sense strand
cuagcaagucucaacaguu

SEQ ID NO: 1681473 - RNA, 19 nt, Homo sapiens
  misc_RNA (1)...(19): siRNA sense strand
cugcgaaguuauuucaucu

SEQ ID NO: 1681474 - RNA, 19 nt, Homo sapiens
  misc_RNA (1)...(19): siRNA sense strand
guuacgacaccaccucaga

SEQ ID NO: 1681475 - RNA, 19 nt, Homo sapiens
  misc_RNA (1)...(19): siRNA sense strand
cagagguucaucuuucaug

SEQ ID NO: 1681476 - RNA, 19 nt, Homo sapiens
  misc_RNA (1)...(19): siRNA sense strand
agaagaagugaggcaaauu

SEQ ID NO: 1681477 - RNA, 19 nt, Homo sapiens
  misc_RNA (1)...(19): siRNA sense strand
auugugagagcuuugauuu

SEQ ID NO: 1681478 - RNA, 19 nt, Homo sapiens
  misc_RNA (1)...(19): siRNA sense strand
gcuguuacggauuaauugu

SEQ ID NO: 1681479 - RNA, 19 nt, Homo sapiens
  misc_RNA (1)...(19): siRNA sense strand
gaugacagcacuaauucua

SEQ ID NO: 1681480 - RNA, 19 nt, Homo sapiens
  misc_RNA (1)...(19): siRNA sense strand
gcaaaccagucaacaagag

SEQ ID NO: 1681481 - RNA, 19 nt, Homo sapiens
  misc_RNA (1)...(19): siRNA sense strand
cgauggagcucucgaugga

SEQ ID NO: 1681482 - RNA, 19 nt, Homo sapiens
  misc_RNA (1)...(19): siRNA sense strand
guaaucuacucauccaugu

SEQ ID NO: 1681483 - RNA, 19 nt, Homo sapiens
  misc_RNA (1)...(19): siRNA sense strand
acaagugcgucugcaauaa

SEQ ID NO: 1681484 - RNA, 19 nt, Homo sapiens
  misc_RNA (1)...(19): siRNA sense strand
cauuggaaguugccaugua

SEQ ID NO: 1681485 - RNA, 19 nt, Homo sapiens
  misc_RNA (1)...(19): siRNA sense strand
aauaaugaauggaggcaaa

SEQ ID NO: 1681486 - RNA, 19 nt, Homo sapiens
  misc_RNA (1)...(19): siRNA sense strand
gaaaacaggguuguauaua

SEQ ID NO: 1681487 - RNA, 19 nt, Homo sapiens
  misc_RNA (1)...(19): siRNA sense strand
ggaagggcaagcuaugaaa

SEQ ID NO: 1681488 - RNA, 19 nt, Homo sapiens
  misc_RNA (1)...(19): siRNA sense strand
ugacagcacuaauucuaca

SEQ ID NO: 1681489 - RNA, 19 nt, Homo sapiens
  misc_RNA (1)...(19): siRNA sense strand
gaaagggaacagaguaaag

SEQ ID NO: 1681490 - RNA, 19 nt, Homo sapiens
  misc_RNA (1)...(19): siRNA sense strand
caacaggaaucugguagag

SEQ ID NO: 1681491 - RNA, 19 nt, Homo sapiens
  misc_RNA (1)...(19): siRNA sense strand
caacaagaguaagacaaca

SEQ ID NO: 1681492 - RNA, 19 nt, Homo sapiens
  misc_RNA (1)...(19): siRNA sense strand
gcacuaauucuacacucuu

SEQ ID NO: 1681493 - RNA, 19 nt, Homo sapiens
  misc_RNA (1)...(19): siRNA sense strand
gagaaccaucuuugcauga

SEQ ID NO: 1681494 - RNA, 19 nt, Homo sapiens
  misc_RNA (1)...(19): siRNA sense strand
cacaagugcgucugcaaua

SEQ ID NO: 1681495 - RNA, 19 nt, Homo sapiens
  misc_RNA (1)...(19): siRNA sense strand
aaacaggguuguauauagc

SEQ ID NO: 1681496 - RNA, 19 nt, Homo sapiens
  misc_RNA (1)...(19): siRNA sense strand
acaagaguaagacaacaua

SEQ ID NO: 1681497 - RNA, 19 nt, Homo sapiens
  misc_RNA (1)...(19): siRNA sense strand
guaccgagaaccaucuuug

SEQ ID NO: 1681498 - RNA, 19 nt, Homo sapiens
  misc_RNA (1)...(19): siRNA sense strand
gguuguauauagccaugaa

SEQ ID NO: 1681499 - RNA, 19 nt, Homo sapiens
  misc_RNA (1)...(19): siRNA sense strand
ccagugggacuacguguug

SEQ ID NO: 1681500 - RNA, 19 nt, Homo sapiens
  misc_RNA (1)...(19): siRNA sense strand
ccaaggaugacagcacuaa

SEQ ID NO: 1681501 - RNA, 19 nt, Homo sapiens
  misc_RNA (1)...(19): siRNA sense strand
ccaaaccagcagcucauuu

SEQ ID NO: 1681502 - RNA, 19 nt, Homo sapiens
  misc_RNA (1)...(19): siRNA sense strand
uaugaaagggaacagagua

SEQ ID NO: 1681503 - RNA, 19 nt, Homo sapiens
  misc_RNA (1)...(19): siRNA sense strand
aaagggaacagaguaaaga

SEQ ID NO: 1681504 - RNA, 19 nt, Homo sapiens
  misc_RNA (1)...(19): siRNA sense strand
gaggcaaaccagucaacaa

SEQ ID NO: 1681505 - RNA, 19 nt, Homo sapiens
  misc_RNA (1)...(19): siRNA sense strand
caagugcgucugcaauaau

SEQ ID NO: 1681506 - RNA, 19 nt, Homo sapiens
  misc_RNA (1)...(19): siRNA sense strand
aaggaugacagcacuaauu

SEQ ID NO: 1681507 - RNA, 19 nt, Homo sapiens
  misc_RNA (1)...(19): siRNA sense strand
gaagggcaagcuaugaaag

SEQ ID NO: 1681508 - RNA, 19 nt, Homo sapiens
  misc_RNA (1)...(19): siRNA sense strand
ggguauagugaccagguua

SEQ ID NO: 1681509 - RNA, 19 nt, Homo sapiens
  misc_RNA (1)...(19): siRNA sense strand
uaaggaagggcaagcuaug

SEQ ID NO: 1681510 - RNA, 19 nt, Homo sapiens
  misc_RNA (1)...(19): siRNA sense strand
guacagacaacaggaaucu

SEQ ID NO: 1681511 - RNA, 19 nt, Homo sapiens
  misc_RNA (1)...(19): siRNA sense strand
aaaacaggguuguauauag

SEQ ID NO: 1681512 - RNA, 19 nt, Homo sapiens
  misc_RNA (1)...(19): siRNA sense strand
gcaggcaaggcuacuacuu

SEQ ID NO: 1681513 - RNA, 19 nt, Homo sapiens
  misc_RNA (1)...(19): siRNA sense strand
auagugaccagguuauauu

SEQ ID NO: 1681514 - RNA, 19 nt, Homo sapiens
  misc_RNA (1)...(19): siRNA sense strand
ccagucaacaagaguaaga

SEQ ID NO: 1681515 - RNA, 19 nt, Homo sapiens
  misc_RNA (1)...(19): siRNA sense strand
aaaccagucaacaagagua

SEQ ID NO: 1681516 - RNA, 19 nt, Homo sapiens
  misc_RNA (1)...(19): siRNA sense strand
caaaccagcagcucauuuu

SEQ ID NO: 1681517 - RNA, 19 nt, Homo sapiens
  misc_RNA (1)...(19): siRNA sense strand
ugaaagggaacagaguaaa

SEQ ID NO: 1681518 - RNA, 19 nt, Homo sapiens
  misc_RNA (1)...(19): siRNA sense strand
uauguaaucuacucaucca

SEQ ID NO: 1681519 - RNA, 19 nt, Homo sapiens
  misc_RNA (1)...(19): siRNA sense strand
gugaccagguuauauugca

SEQ ID NO: 1681520 - RNA, 19 nt, Homo sapiens
  misc_RNA (1)...(19): siRNA sense strand
aaucuacucauccauguug

SEQ ID NO: 1681521 - RNA, 19 nt, Homo sapiens
  misc_RNA (1)...(19): siRNA sense strand
agacaacaggaaucuggua

SEQ ID NO: 1681522 - RNA, 19 nt, Homo sapiens
  misc_RNA (1)...(19): siRNA sense strand
cgucugcaauaaugaaugg

SEQ ID NO: 1681523 - RNA, 19 nt, Homo sapiens
  misc_RNA (1)...(19): siRNA sense strand
gcaaguuuaaagaaucugu

SEQ ID NO: 1681524 - RNA, 19 nt, Homo sapiens
  misc_RNA (1)...(19): siRNA sense strand
cagcucaaggguauaguga

SEQ ID NO: 1681525 - RNA, 19 nt, Homo sapiens
  misc_RNA (1)...(19): siRNA sense strand
ccucauaccagugggacua

SEQ ID NO: 1681526 - RNA, 19 nt, Homo sapiens
  misc_RNA (1)...(19): siRNA sense strand
gggaacagaguaaagaaaa

SEQ ID NO: 1681527 - RNA, 19 nt, Homo sapiens
  misc_RNA (1)...(19): siRNA sense strand
agaaccaucuuugcaugau

SEQ ID NO: 1681528 - RNA, 19 nt, Homo sapiens
  misc_RNA (1)...(19): siRNA sense strand
ggcaaaccagucaacaaga

SEQ ID NO: 1681529 - RNA, 19 nt, Homo sapiens
  misc_RNA (1)...(19): siRNA sense strand
aagugcgucugcaauaaug

SEQ ID NO: 1681530 - RNA, 19 nt, Homo sapiens
  misc_RNA (1)...(19): siRNA sense strand
gguauagugaccagguuau

SEQ ID NO: 1681531 - RNA, 19 nt, Homo sapiens
  misc_RNA (1)...(19): siRNA sense strand
cugaaugcaaguuuaaaga

SEQ ID NO: 1681532 - RNA, 19 nt, Homo sapiens
  misc_RNA (1)...(19): siRNA sense strand
aauaaggaagggcaagcua

SEQ ID NO: 1681533 - RNA, 19 nt, Homo sapiens
  misc_RNA (1)...(19): siRNA sense strand
cacuaauucuacacucuuc

SEQ ID NO: 1681534 - RNA, 19 nt, Homo sapiens
  misc_RNA (1)...(19): siRNA sense strand
ccucuacccaucagaacuu

SEQ ID NO: 1681535 - RNA, 19 nt, Homo sapiens
  misc_RNA (1)...(19): siRNA sense strand
ucaacaagaguaagacaac

SEQ ID NO: 1681536 - RNA, 19 nt, Homo sapiens
  misc_RNA (1)...(19): siRNA sense strand
ucgauggaaccaaggauga

SEQ ID NO: 1681537 - RNA, 19 nt, Homo sapiens
  misc_RNA (1)...(19): siRNA sense strand
gaugacagcacuaauucua

SEQ ID NO: 1681538 - RNA, 19 nt, Homo sapiens
  misc_RNA (1)...(19): siRNA sense strand
gcaaaccagucaacaagag

SEQ ID NO: 1681539 - RNA, 19 nt, Homo sapiens
  misc_RNA (1)...(19): siRNA sense strand
cgauggagcucucgaugga

SEQ ID NO: 1681540 - RNA, 19 nt, Homo sapiens
  misc_RNA (1)...(19): siRNA sense strand
guaaucuacucauccaugu

SEQ ID NO: 1681541 - RNA, 19 nt, Homo sapiens
  misc_RNA (1)...(19): siRNA sense strand
acaagugcgucugcaauaa

SEQ ID NO: 1681542 - RNA, 19 nt, Homo sapiens
  misc_RNA (1)...(19): siRNA sense strand
cauuggaaguugccaugua

SEQ ID NO: 1681543 - RNA, 19 nt, Homo sapiens
  misc_RNA (1)...(19): siRNA sense strand
aauaaugaauggaggcaaa

SEQ ID NO: 1681544 - RNA, 19 nt, Homo sapiens
  misc_RNA (1)...(19): siRNA sense strand
gaaaacaggguuguauaua

SEQ ID NO: 1681545 - RNA, 19 nt, Homo sapiens
  misc_RNA (1)...(19): siRNA sense strand
ggaagggcaagcuaugaaa

SEQ ID NO: 1681546 - RNA, 19 nt, Homo sapiens
  misc_RNA (1)...(19): siRNA sense strand
ugacagcacuaauucuaca

SEQ ID NO: 1681547 - RNA, 19 nt, Homo sapiens
  misc_RNA (1)...(19): siRNA sense strand
gaaagggaacagaguaaag

SEQ ID NO: 1681548 - RNA, 19 nt, Homo sapiens
  misc_RNA (1)...(19): siRNA sense strand
caacaggaaucugguagag

SEQ ID NO: 1681549 - RNA, 19 nt, Homo sapiens
  misc_RNA (1)...(19): siRNA sense strand
caacaagaguaagacaaca

SEQ ID NO: 1681550 - RNA, 19 nt, Homo sapiens
  misc_RNA (1)...(19): siRNA sense strand
gcacuaauucuacacucuu

SEQ ID NO: 1681551 - RNA, 19 nt, Homo sapiens
  misc_RNA (1)...(19): siRNA sense strand
gagaaccaucuuugcauga

SEQ ID NO: 1681552 - RNA, 19 nt, Homo sapiens
  misc_RNA (1)...(19): siRNA sense strand
cacaagugcgucugcaaua

SEQ ID NO: 1681553 - RNA, 19 nt, Homo sapiens
  misc_RNA (1)...(19): siRNA sense strand
aaacaggguuguauauagc

SEQ ID NO: 1681554 - RNA, 19 nt, Homo sapiens
  misc_RNA (1)...(19): siRNA sense strand
acaagaguaagacaacaua

SEQ ID NO: 1681555 - RNA, 19 nt, Homo sapiens
  misc_RNA (1)...(19): siRNA sense strand
guaccgagaaccaucuuug

SEQ ID NO: 1681556 - RNA, 19 nt, Homo sapiens
  misc_RNA (1)...(19): siRNA sense strand
gguuguauauagccaugaa

SEQ ID NO: 1681557 - RNA, 19 nt, Homo sapiens
  misc_RNA (1)...(19): siRNA sense strand
ccagugggacuacguguug

SEQ ID NO: 1681558 - RNA, 19 nt, Homo sapiens
  misc_RNA (1)...(19): siRNA sense strand
ccaaggaugacagcacuaa

SEQ ID NO: 1681559 - RNA, 19 nt, Homo sapiens
  misc_RNA (1)...(19): siRNA sense strand
ccaaaccagcagcucauuu

SEQ ID NO: 1681560 - RNA, 19 nt, Homo sapiens
  misc_RNA (1)...(19): siRNA sense strand
uaugaaagggaacagagua

SEQ ID NO: 1681561 - RNA, 19 nt, Homo sapiens
  misc_RNA (1)...(19): siRNA sense strand
aaagggaacagaguaaaga

SEQ ID NO: 1681562 - RNA, 19 nt, Homo sapiens
  misc_RNA (1)...(19): siRNA sense strand
gaggcaaaccagucaacaa

SEQ ID NO: 1681563 - RNA, 19 nt, Homo sapiens
  misc_RNA (1)...(19): siRNA sense strand
caagugcgucugcaauaau

SEQ ID NO: 1681564 - RNA, 19 nt, Homo sapiens
  misc_RNA (1)...(19): siRNA sense strand
aaggaugacagcacuaauu

SEQ ID NO: 1681565 - RNA, 19 nt, Homo sapiens
  misc_RNA (1)...(19): siRNA sense strand
gaagggcaagcuaugaaag

SEQ ID NO: 1681566 - RNA, 19 nt, Homo sapiens
  misc_RNA (1)...(19): siRNA sense strand
ggguauagugaccagguua

SEQ ID NO: 1681567 - RNA, 19 nt, Homo sapiens
  misc_RNA (1)...(19): siRNA sense strand
uaaggaagggcaagcuaug

SEQ ID NO: 1681568 - RNA, 19 nt, Homo sapiens
  misc_RNA (1)...(19): siRNA sense strand
guacagacaacaggaaucu

SEQ ID NO: 1681569 - RNA, 19 nt, Homo sapiens
  misc_RNA (1)...(19): siRNA sense strand
aaaacaggguuguauauag

SEQ ID NO: 1681570 - RNA, 19 nt, Homo sapiens
  misc_RNA (1)...(19): siRNA sense strand
gcaggcaaggcuacuacuu

SEQ ID NO: 1681571 - RNA, 19 nt, Homo sapiens
  misc_RNA (1)...(19): siRNA sense strand
auagugaccagguuauauu

SEQ ID NO: 1681572 - RNA, 19 nt, Homo sapiens
  misc_RNA (1)...(19): siRNA sense strand
ccagucaacaagaguaaga

SEQ ID NO: 1681573 - RNA, 19 nt, Homo sapiens
  misc_RNA (1)...(19): siRNA sense strand
aaaccagucaacaagagua

SEQ ID NO: 1681574 - RNA, 19 nt, Homo sapiens
  misc_RNA (1)...(19): siRNA sense strand
caaaccagcagcucauuuu

SEQ ID NO: 1681575 - RNA, 19 nt, Homo sapiens
  misc_RNA (1)...(19): siRNA sense strand
ugaaagggaacagaguaaa

SEQ ID NO: 1681576 - RNA, 19 nt, Homo sapiens
  misc_RNA (1)...(19): siRNA sense strand
uauguaaucuacucaucca

SEQ ID NO: 1681577 - RNA, 19 nt, Homo sapiens
  misc_RNA (1)...(19): siRNA sense strand
gugaccagguuauauugca

SEQ ID NO: 1681578 - RNA, 19 nt, Homo sapiens
  misc_RNA (1)...(19): siRNA sense strand
aaucuacucauccauguug

SEQ ID NO: 1681579 - RNA, 19 nt, Homo sapiens
  misc_RNA (1)...(19): siRNA sense strand
agacaacaggaaucuggua

SEQ ID NO: 1681580 - RNA, 19 nt, Homo sapiens
  misc_RNA (1)...(19): siRNA sense strand
cgucugcaauaaugaaugg

SEQ ID NO: 1681581 - RNA, 19 nt, Homo sapiens
  misc_RNA (1)...(19): siRNA sense strand
gcaaguuuaaagaaucugu

SEQ ID NO: 1681582 - RNA, 19 nt, Homo sapiens
  misc_RNA (1)...(19): siRNA sense strand
cagcucaaggguauaguga

SEQ ID NO: 1681583 - RNA, 19 nt, Homo sapiens
  misc_RNA (1)...(19): siRNA sense strand
ccucauaccagugggacua

SEQ ID NO: 1681584 - RNA, 19 nt, Homo sapiens
  misc_RNA (1)...(19): siRNA sense strand
gggaacagaguaaagaaaa

SEQ ID NO: 1681585 - RNA, 19 nt, Homo sapiens
  misc_RNA (1)...(19): siRNA sense strand
agaaccaucuuugcaugau

SEQ ID NO: 1681586 - RNA, 19 nt, Homo sapiens
  misc_RNA (1)...(19): siRNA sense strand
ggcaaaccagucaacaaga

SEQ ID NO: 1681587 - RNA, 19 nt, Homo sapiens
  misc_RNA (1)...(19): siRNA sense strand
aagugcgucugcaauaaug

SEQ ID NO: 1681588 - RNA, 19 nt, Homo sapiens
  misc_RNA (1)...(19): siRNA sense strand
gguauagugaccagguuau

SEQ ID NO: 1681589 - RNA, 19 nt, Homo sapiens
  misc_RNA (1)...(19): siRNA sense strand
cugaaugcaaguuuaaaga

SEQ ID NO: 1681590 - RNA, 19 nt, Homo sapiens
  misc_RNA (1)...(19): siRNA sense strand
aauaaggaagggcaagcua

SEQ ID NO: 1681591 - RNA, 19 nt, Homo sapiens
  misc_RNA (1)...(19): siRNA sense strand
cacuaauucuacacucuuc

SEQ ID NO: 1681592 - RNA, 19 nt, Homo sapiens
  misc_RNA (1)...(19): siRNA sense strand
ccucuacccaucagaacuu

SEQ ID NO: 1681593 - RNA, 19 nt, Homo sapiens
  misc_RNA (1)...(19): siRNA sense strand
ucaacaagaguaagacaac

SEQ ID NO: 1681594 - RNA, 19 nt, Homo sapiens
  misc_RNA (1)...(19): siRNA sense strand
ucgauggaaccaaggauga

SEQ ID NO: 1681595 - RNA, 19 nt, Homo sapiens
  misc_RNA (1)...(19): siRNA sense strand
ucaaucaugucgagaaaua

SEQ ID NO: 1681596 - RNA, 19 nt, Homo sapiens
  misc_RNA (1)...(19): siRNA sense strand
gcaagagccuaauccauga

SEQ ID NO: 1681597 - RNA, 19 nt, Homo sapiens
  misc_RNA (1)...(19): siRNA sense strand
caagacaccucaaucaugu

SEQ ID NO: 1681598 - RNA, 19 nt, Homo sapiens
  misc_RNA (1)...(19): siRNA sense strand
gcuagucgaugcagcagua

SEQ ID NO: 1681599 - RNA, 19 nt, Homo sapiens
  misc_RNA (1)...(19): siRNA sense strand
ggccagaugucaagagaga

SEQ ID NO: 1681600 - RNA, 19 nt, Homo sapiens
  misc_RNA (1)...(19): siRNA sense strand
gccagaagcucaccggaau

SEQ ID NO: 1681601 - RNA, 19 nt, Homo sapiens
  misc_RNA (1)...(19): siRNA sense strand
ugucagagaagaccaauuu

SEQ ID NO: 1681602 - RNA, 19 nt, Homo sapiens
  misc_RNA (1)...(19): siRNA sense strand
caaaugcugucagagaaga

SEQ ID NO: 1681603 - RNA, 19 nt, Homo sapiens
  misc_RNA (1)...(19): siRNA sense strand
gcagauacaggcagaguuc

SEQ ID NO: 1681604 - RNA, 19 nt, Homo sapiens
  misc_RNA (1)...(19): siRNA sense strand
uaccagagcacaagaagaa

SEQ ID NO: 1681605 - RNA, 19 nt, Homo sapiens
  misc_RNA (1)...(19): siRNA sense strand
ccaagacaccucaaucaug

SEQ ID NO: 1681606 - RNA, 19 nt, Homo sapiens
  misc_RNA (1)...(19): siRNA sense strand
agaagaagcgcaagggaaa

SEQ ID NO: 1681607 - RNA, 19 nt, Homo sapiens
  misc_RNA (1)...(19): siRNA sense strand
agaagaagcaagagccuaa

SEQ ID NO: 1681608 - RNA, 19 nt, Homo sapiens
  misc_RNA (1)...(19): siRNA sense strand
ccucaaucaugucgagaaa

SEQ ID NO: 1681609 - RNA, 19 nt, Homo sapiens
  misc_RNA (1)...(19): siRNA sense strand
gcgacuggauguauaagca

SEQ ID NO: 1681610 - RNA, 19 nt, Homo sapiens
  misc_RNA (1)...(19): siRNA sense strand
uguauaagcaucgguuuaa

SEQ ID NO: 1681611 - RNA, 19 nt, Homo sapiens
  misc_RNA (1)...(19): siRNA sense strand
ccaaagggccagaugucaa

SEQ ID NO: 1681612 - RNA, 19 nt, Homo sapiens
  misc_RNA (1)...(19): siRNA sense strand
cagaagaagagaagcaaau

SEQ ID NO: 1681613 - RNA, 19 nt, Homo sapiens
  misc_RNA (1)...(19): siRNA sense strand
gcccagugguccagacaau

SEQ ID NO: 1681614 - RNA, 19 nt, Homo sapiens
  misc_RNA (1)...(19): siRNA sense strand
gauacaggcagaguucuug

SEQ ID NO: 1681615 - RNA, 19 nt, Homo sapiens
  misc_RNA (1)...(19): siRNA sense strand
gcccaagacaccucaauca

SEQ ID NO: 1681616 - RNA, 19 nt, Homo sapiens
  misc_RNA (1)...(19): siRNA sense strand
gagaaauaacgcagauaca

SEQ ID NO: 1681617 - RNA, 19 nt, Homo sapiens
  misc_RNA (1)...(19): siRNA sense strand
ucuaacugguuuaucaaug

SEQ ID NO: 1681618 - RNA, 19 nt, Homo sapiens
  misc_RNA (1)...(19): siRNA sense strand
cagagaagaccaauuuguc

SEQ ID NO: 1681619 - RNA, 19 nt, Homo sapiens
  misc_RNA (1)...(19): siRNA sense strand
gcagaguucuugccuuacc

SEQ ID NO: 1681620 - RNA, 19 nt, Homo sapiens
  misc_RNA (1)...(19): siRNA sense strand
caaagggccagaugucaag

SEQ ID NO: 1681621 - RNA, 19 nt, Homo sapiens
  misc_RNA (1)...(19): siRNA sense strand
gaagaagagaagcaaaugc

SEQ ID NO: 1681622 - RNA, 19 nt, Homo sapiens
  misc_RNA (1)...(19): siRNA sense strand
gcaaaugcugucagagaag

SEQ ID NO: 1681623 - RNA, 19 nt, Homo sapiens
  misc_RNA (1)...(19): siRNA sense strand
ucagagaagaccaauuugu

SEQ ID NO: 1681624 - RNA, 19 nt, Homo sapiens
  misc_RNA (1)...(19): siRNA sense strand
gacgcauucucccggauau

SEQ ID NO: 1681625 - RNA, 19 nt, Homo sapiens
  misc_RNA (1)...(19): siRNA sense strand
ccagaagcucaccggaaua

SEQ ID NO: 1681626 - RNA, 19 nt, Homo sapiens
  misc_RNA (1)...(19): siRNA sense strand
guauaagcaucgguuuaag

SEQ ID NO: 1681627 - RNA, 19 nt, Homo sapiens
  misc_RNA (1)...(19): siRNA sense strand
gaagcaagagccuaaucca

SEQ ID NO: 1681628 - RNA, 19 nt, Homo sapiens
  misc_RNA (1)...(19): siRNA sense strand
cuaacugguuuaucaaugc

SEQ ID NO: 1681629 - RNA, 19 nt, Homo sapiens
  misc_RNA (1)...(19): siRNA sense strand
cgagaaauaacgcagauac

SEQ ID NO: 1681630 - RNA, 19 nt, Homo sapiens
  misc_RNA (1)...(19): siRNA sense strand
ccagugguccagacaaugu

SEQ ID NO: 1681631 - RNA, 19 nt, Homo sapiens
  misc_RNA (1)...(19): siRNA sense strand
gaagaagcaagagccuaau

SEQ ID NO: 1681632 - RNA, 19 nt, Homo sapiens
  misc_RNA (1)...(19): siRNA sense strand
gaaacgaccccaucauugg

SEQ ID NO: 1681633 - RNA, 19 nt, Homo sapiens
  misc_RNA (1)...(19): siRNA sense strand
cuccgcgacuggauguaua

SEQ ID NO: 1681634 - RNA, 19 nt, Homo sapiens
  misc_RNA (1)...(19): siRNA sense strand
gucgagaaauaacgcagau

SEQ ID NO: 1681635 - RNA, 19 nt, Homo sapiens
  misc_RNA (1)...(19): siRNA sense strand
gaccaauuugucuuuguug

SEQ ID NO: 1681636 - RNA, 19 nt, Homo sapiens
  misc_RNA (1)...(19): siRNA sense strand
ccacaaaacgggcaaagau

SEQ ID NO: 1681637 - RNA, 19 nt, Homo sapiens
  misc_RNA (1)...(19): siRNA sense strand
agaagaagagaagcaaaug

SEQ ID NO: 1681638 - RNA, 19 nt, Homo sapiens
  misc_RNA (1)...(19): siRNA sense strand
cagaagcucaccggaauag

SEQ ID NO: 1681639 - RNA, 19 nt, Homo sapiens
  misc_RNA (1)...(19): siRNA sense strand
ucccggauaugcuucaaca

SEQ ID NO: 1681640 - RNA, 19 nt, Homo sapiens
  misc_RNA (1)...(19): siRNA sense strand
agacgcauucucccggaua

SEQ ID NO: 1681641 - RNA, 19 nt, Homo sapiens
  misc_RNA (1)...(19): siRNA sense strand
uaacugguuuaucaaugcu

SEQ ID NO: 1681642 - RNA, 19 nt, Homo sapiens
  misc_RNA (1)...(19): siRNA sense strand
ccaaagcccagcccaagac

SEQ ID NO: 1681643 - RNA, 19 nt, Homo sapiens
  misc_RNA (1)...(19): siRNA sense strand
caaucaugucgagaaauaa

SEQ ID NO: 1681644 - RNA, 19 nt, Homo sapiens
  misc_RNA (1)...(19): siRNA sense strand
agaaauaacgcagauacag

SEQ ID NO: 1681645 - RNA, 19 nt, Homo sapiens
  misc_RNA (1)...(19): siRNA sense strand
gccaaagggccagauguca

SEQ ID NO: 1681646 - RNA, 19 nt, Homo sapiens
  misc_RNA (1)...(19): siRNA sense strand
cagccgaguccguuaagau

SEQ ID NO: 1681647 - RNA, 19 nt, Homo sapiens
  misc_RNA (1)...(19): siRNA sense strand
gaaggaaccugcugucgaa

SEQ ID NO: 1681648 - RNA, 19 nt, Homo sapiens
  misc_RNA (1)...(19): siRNA sense strand
caagauggcucuggauaua

SEQ ID NO: 1681649 - RNA, 19 nt, Homo sapiens
  misc_RNA (1)...(19): siRNA sense strand
gaaagaaacugugauugug

SEQ ID NO: 1681650 - RNA, 19 nt, Homo sapiens
  misc_RNA (1)...(19): siRNA sense strand
ggaagacgcuaaacccaaa

SEQ ID NO: 1681651 - RNA, 19 nt, Homo sapiens
  misc_RNA (1)...(19): siRNA sense strand
ggaagaggcugaagauaag

SEQ ID NO: 1681652 - RNA, 19 nt, Homo sapiens
  misc_RNA (1)...(19): siRNA sense strand
ggagaagucugagaaagaa

SEQ ID NO: 1681653 - RNA, 19 nt, Homo sapiens
  misc_RNA (1)...(19): siRNA sense strand
gaagccaagucaccaguaa

SEQ ID NO: 1681654 - RNA, 19 nt, Homo sapiens
  misc_RNA (1)...(19): siRNA sense strand
caagaagccugaggagaaa

SEQ ID NO: 1681655 - RNA, 19 nt, Homo sapiens
  misc_RNA (1)...(19): siRNA sense strand
ccaagugacugaagaagug

SEQ ID NO: 1681656 - RNA, 19 nt, Homo sapiens
  misc_RNA (1)...(19): siRNA sense strand
caaagaauccaaaguugaa

SEQ ID NO: 1681657 - RNA, 19 nt, Homo sapiens
  misc_RNA (1)...(19): siRNA sense strand
ccaagaagccugaggagaa

SEQ ID NO: 1681658 - RNA, 19 nt, Homo sapiens
  misc_RNA (1)...(19): siRNA sense strand
gaggagugguuccgaguga

SEQ ID NO: 1681659 - RNA, 19 nt, Homo sapiens
  misc_RNA (1)...(19): siRNA sense strand
gaaggcagaggaagagaaa

SEQ ID NO: 1681660 - RNA, 19 nt, Homo sapiens
  misc_RNA (1)...(19): siRNA sense strand
gaaggaagaggcugaagau

SEQ ID NO: 1681661 - RNA, 19 nt, Homo sapiens
  misc_RNA (1)...(19): siRNA sense strand
ggugaagagugucggauug

SEQ ID NO: 1681662 - RNA, 19 nt, Homo sapiens
  misc_RNA (1)...(19): siRNA sense strand
gcguggaccugcagaagaa

SEQ ID NO: 1681663 - RNA, 19 nt, Homo sapiens
  misc_RNA (1)...(19): siRNA sense strand
caacgaaggaggaagcaaa

SEQ ID NO: 1681664 - RNA, 19 nt, Homo sapiens
  misc_RNA (1)...(19): siRNA sense strand
caaagaaggcagaggaaga

SEQ ID NO: 1681665 - RNA, 19 nt, Homo sapiens
  misc_RNA (1)...(19): siRNA sense strand
aaacagaggagaagaagga

SEQ ID NO: 1681666 - RNA, 19 nt, Homo sapiens
  misc_RNA (1)...(19): siRNA sense strand
cagccaaggugaacacaga

SEQ ID NO: 1681667 - RNA, 19 nt, Homo sapiens
  misc_RNA (1)...(19): siRNA sense strand
ccaaagaauccaaaguuga

SEQ ID NO: 1681668 - RNA, 19 nt, Homo sapiens
  misc_RNA (1)...(19): siRNA sense strand
gaugugaagucuccagaag

SEQ ID NO: 1681669 - RNA, 19 nt, Homo sapiens
  misc_RNA (1)...(19): siRNA sense strand
gcgaagagaagaucaaagu

SEQ ID NO: 1681670 - RNA, 19 nt, Homo sapiens
  misc_RNA (1)...(19): siRNA sense strand
gcccaaagaauccaaaguu

SEQ ID NO: 1681671 - RNA, 19 nt, Homo sapiens
  misc_RNA (1)...(19): siRNA sense strand
ggagaaagaggccaaagag

SEQ ID NO: 1681672 - RNA, 19 nt, Homo sapiens
  misc_RNA (1)...(19): siRNA sense strand
aggaagaggcugaagauaa

SEQ ID NO: 1681673 - RNA, 19 nt, Homo sapiens
  misc_RNA (1)...(19): siRNA sense strand
cugaagaagugacugaaga

SEQ ID NO: 1681674 - RNA, 19 nt, Homo sapiens
  misc_RNA (1)...(19): siRNA sense strand
cagcaagccuccagagaag

SEQ ID NO: 1681675 - RNA, 19 nt, Homo sapiens
  misc_RNA (1)...(19): siRNA sense strand
aggaggagauaacugagua

SEQ ID NO: 1681676 - RNA, 19 nt, Homo sapiens
  misc_RNA (1)...(19): siRNA sense strand
ucaaagugguggagaaguc

SEQ ID NO: 1681677 - RNA, 19 nt, Homo sapiens
  misc_RNA (1)...(19): siRNA sense strand
gcaaaccagcagagaagaa

SEQ ID NO: 1681678 - RNA, 19 nt, Homo sapiens
  misc_RNA (1)...(19): siRNA sense strand
agaagugacugaagaagag

SEQ ID NO: 1681679 - RNA, 19 nt, Homo sapiens
  misc_RNA (1)...(19): siRNA sense strand
agaaagaaacugugauugu

SEQ ID NO: 1681680 - RNA, 19 nt, Homo sapiens
  misc_RNA (1)...(19): siRNA sense strand
ggccaagucuccagcaaag

SEQ ID NO: 1681681 - RNA, 19 nt, Homo sapiens
  misc_RNA (1)...(19): siRNA sense strand
cccaaagaauccaaaguug

SEQ ID NO: 1681682 - RNA, 19 nt, Homo sapiens
  misc_RNA (1)...(19): siRNA sense strand
ugagaaagaaacugugauu

SEQ ID NO: 1681683 - RNA, 19 nt, Homo sapiens
  misc_RNA (1)...(19): siRNA sense strand
ccaagaaggaaccagauga

SEQ ID NO: 1681684 - RNA, 19 nt, Homo sapiens
  misc_RNA (1)...(19): siRNA sense strand
ccaaagccaaggaagauga

SEQ ID NO: 1681685 - RNA, 19 nt, Homo sapiens
  misc_RNA (1)...(19): siRNA sense strand
cagagaaggccacagaaga

SEQ ID NO: 1681686 - RNA, 19 nt, Homo sapiens
  misc_RNA (1)...(19): siRNA sense strand
ccuggaaggugaagagugu

SEQ ID NO: 1681687 - RNA, 19 nt, Homo sapiens
  misc_RNA (1)...(19): siRNA sense strand
gagaagaaggacagcaaga

SEQ ID NO: 1681688 - RNA, 19 nt, Homo sapiens
  misc_RNA (1)...(19): siRNA sense strand
caagucaccaguaaaggaa

SEQ ID NO: 1681689 - RNA, 19 nt, Homo sapiens
  misc_RNA (1)...(19): siRNA sense strand
ccgcccagcugcgagaaua

SEQ ID NO: 1681690 - RNA, 19 nt, Homo sapiens
  misc_RNA (1)...(19): siRNA sense strand
ggaagccaagucaccagua

SEQ ID NO: 1681691 - RNA, 19 nt, Homo sapiens
  misc_RNA (1)...(19): siRNA sense strand
gagaaagaaacugugauug

SEQ ID NO: 1681692 - RNA, 19 nt, Homo sapiens
  misc_RNA (1)...(19): siRNA sense strand
gagaagaagaaacaaaguc

SEQ ID NO: 1681693 - RNA, 19 nt, Homo sapiens
  misc_RNA (1)...(19): siRNA sense strand
agauggcucuggauauaga

SEQ ID NO: 1681694 - RNA, 19 nt, Homo sapiens
  misc_RNA (1)...(19): siRNA sense strand
ggaggcagcaccggagaaa

SEQ ID NO: 1681695 - RNA, 19 nt, Homo sapiens
  misc_RNA (1)...(19): siRNA sense strand
gaagcaaaguccccugaga

SEQ ID NO: 1681696 - RNA, 19 nt, Homo sapiens
  misc_RNA (1)...(19): siRNA sense strand
gaagcaaaguccccugaga

SEQ ID NO: 1681697 - RNA, 19 nt, Homo sapiens
  misc_RNA (1)...(19): siRNA sense strand
gaagcaaaguccccugaga

SEQ ID NO: 1681698 - RNA, 19 nt, Homo sapiens
  misc_RNA (1)...(19): siRNA sense strand
gaagcaaaguccccugaga

SEQ ID NO: 1681699 - RNA, 19 nt, Homo sapiens
  misc_RNA (1)...(19): siRNA sense strand
gaagcaaaguccccugaga

SEQ ID NO: 1681700 - RNA, 19 nt, Homo sapiens
  misc_RNA (1)...(19): siRNA sense strand
caaaggaagaggcaaaguc

SEQ ID NO: 1681701 - RNA, 19 nt, Homo sapiens
  misc_RNA (1)...(19): siRNA sense strand
gaagucaaguccccugaga

SEQ ID NO: 1681702 - RNA, 19 nt, Homo sapiens
  misc_RNA (1)...(19): siRNA sense strand
ccaagucaccaguaaagga

SEQ ID NO: 1681703 - RNA, 19 nt, Homo sapiens
  misc_RNA (1)...(19): siRNA sense strand
gaaggacuccccaaaauuc

SEQ ID NO: 1681704 - RNA, 19 nt, Homo sapiens
  misc_RNA (1)...(19): siRNA sense strand
cagagaaggaggaagcaaa

SEQ ID NO: 1681705 - RNA, 19 nt, Homo sapiens
  misc_RNA (1)...(19): siRNA sense strand
cagagaaggaggaagcaaa

SEQ ID NO: 1681706 - RNA, 19 nt, Homo sapiens
  misc_RNA (1)...(19): siRNA sense strand
cagaaggacuccccaaaau

SEQ ID NO: 1681707 - RNA, 19 nt, Homo sapiens
  misc_RNA (1)...(19): siRNA sense strand
caagaaggaaccagaugau

SEQ ID NO: 1681708 - RNA, 19 nt, Homo sapiens
  misc_RNA (1)...(19): siRNA sense strand
aaaggaagaggcaaaguca

SEQ ID NO: 1681709 - RNA, 19 nt, Homo sapiens
  misc_RNA (1)...(19): siRNA sense strand
aaaggaagaggcaaaguca

SEQ ID NO: 1681710 - RNA, 19 nt, Homo sapiens
  misc_RNA (1)...(19): siRNA sense strand
aaaggaagaggcaaaguca

SEQ ID NO: 1681711 - RNA, 19 nt, Homo sapiens
  misc_RNA (1)...(19): siRNA sense strand
gggagaagaagaaacaaag

SEQ ID NO: 1681712 - RNA, 19 nt, Homo sapiens
  misc_RNA (1)...(19): siRNA sense strand
ggagaagaagaaacaaagu

SEQ ID NO: 1681713 - RNA, 19 nt, Homo sapiens
  misc_RNA (1)...(19): siRNA sense strand
ccaagucuccaacgaagga

SEQ ID NO: 1681714 - RNA, 19 nt, Homo sapiens
  misc_RNA (1)...(19): siRNA sense strand
cagcaaaggaagaggcaaa

SEQ ID NO: 1681715 - RNA, 19 nt, Homo sapiens
  misc_RNA (1)...(19): siRNA sense strand
ccaagucuccagcaaagga

SEQ ID NO: 1681716 - RNA, 19 nt, Homo sapiens
  misc_RNA (1)...(19): siRNA sense strand
ugaagaagugacugaagaa

SEQ ID NO: 1681717 - RNA, 19 nt, Homo sapiens
  misc_RNA (1)...(19): siRNA sense strand
gaggugaaguccccaguga

SEQ ID NO: 1681718 - RNA, 19 nt, Homo sapiens
  misc_RNA (1)...(19): siRNA sense strand
uaaaggaagaggcaaaguc

SEQ ID NO: 1681719 - RNA, 19 nt, Homo sapiens
  misc_RNA (1)...(19): siRNA sense strand
gucaagauggcucuggaua

SEQ ID NO: 1681720 - RNA, 19 nt, Homo sapiens
  misc_RNA (1)...(19): siRNA sense strand
acagcaagccuccagagaa

SEQ ID NO: 1681721 - RNA, 19 nt, Homo sapiens
  misc_RNA (1)...(19): siRNA sense strand
acaagacccucucaaaaga

SEQ ID NO: 1681722 - RNA, 19 nt, Homo sapiens
  misc_RNA (1)...(19): siRNA sense strand
cagcaaaccagcagagaag

SEQ ID NO: 1681723 - RNA, 19 nt, Homo sapiens
  misc_RNA (1)...(19): siRNA sense strand
gacgcuaaacccaaagaaa

SEQ ID NO: 1681724 - RNA, 19 nt, Homo sapiens
  misc_RNA (1)...(19): siRNA sense strand
ggugaaggaagacgcuaaa

SEQ ID NO: 1681725 - RNA, 19 nt, Homo sapiens
  misc_RNA (1)...(19): siRNA sense strand
agacccaagugacugaaga

SEQ ID NO: 1681726 - RNA, 19 nt, Homo sapiens
  misc_RNA (1)...(19): siRNA sense strand
gcucagcgcaggaggagau

SEQ ID NO: 1681727 - RNA, 19 nt, Homo sapiens
  misc_RNA (1)...(19): siRNA sense strand
gaacaccaagugggagaug

SEQ ID NO: 1681728 - RNA, 19 nt, Homo sapiens
  misc_RNA (1)...(19): siRNA sense strand
ccaagacuccagcgaagga

SEQ ID NO: 1681729 - RNA, 19 nt, Homo sapiens
  misc_RNA (1)...(19): siRNA sense strand
ucaagauggcucuggauau

SEQ ID NO: 1681730 - RNA, 19 nt, Homo sapiens
  misc_RNA (1)...(19): siRNA sense strand
uggagaagucugagaaaga

SEQ ID NO: 1681731 - RNA, 19 nt, Homo sapiens
  misc_RNA (1)...(19): siRNA sense strand
gaaggaagaagcaaaaucu

SEQ ID NO: 1681732 - RNA, 19 nt, Homo sapiens
  misc_RNA (1)...(19): siRNA sense strand
ugacugaagaagugacuga

SEQ ID NO: 1681733 - RNA, 19 nt, Homo sapiens
  misc_RNA (1)...(19): siRNA sense strand
cccaggaggugaaagucaa

SEQ ID NO: 1681734 - RNA, 19 nt, Homo sapiens
  misc_RNA (1)...(19): siRNA sense strand
gaaggccacagaagacaag

SEQ ID NO: 1681735 - RNA, 19 nt, Homo sapiens
  misc_RNA (1)...(19): siRNA sense strand
ggccaaagccaaggaagau

SEQ ID NO: 1681736 - RNA, 19 nt, Homo sapiens
  misc_RNA (1)...(19): siRNA sense strand
gaagaagugacugaagaag

SEQ ID NO: 1681737 - RNA, 19 nt, Homo sapiens
  misc_RNA (1)...(19): siRNA sense strand
caaggaacccagcaaacca

SEQ ID NO: 1681738 - RNA, 19 nt, Homo sapiens
  misc_RNA (1)...(19): siRNA sense strand
agaagaaggacagcaagaa

SEQ ID NO: 1681739 - RNA, 19 nt, Homo sapiens
  misc_RNA (1)...(19): siRNA sense strand
agaucaaagugguggagaa

SEQ ID NO: 1681740 - RNA, 19 nt, Homo sapiens
  misc_RNA (1)...(19): siRNA sense strand
ugacaagacccucucaaaa

SEQ ID NO: 1681741 - RNA, 19 nt, Homo sapiens
  misc_RNA (1)...(19): siRNA sense strand
gaagaggcugaagauaaga

SEQ ID NO: 1681742 - RNA, 19 nt, Homo sapiens
  misc_RNA (1)...(19): siRNA sense strand
ccaagguggaggagaagaa

SEQ ID NO: 1681743 - RNA, 19 nt, Homo sapiens
  misc_RNA (1)...(19): siRNA sense strand
gagcugaggaacaccaagu

SEQ ID NO: 1681744 - RNA, 19 nt, Homo sapiens
  misc_RNA (1)...(19): siRNA sense strand
agacagaggagacccaagu

SEQ ID NO: 1681745 - RNA, 19 nt, Homo sapiens
  misc_RNA (1)...(19): siRNA sense strand
ccagcaaaccagcagagaa

SEQ ID NO: 1681746 - RNA, 19 nt, Homo sapiens
  misc_RNA (1)...(19): siRNA sense strand
aggagaaacccaagacaga

SEQ ID NO: 1681747 - RNA, 19 nt, Homo sapiens
  misc_RNA (1)...(19): siRNA sense strand
gaaggaggcuuguuuaaac

SEQ ID NO: 1681748 - RNA, 19 nt, Homo sapiens
  misc_RNA (1)...(19): siRNA sense strand
gcagaggccuacacgauuu

SEQ ID NO: 1681749 - RNA, 19 nt, Homo sapiens
  misc_RNA (1)...(19): siRNA sense strand
gaggaaagaccacccauuu

SEQ ID NO: 1681750 - RNA, 19 nt, Homo sapiens
  misc_RNA (1)...(19): siRNA sense strand
uacaggaacuucuaaauga

SEQ ID NO: 1681751 - RNA, 19 nt, Homo sapiens
  misc_RNA (1)...(19): siRNA sense strand
uaaauucgaaccaccauua

SEQ ID NO: 1681752 - RNA, 19 nt, Homo sapiens
  misc_RNA (1)...(19): siRNA sense strand
ggaaggaggcuuguuuaaa

SEQ ID NO: 1681753 - RNA, 19 nt, Homo sapiens
  misc_RNA (1)...(19): siRNA sense strand
gaaguuugcgcccucauaa

SEQ ID NO: 1681754 - RNA, 19 nt, Homo sapiens
  misc_RNA (1)...(19): siRNA sense strand
ggaaagaccacccauuugg

SEQ ID NO: 1681755 - RNA, 19 nt, Homo sapiens
  misc_RNA (1)...(19): siRNA sense strand
gagcacaagccaagaaguu

SEQ ID NO: 1681756 - RNA, 19 nt, Homo sapiens
  misc_RNA (1)...(19): siRNA sense strand
gaacugggagugcgccauu

SEQ ID NO: 1681757 - RNA, 19 nt, Homo sapiens
  misc_RNA (1)...(19): siRNA sense strand
ggaauacaggaacuucuaa

SEQ ID NO: 1681758 - RNA, 19 nt, Homo sapiens
  misc_RNA (1)...(19): siRNA sense strand
gcacaagccaagaaguuug

SEQ ID NO: 1681759 - RNA, 19 nt, Homo sapiens
  misc_RNA (1)...(19): siRNA sense strand
gaggaaagcauggaggaaa

SEQ ID NO: 1681760 - RNA, 19 nt, Homo sapiens
  misc_RNA (1)...(19): siRNA sense strand
gaauacaggaacuucuaaa

SEQ ID NO: 1681761 - RNA, 19 nt, Homo sapiens
  misc_RNA (1)...(19): siRNA sense strand
gggaaggaggcuuguuuaa

SEQ ID NO: 1681762 - RNA, 19 nt, Homo sapiens
  misc_RNA (1)...(19): siRNA sense strand
acaggaacuucuaaaugaa

SEQ ID NO: 1681763 - RNA, 19 nt, Homo sapiens
  misc_RNA (1)...(19): siRNA sense strand
ggaggaaagaccacccauu

SEQ ID NO: 1681764 - RNA, 19 nt, Homo sapiens
  misc_RNA (1)...(19): siRNA sense strand
ggccagccaucacaaucaa

SEQ ID NO: 1681765 - RNA, 19 nt, Homo sapiens
  misc_RNA (1)...(19): siRNA sense strand
caaucaaacagauccuauu

SEQ ID NO: 1681766 - RNA, 19 nt, Homo sapiens
  misc_RNA (1)...(19): siRNA sense strand
auacaggaacuucuaaaug

SEQ ID NO: 1681767 - RNA, 19 nt, Homo sapiens
  misc_RNA (1)...(19): siRNA sense strand
ggaaagcauggaggaaaga

SEQ ID NO: 1681768 - RNA, 19 nt, Homo sapiens
  misc_RNA (1)...(19): siRNA sense strand
gugggaaggaggcuuguuu

SEQ ID NO: 1681769 - RNA, 19 nt, Homo sapiens
  misc_RNA (1)...(19): siRNA sense strand
cagaguggaguacgagaaa

SEQ ID NO: 1681770 - RNA, 19 nt, Homo sapiens
  misc_RNA (1)...(19): siRNA sense strand
auucgaaccaccauuauuu

SEQ ID NO: 1681771 - RNA, 19 nt, Homo sapiens
  misc_RNA (1)...(19): siRNA sense strand
ggaggcuuguuuaaacuac

SEQ ID NO: 1681772 - RNA, 19 nt, Homo sapiens
  misc_RNA (1)...(19): siRNA sense strand
cagaggccuacacgauuua

SEQ ID NO: 1681773 - RNA, 19 nt, Homo sapiens
  misc_RNA (1)...(19): siRNA sense strand
ugggaaggaggcuuguuua

SEQ ID NO: 1681774 - RNA, 19 nt, Homo sapiens
  misc_RNA (1)...(19): siRNA sense strand
gaacuucuaaaugaaccaa

SEQ ID NO: 1681775 - RNA, 19 nt, Homo sapiens
  misc_RNA (1)...(19): siRNA sense strand
uuucguggcugucccaaca

SEQ ID NO: 1681776 - RNA, 19 nt, Homo sapiens
  misc_RNA (1)...(19): siRNA sense strand
agaaguuugcgcccucaua

SEQ ID NO: 1681777 - RNA, 19 nt, Homo sapiens
  misc_RNA (1)...(19): siRNA sense strand
gaaaaggguccgagcacaa

SEQ ID NO: 1681778 - RNA, 19 nt, Homo sapiens
  misc_RNA (1)...(19): siRNA sense strand
cagugugccuguccaucuu

SEQ ID NO: 1681779 - RNA, 19 nt, Homo sapiens
  misc_RNA (1)...(19): siRNA sense strand
aagcagaggccuacacgau

SEQ ID NO: 1681780 - RNA, 19 nt, Homo sapiens
  misc_RNA (1)...(19): siRNA sense strand
uuuaaacuacggaugcuuu

SEQ ID NO: 1681781 - RNA, 19 nt, Homo sapiens
  misc_RNA (1)...(19): siRNA sense strand
ccaagacccagcucaagca

SEQ ID NO: 1681782 - RNA, 19 nt, Homo sapiens
  misc_RNA (1)...(19): siRNA sense strand
aggaauacaggaacuucua

SEQ ID NO: 1681783 - RNA, 19 nt, Homo sapiens
  misc_RNA (1)...(19): siRNA sense strand
guaaauucgaaccaccauu

SEQ ID NO: 1681784 - RNA, 19 nt, Homo sapiens
  misc_RNA (1)...(19): siRNA sense strand
cuaaaugaaccaaauaucc

SEQ ID NO: 1681785 - RNA, 19 nt, Homo sapiens
  misc_RNA (1)...(19): siRNA sense strand
ccaucacaaucaaacagau

SEQ ID NO: 1681786 - RNA, 19 nt, Homo sapiens
  misc_RNA (1)...(19): siRNA sense strand
ggaggccagccaucacaau

SEQ ID NO: 1681787 - RNA, 19 nt, Homo sapiens
  misc_RNA (1)...(19): siRNA sense strand
uauuucacccgaaugugua

SEQ ID NO: 1681788 - RNA, 19 nt, Homo sapiens
  misc_RNA (1)...(19): siRNA sense strand
aggaaagcauggaggaaag

SEQ ID NO: 1681789 - RNA, 19 nt, Homo sapiens
  misc_RNA (1)...(19): siRNA sense strand
gaggccagccaucacaauc

SEQ ID NO: 1681790 - RNA, 19 nt, Homo sapiens
  misc_RNA (1)...(19): siRNA sense strand
aggaaagaccacccauuug

SEQ ID NO: 1681791 - RNA, 19 nt, Homo sapiens
  misc_RNA (1)...(19): siRNA sense strand
acaaucaaacagauccuau

SEQ ID NO: 1681792 - RNA, 19 nt, Homo sapiens
  misc_RNA (1)...(19): siRNA sense strand
gaaggaggcuuguuuaaac

SEQ ID NO: 1681793 - RNA, 19 nt, Homo sapiens
  misc_RNA (1)...(19): siRNA sense strand
gcagaggccuacacgauuu

SEQ ID NO: 1681794 - RNA, 19 nt, Homo sapiens
  misc_RNA (1)...(19): siRNA sense strand
gaggaaagaccacccauuu

SEQ ID NO: 1681795 - RNA, 19 nt, Homo sapiens
  misc_RNA (1)...(19): siRNA sense strand
uacaggaacuucuaaauga

SEQ ID NO: 1681796 - RNA, 19 nt, Homo sapiens
  misc_RNA (1)...(19): siRNA sense strand
uaaauucgaaccaccauua

SEQ ID NO: 1681797 - RNA, 19 nt, Homo sapiens
  misc_RNA (1)...(19): siRNA sense strand
ggaaggaggcuuguuuaaa

SEQ ID NO: 1681798 - RNA, 19 nt, Homo sapiens
  misc_RNA (1)...(19): siRNA sense strand
gaaguuugcgcccucauaa

SEQ ID NO: 1681799 - RNA, 19 nt, Homo sapiens
  misc_RNA (1)...(19): siRNA sense strand
ggaaagaccacccauuugg

SEQ ID NO: 1681800 - RNA, 19 nt, Homo sapiens
  misc_RNA (1)...(19): siRNA sense strand
gagcacaagccaagaaguu

SEQ ID NO: 1681801 - RNA, 19 nt, Homo sapiens
  misc_RNA (1)...(19): siRNA sense strand
gaacugggagugcgccauu

SEQ ID NO: 1681802 - RNA, 19 nt, Homo sapiens
  misc_RNA (1)...(19): siRNA sense strand
ggaauacaggaacuucuaa

SEQ ID NO: 1681803 - RNA, 19 nt, Homo sapiens
  misc_RNA (1)...(19): siRNA sense strand
gcacaagccaagaaguuug

SEQ ID NO: 1681804 - RNA, 19 nt, Homo sapiens
  misc_RNA (1)...(19): siRNA sense strand
gaggaaagcauggaggaaa

SEQ ID NO: 1681805 - RNA, 19 nt, Homo sapiens
  misc_RNA (1)...(19): siRNA sense strand
gaauacaggaacuucuaaa

SEQ ID NO: 1681806 - RNA, 19 nt, Homo sapiens
  misc_RNA (1)...(19): siRNA sense strand
gggaaggaggcuuguuuaa

SEQ ID NO: 1681807 - RNA, 19 nt, Homo sapiens
  misc_RNA (1)...(19): siRNA sense strand
acaggaacuucuaaaugaa

SEQ ID NO: 1681808 - RNA, 19 nt, Homo sapiens
  misc_RNA (1)...(19): siRNA sense strand
ggaggaaagaccacccauu

SEQ ID NO: 1681809 - RNA, 19 nt, Homo sapiens
  misc_RNA (1)...(19): siRNA sense strand
ggccagccaucacaaucaa

SEQ ID NO: 1681810 - RNA, 19 nt, Homo sapiens
  misc_RNA (1)...(19): siRNA sense strand
caaucaaacagauccuauu

SEQ ID NO: 1681811 - RNA, 19 nt, Homo sapiens
  misc_RNA (1)...(19): siRNA sense strand
auacaggaacuucuaaaug

SEQ ID NO: 1681812 - RNA, 19 nt, Homo sapiens
  misc_RNA (1)...(19): siRNA sense strand
ggaaagcauggaggaaaga

SEQ ID NO: 1681813 - RNA, 19 nt, Homo sapiens
  misc_RNA (1)...(19): siRNA sense strand
gugggaaggaggcuuguuu

SEQ ID NO: 1681814 - RNA, 19 nt, Homo sapiens
  misc_RNA (1)...(19): siRNA sense strand
cagaguggaguacgagaaa

SEQ ID NO: 1681815 - RNA, 19 nt, Homo sapiens
  misc_RNA (1)...(19): siRNA sense strand
auucgaaccaccauuauuu

SEQ ID NO: 1681816 - RNA, 19 nt, Homo sapiens
  misc_RNA (1)...(19): siRNA sense strand
ggaggcuuguuuaaacuac

SEQ ID NO: 1681817 - RNA, 19 nt, Homo sapiens
  misc_RNA (1)...(19): siRNA sense strand
cagaggccuacacgauuua

SEQ ID NO: 1681818 - RNA, 19 nt, Homo sapiens
  misc_RNA (1)...(19): siRNA sense strand
ugggaaggaggcuuguuua

SEQ ID NO: 1681819 - RNA, 19 nt, Homo sapiens
  misc_RNA (1)...(19): siRNA sense strand
gaacuucuaaaugaaccaa

SEQ ID NO: 1681820 - RNA, 19 nt, Homo sapiens
  misc_RNA (1)...(19): siRNA sense strand
uuucguggcugucccaaca

SEQ ID NO: 1681821 - RNA, 19 nt, Homo sapiens
  misc_RNA (1)...(19): siRNA sense strand
agaaguuugcgcccucaua

SEQ ID NO: 1681822 - RNA, 19 nt, Homo sapiens
  misc_RNA (1)...(19): siRNA sense strand
gaaaaggguccgagcacaa

SEQ ID NO: 1681823 - RNA, 19 nt, Homo sapiens
  misc_RNA (1)...(19): siRNA sense strand
cagugugccuguccaucuu

SEQ ID NO: 1681824 - RNA, 19 nt, Homo sapiens
  misc_RNA (1)...(19): siRNA sense strand
aagcagaggccuacacgau

SEQ ID NO: 1681825 - RNA, 19 nt, Homo sapiens
  misc_RNA (1)...(19): siRNA sense strand
uuuaaacuacggaugcuuu

SEQ ID NO: 1681826 - RNA, 19 nt, Homo sapiens
  misc_RNA (1)...(19): siRNA sense strand
ccaagacccagcucaagca

SEQ ID NO: 1681827 - RNA, 19 nt, Homo sapiens
  misc_RNA (1)...(19): siRNA sense strand
aggaauacaggaacuucua

SEQ ID NO: 1681828 - RNA, 19 nt, Homo sapiens
  misc_RNA (1)...(19): siRNA sense strand
guaaauucgaaccaccauu

SEQ ID NO: 1681829 - RNA, 19 nt, Homo sapiens
  misc_RNA (1)...(19): siRNA sense strand
cuaaaugaaccaaauaucc

SEQ ID NO: 1681830 - RNA, 19 nt, Homo sapiens
  misc_RNA (1)...(19): siRNA sense strand
ccaucacaaucaaacagau

SEQ ID NO: 1681831 - RNA, 19 nt, Homo sapiens
  misc_RNA (1)...(19): siRNA sense strand
ggaggccagccaucacaau

SEQ ID NO: 1681832 - RNA, 19 nt, Homo sapiens
  misc_RNA (1)...(19): siRNA sense strand
uauuucacccgaaugugua

SEQ ID NO: 1681833 - RNA, 19 nt, Homo sapiens
  misc_RNA (1)...(19): siRNA sense strand
aggaaagcauggaggaaag

SEQ ID NO: 1681834 - RNA, 19 nt, Homo sapiens
  misc_RNA (1)...(19): siRNA sense strand
gaggccagccaucacaauc

SEQ ID NO: 1681835 - RNA, 19 nt, Homo sapiens
  misc_RNA (1)...(19): siRNA sense strand
aggaaagaccacccauuug

SEQ ID NO: 1681836 - RNA, 19 nt, Homo sapiens
  misc_RNA (1)...(19): siRNA sense strand
acaaucaaacagauccuau

SEQ ID NO: 1681837 - RNA, 19 nt, Homo sapiens
  misc_RNA (1)...(19): siRNA sense strand
gaaggaggcuuguuuaaac

SEQ ID NO: 1681838 - RNA, 19 nt, Homo sapiens
  misc_RNA (1)...(19): siRNA sense strand
gcagaggccuacacgauuu

SEQ ID NO: 1681839 - RNA, 19 nt, Homo sapiens
  misc_RNA (1)...(19): siRNA sense strand
gaggaaagaccacccauuu

SEQ ID NO: 1681840 - RNA, 19 nt, Homo sapiens
  misc_RNA (1)...(19): siRNA sense strand
uacaggaacuucuaaauga

SEQ ID NO: 1681841 - RNA, 19 nt, Homo sapiens
  misc_RNA (1)...(19): siRNA sense strand
uaaauucgaaccaccauua

SEQ ID NO: 1681842 - RNA, 19 nt, Homo sapiens
  misc_RNA (1)...(19): siRNA sense strand
ggaaggaggcuuguuuaaa

SEQ ID NO: 1681843 - RNA, 19 nt, Homo sapiens
  misc_RNA (1)...(19): siRNA sense strand
gaaguuugcgcccucauaa

SEQ ID NO: 1681844 - RNA, 19 nt, Homo sapiens
  misc_RNA (1)...(19): siRNA sense strand
ggaaagaccacccauuugg

SEQ ID NO: 1681845 - RNA, 19 nt, Homo sapiens
  misc_RNA (1)...(19): siRNA sense strand
gagcacaagccaagaaguu

SEQ ID NO: 1681846 - RNA, 19 nt, Homo sapiens
  misc_RNA (1)...(19): siRNA sense strand
gaacugggagugcgccauu

SEQ ID NO: 1681847 - RNA, 19 nt, Homo sapiens
  misc_RNA (1)...(19): siRNA sense strand
ggaauacaggaacuucuaa

SEQ ID NO: 1681848 - RNA, 19 nt, Homo sapiens
  misc_RNA (1)...(19): siRNA sense strand
gcacaagccaagaaguuug

SEQ ID NO: 1681849 - RNA, 19 nt, Homo sapiens
  misc_RNA (1)...(19): siRNA sense strand
gaggaaagcauggaggaaa

SEQ ID NO: 1681850 - RNA, 19 nt, Homo sapiens
  misc_RNA (1)...(19): siRNA sense strand
gaauacaggaacuucuaaa

SEQ ID NO: 1681851 - RNA, 19 nt, Homo sapiens
  misc_RNA (1)...(19): siRNA sense strand
gggaaggaggcuuguuuaa

SEQ ID NO: 1681852 - RNA, 19 nt, Homo sapiens
  misc_RNA (1)...(19): siRNA sense strand
acaggaacuucuaaaugaa

SEQ ID NO: 1681853 - RNA, 19 nt, Homo sapiens
  misc_RNA (1)...(19): siRNA sense strand
ggaggaaagaccacccauu

SEQ ID NO: 1681854 - RNA, 19 nt, Homo sapiens
  misc_RNA (1)...(19): siRNA sense strand
ggccagccaucacaaucaa

SEQ ID NO: 1681855 - RNA, 19 nt, Homo sapiens
  misc_RNA (1)...(19): siRNA sense strand
caaucaaacagauccuauu

SEQ ID NO: 1681856 - RNA, 19 nt, Homo sapiens
  misc_RNA (1)...(19): siRNA sense strand
auacaggaacuucuaaaug

SEQ ID NO: 1681857 - RNA, 19 nt, Homo sapiens
  misc_RNA (1)...(19): siRNA sense strand
ggaaagcauggaggaaaga

SEQ ID NO: 1681858 - RNA, 19 nt, Homo sapiens
  misc_RNA (1)...(19): siRNA sense strand
gugggaaggaggcuuguuu

SEQ ID NO: 1681859 - RNA, 19 nt, Homo sapiens
  misc_RNA (1)...(19): siRNA sense strand
cagaguggaguacgagaaa

SEQ ID NO: 1681860 - RNA, 19 nt, Homo sapiens
  misc_RNA (1)...(19): siRNA sense strand
auucgaaccaccauuauuu

SEQ ID NO: 1681861 - RNA, 19 nt, Homo sapiens
  misc_RNA (1)...(19): siRNA sense strand
ggaggcuuguuuaaacuac

SEQ ID NO: 1681862 - RNA, 19 nt, Homo sapiens
  misc_RNA (1)...(19): siRNA sense strand
cagaggccuacacgauuua

SEQ ID NO: 1681863 - RNA, 19 nt, Homo sapiens
  misc_RNA (1)...(19): siRNA sense strand
ugggaaggaggcuuguuua

SEQ ID NO: 1681864 - RNA, 19 nt, Homo sapiens
  misc_RNA (1)...(19): siRNA sense strand
gaacuucuaaaugaaccaa

SEQ ID NO: 1681865 - RNA, 19 nt, Homo sapiens
  misc_RNA (1)...(19): siRNA sense strand
uuucguggcugucccaaca

SEQ ID NO: 1681866 - RNA, 19 nt, Homo sapiens
  misc_RNA (1)...(19): siRNA sense strand
agaaguuugcgcccucaua

SEQ ID NO: 1681867 - RNA, 19 nt, Homo sapiens
  misc_RNA (1)...(19): siRNA sense strand
gaaaaggguccgagcacaa

SEQ ID NO: 1681868 - RNA, 19 nt, Homo sapiens
  misc_RNA (1)...(19): siRNA sense strand
cagugugccuguccaucuu

SEQ ID NO: 1681869 - RNA, 19 nt, Homo sapiens
  misc_RNA (1)...(19): siRNA sense strand
aagcagaggccuacacgau

SEQ ID NO: 1681870 - RNA, 19 nt, Homo sapiens
  misc_RNA (1)...(19): siRNA sense strand
uuuaaacuacggaugcuuu

SEQ ID NO: 1681871 - RNA, 19 nt, Homo sapiens
  misc_RNA (1)...(19): siRNA sense strand
ccaagacccagcucaagca

SEQ ID NO: 1681872 - RNA, 19 nt, Homo sapiens
  misc_RNA (1)...(19): siRNA sense strand
aggaauacaggaacuucua

SEQ ID NO: 1681873 - RNA, 19 nt, Homo sapiens
  misc_RNA (1)...(19): siRNA sense strand
guaaauucgaaccaccauu

SEQ ID NO: 1681874 - RNA, 19 nt, Homo sapiens
  misc_RNA (1)...(19): siRNA sense strand
cuaaaugaaccaaauaucc

SEQ ID NO: 1681875 - RNA, 19 nt, Homo sapiens
  misc_RNA (1)...(19): siRNA sense strand
ccaucacaaucaaacagau

SEQ ID NO: 1681876 - RNA, 19 nt, Homo sapiens
  misc_RNA (1)...(19): siRNA sense strand
ggaggccagccaucacaau

SEQ ID NO: 1681877 - RNA, 19 nt, Homo sapiens
  misc_RNA (1)...(19): siRNA sense strand
uauuucacccgaaugugua

SEQ ID NO: 1681878 - RNA, 19 nt, Homo sapiens
  misc_RNA (1)...(19): siRNA sense strand
aggaaagcauggaggaaag

SEQ ID NO: 1681879 - RNA, 19 nt, Homo sapiens
  misc_RNA (1)...(19): siRNA sense strand
gaggccagccaucacaauc

SEQ ID NO: 1681880 - RNA, 19 nt, Homo sapiens
  misc_RNA (1)...(19): siRNA sense strand
aggaaagaccacccauuug

SEQ ID NO: 1681881 - RNA, 19 nt, Homo sapiens
  misc_RNA (1)...(19): siRNA sense strand
acaaucaaacagauccuau

SEQ ID NO: 1681882 - RNA, 19 nt, Homo sapiens
  misc_RNA (1)...(19): siRNA sense strand
gaaggaggcuuguuuaaac

SEQ ID NO: 1681883 - RNA, 19 nt, Homo sapiens
  misc_RNA (1)...(19): siRNA sense strand
gcagaggccuacacgauuu

SEQ ID NO: 1681884 - RNA, 19 nt, Homo sapiens
  misc_RNA (1)...(19): siRNA sense strand
gaggaaagaccacccauuu

SEQ ID NO: 1681885 - RNA, 19 nt, Homo sapiens
  misc_RNA (1)...(19): siRNA sense strand
uacaggaacuucuaaauga

SEQ ID NO: 1681886 - RNA, 19 nt, Homo sapiens
  misc_RNA (1)...(19): siRNA sense strand
uaaauucgaaccaccauua

SEQ ID NO: 1681887 - RNA, 19 nt, Homo sapiens
  misc_RNA (1)...(19): siRNA sense strand
ggaaggaggcuuguuuaaa

SEQ ID NO: 1681888 - RNA, 19 nt, Homo sapiens
  misc_RNA (1)...(19): siRNA sense strand
gaaguuugcgcccucauaa

SEQ ID NO: 1681889 - RNA, 19 nt, Homo sapiens
  misc_RNA (1)...(19): siRNA sense strand
ggaaagaccacccauuugg

SEQ ID NO: 1681890 - RNA, 19 nt, Homo sapiens
  misc_RNA (1)...(19): siRNA sense strand
gagcacaagccaagaaguu

SEQ ID NO: 1681891 - RNA, 19 nt, Homo sapiens
  misc_RNA (1)...(19): siRNA sense strand
gaacugggagugcgccauu

SEQ ID NO: 1681892 - RNA, 19 nt, Homo sapiens
  misc_RNA (1)...(19): siRNA sense strand
ggaauacaggaacuucuaa

SEQ ID NO: 1681893 - RNA, 19 nt, Homo sapiens
  misc_RNA (1)...(19): siRNA sense strand
gcacaagccaagaaguuug

SEQ ID NO: 1681894 - RNA, 19 nt, Homo sapiens
  misc_RNA (1)...(19): siRNA sense strand
gaggaaagcauggaggaaa

SEQ ID NO: 1681895 - RNA, 19 nt, Homo sapiens
  misc_RNA (1)...(19): siRNA sense strand
gaauacaggaacuucuaaa

SEQ ID NO: 1681896 - RNA, 19 nt, Homo sapiens
  misc_RNA (1)...(19): siRNA sense strand
gggaaggaggcuuguuuaa

SEQ ID NO: 1681897 - RNA, 19 nt, Homo sapiens
  misc_RNA (1)...(19): siRNA sense strand
acaggaacuucuaaaugaa

SEQ ID NO: 1681898 - RNA, 19 nt, Homo sapiens
  misc_RNA (1)...(19): siRNA sense strand
ggaggaaagaccacccauu

SEQ ID NO: 1681899 - RNA, 19 nt, Homo sapiens
  misc_RNA (1)...(19): siRNA sense strand
ggccagccaucacaaucaa

SEQ ID NO: 1681900 - RNA, 19 nt, Homo sapiens
  misc_RNA (1)...(19): siRNA sense strand
caaucaaacagauccuauu

SEQ ID NO: 1681901 - RNA, 19 nt, Homo sapiens
  misc_RNA (1)...(19): siRNA sense strand
auacaggaacuucuaaaug

SEQ ID NO: 1681902 - RNA, 19 nt, Homo sapiens
  misc_RNA (1)...(19): siRNA sense strand
ggaaagcauggaggaaaga

SEQ ID NO: 1681903 - RNA, 19 nt, Homo sapiens
  misc_RNA (1)...(19): siRNA sense strand
gugggaaggaggcuuguuu

SEQ ID NO: 1681904 - RNA, 19 nt, Homo sapiens
  misc_RNA (1)...(19): siRNA sense strand
cagaguggaguacgagaaa

SEQ ID NO: 1681905 - RNA, 19 nt, Homo sapiens
  misc_RNA (1)...(19): siRNA sense strand
auucgaaccaccauuauuu

SEQ ID NO: 1681906 - RNA, 19 nt, Homo sapiens
  misc_RNA (1)...(19): siRNA sense strand
ggaggcuuguuuaaacuac

SEQ ID NO: 1681907 - RNA, 19 nt, Homo sapiens
  misc_RNA (1)...(19): siRNA sense strand
cagaggccuacacgauuua

SEQ ID NO: 1681908 - RNA, 19 nt, Homo sapiens
  misc_RNA (1)...(19): siRNA sense strand
ugggaaggaggcuuguuua

SEQ ID NO: 1681909 - RNA, 19 nt, Homo sapiens
  misc_RNA (1)...(19): siRNA sense strand
gaacuucuaaaugaaccaa

SEQ ID NO: 1681910 - RNA, 19 nt, Homo sapiens
  misc_RNA (1)...(19): siRNA sense strand
uuucguggcugucccaaca

SEQ ID NO: 1681911 - RNA, 19 nt, Homo sapiens
  misc_RNA (1)...(19): siRNA sense strand
agaaguuugcgcccucaua

SEQ ID NO: 1681912 - RNA, 19 nt, Homo sapiens
  misc_RNA (1)...(19): siRNA sense strand
gaaaaggguccgagcacaa

SEQ ID NO: 1681913 - RNA, 19 nt, Homo sapiens
  misc_RNA (1)...(19): siRNA sense strand
cagugugccuguccaucuu

SEQ ID NO: 1681914 - RNA, 19 nt, Homo sapiens
  misc_RNA (1)...(19): siRNA sense strand
aagcagaggccuacacgau

SEQ ID NO: 1681915 - RNA, 19 nt, Homo sapiens
  misc_RNA (1)...(19): siRNA sense strand
uuuaaacuacggaugcuuu

SEQ ID NO: 1681916 - RNA, 19 nt, Homo sapiens
  misc_RNA (1)...(19): siRNA sense strand
ccaagacccagcucaagca

SEQ ID NO: 1681917 - RNA, 19 nt, Homo sapiens
  misc_RNA (1)...(19): siRNA sense strand
aggaauacaggaacuucua

SEQ ID NO: 1681918 - RNA, 19 nt, Homo sapiens
  misc_RNA (1)...(19): siRNA sense strand
guaaauucgaaccaccauu

SEQ ID NO: 1681919 - RNA, 19 nt, Homo sapiens
  misc_RNA (1)...(19): siRNA sense strand
cuaaaugaaccaaauaucc

SEQ ID NO: 1681920 - RNA, 19 nt, Homo sapiens
  misc_RNA (1)...(19): siRNA sense strand
ccaucacaaucaaacagau

SEQ ID NO: 1681921 - RNA, 19 nt, Homo sapiens
  misc_RNA (1)...(19): siRNA sense strand
ggaggccagccaucacaau

SEQ ID NO: 1681922 - RNA, 19 nt, Homo sapiens
  misc_RNA (1)...(19): siRNA sense strand
uauuucacccgaaugugua

SEQ ID NO: 1681923 - RNA, 19 nt, Homo sapiens
  misc_RNA (1)...(19): siRNA sense strand
aggaaagcauggaggaaag

SEQ ID NO: 1681924 - RNA, 19 nt, Homo sapiens
  misc_RNA (1)...(19): siRNA sense strand
gaggccagccaucacaauc

SEQ ID NO: 1681925 - RNA, 19 nt, Homo sapiens
  misc_RNA (1)...(19): siRNA sense strand
aggaaagaccacccauuug

SEQ ID NO: 1681926 - RNA, 19 nt, Homo sapiens
  misc_RNA (1)...(19): siRNA sense strand
acaaucaaacagauccuau

SEQ ID NO: 1681927 - RNA, 19 nt, Homo sapiens
  misc_RNA (1)...(19): siRNA sense strand
gaaggaggcuuguuuaaac

SEQ ID NO: 1681928 - RNA, 19 nt, Homo sapiens
  misc_RNA (1)...(19): siRNA sense strand
gcagaggccuacacgauuu

SEQ ID NO: 1681929 - RNA, 19 nt, Homo sapiens
  misc_RNA (1)...(19): siRNA sense strand
gaggaaagaccacccauuu

SEQ ID NO: 1681930 - RNA, 19 nt, Homo sapiens
  misc_RNA (1)...(19): siRNA sense strand
uacaggaacuucuaaauga

SEQ ID NO: 1681931 - RNA, 19 nt, Homo sapiens
  misc_RNA (1)...(19): siRNA sense strand
uaaauucgaaccaccauua

SEQ ID NO: 1681932 - RNA, 19 nt, Homo sapiens
  misc_RNA (1)...(19): siRNA sense strand
ggaaggaggcuuguuuaaa

SEQ ID NO: 1681933 - RNA, 19 nt, Homo sapiens
  misc_RNA (1)...(19): siRNA sense strand
gaaguuugcgcccucauaa

SEQ ID NO: 1681934 - RNA, 19 nt, Homo sapiens
  misc_RNA (1)...(19): siRNA sense strand
ggaaagaccacccauuugg

SEQ ID NO: 1681935 - RNA, 19 nt, Homo sapiens
  misc_RNA (1)...(19): siRNA sense strand
gagcacaagccaagaaguu

SEQ ID NO: 1681936 - RNA, 19 nt, Homo sapiens
  misc_RNA (1)...(19): siRNA sense strand
gaacugggagugcgccauu

SEQ ID NO: 1681937 - RNA, 19 nt, Homo sapiens
  misc_RNA (1)...(19): siRNA sense strand
ggaauacaggaacuucuaa

SEQ ID NO: 1681938 - RNA, 19 nt, Homo sapiens
  misc_RNA (1)...(19): siRNA sense strand
gcacaagccaagaaguuug

SEQ ID NO: 1681939 - RNA, 19 nt, Homo sapiens
  misc_RNA (1)...(19): siRNA sense strand
gaggaaagcauggaggaaa

SEQ ID NO: 1681940 - RNA, 19 nt, Homo sapiens
  misc_RNA (1)...(19): siRNA sense strand
gaauacaggaacuucuaaa

SEQ ID NO: 1681941 - RNA, 19 nt, Homo sapiens
  misc_RNA (1)...(19): siRNA sense strand
gggaaggaggcuuguuuaa

SEQ ID NO: 1681942 - RNA, 19 nt, Homo sapiens
  misc_RNA (1)...(19): siRNA sense strand
acaggaacuucuaaaugaa

SEQ ID NO: 1681943 - RNA, 19 nt, Homo sapiens
  misc_RNA (1)...(19): siRNA sense strand
ggaggaaagaccacccauu

SEQ ID NO: 1681944 - RNA, 19 nt, Homo sapiens
  misc_RNA (1)...(19): siRNA sense strand
ggccagccaucacaaucaa

SEQ ID NO: 1681945 - RNA, 19 nt, Homo sapiens
  misc_RNA (1)...(19): siRNA sense strand
caaucaaacagauccuauu

SEQ ID NO: 1681946 - RNA, 19 nt, Homo sapiens
  misc_RNA (1)...(19): siRNA sense strand
auacaggaacuucuaaaug

SEQ ID NO: 1681947 - RNA, 19 nt, Homo sapiens
  misc_RNA (1)...(19): siRNA sense strand
ggaaagcauggaggaaaga

SEQ ID NO: 1681948 - RNA, 19 nt, Homo sapiens
  misc_RNA (1)...(19): siRNA sense strand
gugggaaggaggcuuguuu

SEQ ID NO: 1681949 - RNA, 19 nt, Homo sapiens
  misc_RNA (1)...(19): siRNA sense strand
cagaguggaguacgagaaa

SEQ ID NO: 1681950 - RNA, 19 nt, Homo sapiens
  misc_RNA (1)...(19): siRNA sense strand
auucgaaccaccauuauuu

SEQ ID NO: 1681951 - RNA, 19 nt, Homo sapiens
  misc_RNA (1)...(19): siRNA sense strand
ggaggcuuguuuaaacuac

SEQ ID NO: 1681952 - RNA, 19 nt, Homo sapiens
  misc_RNA (1)...(19): siRNA sense strand
cagaggccuacacgauuua

SEQ ID NO: 1681953 - RNA, 19 nt, Homo sapiens
  misc_RNA (1)...(19): siRNA sense strand
ugggaaggaggcuuguuua

SEQ ID NO: 1681954 - RNA, 19 nt, Homo sapiens
  misc_RNA (1)...(19): siRNA sense strand
gaacuucuaaaugaaccaa

SEQ ID NO: 1681955 - RNA, 19 nt, Homo sapiens
  misc_RNA (1)...(19): siRNA sense strand
uuucguggcugucccaaca

SEQ ID NO: 1681956 - RNA, 19 nt, Homo sapiens
  misc_RNA (1)...(19): siRNA sense strand
agaaguuugcgcccucaua

SEQ ID NO: 1681957 - RNA, 19 nt, Homo sapiens
  misc_RNA (1)...(19): siRNA sense strand
gaaaaggguccgagcacaa

SEQ ID NO: 1681958 - RNA, 19 nt, Homo sapiens
  misc_RNA (1)...(19): siRNA sense strand
cagugugccuguccaucuu

SEQ ID NO: 1681959 - RNA, 19 nt, Homo sapiens
  misc_RNA (1)...(19): siRNA sense strand
aagcagaggccuacacgau

SEQ ID NO: 1681960 - RNA, 19 nt, Homo sapiens
  misc_RNA (1)...(19): siRNA sense strand
uuuaaacuacggaugcuuu

SEQ ID NO: 1681961 - RNA, 19 nt, Homo sapiens
  misc_RNA (1)...(19): siRNA sense strand
ccaagacccagcucaagca

SEQ ID NO: 1681962 - RNA, 19 nt, Homo sapiens
  misc_RNA (1)...(19): siRNA sense strand
aggaauacaggaacuucua

SEQ ID NO: 1681963 - RNA, 19 nt, Homo sapiens
  misc_RNA (1)...(19): siRNA sense strand
guaaauucgaaccaccauu

SEQ ID NO: 1681964 - RNA, 19 nt, Homo sapiens
  misc_RNA (1)...(19): siRNA sense strand
cuaaaugaaccaaauaucc

SEQ ID NO: 1681965 - RNA, 19 nt, Homo sapiens
  misc_RNA (1)...(19): siRNA sense strand
ccaucacaaucaaacagau

SEQ ID NO: 1681966 - RNA, 19 nt, Homo sapiens
  misc_RNA (1)...(19): siRNA sense strand
ggaggccagccaucacaau

SEQ ID NO: 1681967 - RNA, 19 nt, Homo sapiens
  misc_RNA (1)...(19): siRNA sense strand
uauuucacccgaaugugua

SEQ ID NO: 1681968 - RNA, 19 nt, Homo sapiens
  misc_RNA (1)...(19): siRNA sense strand
aggaaagcauggaggaaag

SEQ ID NO: 1681969 - RNA, 19 nt, Homo sapiens
  misc_RNA (1)...(19): siRNA sense strand
gaggccagccaucacaauc

SEQ ID NO: 1681970 - RNA, 19 nt, Homo sapiens
  misc_RNA (1)...(19): siRNA sense strand
aggaaagaccacccauuug

SEQ ID NO: 1681971 - RNA, 19 nt, Homo sapiens
  misc_RNA (1)...(19): siRNA sense strand
acaaucaaacagauccuau

SEQ ID NO: 1681972 - RNA, 19 nt, Homo sapiens
  misc_RNA (1)...(19): siRNA sense strand
gaaggaggcuuguuuaaac

SEQ ID NO: 1681973 - RNA, 19 nt, Homo sapiens
  misc_RNA (1)...(19): siRNA sense strand
gcagaggccuacacgauuu

SEQ ID NO: 1681974 - RNA, 19 nt, Homo sapiens
  misc_RNA (1)...(19): siRNA sense strand
gaggaaagaccacccauuu

SEQ ID NO: 1681975 - RNA, 19 nt, Homo sapiens
  misc_RNA (1)...(19): siRNA sense strand
uacaggaacuucuaaauga

SEQ ID NO: 1681976 - RNA, 19 nt, Homo sapiens
  misc_RNA (1)...(19): siRNA sense strand
uaaauucgaaccaccauua

SEQ ID NO: 1681977 - RNA, 19 nt, Homo sapiens
  misc_RNA (1)...(19): siRNA sense strand
ggaaggaggcuuguuuaaa

SEQ ID NO: 1681978 - RNA, 19 nt, Homo sapiens
  misc_RNA (1)...(19): siRNA sense strand
gaaguuugcgcccucauaa

SEQ ID NO: 1681979 - RNA, 19 nt, Homo sapiens
  misc_RNA (1)...(19): siRNA sense strand
ggaaagaccacccauuugg

SEQ ID NO: 1681980 - RNA, 19 nt, Homo sapiens
  misc_RNA (1)...(19): siRNA sense strand
gagcacaagccaagaaguu

SEQ ID NO: 1681981 - RNA, 19 nt, Homo sapiens
  misc_RNA (1)...(19): siRNA sense strand
gaacugggagugcgccauu

SEQ ID NO: 1681982 - RNA, 19 nt, Homo sapiens
  misc_RNA (1)...(19): siRNA sense strand
ggaauacaggaacuucuaa

SEQ ID NO: 1681983 - RNA, 19 nt, Homo sapiens
  misc_RNA (1)...(19): siRNA sense strand
gcacaagccaagaaguuug

SEQ ID NO: 1681984 - RNA, 19 nt, Homo sapiens
  misc_RNA (1)...(19): siRNA sense strand
gaggaaagcauggaggaaa

SEQ ID NO: 1681985 - RNA, 19 nt, Homo sapiens
  misc_RNA (1)...(19): siRNA sense strand
gaauacaggaacuucuaaa

SEQ ID NO: 1681986 - RNA, 19 nt, Homo sapiens
  misc_RNA (1)...(19): siRNA sense strand
gggaaggaggcuuguuuaa

SEQ ID NO: 1681987 - RNA, 19 nt, Homo sapiens
  misc_RNA (1)...(19): siRNA sense strand
acaggaacuucuaaaugaa

SEQ ID NO: 1681988 - RNA, 19 nt, Homo sapiens
  misc_RNA (1)...(19): siRNA sense strand
ggaggaaagaccacccauu

SEQ ID NO: 1681989 - RNA, 19 nt, Homo sapiens
  misc_RNA (1)...(19): siRNA sense strand
ggccagccaucacaaucaa

SEQ ID NO: 1681990 - RNA, 19 nt, Homo sapiens
  misc_RNA (1)...(19): siRNA sense strand
caaucaaacagauccuauu

SEQ ID NO: 1681991 - RNA, 19 nt, Homo sapiens
  misc_RNA (1)...(19): siRNA sense strand
auacaggaacuucuaaaug

SEQ ID NO: 1681992 - RNA, 19 nt, Homo sapiens
  misc_RNA (1)...(19): siRNA sense strand
ggaaagcauggaggaaaga

SEQ ID NO: 1681993 - RNA, 19 nt, Homo sapiens
  misc_RNA (1)...(19): siRNA sense strand
gugggaaggaggcuuguuu

SEQ ID NO: 1681994 - RNA, 19 nt, Homo sapiens
  misc_RNA (1)...(19): siRNA sense strand
cagaguggaguacgagaaa

SEQ ID NO: 1681995 - RNA, 19 nt, Homo sapiens
  misc_RNA (1)...(19): siRNA sense strand
auucgaaccaccauuauuu

SEQ ID NO: 1681996 - RNA, 19 nt, Homo sapiens
  misc_RNA (1)...(19): siRNA sense strand
ggaggcuuguuuaaacuac

SEQ ID NO: 1681997 - RNA, 19 nt, Homo sapiens
  misc_RNA (1)...(19): siRNA sense strand
cagaggccuacacgauuua

SEQ ID NO: 1681998 - RNA, 19 nt, Homo sapiens
  misc_RNA (1)...(19): siRNA sense strand
ugggaaggaggcuuguuua

SEQ ID NO: 1681999 - RNA, 19 nt, Homo sapiens
  misc_RNA (1)...(19): siRNA sense strand
gaacuucuaaaugaaccaa

SEQ ID NO: 1682000 - RNA, 19 nt, Homo sapiens
  misc_RNA (1)...(19): siRNA sense strand
uuucguggcugucccaaca

SEQ ID NO: 1682001 - RNA, 19 nt, Homo sapiens
  misc_RNA (1)...(19): siRNA sense strand
agaaguuugcgcccucaua

SEQ ID NO: 1682002 - RNA, 19 nt, Homo sapiens
  misc_RNA (1)...(19): siRNA sense strand
gaaaaggguccgagcacaa

SEQ ID NO: 1682003 - RNA, 19 nt, Homo sapiens
  misc_RNA (1)...(19): siRNA sense strand
cagugugccuguccaucuu

SEQ ID NO: 1682004 - RNA, 19 nt, Homo sapiens
  misc_RNA (1)...(19): siRNA sense strand
aagcagaggccuacacgau

SEQ ID NO: 1682005 - RNA, 19 nt, Homo sapiens
  misc_RNA (1)...(19): siRNA sense strand
uuuaaacuacggaugcuuu

SEQ ID NO: 1682006 - RNA, 19 nt, Homo sapiens
  misc_RNA (1)...(19): siRNA sense strand
ccaagacccagcucaagca

SEQ ID NO: 1682007 - RNA, 19 nt, Homo sapiens
  misc_RNA (1)...(19): siRNA sense strand
aggaauacaggaacuucua

SEQ ID NO: 1682008 - RNA, 19 nt, Homo sapiens
  misc_RNA (1)...(19): siRNA sense strand
guaaauucgaaccaccauu

SEQ ID NO: 1682009 - RNA, 19 nt, Homo sapiens
  misc_RNA (1)...(19): siRNA sense strand
cuaaaugaaccaaauaucc

SEQ ID NO: 1682010 - RNA, 19 nt, Homo sapiens
  misc_RNA (1)...(19): siRNA sense strand
ccaucacaaucaaacagau

SEQ ID NO: 1682011 - RNA, 19 nt, Homo sapiens
  misc_RNA (1)...(19): siRNA sense strand
ggaggccagccaucacaau

SEQ ID NO: 1682012 - RNA, 19 nt, Homo sapiens
  misc_RNA (1)...(19): siRNA sense strand
uauuucacccgaaugugua

SEQ ID NO: 1682013 - RNA, 19 nt, Homo sapiens
  misc_RNA (1)...(19): siRNA sense strand
aggaaagcauggaggaaag

SEQ ID NO: 1682014 - RNA, 19 nt, Homo sapiens
  misc_RNA (1)...(19): siRNA sense strand
gaggccagccaucacaauc

SEQ ID NO: 1682015 - RNA, 19 nt, Homo sapiens
  misc_RNA (1)...(19): siRNA sense strand
aggaaagaccacccauuug

SEQ ID NO: 1682016 - RNA, 19 nt, Homo sapiens
  misc_RNA (1)...(19): siRNA sense strand
acaaucaaacagauccuau

SEQ ID NO: 1682017 - RNA, 19 nt, Homo sapiens
  misc_RNA (1)...(19): siRNA sense strand
gaaggaggcuuguuuaaac

SEQ ID NO: 1682018 - RNA, 19 nt, Homo sapiens
  misc_RNA (1)...(19): siRNA sense strand
gcagaggccuacacgauuu

SEQ ID NO: 1682019 - RNA, 19 nt, Homo sapiens
  misc_RNA (1)...(19): siRNA sense strand
gaggaaagaccacccauuu

SEQ ID NO: 1682020 - RNA, 19 nt, Homo sapiens
  misc_RNA (1)...(19): siRNA sense strand
uacaggaacuucuaaauga

SEQ ID NO: 1682021 - RNA, 19 nt, Homo sapiens
  misc_RNA (1)...(19): siRNA sense strand
uaaauucgaaccaccauua

SEQ ID NO: 1682022 - RNA, 19 nt, Homo sapiens
  misc_RNA (1)...(19): siRNA sense strand
ggaaggaggcuuguuuaaa

SEQ ID NO: 1682023 - RNA, 19 nt, Homo sapiens
  misc_RNA (1)...(19): siRNA sense strand
gaaguuugcgcccucauaa

SEQ ID NO: 1682024 - RNA, 19 nt, Homo sapiens
  misc_RNA (1)...(19): siRNA sense strand
ggaaagaccacccauuugg

SEQ ID NO: 1682025 - RNA, 19 nt, Homo sapiens
  misc_RNA (1)...(19): siRNA sense strand
gagcacaagccaagaaguu

SEQ ID NO: 1682026 - RNA, 19 nt, Homo sapiens
  misc_RNA (1)...(19): siRNA sense strand
gaacugggagugcgccauu

SEQ ID NO: 1682027 - RNA, 19 nt, Homo sapiens
  misc_RNA (1)...(19): siRNA sense strand
ggaauacaggaacuucuaa

SEQ ID NO: 1682028 - RNA, 19 nt, Homo sapiens
  misc_RNA (1)...(19): siRNA sense strand
gcacaagccaagaaguuug

SEQ ID NO: 1682029 - RNA, 19 nt, Homo sapiens
  misc_RNA (1)...(19): siRNA sense strand
gaggaaagcauggaggaaa

SEQ ID NO: 1682030 - RNA, 19 nt, Homo sapiens
  misc_RNA (1)...(19): siRNA sense strand
gaauacaggaacuucuaaa

SEQ ID NO: 1682031 - RNA, 19 nt, Homo sapiens
  misc_RNA (1)...(19): siRNA sense strand
gggaaggaggcuuguuuaa

SEQ ID NO: 1682032 - RNA, 19 nt, Homo sapiens
  misc_RNA (1)...(19): siRNA sense strand
acaggaacuucuaaaugaa

SEQ ID NO: 1682033 - RNA, 19 nt, Homo sapiens
  misc_RNA (1)...(19): siRNA sense strand
ggaggaaagaccacccauu

SEQ ID NO: 1682034 - RNA, 19 nt, Homo sapiens
  misc_RNA (1)...(19): siRNA sense strand
ggccagccaucacaaucaa

SEQ ID NO: 1682035 - RNA, 19 nt, Homo sapiens
  misc_RNA (1)...(19): siRNA sense strand
caaucaaacagauccuauu

SEQ ID NO: 1682036 - RNA, 19 nt, Homo sapiens
  misc_RNA (1)...(19): siRNA sense strand
auacaggaacuucuaaaug

SEQ ID NO: 1682037 - RNA, 19 nt, Homo sapiens
  misc_RNA (1)...(19): siRNA sense strand
ggaaagcauggaggaaaga

SEQ ID NO: 1682038 - RNA, 19 nt, Homo sapiens
  misc_RNA (1)...(19): siRNA sense strand
gugggaaggaggcuuguuu

SEQ ID NO: 1682039 - RNA, 19 nt, Homo sapiens
  misc_RNA (1)...(19): siRNA sense strand
cagaguggaguacgagaaa

SEQ ID NO: 1682040 - RNA, 19 nt, Homo sapiens
  misc_RNA (1)...(19): siRNA sense strand
auucgaaccaccauuauuu

SEQ ID NO: 1682041 - RNA, 19 nt, Homo sapiens
  misc_RNA (1)...(19): siRNA sense strand
ggaggcuuguuuaaacuac

SEQ ID NO: 1682042 - RNA, 19 nt, Homo sapiens
  misc_RNA (1)...(19): siRNA sense strand
cagaggccuacacgauuua

SEQ ID NO: 1682043 - RNA, 19 nt, Homo sapiens
  misc_RNA (1)...(19): siRNA sense strand
ugggaaggaggcuuguuua

SEQ ID NO: 1682044 - RNA, 19 nt, Homo sapiens
  misc_RNA (1)...(19): siRNA sense strand
gaacuucuaaaugaaccaa

SEQ ID NO: 1682045 - RNA, 19 nt, Homo sapiens
  misc_RNA (1)...(19): siRNA sense strand
uuucguggcugucccaaca

SEQ ID NO: 1682046 - RNA, 19 nt, Homo sapiens
  misc_RNA (1)...(19): siRNA sense strand
agaaguuugcgcccucaua

SEQ ID NO: 1682047 - RNA, 19 nt, Homo sapiens
  misc_RNA (1)...(19): siRNA sense strand
gaaaaggguccgagcacaa

SEQ ID NO: 1682048 - RNA, 19 nt, Homo sapiens
  misc_RNA (1)...(19): siRNA sense strand
cagugugccuguccaucuu

SEQ ID NO: 1682049 - RNA, 19 nt, Homo sapiens
  misc_RNA (1)...(19): siRNA sense strand
aagcagaggccuacacgau

SEQ ID NO: 1682050 - RNA, 19 nt, Homo sapiens
  misc_RNA (1)...(19): siRNA sense strand
uuuaaacuacggaugcuuu

SEQ ID NO: 1682051 - RNA, 19 nt, Homo sapiens
  misc_RNA (1)...(19): siRNA sense strand
ccaagacccagcucaagca

SEQ ID NO: 1682052 - RNA, 19 nt, Homo sapiens
  misc_RNA (1)...(19): siRNA sense strand
aggaauacaggaacuucua

SEQ ID NO: 1682053 - RNA, 19 nt, Homo sapiens
  misc_RNA (1)...(19): siRNA sense strand
guaaauucgaaccaccauu

SEQ ID NO: 1682054 - RNA, 19 nt, Homo sapiens
  misc_RNA (1)...(19): siRNA sense strand
cuaaaugaaccaaauaucc

SEQ ID NO: 1682055 - RNA, 19 nt, Homo sapiens
  misc_RNA (1)...(19): siRNA sense strand
ccaucacaaucaaacagau

SEQ ID NO: 1682056 - RNA, 19 nt, Homo sapiens
  misc_RNA (1)...(19): siRNA sense strand
ggaggccagccaucacaau

SEQ ID NO: 1682057 - RNA, 19 nt, Homo sapiens
  misc_RNA (1)...(19): siRNA sense strand
uauuucacccgaaugugua

SEQ ID NO: 1682058 - RNA, 19 nt, Homo sapiens
  misc_RNA (1)...(19): siRNA sense strand
aggaaagcauggaggaaag

SEQ ID NO: 1682059 - RNA, 19 nt, Homo sapiens
  misc_RNA (1)...(19): siRNA sense strand
gaggccagccaucacaauc

SEQ ID NO: 1682060 - RNA, 19 nt, Homo sapiens
  misc_RNA (1)...(19): siRNA sense strand
aggaaagaccacccauuug

SEQ ID NO: 1682061 - RNA, 19 nt, Homo sapiens
  misc_RNA (1)...(19): siRNA sense strand
acaaucaaacagauccuau

SEQ ID NO: 1682062 - RNA, 19 nt, Homo sapiens
  misc_RNA (1)...(19): siRNA sense strand
gaaggaggcuuguuuaaac

SEQ ID NO: 1682063 - RNA, 19 nt, Homo sapiens
  misc_RNA (1)...(19): siRNA sense strand
gcagaggccuacacgauuu

SEQ ID NO: 1682064 - RNA, 19 nt, Homo sapiens
  misc_RNA (1)...(19): siRNA sense strand
gaggaaagaccacccauuu

SEQ ID NO: 1682065 - RNA, 19 nt, Homo sapiens
  misc_RNA (1)...(19): siRNA sense strand
uacaggaacuucuaaauga

SEQ ID NO: 1682066 - RNA, 19 nt, Homo sapiens
  misc_RNA (1)...(19): siRNA sense strand
uaaauucgaaccaccauua

SEQ ID NO: 1682067 - RNA, 19 nt, Homo sapiens
  misc_RNA (1)...(19): siRNA sense strand
ggaaggaggcuuguuuaaa

SEQ ID NO: 1682068 - RNA, 19 nt, Homo sapiens
  misc_RNA (1)...(19): siRNA sense strand
gaaguuugcgcccucauaa

SEQ ID NO: 1682069 - RNA, 19 nt, Homo sapiens
  misc_RNA (1)...(19): siRNA sense strand
ggaaagaccacccauuugg

SEQ ID NO: 1682070 - RNA, 19 nt, Homo sapiens
  misc_RNA (1)...(19): siRNA sense strand
gagcacaagccaagaaguu

SEQ ID NO: 1682071 - RNA, 19 nt, Homo sapiens
  misc_RNA (1)...(19): siRNA sense strand
gaacugggagugcgccauu

SEQ ID NO: 1682072 - RNA, 19 nt, Homo sapiens
  misc_RNA (1)...(19): siRNA sense strand
ggaauacaggaacuucuaa

SEQ ID NO: 1682073 - RNA, 19 nt, Homo sapiens
  misc_RNA (1)...(19): siRNA sense strand
gcacaagccaagaaguuug

SEQ ID NO: 1682074 - RNA, 19 nt, Homo sapiens
  misc_RNA (1)...(19): siRNA sense strand
gaggaaagcauggaggaaa

SEQ ID NO: 1682075 - RNA, 19 nt, Homo sapiens
  misc_RNA (1)...(19): siRNA sense strand
gaauacaggaacuucuaaa

SEQ ID NO: 1682076 - RNA, 19 nt, Homo sapiens
  misc_RNA (1)...(19): siRNA sense strand
gggaaggaggcuuguuuaa

SEQ ID NO: 1682077 - RNA, 19 nt, Homo sapiens
  misc_RNA (1)...(19): siRNA sense strand
acaggaacuucuaaaugaa

SEQ ID NO: 1682078 - RNA, 19 nt, Homo sapiens
  misc_RNA (1)...(19): siRNA sense strand
ggaggaaagaccacccauu

SEQ ID NO: 1682079 - RNA, 19 nt, Homo sapiens
  misc_RNA (1)...(19): siRNA sense strand
ggccagccaucacaaucaa

SEQ ID NO: 1682080 - RNA, 19 nt, Homo sapiens
  misc_RNA (1)...(19): siRNA sense strand
caaucaaacagauccuauu

SEQ ID NO: 1682081 - RNA, 19 nt, Homo sapiens
  misc_RNA (1)...(19): siRNA sense strand
auacaggaacuucuaaaug

SEQ ID NO: 1682082 - RNA, 19 nt, Homo sapiens
  misc_RNA (1)...(19): siRNA sense strand
ggaaagcauggaggaaaga

SEQ ID NO: 1682083 - RNA, 19 nt, Homo sapiens
  misc_RNA (1)...(19): siRNA sense strand
gugggaaggaggcuuguuu

SEQ ID NO: 1682084 - RNA, 19 nt, Homo sapiens
  misc_RNA (1)...(19): siRNA sense strand
cagaguggaguacgagaaa

SEQ ID NO: 1682085 - RNA, 19 nt, Homo sapiens
  misc_RNA (1)...(19): siRNA sense strand
auucgaaccaccauuauuu

SEQ ID NO: 1682086 - RNA, 19 nt, Homo sapiens
  misc_RNA (1)...(19): siRNA sense strand
ggaggcuuguuuaaacuac

SEQ ID NO: 1682087 - RNA, 19 nt, Homo sapiens
  misc_RNA (1)...(19): siRNA sense strand
cagaggccuacacgauuua

SEQ ID NO: 1682088 - RNA, 19 nt, Homo sapiens
  misc_RNA (1)...(19): siRNA sense strand
ugggaaggaggcuuguuua

SEQ ID NO: 1682089 - RNA, 19 nt, Homo sapiens
  misc_RNA (1)...(19): siRNA sense strand
gaacuucuaaaugaaccaa

SEQ ID NO: 1682090 - RNA, 19 nt, Homo sapiens
  misc_RNA (1)...(19): siRNA sense strand
uuucguggcugucccaaca

SEQ ID NO: 1682091 - RNA, 19 nt, Homo sapiens
  misc_RNA (1)...(19): siRNA sense strand
agaaguuugcgcccucaua

SEQ ID NO: 1682092 - RNA, 19 nt, Homo sapiens
  misc_RNA (1)...(19): siRNA sense strand
gaaaaggguccgagcacaa

SEQ ID NO: 1682093 - RNA, 19 nt, Homo sapiens
  misc_RNA (1)...(19): siRNA sense strand
cagugugccuguccaucuu

SEQ ID NO: 1682094 - RNA, 19 nt, Homo sapiens
  misc_RNA (1)...(19): siRNA sense strand
aagcagaggccuacacgau

SEQ ID NO: 1682095 - RNA, 19 nt, Homo sapiens
  misc_RNA (1)...(19): siRNA sense strand
uuuaaacuacggaugcuuu

SEQ ID NO: 1682096 - RNA, 19 nt, Homo sapiens
  misc_RNA (1)...(19): siRNA sense strand
ccaagacccagcucaagca

SEQ ID NO: 1682097 - RNA, 19 nt, Homo sapiens
  misc_RNA (1)...(19): siRNA sense strand
aggaauacaggaacuucua

SEQ ID NO: 1682098 - RNA, 19 nt, Homo sapiens
  misc_RNA (1)...(19): siRNA sense strand
guaaauucgaaccaccauu

SEQ ID NO: 1682099 - RNA, 19 nt, Homo sapiens
  misc_RNA (1)...(19): siRNA sense strand
cuaaaugaaccaaauaucc

SEQ ID NO: 1682100 - RNA, 19 nt, Homo sapiens
  misc_RNA (1)...(19): siRNA sense strand
ccaucacaaucaaacagau

SEQ ID NO: 1682101 - RNA, 19 nt, Homo sapiens
  misc_RNA (1)...(19): siRNA sense strand
ggaggccagccaucacaau

SEQ ID NO: 1682102 - RNA, 19 nt, Homo sapiens
  misc_RNA (1)...(19): siRNA sense strand
uauuucacccgaaugugua

SEQ ID NO: 1682103 - RNA, 19 nt, Homo sapiens
  misc_RNA (1)...(19): siRNA sense strand
aggaaagcauggaggaaag

SEQ ID NO: 1682104 - RNA, 19 nt, Homo sapiens
  misc_RNA (1)...(19): siRNA sense strand
gaggccagccaucacaauc

SEQ ID NO: 1682105 - RNA, 19 nt, Homo sapiens
  misc_RNA (1)...(19): siRNA sense strand
aggaaagaccacccauuug

SEQ ID NO: 1682106 - RNA, 19 nt, Homo sapiens
  misc_RNA (1)...(19): siRNA sense strand
acaaucaaacagauccuau

SEQ ID NO: 1682107 - RNA, 19 nt, Homo sapiens
  misc_RNA (1)...(19): siRNA sense strand
gaaggaggcuuguuuaaac

SEQ ID NO: 1682108 - RNA, 19 nt, Homo sapiens
  misc_RNA (1)...(19): siRNA sense strand
gcagaggccuacacgauuu

SEQ ID NO: 1682109 - RNA, 19 nt, Homo sapiens
  misc_RNA (1)...(19): siRNA sense strand
gaggaaagaccacccauuu

SEQ ID NO: 1682110 - RNA, 19 nt, Homo sapiens
  misc_RNA (1)...(19): siRNA sense strand
uacaggaacuucuaaauga

SEQ ID NO: 1682111 - RNA, 19 nt, Homo sapiens
  misc_RNA (1)...(19): siRNA sense strand
uaaauucgaaccaccauua

SEQ ID NO: 1682112 - RNA, 19 nt, Homo sapiens
  misc_RNA (1)...(19): siRNA sense strand
ggaaggaggcuuguuuaaa

SEQ ID NO: 1682113 - RNA, 19 nt, Homo sapiens
  misc_RNA (1)...(19): siRNA sense strand
gaaguuugcgcccucauaa

SEQ ID NO: 1682114 - RNA, 19 nt, Homo sapiens
  misc_RNA (1)...(19): siRNA sense strand
ggaaagaccacccauuugg

SEQ ID NO: 1682115 - RNA, 19 nt, Homo sapiens
  misc_RNA (1)...(19): siRNA sense strand
gagcacaagccaagaaguu

SEQ ID NO: 1682116 - RNA, 19 nt, Homo sapiens
  misc_RNA (1)...(19): siRNA sense strand
gaacugggagugcgccauu

SEQ ID NO: 1682117 - RNA, 19 nt, Homo sapiens
  misc_RNA (1)...(19): siRNA sense strand
ggaauacaggaacuucuaa

SEQ ID NO: 1682118 - RNA, 19 nt, Homo sapiens
  misc_RNA (1)...(19): siRNA sense strand
gcacaagccaagaaguuug

SEQ ID NO: 1682119 - RNA, 19 nt, Homo sapiens
  misc_RNA (1)...(19): siRNA sense strand
gaggaaagcauggaggaaa

SEQ ID NO: 1682120 - RNA, 19 nt, Homo sapiens
  misc_RNA (1)...(19): siRNA sense strand
gaauacaggaacuucuaaa

SEQ ID NO: 1682121 - RNA, 19 nt, Homo sapiens
  misc_RNA (1)...(19): siRNA sense strand
gggaaggaggcuuguuuaa

SEQ ID NO: 1682122 - RNA, 19 nt, Homo sapiens
  misc_RNA (1)...(19): siRNA sense strand
acaggaacuucuaaaugaa

SEQ ID NO: 1682123 - RNA, 19 nt, Homo sapiens
  misc_RNA (1)...(19): siRNA sense strand
ggaggaaagaccacccauu

SEQ ID NO: 1682124 - RNA, 19 nt, Homo sapiens
  misc_RNA (1)...(19): siRNA sense strand
ggccagccaucacaaucaa

SEQ ID NO: 1682125 - RNA, 19 nt, Homo sapiens
  misc_RNA (1)...(19): siRNA sense strand
caaucaaacagauccuauu

SEQ ID NO: 1682126 - RNA, 19 nt, Homo sapiens
  misc_RNA (1)...(19): siRNA sense strand
auacaggaacuucuaaaug

SEQ ID NO: 1682127 - RNA, 19 nt, Homo sapiens
  misc_RNA (1)...(19): siRNA sense strand
ggaaagcauggaggaaaga

SEQ ID NO: 1682128 - RNA, 19 nt, Homo sapiens
  misc_RNA (1)...(19): siRNA sense strand
gugggaaggaggcuuguuu

SEQ ID NO: 1682129 - RNA, 19 nt, Homo sapiens
  misc_RNA (1)...(19): siRNA sense strand
cagaguggaguacgagaaa

SEQ ID NO: 1682130 - RNA, 19 nt, Homo sapiens
  misc_RNA (1)...(19): siRNA sense strand
auucgaaccaccauuauuu

SEQ ID NO: 1682131 - RNA, 19 nt, Homo sapiens
  misc_RNA (1)...(19): siRNA sense strand
ggaggcuuguuuaaacuac

SEQ ID NO: 1682132 - RNA, 19 nt, Homo sapiens
  misc_RNA (1)...(19): siRNA sense strand
cagaggccuacacgauuua

SEQ ID NO: 1682133 - RNA, 19 nt, Homo sapiens
  misc_RNA (1)...(19): siRNA sense strand
ugggaaggaggcuuguuua

SEQ ID NO: 1682134 - RNA, 19 nt, Homo sapiens
  misc_RNA (1)...(19): siRNA sense strand
gaacuucuaaaugaaccaa

SEQ ID NO: 1682135 - RNA, 19 nt, Homo sapiens
  misc_RNA (1)...(19): siRNA sense strand
uuucguggcugucccaaca

SEQ ID NO: 1682136 - RNA, 19 nt, Homo sapiens
  misc_RNA (1)...(19): siRNA sense strand
agaaguuugcgcccucaua

SEQ ID NO: 1682137 - RNA, 19 nt, Homo sapiens
  misc_RNA (1)...(19): siRNA sense strand
gaaaaggguccgagcacaa

SEQ ID NO: 1682138 - RNA, 19 nt, Homo sapiens
  misc_RNA (1)...(19): siRNA sense strand
cagugugccuguccaucuu

SEQ ID NO: 1682139 - RNA, 19 nt, Homo sapiens
  misc_RNA (1)...(19): siRNA sense strand
aagcagaggccuacacgau

SEQ ID NO: 1682140 - RNA, 19 nt, Homo sapiens
  misc_RNA (1)...(19): siRNA sense strand
uuuaaacuacggaugcuuu

SEQ ID NO: 1682141 - RNA, 19 nt, Homo sapiens
  misc_RNA (1)...(19): siRNA sense strand
ccaagacccagcucaagca

SEQ ID NO: 1682142 - RNA, 19 nt, Homo sapiens
  misc_RNA (1)...(19): siRNA sense strand
aggaauacaggaacuucua

SEQ ID NO: 1682143 - RNA, 19 nt, Homo sapiens
  misc_RNA (1)...(19): siRNA sense strand
guaaauucgaaccaccauu

SEQ ID NO: 1682144 - RNA, 19 nt, Homo sapiens
  misc_RNA (1)...(19): siRNA sense strand
cuaaaugaaccaaauaucc

SEQ ID NO: 1682145 - RNA, 19 nt, Homo sapiens
  misc_RNA (1)...(19): siRNA sense strand
ccaucacaaucaaacagau

SEQ ID NO: 1682146 - RNA, 19 nt, Homo sapiens
  misc_RNA (1)...(19): siRNA sense strand
ggaggccagccaucacaau

SEQ ID NO: 1682147 - RNA, 19 nt, Homo sapiens
  misc_RNA (1)...(19): siRNA sense strand
uauuucacccgaaugugua

SEQ ID NO: 1682148 - RNA, 19 nt, Homo sapiens
  misc_RNA (1)...(19): siRNA sense strand
aggaaagcauggaggaaag

SEQ ID NO: 1682149 - RNA, 19 nt, Homo sapiens
  misc_RNA (1)...(19): siRNA sense strand
gaggccagccaucacaauc

SEQ ID NO: 1682150 - RNA, 19 nt, Homo sapiens
  misc_RNA (1)...(19): siRNA sense strand
aggaaagaccacccauuug

SEQ ID NO: 1682151 - RNA, 19 nt, Homo sapiens
  misc_RNA (1)...(19): siRNA sense strand
acaaucaaacagauccuau

SEQ ID NO: 1682152 - RNA, 19 nt, Homo sapiens
  misc_RNA (1)...(19): siRNA sense strand
gaaggaggcuuguuuaaac

SEQ ID NO: 1682153 - RNA, 19 nt, Homo sapiens
  misc_RNA (1)...(19): siRNA sense strand
gcagaggccuacacgauuu

SEQ ID NO: 1682154 - RNA, 19 nt, Homo sapiens
  misc_RNA (1)...(19): siRNA sense strand
gaggaaagaccacccauuu

SEQ ID NO: 1682155 - RNA, 19 nt, Homo sapiens
  misc_RNA (1)...(19): siRNA sense strand
uacaggaacuucuaaauga

SEQ ID NO: 1682156 - RNA, 19 nt, Homo sapiens
  misc_RNA (1)...(19): siRNA sense strand
uaaauucgaaccaccauua

SEQ ID NO: 1682157 - RNA, 19 nt, Homo sapiens
  misc_RNA (1)...(19): siRNA sense strand
ggaaggaggcuuguuuaaa

SEQ ID NO: 1682158 - RNA, 19 nt, Homo sapiens
  misc_RNA (1)...(19): siRNA sense strand
gaaguuugcgcccucauaa

SEQ ID NO: 1682159 - RNA, 19 nt, Homo sapiens
  misc_RNA (1)...(19): siRNA sense strand
ggaaagaccacccauuugg

SEQ ID NO: 1682160 - RNA, 19 nt, Homo sapiens
  misc_RNA (1)...(19): siRNA sense strand
gagcacaagccaagaaguu

SEQ ID NO: 1682161 - RNA, 19 nt, Homo sapiens
  misc_RNA (1)...(19): siRNA sense strand
gaacugggagugcgccauu

SEQ ID NO: 1682162 - RNA, 19 nt, Homo sapiens
  misc_RNA (1)...(19): siRNA sense strand
ggaauacaggaacuucuaa

SEQ ID NO: 1682163 - RNA, 19 nt, Homo sapiens
  misc_RNA (1)...(19): siRNA sense strand
gcacaagccaagaaguuug

SEQ ID NO: 1682164 - RNA, 19 nt, Homo sapiens
  misc_RNA (1)...(19): siRNA sense strand
gaggaaagcauggaggaaa

SEQ ID NO: 1682165 - RNA, 19 nt, Homo sapiens
  misc_RNA (1)...(19): siRNA sense strand
gaauacaggaacuucuaaa

SEQ ID NO: 1682166 - RNA, 19 nt, Homo sapiens
  misc_RNA (1)...(19): siRNA sense strand
gggaaggaggcuuguuuaa

SEQ ID NO: 1682167 - RNA, 19 nt, Homo sapiens
  misc_RNA (1)...(19): siRNA sense strand
acaggaacuucuaaaugaa

SEQ ID NO: 1682168 - RNA, 19 nt, Homo sapiens
  misc_RNA (1)...(19): siRNA sense strand
ggaggaaagaccacccauu

SEQ ID NO: 1682169 - RNA, 19 nt, Homo sapiens
  misc_RNA (1)...(19): siRNA sense strand
ggccagccaucacaaucaa

SEQ ID NO: 1682170 - RNA, 19 nt, Homo sapiens
  misc_RNA (1)...(19): siRNA sense strand
caaucaaacagauccuauu

SEQ ID NO: 1682171 - RNA, 19 nt, Homo sapiens
  misc_RNA (1)...(19): siRNA sense strand
auacaggaacuucuaaaug

SEQ ID NO: 1682172 - RNA, 19 nt, Homo sapiens
  misc_RNA (1)...(19): siRNA sense strand
ggaaagcauggaggaaaga

SEQ ID NO: 1682173 - RNA, 19 nt, Homo sapiens
  misc_RNA (1)...(19): siRNA sense strand
gugggaaggaggcuuguuu

SEQ ID NO: 1682174 - RNA, 19 nt, Homo sapiens
  misc_RNA (1)...(19): siRNA sense strand
cagaguggaguacgagaaa

SEQ ID NO: 1682175 - RNA, 19 nt, Homo sapiens
  misc_RNA (1)...(19): siRNA sense strand
auucgaaccaccauuauuu

SEQ ID NO: 1682176 - RNA, 19 nt, Homo sapiens
  misc_RNA (1)...(19): siRNA sense strand
ggaggcuuguuuaaacuac

SEQ ID NO: 1682177 - RNA, 19 nt, Homo sapiens
  misc_RNA (1)...(19): siRNA sense strand
cagaggccuacacgauuua

SEQ ID NO: 1682178 - RNA, 19 nt, Homo sapiens
  misc_RNA (1)...(19): siRNA sense strand
ugggaaggaggcuuguuua

SEQ ID NO: 1682179 - RNA, 19 nt, Homo sapiens
  misc_RNA (1)...(19): siRNA sense strand
gaacuucuaaaugaaccaa

SEQ ID NO: 1682180 - RNA, 19 nt, Homo sapiens
  misc_RNA (1)...(19): siRNA sense strand
uuucguggcugucccaaca

SEQ ID NO: 1682181 - RNA, 19 nt, Homo sapiens
  misc_RNA (1)...(19): siRNA sense strand
agaaguuugcgcccucaua

SEQ ID NO: 1682182 - RNA, 19 nt, Homo sapiens
  misc_RNA (1)...(19): siRNA sense strand
gaaaaggguccgagcacaa

SEQ ID NO: 1682183 - RNA, 19 nt, Homo sapiens
  misc_RNA (1)...(19): siRNA sense strand
cagugugccuguccaucuu

SEQ ID NO: 1682184 - RNA, 19 nt, Homo sapiens
  misc_RNA (1)...(19): siRNA sense strand
aagcagaggccuacacgau

SEQ ID NO: 1682185 - RNA, 19 nt, Homo sapiens
  misc_RNA (1)...(19): siRNA sense strand
uuuaaacuacggaugcuuu

SEQ ID NO: 1682186 - RNA, 19 nt, Homo sapiens
  misc_RNA (1)...(19): siRNA sense strand
ccaagacccagcucaagca

SEQ ID NO: 1682187 - RNA, 19 nt, Homo sapiens
  misc_RNA (1)...(19): siRNA sense strand
aggaauacaggaacuucua

SEQ ID NO: 1682188 - RNA, 19 nt, Homo sapiens
  misc_RNA (1)...(19): siRNA sense strand
guaaauucgaaccaccauu

SEQ ID NO: 1682189 - RNA, 19 nt, Homo sapiens
  misc_RNA (1)...(19): siRNA sense strand
cuaaaugaaccaaauaucc

SEQ ID NO: 1682190 - RNA, 19 nt, Homo sapiens
  misc_RNA (1)...(19): siRNA sense strand
ccaucacaaucaaacagau

SEQ ID NO: 1682191 - RNA, 19 nt, Homo sapiens
  misc_RNA (1)...(19): siRNA sense strand
ggaggccagccaucacaau

SEQ ID NO: 1682192 - RNA, 19 nt, Homo sapiens
  misc_RNA (1)...(19): siRNA sense strand
uauuucacccgaaugugua

SEQ ID NO: 1682193 - RNA, 19 nt, Homo sapiens
  misc_RNA (1)...(19): siRNA sense strand
aggaaagcauggaggaaag

SEQ ID NO: 1682194 - RNA, 19 nt, Homo sapiens
  misc_RNA (1)...(19): siRNA sense strand
gaggccagccaucacaauc

SEQ ID NO: 1682195 - RNA, 19 nt, Homo sapiens
  misc_RNA (1)...(19): siRNA sense strand
aggaaagaccacccauuug

SEQ ID NO: 1682196 - RNA, 19 nt, Homo sapiens
  misc_RNA (1)...(19): siRNA sense strand
acaaucaaacagauccuau

SEQ ID NO: 1682197 - RNA, 19 nt, Homo sapiens
  misc_RNA (1)...(19): siRNA sense strand
gaaggaggcuuguuuaaac

SEQ ID NO: 1682198 - RNA, 19 nt, Homo sapiens
  misc_RNA (1)...(19): siRNA sense strand
gcagaggccuacacgauuu

SEQ ID NO: 1682199 - RNA, 19 nt, Homo sapiens
  misc_RNA (1)...(19): siRNA sense strand
gaggaaagaccacccauuu

SEQ ID NO: 1682200 - RNA, 19 nt, Homo sapiens
  misc_RNA (1)...(19): siRNA sense strand
uacaggaacuucuaaauga

SEQ ID NO: 1682201 - RNA, 19 nt, Homo sapiens
  misc_RNA (1)...(19): siRNA sense strand
uaaauucgaaccaccauua

SEQ ID NO: 1682202 - RNA, 19 nt, Homo sapiens
  misc_RNA (1)...(19): siRNA sense strand
ggaaggaggcuuguuuaaa

SEQ ID NO: 1682203 - RNA, 19 nt, Homo sapiens
  misc_RNA (1)...(19): siRNA sense strand
gaaguuugcgcccucauaa

SEQ ID NO: 1682204 - RNA, 19 nt, Homo sapiens
  misc_RNA (1)...(19): siRNA sense strand
ggaaagaccacccauuugg

SEQ ID NO: 1682205 - RNA, 19 nt, Homo sapiens
  misc_RNA (1)...(19): siRNA sense strand
gagcacaagccaagaaguu

SEQ ID NO: 1682206 - RNA, 19 nt, Homo sapiens
  misc_RNA (1)...(19): siRNA sense strand
gaacugggagugcgccauu

SEQ ID NO: 1682207 - RNA, 19 nt, Homo sapiens
  misc_RNA (1)...(19): siRNA sense strand
ggaauacaggaacuucuaa

SEQ ID NO: 1682208 - RNA, 19 nt, Homo sapiens
  misc_RNA (1)...(19): siRNA sense strand
gcacaagccaagaaguuug

SEQ ID NO: 1682209 - RNA, 19 nt, Homo sapiens
  misc_RNA (1)...(19): siRNA sense strand
gaggaaagcauggaggaaa

SEQ ID NO: 1682210 - RNA, 19 nt, Homo sapiens
  misc_RNA (1)...(19): siRNA sense strand
gaauacaggaacuucuaaa

SEQ ID NO: 1682211 - RNA, 19 nt, Homo sapiens
  misc_RNA (1)...(19): siRNA sense strand
gggaaggaggcuuguuuaa

SEQ ID NO: 1682212 - RNA, 19 nt, Homo sapiens
  misc_RNA (1)...(19): siRNA sense strand
acaggaacuucuaaaugaa

SEQ ID NO: 1682213 - RNA, 19 nt, Homo sapiens
  misc_RNA (1)...(19): siRNA sense strand
ggaggaaagaccacccauu

SEQ ID NO: 1682214 - RNA, 19 nt, Homo sapiens
  misc_RNA (1)...(19): siRNA sense strand
ggccagccaucacaaucaa

SEQ ID NO: 1682215 - RNA, 19 nt, Homo sapiens
  misc_RNA (1)...(19): siRNA sense strand
caaucaaacagauccuauu

SEQ ID NO: 1682216 - RNA, 19 nt, Homo sapiens
  misc_RNA (1)...(19): siRNA sense strand
auacaggaacuucuaaaug

SEQ ID NO: 1682217 - RNA, 19 nt, Homo sapiens
  misc_RNA (1)...(19): siRNA sense strand
ggaaagcauggaggaaaga

SEQ ID NO: 1682218 - RNA, 19 nt, Homo sapiens
  misc_RNA (1)...(19): siRNA sense strand
gugggaaggaggcuuguuu

SEQ ID NO: 1682219 - RNA, 19 nt, Homo sapiens
  misc_RNA (1)...(19): siRNA sense strand
cagaguggaguacgagaaa

SEQ ID NO: 1682220 - RNA, 19 nt, Homo sapiens
  misc_RNA (1)...(19): siRNA sense strand
auucgaaccaccauuauuu

SEQ ID NO: 1682221 - RNA, 19 nt, Homo sapiens
  misc_RNA (1)...(19): siRNA sense strand
ggaggcuuguuuaaacuac

SEQ ID NO: 1682222 - RNA, 19 nt, Homo sapiens
  misc_RNA (1)...(19): siRNA sense strand
cagaggccuacacgauuua

SEQ ID NO: 1682223 - RNA, 19 nt, Homo sapiens
  misc_RNA (1)...(19): siRNA sense strand
ugggaaggaggcuuguuua

SEQ ID NO: 1682224 - RNA, 19 nt, Homo sapiens
  misc_RNA (1)...(19): siRNA sense strand
gaacuucuaaaugaaccaa

SEQ ID NO: 1682225 - RNA, 19 nt, Homo sapiens
  misc_RNA (1)...(19): siRNA sense strand
uuucguggcugucccaaca

SEQ ID NO: 1682226 - RNA, 19 nt, Homo sapiens
  misc_RNA (1)...(19): siRNA sense strand
agaaguuugcgcccucaua

SEQ ID NO: 1682227 - RNA, 19 nt, Homo sapiens
  misc_RNA (1)...(19): siRNA sense strand
gaaaaggguccgagcacaa

SEQ ID NO: 1682228 - RNA, 19 nt, Homo sapiens
  misc_RNA (1)...(19): siRNA sense strand
cagugugccuguccaucuu

SEQ ID NO: 1682229 - RNA, 19 nt, Homo sapiens
  misc_RNA (1)...(19): siRNA sense strand
aagcagaggccuacacgau

SEQ ID NO: 1682230 - RNA, 19 nt, Homo sapiens
  misc_RNA (1)...(19): siRNA sense strand
uuuaaacuacggaugcuuu

SEQ ID NO: 1682231 - RNA, 19 nt, Homo sapiens
  misc_RNA (1)...(19): siRNA sense strand
ccaagacccagcucaagca

SEQ ID NO: 1682232 - RNA, 19 nt, Homo sapiens
  misc_RNA (1)...(19): siRNA sense strand
aggaauacaggaacuucua

SEQ ID NO: 1682233 - RNA, 19 nt, Homo sapiens
  misc_RNA (1)...(19): siRNA sense strand
guaaauucgaaccaccauu

SEQ ID NO: 1682234 - RNA, 19 nt, Homo sapiens
  misc_RNA (1)...(19): siRNA sense strand
cuaaaugaaccaaauaucc

SEQ ID NO: 1682235 - RNA, 19 nt, Homo sapiens
  misc_RNA (1)...(19): siRNA sense strand
ccaucacaaucaaacagau

SEQ ID NO: 1682236 - RNA, 19 nt, Homo sapiens
  misc_RNA (1)...(19): siRNA sense strand
ggaggccagccaucacaau

SEQ ID NO: 1682237 - RNA, 19 nt, Homo sapiens
  misc_RNA (1)...(19): siRNA sense strand
uauuucacccgaaugugua

SEQ ID NO: 1682238 - RNA, 19 nt, Homo sapiens
  misc_RNA (1)...(19): siRNA sense strand
aggaaagcauggaggaaag

SEQ ID NO: 1682239 - RNA, 19 nt, Homo sapiens
  misc_RNA (1)...(19): siRNA sense strand
gaggccagccaucacaauc

SEQ ID NO: 1682240 - RNA, 19 nt, Homo sapiens
  misc_RNA (1)...(19): siRNA sense strand
aggaaagaccacccauuug

SEQ ID NO: 1682241 - RNA, 19 nt, Homo sapiens
  misc_RNA (1)...(19): siRNA sense strand
acaaucaaacagauccuau

SEQ ID NO: 1682242 - RNA, 19 nt, Homo sapiens
  misc_RNA (1)...(19): siRNA sense strand
gaaggaggcuuguuuaaac

SEQ ID NO: 1682243 - RNA, 19 nt, Homo sapiens
  misc_RNA (1)...(19): siRNA sense strand
gcagaggccuacacgauuu

SEQ ID NO: 1682244 - RNA, 19 nt, Homo sapiens
  misc_RNA (1)...(19): siRNA sense strand
gaggaaagaccacccauuu

SEQ ID NO: 1682245 - RNA, 19 nt, Homo sapiens
  misc_RNA (1)...(19): siRNA sense strand
uacaggaacuucuaaauga

SEQ ID NO: 1682246 - RNA, 19 nt, Homo sapiens
  misc_RNA (1)...(19): siRNA sense strand
uaaauucgaaccaccauua

SEQ ID NO: 1682247 - RNA, 19 nt, Homo sapiens
  misc_RNA (1)...(19): siRNA sense strand
ggaaggaggcuuguuuaaa

SEQ ID NO: 1682248 - RNA, 19 nt, Homo sapiens
  misc_RNA (1)...(19): siRNA sense strand
gaaguuugcgcccucauaa

SEQ ID NO: 1682249 - RNA, 19 nt, Homo sapiens
  misc_RNA (1)...(19): siRNA sense strand
ggaaagaccacccauuugg

SEQ ID NO: 1682250 - RNA, 19 nt, Homo sapiens
  misc_RNA (1)...(19): siRNA sense strand
gagcacaagccaagaaguu

SEQ ID NO: 1682251 - RNA, 19 nt, Homo sapiens
  misc_RNA (1)...(19): siRNA sense strand
gaacugggagugcgccauu

SEQ ID NO: 1682252 - RNA, 19 nt, Homo sapiens
  misc_RNA (1)...(19): siRNA sense strand
ggaauacaggaacuucuaa

SEQ ID NO: 1682253 - RNA, 19 nt, Homo sapiens
  misc_RNA (1)...(19): siRNA sense strand
gcacaagccaagaaguuug

SEQ ID NO: 1682254 - RNA, 19 nt, Homo sapiens
  misc_RNA (1)...(19): siRNA sense strand
gaggaaagcauggaggaaa

SEQ ID NO: 1682255 - RNA, 19 nt, Homo sapiens
  misc_RNA (1)...(19): siRNA sense strand
gaauacaggaacuucuaaa

SEQ ID NO: 1682256 - RNA, 19 nt, Homo sapiens
  misc_RNA (1)...(19): siRNA sense strand
gggaaggaggcuuguuuaa

SEQ ID NO: 1682257 - RNA, 19 nt, Homo sapiens
  misc_RNA (1)...(19): siRNA sense strand
acaggaacuucuaaaugaa

SEQ ID NO: 1682258 - RNA, 19 nt, Homo sapiens
  misc_RNA (1)...(19): siRNA sense strand
ggaggaaagaccacccauu

SEQ ID NO: 1682259 - RNA, 19 nt, Homo sapiens
  misc_RNA (1)...(19): siRNA sense strand
ggccagccaucacaaucaa

SEQ ID NO: 1682260 - RNA, 19 nt, Homo sapiens
  misc_RNA (1)...(19): siRNA sense strand
caaucaaacagauccuauu

SEQ ID NO: 1682261 - RNA, 19 nt, Homo sapiens
  misc_RNA (1)...(19): siRNA sense strand
auacaggaacuucuaaaug

SEQ ID NO: 1682262 - RNA, 19 nt, Homo sapiens
  misc_RNA (1)...(19): siRNA sense strand
ggaaagcauggaggaaaga

SEQ ID NO: 1682263 - RNA, 19 nt, Homo sapiens
  misc_RNA (1)...(19): siRNA sense strand
gugggaaggaggcuuguuu

SEQ ID NO: 1682264 - RNA, 19 nt, Homo sapiens
  misc_RNA (1)...(19): siRNA sense strand
cagaguggaguacgagaaa

SEQ ID NO: 1682265 - RNA, 19 nt, Homo sapiens
  misc_RNA (1)...(19): siRNA sense strand
auucgaaccaccauuauuu

SEQ ID NO: 1682266 - RNA, 19 nt, Homo sapiens
  misc_RNA (1)...(19): siRNA sense strand
ggaggcuuguuuaaacuac

SEQ ID NO: 1682267 - RNA, 19 nt, Homo sapiens
  misc_RNA (1)...(19): siRNA sense strand
cagaggccuacacgauuua

SEQ ID NO: 1682268 - RNA, 19 nt, Homo sapiens
  misc_RNA (1)...(19): siRNA sense strand
ugggaaggaggcuuguuua

SEQ ID NO: 1682269 - RNA, 19 nt, Homo sapiens
  misc_RNA (1)...(19): siRNA sense strand
gaacuucuaaaugaaccaa

SEQ ID NO: 1682270 - RNA, 19 nt, Homo sapiens
  misc_RNA (1)...(19): siRNA sense strand
uuucguggcugucccaaca

SEQ ID NO: 1682271 - RNA, 19 nt, Homo sapiens
  misc_RNA (1)...(19): siRNA sense strand
agaaguuugcgcccucaua

SEQ ID NO: 1682272 - RNA, 19 nt, Homo sapiens
  misc_RNA (1)...(19): siRNA sense strand
gaaaaggguccgagcacaa

SEQ ID NO: 1682273 - RNA, 19 nt, Homo sapiens
  misc_RNA (1)...(19): siRNA sense strand
cagugugccuguccaucuu

SEQ ID NO: 1682274 - RNA, 19 nt, Homo sapiens
  misc_RNA (1)...(19): siRNA sense strand
aagcagaggccuacacgau

SEQ ID NO: 1682275 - RNA, 19 nt, Homo sapiens
  misc_RNA (1)...(19): siRNA sense strand
uuuaaacuacggaugcuuu

SEQ ID NO: 1682276 - RNA, 19 nt, Homo sapiens
  misc_RNA (1)...(19): siRNA sense strand
ccaagacccagcucaagca

SEQ ID NO: 1682277 - RNA, 19 nt, Homo sapiens
  misc_RNA (1)...(19): siRNA sense strand
aggaauacaggaacuucua

SEQ ID NO: 1682278 - RNA, 19 nt, Homo sapiens
  misc_RNA (1)...(19): siRNA sense strand
guaaauucgaaccaccauu

SEQ ID NO: 1682279 - RNA, 19 nt, Homo sapiens
  misc_RNA (1)...(19): siRNA sense strand
cuaaaugaaccaaauaucc

SEQ ID NO: 1682280 - RNA, 19 nt, Homo sapiens
  misc_RNA (1)...(19): siRNA sense strand
ccaucacaaucaaacagau

SEQ ID NO: 1682281 - RNA, 19 nt, Homo sapiens
  misc_RNA (1)...(19): siRNA sense strand
ggaggccagccaucacaau

SEQ ID NO: 1682282 - RNA, 19 nt, Homo sapiens
  misc_RNA (1)...(19): siRNA sense strand
uauuucacccgaaugugua

SEQ ID NO: 1682283 - RNA, 19 nt, Homo sapiens
  misc_RNA (1)...(19): siRNA sense strand
aggaaagcauggaggaaag

SEQ ID NO: 1682284 - RNA, 19 nt, Homo sapiens
  misc_RNA (1)...(19): siRNA sense strand
gaggccagccaucacaauc

SEQ ID NO: 1682285 - RNA, 19 nt, Homo sapiens
  misc_RNA (1)...(19): siRNA sense strand
aggaaagaccacccauuug

SEQ ID NO: 1682286 - RNA, 19 nt, Homo sapiens
  misc_RNA (1)...(19): siRNA sense strand
acaaucaaacagauccuau

SEQ ID NO: 1682287 - RNA, 19 nt, Homo sapiens
  misc_RNA (1)...(19): siRNA sense strand
gaaggaggcuuguuuaaac

SEQ ID NO: 1682288 - RNA, 19 nt, Homo sapiens
  misc_RNA (1)...(19): siRNA sense strand
gcagaggccuacacgauuu

SEQ ID NO: 1682289 - RNA, 19 nt, Homo sapiens
  misc_RNA (1)...(19): siRNA sense strand
gaggaaagaccacccauuu

SEQ ID NO: 1682290 - RNA, 19 nt, Homo sapiens
  misc_RNA (1)...(19): siRNA sense strand
uacaggaacuucuaaauga

SEQ ID NO: 1682291 - RNA, 19 nt, Homo sapiens
  misc_RNA (1)...(19): siRNA sense strand
uaaauucgaaccaccauua

SEQ ID NO: 1682292 - RNA, 19 nt, Homo sapiens
  misc_RNA (1)...(19): siRNA sense strand
ggaaggaggcuuguuuaaa

SEQ ID NO: 1682293 - RNA, 19 nt, Homo sapiens
  misc_RNA (1)...(19): siRNA sense strand
gaaguuugcgcccucauaa

SEQ ID NO: 1682294 - RNA, 19 nt, Homo sapiens
  misc_RNA (1)...(19): siRNA sense strand
ggaaagaccacccauuugg

SEQ ID NO: 1682295 - RNA, 19 nt, Homo sapiens
  misc_RNA (1)...(19): siRNA sense strand
gagcacaagccaagaaguu

SEQ ID NO: 1682296 - RNA, 19 nt, Homo sapiens
  misc_RNA (1)...(19): siRNA sense strand
gaacugggagugcgccauu

SEQ ID NO: 1682297 - RNA, 19 nt, Homo sapiens
  misc_RNA (1)...(19): siRNA sense strand
ggaauacaggaacuucuaa

SEQ ID NO: 1682298 - RNA, 19 nt, Homo sapiens
  misc_RNA (1)...(19): siRNA sense strand
gcacaagccaagaaguuug

SEQ ID NO: 1682299 - RNA, 19 nt, Homo sapiens
  misc_RNA (1)...(19): siRNA sense strand
gaggaaagcauggaggaaa

SEQ ID NO: 1682300 - RNA, 19 nt, Homo sapiens
  misc_RNA (1)...(19): siRNA sense strand
gaauacaggaacuucuaaa

SEQ ID NO: 1682301 - RNA, 19 nt, Homo sapiens
  misc_RNA (1)...(19): siRNA sense strand
gggaaggaggcuuguuuaa

SEQ ID NO: 1682302 - RNA, 19 nt, Homo sapiens
  misc_RNA (1)...(19): siRNA sense strand
acaggaacuucuaaaugaa

SEQ ID NO: 1682303 - RNA, 19 nt, Homo sapiens
  misc_RNA (1)...(19): siRNA sense strand
ggaggaaagaccacccauu

SEQ ID NO: 1682304 - RNA, 19 nt, Homo sapiens
  misc_RNA (1)...(19): siRNA sense strand
ggccagccaucacaaucaa

SEQ ID NO: 1682305 - RNA, 19 nt, Homo sapiens
  misc_RNA (1)...(19): siRNA sense strand
caaucaaacagauccuauu

SEQ ID NO: 1682306 - RNA, 19 nt, Homo sapiens
  misc_RNA (1)...(19): siRNA sense strand
auacaggaacuucuaaaug

SEQ ID NO: 1682307 - RNA, 19 nt, Homo sapiens
  misc_RNA (1)...(19): siRNA sense strand
ggaaagcauggaggaaaga

SEQ ID NO: 1682308 - RNA, 19 nt, Homo sapiens
  misc_RNA (1)...(19): siRNA sense strand
gugggaaggaggcuuguuu

SEQ ID NO: 1682309 - RNA, 19 nt, Homo sapiens
  misc_RNA (1)...(19): siRNA sense strand
cagaguggaguacgagaaa

SEQ ID NO: 1682310 - RNA, 19 nt, Homo sapiens
  misc_RNA (1)...(19): siRNA sense strand
auucgaaccaccauuauuu

SEQ ID NO: 1682311 - RNA, 19 nt, Homo sapiens
  misc_RNA (1)...(19): siRNA sense strand
ggaggcuuguuuaaacuac

SEQ ID NO: 1682312 - RNA, 19 nt, Homo sapiens
  misc_RNA (1)...(19): siRNA sense strand
cagaggccuacacgauuua

SEQ ID NO: 1682313 - RNA, 19 nt, Homo sapiens
  misc_RNA (1)...(19): siRNA sense strand
ugggaaggaggcuuguuua

SEQ ID NO: 1682314 - RNA, 19 nt, Homo sapiens
  misc_RNA (1)...(19): siRNA sense strand
gaacuucuaaaugaaccaa

SEQ ID NO: 1682315 - RNA, 19 nt, Homo sapiens
  misc_RNA (1)...(19): siRNA sense strand
uuucguggcugucccaaca

SEQ ID NO: 1682316 - RNA, 19 nt, Homo sapiens
  misc_RNA (1)...(19): siRNA sense strand
agaaguuugcgcccucaua

SEQ ID NO: 1682317 - RNA, 19 nt, Homo sapiens
  misc_RNA (1)...(19): siRNA sense strand
gaaaaggguccgagcacaa

SEQ ID NO: 1682318 - RNA, 19 nt, Homo sapiens
  misc_RNA (1)...(19): siRNA sense strand
cagugugccuguccaucuu

SEQ ID NO: 1682319 - RNA, 19 nt, Homo sapiens
  misc_RNA (1)...(19): siRNA sense strand
aagcagaggccuacacgau

SEQ ID NO: 1682320 - RNA, 19 nt, Homo sapiens
  misc_RNA (1)...(19): siRNA sense strand
uuuaaacuacggaugcuuu

SEQ ID NO: 1682321 - RNA, 19 nt, Homo sapiens
  misc_RNA (1)...(19): siRNA sense strand
ccaagacccagcucaagca

SEQ ID NO: 1682322 - RNA, 19 nt, Homo sapiens
  misc_RNA (1)...(19): siRNA sense strand
aggaauacaggaacuucua

SEQ ID NO: 1682323 - RNA, 19 nt, Homo sapiens
  misc_RNA (1)...(19): siRNA sense strand
guaaauucgaaccaccauu

SEQ ID NO: 1682324 - RNA, 19 nt, Homo sapiens
  misc_RNA (1)...(19): siRNA sense strand
cuaaaugaaccaaauaucc

SEQ ID NO: 1682325 - RNA, 19 nt, Homo sapiens
  misc_RNA (1)...(19): siRNA sense strand
ccaucacaaucaaacagau

SEQ ID NO: 1682326 - RNA, 19 nt, Homo sapiens
  misc_RNA (1)...(19): siRNA sense strand
ggaggccagccaucacaau

SEQ ID NO: 1682327 - RNA, 19 nt, Homo sapiens
  misc_RNA (1)...(19): siRNA sense strand
uauuucacccgaaugugua

SEQ ID NO: 1682328 - RNA, 19 nt, Homo sapiens
  misc_RNA (1)...(19): siRNA sense strand
aggaaagcauggaggaaag

SEQ ID NO: 1682329 - RNA, 19 nt, Homo sapiens
  misc_RNA (1)...(19): siRNA sense strand
gaggccagccaucacaauc

SEQ ID NO: 1682330 - RNA, 19 nt, Homo sapiens
  misc_RNA (1)...(19): siRNA sense strand
aggaaagaccacccauuug

SEQ ID NO: 1682331 - RNA, 19 nt, Homo sapiens
  misc_RNA (1)...(19): siRNA sense strand
acaaucaaacagauccuau

SEQ ID NO: 1682332 - RNA, 19 nt, Homo sapiens
  misc_RNA (1)...(19): siRNA sense strand
gaaggaggcuuguuuaaac

SEQ ID NO: 1682333 - RNA, 19 nt, Homo sapiens
  misc_RNA (1)...(19): siRNA sense strand
gcagaggccuacacgauuu

SEQ ID NO: 1682334 - RNA, 19 nt, Homo sapiens
  misc_RNA (1)...(19): siRNA sense strand
gaggaaagaccacccauuu

SEQ ID NO: 1682335 - RNA, 19 nt, Homo sapiens
  misc_RNA (1)...(19): siRNA sense strand
uacaggaacuucuaaauga

SEQ ID NO: 1682336 - RNA, 19 nt, Homo sapiens
  misc_RNA (1)...(19): siRNA sense strand
uaaauucgaaccaccauua

SEQ ID NO: 1682337 - RNA, 19 nt, Homo sapiens
  misc_RNA (1)...(19): siRNA sense strand
ggaaggaggcuuguuuaaa

SEQ ID NO: 1682338 - RNA, 19 nt, Homo sapiens
  misc_RNA (1)...(19): siRNA sense strand
gaaguuugcgcccucauaa

SEQ ID NO: 1682339 - RNA, 19 nt, Homo sapiens
  misc_RNA (1)...(19): siRNA sense strand
ggaaagaccacccauuugg

SEQ ID NO: 1682340 - RNA, 19 nt, Homo sapiens
  misc_RNA (1)...(19): siRNA sense strand
gagcacaagccaagaaguu

SEQ ID NO: 1682341 - RNA, 19 nt, Homo sapiens
  misc_RNA (1)...(19): siRNA sense strand
gaacugggagugcgccauu

SEQ ID NO: 1682342 - RNA, 19 nt, Homo sapiens
  misc_RNA (1)...(19): siRNA sense strand
ggaauacaggaacuucuaa

SEQ ID NO: 1682343 - RNA, 19 nt, Homo sapiens
  misc_RNA (1)...(19): siRNA sense strand
gcacaagccaagaaguuug

SEQ ID NO: 1682344 - RNA, 19 nt, Homo sapiens
  misc_RNA (1)...(19): siRNA sense strand
gaggaaagcauggaggaaa

SEQ ID NO: 1682345 - RNA, 19 nt, Homo sapiens
  misc_RNA (1)...(19): siRNA sense strand
gaauacaggaacuucuaaa

SEQ ID NO: 1682346 - RNA, 19 nt, Homo sapiens
  misc_RNA (1)...(19): siRNA sense strand
gggaaggaggcuuguuuaa

SEQ ID NO: 1682347 - RNA, 19 nt, Homo sapiens
  misc_RNA (1)...(19): siRNA sense strand
acaggaacuucuaaaugaa

SEQ ID NO: 1682348 - RNA, 19 nt, Homo sapiens
  misc_RNA (1)...(19): siRNA sense strand
ggaggaaagaccacccauu

SEQ ID NO: 1682349 - RNA, 19 nt, Homo sapiens
  misc_RNA (1)...(19): siRNA sense strand
ggccagccaucacaaucaa

SEQ ID NO: 1682350 - RNA, 19 nt, Homo sapiens
  misc_RNA (1)...(19): siRNA sense strand
caaucaaacagauccuauu

SEQ ID NO: 1682351 - RNA, 19 nt, Homo sapiens
  misc_RNA (1)...(19): siRNA sense strand
auacaggaacuucuaaaug

SEQ ID NO: 1682352 - RNA, 19 nt, Homo sapiens
  misc_RNA (1)...(19): siRNA sense strand
ggaaagcauggaggaaaga

SEQ ID NO: 1682353 - RNA, 19 nt, Homo sapiens
  misc_RNA (1)...(19): siRNA sense strand
gugggaaggaggcuuguuu

SEQ ID NO: 1682354 - RNA, 19 nt, Homo sapiens
  misc_RNA (1)...(19): siRNA sense strand
cagaguggaguacgagaaa

SEQ ID NO: 1682355 - RNA, 19 nt, Homo sapiens
  misc_RNA (1)...(19): siRNA sense strand
auucgaaccaccauuauuu

SEQ ID NO: 1682356 - RNA, 19 nt, Homo sapiens
  misc_RNA (1)...(19): siRNA sense strand
ggaggcuuguuuaaacuac

SEQ ID NO: 1682357 - RNA, 19 nt, Homo sapiens
  misc_RNA (1)...(19): siRNA sense strand
cagaggccuacacgauuua

SEQ ID NO: 1682358 - RNA, 19 nt, Homo sapiens
  misc_RNA (1)...(19): siRNA sense strand
ugggaaggaggcuuguuua

SEQ ID NO: 1682359 - RNA, 19 nt, Homo sapiens
  misc_RNA (1)...(19): siRNA sense strand
gaacuucuaaaugaaccaa

SEQ ID NO: 1682360 - RNA, 19 nt, Homo sapiens
  misc_RNA (1)...(19): siRNA sense strand
uuucguggcugucccaaca

SEQ ID NO: 1682361 - RNA, 19 nt, Homo sapiens
  misc_RNA (1)...(19): siRNA sense strand
agaaguuugcgcccucaua

SEQ ID NO: 1682362 - RNA, 19 nt, Homo sapiens
  misc_RNA (1)...(19): siRNA sense strand
gaaaaggguccgagcacaa

SEQ ID NO: 1682363 - RNA, 19 nt, Homo sapiens
  misc_RNA (1)...(19): siRNA sense strand
cagugugccuguccaucuu

SEQ ID NO: 1682364 - RNA, 19 nt, Homo sapiens
  misc_RNA (1)...(19): siRNA sense strand
aagcagaggccuacacgau

SEQ ID NO: 1682365 - RNA, 19 nt, Homo sapiens
  misc_RNA (1)...(19): siRNA sense strand
uuuaaacuacggaugcuuu

SEQ ID NO: 1682366 - RNA, 19 nt, Homo sapiens
  misc_RNA (1)...(19): siRNA sense strand
ccaagacccagcucaagca

SEQ ID NO: 1682367 - RNA, 19 nt, Homo sapiens
  misc_RNA (1)...(19): siRNA sense strand
aggaauacaggaacuucua

SEQ ID NO: 1682368 - RNA, 19 nt, Homo sapiens
  misc_RNA (1)...(19): siRNA sense strand
guaaauucgaaccaccauu

SEQ ID NO: 1682369 - RNA, 19 nt, Homo sapiens
  misc_RNA (1)...(19): siRNA sense strand
cuaaaugaaccaaauaucc

SEQ ID NO: 1682370 - RNA, 19 nt, Homo sapiens
  misc_RNA (1)...(19): siRNA sense strand
ccaucacaaucaaacagau

SEQ ID NO: 1682371 - RNA, 19 nt, Homo sapiens
  misc_RNA (1)...(19): siRNA sense strand
ggaggccagccaucacaau

SEQ ID NO: 1682372 - RNA, 19 nt, Homo sapiens
  misc_RNA (1)...(19): siRNA sense strand
uauuucacccgaaugugua

SEQ ID NO: 1682373 - RNA, 19 nt, Homo sapiens
  misc_RNA (1)...(19): siRNA sense strand
aggaaagcauggaggaaag

SEQ ID NO: 1682374 - RNA, 19 nt, Homo sapiens
  misc_RNA (1)...(19): siRNA sense strand
gaggccagccaucacaauc

SEQ ID NO: 1682375 - RNA, 19 nt, Homo sapiens
  misc_RNA (1)...(19): siRNA sense strand
aggaaagaccacccauuug

SEQ ID NO: 1682376 - RNA, 19 nt, Homo sapiens
  misc_RNA (1)...(19): siRNA sense strand
acaaucaaacagauccuau

SEQ ID NO: 1682377 - RNA, 19 nt, Homo sapiens
  misc_RNA (1)...(19): siRNA sense strand
gaaggaggcuuguuuaaac

SEQ ID NO: 1682378 - RNA, 19 nt, Homo sapiens
  misc_RNA (1)...(19): siRNA sense strand
gcagaggccuacacgauuu

SEQ ID NO: 1682379 - RNA, 19 nt, Homo sapiens
  misc_RNA (1)...(19): siRNA sense strand
gaggaaagaccacccauuu

SEQ ID NO: 1682380 - RNA, 19 nt, Homo sapiens
  misc_RNA (1)...(19): siRNA sense strand
uacaggaacuucuaaauga

SEQ ID NO: 1682381 - RNA, 19 nt, Homo sapiens
  misc_RNA (1)...(19): siRNA sense strand
uaaauucgaaccaccauua

SEQ ID NO: 1682382 - RNA, 19 nt, Homo sapiens
  misc_RNA (1)...(19): siRNA sense strand
ggaaggaggcuuguuuaaa

SEQ ID NO: 1682383 - RNA, 19 nt, Homo sapiens
  misc_RNA (1)...(19): siRNA sense strand
gaaguuugcgcccucauaa

SEQ ID NO: 1682384 - RNA, 19 nt, Homo sapiens
  misc_RNA (1)...(19): siRNA sense strand
ggaaagaccacccauuugg

SEQ ID NO: 1682385 - RNA, 19 nt, Homo sapiens
  misc_RNA (1)...(19): siRNA sense strand
gagcacaagccaagaaguu

SEQ ID NO: 1682386 - RNA, 19 nt, Homo sapiens
  misc_RNA (1)...(19): siRNA sense strand
gaacugggagugcgccauu

SEQ ID NO: 1682387 - RNA, 19 nt, Homo sapiens
  misc_RNA (1)...(19): siRNA sense strand
ggaauacaggaacuucuaa

SEQ ID NO: 1682388 - RNA, 19 nt, Homo sapiens
  misc_RNA (1)...(19): siRNA sense strand
gcacaagccaagaaguuug

SEQ ID NO: 1682389 - RNA, 19 nt, Homo sapiens
  misc_RNA (1)...(19): siRNA sense strand
gaggaaagcauggaggaaa

SEQ ID NO: 1682390 - RNA, 19 nt, Homo sapiens
  misc_RNA (1)...(19): siRNA sense strand
gaauacaggaacuucuaaa

SEQ ID NO: 1682391 - RNA, 19 nt, Homo sapiens
  misc_RNA (1)...(19): siRNA sense strand
gggaaggaggcuuguuuaa

SEQ ID NO: 1682392 - RNA, 19 nt, Homo sapiens
  misc_RNA (1)...(19): siRNA sense strand
acaggaacuucuaaaugaa

SEQ ID NO: 1682393 - RNA, 19 nt, Homo sapiens
  misc_RNA (1)...(19): siRNA sense strand
ggaggaaagaccacccauu

SEQ ID NO: 1682394 - RNA, 19 nt, Homo sapiens
  misc_RNA (1)...(19): siRNA sense strand
ggccagccaucacaaucaa

SEQ ID NO: 1682395 - RNA, 19 nt, Homo sapiens
  misc_RNA (1)...(19): siRNA sense strand
caaucaaacagauccuauu

SEQ ID NO: 1682396 - RNA, 19 nt, Homo sapiens
  misc_RNA (1)...(19): siRNA sense strand
auacaggaacuucuaaaug

SEQ ID NO: 1682397 - RNA, 19 nt, Homo sapiens
  misc_RNA (1)...(19): siRNA sense strand
ggaaagcauggaggaaaga

SEQ ID NO: 1682398 - RNA, 19 nt, Homo sapiens
  misc_RNA (1)...(19): siRNA sense strand
gugggaaggaggcuuguuu

SEQ ID NO: 1682399 - RNA, 19 nt, Homo sapiens
  misc_RNA (1)...(19): siRNA sense strand
cagaguggaguacgagaaa

SEQ ID NO: 1682400 - RNA, 19 nt, Homo sapiens
  misc_RNA (1)...(19): siRNA sense strand
auucgaaccaccauuauuu

SEQ ID NO: 1682401 - RNA, 19 nt, Homo sapiens
  misc_RNA (1)...(19): siRNA sense strand
ggaggcuuguuuaaacuac

SEQ ID NO: 1682402 - RNA, 19 nt, Homo sapiens
  misc_RNA (1)...(19): siRNA sense strand
cagaggccuacacgauuua

SEQ ID NO: 1682403 - RNA, 19 nt, Homo sapiens
  misc_RNA (1)...(19): siRNA sense strand
ugggaaggaggcuuguuua

SEQ ID NO: 1682404 - RNA, 19 nt, Homo sapiens
  misc_RNA (1)...(19): siRNA sense strand
gaacuucuaaaugaaccaa

SEQ ID NO: 1682405 - RNA, 19 nt, Homo sapiens
  misc_RNA (1)...(19): siRNA sense strand
uuucguggcugucccaaca

SEQ ID NO: 1682406 - RNA, 19 nt, Homo sapiens
  misc_RNA (1)...(19): siRNA sense strand
agaaguuugcgcccucaua

SEQ ID NO: 1682407 - RNA, 19 nt, Homo sapiens
  misc_RNA (1)...(19): siRNA sense strand
gaaaaggguccgagcacaa

SEQ ID NO: 1682408 - RNA, 19 nt, Homo sapiens
  misc_RNA (1)...(19): siRNA sense strand
cagugugccuguccaucuu

SEQ ID NO: 1682409 - RNA, 19 nt, Homo sapiens
  misc_RNA (1)...(19): siRNA sense strand
aagcagaggccuacacgau

SEQ ID NO: 1682410 - RNA, 19 nt, Homo sapiens
  misc_RNA (1)...(19): siRNA sense strand
uuuaaacuacggaugcuuu

SEQ ID NO: 1682411 - RNA, 19 nt, Homo sapiens
  misc_RNA (1)...(19): siRNA sense strand
ccaagacccagcucaagca

SEQ ID NO: 1682412 - RNA, 19 nt, Homo sapiens
  misc_RNA (1)...(19): siRNA sense strand
aggaauacaggaacuucua

SEQ ID NO: 1682413 - RNA, 19 nt, Homo sapiens
  misc_RNA (1)...(19): siRNA sense strand
guaaauucgaaccaccauu

SEQ ID NO: 1682414 - RNA, 19 nt, Homo sapiens
  misc_RNA (1)...(19): siRNA sense strand
cuaaaugaaccaaauaucc

SEQ ID NO: 1682415 - RNA, 19 nt, Homo sapiens
  misc_RNA (1)...(19): siRNA sense strand
ccaucacaaucaaacagau

SEQ ID NO: 1682416 - RNA, 19 nt, Homo sapiens
  misc_RNA (1)...(19): siRNA sense strand
ggaggccagccaucacaau

SEQ ID NO: 1682417 - RNA, 19 nt, Homo sapiens
  misc_RNA (1)...(19): siRNA sense strand
uauuucacccgaaugugua

SEQ ID NO: 1682418 - RNA, 19 nt, Homo sapiens
  misc_RNA (1)...(19): siRNA sense strand
aggaaagcauggaggaaag

SEQ ID NO: 1682419 - RNA, 19 nt, Homo sapiens
  misc_RNA (1)...(19): siRNA sense strand
gaggccagccaucacaauc

SEQ ID NO: 1682420 - RNA, 19 nt, Homo sapiens
  misc_RNA (1)...(19): siRNA sense strand
aggaaagaccacccauuug

SEQ ID NO: 1682421 - RNA, 19 nt, Homo sapiens
  misc_RNA (1)...(19): siRNA sense strand
acaaucaaacagauccuau

SEQ ID NO: 1682422 - RNA, 19 nt, Homo sapiens
  misc_RNA (1)...(19): siRNA sense strand
gaaggaggcuuguuuaaac

SEQ ID NO: 1682423 - RNA, 19 nt, Homo sapiens
  misc_RNA (1)...(19): siRNA sense strand
gcagaggccuacacgauuu

SEQ ID NO: 1682424 - RNA, 19 nt, Homo sapiens
  misc_RNA (1)...(19): siRNA sense strand
gaggaaagaccacccauuu

SEQ ID NO: 1682425 - RNA, 19 nt, Homo sapiens
  misc_RNA (1)...(19): siRNA sense strand
uacaggaacuucuaaauga

SEQ ID NO: 1682426 - RNA, 19 nt, Homo sapiens
  misc_RNA (1)...(19): siRNA sense strand
uaaauucgaaccaccauua

SEQ ID NO: 1682427 - RNA, 19 nt, Homo sapiens
  misc_RNA (1)...(19): siRNA sense strand
ggaaggaggcuuguuuaaa

SEQ ID NO: 1682428 - RNA, 19 nt, Homo sapiens
  misc_RNA (1)...(19): siRNA sense strand
gaaguuugcgcccucauaa

SEQ ID NO: 1682429 - RNA, 19 nt, Homo sapiens
  misc_RNA (1)...(19): siRNA sense strand
ggaaagaccacccauuugg

SEQ ID NO: 1682430 - RNA, 19 nt, Homo sapiens
  misc_RNA (1)...(19): siRNA sense strand
gagcacaagccaagaaguu

SEQ ID NO: 1682431 - RNA, 19 nt, Homo sapiens
  misc_RNA (1)...(19): siRNA sense strand
gaacugggagugcgccauu

SEQ ID NO: 1682432 - RNA, 19 nt, Homo sapiens
  misc_RNA (1)...(19): siRNA sense strand
ggaauacaggaacuucuaa

SEQ ID NO: 1682433 - RNA, 19 nt, Homo sapiens
  misc_RNA (1)...(19): siRNA sense strand
gcacaagccaagaaguuug

SEQ ID NO: 1682434 - RNA, 19 nt, Homo sapiens
  misc_RNA (1)...(19): siRNA sense strand
gaggaaagcauggaggaaa

SEQ ID NO: 1682435 - RNA, 19 nt, Homo sapiens
  misc_RNA (1)...(19): siRNA sense strand
gaauacaggaacuucuaaa

SEQ ID NO: 1682436 - RNA, 19 nt, Homo sapiens
  misc_RNA (1)...(19): siRNA sense strand
gggaaggaggcuuguuuaa

SEQ ID NO: 1682437 - RNA, 19 nt, Homo sapiens
  misc_RNA (1)...(19): siRNA sense strand
acaggaacuucuaaaugaa

SEQ ID NO: 1682438 - RNA, 19 nt, Homo sapiens
  misc_RNA (1)...(19): siRNA sense strand
ggaggaaagaccacccauu

SEQ ID NO: 1682439 - RNA, 19 nt, Homo sapiens
  misc_RNA (1)...(19): siRNA sense strand
ggccagccaucacaaucaa

SEQ ID NO: 1682440 - RNA, 19 nt, Homo sapiens
  misc_RNA (1)...(19): siRNA sense strand
caaucaaacagauccuauu

SEQ ID NO: 1682441 - RNA, 19 nt, Homo sapiens
  misc_RNA (1)...(19): siRNA sense strand
auacaggaacuucuaaaug

SEQ ID NO: 1682442 - RNA, 19 nt, Homo sapiens
  misc_RNA (1)...(19): siRNA sense strand
ggaaagcauggaggaaaga

SEQ ID NO: 1682443 - RNA, 19 nt, Homo sapiens
  misc_RNA (1)...(19): siRNA sense strand
gugggaaggaggcuuguuu

SEQ ID NO: 1682444 - RNA, 19 nt, Homo sapiens
  misc_RNA (1)...(19): siRNA sense strand
cagaguggaguacgagaaa

SEQ ID NO: 1682445 - RNA, 19 nt, Homo sapiens
  misc_RNA (1)...(19): siRNA sense strand
auucgaaccaccauuauuu

SEQ ID NO: 1682446 - RNA, 19 nt, Homo sapiens
  misc_RNA (1)...(19): siRNA sense strand
ggaggcuuguuuaaacuac

SEQ ID NO: 1682447 - RNA, 19 nt, Homo sapiens
  misc_RNA (1)...(19): siRNA sense strand
cagaggccuacacgauuua

SEQ ID NO: 1682448 - RNA, 19 nt, Homo sapiens
  misc_RNA (1)...(19): siRNA sense strand
ugggaaggaggcuuguuua

SEQ ID NO: 1682449 - RNA, 19 nt, Homo sapiens
  misc_RNA (1)...(19): siRNA sense strand
gaacuucuaaaugaaccaa

SEQ ID NO: 1682450 - RNA, 19 nt, Homo sapiens
  misc_RNA (1)...(19): siRNA sense strand
uuucguggcugucccaaca

SEQ ID NO: 1682451 - RNA, 19 nt, Homo sapiens
  misc_RNA (1)...(19): siRNA sense strand
agaaguuugcgcccucaua

SEQ ID NO: 1682452 - RNA, 19 nt, Homo sapiens
  misc_RNA (1)...(19): siRNA sense strand
gaaaaggguccgagcacaa

SEQ ID NO: 1682453 - RNA, 19 nt, Homo sapiens
  misc_RNA (1)...(19): siRNA sense strand
cagugugccuguccaucuu

SEQ ID NO: 1682454 - RNA, 19 nt, Homo sapiens
  misc_RNA (1)...(19): siRNA sense strand
aagcagaggccuacacgau

SEQ ID NO: 1682455 - RNA, 19 nt, Homo sapiens
  misc_RNA (1)...(19): siRNA sense strand
uuuaaacuacggaugcuuu

SEQ ID NO: 1682456 - RNA, 19 nt, Homo sapiens
  misc_RNA (1)...(19): siRNA sense strand
ccaagacccagcucaagca

SEQ ID NO: 1682457 - RNA, 19 nt, Homo sapiens
  misc_RNA (1)...(19): siRNA sense strand
aggaauacaggaacuucua

SEQ ID NO: 1682458 - RNA, 19 nt, Homo sapiens
  misc_RNA (1)...(19): siRNA sense strand
guaaauucgaaccaccauu

SEQ ID NO: 1682459 - RNA, 19 nt, Homo sapiens
  misc_RNA (1)...(19): siRNA sense strand
cuaaaugaaccaaauaucc

SEQ ID NO: 1682460 - RNA, 19 nt, Homo sapiens
  misc_RNA (1)...(19): siRNA sense strand
ccaucacaaucaaacagau

SEQ ID NO: 1682461 - RNA, 19 nt, Homo sapiens
  misc_RNA (1)...(19): siRNA sense strand
ggaggccagccaucacaau

SEQ ID NO: 1682462 - RNA, 19 nt, Homo sapiens
  misc_RNA (1)...(19): siRNA sense strand
uauuucacccgaaugugua

SEQ ID NO: 1682463 - RNA, 19 nt, Homo sapiens
  misc_RNA (1)...(19): siRNA sense strand
aggaaagcauggaggaaag

SEQ ID NO: 1682464 - RNA, 19 nt, Homo sapiens
  misc_RNA (1)...(19): siRNA sense strand
gaggccagccaucacaauc

SEQ ID NO: 1682465 - RNA, 19 nt, Homo sapiens
  misc_RNA (1)...(19): siRNA sense strand
aggaaagaccacccauuug

SEQ ID NO: 1682466 - RNA, 19 nt, Homo sapiens
  misc_RNA (1)...(19): siRNA sense strand
acaaucaaacagauccuau

SEQ ID NO: 1682467 - RNA, 19 nt, Homo sapiens
  misc_RNA (1)...(19): siRNA sense strand
gcuagaagcuuauauuaca

SEQ ID NO: 1682468 - RNA, 19 nt, Homo sapiens
  misc_RNA (1)...(19): siRNA sense strand
gaagaaacuggaaucaaua

SEQ ID NO: 1682469 - RNA, 19 nt, Homo sapiens
  misc_RNA (1)...(19): siRNA sense strand
caaauuauacccaguguaa

SEQ ID NO: 1682470 - RNA, 19 nt, Homo sapiens
  misc_RNA (1)...(19): siRNA sense strand
gcucugcccugauuacuuu

SEQ ID NO: 1682471 - RNA, 19 nt, Homo sapiens
  misc_RNA (1)...(19): siRNA sense strand
ccacaaauccuguuaguug

SEQ ID NO: 1682472 - RNA, 19 nt, Homo sapiens
  misc_RNA (1)...(19): siRNA sense strand
caugacagcucaauaugaa

SEQ ID NO: 1682473 - RNA, 19 nt, Homo sapiens
  misc_RNA (1)...(19): siRNA sense strand
gaacauggacaaauuauac

SEQ ID NO: 1682474 - RNA, 19 nt, Homo sapiens
  misc_RNA (1)...(19): siRNA sense strand
gcagagaagcaacauuuaa

SEQ ID NO: 1682475 - RNA, 19 nt, Homo sapiens
  misc_RNA (1)...(19): siRNA sense strand
gacaauugcuggaucaguu

SEQ ID NO: 1682476 - RNA, 19 nt, Homo sapiens
  misc_RNA (1)...(19): siRNA sense strand
ggagguauaugacuacauc

SEQ ID NO: 1682477 - RNA, 19 nt, Homo sapiens
  misc_RNA (1)...(19): siRNA sense strand
agaagaaacuggaaucaau

SEQ ID NO: 1682478 - RNA, 19 nt, Homo sapiens
  misc_RNA (1)...(19): siRNA sense strand
ucaauucaguugggaguua

SEQ ID NO: 1682479 - RNA, 19 nt, Homo sapiens
  misc_RNA (1)...(19): siRNA sense strand
caacaaccaggccuuagua

SEQ ID NO: 1682480 - RNA, 19 nt, Homo sapiens
  misc_RNA (1)...(19): siRNA sense strand
cagaggagguauaugacua

SEQ ID NO: 1682481 - RNA, 19 nt, Homo sapiens
  misc_RNA (1)...(19): siRNA sense strand
gaugggcuguaauuacuuu

SEQ ID NO: 1682482 - RNA, 19 nt, Homo sapiens
  misc_RNA (1)...(19): siRNA sense strand
gaagacugcacuaaauuug

SEQ ID NO: 1682483 - RNA, 19 nt, Homo sapiens
  misc_RNA (1)...(19): siRNA sense strand
gaaacuggaaucaauacaa

SEQ ID NO: 1682484 - RNA, 19 nt, Homo sapiens
  misc_RNA (1)...(19): siRNA sense strand
gagcuacucuuaucuuggu

SEQ ID NO: 1682485 - RNA, 19 nt, Homo sapiens
  misc_RNA (1)...(19): siRNA sense strand
gggaguuacuagaaauaaa

SEQ ID NO: 1682486 - RNA, 19 nt, Homo sapiens
  misc_RNA (1)...(19): siRNA sense strand
ucuauugcaucacugcuua

SEQ ID NO: 1682487 - RNA, 19 nt, Homo sapiens
  misc_RNA (1)...(19): siRNA sense strand
aacagaacauggacaaauu

SEQ ID NO: 1682488 - RNA, 19 nt, Homo sapiens
  misc_RNA (1)...(19): siRNA sense strand
guuuguaacucuguuguaa

SEQ ID NO: 1682489 - RNA, 19 nt, Homo sapiens
  misc_RNA (1)...(19): siRNA sense strand
cuaaguugccaaaggauua

SEQ ID NO: 1682490 - RNA, 19 nt, Homo sapiens
  misc_RNA (1)...(19): siRNA sense strand
caacagaacauggacaaau

SEQ ID NO: 1682491 - RNA, 19 nt, Homo sapiens
  misc_RNA (1)...(19): siRNA sense strand
aauccaaucuguacaugaa

SEQ ID NO: 1682492 - RNA, 19 nt, Homo sapiens
  misc_RNA (1)...(19): siRNA sense strand
uauacccaguguaauguua

SEQ ID NO: 1682493 - RNA, 19 nt, Homo sapiens
  misc_RNA (1)...(19): siRNA sense strand
agacugcacuaaauuuguu

SEQ ID NO: 1682494 - RNA, 19 nt, Homo sapiens
  misc_RNA (1)...(19): siRNA sense strand
caacagaaccugggaugga

SEQ ID NO: 1682495 - RNA, 19 nt, Homo sapiens
  misc_RNA (1)...(19): siRNA sense strand
caaagugucccaguucauu

SEQ ID NO: 1682496 - RNA, 19 nt, Homo sapiens
  misc_RNA (1)...(19): siRNA sense strand
ggaauccaaucuguacaug

SEQ ID NO: 1682497 - RNA, 19 nt, Homo sapiens
  misc_RNA (1)...(19): siRNA sense strand
aagcauccaugauauugaa

SEQ ID NO: 1682498 - RNA, 19 nt, Homo sapiens
  misc_RNA (1)...(19): siRNA sense strand
cagaaggcguuuacugcaa

SEQ ID NO: 1682499 - RNA, 19 nt, Homo sapiens
  misc_RNA (1)...(19): siRNA sense strand
ugccauugcuagaagcuua

SEQ ID NO: 1682500 - RNA, 19 nt, Homo sapiens
  misc_RNA (1)...(19): siRNA sense strand
gcauuuaccuacacacacu

SEQ ID NO: 1682501 - RNA, 19 nt, Homo sapiens
  misc_RNA (1)...(19): siRNA sense strand
gagccuaaguugccaaagg

SEQ ID NO: 1682502 - RNA, 19 nt, Homo sapiens
  misc_RNA (1)...(19): siRNA sense strand
ugaagacugcacuaaauuu

SEQ ID NO: 1682503 - RNA, 19 nt, Homo sapiens
  misc_RNA (1)...(19): siRNA sense strand
gcaagcaacagaacaugga

SEQ ID NO: 1682504 - RNA, 19 nt, Homo sapiens
  misc_RNA (1)...(19): siRNA sense strand
aaucuguucuucucauuug

SEQ ID NO: 1682505 - RNA, 19 nt, Homo sapiens
  misc_RNA (1)...(19): siRNA sense strand
gaaggcauuuaccuacaca

SEQ ID NO: 1682506 - RNA, 19 nt, Homo sapiens
  misc_RNA (1)...(19): siRNA sense strand
acagaacauggacaaauua

SEQ ID NO: 1682507 - RNA, 19 nt, Homo sapiens
  misc_RNA (1)...(19): siRNA sense strand
gcacauccuuaugcacuuc

SEQ ID NO: 1682508 - RNA, 19 nt, Homo sapiens
  misc_RNA (1)...(19): siRNA sense strand
cauuauccauggcccaauu

SEQ ID NO: 1682509 - RNA, 19 nt, Homo sapiens
  misc_RNA (1)...(19): siRNA sense strand
gagaagaaacuggaaucaa

SEQ ID NO: 1682510 - RNA, 19 nt, Homo sapiens
  misc_RNA (1)...(19): siRNA sense strand
cccaauuugugcugcuuua

SEQ ID NO: 1682511 - RNA, 19 nt, Homo sapiens
  misc_RNA (1)...(19): siRNA sense strand
guacaugaaagcugugaga

SEQ ID NO: 1682512 - RNA, 19 nt, Homo sapiens
  misc_RNA (1)...(19): siRNA sense strand
caagcggaauccaaucugu

SEQ ID NO: 1682513 - RNA, 19 nt, Homo sapiens
  misc_RNA (1)...(19): siRNA sense strand
gcauugaauuugugcugau

SEQ ID NO: 1682514 - RNA, 19 nt, Homo sapiens
  misc_RNA (1)...(19): siRNA sense strand
gugaagacugcacuaaauu

SEQ ID NO: 1682515 - RNA, 19 nt, Homo sapiens
  misc_RNA (1)...(19): siRNA sense strand
ucagugaugguccagguua

SEQ ID NO: 1682516 - RNA, 19 nt, Homo sapiens
  misc_RNA (1)...(19): siRNA sense strand
cagcucaauaugaauguua

SEQ ID NO: 1682517 - RNA, 19 nt, Homo sapiens
  misc_RNA (1)...(19): siRNA sense strand
acccaucuccucuacauua

SEQ ID NO: 1682518 - RNA, 19 nt, Homo sapiens
  misc_RNA (1)...(19): siRNA sense strand
cagagaagcaacauuuaau

SEQ ID NO: 1682519 - RNA, 19 nt, Homo sapiens
  misc_RNA (1)...(19): siRNA sense strand
aaucaugacagcucaauau

SEQ ID NO: 1682520 - RNA, 19 nt, Homo sapiens
  misc_RNA (1)...(19): siRNA sense strand
cggauugucuauugcauca

SEQ ID NO: 1682521 - RNA, 19 nt, Homo sapiens
  misc_RNA (1)...(19): siRNA sense strand
gugaacacuuaaauggaaa

SEQ ID NO: 1682522 - RNA, 19 nt, Homo sapiens
  misc_RNA (1)...(19): siRNA sense strand
gacaaauuauacccagugu

SEQ ID NO: 1682523 - RNA, 19 nt, Homo sapiens
  misc_RNA (1)...(19): siRNA sense strand
uggagagguucaagcaauu

SEQ ID NO: 1682524 - RNA, 19 nt, Homo sapiens
  misc_RNA (1)...(19): siRNA sense strand
acugauuccugcuuguaua

SEQ ID NO: 1682525 - RNA, 19 nt, Homo sapiens
  misc_RNA (1)...(19): siRNA sense strand
ccuguuaguugcaaagugu

SEQ ID NO: 1682526 - RNA, 19 nt, Homo sapiens
  misc_RNA (1)...(19): siRNA sense strand
caaauccuguuaguugcaa

SEQ ID NO: 1682527 - RNA, 19 nt, Homo sapiens
  misc_RNA (1)...(19): siRNA sense strand
agcaggaacugaaucaaug

SEQ ID NO: 1682528 - RNA, 19 nt, Homo sapiens
  misc_RNA (1)...(19): siRNA sense strand
cccaguucauucaucuuua

SEQ ID NO: 1682529 - RNA, 19 nt, Homo sapiens
  misc_RNA (1)...(19): siRNA sense strand
gcuuaucucgcuuggcaua

SEQ ID NO: 1682530 - RNA, 19 nt, Homo sapiens
  misc_RNA (1)...(19): siRNA sense strand
guucucaucaccaaguuaa

SEQ ID NO: 1682531 - RNA, 19 nt, Homo sapiens
  misc_RNA (1)...(19): siRNA sense strand
gugaaggcauuuaccuaca

SEQ ID NO: 1682532 - RNA, 19 nt, Homo sapiens
  misc_RNA (1)...(19): siRNA sense strand
gaauccaaucuguacauga

SEQ ID NO: 1682533 - RNA, 19 nt, Homo sapiens
  misc_RNA (1)...(19): siRNA sense strand
gagguucaagcaauucuga

SEQ ID NO: 1682534 - RNA, 19 nt, Homo sapiens
  misc_RNA (1)...(19): siRNA sense strand
guugggaguuacuagaaau

SEQ ID NO: 1682535 - RNA, 19 nt, Homo sapiens
  misc_RNA (1)...(19): siRNA sense strand
uugcagaggagguauauga

SEQ ID NO: 1682536 - RNA, 19 nt, Homo sapiens
  misc_RNA (1)...(19): siRNA sense strand
ugacagcucaauaugaaug

SEQ ID NO: 1682537 - RNA, 19 nt, Homo sapiens
  misc_RNA (1)...(19): siRNA sense strand
ggcguuuacugcaacagaa

SEQ ID NO: 1682538 - RNA, 19 nt, Homo sapiens
  misc_RNA (1)...(19): siRNA sense strand
cagcaggaacugaaucaau

SEQ ID NO: 1682539 - RNA, 19 nt, Homo sapiens
  misc_RNA (1)...(19): siRNA sense strand
ccacugauuccugcuugua

SEQ ID NO: 1682540 - RNA, 19 nt, Homo sapiens
  misc_RNA (1)...(19): siRNA sense strand
ucauucaucuuuaccugau

SEQ ID NO: 1682541 - RNA, 19 nt, Homo sapiens
  misc_RNA (1)...(19): siRNA sense strand
ccaguucauucaucuuuac

SEQ ID NO: 1682542 - RNA, 19 nt, Homo sapiens
  misc_RNA (1)...(19): siRNA sense strand
gaaggcguuuacugcaaca

SEQ ID NO: 1682543 - RNA, 19 nt, Homo sapiens
  misc_RNA (1)...(19): siRNA sense strand
guugcaaagugucccaguu

SEQ ID NO: 1682544 - RNA, 19 nt, Homo sapiens
  misc_RNA (1)...(19): siRNA sense strand
cauaauuggacacggauug

SEQ ID NO: 1682545 - RNA, 19 nt, Homo sapiens
  misc_RNA (1)...(19): siRNA sense strand
gguccagguuauagucaug

SEQ ID NO: 1682546 - RNA, 19 nt, Homo sapiens
  misc_RNA (1)...(19): siRNA sense strand
aggauuaccuuacacaaaa

SEQ ID NO: 1682547 - RNA, 19 nt, Homo sapiens
  misc_RNA (1)...(19): siRNA sense strand
guagccacaaauccuguua

SEQ ID NO: 1682548 - RNA, 19 nt, Homo sapiens
  misc_RNA (1)...(19): siRNA sense strand
aaagauugcagaggaggua

SEQ ID NO: 1682549 - RNA, 19 nt, Homo sapiens
  misc_RNA (1)...(19): siRNA sense strand
ugauuacuuucaggacuuu

SEQ ID NO: 1682550 - RNA, 19 nt, Homo sapiens
  misc_RNA (1)...(19): siRNA sense strand
cauugaauuugugcugauu

SEQ ID NO: 1682551 - RNA, 19 nt, Homo sapiens
  misc_RNA (1)...(19): siRNA sense strand
aaaaguguacccuguauuu

SEQ ID NO: 1682552 - RNA, 19 nt, Homo sapiens
  misc_RNA (1)...(19): siRNA sense strand
cugaugggcuguaauuacu

SEQ ID NO: 1682553 - RNA, 19 nt, Homo sapiens
  misc_RNA (1)...(19): siRNA sense strand
gcaaagugucccaguucau

SEQ ID NO: 1682554 - RNA, 19 nt, Homo sapiens
  misc_RNA (1)...(19): siRNA sense strand
guucuucucauuuguuugu

SEQ ID NO: 1682555 - RNA, 19 nt, Homo sapiens
  misc_RNA (1)...(19): siRNA sense strand
gauugucuauugcaucacu

SEQ ID NO: 1682556 - RNA, 19 nt, Homo sapiens
  misc_RNA (1)...(19): siRNA sense strand
uaucucgcuuggcauauuc

SEQ ID NO: 1682557 - RNA, 19 nt, Homo sapiens
  misc_RNA (1)...(19): siRNA sense strand
uguuacagcagaauuagaa

SEQ ID NO: 1682558 - RNA, 19 nt, Homo sapiens
  misc_RNA (1)...(19): siRNA sense strand
aaugacaauugcuggauca

SEQ ID NO: 1682559 - RNA, 19 nt, Homo sapiens
  misc_RNA (1)...(19): siRNA sense strand
gcaacagaacauggacaaa

SEQ ID NO: 1682560 - RNA, 19 nt, Homo sapiens
  misc_RNA (1)...(19): siRNA sense strand
ucaugacuguccuagugaa

SEQ ID NO: 1682561 - RNA, 19 nt, Homo sapiens
  misc_RNA (1)...(19): siRNA sense strand
caacaagcagaaggcguuu

SEQ ID NO: 1682562 - RNA, 19 nt, Homo sapiens
  misc_RNA (1)...(19): siRNA sense strand
cagaacauggacaaauuau

SEQ ID NO: 1682563 - RNA, 19 nt, Homo sapiens
  misc_RNA (1)...(19): siRNA sense strand
uuaucucgcuuggcauauu

SEQ ID NO: 1682564 - RNA, 19 nt, Homo sapiens
  misc_RNA (1)...(19): siRNA sense strand
caucaugcacauccuuaug

SEQ ID NO: 1682565 - RNA, 19 nt, Homo sapiens
  misc_RNA (1)...(19): siRNA sense strand
gcuuuacuggugaaucuuu

SEQ ID NO: 1682566 - RNA, 19 nt, Homo sapiens
  misc_RNA (1)...(19): siRNA sense strand
uaccugaugggcuguaauu

SEQ ID NO: 1682567 - RNA, 19 nt, Homo sapiens
  misc_RNA (1)...(19): siRNA sense strand
gcaaauagaucaucagaaa

SEQ ID NO: 1682568 - RNA, 19 nt, Homo sapiens
  misc_RNA (1)...(19): siRNA sense strand
ucacuuagaucaagcauua

SEQ ID NO: 1682569 - RNA, 19 nt, Homo sapiens
  misc_RNA (1)...(19): siRNA sense strand
gaaagcaguuccucuauug

SEQ ID NO: 1682570 - RNA, 19 nt, Homo sapiens
  misc_RNA (1)...(19): siRNA sense strand
gaacaaacgucagacauga

SEQ ID NO: 1682571 - RNA, 19 nt, Homo sapiens
  misc_RNA (1)...(19): siRNA sense strand
aaacaugccuccuucuuua

SEQ ID NO: 1682572 - RNA, 19 nt, Homo sapiens
  misc_RNA (1)...(19): siRNA sense strand
gaaagaaacugauugacau

SEQ ID NO: 1682573 - RNA, 19 nt, Homo sapiens
  misc_RNA (1)...(19): siRNA sense strand
ggaaguauauuacaggauu

SEQ ID NO: 1682574 - RNA, 19 nt, Homo sapiens
  misc_RNA (1)...(19): siRNA sense strand
gaacaaaucaaucagcuaa

SEQ ID NO: 1682575 - RNA, 19 nt, Homo sapiens
  misc_RNA (1)...(19): siRNA sense strand
gggaagaucuuguagagaa

SEQ ID NO: 1682576 - RNA, 19 nt, Homo sapiens
  misc_RNA (1)...(19): siRNA sense strand
gaaaugagaagacaugaaa

SEQ ID NO: 1682577 - RNA, 19 nt, Homo sapiens
  misc_RNA (1)...(19): siRNA sense strand
gcagagaaaccaaggaaua

SEQ ID NO: 1682578 - RNA, 19 nt, Homo sapiens
  misc_RNA (1)...(19): siRNA sense strand
gaacaaagacuccacauac

SEQ ID NO: 1682579 - RNA, 19 nt, Homo sapiens
  misc_RNA (1)...(19): siRNA sense strand
gcaucaaacucagaacuua

SEQ ID NO: 1682580 - RNA, 19 nt, Homo sapiens
  misc_RNA (1)...(19): siRNA sense strand
gaagaaagcaaauagauca

SEQ ID NO: 1682581 - RNA, 19 nt, Homo sapiens
  misc_RNA (1)...(19): siRNA sense strand
gagaaaccauuuaucaaga

SEQ ID NO: 1682582 - RNA, 19 nt, Homo sapiens
  misc_RNA (1)...(19): siRNA sense strand
ggaaugaaguaaauaguca

SEQ ID NO: 1682583 - RNA, 19 nt, Homo sapiens
  misc_RNA (1)...(19): siRNA sense strand
gcacauggaugaaguaugc

SEQ ID NO: 1682584 - RNA, 19 nt, Homo sapiens
  misc_RNA (1)...(19): siRNA sense strand
gaaagacuguggagaagau

SEQ ID NO: 1682585 - RNA, 19 nt, Homo sapiens
  misc_RNA (1)...(19): siRNA sense strand
gaaagcaaauagaucauca

SEQ ID NO: 1682586 - RNA, 19 nt, Homo sapiens
  misc_RNA (1)...(19): siRNA sense strand
agagauaucugaaguguug

SEQ ID NO: 1682587 - RNA, 19 nt, Homo sapiens
  misc_RNA (1)...(19): siRNA sense strand
gaagaaagaaagaaacuga

SEQ ID NO: 1682588 - RNA, 19 nt, Homo sapiens
  misc_RNA (1)...(19): siRNA sense strand
cauaagggcucuaaacaug

SEQ ID NO: 1682589 - RNA, 19 nt, Homo sapiens
  misc_RNA (1)...(19): siRNA sense strand
gaaguuaaaugaaguucga

SEQ ID NO: 1682590 - RNA, 19 nt, Homo sapiens
  misc_RNA (1)...(19): siRNA sense strand
uaacauggcaacagaauaa

SEQ ID NO: 1682591 - RNA, 19 nt, Homo sapiens
  misc_RNA (1)...(19): siRNA sense strand
ugagagaucugcuaauguu

SEQ ID NO: 1682592 - RNA, 19 nt, Homo sapiens
  misc_RNA (1)...(19): siRNA sense strand
agaagaaacucccguuauu

SEQ ID NO: 1682593 - RNA, 19 nt, Homo sapiens
  misc_RNA (1)...(19): siRNA sense strand
ugaagaaacugaagaguca

SEQ ID NO: 1682594 - RNA, 19 nt, Homo sapiens
  misc_RNA (1)...(19): siRNA sense strand
gaacaagagaagucauaua

SEQ ID NO: 1682595 - RNA, 19 nt, Homo sapiens
  misc_RNA (1)...(19): siRNA sense strand
gaugagcaaccuuuaaaua

SEQ ID NO: 1682596 - RNA, 19 nt, Homo sapiens
  misc_RNA (1)...(19): siRNA sense strand
agaagcaacuggagugaua

SEQ ID NO: 1682597 - RNA, 19 nt, Homo sapiens
  misc_RNA (1)...(19): siRNA sense strand
gacauaguauccagacaua

SEQ ID NO: 1682598 - RNA, 19 nt, Homo sapiens
  misc_RNA (1)...(19): siRNA sense strand
guacuuggauagcaucaaa

SEQ ID NO: 1682599 - RNA, 19 nt, Homo sapiens
  misc_RNA (1)...(19): siRNA sense strand
gaugacaggcucaacaaua

SEQ ID NO: 1682600 - RNA, 19 nt, Homo sapiens
  misc_RNA (1)...(19): siRNA sense strand
cuggaaagcuuuagcagua

SEQ ID NO: 1682601 - RNA, 19 nt, Homo sapiens
  misc_RNA (1)...(19): siRNA sense strand
gaacuuaugcgccagcaaa

SEQ ID NO: 1682602 - RNA, 19 nt, Homo sapiens
  misc_RNA (1)...(19): siRNA sense strand
aaucauaacuccuacaaug

SEQ ID NO: 1682603 - RNA, 19 nt, Homo sapiens
  misc_RNA (1)...(19): siRNA sense strand
cggauaaacuucagugauu

SEQ ID NO: 1682604 - RNA, 19 nt, Homo sapiens
  misc_RNA (1)...(19): siRNA sense strand
ggauaaacuucagugauuu

SEQ ID NO: 1682605 - RNA, 19 nt, Homo sapiens
  misc_RNA (1)...(19): siRNA sense strand
gaagaagacgccaguuuga

SEQ ID NO: 1682606 - RNA, 19 nt, Homo sapiens
  misc_RNA (1)...(19): siRNA sense strand
gaauuucagcccuuuauuu

SEQ ID NO: 1682607 - RNA, 19 nt, Homo sapiens
  misc_RNA (1)...(19): siRNA sense strand
ugaaugagcuaagagaauu

SEQ ID NO: 1682608 - RNA, 19 nt, Homo sapiens
  misc_RNA (1)...(19): siRNA sense strand
ggagcagucugguugauga

SEQ ID NO: 1682609 - RNA, 19 nt, Homo sapiens
  misc_RNA (1)...(19): siRNA sense strand
gaaagaaaaugguagaaga

SEQ ID NO: 1682610 - RNA, 19 nt, Homo sapiens
  misc_RNA (1)...(19): siRNA sense strand
gaagaugagcaaccuuuaa

SEQ ID NO: 1682611 - RNA, 19 nt, Homo sapiens
  misc_RNA (1)...(19): siRNA sense strand
gaacgagaagccacuagua

SEQ ID NO: 1682612 - RNA, 19 nt, Homo sapiens
  misc_RNA (1)...(19): siRNA sense strand
gcgccuuacucaucuaaua

SEQ ID NO: 1682613 - RNA, 19 nt, Homo sapiens
  misc_RNA (1)...(19): siRNA sense strand
gaaugacuaugaagcagaa

SEQ ID NO: 1682614 - RNA, 19 nt, Homo sapiens
  misc_RNA (1)...(19): siRNA sense strand
guaaugagaauguugauga

SEQ ID NO: 1682615 - RNA, 19 nt, Homo sapiens
  misc_RNA (1)...(19): siRNA sense strand
gaugaagaaucacuggaaa

SEQ ID NO: 1682616 - RNA, 19 nt, Homo sapiens
  misc_RNA (1)...(19): siRNA sense strand
ggaagaagacgccaguuug

SEQ ID NO: 1682617 - RNA, 19 nt, Homo sapiens
  misc_RNA (1)...(19): siRNA sense strand
caucugaacuaaaugaaga

SEQ ID NO: 1682618 - RNA, 19 nt, Homo sapiens
  misc_RNA (1)...(19): siRNA sense strand
ugaauuggcuuucuuuaag

SEQ ID NO: 1682619 - RNA, 19 nt, Homo sapiens
  misc_RNA (1)...(19): siRNA sense strand
gaaagaaagaaacugauug

SEQ ID NO: 1682620 - RNA, 19 nt, Homo sapiens
  misc_RNA (1)...(19): siRNA sense strand
gaagauggcaugaaugauc

SEQ ID NO: 1682621 - RNA, 19 nt, Homo sapiens
  misc_RNA (1)...(19): siRNA sense strand
gagagcagccagauuguaa

SEQ ID NO: 1682622 - RNA, 19 nt, Homo sapiens
  misc_RNA (1)...(19): siRNA sense strand
gagcaaccuuuaaauagug

SEQ ID NO: 1682623 - RNA, 19 nt, Homo sapiens
  misc_RNA (1)...(19): siRNA sense strand
gaaacucccguuauugaaa

SEQ ID NO: 1682624 - RNA, 19 nt, Homo sapiens
  misc_RNA (1)...(19): siRNA sense strand
ucaaucagcuaaagaaaca

SEQ ID NO: 1682625 - RNA, 19 nt, Homo sapiens
  misc_RNA (1)...(19): siRNA sense strand
gaagaagacaccaagcaaa

SEQ ID NO: 1682626 - RNA, 19 nt, Homo sapiens
  misc_RNA (1)...(19): siRNA sense strand
ggaaagaugaagaaacuga

SEQ ID NO: 1682627 - RNA, 19 nt, Homo sapiens
  misc_RNA (1)...(19): siRNA sense strand
cagcuggaccggcaaauua

SEQ ID NO: 1682628 - RNA, 19 nt, Homo sapiens
  misc_RNA (1)...(19): siRNA sense strand
gaacuuacuccuagugaga

SEQ ID NO: 1682629 - RNA, 19 nt, Homo sapiens
  misc_RNA (1)...(19): siRNA sense strand
guagagaaaccauuuauca

SEQ ID NO: 1682630 - RNA, 19 nt, Homo sapiens
  misc_RNA (1)...(19): siRNA sense strand
gaaguagagaaaccauuua

SEQ ID NO: 1682631 - RNA, 19 nt, Homo sapiens
  misc_RNA (1)...(19): siRNA sense strand
uccagaagaugcugaauuu

SEQ ID NO: 1682632 - RNA, 19 nt, Homo sapiens
  misc_RNA (1)...(19): siRNA sense strand
gaucagagaagcauuggaa

SEQ ID NO: 1682633 - RNA, 19 nt, Homo sapiens
  misc_RNA (1)...(19): siRNA sense strand
cacugaaacugacaauaua

SEQ ID NO: 1682634 - RNA, 19 nt, Homo sapiens
  misc_RNA (1)...(19): siRNA sense strand
aaacucaggcuuuaacuaa

SEQ ID NO: 1682635 - RNA, 19 nt, Homo sapiens
  misc_RNA (1)...(19): siRNA sense strand
caauauaccuggauuuacu

SEQ ID NO: 1682636 - RNA, 19 nt, Homo sapiens
  misc_RNA (1)...(19): siRNA sense strand
uagaggaaaugccaauaaa

SEQ ID NO: 1682637 - RNA, 19 nt, Homo sapiens
  misc_RNA (1)...(19): siRNA sense strand
cagaagaucaaccgacuua

SEQ ID NO: 1682638 - RNA, 19 nt, Homo sapiens
  misc_RNA (1)...(19): siRNA sense strand
guaaugaccucuugcaaaa

SEQ ID NO: 1682639 - RNA, 19 nt, Homo sapiens
  misc_RNA (1)...(19): siRNA sense strand
ccacauacguucccacaca

SEQ ID NO: 1682640 - RNA, 19 nt, Homo sapiens
  misc_RNA (1)...(19): siRNA sense strand
ucaaacaucugagguguau

SEQ ID NO: 1682641 - RNA, 19 nt, Homo sapiens
  misc_RNA (1)...(19): siRNA sense strand
gaagaaacucccguuauug

SEQ ID NO: 1682642 - RNA, 19 nt, Homo sapiens
  misc_RNA (1)...(19): siRNA sense strand
cuacagaaauaucuucaga

SEQ ID NO: 1682643 - RNA, 19 nt, Homo sapiens
  misc_RNA (1)...(19): siRNA sense strand
gaugccaguuccaaugaua

SEQ ID NO: 1682644 - RNA, 19 nt, Homo sapiens
  misc_RNA (1)...(19): siRNA sense strand
ggcgaacaguuaauucuaa

SEQ ID NO: 1682645 - RNA, 19 nt, Homo sapiens
  misc_RNA (1)...(19): siRNA sense strand
ggaagaucuuguagagaaa

SEQ ID NO: 1682646 - RNA, 19 nt, Homo sapiens
  misc_RNA (1)...(19): siRNA sense strand
gaagaucaaccgacuuaug

SEQ ID NO: 1682647 - RNA, 19 nt, Homo sapiens
  misc_RNA (1)...(19): siRNA sense strand
ccacugaaacugacaauau

SEQ ID NO: 1682648 - RNA, 19 nt, Homo sapiens
  misc_RNA (1)...(19): siRNA sense strand
gauguccagugucuauuaa

SEQ ID NO: 1682649 - RNA, 19 nt, Homo sapiens
  misc_RNA (1)...(19): siRNA sense strand
ugaagaaagugaaggaugu

SEQ ID NO: 1682650 - RNA, 19 nt, Homo sapiens
  misc_RNA (1)...(19): siRNA sense strand
gaaagugccaguaugucua

SEQ ID NO: 1682651 - RNA, 19 nt, Homo sapiens
  misc_RNA (1)...(19): siRNA sense strand
caacagaagaaagcaaaua

SEQ ID NO: 1682652 - RNA, 19 nt, Homo sapiens
  misc_RNA (1)...(19): siRNA sense strand
ugaaagcaguuccucuauu

SEQ ID NO: 1682653 - RNA, 19 nt, Homo sapiens
  misc_RNA (1)...(19): siRNA sense strand
agaauaauguucagagguu

SEQ ID NO: 1682654 - RNA, 19 nt, Homo sapiens
  misc_RNA (1)...(19): siRNA sense strand
cagaucugcugccaacaua

SEQ ID NO: 1682655 - RNA, 19 nt, Homo sapiens
  misc_RNA (1)...(19): siRNA sense strand
ggaagaugagcaaccuuua

SEQ ID NO: 1682656 - RNA, 19 nt, Homo sapiens
  misc_RNA (1)...(19): siRNA sense strand
gaagaacaauugcccuuuu

SEQ ID NO: 1682657 - RNA, 19 nt, Homo sapiens
  misc_RNA (1)...(19): siRNA sense strand
caugaaugaucaggauuua

SEQ ID NO: 1682658 - RNA, 19 nt, Homo sapiens
  misc_RNA (1)...(19): siRNA sense strand
ccaauagccucacaucauc

SEQ ID NO: 1682659 - RNA, 19 nt, Homo sapiens
  misc_RNA (1)...(19): siRNA sense strand
agacaaggaugaaacugaa

SEQ ID NO: 1682660 - RNA, 19 nt, Homo sapiens
  misc_RNA (1)...(19): siRNA sense strand
caacuggagugauacaauc

SEQ ID NO: 1682661 - RNA, 19 nt, Homo sapiens
  misc_RNA (1)...(19): siRNA sense strand
agacugaggcugaaaguaa

SEQ ID NO: 1682662 - RNA, 19 nt, Homo sapiens
  misc_RNA (1)...(19): siRNA sense strand
gaagacgccaguuugauga

SEQ ID NO: 1682663 - RNA, 19 nt, Homo sapiens
  misc_RNA (1)...(19): siRNA sense strand
gaaagaacaauggcaagaa

SEQ ID NO: 1682664 - RNA, 19 nt, Homo sapiens
  misc_RNA (1)...(19): siRNA sense strand
ucaaauaacacuagaggaa

SEQ ID NO: 1682665 - RNA, 19 nt, Homo sapiens
  misc_RNA (1)...(19): siRNA sense strand
agaagaugcugaauuugaa

SEQ ID NO: 1682666 - RNA, 19 nt, Homo sapiens
  misc_RNA (1)...(19): siRNA sense strand
gagauugaaugagcuaaga

SEQ ID NO: 1682667 - RNA, 19 nt, Homo sapiens
  misc_RNA (1)...(19): siRNA sense strand
gaaacaccuuugagggaua

SEQ ID NO: 1682668 - RNA, 19 nt, Homo sapiens
  misc_RNA (1)...(19): siRNA sense strand
gagggcaccuggaacaaug

SEQ ID NO: 1682669 - RNA, 19 nt, Homo sapiens
  misc_RNA (1)...(19): siRNA sense strand
aagcagcggugccaaguau

SEQ ID NO: 1682670 - RNA, 19 nt, Homo sapiens
  misc_RNA (1)...(19): siRNA sense strand
gcagcggugccaaguauga

SEQ ID NO: 1682671 - RNA, 19 nt, Homo sapiens
  misc_RNA (1)...(19): siRNA sense strand
ggaacaauggccugcaaga

SEQ ID NO: 1682672 - RNA, 19 nt, Homo sapiens
  misc_RNA (1)...(19): siRNA sense strand
ggcaugggcugggcauaga

SEQ ID NO: 1682673 - RNA, 19 nt, Homo sapiens
  misc_RNA (1)...(19): siRNA sense strand
cgagaccuaugcugaugga

SEQ ID NO: 1682674 - RNA, 19 nt, Homo sapiens
  misc_RNA (1)...(19): siRNA sense strand
caagggacgcuacggaauc

SEQ ID NO: 1682675 - RNA, 19 nt, Homo sapiens
  misc_RNA (1)...(19): siRNA sense strand
ugagguggcaggugucuau

SEQ ID NO: 1682676 - RNA, 19 nt, Homo sapiens
  misc_RNA (1)...(19): siRNA sense strand
ccaagggccagggcgaaua

SEQ ID NO: 1682677 - RNA, 19 nt, Homo sapiens
  misc_RNA (1)...(19): siRNA sense strand
gcuauggcaccgagaccua

SEQ ID NO: 1682678 - RNA, 19 nt, Homo sapiens
  misc_RNA (1)...(19): siRNA sense strand
gaacaauggccugcaagac

SEQ ID NO: 1682679 - RNA, 19 nt, Homo sapiens
  misc_RNA (1)...(19): siRNA sense strand
caagcagcggugccaagua

SEQ ID NO: 1682680 - RNA, 19 nt, Homo sapiens
  misc_RNA (1)...(19): siRNA sense strand
guggacacauggcuucaag

SEQ ID NO: 1682681 - RNA, 19 nt, Homo sapiens
  misc_RNA (1)...(19): siRNA sense strand
ccuggaacuuuggcuuuga

SEQ ID NO: 1682682 - RNA, 19 nt, Homo sapiens
  misc_RNA (1)...(19): siRNA sense strand
gcccagcggaaacaccuuu

SEQ ID NO: 1682683 - RNA, 19 nt, Homo sapiens
  misc_RNA (1)...(19): siRNA sense strand
ggaauccggcagagcucaa

SEQ ID NO: 1682684 - RNA, 19 nt, Homo sapiens
  misc_RNA (1)...(19): siRNA sense strand
ucaagggacgcuacggaau

SEQ ID NO: 1682685 - RNA, 19 nt, Homo sapiens
  misc_RNA (1)...(19): siRNA sense strand
uaugagggcaccuggaaca

SEQ ID NO: 1682686 - RNA, 19 nt, Homo sapiens
  misc_RNA (1)...(19): siRNA sense strand
gaaacaccuuugagggaua

SEQ ID NO: 1682687 - RNA, 19 nt, Homo sapiens
  misc_RNA (1)...(19): siRNA sense strand
gagggcaccuggaacaaug

SEQ ID NO: 1682688 - RNA, 19 nt, Homo sapiens
  misc_RNA (1)...(19): siRNA sense strand
aagcagcggugccaaguau

SEQ ID NO: 1682689 - RNA, 19 nt, Homo sapiens
  misc_RNA (1)...(19): siRNA sense strand
gcagcggugccaaguauga

SEQ ID NO: 1682690 - RNA, 19 nt, Homo sapiens
  misc_RNA (1)...(19): siRNA sense strand
ggaacaauggccugcaaga

SEQ ID NO: 1682691 - RNA, 19 nt, Homo sapiens
  misc_RNA (1)...(19): siRNA sense strand
ggcaugggcugggcauaga

SEQ ID NO: 1682692 - RNA, 19 nt, Homo sapiens
  misc_RNA (1)...(19): siRNA sense strand
cgagaccuaugcugaugga

SEQ ID NO: 1682693 - RNA, 19 nt, Homo sapiens
  misc_RNA (1)...(19): siRNA sense strand
caagggacgcuacggaauc

SEQ ID NO: 1682694 - RNA, 19 nt, Homo sapiens
  misc_RNA (1)...(19): siRNA sense strand
ugagguggcaggugucuau

SEQ ID NO: 1682695 - RNA, 19 nt, Homo sapiens
  misc_RNA (1)...(19): siRNA sense strand
ccaagggccagggcgaaua

SEQ ID NO: 1682696 - RNA, 19 nt, Homo sapiens
  misc_RNA (1)...(19): siRNA sense strand
gcuauggcaccgagaccua

SEQ ID NO: 1682697 - RNA, 19 nt, Homo sapiens
  misc_RNA (1)...(19): siRNA sense strand
gaacaauggccugcaagac

SEQ ID NO: 1682698 - RNA, 19 nt, Homo sapiens
  misc_RNA (1)...(19): siRNA sense strand
caagcagcggugccaagua

SEQ ID NO: 1682699 - RNA, 19 nt, Homo sapiens
  misc_RNA (1)...(19): siRNA sense strand
guggacacauggcuucaag

SEQ ID NO: 1682700 - RNA, 19 nt, Homo sapiens
  misc_RNA (1)...(19): siRNA sense strand
ccuggaacuuuggcuuuga

SEQ ID NO: 1682701 - RNA, 19 nt, Homo sapiens
  misc_RNA (1)...(19): siRNA sense strand
gcccagcggaaacaccuuu

SEQ ID NO: 1682702 - RNA, 19 nt, Homo sapiens
  misc_RNA (1)...(19): siRNA sense strand
ggaauccggcagagcucaa

SEQ ID NO: 1682703 - RNA, 19 nt, Homo sapiens
  misc_RNA (1)...(19): siRNA sense strand
ucaagggacgcuacggaau

SEQ ID NO: 1682704 - RNA, 19 nt, Homo sapiens
  misc_RNA (1)...(19): siRNA sense strand
uaugagggcaccuggaaca

SEQ ID NO: 1682705 - RNA, 19 nt, Homo sapiens
  misc_RNA (1)...(19): siRNA sense strand
ccacugagauucugggauu

SEQ ID NO: 1682706 - RNA, 19 nt, Homo sapiens
  misc_RNA (1)...(19): siRNA sense strand
gcuaugagguccugggaaa

SEQ ID NO: 1682707 - RNA, 19 nt, Homo sapiens
  misc_RNA (1)...(19): siRNA sense strand
gauccugccucacaccuuu

SEQ ID NO: 1682708 - RNA, 19 nt, Homo sapiens
  misc_RNA (1)...(19): siRNA sense strand
gcaucaguguggaccguua

SEQ ID NO: 1682709 - RNA, 19 nt, Homo sapiens
  misc_RNA (1)...(19): siRNA sense strand
caaggugaauggcuggauu

SEQ ID NO: 1682710 - RNA, 19 nt, Homo sapiens
  misc_RNA (1)...(19): siRNA sense strand
gaaacucccuggugaugcu

SEQ ID NO: 1682711 - RNA, 19 nt, Homo sapiens
  misc_RNA (1)...(19): siRNA sense strand
guccucaucuuccugcuuu

SEQ ID NO: 1682712 - RNA, 19 nt, Homo sapiens
  misc_RNA (1)...(19): siRNA sense strand
uauuacagauccacagaug

SEQ ID NO: 1682713 - RNA, 19 nt, Homo sapiens
  misc_RNA (1)...(19): siRNA sense strand
ggucaaguuuguuugucuu

SEQ ID NO: 1682714 - RNA, 19 nt, Homo sapiens
  misc_RNA (1)...(19): siRNA sense strand
gcccugaccuugcccaucu

SEQ ID NO: 1682715 - RNA, 19 nt, Homo sapiens
  misc_RNA (1)...(19): siRNA sense strand
cgccauggauuccucaaga

SEQ ID NO: 1682716 - RNA, 19 nt, Homo sapiens
  misc_RNA (1)...(19): siRNA sense strand
gaaaugacacagcaaaaug

SEQ ID NO: 1682717 - RNA, 19 nt, Homo sapiens
  misc_RNA (1)...(19): siRNA sense strand
auucugggauuucuccaua

SEQ ID NO: 1682718 - RNA, 19 nt, Homo sapiens
  misc_RNA (1)...(19): siRNA sense strand
ccuguaugcuagaaacuga

SEQ ID NO: 1682719 - RNA, 19 nt, Homo sapiens
  misc_RNA (1)...(19): siRNA sense strand
ccaguccaguuugcuauga

SEQ ID NO: 1682720 - RNA, 19 nt, Homo sapiens
  misc_RNA (1)...(19): siRNA sense strand
gcaugccaccugcagauga

SEQ ID NO: 1682721 - RNA, 19 nt, Homo sapiens
  misc_RNA (1)...(19): siRNA sense strand
caugccaccugcagaugaa

SEQ ID NO: 1682722 - RNA, 19 nt, Homo sapiens
  misc_RNA (1)...(19): siRNA sense strand
ucccugcccuucuuccuuu

SEQ ID NO: 1682723 - RNA, 19 nt, Homo sapiens
  misc_RNA (1)...(19): siRNA sense strand
caccugcagaugaagauua

SEQ ID NO: 1682724 - RNA, 19 nt, Homo sapiens
  misc_RNA (1)...(19): siRNA sense strand
aaacaauuccaguccaguu

SEQ ID NO: 1682725 - RNA, 19 nt, Homo sapiens
  misc_RNA (1)...(19): siRNA sense strand
cagaagcaccgagccauga

SEQ ID NO: 1682726 - RNA, 19 nt, Homo sapiens
  misc_RNA (1)...(19): siRNA sense strand
ucaagauccuggcuaugca

SEQ ID NO: 1682727 - RNA, 19 nt, Homo sapiens
  misc_RNA (1)...(19): siRNA sense strand
ccucacaccuuuggcuuca

SEQ ID NO: 1682728 - RNA, 19 nt, Homo sapiens
  misc_RNA (1)...(19): siRNA sense strand
ucacaccuuuggcuucauc

SEQ ID NO: 1682729 - RNA, 19 nt, Homo sapiens
  misc_RNA (1)...(19): siRNA sense strand
caucgccuaugcccuagug

SEQ ID NO: 1682730 - RNA, 19 nt, Homo sapiens
  misc_RNA (1)...(19): siRNA sense strand
gccauggauuccucaagau

SEQ ID NO: 1682731 - RNA, 19 nt, Homo sapiens
  misc_RNA (1)...(19): siRNA sense strand
gcuguuggccugcaucagu

SEQ ID NO: 1682732 - RNA, 19 nt, Homo sapiens
  misc_RNA (1)...(19): siRNA sense strand
caaguauguugugaucauc

SEQ ID NO: 1682733 - RNA, 19 nt, Homo sapiens
  misc_RNA (1)...(19): siRNA sense strand
caaaauggcggaugguguu

SEQ ID NO: 1682734 - RNA, 19 nt, Homo sapiens
  misc_RNA (1)...(19): siRNA sense strand
caucaucuacgccuucauc

SEQ ID NO: 1682735 - RNA, 19 nt, Homo sapiens
  misc_RNA (1)...(19): siRNA sense strand
gaugugggauuuugaugau

SEQ ID NO: 1682736 - RNA, 19 nt, Homo sapiens
  misc_RNA (1)...(19): siRNA sense strand
ggaaaugacacagcaaaau

SEQ ID NO: 1682737 - RNA, 19 nt, Homo sapiens
  misc_RNA (1)...(19): siRNA sense strand
gucaucguguuaccuccua

SEQ ID NO: 1682738 - RNA, 19 nt, Homo sapiens
  misc_RNA (1)...(19): siRNA sense strand
cacccugcguacacuguuu

SEQ ID NO: 1682739 - RNA, 19 nt, Homo sapiens
  misc_RNA (1)...(19): siRNA sense strand
gcuguucugcuauggauuc

SEQ ID NO: 1682740 - RNA, 19 nt, Homo sapiens
  misc_RNA (1)...(19): siRNA sense strand
gucaugcuguucugcuaug

SEQ ID NO: 1682741 - RNA, 19 nt, Homo sapiens
  misc_RNA (1)...(19): siRNA sense strand
cacgcacacugacccagaa

SEQ ID NO: 1682742 - RNA, 19 nt, Homo sapiens
  misc_RNA (1)...(19): siRNA sense strand
ggcuuaccauccaaacaau

SEQ ID NO: 1682743 - RNA, 19 nt, Homo sapiens
  misc_RNA (1)...(19): siRNA sense strand
gcuggggacugucuaugaa

SEQ ID NO: 1682744 - RNA, 19 nt, Homo sapiens
  misc_RNA (1)...(19): siRNA sense strand
ggaugccacugagauucug

SEQ ID NO: 1682745 - RNA, 19 nt, Homo sapiens
  misc_RNA (1)...(19): siRNA sense strand
uaugagguccugggaaaug

SEQ ID NO: 1682746 - RNA, 19 nt, Homo sapiens
  misc_RNA (1)...(19): siRNA sense strand
ggacugucuaugaaucugu

SEQ ID NO: 1682747 - RNA, 19 nt, Homo sapiens
  misc_RNA (1)...(19): siRNA sense strand
accguuaccuggccauugu

SEQ ID NO: 1682748 - RNA, 19 nt, Homo sapiens
  misc_RNA (1)...(19): siRNA sense strand
aacaauuccaguccaguuu

SEQ ID NO: 1682749 - RNA, 19 nt, Homo sapiens
  misc_RNA (1)...(19): siRNA sense strand
aggcuuaccauccaaacaa

SEQ ID NO: 1682750 - RNA, 19 nt, Homo sapiens
  misc_RNA (1)...(19): siRNA sense strand
gagacacucaacaaguaug

SEQ ID NO: 1682751 - RNA, 19 nt, Homo sapiens
  misc_RNA (1)...(19): siRNA sense strand
ugcauggccuggucagcaa

SEQ ID NO: 1682752 - RNA, 19 nt, Homo sapiens
  misc_RNA (1)...(19): siRNA sense strand
ggaagaagcccagggacaa

SEQ ID NO: 1682753 - RNA, 19 nt, Homo sapiens
  misc_RNA (1)...(19): siRNA sense strand
ggugcaaccugauguggau

SEQ ID NO: 1682754 - RNA, 19 nt, Homo sapiens
  misc_RNA (1)...(19): siRNA sense strand
cugcauggcuggcaaacca

SEQ ID NO: 1682755 - RNA, 19 nt, Homo sapiens
  misc_RNA (1)...(19): siRNA sense strand
gaagaagcccagggacaag

SEQ ID NO: 1682756 - RNA, 19 nt, Homo sapiens
  misc_RNA (1)...(19): siRNA sense strand
caugcaggguagaaagaug

SEQ ID NO: 1682757 - RNA, 19 nt, Homo sapiens
  misc_RNA (1)...(19): siRNA sense strand
gcuauaccugggcuuauuc

SEQ ID NO: 1682758 - RNA, 19 nt, Homo sapiens
  misc_RNA (1)...(19): siRNA sense strand
acagcuauaccugggcuua

SEQ ID NO: 1682759 - RNA, 19 nt, Homo sapiens
  misc_RNA (1)...(19): siRNA sense strand
agcuauaccugggcuuauu

SEQ ID NO: 1682760 - RNA, 19 nt, Homo sapiens
  misc_RNA (1)...(19): siRNA sense strand
gaaaguaguuggagugauu

SEQ ID NO: 1682761 - RNA, 19 nt, Homo sapiens
  misc_RNA (1)...(19): siRNA sense strand
ggcaaucacuuccaguuua

SEQ ID NO: 1682762 - RNA, 19 nt, Homo sapiens
  misc_RNA (1)...(19): siRNA sense strand
caaaagagcugaccaaguu

SEQ ID NO: 1682763 - RNA, 19 nt, Homo sapiens
  misc_RNA (1)...(19): siRNA sense strand
gcaaucacuuccaguuuaa

SEQ ID NO: 1682764 - RNA, 19 nt, Homo sapiens
  misc_RNA (1)...(19): siRNA sense strand
cagaagaaauguaugguuu

SEQ ID NO: 1682765 - RNA, 19 nt, Homo sapiens
  misc_RNA (1)...(19): siRNA sense strand
gaaaagcucuacauacaaa

SEQ ID NO: 1682766 - RNA, 19 nt, Homo sapiens
  misc_RNA (1)...(19): siRNA sense strand
caacagugaucccaaccua

SEQ ID NO: 1682767 - RNA, 19 nt, Homo sapiens
  misc_RNA (1)...(19): siRNA sense strand
guuaugacaucuuucagua

SEQ ID NO: 1682768 - RNA, 19 nt, Homo sapiens
  misc_RNA (1)...(19): siRNA sense strand
gcaaagacaggaccauuga

SEQ ID NO: 1682769 - RNA, 19 nt, Homo sapiens
  misc_RNA (1)...(19): siRNA sense strand
gaacuucagcucaauauag

SEQ ID NO: 1682770 - RNA, 19 nt, Homo sapiens
  misc_RNA (1)...(19): siRNA sense strand
agaaguugcugaaguauau

SEQ ID NO: 1682771 - RNA, 19 nt, Homo sapiens
  misc_RNA (1)...(19): siRNA sense strand
ucacgcagauuuccaaaga

SEQ ID NO: 1682772 - RNA, 19 nt, Homo sapiens
  misc_RNA (1)...(19): siRNA sense strand
ggauauagcauucuucuca

SEQ ID NO: 1682773 - RNA, 19 nt, Homo sapiens
  misc_RNA (1)...(19): siRNA sense strand
uaaaggaguccgagagaua

SEQ ID NO: 1682774 - RNA, 19 nt, Homo sapiens
  misc_RNA (1)...(19): siRNA sense strand
gcaugaagauaucgcagaa

SEQ ID NO: 1682775 - RNA, 19 nt, Homo sapiens
  misc_RNA (1)...(19): siRNA sense strand
gaaaguguacaucaucauu

SEQ ID NO: 1682776 - RNA, 19 nt, Homo sapiens
  misc_RNA (1)...(19): siRNA sense strand
gaucauugccaccaucuuu

SEQ ID NO: 1682777 - RNA, 19 nt, Homo sapiens
  misc_RNA (1)...(19): siRNA sense strand
gaccagaggcccaaugaaa

SEQ ID NO: 1682778 - RNA, 19 nt, Homo sapiens
  misc_RNA (1)...(19): siRNA sense strand
ggauuuaucgcauauuuga

SEQ ID NO: 1682779 - RNA, 19 nt, Homo sapiens
  misc_RNA (1)...(19): siRNA sense strand
gaaaagauuccaacuauga

SEQ ID NO: 1682780 - RNA, 19 nt, Homo sapiens
  misc_RNA (1)...(19): siRNA sense strand
gaaagaagacacagaaagg

SEQ ID NO: 1682781 - RNA, 19 nt, Homo sapiens
  misc_RNA (1)...(19): siRNA sense strand
gaaggaaguuauggagaga

SEQ ID NO: 1682782 - RNA, 19 nt, Homo sapiens
  misc_RNA (1)...(19): siRNA sense strand
gcccuaggcuggaauuaug

SEQ ID NO: 1682783 - RNA, 19 nt, Homo sapiens
  misc_RNA (1)...(19): siRNA sense strand
guucucaagugugacauua

SEQ ID NO: 1682784 - RNA, 19 nt, Homo sapiens
  misc_RNA (1)...(19): siRNA sense strand
uuacagaucuccaaaucau

SEQ ID NO: 1682785 - RNA, 19 nt, Homo sapiens
  misc_RNA (1)...(19): siRNA sense strand
caucgaggcugucacacaa

SEQ ID NO: 1682786 - RNA, 19 nt, Homo sapiens
  misc_RNA (1)...(19): siRNA sense strand
gaaaacaacagaagaaaug

SEQ ID NO: 1682787 - RNA, 19 nt, Homo sapiens
  misc_RNA (1)...(19): siRNA sense strand
gcacaggacaggagagaau

SEQ ID NO: 1682788 - RNA, 19 nt, Homo sapiens
  misc_RNA (1)...(19): siRNA sense strand
gaagaaauguaugguuugc

SEQ ID NO: 1682789 - RNA, 19 nt, Homo sapiens
  misc_RNA (1)...(19): siRNA sense strand
gaugaacacaagacaauga

SEQ ID NO: 1682790 - RNA, 19 nt, Homo sapiens
  misc_RNA (1)...(19): siRNA sense strand
gcaccagcaugaagauauc

SEQ ID NO: 1682791 - RNA, 19 nt, Homo sapiens
  misc_RNA (1)...(19): siRNA sense strand
ggacaggagagaauuggaa

SEQ ID NO: 1682792 - RNA, 19 nt, Homo sapiens
  misc_RNA (1)...(19): siRNA sense strand
ugaacucaauguccagaaa

SEQ ID NO: 1682793 - RNA, 19 nt, Homo sapiens
  misc_RNA (1)...(19): siRNA sense strand
agacacagaucgcaaaugc

SEQ ID NO: 1682794 - RNA, 19 nt, Homo sapiens
  misc_RNA (1)...(19): siRNA sense strand
caaacuaccacgcuuacaa

SEQ ID NO: 1682795 - RNA, 19 nt, Homo sapiens
  misc_RNA (1)...(19): siRNA sense strand
cauuacagaucuccaaauc

SEQ ID NO: 1682796 - RNA, 19 nt, Homo sapiens
  misc_RNA (1)...(19): siRNA sense strand
cgaaccggaugccaggaua

SEQ ID NO: 1682797 - RNA, 19 nt, Homo sapiens
  misc_RNA (1)...(19): siRNA sense strand
ccagauuaguuaugcauca

SEQ ID NO: 1682798 - RNA, 19 nt, Homo sapiens
  misc_RNA (1)...(19): siRNA sense strand
ugacgggcaucuuucuuug

SEQ ID NO: 1682799 - RNA, 19 nt, Homo sapiens
  misc_RNA (1)...(19): siRNA sense strand
agacaggaccauugacuuu

SEQ ID NO: 1682800 - RNA, 19 nt, Homo sapiens
  misc_RNA (1)...(19): siRNA sense strand
caacagaagaaauguaugg

SEQ ID NO: 1682801 - RNA, 19 nt, Homo sapiens
  misc_RNA (1)...(19): siRNA sense strand
ucggauuuaucgcauauuu

SEQ ID NO: 1682802 - RNA, 19 nt, Homo sapiens
  misc_RNA (1)...(19): siRNA sense strand
ugaaguauauacgcaaugu

SEQ ID NO: 1682803 - RNA, 19 nt, Homo sapiens
  misc_RNA (1)...(19): siRNA sense strand
gauauagcauucuucucau

SEQ ID NO: 1682804 - RNA, 19 nt, Homo sapiens
  misc_RNA (1)...(19): siRNA sense strand
acaggaccauugacuuuga

SEQ ID NO: 1682805 - RNA, 19 nt, Homo sapiens
  misc_RNA (1)...(19): siRNA sense strand
ccauuggauucacuaugua

SEQ ID NO: 1682806 - RNA, 19 nt, Homo sapiens
  misc_RNA (1)...(19): siRNA sense strand
gagaaagaagacacagaaa

SEQ ID NO: 1682807 - RNA, 19 nt, Homo sapiens
  misc_RNA (1)...(19): siRNA sense strand
ccauugacuuugauagaau

SEQ ID NO: 1682808 - RNA, 19 nt, Homo sapiens
  misc_RNA (1)...(19): siRNA sense strand
acacaaacccagugacaga

SEQ ID NO: 1682809 - RNA, 19 nt, Homo sapiens
  misc_RNA (1)...(19): siRNA sense strand
uaacgaagccaagcccauu

SEQ ID NO: 1682810 - RNA, 19 nt, Homo sapiens
  misc_RNA (1)...(19): siRNA sense strand
ccaacaucaucauagacua

SEQ ID NO: 1682811 - RNA, 19 nt, Homo sapiens
  misc_RNA (1)...(19): siRNA sense strand
ggauauucccaucaucaaa

SEQ ID NO: 1682812 - RNA, 19 nt, Homo sapiens
  misc_RNA (1)...(19): siRNA sense strand
guaccaguuugaugagaug

SEQ ID NO: 1682813 - RNA, 19 nt, Homo sapiens
  misc_RNA (1)...(19): siRNA sense strand
guaaaggaguccgagagau

SEQ ID NO: 1682814 - RNA, 19 nt, Homo sapiens
  misc_RNA (1)...(19): siRNA sense strand
cagacgaacuucagcucaa

SEQ ID NO: 1682815 - RNA, 19 nt, Homo sapiens
  misc_RNA (1)...(19): siRNA sense strand
ggagagaauuggaaaagau

SEQ ID NO: 1682816 - RNA, 19 nt, Homo sapiens
  misc_RNA (1)...(19): siRNA sense strand
gaccauugacuuugauaga

SEQ ID NO: 1682817 - RNA, 19 nt, Homo sapiens
  misc_RNA (1)...(19): siRNA sense strand
cccauuggauucacuaugu

SEQ ID NO: 1682818 - RNA, 19 nt, Homo sapiens
  misc_RNA (1)...(19): siRNA sense strand
ggaacuccuugcuguugga

SEQ ID NO: 1682819 - RNA, 19 nt, Homo sapiens
  misc_RNA (1)...(19): siRNA sense strand
ugccaacgaugaggauaua

SEQ ID NO: 1682820 - RNA, 19 nt, Homo sapiens
  misc_RNA (1)...(19): siRNA sense strand
uaaaggcccuaggcuggaa

SEQ ID NO: 1682821 - RNA, 19 nt, Homo sapiens
  misc_RNA (1)...(19): siRNA sense strand
gcaguggacagacgaacuu

SEQ ID NO: 1682822 - RNA, 19 nt, Homo sapiens
  misc_RNA (1)...(19): siRNA sense strand
uaaaguccaguucgugauu

SEQ ID NO: 1682823 - RNA, 19 nt, Homo sapiens
  misc_RNA (1)...(19): siRNA sense strand
gaagacacagaucgcaaau

SEQ ID NO: 1682824 - RNA, 19 nt, Homo sapiens
  misc_RNA (1)...(19): siRNA sense strand
caaagaccgagcucuguga

SEQ ID NO: 1682825 - RNA, 19 nt, Homo sapiens
  misc_RNA (1)...(19): siRNA sense strand
agagaaagaagacacagaa

SEQ ID NO: 1682826 - RNA, 19 nt, Homo sapiens
  misc_RNA (1)...(19): siRNA sense strand
gguaaaggaguccgagaga

SEQ ID NO: 1682827 - RNA, 19 nt, Homo sapiens
  misc_RNA (1)...(19): siRNA sense strand
ccaacgaugaggauauaaa

SEQ ID NO: 1682828 - RNA, 19 nt, Homo sapiens
  misc_RNA (1)...(19): siRNA sense strand
cggaaaagcucuacauaca

SEQ ID NO: 1682829 - RNA, 19 nt, Homo sapiens
  misc_RNA (1)...(19): siRNA sense strand
ggaugcaccugggcguuau

SEQ ID NO: 1682830 - RNA, 19 nt, Homo sapiens
  misc_RNA (1)...(19): siRNA sense strand
gggaugcaccugggcguua

SEQ ID NO: 1682831 - RNA, 19 nt, Homo sapiens
  misc_RNA (1)...(19): siRNA sense strand
gcugaaguauauacgcaau

SEQ ID NO: 1682832 - RNA, 19 nt, Homo sapiens
  misc_RNA (1)...(19): siRNA sense strand
gagaaaguaguuggaguga

SEQ ID NO: 1682833 - RNA, 19 nt, Homo sapiens
  misc_RNA (1)...(19): siRNA sense strand
cacccaacaucaucauaga

SEQ ID NO: 1682834 - RNA, 19 nt, Homo sapiens
  misc_RNA (1)...(19): siRNA sense strand
ggcgggaacucagcuaugu

SEQ ID NO: 1682835 - RNA, 19 nt, Homo sapiens
  misc_RNA (1)...(19): siRNA sense strand
uggaccagaucaacaguga

SEQ ID NO: 1682836 - RNA, 19 nt, Homo sapiens
  misc_RNA (1)...(19): siRNA sense strand
ccgaaaguguacaucauca

SEQ ID NO: 1682837 - RNA, 19 nt, Homo sapiens
  misc_RNA (1)...(19): siRNA sense strand
caacaucacaacuggcaau

SEQ ID NO: 1682838 - RNA, 19 nt, Homo sapiens
  misc_RNA (1)...(19): siRNA sense strand
cacccgagcuaagugauga

SEQ ID NO: 1682839 - RNA, 19 nt, Homo sapiens
  misc_RNA (1)...(19): siRNA sense strand
auacaaacuaccacgcuua

SEQ ID NO: 1682840 - RNA, 19 nt, Homo sapiens
  misc_RNA (1)...(19): siRNA sense strand
uaauaucaguucagcuucu

SEQ ID NO: 1682841 - RNA, 19 nt, Homo sapiens
  misc_RNA (1)...(19): siRNA sense strand
gcagggcaagaaaucagua

SEQ ID NO: 1682842 - RNA, 19 nt, Homo sapiens
  misc_RNA (1)...(19): siRNA sense strand
gcaccugggcguuaugaca

SEQ ID NO: 1682843 - RNA, 19 nt, Homo sapiens
  misc_RNA (1)...(19): siRNA sense strand
gcaauguuaauuucaaugg

SEQ ID NO: 1682844 - RNA, 19 nt, Homo sapiens
  misc_RNA (1)...(19): siRNA sense strand
gacaggagagaauuggaaa

SEQ ID NO: 1682845 - RNA, 19 nt, Homo sapiens
  misc_RNA (1)...(19): siRNA sense strand
gaacagucgcuuacuuucg

SEQ ID NO: 1682846 - RNA, 19 nt, Homo sapiens
  misc_RNA (1)...(19): siRNA sense strand
gaaguuauggagagaaagg

SEQ ID NO: 1682847 - RNA, 19 nt, Homo sapiens
  misc_RNA (1)...(19): siRNA sense strand
caacgaugaggauauaaag

SEQ ID NO: 1682848 - RNA, 19 nt, Homo sapiens
  misc_RNA (1)...(19): siRNA sense strand
uggcuugccuucauuccaa

SEQ ID NO: 1682849 - RNA, 19 nt, Homo sapiens
  misc_RNA (1)...(19): siRNA sense strand
ucgaacagucgcuuacuuu

SEQ ID NO: 1682850 - RNA, 19 nt, Homo sapiens
  misc_RNA (1)...(19): siRNA sense strand
ucucaagugugacauuaca

SEQ ID NO: 1682851 - RNA, 19 nt, Homo sapiens
  misc_RNA (1)...(19): siRNA sense strand
agacuaugaugaacacaag

SEQ ID NO: 1682852 - RNA, 19 nt, Homo sapiens
  misc_RNA (1)...(19): siRNA sense strand
uccaggcgcucauccagaa

SEQ ID NO: 1682853 - RNA, 19 nt, Homo sapiens
  misc_RNA (1)...(19): siRNA sense strand
gagauacccgccucagugu

SEQ ID NO: 1682854 - RNA, 19 nt, Homo sapiens
  misc_RNA (1)...(19): siRNA sense strand
gaaguugcugaaguauaua

SEQ ID NO: 1682855 - RNA, 19 nt, Homo sapiens
  misc_RNA (1)...(19): siRNA sense strand
caaguuggccauuuucuuu

SEQ ID NO: 1682856 - RNA, 19 nt, Homo sapiens
  misc_RNA (1)...(19): siRNA sense strand
acuaugagcaggaggguaa

SEQ ID NO: 1682857 - RNA, 19 nt, Homo sapiens
  misc_RNA (1)...(19): siRNA sense strand
gguaugugcaucaguuaug

SEQ ID NO: 1682858 - RNA, 19 nt, Homo sapiens
  misc_RNA (1)...(19): siRNA sense strand
gccaggauauucccaucau

SEQ ID NO: 1682859 - RNA, 19 nt, Homo sapiens
  misc_RNA (1)...(19): siRNA sense strand
cuaccacgcuuacaaucuc

SEQ ID NO: 1682860 - RNA, 19 nt, Homo sapiens
  misc_RNA (1)...(19): siRNA sense strand
gaaaguaguuggagugauu

SEQ ID NO: 1682861 - RNA, 19 nt, Homo sapiens
  misc_RNA (1)...(19): siRNA sense strand
ggcaaucacuuccaguuua

SEQ ID NO: 1682862 - RNA, 19 nt, Homo sapiens
  misc_RNA (1)...(19): siRNA sense strand
caaaagagcugaccaaguu

SEQ ID NO: 1682863 - RNA, 19 nt, Homo sapiens
  misc_RNA (1)...(19): siRNA sense strand
gcaaucacuuccaguuuaa

SEQ ID NO: 1682864 - RNA, 19 nt, Homo sapiens
  misc_RNA (1)...(19): siRNA sense strand
cagaagaaauguaugguuu

SEQ ID NO: 1682865 - RNA, 19 nt, Homo sapiens
  misc_RNA (1)...(19): siRNA sense strand
gaaaagcucuacauacaaa

SEQ ID NO: 1682866 - RNA, 19 nt, Homo sapiens
  misc_RNA (1)...(19): siRNA sense strand
caacagugaucccaaccua

SEQ ID NO: 1682867 - RNA, 19 nt, Homo sapiens
  misc_RNA (1)...(19): siRNA sense strand
guuaugacaucuuucagua

SEQ ID NO: 1682868 - RNA, 19 nt, Homo sapiens
  misc_RNA (1)...(19): siRNA sense strand
gcaaagacaggaccauuga

SEQ ID NO: 1682869 - RNA, 19 nt, Homo sapiens
  misc_RNA (1)...(19): siRNA sense strand
gaacuucagcucaauauag

SEQ ID NO: 1682870 - RNA, 19 nt, Homo sapiens
  misc_RNA (1)...(19): siRNA sense strand
agaaguugcugaaguauau

SEQ ID NO: 1682871 - RNA, 19 nt, Homo sapiens
  misc_RNA (1)...(19): siRNA sense strand
ucacgcagauuuccaaaga

SEQ ID NO: 1682872 - RNA, 19 nt, Homo sapiens
  misc_RNA (1)...(19): siRNA sense strand
ggauauagcauucuucuca

SEQ ID NO: 1682873 - RNA, 19 nt, Homo sapiens
  misc_RNA (1)...(19): siRNA sense strand
uaaaggaguccgagagaua

SEQ ID NO: 1682874 - RNA, 19 nt, Homo sapiens
  misc_RNA (1)...(19): siRNA sense strand
gcaugaagauaucgcagaa

SEQ ID NO: 1682875 - RNA, 19 nt, Homo sapiens
  misc_RNA (1)...(19): siRNA sense strand
gaaaguguacaucaucauu

SEQ ID NO: 1682876 - RNA, 19 nt, Homo sapiens
  misc_RNA (1)...(19): siRNA sense strand
gaucauugccaccaucuuu

SEQ ID NO: 1682877 - RNA, 19 nt, Homo sapiens
  misc_RNA (1)...(19): siRNA sense strand
gaccagaggcccaaugaaa

SEQ ID NO: 1682878 - RNA, 19 nt, Homo sapiens
  misc_RNA (1)...(19): siRNA sense strand
ggauuuaucgcauauuuga

SEQ ID NO: 1682879 - RNA, 19 nt, Homo sapiens
  misc_RNA (1)...(19): siRNA sense strand
gaaaagauuccaacuauga

SEQ ID NO: 1682880 - RNA, 19 nt, Homo sapiens
  misc_RNA (1)...(19): siRNA sense strand
gaaagaagacacagaaagg

SEQ ID NO: 1682881 - RNA, 19 nt, Homo sapiens
  misc_RNA (1)...(19): siRNA sense strand
gaaggaaguuauggagaga

SEQ ID NO: 1682882 - RNA, 19 nt, Homo sapiens
  misc_RNA (1)...(19): siRNA sense strand
gcccuaggcuggaauuaug

SEQ ID NO: 1682883 - RNA, 19 nt, Homo sapiens
  misc_RNA (1)...(19): siRNA sense strand
guucucaagugugacauua

SEQ ID NO: 1682884 - RNA, 19 nt, Homo sapiens
  misc_RNA (1)...(19): siRNA sense strand
uuacagaucuccaaaucau

SEQ ID NO: 1682885 - RNA, 19 nt, Homo sapiens
  misc_RNA (1)...(19): siRNA sense strand
caucgaggcugucacacaa

SEQ ID NO: 1682886 - RNA, 19 nt, Homo sapiens
  misc_RNA (1)...(19): siRNA sense strand
gaaaacaacagaagaaaug

SEQ ID NO: 1682887 - RNA, 19 nt, Homo sapiens
  misc_RNA (1)...(19): siRNA sense strand
gcacaggacaggagagaau

SEQ ID NO: 1682888 - RNA, 19 nt, Homo sapiens
  misc_RNA (1)...(19): siRNA sense strand
gaagaaauguaugguuugc

SEQ ID NO: 1682889 - RNA, 19 nt, Homo sapiens
  misc_RNA (1)...(19): siRNA sense strand
gaugaacacaagacaauga

SEQ ID NO: 1682890 - RNA, 19 nt, Homo sapiens
  misc_RNA (1)...(19): siRNA sense strand
gcaccagcaugaagauauc

SEQ ID NO: 1682891 - RNA, 19 nt, Homo sapiens
  misc_RNA (1)...(19): siRNA sense strand
ggacaggagagaauuggaa

SEQ ID NO: 1682892 - RNA, 19 nt, Homo sapiens
  misc_RNA (1)...(19): siRNA sense strand
ugaacucaauguccagaaa

SEQ ID NO: 1682893 - RNA, 19 nt, Homo sapiens
  misc_RNA (1)...(19): siRNA sense strand
agacacagaucgcaaaugc

SEQ ID NO: 1682894 - RNA, 19 nt, Homo sapiens
  misc_RNA (1)...(19): siRNA sense strand
caaacuaccacgcuuacaa

SEQ ID NO: 1682895 - RNA, 19 nt, Homo sapiens
  misc_RNA (1)...(19): siRNA sense strand
cauuacagaucuccaaauc

SEQ ID NO: 1682896 - RNA, 19 nt, Homo sapiens
  misc_RNA (1)...(19): siRNA sense strand
cgaaccggaugccaggaua

SEQ ID NO: 1682897 - RNA, 19 nt, Homo sapiens
  misc_RNA (1)...(19): siRNA sense strand
ccagauuaguuaugcauca

SEQ ID NO: 1682898 - RNA, 19 nt, Homo sapiens
  misc_RNA (1)...(19): siRNA sense strand
ugacgggcaucuuucuuug

SEQ ID NO: 1682899 - RNA, 19 nt, Homo sapiens
  misc_RNA (1)...(19): siRNA sense strand
agacaggaccauugacuuu

SEQ ID NO: 1682900 - RNA, 19 nt, Homo sapiens
  misc_RNA (1)...(19): siRNA sense strand
caacagaagaaauguaugg

SEQ ID NO: 1682901 - RNA, 19 nt, Homo sapiens
  misc_RNA (1)...(19): siRNA sense strand
ucggauuuaucgcauauuu

SEQ ID NO: 1682902 - RNA, 19 nt, Homo sapiens
  misc_RNA (1)...(19): siRNA sense strand
ugaaguauauacgcaaugu

SEQ ID NO: 1682903 - RNA, 19 nt, Homo sapiens
  misc_RNA (1)...(19): siRNA sense strand
gauauagcauucuucucau

SEQ ID NO: 1682904 - RNA, 19 nt, Homo sapiens
  misc_RNA (1)...(19): siRNA sense strand
acaggaccauugacuuuga

SEQ ID NO: 1682905 - RNA, 19 nt, Homo sapiens
  misc_RNA (1)...(19): siRNA sense strand
ccauuggauucacuaugua

SEQ ID NO: 1682906 - RNA, 19 nt, Homo sapiens
  misc_RNA (1)...(19): siRNA sense strand
gagaaagaagacacagaaa

SEQ ID NO: 1682907 - RNA, 19 nt, Homo sapiens
  misc_RNA (1)...(19): siRNA sense strand
ccauugacuuugauagaau

SEQ ID NO: 1682908 - RNA, 19 nt, Homo sapiens
  misc_RNA (1)...(19): siRNA sense strand
acacaaacccagugacaga

SEQ ID NO: 1682909 - RNA, 19 nt, Homo sapiens
  misc_RNA (1)...(19): siRNA sense strand
uaacgaagccaagcccauu

SEQ ID NO: 1682910 - RNA, 19 nt, Homo sapiens
  misc_RNA (1)...(19): siRNA sense strand
ccaacaucaucauagacua

SEQ ID NO: 1682911 - RNA, 19 nt, Homo sapiens
  misc_RNA (1)...(19): siRNA sense strand
ggauauucccaucaucaaa

SEQ ID NO: 1682912 - RNA, 19 nt, Homo sapiens
  misc_RNA (1)...(19): siRNA sense strand
guaccaguuugaugagaug

SEQ ID NO: 1682913 - RNA, 19 nt, Homo sapiens
  misc_RNA (1)...(19): siRNA sense strand
guaaaggaguccgagagau

SEQ ID NO: 1682914 - RNA, 19 nt, Homo sapiens
  misc_RNA (1)...(19): siRNA sense strand
cagacgaacuucagcucaa

SEQ ID NO: 1682915 - RNA, 19 nt, Homo sapiens
  misc_RNA (1)...(19): siRNA sense strand
ggagagaauuggaaaagau

SEQ ID NO: 1682916 - RNA, 19 nt, Homo sapiens
  misc_RNA (1)...(19): siRNA sense strand
gaccauugacuuugauaga

SEQ ID NO: 1682917 - RNA, 19 nt, Homo sapiens
  misc_RNA (1)...(19): siRNA sense strand
cccauuggauucacuaugu

SEQ ID NO: 1682918 - RNA, 19 nt, Homo sapiens
  misc_RNA (1)...(19): siRNA sense strand
ggaacuccuugcuguugga

SEQ ID NO: 1682919 - RNA, 19 nt, Homo sapiens
  misc_RNA (1)...(19): siRNA sense strand
ugccaacgaugaggauaua

SEQ ID NO: 1682920 - RNA, 19 nt, Homo sapiens
  misc_RNA (1)...(19): siRNA sense strand
uaaaggcccuaggcuggaa

SEQ ID NO: 1682921 - RNA, 19 nt, Homo sapiens
  misc_RNA (1)...(19): siRNA sense strand
gcaguggacagacgaacuu

SEQ ID NO: 1682922 - RNA, 19 nt, Homo sapiens
  misc_RNA (1)...(19): siRNA sense strand
uaaaguccaguucgugauu

SEQ ID NO: 1682923 - RNA, 19 nt, Homo sapiens
  misc_RNA (1)...(19): siRNA sense strand
gaagacacagaucgcaaau

SEQ ID NO: 1682924 - RNA, 19 nt, Homo sapiens
  misc_RNA (1)...(19): siRNA sense strand
caaagaccgagcucuguga

SEQ ID NO: 1682925 - RNA, 19 nt, Homo sapiens
  misc_RNA (1)...(19): siRNA sense strand
agagaaagaagacacagaa

SEQ ID NO: 1682926 - RNA, 19 nt, Homo sapiens
  misc_RNA (1)...(19): siRNA sense strand
gguaaaggaguccgagaga

SEQ ID NO: 1682927 - RNA, 19 nt, Homo sapiens
  misc_RNA (1)...(19): siRNA sense strand
ccaacgaugaggauauaaa

SEQ ID NO: 1682928 - RNA, 19 nt, Homo sapiens
  misc_RNA (1)...(19): siRNA sense strand
cggaaaagcucuacauaca

SEQ ID NO: 1682929 - RNA, 19 nt, Homo sapiens
  misc_RNA (1)...(19): siRNA sense strand
ggaugcaccugggcguuau

SEQ ID NO: 1682930 - RNA, 19 nt, Homo sapiens
  misc_RNA (1)...(19): siRNA sense strand
gggaugcaccugggcguua

SEQ ID NO: 1682931 - RNA, 19 nt, Homo sapiens
  misc_RNA (1)...(19): siRNA sense strand
gcugaaguauauacgcaau

SEQ ID NO: 1682932 - RNA, 19 nt, Homo sapiens
  misc_RNA (1)...(19): siRNA sense strand
gagaaaguaguuggaguga

SEQ ID NO: 1682933 - RNA, 19 nt, Homo sapiens
  misc_RNA (1)...(19): siRNA sense strand
cacccaacaucaucauaga

SEQ ID NO: 1682934 - RNA, 19 nt, Homo sapiens
  misc_RNA (1)...(19): siRNA sense strand
ggcgggaacucagcuaugu

SEQ ID NO: 1682935 - RNA, 19 nt, Homo sapiens
  misc_RNA (1)...(19): siRNA sense strand
uggaccagaucaacaguga

SEQ ID NO: 1682936 - RNA, 19 nt, Homo sapiens
  misc_RNA (1)...(19): siRNA sense strand
ccgaaaguguacaucauca

SEQ ID NO: 1682937 - RNA, 19 nt, Homo sapiens
  misc_RNA (1)...(19): siRNA sense strand
caacaucacaacuggcaau

SEQ ID NO: 1682938 - RNA, 19 nt, Homo sapiens
  misc_RNA (1)...(19): siRNA sense strand
cacccgagcuaagugauga

SEQ ID NO: 1682939 - RNA, 19 nt, Homo sapiens
  misc_RNA (1)...(19): siRNA sense strand
auacaaacuaccacgcuua

SEQ ID NO: 1682940 - RNA, 19 nt, Homo sapiens
  misc_RNA (1)...(19): siRNA sense strand
uaauaucaguucagcuucu

SEQ ID NO: 1682941 - RNA, 19 nt, Homo sapiens
  misc_RNA (1)...(19): siRNA sense strand
gcagggcaagaaaucagua

SEQ ID NO: 1682942 - RNA, 19 nt, Homo sapiens
  misc_RNA (1)...(19): siRNA sense strand
gcaccugggcguuaugaca

SEQ ID NO: 1682943 - RNA, 19 nt, Homo sapiens
  misc_RNA (1)...(19): siRNA sense strand
gcaauguuaauuucaaugg

SEQ ID NO: 1682944 - RNA, 19 nt, Homo sapiens
  misc_RNA (1)...(19): siRNA sense strand
gacaggagagaauuggaaa

SEQ ID NO: 1682945 - RNA, 19 nt, Homo sapiens
  misc_RNA (1)...(19): siRNA sense strand
gaacagucgcuuacuuucg

SEQ ID NO: 1682946 - RNA, 19 nt, Homo sapiens
  misc_RNA (1)...(19): siRNA sense strand
gaaguuauggagagaaagg

SEQ ID NO: 1682947 - RNA, 19 nt, Homo sapiens
  misc_RNA (1)...(19): siRNA sense strand
caacgaugaggauauaaag

SEQ ID NO: 1682948 - RNA, 19 nt, Homo sapiens
  misc_RNA (1)...(19): siRNA sense strand
uggcuugccuucauuccaa

SEQ ID NO: 1682949 - RNA, 19 nt, Homo sapiens
  misc_RNA (1)...(19): siRNA sense strand
ucgaacagucgcuuacuuu

SEQ ID NO: 1682950 - RNA, 19 nt, Homo sapiens
  misc_RNA (1)...(19): siRNA sense strand
ucucaagugugacauuaca

SEQ ID NO: 1682951 - RNA, 19 nt, Homo sapiens
  misc_RNA (1)...(19): siRNA sense strand
agacuaugaugaacacaag

SEQ ID NO: 1682952 - RNA, 19 nt, Homo sapiens
  misc_RNA (1)...(19): siRNA sense strand
uccaggcgcucauccagaa

SEQ ID NO: 1682953 - RNA, 19 nt, Homo sapiens
  misc_RNA (1)...(19): siRNA sense strand
gagauacccgccucagugu

SEQ ID NO: 1682954 - RNA, 19 nt, Homo sapiens
  misc_RNA (1)...(19): siRNA sense strand
gaaguugcugaaguauaua

SEQ ID NO: 1682955 - RNA, 19 nt, Homo sapiens
  misc_RNA (1)...(19): siRNA sense strand
caaguuggccauuuucuuu

SEQ ID NO: 1682956 - RNA, 19 nt, Homo sapiens
  misc_RNA (1)...(19): siRNA sense strand
acuaugagcaggaggguaa

SEQ ID NO: 1682957 - RNA, 19 nt, Homo sapiens
  misc_RNA (1)...(19): siRNA sense strand
gguaugugcaucaguuaug

SEQ ID NO: 1682958 - RNA, 19 nt, Homo sapiens
  misc_RNA (1)...(19): siRNA sense strand
gccaggauauucccaucau

SEQ ID NO: 1682959 - RNA, 19 nt, Homo sapiens
  misc_RNA (1)...(19): siRNA sense strand
cuaccacgcuuacaaucuc

SEQ ID NO: 1682960 - RNA, 19 nt, Homo sapiens
  misc_RNA (1)...(19): siRNA sense strand
gaaaguaguuggagugauu

SEQ ID NO: 1682961 - RNA, 19 nt, Homo sapiens
  misc_RNA (1)...(19): siRNA sense strand
ggcaaucacuuccaguuua

SEQ ID NO: 1682962 - RNA, 19 nt, Homo sapiens
  misc_RNA (1)...(19): siRNA sense strand
caaaagagcugaccaaguu

SEQ ID NO: 1682963 - RNA, 19 nt, Homo sapiens
  misc_RNA (1)...(19): siRNA sense strand
gcaaucacuuccaguuuaa

SEQ ID NO: 1682964 - RNA, 19 nt, Homo sapiens
  misc_RNA (1)...(19): siRNA sense strand
cagaagaaauguaugguuu

SEQ ID NO: 1682965 - RNA, 19 nt, Homo sapiens
  misc_RNA (1)...(19): siRNA sense strand
gaaaagcucuacauacaaa

SEQ ID NO: 1682966 - RNA, 19 nt, Homo sapiens
  misc_RNA (1)...(19): siRNA sense strand
caacagugaucccaaccua

SEQ ID NO: 1682967 - RNA, 19 nt, Homo sapiens
  misc_RNA (1)...(19): siRNA sense strand
guuaugacaucuuucagua

SEQ ID NO: 1682968 - RNA, 19 nt, Homo sapiens
  misc_RNA (1)...(19): siRNA sense strand
gcaaagacaggaccauuga

SEQ ID NO: 1682969 - RNA, 19 nt, Homo sapiens
  misc_RNA (1)...(19): siRNA sense strand
gaacuucagcucaauauag

SEQ ID NO: 1682970 - RNA, 19 nt, Homo sapiens
  misc_RNA (1)...(19): siRNA sense strand
agaaguugcugaaguauau

SEQ ID NO: 1682971 - RNA, 19 nt, Homo sapiens
  misc_RNA (1)...(19): siRNA sense strand
ucacgcagauuuccaaaga

SEQ ID NO: 1682972 - RNA, 19 nt, Homo sapiens
  misc_RNA (1)...(19): siRNA sense strand
ggauauagcauucuucuca

SEQ ID NO: 1682973 - RNA, 19 nt, Homo sapiens
  misc_RNA (1)...(19): siRNA sense strand
uaaaggaguccgagagaua

SEQ ID NO: 1682974 - RNA, 19 nt, Homo sapiens
  misc_RNA (1)...(19): siRNA sense strand
gcaugaagauaucgcagaa

SEQ ID NO: 1682975 - RNA, 19 nt, Homo sapiens
  misc_RNA (1)...(19): siRNA sense strand
gaaaguguacaucaucauu

SEQ ID NO: 1682976 - RNA, 19 nt, Homo sapiens
  misc_RNA (1)...(19): siRNA sense strand
gaucauugccaccaucuuu

SEQ ID NO: 1682977 - RNA, 19 nt, Homo sapiens
  misc_RNA (1)...(19): siRNA sense strand
gaccagaggcccaaugaaa

SEQ ID NO: 1682978 - RNA, 19 nt, Homo sapiens
  misc_RNA (1)...(19): siRNA sense strand
ggauuuaucgcauauuuga

SEQ ID NO: 1682979 - RNA, 19 nt, Homo sapiens
  misc_RNA (1)...(19): siRNA sense strand
gaaaagauuccaacuauga

SEQ ID NO: 1682980 - RNA, 19 nt, Homo sapiens
  misc_RNA (1)...(19): siRNA sense strand
gaaagaagacacagaaagg

SEQ ID NO: 1682981 - RNA, 19 nt, Homo sapiens
  misc_RNA (1)...(19): siRNA sense strand
gaaggaaguuauggagaga

SEQ ID NO: 1682982 - RNA, 19 nt, Homo sapiens
  misc_RNA (1)...(19): siRNA sense strand
gcccuaggcuggaauuaug

SEQ ID NO: 1682983 - RNA, 19 nt, Homo sapiens
  misc_RNA (1)...(19): siRNA sense strand
guucucaagugugacauua

SEQ ID NO: 1682984 - RNA, 19 nt, Homo sapiens
  misc_RNA (1)...(19): siRNA sense strand
uuacagaucuccaaaucau

SEQ ID NO: 1682985 - RNA, 19 nt, Homo sapiens
  misc_RNA (1)...(19): siRNA sense strand
caucgaggcugucacacaa

SEQ ID NO: 1682986 - RNA, 19 nt, Homo sapiens
  misc_RNA (1)...(19): siRNA sense strand
gaaaacaacagaagaaaug

SEQ ID NO: 1682987 - RNA, 19 nt, Homo sapiens
  misc_RNA (1)...(19): siRNA sense strand
gcacaggacaggagagaau

SEQ ID NO: 1682988 - RNA, 19 nt, Homo sapiens
  misc_RNA (1)...(19): siRNA sense strand
gaagaaauguaugguuugc

SEQ ID NO: 1682989 - RNA, 19 nt, Homo sapiens
  misc_RNA (1)...(19): siRNA sense strand
gaugaacacaagacaauga

SEQ ID NO: 1682990 - RNA, 19 nt, Homo sapiens
  misc_RNA (1)...(19): siRNA sense strand
gcaccagcaugaagauauc

SEQ ID NO: 1682991 - RNA, 19 nt, Homo sapiens
  misc_RNA (1)...(19): siRNA sense strand
ggacaggagagaauuggaa

SEQ ID NO: 1682992 - RNA, 19 nt, Homo sapiens
  misc_RNA (1)...(19): siRNA sense strand
ugaacucaauguccagaaa

SEQ ID NO: 1682993 - RNA, 19 nt, Homo sapiens
  misc_RNA (1)...(19): siRNA sense strand
agacacagaucgcaaaugc

SEQ ID NO: 1682994 - RNA, 19 nt, Homo sapiens
  misc_RNA (1)...(19): siRNA sense strand
caaacuaccacgcuuacaa

SEQ ID NO: 1682995 - RNA, 19 nt, Homo sapiens
  misc_RNA (1)...(19): siRNA sense strand
cauuacagaucuccaaauc

SEQ ID NO: 1682996 - RNA, 19 nt, Homo sapiens
  misc_RNA (1)...(19): siRNA sense strand
cgaaccggaugccaggaua

SEQ ID NO: 1682997 - RNA, 19 nt, Homo sapiens
  misc_RNA (1)...(19): siRNA sense strand
ccagauuaguuaugcauca

SEQ ID NO: 1682998 - RNA, 19 nt, Homo sapiens
  misc_RNA (1)...(19): siRNA sense strand
ugacgggcaucuuucuuug

SEQ ID NO: 1682999 - RNA, 19 nt, Homo sapiens
  misc_RNA (1)...(19): siRNA sense strand
agacaggaccauugacuuu

SEQ ID NO: 1683000 - RNA, 19 nt, Homo sapiens
  misc_RNA (1)...(19): siRNA sense strand
caacagaagaaauguaugg

SEQ ID NO: 1683001 - RNA, 19 nt, Homo sapiens
  misc_RNA (1)...(19): siRNA sense strand
ucggauuuaucgcauauuu

SEQ ID NO: 1683002 - RNA, 19 nt, Homo sapiens
  misc_RNA (1)...(19): siRNA sense strand
ugaaguauauacgcaaugu

SEQ ID NO: 1683003 - RNA, 19 nt, Homo sapiens
  misc_RNA (1)...(19): siRNA sense strand
gauauagcauucuucucau

SEQ ID NO: 1683004 - RNA, 19 nt, Homo sapiens
  misc_RNA (1)...(19): siRNA sense strand
acaggaccauugacuuuga

SEQ ID NO: 1683005 - RNA, 19 nt, Homo sapiens
  misc_RNA (1)...(19): siRNA sense strand
ccauuggauucacuaugua

SEQ ID NO: 1683006 - RNA, 19 nt, Homo sapiens
  misc_RNA (1)...(19): siRNA sense strand
gagaaagaagacacagaaa

SEQ ID NO: 1683007 - RNA, 19 nt, Homo sapiens
  misc_RNA (1)...(19): siRNA sense strand
ccauugacuuugauagaau

SEQ ID NO: 1683008 - RNA, 19 nt, Homo sapiens
  misc_RNA (1)...(19): siRNA sense strand
acacaaacccagugacaga

SEQ ID NO: 1683009 - RNA, 19 nt, Homo sapiens
  misc_RNA (1)...(19): siRNA sense strand
uaacgaagccaagcccauu

SEQ ID NO: 1683010 - RNA, 19 nt, Homo sapiens
  misc_RNA (1)...(19): siRNA sense strand
ccaacaucaucauagacua

SEQ ID NO: 1683011 - RNA, 19 nt, Homo sapiens
  misc_RNA (1)...(19): siRNA sense strand
ggauauucccaucaucaaa

SEQ ID NO: 1683012 - RNA, 19 nt, Homo sapiens
  misc_RNA (1)...(19): siRNA sense strand
guaccaguuugaugagaug

SEQ ID NO: 1683013 - RNA, 19 nt, Homo sapiens
  misc_RNA (1)...(19): siRNA sense strand
guaaaggaguccgagagau

SEQ ID NO: 1683014 - RNA, 19 nt, Homo sapiens
  misc_RNA (1)...(19): siRNA sense strand
cagacgaacuucagcucaa

SEQ ID NO: 1683015 - RNA, 19 nt, Homo sapiens
  misc_RNA (1)...(19): siRNA sense strand
ggagagaauuggaaaagau

SEQ ID NO: 1683016 - RNA, 19 nt, Homo sapiens
  misc_RNA (1)...(19): siRNA sense strand
gaccauugacuuugauaga

SEQ ID NO: 1683017 - RNA, 19 nt, Homo sapiens
  misc_RNA (1)...(19): siRNA sense strand
cccauuggauucacuaugu

SEQ ID NO: 1683018 - RNA, 19 nt, Homo sapiens
  misc_RNA (1)...(19): siRNA sense strand
ggaacuccuugcuguugga

SEQ ID NO: 1683019 - RNA, 19 nt, Homo sapiens
  misc_RNA (1)...(19): siRNA sense strand
ugccaacgaugaggauaua

SEQ ID NO: 1683020 - RNA, 19 nt, Homo sapiens
  misc_RNA (1)...(19): siRNA sense strand
uaaaggcccuaggcuggaa

SEQ ID NO: 1683021 - RNA, 19 nt, Homo sapiens
  misc_RNA (1)...(19): siRNA sense strand
gcaguggacagacgaacuu

SEQ ID NO: 1683022 - RNA, 19 nt, Homo sapiens
  misc_RNA (1)...(19): siRNA sense strand
uaaaguccaguucgugauu

SEQ ID NO: 1683023 - RNA, 19 nt, Homo sapiens
  misc_RNA (1)...(19): siRNA sense strand
gaagacacagaucgcaaau

SEQ ID NO: 1683024 - RNA, 19 nt, Homo sapiens
  misc_RNA (1)...(19): siRNA sense strand
caaagaccgagcucuguga

SEQ ID NO: 1683025 - RNA, 19 nt, Homo sapiens
  misc_RNA (1)...(19): siRNA sense strand
agagaaagaagacacagaa

SEQ ID NO: 1683026 - RNA, 19 nt, Homo sapiens
  misc_RNA (1)...(19): siRNA sense strand
gguaaaggaguccgagaga

SEQ ID NO: 1683027 - RNA, 19 nt, Homo sapiens
  misc_RNA (1)...(19): siRNA sense strand
ccaacgaugaggauauaaa

SEQ ID NO: 1683028 - RNA, 19 nt, Homo sapiens
  misc_RNA (1)...(19): siRNA sense strand
cggaaaagcucuacauaca

SEQ ID NO: 1683029 - RNA, 19 nt, Homo sapiens
  misc_RNA (1)...(19): siRNA sense strand
ggaugcaccugggcguuau

SEQ ID NO: 1683030 - RNA, 19 nt, Homo sapiens
  misc_RNA (1)...(19): siRNA sense strand
gggaugcaccugggcguua

SEQ ID NO: 1683031 - RNA, 19 nt, Homo sapiens
  misc_RNA (1)...(19): siRNA sense strand
gcugaaguauauacgcaau

SEQ ID NO: 1683032 - RNA, 19 nt, Homo sapiens
  misc_RNA (1)...(19): siRNA sense strand
gagaaaguaguuggaguga

SEQ ID NO: 1683033 - RNA, 19 nt, Homo sapiens
  misc_RNA (1)...(19): siRNA sense strand
cacccaacaucaucauaga

SEQ ID NO: 1683034 - RNA, 19 nt, Homo sapiens
  misc_RNA (1)...(19): siRNA sense strand
ggcgggaacucagcuaugu

SEQ ID NO: 1683035 - RNA, 19 nt, Homo sapiens
  misc_RNA (1)...(19): siRNA sense strand
uggaccagaucaacaguga

SEQ ID NO: 1683036 - RNA, 19 nt, Homo sapiens
  misc_RNA (1)...(19): siRNA sense strand
ccgaaaguguacaucauca

SEQ ID NO: 1683037 - RNA, 19 nt, Homo sapiens
  misc_RNA (1)...(19): siRNA sense strand
caacaucacaacuggcaau

SEQ ID NO: 1683038 - RNA, 19 nt, Homo sapiens
  misc_RNA (1)...(19): siRNA sense strand
cacccgagcuaagugauga

SEQ ID NO: 1683039 - RNA, 19 nt, Homo sapiens
  misc_RNA (1)...(19): siRNA sense strand
auacaaacuaccacgcuua

SEQ ID NO: 1683040 - RNA, 19 nt, Homo sapiens
  misc_RNA (1)...(19): siRNA sense strand
uaauaucaguucagcuucu

SEQ ID NO: 1683041 - RNA, 19 nt, Homo sapiens
  misc_RNA (1)...(19): siRNA sense strand
gcagggcaagaaaucagua

SEQ ID NO: 1683042 - RNA, 19 nt, Homo sapiens
  misc_RNA (1)...(19): siRNA sense strand
gcaccugggcguuaugaca

SEQ ID NO: 1683043 - RNA, 19 nt, Homo sapiens
  misc_RNA (1)...(19): siRNA sense strand
gcaauguuaauuucaaugg

SEQ ID NO: 1683044 - RNA, 19 nt, Homo sapiens
  misc_RNA (1)...(19): siRNA sense strand
gacaggagagaauuggaaa

SEQ ID NO: 1683045 - RNA, 19 nt, Homo sapiens
  misc_RNA (1)...(19): siRNA sense strand
gaacagucgcuuacuuucg

SEQ ID NO: 1683046 - RNA, 19 nt, Homo sapiens
  misc_RNA (1)...(19): siRNA sense strand
gaaguuauggagagaaagg

SEQ ID NO: 1683047 - RNA, 19 nt, Homo sapiens
  misc_RNA (1)...(19): siRNA sense strand
caacgaugaggauauaaag

SEQ ID NO: 1683048 - RNA, 19 nt, Homo sapiens
  misc_RNA (1)...(19): siRNA sense strand
uggcuugccuucauuccaa

SEQ ID NO: 1683049 - RNA, 19 nt, Homo sapiens
  misc_RNA (1)...(19): siRNA sense strand
ucgaacagucgcuuacuuu

SEQ ID NO: 1683050 - RNA, 19 nt, Homo sapiens
  misc_RNA (1)...(19): siRNA sense strand
ucucaagugugacauuaca

SEQ ID NO: 1683051 - RNA, 19 nt, Homo sapiens
  misc_RNA (1)...(19): siRNA sense strand
agacuaugaugaacacaag

SEQ ID NO: 1683052 - RNA, 19 nt, Homo sapiens
  misc_RNA (1)...(19): siRNA sense strand
uccaggcgcucauccagaa

SEQ ID NO: 1683053 - RNA, 19 nt, Homo sapiens
  misc_RNA (1)...(19): siRNA sense strand
gagauacccgccucagugu

SEQ ID NO: 1683054 - RNA, 19 nt, Homo sapiens
  misc_RNA (1)...(19): siRNA sense strand
gaaguugcugaaguauaua

SEQ ID NO: 1683055 - RNA, 19 nt, Homo sapiens
  misc_RNA (1)...(19): siRNA sense strand
caaguuggccauuuucuuu

SEQ ID NO: 1683056 - RNA, 19 nt, Homo sapiens
  misc_RNA (1)...(19): siRNA sense strand
acuaugagcaggaggguaa

SEQ ID NO: 1683057 - RNA, 19 nt, Homo sapiens
  misc_RNA (1)...(19): siRNA sense strand
gguaugugcaucaguuaug

SEQ ID NO: 1683058 - RNA, 19 nt, Homo sapiens
  misc_RNA (1)...(19): siRNA sense strand
gccaggauauucccaucau

SEQ ID NO: 1683059 - RNA, 19 nt, Homo sapiens
  misc_RNA (1)...(19): siRNA sense strand
cuaccacgcuuacaaucuc

SEQ ID NO: 1683060 - RNA, 19 nt, Homo sapiens
  misc_RNA (1)...(19): siRNA sense strand
gaaaguaguuggagugauu

SEQ ID NO: 1683061 - RNA, 19 nt, Homo sapiens
  misc_RNA (1)...(19): siRNA sense strand
ggcaaucacuuccaguuua

SEQ ID NO: 1683062 - RNA, 19 nt, Homo sapiens
  misc_RNA (1)...(19): siRNA sense strand
caaaagagcugaccaaguu

SEQ ID NO: 1683063 - RNA, 19 nt, Homo sapiens
  misc_RNA (1)...(19): siRNA sense strand
gcaaucacuuccaguuuaa

SEQ ID NO: 1683064 - RNA, 19 nt, Homo sapiens
  misc_RNA (1)...(19): siRNA sense strand
cagaagaaauguaugguuu

SEQ ID NO: 1683065 - RNA, 19 nt, Homo sapiens
  misc_RNA (1)...(19): siRNA sense strand
gaaaagcucuacauacaaa

SEQ ID NO: 1683066 - RNA, 19 nt, Homo sapiens
  misc_RNA (1)...(19): siRNA sense strand
caacagugaucccaaccua

SEQ ID NO: 1683067 - RNA, 19 nt, Homo sapiens
  misc_RNA (1)...(19): siRNA sense strand
guuaugacaucuuucagua

SEQ ID NO: 1683068 - RNA, 19 nt, Homo sapiens
  misc_RNA (1)...(19): siRNA sense strand
gcaaagacaggaccauuga

SEQ ID NO: 1683069 - RNA, 19 nt, Homo sapiens
  misc_RNA (1)...(19): siRNA sense strand
gaacuucagcucaauauag

SEQ ID NO: 1683070 - RNA, 19 nt, Homo sapiens
  misc_RNA (1)...(19): siRNA sense strand
agaaguugcugaaguauau

SEQ ID NO: 1683071 - RNA, 19 nt, Homo sapiens
  misc_RNA (1)...(19): siRNA sense strand
ucacgcagauuuccaaaga

SEQ ID NO: 1683072 - RNA, 19 nt, Homo sapiens
  misc_RNA (1)...(19): siRNA sense strand
ggauauagcauucuucuca

SEQ ID NO: 1683073 - RNA, 19 nt, Homo sapiens
  misc_RNA (1)...(19): siRNA sense strand
uaaaggaguccgagagaua

SEQ ID NO: 1683074 - RNA, 19 nt, Homo sapiens
  misc_RNA (1)...(19): siRNA sense strand
gcaugaagauaucgcagaa

SEQ ID NO: 1683075 - RNA, 19 nt, Homo sapiens
  misc_RNA (1)...(19): siRNA sense strand
gaaaguguacaucaucauu

SEQ ID NO: 1683076 - RNA, 19 nt, Homo sapiens
  misc_RNA (1)...(19): siRNA sense strand
gaucauugccaccaucuuu

SEQ ID NO: 1683077 - RNA, 19 nt, Homo sapiens
  misc_RNA (1)...(19): siRNA sense strand
gaccagaggcccaaugaaa

SEQ ID NO: 1683078 - RNA, 19 nt, Homo sapiens
  misc_RNA (1)...(19): siRNA sense strand
ggauuuaucgcauauuuga

SEQ ID NO: 1683079 - RNA, 19 nt, Homo sapiens
  misc_RNA (1)...(19): siRNA sense strand
gaaaagauuccaacuauga

SEQ ID NO: 1683080 - RNA, 19 nt, Homo sapiens
  misc_RNA (1)...(19): siRNA sense strand
gaaagaagacacagaaagg

SEQ ID NO: 1683081 - RNA, 19 nt, Homo sapiens
  misc_RNA (1)...(19): siRNA sense strand
gaaggaaguuauggagaga

SEQ ID NO: 1683082 - RNA, 19 nt, Homo sapiens
  misc_RNA (1)...(19): siRNA sense strand
gcccuaggcuggaauuaug

SEQ ID NO: 1683083 - RNA, 19 nt, Homo sapiens
  misc_RNA (1)...(19): siRNA sense strand
guucucaagugugacauua

SEQ ID NO: 1683084 - RNA, 19 nt, Homo sapiens
  misc_RNA (1)...(19): siRNA sense strand
uuacagaucuccaaaucau

SEQ ID NO: 1683085 - RNA, 19 nt, Homo sapiens
  misc_RNA (1)...(19): siRNA sense strand
caucgaggcugucacacaa

SEQ ID NO: 1683086 - RNA, 19 nt, Homo sapiens
  misc_RNA (1)...(19): siRNA sense strand
gaaaacaacagaagaaaug

SEQ ID NO: 1683087 - RNA, 19 nt, Homo sapiens
  misc_RNA (1)...(19): siRNA sense strand
gcacaggacaggagagaau

SEQ ID NO: 1683088 - RNA, 19 nt, Homo sapiens
  misc_RNA (1)...(19): siRNA sense strand
gaagaaauguaugguuugc

SEQ ID NO: 1683089 - RNA, 19 nt, Homo sapiens
  misc_RNA (1)...(19): siRNA sense strand
gaugaacacaagacaauga

SEQ ID NO: 1683090 - RNA, 19 nt, Homo sapiens
  misc_RNA (1)...(19): siRNA sense strand
gcaccagcaugaagauauc

SEQ ID NO: 1683091 - RNA, 19 nt, Homo sapiens
  misc_RNA (1)...(19): siRNA sense strand
ggacaggagagaauuggaa

SEQ ID NO: 1683092 - RNA, 19 nt, Homo sapiens
  misc_RNA (1)...(19): siRNA sense strand
ugaacucaauguccagaaa

SEQ ID NO: 1683093 - RNA, 19 nt, Homo sapiens
  misc_RNA (1)...(19): siRNA sense strand
agacacagaucgcaaaugc

SEQ ID NO: 1683094 - RNA, 19 nt, Homo sapiens
  misc_RNA (1)...(19): siRNA sense strand
caaacuaccacgcuuacaa

SEQ ID NO: 1683095 - RNA, 19 nt, Homo sapiens
  misc_RNA (1)...(19): siRNA sense strand
cauuacagaucuccaaauc

SEQ ID NO: 1683096 - RNA, 19 nt, Homo sapiens
  misc_RNA (1)...(19): siRNA sense strand
cgaaccggaugccaggaua

SEQ ID NO: 1683097 - RNA, 19 nt, Homo sapiens
  misc_RNA (1)...(19): siRNA sense strand
ccagauuaguuaugcauca

SEQ ID NO: 1683098 - RNA, 19 nt, Homo sapiens
  misc_RNA (1)...(19): siRNA sense strand
ugacgggcaucuuucuuug

SEQ ID NO: 1683099 - RNA, 19 nt, Homo sapiens
  misc_RNA (1)...(19): siRNA sense strand
agacaggaccauugacuuu

SEQ ID NO: 1683100 - RNA, 19 nt, Homo sapiens
  misc_RNA (1)...(19): siRNA sense strand
caacagaagaaauguaugg

SEQ ID NO: 1683101 - RNA, 19 nt, Homo sapiens
  misc_RNA (1)...(19): siRNA sense strand
ucggauuuaucgcauauuu

SEQ ID NO: 1683102 - RNA, 19 nt, Homo sapiens
  misc_RNA (1)...(19): siRNA sense strand
ugaaguauauacgcaaugu

SEQ ID NO: 1683103 - RNA, 19 nt, Homo sapiens
  misc_RNA (1)...(19): siRNA sense strand
gauauagcauucuucucau

SEQ ID NO: 1683104 - RNA, 19 nt, Homo sapiens
  misc_RNA (1)...(19): siRNA sense strand
acaggaccauugacuuuga

SEQ ID NO: 1683105 - RNA, 19 nt, Homo sapiens
  misc_RNA (1)...(19): siRNA sense strand
ccauuggauucacuaugua

SEQ ID NO: 1683106 - RNA, 19 nt, Homo sapiens
  misc_RNA (1)...(19): siRNA sense strand
gagaaagaagacacagaaa

SEQ ID NO: 1683107 - RNA, 19 nt, Homo sapiens
  misc_RNA (1)...(19): siRNA sense strand
ccauugacuuugauagaau

SEQ ID NO: 1683108 - RNA, 19 nt, Homo sapiens
  misc_RNA (1)...(19): siRNA sense strand
acacaaacccagugacaga

SEQ ID NO: 1683109 - RNA, 19 nt, Homo sapiens
  misc_RNA (1)...(19): siRNA sense strand
uaacgaagccaagcccauu

SEQ ID NO: 1683110 - RNA, 19 nt, Homo sapiens
  misc_RNA (1)...(19): siRNA sense strand
ccaacaucaucauagacua

SEQ ID NO: 1683111 - RNA, 19 nt, Homo sapiens
  misc_RNA (1)...(19): siRNA sense strand
ggauauucccaucaucaaa

SEQ ID NO: 1683112 - RNA, 19 nt, Homo sapiens
  misc_RNA (1)...(19): siRNA sense strand
guaccaguuugaugagaug

SEQ ID NO: 1683113 - RNA, 19 nt, Homo sapiens
  misc_RNA (1)...(19): siRNA sense strand
guaaaggaguccgagagau

SEQ ID NO: 1683114 - RNA, 19 nt, Homo sapiens
  misc_RNA (1)...(19): siRNA sense strand
cagacgaacuucagcucaa

SEQ ID NO: 1683115 - RNA, 19 nt, Homo sapiens
  misc_RNA (1)...(19): siRNA sense strand
ggagagaauuggaaaagau

SEQ ID NO: 1683116 - RNA, 19 nt, Homo sapiens
  misc_RNA (1)...(19): siRNA sense strand
gaccauugacuuugauaga

SEQ ID NO: 1683117 - RNA, 19 nt, Homo sapiens
  misc_RNA (1)...(19): siRNA sense strand
cccauuggauucacuaugu

SEQ ID NO: 1683118 - RNA, 19 nt, Homo sapiens
  misc_RNA (1)...(19): siRNA sense strand
ggaacuccuugcuguugga

SEQ ID NO: 1683119 - RNA, 19 nt, Homo sapiens
  misc_RNA (1)...(19): siRNA sense strand
ugccaacgaugaggauaua

SEQ ID NO: 1683120 - RNA, 19 nt, Homo sapiens
  misc_RNA (1)...(19): siRNA sense strand
uaaaggcccuaggcuggaa

SEQ ID NO: 1683121 - RNA, 19 nt, Homo sapiens
  misc_RNA (1)...(19): siRNA sense strand
gcaguggacagacgaacuu

SEQ ID NO: 1683122 - RNA, 19 nt, Homo sapiens
  misc_RNA (1)...(19): siRNA sense strand
uaaaguccaguucgugauu

SEQ ID NO: 1683123 - RNA, 19 nt, Homo sapiens
  misc_RNA (1)...(19): siRNA sense strand
gaagacacagaucgcaaau

SEQ ID NO: 1683124 - RNA, 19 nt, Homo sapiens
  misc_RNA (1)...(19): siRNA sense strand
caaagaccgagcucuguga

SEQ ID NO: 1683125 - RNA, 19 nt, Homo sapiens
  misc_RNA (1)...(19): siRNA sense strand
agagaaagaagacacagaa

SEQ ID NO: 1683126 - RNA, 19 nt, Homo sapiens
  misc_RNA (1)...(19): siRNA sense strand
gguaaaggaguccgagaga

SEQ ID NO: 1683127 - RNA, 19 nt, Homo sapiens
  misc_RNA (1)...(19): siRNA sense strand
ccaacgaugaggauauaaa

SEQ ID NO: 1683128 - RNA, 19 nt, Homo sapiens
  misc_RNA (1)...(19): siRNA sense strand
cggaaaagcucuacauaca

SEQ ID NO: 1683129 - RNA, 19 nt, Homo sapiens
  misc_RNA (1)...(19): siRNA sense strand
ggaugcaccugggcguuau

SEQ ID NO: 1683130 - RNA, 19 nt, Homo sapiens
  misc_RNA (1)...(19): siRNA sense strand
gggaugcaccugggcguua

SEQ ID NO: 1683131 - RNA, 19 nt, Homo sapiens
  misc_RNA (1)...(19): siRNA sense strand
gcugaaguauauacgcaau

SEQ ID NO: 1683132 - RNA, 19 nt, Homo sapiens
  misc_RNA (1)...(19): siRNA sense strand
gagaaaguaguuggaguga

SEQ ID NO: 1683133 - RNA, 19 nt, Homo sapiens
  misc_RNA (1)...(19): siRNA sense strand
cacccaacaucaucauaga

SEQ ID NO: 1683134 - RNA, 19 nt, Homo sapiens
  misc_RNA (1)...(19): siRNA sense strand
ggcgggaacucagcuaugu

SEQ ID NO: 1683135 - RNA, 19 nt, Homo sapiens
  misc_RNA (1)...(19): siRNA sense strand
uggaccagaucaacaguga

SEQ ID NO: 1683136 - RNA, 19 nt, Homo sapiens
  misc_RNA (1)...(19): siRNA sense strand
ccgaaaguguacaucauca

SEQ ID NO: 1683137 - RNA, 19 nt, Homo sapiens
  misc_RNA (1)...(19): siRNA sense strand
caacaucacaacuggcaau

SEQ ID NO: 1683138 - RNA, 19 nt, Homo sapiens
  misc_RNA (1)...(19): siRNA sense strand
cacccgagcuaagugauga

SEQ ID NO: 1683139 - RNA, 19 nt, Homo sapiens
  misc_RNA (1)...(19): siRNA sense strand
auacaaacuaccacgcuua

SEQ ID NO: 1683140 - RNA, 19 nt, Homo sapiens
  misc_RNA (1)...(19): siRNA sense strand
uaauaucaguucagcuucu

SEQ ID NO: 1683141 - RNA, 19 nt, Homo sapiens
  misc_RNA (1)...(19): siRNA sense strand
gcagggcaagaaaucagua

SEQ ID NO: 1683142 - RNA, 19 nt, Homo sapiens
  misc_RNA (1)...(19): siRNA sense strand
gcaccugggcguuaugaca

SEQ ID NO: 1683143 - RNA, 19 nt, Homo sapiens
  misc_RNA (1)...(19): siRNA sense strand
gcaauguuaauuucaaugg

SEQ ID NO: 1683144 - RNA, 19 nt, Homo sapiens
  misc_RNA (1)...(19): siRNA sense strand
gacaggagagaauuggaaa

SEQ ID NO: 1683145 - RNA, 19 nt, Homo sapiens
  misc_RNA (1)...(19): siRNA sense strand
gaacagucgcuuacuuucg

SEQ ID NO: 1683146 - RNA, 19 nt, Homo sapiens
  misc_RNA (1)...(19): siRNA sense strand
gaaguuauggagagaaagg

SEQ ID NO: 1683147 - RNA, 19 nt, Homo sapiens
  misc_RNA (1)...(19): siRNA sense strand
caacgaugaggauauaaag

SEQ ID NO: 1683148 - RNA, 19 nt, Homo sapiens
  misc_RNA (1)...(19): siRNA sense strand
uggcuugccuucauuccaa

SEQ ID NO: 1683149 - RNA, 19 nt, Homo sapiens
  misc_RNA (1)...(19): siRNA sense strand
ucgaacagucgcuuacuuu

SEQ ID NO: 1683150 - RNA, 19 nt, Homo sapiens
  misc_RNA (1)...(19): siRNA sense strand
ucucaagugugacauuaca

SEQ ID NO: 1683151 - RNA, 19 nt, Homo sapiens
  misc_RNA (1)...(19): siRNA sense strand
agacuaugaugaacacaag

SEQ ID NO: 1683152 - RNA, 19 nt, Homo sapiens
  misc_RNA (1)...(19): siRNA sense strand
uccaggcgcucauccagaa

SEQ ID NO: 1683153 - RNA, 19 nt, Homo sapiens
  misc_RNA (1)...(19): siRNA sense strand
gagauacccgccucagugu

SEQ ID NO: 1683154 - RNA, 19 nt, Homo sapiens
  misc_RNA (1)...(19): siRNA sense strand
gaaguugcugaaguauaua

SEQ ID NO: 1683155 - RNA, 19 nt, Homo sapiens
  misc_RNA (1)...(19): siRNA sense strand
caaguuggccauuuucuuu

SEQ ID NO: 1683156 - RNA, 19 nt, Homo sapiens
  misc_RNA (1)...(19): siRNA sense strand
acuaugagcaggaggguaa

SEQ ID NO: 1683157 - RNA, 19 nt, Homo sapiens
  misc_RNA (1)...(19): siRNA sense strand
gguaugugcaucaguuaug

SEQ ID NO: 1683158 - RNA, 19 nt, Homo sapiens
  misc_RNA (1)...(19): siRNA sense strand
gccaggauauucccaucau

SEQ ID NO: 1683159 - RNA, 19 nt, Homo sapiens
  misc_RNA (1)...(19): siRNA sense strand
cuaccacgcuuacaaucuc

SEQ ID NO: 1683160 - RNA, 19 nt, Homo sapiens
  misc_RNA (1)...(19): siRNA sense strand
gaaaguaguuggagugauu

SEQ ID NO: 1683161 - RNA, 19 nt, Homo sapiens
  misc_RNA (1)...(19): siRNA sense strand
ggcaaucacuuccaguuua

SEQ ID NO: 1683162 - RNA, 19 nt, Homo sapiens
  misc_RNA (1)...(19): siRNA sense strand
caaaagagcugaccaaguu

SEQ ID NO: 1683163 - RNA, 19 nt, Homo sapiens
  misc_RNA (1)...(19): siRNA sense strand
gcaaucacuuccaguuuaa

SEQ ID NO: 1683164 - RNA, 19 nt, Homo sapiens
  misc_RNA (1)...(19): siRNA sense strand
cagaagaaauguaugguuu

SEQ ID NO: 1683165 - RNA, 19 nt, Homo sapiens
  misc_RNA (1)...(19): siRNA sense strand
gaaaagcucuacauacaaa

SEQ ID NO: 1683166 - RNA, 19 nt, Homo sapiens
  misc_RNA (1)...(19): siRNA sense strand
caacagugaucccaaccua

SEQ ID NO: 1683167 - RNA, 19 nt, Homo sapiens
  misc_RNA (1)...(19): siRNA sense strand
guuaugacaucuuucagua

SEQ ID NO: 1683168 - RNA, 19 nt, Homo sapiens
  misc_RNA (1)...(19): siRNA sense strand
gcaaagacaggaccauuga

SEQ ID NO: 1683169 - RNA, 19 nt, Homo sapiens
  misc_RNA (1)...(19): siRNA sense strand
gaacuucagcucaauauag

SEQ ID NO: 1683170 - RNA, 19 nt, Homo sapiens
  misc_RNA (1)...(19): siRNA sense strand
agaaguugcugaaguauau

SEQ ID NO: 1683171 - RNA, 19 nt, Homo sapiens
  misc_RNA (1)...(19): siRNA sense strand
ucacgcagauuuccaaaga

SEQ ID NO: 1683172 - RNA, 19 nt, Homo sapiens
  misc_RNA (1)...(19): siRNA sense strand
ggauauagcauucuucuca

SEQ ID NO: 1683173 - RNA, 19 nt, Homo sapiens
  misc_RNA (1)...(19): siRNA sense strand
uaaaggaguccgagagaua

SEQ ID NO: 1683174 - RNA, 19 nt, Homo sapiens
  misc_RNA (1)...(19): siRNA sense strand
gcaugaagauaucgcagaa

SEQ ID NO: 1683175 - RNA, 19 nt, Homo sapiens
  misc_RNA (1)...(19): siRNA sense strand
gaaaguguacaucaucauu

SEQ ID NO: 1683176 - RNA, 19 nt, Homo sapiens
  misc_RNA (1)...(19): siRNA sense strand
gaucauugccaccaucuuu

SEQ ID NO: 1683177 - RNA, 19 nt, Homo sapiens
  misc_RNA (1)...(19): siRNA sense strand
gaccagaggcccaaugaaa

SEQ ID NO: 1683178 - RNA, 19 nt, Homo sapiens
  misc_RNA (1)...(19): siRNA sense strand
ggauuuaucgcauauuuga

SEQ ID NO: 1683179 - RNA, 19 nt, Homo sapiens
  misc_RNA (1)...(19): siRNA sense strand
gaaaagauuccaacuauga

SEQ ID NO: 1683180 - RNA, 19 nt, Homo sapiens
  misc_RNA (1)...(19): siRNA sense strand
gaaagaagacacagaaagg

SEQ ID NO: 1683181 - RNA, 19 nt, Homo sapiens
  misc_RNA (1)...(19): siRNA sense strand
gaaggaaguuauggagaga

SEQ ID NO: 1683182 - RNA, 19 nt, Homo sapiens
  misc_RNA (1)...(19): siRNA sense strand
gcccuaggcuggaauuaug

SEQ ID NO: 1683183 - RNA, 19 nt, Homo sapiens
  misc_RNA (1)...(19): siRNA sense strand
guucucaagugugacauua

SEQ ID NO: 1683184 - RNA, 19 nt, Homo sapiens
  misc_RNA (1)...(19): siRNA sense strand
uuacagaucuccaaaucau

SEQ ID NO: 1683185 - RNA, 19 nt, Homo sapiens
  misc_RNA (1)...(19): siRNA sense strand
caucgaggcugucacacaa

SEQ ID NO: 1683186 - RNA, 19 nt, Homo sapiens
  misc_RNA (1)...(19): siRNA sense strand
gaaaacaacagaagaaaug

SEQ ID NO: 1683187 - RNA, 19 nt, Homo sapiens
  misc_RNA (1)...(19): siRNA sense strand
gcacaggacaggagagaau

SEQ ID NO: 1683188 - RNA, 19 nt, Homo sapiens
  misc_RNA (1)...(19): siRNA sense strand
gaagaaauguaugguuugc

SEQ ID NO: 1683189 - RNA, 19 nt, Homo sapiens
  misc_RNA (1)...(19): siRNA sense strand
gaugaacacaagacaauga

SEQ ID NO: 1683190 - RNA, 19 nt, Homo sapiens
  misc_RNA (1)...(19): siRNA sense strand
gcaccagcaugaagauauc

SEQ ID NO: 1683191 - RNA, 19 nt, Homo sapiens
  misc_RNA (1)...(19): siRNA sense strand
ggacaggagagaauuggaa

SEQ ID NO: 1683192 - RNA, 19 nt, Homo sapiens
  misc_RNA (1)...(19): siRNA sense strand
ugaacucaauguccagaaa

SEQ ID NO: 1683193 - RNA, 19 nt, Homo sapiens
  misc_RNA (1)...(19): siRNA sense strand
agacacagaucgcaaaugc

SEQ ID NO: 1683194 - RNA, 19 nt, Homo sapiens
  misc_RNA (1)...(19): siRNA sense strand
caaacuaccacgcuuacaa

SEQ ID NO: 1683195 - RNA, 19 nt, Homo sapiens
  misc_RNA (1)...(19): siRNA sense strand
cauuacagaucuccaaauc

SEQ ID NO: 1683196 - RNA, 19 nt, Homo sapiens
  misc_RNA (1)...(19): siRNA sense strand
cgaaccggaugccaggaua

SEQ ID NO: 1683197 - RNA, 19 nt, Homo sapiens
  misc_RNA (1)...(19): siRNA sense strand
ccagauuaguuaugcauca

SEQ ID NO: 1683198 - RNA, 19 nt, Homo sapiens
  misc_RNA (1)...(19): siRNA sense strand
ugacgggcaucuuucuuug

SEQ ID NO: 1683199 - RNA, 19 nt, Homo sapiens
  misc_RNA (1)...(19): siRNA sense strand
agacaggaccauugacuuu

SEQ ID NO: 1683200 - RNA, 19 nt, Homo sapiens
  misc_RNA (1)...(19): siRNA sense strand
caacagaagaaauguaugg

SEQ ID NO: 1683201 - RNA, 19 nt, Homo sapiens
  misc_RNA (1)...(19): siRNA sense strand
ucggauuuaucgcauauuu

SEQ ID NO: 1683202 - RNA, 19 nt, Homo sapiens
  misc_RNA (1)...(19): siRNA sense strand
ugaaguauauacgcaaugu

SEQ ID NO: 1683203 - RNA, 19 nt, Homo sapiens
  misc_RNA (1)...(19): siRNA sense strand
gauauagcauucuucucau

SEQ ID NO: 1683204 - RNA, 19 nt, Homo sapiens
  misc_RNA (1)...(19): siRNA sense strand
acaggaccauugacuuuga

SEQ ID NO: 1683205 - RNA, 19 nt, Homo sapiens
  misc_RNA (1)...(19): siRNA sense strand
ccauuggauucacuaugua

SEQ ID NO: 1683206 - RNA, 19 nt, Homo sapiens
  misc_RNA (1)...(19): siRNA sense strand
gagaaagaagacacagaaa

SEQ ID NO: 1683207 - RNA, 19 nt, Homo sapiens
  misc_RNA (1)...(19): siRNA sense strand
ccauugacuuugauagaau

SEQ ID NO: 1683208 - RNA, 19 nt, Homo sapiens
  misc_RNA (1)...(19): siRNA sense strand
acacaaacccagugacaga

SEQ ID NO: 1683209 - RNA, 19 nt, Homo sapiens
  misc_RNA (1)...(19): siRNA sense strand
uaacgaagccaagcccauu

SEQ ID NO: 1683210 - RNA, 19 nt, Homo sapiens
  misc_RNA (1)...(19): siRNA sense strand
ccaacaucaucauagacua

SEQ ID NO: 1683211 - RNA, 19 nt, Homo sapiens
  misc_RNA (1)...(19): siRNA sense strand
ggauauucccaucaucaaa

SEQ ID NO: 1683212 - RNA, 19 nt, Homo sapiens
  misc_RNA (1)...(19): siRNA sense strand
guaccaguuugaugagaug

SEQ ID NO: 1683213 - RNA, 19 nt, Homo sapiens
  misc_RNA (1)...(19): siRNA sense strand
guaaaggaguccgagagau

SEQ ID NO: 1683214 - RNA, 19 nt, Homo sapiens
  misc_RNA (1)...(19): siRNA sense strand
cagacgaacuucagcucaa

SEQ ID NO: 1683215 - RNA, 19 nt, Homo sapiens
  misc_RNA (1)...(19): siRNA sense strand
ggagagaauuggaaaagau

SEQ ID NO: 1683216 - RNA, 19 nt, Homo sapiens
  misc_RNA (1)...(19): siRNA sense strand
gaccauugacuuugauaga

SEQ ID NO: 1683217 - RNA, 19 nt, Homo sapiens
  misc_RNA (1)...(19): siRNA sense strand
cccauuggauucacuaugu

SEQ ID NO: 1683218 - RNA, 19 nt, Homo sapiens
  misc_RNA (1)...(19): siRNA sense strand
ggaacuccuugcuguugga

SEQ ID NO: 1683219 - RNA, 19 nt, Homo sapiens
  misc_RNA (1)...(19): siRNA sense strand
ugccaacgaugaggauaua

SEQ ID NO: 1683220 - RNA, 19 nt, Homo sapiens
  misc_RNA (1)...(19): siRNA sense strand
uaaaggcccuaggcuggaa

SEQ ID NO: 1683221 - RNA, 19 nt, Homo sapiens
  misc_RNA (1)...(19): siRNA sense strand
gcaguggacagacgaacuu

SEQ ID NO: 1683222 - RNA, 19 nt, Homo sapiens
  misc_RNA (1)...(19): siRNA sense strand
uaaaguccaguucgugauu

SEQ ID NO: 1683223 - RNA, 19 nt, Homo sapiens
  misc_RNA (1)...(19): siRNA sense strand
gaagacacagaucgcaaau

SEQ ID NO: 1683224 - RNA, 19 nt, Homo sapiens
  misc_RNA (1)...(19): siRNA sense strand
caaagaccgagcucuguga

SEQ ID NO: 1683225 - RNA, 19 nt, Homo sapiens
  misc_RNA (1)...(19): siRNA sense strand
agagaaagaagacacagaa

SEQ ID NO: 1683226 - RNA, 19 nt, Homo sapiens
  misc_RNA (1)...(19): siRNA sense strand
gguaaaggaguccgagaga

SEQ ID NO: 1683227 - RNA, 19 nt, Homo sapiens
  misc_RNA (1)...(19): siRNA sense strand
ccaacgaugaggauauaaa

SEQ ID NO: 1683228 - RNA, 19 nt, Homo sapiens
  misc_RNA (1)...(19): siRNA sense strand
cggaaaagcucuacauaca

SEQ ID NO: 1683229 - RNA, 19 nt, Homo sapiens
  misc_RNA (1)...(19): siRNA sense strand
ggaugcaccugggcguuau

SEQ ID NO: 1683230 - RNA, 19 nt, Homo sapiens
  misc_RNA (1)...(19): siRNA sense strand
gggaugcaccugggcguua

SEQ ID NO: 1683231 - RNA, 19 nt, Homo sapiens
  misc_RNA (1)...(19): siRNA sense strand
gcugaaguauauacgcaau

SEQ ID NO: 1683232 - RNA, 19 nt, Homo sapiens
  misc_RNA (1)...(19): siRNA sense strand
gagaaaguaguuggaguga

SEQ ID NO: 1683233 - RNA, 19 nt, Homo sapiens
  misc_RNA (1)...(19): siRNA sense strand
cacccaacaucaucauaga

SEQ ID NO: 1683234 - RNA, 19 nt, Homo sapiens
  misc_RNA (1)...(19): siRNA sense strand
ggcgggaacucagcuaugu

SEQ ID NO: 1683235 - RNA, 19 nt, Homo sapiens
  misc_RNA (1)...(19): siRNA sense strand
uggaccagaucaacaguga

SEQ ID NO: 1683236 - RNA, 19 nt, Homo sapiens
  misc_RNA (1)...(19): siRNA sense strand
ccgaaaguguacaucauca

SEQ ID NO: 1683237 - RNA, 19 nt, Homo sapiens
  misc_RNA (1)...(19): siRNA sense strand
caacaucacaacuggcaau

SEQ ID NO: 1683238 - RNA, 19 nt, Homo sapiens
  misc_RNA (1)...(19): siRNA sense strand
cacccgagcuaagugauga

SEQ ID NO: 1683239 - RNA, 19 nt, Homo sapiens
  misc_RNA (1)...(19): siRNA sense strand
auacaaacuaccacgcuua

SEQ ID NO: 1683240 - RNA, 19 nt, Homo sapiens
  misc_RNA (1)...(19): siRNA sense strand
uaauaucaguucagcuucu

SEQ ID NO: 1683241 - RNA, 19 nt, Homo sapiens
  misc_RNA (1)...(19): siRNA sense strand
gcagggcaagaaaucagua

SEQ ID NO: 1683242 - RNA, 19 nt, Homo sapiens
  misc_RNA (1)...(19): siRNA sense strand
gcaccugggcguuaugaca

SEQ ID NO: 1683243 - RNA, 19 nt, Homo sapiens
  misc_RNA (1)...(19): siRNA sense strand
gcaauguuaauuucaaugg

SEQ ID NO: 1683244 - RNA, 19 nt, Homo sapiens
  misc_RNA (1)...(19): siRNA sense strand
gacaggagagaauuggaaa

SEQ ID NO: 1683245 - RNA, 19 nt, Homo sapiens
  misc_RNA (1)...(19): siRNA sense strand
gaacagucgcuuacuuucg

SEQ ID NO: 1683246 - RNA, 19 nt, Homo sapiens
  misc_RNA (1)...(19): siRNA sense strand
gaaguuauggagagaaagg

SEQ ID NO: 1683247 - RNA, 19 nt, Homo sapiens
  misc_RNA (1)...(19): siRNA sense strand
caacgaugaggauauaaag

SEQ ID NO: 1683248 - RNA, 19 nt, Homo sapiens
  misc_RNA (1)...(19): siRNA sense strand
uggcuugccuucauuccaa

SEQ ID NO: 1683249 - RNA, 19 nt, Homo sapiens
  misc_RNA (1)...(19): siRNA sense strand
ucgaacagucgcuuacuuu

SEQ ID NO: 1683250 - RNA, 19 nt, Homo sapiens
  misc_RNA (1)...(19): siRNA sense strand
ucucaagugugacauuaca

SEQ ID NO: 1683251 - RNA, 19 nt, Homo sapiens
  misc_RNA (1)...(19): siRNA sense strand
agacuaugaugaacacaag

SEQ ID NO: 1683252 - RNA, 19 nt, Homo sapiens
  misc_RNA (1)...(19): siRNA sense strand
uccaggcgcucauccagaa

SEQ ID NO: 1683253 - RNA, 19 nt, Homo sapiens
  misc_RNA (1)...(19): siRNA sense strand
gagauacccgccucagugu

SEQ ID NO: 1683254 - RNA, 19 nt, Homo sapiens
  misc_RNA (1)...(19): siRNA sense strand
gaaguugcugaaguauaua

SEQ ID NO: 1683255 - RNA, 19 nt, Homo sapiens
  misc_RNA (1)...(19): siRNA sense strand
caaguuggccauuuucuuu

SEQ ID NO: 1683256 - RNA, 19 nt, Homo sapiens
  misc_RNA (1)...(19): siRNA sense strand
acuaugagcaggaggguaa

SEQ ID NO: 1683257 - RNA, 19 nt, Homo sapiens
  misc_RNA (1)...(19): siRNA sense strand
gguaugugcaucaguuaug

SEQ ID NO: 1683258 - RNA, 19 nt, Homo sapiens
  misc_RNA (1)...(19): siRNA sense strand
gccaggauauucccaucau

SEQ ID NO: 1683259 - RNA, 19 nt, Homo sapiens
  misc_RNA (1)...(19): siRNA sense strand
cuaccacgcuuacaaucuc

SEQ ID NO: 1683260 - RNA, 19 nt, Homo sapiens
  misc_RNA (1)...(19): siRNA sense strand
gaaaguaguuggagugauu

SEQ ID NO: 1683261 - RNA, 19 nt, Homo sapiens
  misc_RNA (1)...(19): siRNA sense strand
ggcaaucacuuccaguuua

SEQ ID NO: 1683262 - RNA, 19 nt, Homo sapiens
  misc_RNA (1)...(19): siRNA sense strand
caaaagagcugaccaaguu

SEQ ID NO: 1683263 - RNA, 19 nt, Homo sapiens
  misc_RNA (1)...(19): siRNA sense strand
gcaaucacuuccaguuuaa

SEQ ID NO: 1683264 - RNA, 19 nt, Homo sapiens
  misc_RNA (1)...(19): siRNA sense strand
cagaagaaauguaugguuu

SEQ ID NO: 1683265 - RNA, 19 nt, Homo sapiens
  misc_RNA (1)...(19): siRNA sense strand
gaaaagcucuacauacaaa

SEQ ID NO: 1683266 - RNA, 19 nt, Homo sapiens
  misc_RNA (1)...(19): siRNA sense strand
caacagugaucccaaccua

SEQ ID NO: 1683267 - RNA, 19 nt, Homo sapiens
  misc_RNA (1)...(19): siRNA sense strand
guuaugacaucuuucagua

SEQ ID NO: 1683268 - RNA, 19 nt, Homo sapiens
  misc_RNA (1)...(19): siRNA sense strand
gcaaagacaggaccauuga

SEQ ID NO: 1683269 - RNA, 19 nt, Homo sapiens
  misc_RNA (1)...(19): siRNA sense strand
gaacuucagcucaauauag

SEQ ID NO: 1683270 - RNA, 19 nt, Homo sapiens
  misc_RNA (1)...(19): siRNA sense strand
agaaguugcugaaguauau

SEQ ID NO: 1683271 - RNA, 19 nt, Homo sapiens
  misc_RNA (1)...(19): siRNA sense strand
ucacgcagauuuccaaaga

SEQ ID NO: 1683272 - RNA, 19 nt, Homo sapiens
  misc_RNA (1)...(19): siRNA sense strand
ggauauagcauucuucuca

SEQ ID NO: 1683273 - RNA, 19 nt, Homo sapiens
  misc_RNA (1)...(19): siRNA sense strand
uaaaggaguccgagagaua

SEQ ID NO: 1683274 - RNA, 19 nt, Homo sapiens
  misc_RNA (1)...(19): siRNA sense strand
gcaugaagauaucgcagaa

SEQ ID NO: 1683275 - RNA, 19 nt, Homo sapiens
  misc_RNA (1)...(19): siRNA sense strand
gaaaguguacaucaucauu

SEQ ID NO: 1683276 - RNA, 19 nt, Homo sapiens
  misc_RNA (1)...(19): siRNA sense strand
gaucauugccaccaucuuu

SEQ ID NO: 1683277 - RNA, 19 nt, Homo sapiens
  misc_RNA (1)...(19): siRNA sense strand
gaccagaggcccaaugaaa

SEQ ID NO: 1683278 - RNA, 19 nt, Homo sapiens
  misc_RNA (1)...(19): siRNA sense strand
ggauuuaucgcauauuuga

SEQ ID NO: 1683279 - RNA, 19 nt, Homo sapiens
  misc_RNA (1)...(19): siRNA sense strand
gaaaagauuccaacuauga

SEQ ID NO: 1683280 - RNA, 19 nt, Homo sapiens
  misc_RNA (1)...(19): siRNA sense strand
gaaagaagacacagaaagg

SEQ ID NO: 1683281 - RNA, 19 nt, Homo sapiens
  misc_RNA (1)...(19): siRNA sense strand
gaaggaaguuauggagaga

SEQ ID NO: 1683282 - RNA, 19 nt, Homo sapiens
  misc_RNA (1)...(19): siRNA sense strand
gcccuaggcuggaauuaug

SEQ ID NO: 1683283 - RNA, 19 nt, Homo sapiens
  misc_RNA (1)...(19): siRNA sense strand
guucucaagugugacauua

SEQ ID NO: 1683284 - RNA, 19 nt, Homo sapiens
  misc_RNA (1)...(19): siRNA sense strand
uuacagaucuccaaaucau

SEQ ID NO: 1683285 - RNA, 19 nt, Homo sapiens
  misc_RNA (1)...(19): siRNA sense strand
caucgaggcugucacacaa

SEQ ID NO: 1683286 - RNA, 19 nt, Homo sapiens
  misc_RNA (1)...(19): siRNA sense strand
gaaaacaacagaagaaaug

SEQ ID NO: 1683287 - RNA, 19 nt, Homo sapiens
  misc_RNA (1)...(19): siRNA sense strand
gcacaggacaggagagaau

SEQ ID NO: 1683288 - RNA, 19 nt, Homo sapiens
  misc_RNA (1)...(19): siRNA sense strand
gaagaaauguaugguuugc

SEQ ID NO: 1683289 - RNA, 19 nt, Homo sapiens
  misc_RNA (1)...(19): siRNA sense strand
gaugaacacaagacaauga

SEQ ID NO: 1683290 - RNA, 19 nt, Homo sapiens
  misc_RNA (1)...(19): siRNA sense strand
gcaccagcaugaagauauc

SEQ ID NO: 1683291 - RNA, 19 nt, Homo sapiens
  misc_RNA (1)...(19): siRNA sense strand
ggacaggagagaauuggaa

SEQ ID NO: 1683292 - RNA, 19 nt, Homo sapiens
  misc_RNA (1)...(19): siRNA sense strand
ugaacucaauguccagaaa

SEQ ID NO: 1683293 - RNA, 19 nt, Homo sapiens
  misc_RNA (1)...(19): siRNA sense strand
agacacagaucgcaaaugc

SEQ ID NO: 1683294 - RNA, 19 nt, Homo sapiens
  misc_RNA (1)...(19): siRNA sense strand
caaacuaccacgcuuacaa

SEQ ID NO: 1683295 - RNA, 19 nt, Homo sapiens
  misc_RNA (1)...(19): siRNA sense strand
cauuacagaucuccaaauc

SEQ ID NO: 1683296 - RNA, 19 nt, Homo sapiens
  misc_RNA (1)...(19): siRNA sense strand
cgaaccggaugccaggaua

SEQ ID NO: 1683297 - RNA, 19 nt, Homo sapiens
  misc_RNA (1)...(19): siRNA sense strand
ccagauuaguuaugcauca

SEQ ID NO: 1683298 - RNA, 19 nt, Homo sapiens
  misc_RNA (1)...(19): siRNA sense strand
ugacgggcaucuuucuuug

SEQ ID NO: 1683299 - RNA, 19 nt, Homo sapiens
  misc_RNA (1)...(19): siRNA sense strand
agacaggaccauugacuuu

SEQ ID NO: 1683300 - RNA, 19 nt, Homo sapiens
  misc_RNA (1)...(19): siRNA sense strand
caacagaagaaauguaugg

SEQ ID NO: 1683301 - RNA, 19 nt, Homo sapiens
  misc_RNA (1)...(19): siRNA sense strand
ucggauuuaucgcauauuu

SEQ ID NO: 1683302 - RNA, 19 nt, Homo sapiens
  misc_RNA (1)...(19): siRNA sense strand
ugaaguauauacgcaaugu

SEQ ID NO: 1683303 - RNA, 19 nt, Homo sapiens
  misc_RNA (1)...(19): siRNA sense strand
gauauagcauucuucucau

SEQ ID NO: 1683304 - RNA, 19 nt, Homo sapiens
  misc_RNA (1)...(19): siRNA sense strand
acaggaccauugacuuuga

SEQ ID NO: 1683305 - RNA, 19 nt, Homo sapiens
  misc_RNA (1)...(19): siRNA sense strand
ccauuggauucacuaugua

SEQ ID NO: 1683306 - RNA, 19 nt, Homo sapiens
  misc_RNA (1)...(19): siRNA sense strand
gagaaagaagacacagaaa

SEQ ID NO: 1683307 - RNA, 19 nt, Homo sapiens
  misc_RNA (1)...(19): siRNA sense strand
ccauugacuuugauagaau

SEQ ID NO: 1683308 - RNA, 19 nt, Homo sapiens
  misc_RNA (1)...(19): siRNA sense strand
acacaaacccagugacaga

SEQ ID NO: 1683309 - RNA, 19 nt, Homo sapiens
  misc_RNA (1)...(19): siRNA sense strand
uaacgaagccaagcccauu

SEQ ID NO: 1683310 - RNA, 19 nt, Homo sapiens
  misc_RNA (1)...(19): siRNA sense strand
ccaacaucaucauagacua

SEQ ID NO: 1683311 - RNA, 19 nt, Homo sapiens
  misc_RNA (1)...(19): siRNA sense strand
ggauauucccaucaucaaa

SEQ ID NO: 1683312 - RNA, 19 nt, Homo sapiens
  misc_RNA (1)...(19): siRNA sense strand
guaccaguuugaugagaug

SEQ ID NO: 1683313 - RNA, 19 nt, Homo sapiens
  misc_RNA (1)...(19): siRNA sense strand
guaaaggaguccgagagau

SEQ ID NO: 1683314 - RNA, 19 nt, Homo sapiens
  misc_RNA (1)...(19): siRNA sense strand
cagacgaacuucagcucaa

SEQ ID NO: 1683315 - RNA, 19 nt, Homo sapiens
  misc_RNA (1)...(19): siRNA sense strand
ggagagaauuggaaaagau

SEQ ID NO: 1683316 - RNA, 19 nt, Homo sapiens
  misc_RNA (1)...(19): siRNA sense strand
gaccauugacuuugauaga

SEQ ID NO: 1683317 - RNA, 19 nt, Homo sapiens
  misc_RNA (1)...(19): siRNA sense strand
cccauuggauucacuaugu

SEQ ID NO: 1683318 - RNA, 19 nt, Homo sapiens
  misc_RNA (1)...(19): siRNA sense strand
ggaacuccuugcuguugga

SEQ ID NO: 1683319 - RNA, 19 nt, Homo sapiens
  misc_RNA (1)...(19): siRNA sense strand
ugccaacgaugaggauaua

SEQ ID NO: 1683320 - RNA, 19 nt, Homo sapiens
  misc_RNA (1)...(19): siRNA sense strand
uaaaggcccuaggcuggaa

SEQ ID NO: 1683321 - RNA, 19 nt, Homo sapiens
  misc_RNA (1)...(19): siRNA sense strand
gcaguggacagacgaacuu

SEQ ID NO: 1683322 - RNA, 19 nt, Homo sapiens
  misc_RNA (1)...(19): siRNA sense strand
uaaaguccaguucgugauu

SEQ ID NO: 1683323 - RNA, 19 nt, Homo sapiens
  misc_RNA (1)...(19): siRNA sense strand
gaagacacagaucgcaaau

SEQ ID NO: 1683324 - RNA, 19 nt, Homo sapiens
  misc_RNA (1)...(19): siRNA sense strand
caaagaccgagcucuguga

SEQ ID NO: 1683325 - RNA, 19 nt, Homo sapiens
  misc_RNA (1)...(19): siRNA sense strand
agagaaagaagacacagaa

SEQ ID NO: 1683326 - RNA, 19 nt, Homo sapiens
  misc_RNA (1)...(19): siRNA sense strand
gguaaaggaguccgagaga

SEQ ID NO: 1683327 - RNA, 19 nt, Homo sapiens
  misc_RNA (1)...(19): siRNA sense strand
ccaacgaugaggauauaaa

SEQ ID NO: 1683328 - RNA, 19 nt, Homo sapiens
  misc_RNA (1)...(19): siRNA sense strand
cggaaaagcucuacauaca

SEQ ID NO: 1683329 - RNA, 19 nt, Homo sapiens
  misc_RNA (1)...(19): siRNA sense strand
ggaugcaccugggcguuau

SEQ ID NO: 1683330 - RNA, 19 nt, Homo sapiens
  misc_RNA (1)...(19): siRNA sense strand
gggaugcaccugggcguua

SEQ ID NO: 1683331 - RNA, 19 nt, Homo sapiens
  misc_RNA (1)...(19): siRNA sense strand
gcugaaguauauacgcaau

SEQ ID NO: 1683332 - RNA, 19 nt, Homo sapiens
  misc_RNA (1)...(19): siRNA sense strand
gagaaaguaguuggaguga

SEQ ID NO: 1683333 - RNA, 19 nt, Homo sapiens
  misc_RNA (1)...(19): siRNA sense strand
cacccaacaucaucauaga

SEQ ID NO: 1683334 - RNA, 19 nt, Homo sapiens
  misc_RNA (1)...(19): siRNA sense strand
ggcgggaacucagcuaugu

SEQ ID NO: 1683335 - RNA, 19 nt, Homo sapiens
  misc_RNA (1)...(19): siRNA sense strand
uggaccagaucaacaguga

SEQ ID NO: 1683336 - RNA, 19 nt, Homo sapiens
  misc_RNA (1)...(19): siRNA sense strand
ccgaaaguguacaucauca

SEQ ID NO: 1683337 - RNA, 19 nt, Homo sapiens
  misc_RNA (1)...(19): siRNA sense strand
caacaucacaacuggcaau

SEQ ID NO: 1683338 - RNA, 19 nt, Homo sapiens
  misc_RNA (1)...(19): siRNA sense strand
cacccgagcuaagugauga

SEQ ID NO: 1683339 - RNA, 19 nt, Homo sapiens
  misc_RNA (1)...(19): siRNA sense strand
auacaaacuaccacgcuua

SEQ ID NO: 1683340 - RNA, 19 nt, Homo sapiens
  misc_RNA (1)...(19): siRNA sense strand
uaauaucaguucagcuucu

SEQ ID NO: 1683341 - RNA, 19 nt, Homo sapiens
  misc_RNA (1)...(19): siRNA sense strand
gcagggcaagaaaucagua

SEQ ID NO: 1683342 - RNA, 19 nt, Homo sapiens
  misc_RNA (1)...(19): siRNA sense strand
gcaccugggcguuaugaca

SEQ ID NO: 1683343 - RNA, 19 nt, Homo sapiens
  misc_RNA (1)...(19): siRNA sense strand
gcaauguuaauuucaaugg

SEQ ID NO: 1683344 - RNA, 19 nt, Homo sapiens
  misc_RNA (1)...(19): siRNA sense strand
gacaggagagaauuggaaa

SEQ ID NO: 1683345 - RNA, 19 nt, Homo sapiens
  misc_RNA (1)...(19): siRNA sense strand
gaacagucgcuuacuuucg

SEQ ID NO: 1683346 - RNA, 19 nt, Homo sapiens
  misc_RNA (1)...(19): siRNA sense strand
gaaguuauggagagaaagg

SEQ ID NO: 1683347 - RNA, 19 nt, Homo sapiens
  misc_RNA (1)...(19): siRNA sense strand
caacgaugaggauauaaag

SEQ ID NO: 1683348 - RNA, 19 nt, Homo sapiens
  misc_RNA (1)...(19): siRNA sense strand
uggcuugccuucauuccaa

SEQ ID NO: 1683349 - RNA, 19 nt, Homo sapiens
  misc_RNA (1)...(19): siRNA sense strand
ucgaacagucgcuuacuuu

SEQ ID NO: 1683350 - RNA, 19 nt, Homo sapiens
  misc_RNA (1)...(19): siRNA sense strand
ucucaagugugacauuaca

SEQ ID NO: 1683351 - RNA, 19 nt, Homo sapiens
  misc_RNA (1)...(19): siRNA sense strand
agacuaugaugaacacaag

SEQ ID NO: 1683352 - RNA, 19 nt, Homo sapiens
  misc_RNA (1)...(19): siRNA sense strand
uccaggcgcucauccagaa

SEQ ID NO: 1683353 - RNA, 19 nt, Homo sapiens
  misc_RNA (1)...(19): siRNA sense strand
gagauacccgccucagugu

SEQ ID NO: 1683354 - RNA, 19 nt, Homo sapiens
  misc_RNA (1)...(19): siRNA sense strand
gaaguugcugaaguauaua

SEQ ID NO: 1683355 - RNA, 19 nt, Homo sapiens
  misc_RNA (1)...(19): siRNA sense strand
caaguuggccauuuucuuu

SEQ ID NO: 1683356 - RNA, 19 nt, Homo sapiens
  misc_RNA (1)...(19): siRNA sense strand
acuaugagcaggaggguaa

SEQ ID NO: 1683357 - RNA, 19 nt, Homo sapiens
  misc_RNA (1)...(19): siRNA sense strand
gguaugugcaucaguuaug

SEQ ID NO: 1683358 - RNA, 19 nt, Homo sapiens
  misc_RNA (1)...(19): siRNA sense strand
gccaggauauucccaucau

SEQ ID NO: 1683359 - RNA, 19 nt, Homo sapiens
  misc_RNA (1)...(19): siRNA sense strand
cuaccacgcuuacaaucuc

SEQ ID NO: 1683360 - RNA, 19 nt, Homo sapiens
  misc_RNA (1)...(19): siRNA sense strand
gauacaaccugaaggauga

SEQ ID NO: 1683361 - RNA, 19 nt, Homo sapiens
  misc_RNA (1)...(19): siRNA sense strand
ccaacaaccuguacaucuu

SEQ ID NO: 1683362 - RNA, 19 nt, Homo sapiens
  misc_RNA (1)...(19): siRNA sense strand
gaucacagcaucugaguuc

SEQ ID NO: 1683363 - RNA, 19 nt, Homo sapiens
  misc_RNA (1)...(19): siRNA sense strand
ucaagagccuggagauaga

SEQ ID NO: 1683364 - RNA, 19 nt, Homo sapiens
  misc_RNA (1)...(19): siRNA sense strand
gaagauuaccgaacgagau

SEQ ID NO: 1683365 - RNA, 19 nt, Homo sapiens
  misc_RNA (1)...(19): siRNA sense strand
caagguaaacucugacaug

SEQ ID NO: 1683366 - RNA, 19 nt, Homo sapiens
  misc_RNA (1)...(19): siRNA sense strand
caagacccauagagaccua

SEQ ID NO: 1683367 - RNA, 19 nt, Homo sapiens
  misc_RNA (1)...(19): siRNA sense strand
gaggagaagaucaacaaga

SEQ ID NO: 1683368 - RNA, 19 nt, Homo sapiens
  misc_RNA (1)...(19): siRNA sense strand
aggagaagaucaacaagau

SEQ ID NO: 1683369 - RNA, 19 nt, Homo sapiens
  misc_RNA (1)...(19): siRNA sense strand
ggccacaccuaccacauca

SEQ ID NO: 1683370 - RNA, 19 nt, Homo sapiens
  misc_RNA (1)...(19): siRNA sense strand
gccacgagccggaguuuga

SEQ ID NO: 1683371 - RNA, 19 nt, Homo sapiens
  misc_RNA (1)...(19): siRNA sense strand
cggaggaucuuugccaaug

SEQ ID NO: 1683372 - RNA, 19 nt, Homo sapiens
  misc_RNA (1)...(19): siRNA sense strand
ggagauagaggagaagauc

SEQ ID NO: 1683373 - RNA, 19 nt, Homo sapiens
  misc_RNA (1)...(19): siRNA sense strand
gaggcaagacccauagaga

SEQ ID NO: 1683374 - RNA, 19 nt, Homo sapiens
  misc_RNA (1)...(19): siRNA sense strand
gcacccggcugagaacauc

SEQ ID NO: 1683375 - RNA, 19 nt, Homo sapiens
  misc_RNA (1)...(19): siRNA sense strand
guacgagaacgacugcauu

SEQ ID NO: 1683376 - RNA, 19 nt, Homo sapiens
  misc_RNA (1)...(19): siRNA sense strand
aagauuaccgaacgagaua

SEQ ID NO: 1683377 - RNA, 19 nt, Homo sapiens
  misc_RNA (1)...(19): siRNA sense strand
gcucauucuucucggaaau

SEQ ID NO: 1683378 - RNA, 19 nt, Homo sapiens
  misc_RNA (1)...(19): siRNA sense strand
caacaaccuguacaucuuc

SEQ ID NO: 1683379 - RNA, 19 nt, Homo sapiens
  misc_RNA (1)...(19): siRNA sense strand
ccuaccagguccaugacua

SEQ ID NO: 1683380 - RNA, 19 nt, Homo sapiens
  misc_RNA (1)...(19): siRNA sense strand
caucaucucuaccguugag

SEQ ID NO: 1683381 - RNA, 19 nt, Homo sapiens
  misc_RNA (1)...(19): siRNA sense strand
guggacagcuuggacuuca

SEQ ID NO: 1683382 - RNA, 19 nt, Homo sapiens
  misc_RNA (1)...(19): siRNA sense strand
uagaggagaagaucaacaa

SEQ ID NO: 1683383 - RNA, 19 nt, Homo sapiens
  misc_RNA (1)...(19): siRNA sense strand
caacuucuuccgcauguuc

SEQ ID NO: 1683384 - RNA, 19 nt, Homo sapiens
  misc_RNA (1)...(19): siRNA sense strand
gagcgacagcgucaucaug

SEQ ID NO: 1683385 - RNA, 19 nt, Homo sapiens
  misc_RNA (1)...(19): siRNA sense strand
ggaggaucuuugccaaugg

SEQ ID NO: 1683386 - RNA, 19 nt, Homo sapiens
  misc_RNA (1)...(19): siRNA sense strand
cgacaggagcuucaacauc

SEQ ID NO: 1683387 - RNA, 19 nt, Homo sapiens
  misc_RNA (1)...(19): siRNA sense strand
aggacaagguaaacucuga

SEQ ID NO: 1683388 - RNA, 19 nt, Homo sapiens
  misc_RNA (1)...(19): siRNA sense strand
ucuguucccuguacgagaa

SEQ ID NO: 1683389 - RNA, 19 nt, Homo sapiens
  misc_RNA (1)...(19): siRNA sense strand
ucugggaccugaacaugga

SEQ ID NO: 1683390 - RNA, 19 nt, Homo sapiens
  misc_RNA (1)...(19): siRNA sense strand
caacaucguggacaucaag

SEQ ID NO: 1683391 - RNA, 19 nt, Homo sapiens
  misc_RNA (1)...(19): siRNA sense strand
gauuaccgaacgagauaaa

SEQ ID NO: 1683392 - RNA, 19 nt, Homo sapiens
  misc_RNA (1)...(19): siRNA sense strand
ccaguaaccgcucauucuu

SEQ ID NO: 1683393 - RNA, 19 nt, Homo sapiens
  misc_RNA (1)...(19): siRNA sense strand
ccaucuccgucaacaguga

SEQ ID NO: 1683394 - RNA, 19 nt, Homo sapiens
  misc_RNA (1)...(19): siRNA sense strand
caagcucuguucccuguac

SEQ ID NO: 1683395 - RNA, 19 nt, Homo sapiens
  misc_RNA (1)...(19): siRNA sense strand
gccuggagauagaggagaa

SEQ ID NO: 1683396 - RNA, 19 nt, Homo sapiens
  misc_RNA (1)...(19): siRNA sense strand
gaugaagaggggaaacuua

SEQ ID NO: 1683397 - RNA, 19 nt, Homo sapiens
  misc_RNA (1)...(19): siRNA sense strand
cagcugcccugugugacaa

SEQ ID NO: 1683398 - RNA, 19 nt, Homo sapiens
  misc_RNA (1)...(19): siRNA sense strand
cuggaggccucgagggaaa

SEQ ID NO: 1683399 - RNA, 19 nt, Homo sapiens
  misc_RNA (1)...(19): siRNA sense strand
caucuuccaggacaaggua

SEQ ID NO: 1683400 - RNA, 19 nt, Homo sapiens
  misc_RNA (1)...(19): siRNA sense strand
uacgagaacgacugcauuu

SEQ ID NO: 1683401 - RNA, 19 nt, Homo sapiens
  misc_RNA (1)...(19): siRNA sense strand
uaaacucugacaugcacua

SEQ ID NO: 1683402 - RNA, 19 nt, Homo sapiens
  misc_RNA (1)...(19): siRNA sense strand
gcagcugcccugugugaca

SEQ ID NO: 1683403 - RNA, 19 nt, Homo sapiens
  misc_RNA (1)...(19): siRNA sense strand
gggcgaauacgacguguac

SEQ ID NO: 1683404 - RNA, 19 nt, Homo sapiens
  misc_RNA (1)...(19): siRNA sense strand
cgaaggauacaaccugaag

SEQ ID NO: 1683405 - RNA, 19 nt, Homo sapiens
  misc_RNA (1)...(19): siRNA sense strand
aguaaccgcucauucuucu

SEQ ID NO: 1683406 - RNA, 19 nt, Homo sapiens
  misc_RNA (1)...(19): siRNA sense strand
gagauagaggagaagauca

SEQ ID NO: 1683407 - RNA, 19 nt, Homo sapiens
  misc_RNA (1)...(19): siRNA sense strand
gcaccacugcaaccucuuc

SEQ ID NO: 1683408 - RNA, 19 nt, Homo sapiens
  misc_RNA (1)...(19): siRNA sense strand
ucaacuccaucuccgucaa

SEQ ID NO: 1683409 - RNA, 19 nt, Homo sapiens
  misc_RNA (1)...(19): siRNA sense strand
auaaaaggcccgaaggaua

SEQ ID NO: 1683410 - RNA, 19 nt, Homo sapiens
  misc_RNA (1)...(19): siRNA sense strand
acugcaaccucuucgucua

SEQ ID NO: 1683411 - RNA, 19 nt, Homo sapiens
  misc_RNA (1)...(19): siRNA sense strand
caacauggaggaccuuacg

SEQ ID NO: 1683412 - RNA, 19 nt, Homo sapiens
  misc_RNA (1)...(19): siRNA sense strand
ccacagccagggcgaauac

SEQ ID NO: 1683413 - RNA, 19 nt, Homo sapiens
  misc_RNA (1)...(19): siRNA sense strand
ucaacaucguggacaucaa

SEQ ID NO: 1683414 - RNA, 19 nt, Homo sapiens
  misc_RNA (1)...(19): siRNA sense strand
gcgaauacgacguguacag

SEQ ID NO: 1683415 - RNA, 19 nt, Homo sapiens
  misc_RNA (1)...(19): siRNA sense strand
agauagaggagaagaucaa

SEQ ID NO: 1683416 - RNA, 19 nt, Homo sapiens
  misc_RNA (1)...(19): siRNA sense strand
gagccacgagccggaguuu

SEQ ID NO: 1683417 - RNA, 19 nt, Homo sapiens
  misc_RNA (1)...(19): siRNA sense strand
ugaagcccauggaucugau

SEQ ID NO: 1683418 - RNA, 19 nt, Homo sapiens
  misc_RNA (1)...(19): siRNA sense strand
gagaacgacugcauuuucg

SEQ ID NO: 1683419 - RNA, 19 nt, Homo sapiens
  misc_RNA (1)...(19): siRNA sense strand
gcgggaaccagagaguaaa

SEQ ID NO: 1683420 - RNA, 19 nt, Homo sapiens
  misc_RNA (1)...(19): siRNA sense strand
gagccggaguuugacuauc

SEQ ID NO: 1683421 - RNA, 19 nt, Homo sapiens
  misc_RNA (1)...(19): siRNA sense strand
aacaacuucuuccgcaugu

SEQ ID NO: 1683422 - RNA, 19 nt, Homo sapiens
  misc_RNA (1)...(19): siRNA sense strand
gauacaaccugaaggauga

SEQ ID NO: 1683423 - RNA, 19 nt, Homo sapiens
  misc_RNA (1)...(19): siRNA sense strand
ccaacaaccuguacaucuu

SEQ ID NO: 1683424 - RNA, 19 nt, Homo sapiens
  misc_RNA (1)...(19): siRNA sense strand
gaucacagcaucugaguuc

SEQ ID NO: 1683425 - RNA, 19 nt, Homo sapiens
  misc_RNA (1)...(19): siRNA sense strand
ucaagagccuggagauaga

SEQ ID NO: 1683426 - RNA, 19 nt, Homo sapiens
  misc_RNA (1)...(19): siRNA sense strand
gaagauuaccgaacgagau

SEQ ID NO: 1683427 - RNA, 19 nt, Homo sapiens
  misc_RNA (1)...(19): siRNA sense strand
caagguaaacucugacaug

SEQ ID NO: 1683428 - RNA, 19 nt, Homo sapiens
  misc_RNA (1)...(19): siRNA sense strand
caagacccauagagaccua

SEQ ID NO: 1683429 - RNA, 19 nt, Homo sapiens
  misc_RNA (1)...(19): siRNA sense strand
gaggagaagaucaacaaga

SEQ ID NO: 1683430 - RNA, 19 nt, Homo sapiens
  misc_RNA (1)...(19): siRNA sense strand
aggagaagaucaacaagau

SEQ ID NO: 1683431 - RNA, 19 nt, Homo sapiens
  misc_RNA (1)...(19): siRNA sense strand
ggccacaccuaccacauca

SEQ ID NO: 1683432 - RNA, 19 nt, Homo sapiens
  misc_RNA (1)...(19): siRNA sense strand
gccacgagccggaguuuga

SEQ ID NO: 1683433 - RNA, 19 nt, Homo sapiens
  misc_RNA (1)...(19): siRNA sense strand
cggaggaucuuugccaaug

SEQ ID NO: 1683434 - RNA, 19 nt, Homo sapiens
  misc_RNA (1)...(19): siRNA sense strand
ggagauagaggagaagauc

SEQ ID NO: 1683435 - RNA, 19 nt, Homo sapiens
  misc_RNA (1)...(19): siRNA sense strand
gaggcaagacccauagaga

SEQ ID NO: 1683436 - RNA, 19 nt, Homo sapiens
  misc_RNA (1)...(19): siRNA sense strand
gcacccggcugagaacauc

SEQ ID NO: 1683437 - RNA, 19 nt, Homo sapiens
  misc_RNA (1)...(19): siRNA sense strand
guacgagaacgacugcauu

SEQ ID NO: 1683438 - RNA, 19 nt, Homo sapiens
  misc_RNA (1)...(19): siRNA sense strand
aagauuaccgaacgagaua

SEQ ID NO: 1683439 - RNA, 19 nt, Homo sapiens
  misc_RNA (1)...(19): siRNA sense strand
gcucauucuucucggaaau

SEQ ID NO: 1683440 - RNA, 19 nt, Homo sapiens
  misc_RNA (1)...(19): siRNA sense strand
caacaaccuguacaucuuc

SEQ ID NO: 1683441 - RNA, 19 nt, Homo sapiens
  misc_RNA (1)...(19): siRNA sense strand
ccuaccagguccaugacua

SEQ ID NO: 1683442 - RNA, 19 nt, Homo sapiens
  misc_RNA (1)...(19): siRNA sense strand
caucaucucuaccguugag

SEQ ID NO: 1683443 - RNA, 19 nt, Homo sapiens
  misc_RNA (1)...(19): siRNA sense strand
guggacagcuuggacuuca

SEQ ID NO: 1683444 - RNA, 19 nt, Homo sapiens
  misc_RNA (1)...(19): siRNA sense strand
uagaggagaagaucaacaa

SEQ ID NO: 1683445 - RNA, 19 nt, Homo sapiens
  misc_RNA (1)...(19): siRNA sense strand
caacuucuuccgcauguuc

SEQ ID NO: 1683446 - RNA, 19 nt, Homo sapiens
  misc_RNA (1)...(19): siRNA sense strand
gagcgacagcgucaucaug

SEQ ID NO: 1683447 - RNA, 19 nt, Homo sapiens
  misc_RNA (1)...(19): siRNA sense strand
ggaggaucuuugccaaugg

SEQ ID NO: 1683448 - RNA, 19 nt, Homo sapiens
  misc_RNA (1)...(19): siRNA sense strand
cgacaggagcuucaacauc

SEQ ID NO: 1683449 - RNA, 19 nt, Homo sapiens
  misc_RNA (1)...(19): siRNA sense strand
aggacaagguaaacucuga

SEQ ID NO: 1683450 - RNA, 19 nt, Homo sapiens
  misc_RNA (1)...(19): siRNA sense strand
ucuguucccuguacgagaa

SEQ ID NO: 1683451 - RNA, 19 nt, Homo sapiens
  misc_RNA (1)...(19): siRNA sense strand
ucugggaccugaacaugga

SEQ ID NO: 1683452 - RNA, 19 nt, Homo sapiens
  misc_RNA (1)...(19): siRNA sense strand
caacaucguggacaucaag

SEQ ID NO: 1683453 - RNA, 19 nt, Homo sapiens
  misc_RNA (1)...(19): siRNA sense strand
gauuaccgaacgagauaaa

SEQ ID NO: 1683454 - RNA, 19 nt, Homo sapiens
  misc_RNA (1)...(19): siRNA sense strand
ccaguaaccgcucauucuu

SEQ ID NO: 1683455 - RNA, 19 nt, Homo sapiens
  misc_RNA (1)...(19): siRNA sense strand
ccaucuccgucaacaguga

SEQ ID NO: 1683456 - RNA, 19 nt, Homo sapiens
  misc_RNA (1)...(19): siRNA sense strand
caagcucuguucccuguac

SEQ ID NO: 1683457 - RNA, 19 nt, Homo sapiens
  misc_RNA (1)...(19): siRNA sense strand
gccuggagauagaggagaa

SEQ ID NO: 1683458 - RNA, 19 nt, Homo sapiens
  misc_RNA (1)...(19): siRNA sense strand
gaugaagaggggaaacuua

SEQ ID NO: 1683459 - RNA, 19 nt, Homo sapiens
  misc_RNA (1)...(19): siRNA sense strand
cagcugcccugugugacaa

SEQ ID NO: 1683460 - RNA, 19 nt, Homo sapiens
  misc_RNA (1)...(19): siRNA sense strand
cuggaggccucgagggaaa

SEQ ID NO: 1683461 - RNA, 19 nt, Homo sapiens
  misc_RNA (1)...(19): siRNA sense strand
caucuuccaggacaaggua

SEQ ID NO: 1683462 - RNA, 19 nt, Homo sapiens
  misc_RNA (1)...(19): siRNA sense strand
uacgagaacgacugcauuu

SEQ ID NO: 1683463 - RNA, 19 nt, Homo sapiens
  misc_RNA (1)...(19): siRNA sense strand
uaaacucugacaugcacua

SEQ ID NO: 1683464 - RNA, 19 nt, Homo sapiens
  misc_RNA (1)...(19): siRNA sense strand
gcagcugcccugugugaca

SEQ ID NO: 1683465 - RNA, 19 nt, Homo sapiens
  misc_RNA (1)...(19): siRNA sense strand
gggcgaauacgacguguac

SEQ ID NO: 1683466 - RNA, 19 nt, Homo sapiens
  misc_RNA (1)...(19): siRNA sense strand
cgaaggauacaaccugaag

SEQ ID NO: 1683467 - RNA, 19 nt, Homo sapiens
  misc_RNA (1)...(19): siRNA sense strand
aguaaccgcucauucuucu

SEQ ID NO: 1683468 - RNA, 19 nt, Homo sapiens
  misc_RNA (1)...(19): siRNA sense strand
gagauagaggagaagauca

SEQ ID NO: 1683469 - RNA, 19 nt, Homo sapiens
  misc_RNA (1)...(19): siRNA sense strand
gcaccacugcaaccucuuc

SEQ ID NO: 1683470 - RNA, 19 nt, Homo sapiens
  misc_RNA (1)...(19): siRNA sense strand
ucaacuccaucuccgucaa

SEQ ID NO: 1683471 - RNA, 19 nt, Homo sapiens
  misc_RNA (1)...(19): siRNA sense strand
auaaaaggcccgaaggaua

SEQ ID NO: 1683472 - RNA, 19 nt, Homo sapiens
  misc_RNA (1)...(19): siRNA sense strand
acugcaaccucuucgucua

SEQ ID NO: 1683473 - RNA, 19 nt, Homo sapiens
  misc_RNA (1)...(19): siRNA sense strand
caacauggaggaccuuacg

SEQ ID NO: 1683474 - RNA, 19 nt, Homo sapiens
  misc_RNA (1)...(19): siRNA sense strand
ccacagccagggcgaauac

SEQ ID NO: 1683475 - RNA, 19 nt, Homo sapiens
  misc_RNA (1)...(19): siRNA sense strand
ucaacaucguggacaucaa

SEQ ID NO: 1683476 - RNA, 19 nt, Homo sapiens
  misc_RNA (1)...(19): siRNA sense strand
gcgaauacgacguguacag

SEQ ID NO: 1683477 - RNA, 19 nt, Homo sapiens
  misc_RNA (1)...(19): siRNA sense strand
agauagaggagaagaucaa

SEQ ID NO: 1683478 - RNA, 19 nt, Homo sapiens
  misc_RNA (1)...(19): siRNA sense strand
gagccacgagccggaguuu

SEQ ID NO: 1683479 - RNA, 19 nt, Homo sapiens
  misc_RNA (1)...(19): siRNA sense strand
ugaagcccauggaucugau

SEQ ID NO: 1683480 - RNA, 19 nt, Homo sapiens
  misc_RNA (1)...(19): siRNA sense strand
gagaacgacugcauuuucg

SEQ ID NO: 1683481 - RNA, 19 nt, Homo sapiens
  misc_RNA (1)...(19): siRNA sense strand
gcgggaaccagagaguaaa

SEQ ID NO: 1683482 - RNA, 19 nt, Homo sapiens
  misc_RNA (1)...(19): siRNA sense strand
gagccggaguuugacuauc

SEQ ID NO: 1683483 - RNA, 19 nt, Homo sapiens
  misc_RNA (1)...(19): siRNA sense strand
aacaacuucuuccgcaugu

SEQ ID NO: 1683484 - RNA, 19 nt, Homo sapiens
  misc_RNA (1)...(19): siRNA sense strand
gauacaaccugaaggauga

SEQ ID NO: 1683485 - RNA, 19 nt, Homo sapiens
  misc_RNA (1)...(19): siRNA sense strand
ccaacaaccuguacaucuu

SEQ ID NO: 1683486 - RNA, 19 nt, Homo sapiens
  misc_RNA (1)...(19): siRNA sense strand
gaucacagcaucugaguuc

SEQ ID NO: 1683487 - RNA, 19 nt, Homo sapiens
  misc_RNA (1)...(19): siRNA sense strand
ucaagagccuggagauaga

SEQ ID NO: 1683488 - RNA, 19 nt, Homo sapiens
  misc_RNA (1)...(19): siRNA sense strand
gaagauuaccgaacgagau

SEQ ID NO: 1683489 - RNA, 19 nt, Homo sapiens
  misc_RNA (1)...(19): siRNA sense strand
caagguaaacucugacaug

SEQ ID NO: 1683490 - RNA, 19 nt, Homo sapiens
  misc_RNA (1)...(19): siRNA sense strand
caagacccauagagaccua

SEQ ID NO: 1683491 - RNA, 19 nt, Homo sapiens
  misc_RNA (1)...(19): siRNA sense strand
gaggagaagaucaacaaga

SEQ ID NO: 1683492 - RNA, 19 nt, Homo sapiens
  misc_RNA (1)...(19): siRNA sense strand
aggagaagaucaacaagau

SEQ ID NO: 1683493 - RNA, 19 nt, Homo sapiens
  misc_RNA (1)...(19): siRNA sense strand
ggccacaccuaccacauca

SEQ ID NO: 1683494 - RNA, 19 nt, Homo sapiens
  misc_RNA (1)...(19): siRNA sense strand
gccacgagccggaguuuga

SEQ ID NO: 1683495 - RNA, 19 nt, Homo sapiens
  misc_RNA (1)...(19): siRNA sense strand
cggaggaucuuugccaaug

SEQ ID NO: 1683496 - RNA, 19 nt, Homo sapiens
  misc_RNA (1)...(19): siRNA sense strand
ggagauagaggagaagauc

SEQ ID NO: 1683497 - RNA, 19 nt, Homo sapiens
  misc_RNA (1)...(19): siRNA sense strand
gaggcaagacccauagaga

SEQ ID NO: 1683498 - RNA, 19 nt, Homo sapiens
  misc_RNA (1)...(19): siRNA sense strand
gcacccggcugagaacauc

SEQ ID NO: 1683499 - RNA, 19 nt, Homo sapiens
  misc_RNA (1)...(19): siRNA sense strand
guacgagaacgacugcauu

SEQ ID NO: 1683500 - RNA, 19 nt, Homo sapiens
  misc_RNA (1)...(19): siRNA sense strand
aagauuaccgaacgagaua

SEQ ID NO: 1683501 - RNA, 19 nt, Homo sapiens
  misc_RNA (1)...(19): siRNA sense strand
gcucauucuucucggaaau

SEQ ID NO: 1683502 - RNA, 19 nt, Homo sapiens
  misc_RNA (1)...(19): siRNA sense strand
caacaaccuguacaucuuc

SEQ ID NO: 1683503 - RNA, 19 nt, Homo sapiens
  misc_RNA (1)...(19): siRNA sense strand
ccuaccagguccaugacua

SEQ ID NO: 1683504 - RNA, 19 nt, Homo sapiens
  misc_RNA (1)...(19): siRNA sense strand
caucaucucuaccguugag

SEQ ID NO: 1683505 - RNA, 19 nt, Homo sapiens
  misc_RNA (1)...(19): siRNA sense strand
guggacagcuuggacuuca

SEQ ID NO: 1683506 - RNA, 19 nt, Homo sapiens
  misc_RNA (1)...(19): siRNA sense strand
uagaggagaagaucaacaa

SEQ ID NO: 1683507 - RNA, 19 nt, Homo sapiens
  misc_RNA (1)...(19): siRNA sense strand
caacuucuuccgcauguuc

SEQ ID NO: 1683508 - RNA, 19 nt, Homo sapiens
  misc_RNA (1)...(19): siRNA sense strand
gagcgacagcgucaucaug

SEQ ID NO: 1683509 - RNA, 19 nt, Homo sapiens
  misc_RNA (1)...(19): siRNA sense strand
ggaggaucuuugccaaugg

SEQ ID NO: 1683510 - RNA, 19 nt, Homo sapiens
  misc_RNA (1)...(19): siRNA sense strand
cgacaggagcuucaacauc

SEQ ID NO: 1683511 - RNA, 19 nt, Homo sapiens
  misc_RNA (1)...(19): siRNA sense strand
aggacaagguaaacucuga

SEQ ID NO: 1683512 - RNA, 19 nt, Homo sapiens
  misc_RNA (1)...(19): siRNA sense strand
ucuguucccuguacgagaa

SEQ ID NO: 1683513 - RNA, 19 nt, Homo sapiens
  misc_RNA (1)...(19): siRNA sense strand
ucugggaccugaacaugga

SEQ ID NO: 1683514 - RNA, 19 nt, Homo sapiens
  misc_RNA (1)...(19): siRNA sense strand
caacaucguggacaucaag

SEQ ID NO: 1683515 - RNA, 19 nt, Homo sapiens
  misc_RNA (1)...(19): siRNA sense strand
gauuaccgaacgagauaaa

SEQ ID NO: 1683516 - RNA, 19 nt, Homo sapiens
  misc_RNA (1)...(19): siRNA sense strand
ccaguaaccgcucauucuu

SEQ ID NO: 1683517 - RNA, 19 nt, Homo sapiens
  misc_RNA (1)...(19): siRNA sense strand
ccaucuccgucaacaguga

SEQ ID NO: 1683518 - RNA, 19 nt, Homo sapiens
  misc_RNA (1)...(19): siRNA sense strand
caagcucuguucccuguac

SEQ ID NO: 1683519 - RNA, 19 nt, Homo sapiens
  misc_RNA (1)...(19): siRNA sense strand
gccuggagauagaggagaa

SEQ ID NO: 1683520 - RNA, 19 nt, Homo sapiens
  misc_RNA (1)...(19): siRNA sense strand
gaugaagaggggaaacuua

SEQ ID NO: 1683521 - RNA, 19 nt, Homo sapiens
  misc_RNA (1)...(19): siRNA sense strand
cagcugcccugugugacaa

SEQ ID NO: 1683522 - RNA, 19 nt, Homo sapiens
  misc_RNA (1)...(19): siRNA sense strand
cuggaggccucgagggaaa

SEQ ID NO: 1683523 - RNA, 19 nt, Homo sapiens
  misc_RNA (1)...(19): siRNA sense strand
caucuuccaggacaaggua

SEQ ID NO: 1683524 - RNA, 19 nt, Homo sapiens
  misc_RNA (1)...(19): siRNA sense strand
uacgagaacgacugcauuu

SEQ ID NO: 1683525 - RNA, 19 nt, Homo sapiens
  misc_RNA (1)...(19): siRNA sense strand
uaaacucugacaugcacua

SEQ ID NO: 1683526 - RNA, 19 nt, Homo sapiens
  misc_RNA (1)...(19): siRNA sense strand
gcagcugcccugugugaca

SEQ ID NO: 1683527 - RNA, 19 nt, Homo sapiens
  misc_RNA (1)...(19): siRNA sense strand
gggcgaauacgacguguac

SEQ ID NO: 1683528 - RNA, 19 nt, Homo sapiens
  misc_RNA (1)...(19): siRNA sense strand
cgaaggauacaaccugaag

SEQ ID NO: 1683529 - RNA, 19 nt, Homo sapiens
  misc_RNA (1)...(19): siRNA sense strand
aguaaccgcucauucuucu

SEQ ID NO: 1683530 - RNA, 19 nt, Homo sapiens
  misc_RNA (1)...(19): siRNA sense strand
gagauagaggagaagauca

SEQ ID NO: 1683531 - RNA, 19 nt, Homo sapiens
  misc_RNA (1)...(19): siRNA sense strand
gcaccacugcaaccucuuc

SEQ ID NO: 1683532 - RNA, 19 nt, Homo sapiens
  misc_RNA (1)...(19): siRNA sense strand
ucaacuccaucuccgucaa

SEQ ID NO: 1683533 - RNA, 19 nt, Homo sapiens
  misc_RNA (1)...(19): siRNA sense strand
auaaaaggcccgaaggaua

SEQ ID NO: 1683534 - RNA, 19 nt, Homo sapiens
  misc_RNA (1)...(19): siRNA sense strand
acugcaaccucuucgucua

SEQ ID NO: 1683535 - RNA, 19 nt, Homo sapiens
  misc_RNA (1)...(19): siRNA sense strand
caacauggaggaccuuacg

SEQ ID NO: 1683536 - RNA, 19 nt, Homo sapiens
  misc_RNA (1)...(19): siRNA sense strand
ccacagccagggcgaauac

SEQ ID NO: 1683537 - RNA, 19 nt, Homo sapiens
  misc_RNA (1)...(19): siRNA sense strand
ucaacaucguggacaucaa

SEQ ID NO: 1683538 - RNA, 19 nt, Homo sapiens
  misc_RNA (1)...(19): siRNA sense strand
gcgaauacgacguguacag

SEQ ID NO: 1683539 - RNA, 19 nt, Homo sapiens
  misc_RNA (1)...(19): siRNA sense strand
agauagaggagaagaucaa

SEQ ID NO: 1683540 - RNA, 19 nt, Homo sapiens
  misc_RNA (1)...(19): siRNA sense strand
gagccacgagccggaguuu

SEQ ID NO: 1683541 - RNA, 19 nt, Homo sapiens
  misc_RNA (1)...(19): siRNA sense strand
ugaagcccauggaucugau

SEQ ID NO: 1683542 - RNA, 19 nt, Homo sapiens
  misc_RNA (1)...(19): siRNA sense strand
gagaacgacugcauuuucg

SEQ ID NO: 1683543 - RNA, 19 nt, Homo sapiens
  misc_RNA (1)...(19): siRNA sense strand
gcgggaaccagagaguaaa

SEQ ID NO: 1683544 - RNA, 19 nt, Homo sapiens
  misc_RNA (1)...(19): siRNA sense strand
gagccggaguuugacuauc

SEQ ID NO: 1683545 - RNA, 19 nt, Homo sapiens
  misc_RNA (1)...(19): siRNA sense strand
aacaacuucuuccgcaugu

SEQ ID NO: 1683546 - RNA, 19 nt, Homo sapiens
  misc_RNA (1)...(19): siRNA sense strand
gauacaaccugaaggauga

SEQ ID NO: 1683547 - RNA, 19 nt, Homo sapiens
  misc_RNA (1)...(19): siRNA sense strand
ccaacaaccuguacaucuu

SEQ ID NO: 1683548 - RNA, 19 nt, Homo sapiens
  misc_RNA (1)...(19): siRNA sense strand
gaucacagcaucugaguuc

SEQ ID NO: 1683549 - RNA, 19 nt, Homo sapiens
  misc_RNA (1)...(19): siRNA sense strand
ucaagagccuggagauaga

SEQ ID NO: 1683550 - RNA, 19 nt, Homo sapiens
  misc_RNA (1)...(19): siRNA sense strand
gaagauuaccgaacgagau

SEQ ID NO: 1683551 - RNA, 19 nt, Homo sapiens
  misc_RNA (1)...(19): siRNA sense strand
caagguaaacucugacaug

SEQ ID NO: 1683552 - RNA, 19 nt, Homo sapiens
  misc_RNA (1)...(19): siRNA sense strand
caagacccauagagaccua

SEQ ID NO: 1683553 - RNA, 19 nt, Homo sapiens
  misc_RNA (1)...(19): siRNA sense strand
gaggagaagaucaacaaga

SEQ ID NO: 1683554 - RNA, 19 nt, Homo sapiens
  misc_RNA (1)...(19): siRNA sense strand
aggagaagaucaacaagau

SEQ ID NO: 1683555 - RNA, 19 nt, Homo sapiens
  misc_RNA (1)...(19): siRNA sense strand
ggccacaccuaccacauca

SEQ ID NO: 1683556 - RNA, 19 nt, Homo sapiens
  misc_RNA (1)...(19): siRNA sense strand
gccacgagccggaguuuga

SEQ ID NO: 1683557 - RNA, 19 nt, Homo sapiens
  misc_RNA (1)...(19): siRNA sense strand
cggaggaucuuugccaaug

SEQ ID NO: 1683558 - RNA, 19 nt, Homo sapiens
  misc_RNA (1)...(19): siRNA sense strand
ggagauagaggagaagauc

SEQ ID NO: 1683559 - RNA, 19 nt, Homo sapiens
  misc_RNA (1)...(19): siRNA sense strand
gaggcaagacccauagaga

SEQ ID NO: 1683560 - RNA, 19 nt, Homo sapiens
  misc_RNA (1)...(19): siRNA sense strand
gcacccggcugagaacauc

SEQ ID NO: 1683561 - RNA, 19 nt, Homo sapiens
  misc_RNA (1)...(19): siRNA sense strand
guacgagaacgacugcauu

SEQ ID NO: 1683562 - RNA, 19 nt, Homo sapiens
  misc_RNA (1)...(19): siRNA sense strand
aagauuaccgaacgagaua

SEQ ID NO: 1683563 - RNA, 19 nt, Homo sapiens
  misc_RNA (1)...(19): siRNA sense strand
gcucauucuucucggaaau

SEQ ID NO: 1683564 - RNA, 19 nt, Homo sapiens
  misc_RNA (1)...(19): siRNA sense strand
caacaaccuguacaucuuc

SEQ ID NO: 1683565 - RNA, 19 nt, Homo sapiens
  misc_RNA (1)...(19): siRNA sense strand
ccuaccagguccaugacua

SEQ ID NO: 1683566 - RNA, 19 nt, Homo sapiens
  misc_RNA (1)...(19): siRNA sense strand
caucaucucuaccguugag

SEQ ID NO: 1683567 - RNA, 19 nt, Homo sapiens
  misc_RNA (1)...(19): siRNA sense strand
guggacagcuuggacuuca

SEQ ID NO: 1683568 - RNA, 19 nt, Homo sapiens
  misc_RNA (1)...(19): siRNA sense strand
uagaggagaagaucaacaa

SEQ ID NO: 1683569 - RNA, 19 nt, Homo sapiens
  misc_RNA (1)...(19): siRNA sense strand
caacuucuuccgcauguuc

SEQ ID NO: 1683570 - RNA, 19 nt, Homo sapiens
  misc_RNA (1)...(19): siRNA sense strand
gagcgacagcgucaucaug

SEQ ID NO: 1683571 - RNA, 19 nt, Homo sapiens
  misc_RNA (1)...(19): siRNA sense strand
ggaggaucuuugccaaugg

SEQ ID NO: 1683572 - RNA, 19 nt, Homo sapiens
  misc_RNA (1)...(19): siRNA sense strand
cgacaggagcuucaacauc

SEQ ID NO: 1683573 - RNA, 19 nt, Homo sapiens
  misc_RNA (1)...(19): siRNA sense strand
aggacaagguaaacucuga

SEQ ID NO: 1683574 - RNA, 19 nt, Homo sapiens
  misc_RNA (1)...(19): siRNA sense strand
ucuguucccuguacgagaa

SEQ ID NO: 1683575 - RNA, 19 nt, Homo sapiens
  misc_RNA (1)...(19): siRNA sense strand
ucugggaccugaacaugga

SEQ ID NO: 1683576 - RNA, 19 nt, Homo sapiens
  misc_RNA (1)...(19): siRNA sense strand
caacaucguggacaucaag

SEQ ID NO: 1683577 - RNA, 19 nt, Homo sapiens
  misc_RNA (1)...(19): siRNA sense strand
gauuaccgaacgagauaaa

SEQ ID NO: 1683578 - RNA, 19 nt, Homo sapiens
  misc_RNA (1)...(19): siRNA sense strand
ccaguaaccgcucauucuu

SEQ ID NO: 1683579 - RNA, 19 nt, Homo sapiens
  misc_RNA (1)...(19): siRNA sense strand
ccaucuccgucaacaguga

SEQ ID NO: 1683580 - RNA, 19 nt, Homo sapiens
  misc_RNA (1)...(19): siRNA sense strand
caagcucuguucccuguac

SEQ ID NO: 1683581 - RNA, 19 nt, Homo sapiens
  misc_RNA (1)...(19): siRNA sense strand
gccuggagauagaggagaa

SEQ ID NO: 1683582 - RNA, 19 nt, Homo sapiens
  misc_RNA (1)...(19): siRNA sense strand
gaugaagaggggaaacuua

SEQ ID NO: 1683583 - RNA, 19 nt, Homo sapiens
  misc_RNA (1)...(19): siRNA sense strand
cagcugcccugugugacaa

SEQ ID NO: 1683584 - RNA, 19 nt, Homo sapiens
  misc_RNA (1)...(19): siRNA sense strand
cuggaggccucgagggaaa

SEQ ID NO: 1683585 - RNA, 19 nt, Homo sapiens
  misc_RNA (1)...(19): siRNA sense strand
caucuuccaggacaaggua

SEQ ID NO: 1683586 - RNA, 19 nt, Homo sapiens
  misc_RNA (1)...(19): siRNA sense strand
uacgagaacgacugcauuu

SEQ ID NO: 1683587 - RNA, 19 nt, Homo sapiens
  misc_RNA (1)...(19): siRNA sense strand
uaaacucugacaugcacua

SEQ ID NO: 1683588 - RNA, 19 nt, Homo sapiens
  misc_RNA (1)...(19): siRNA sense strand
gcagcugcccugugugaca

SEQ ID NO: 1683589 - RNA, 19 nt, Homo sapiens
  misc_RNA (1)...(19): siRNA sense strand
gggcgaauacgacguguac

SEQ ID NO: 1683590 - RNA, 19 nt, Homo sapiens
  misc_RNA (1)...(19): siRNA sense strand
cgaaggauacaaccugaag

SEQ ID NO: 1683591 - RNA, 19 nt, Homo sapiens
  misc_RNA (1)...(19): siRNA sense strand
aguaaccgcucauucuucu

SEQ ID NO: 1683592 - RNA, 19 nt, Homo sapiens
  misc_RNA (1)...(19): siRNA sense strand
gagauagaggagaagauca

SEQ ID NO: 1683593 - RNA, 19 nt, Homo sapiens
  misc_RNA (1)...(19): siRNA sense strand
gcaccacugcaaccucuuc

SEQ ID NO: 1683594 - RNA, 19 nt, Homo sapiens
  misc_RNA (1)...(19): siRNA sense strand
ucaacuccaucuccgucaa

SEQ ID NO: 1683595 - RNA, 19 nt, Homo sapiens
  misc_RNA (1)...(19): siRNA sense strand
auaaaaggcccgaaggaua

SEQ ID NO: 1683596 - RNA, 19 nt, Homo sapiens
  misc_RNA (1)...(19): siRNA sense strand
acugcaaccucuucgucua

SEQ ID NO: 1683597 - RNA, 19 nt, Homo sapiens
  misc_RNA (1)...(19): siRNA sense strand
caacauggaggaccuuacg

SEQ ID NO: 1683598 - RNA, 19 nt, Homo sapiens
  misc_RNA (1)...(19): siRNA sense strand
ccacagccagggcgaauac

SEQ ID NO: 1683599 - RNA, 19 nt, Homo sapiens
  misc_RNA (1)...(19): siRNA sense strand
ucaacaucguggacaucaa

SEQ ID NO: 1683600 - RNA, 19 nt, Homo sapiens
  misc_RNA (1)...(19): siRNA sense strand
gcgaauacgacguguacag

SEQ ID NO: 1683601 - RNA, 19 nt, Homo sapiens
  misc_RNA (1)...(19): siRNA sense strand
agauagaggagaagaucaa

SEQ ID NO: 1683602 - RNA, 19 nt, Homo sapiens
  misc_RNA (1)...(19): siRNA sense strand
gagccacgagccggaguuu

SEQ ID NO: 1683603 - RNA, 19 nt, Homo sapiens
  misc_RNA (1)...(19): siRNA sense strand
ugaagcccauggaucugau

SEQ ID NO: 1683604 - RNA, 19 nt, Homo sapiens
  misc_RNA (1)...(19): siRNA sense strand
gagaacgacugcauuuucg

SEQ ID NO: 1683605 - RNA, 19 nt, Homo sapiens
  misc_RNA (1)...(19): siRNA sense strand
gcgggaaccagagaguaaa

SEQ ID NO: 1683606 - RNA, 19 nt, Homo sapiens
  misc_RNA (1)...(19): siRNA sense strand
gagccggaguuugacuauc

SEQ ID NO: 1683607 - RNA, 19 nt, Homo sapiens
  misc_RNA (1)...(19): siRNA sense strand
aacaacuucuuccgcaugu

SEQ ID NO: 1683608 - RNA, 19 nt, Homo sapiens
  misc_RNA (1)...(19): siRNA sense strand
caugaaagcuuuagaguuu

SEQ ID NO: 1683609 - RNA, 19 nt, Homo sapiens
  misc_RNA (1)...(19): siRNA sense strand
uuacauagcucaaguguuu

SEQ ID NO: 1683610 - RNA, 19 nt, Homo sapiens
  misc_RNA (1)...(19): siRNA sense strand
gaacuuaacgucuuacaaa

SEQ ID NO: 1683611 - RNA, 19 nt, Homo sapiens
  misc_RNA (1)...(19): siRNA sense strand
gaaccuggcuauucauuug

SEQ ID NO: 1683612 - RNA, 19 nt, Homo sapiens
  misc_RNA (1)...(19): siRNA sense strand
gggagucggucuuucauua

SEQ ID NO: 1683613 - RNA, 19 nt, Homo sapiens
  misc_RNA (1)...(19): siRNA sense strand
uaaagaaccuggcuauuca

SEQ ID NO: 1683614 - RNA, 19 nt, Homo sapiens
  misc_RNA (1)...(19): siRNA sense strand
ggaaugggcucuguacuug

SEQ ID NO: 1683615 - RNA, 19 nt, Homo sapiens
  misc_RNA (1)...(19): siRNA sense strand
gaugggagaucucaacuga

SEQ ID NO: 1683616 - RNA, 19 nt, Homo sapiens
  misc_RNA (1)...(19): siRNA sense strand
caaauagccugcuuagaga

SEQ ID NO: 1683617 - RNA, 19 nt, Homo sapiens
  misc_RNA (1)...(19): siRNA sense strand
gaaaggaaauugaagaacu

SEQ ID NO: 1683618 - RNA, 19 nt, Homo sapiens
  misc_RNA (1)...(19): siRNA sense strand
cagaucagcucuaugaauu

SEQ ID NO: 1683619 - RNA, 19 nt, Homo sapiens
  misc_RNA (1)...(19): siRNA sense strand
gggaagccauccuguuaua

SEQ ID NO: 1683620 - RNA, 19 nt, Homo sapiens
  misc_RNA (1)...(19): siRNA sense strand
ugagaauccuggugaaaua

SEQ ID NO: 1683621 - RNA, 19 nt, Homo sapiens
  misc_RNA (1)...(19): siRNA sense strand
ccacugaaauuccauguga

SEQ ID NO: 1683622 - RNA, 19 nt, Homo sapiens
  misc_RNA (1)...(19): siRNA sense strand
gaucucaacugaacaggaa

SEQ ID NO: 1683623 - RNA, 19 nt, Homo sapiens
  misc_RNA (1)...(19): siRNA sense strand
ggaugaagcucuggagaaa

SEQ ID NO: 1683624 - RNA, 19 nt, Homo sapiens
  misc_RNA (1)...(19): siRNA sense strand
gaagaagacccauauacuu

SEQ ID NO: 1683625 - RNA, 19 nt, Homo sapiens
  misc_RNA (1)...(19): siRNA sense strand
cuaaauaucucucaaagca

SEQ ID NO: 1683626 - RNA, 19 nt, Homo sapiens
  misc_RNA (1)...(19): siRNA sense strand
ucaaagaacuuccaacucu

SEQ ID NO: 1683627 - RNA, 19 nt, Homo sapiens
  misc_RNA (1)...(19): siRNA sense strand
cuacgagacugcauuauug

SEQ ID NO: 1683628 - RNA, 19 nt, Homo sapiens
  misc_RNA (1)...(19): siRNA sense strand
ugaagaagaugcugaggaa

SEQ ID NO: 1683629 - RNA, 19 nt, Homo sapiens
  misc_RNA (1)...(19): siRNA sense strand
ggaaauaagugagagaaag

SEQ ID NO: 1683630 - RNA, 19 nt, Homo sapiens
  misc_RNA (1)...(19): siRNA sense strand
caacagaccuacgagcaaa

SEQ ID NO: 1683631 - RNA, 19 nt, Homo sapiens
  misc_RNA (1)...(19): siRNA sense strand
gagaguuugugccagaaua

SEQ ID NO: 1683632 - RNA, 19 nt, Homo sapiens
  misc_RNA (1)...(19): siRNA sense strand
uaaggaaacugcccacaau

SEQ ID NO: 1683633 - RNA, 19 nt, Homo sapiens
  misc_RNA (1)...(19): siRNA sense strand
gaauagcauugaagaacuu

SEQ ID NO: 1683634 - RNA, 19 nt, Homo sapiens
  misc_RNA (1)...(19): siRNA sense strand
gauagagaguccagccuuu

SEQ ID NO: 1683635 - RNA, 19 nt, Homo sapiens
  misc_RNA (1)...(19): siRNA sense strand
agaccuaacuccaaagaaa

SEQ ID NO: 1683636 - RNA, 19 nt, Homo sapiens
  misc_RNA (1)...(19): siRNA sense strand
ugaaaggcauggucacaaa

SEQ ID NO: 1683637 - RNA, 19 nt, Homo sapiens
  misc_RNA (1)...(19): siRNA sense strand
gagucggucuuucauuaua

SEQ ID NO: 1683638 - RNA, 19 nt, Homo sapiens
  misc_RNA (1)...(19): siRNA sense strand
ggccagcccuuuggaauaa

SEQ ID NO: 1683639 - RNA, 19 nt, Homo sapiens
  misc_RNA (1)...(19): siRNA sense strand
gaagacaaucugaugauga

SEQ ID NO: 1683640 - RNA, 19 nt, Homo sapiens
  misc_RNA (1)...(19): siRNA sense strand
gaagaacuaucagaagcuu

SEQ ID NO: 1683641 - RNA, 19 nt, Homo sapiens
  misc_RNA (1)...(19): siRNA sense strand
cagugaauaugacaugaua

SEQ ID NO: 1683642 - RNA, 19 nt, Homo sapiens
  misc_RNA (1)...(19): siRNA sense strand
ucacaaagaacucaagaaa

SEQ ID NO: 1683643 - RNA, 19 nt, Homo sapiens
  misc_RNA (1)...(19): siRNA sense strand
aagaaagucuggugcauga

SEQ ID NO: 1683644 - RNA, 19 nt, Homo sapiens
  misc_RNA (1)...(19): siRNA sense strand
caacuacgagacugcauua

SEQ ID NO: 1683645 - RNA, 19 nt, Homo sapiens
  misc_RNA (1)...(19): siRNA sense strand
gaaacuacaccuuacauag

SEQ ID NO: 1683646 - RNA, 19 nt, Homo sapiens
  misc_RNA (1)...(19): siRNA sense strand
ggaaacuacaccuuacaua

SEQ ID NO: 1683647 - RNA, 19 nt, Homo sapiens
  misc_RNA (1)...(19): siRNA sense strand
ggaaauugaagaacuauca

SEQ ID NO: 1683648 - RNA, 19 nt, Homo sapiens
  misc_RNA (1)...(19): siRNA sense strand
aauguacacuucagcaaua

SEQ ID NO: 1683649 - RNA, 19 nt, Homo sapiens
  misc_RNA (1)...(19): siRNA sense strand
gaaaguaaagaaugggaaa

SEQ ID NO: 1683650 - RNA, 19 nt, Homo sapiens
  misc_RNA (1)...(19): siRNA sense strand
gaaagucuggugcaugaaa

SEQ ID NO: 1683651 - RNA, 19 nt, Homo sapiens
  misc_RNA (1)...(19): siRNA sense strand
ucaaauagccugcuuagag

SEQ ID NO: 1683652 - RNA, 19 nt, Homo sapiens
  misc_RNA (1)...(19): siRNA sense strand
gaaacugcccacaaugaaa

SEQ ID NO: 1683653 - RNA, 19 nt, Homo sapiens
  misc_RNA (1)...(19): siRNA sense strand
gaaauuacgacaacuacga

SEQ ID NO: 1683654 - RNA, 19 nt, Homo sapiens
  misc_RNA (1)...(19): siRNA sense strand
guucagaucagcucuauga

SEQ ID NO: 1683655 - RNA, 19 nt, Homo sapiens
  misc_RNA (1)...(19): siRNA sense strand
ggagaaauuacgacaacua

SEQ ID NO: 1683656 - RNA, 19 nt, Homo sapiens
  misc_RNA (1)...(19): siRNA sense strand
gaucaggcauggagaccaa

SEQ ID NO: 1683657 - RNA, 19 nt, Homo sapiens
  misc_RNA (1)...(19): siRNA sense strand
caaagauucugaagacuac

SEQ ID NO: 1683658 - RNA, 19 nt, Homo sapiens
  misc_RNA (1)...(19): siRNA sense strand
gaacacggccagcccuuug

SEQ ID NO: 1683659 - RNA, 19 nt, Homo sapiens
  misc_RNA (1)...(19): siRNA sense strand
ccacaaguauaccuccaaa

SEQ ID NO: 1683660 - RNA, 19 nt, Homo sapiens
  misc_RNA (1)...(19): siRNA sense strand
ggaaacugcccacaaugaa

SEQ ID NO: 1683661 - RNA, 19 nt, Homo sapiens
  misc_RNA (1)...(19): siRNA sense strand
gauggaaucguuaaagcua

SEQ ID NO: 1683662 - RNA, 19 nt, Homo sapiens
  misc_RNA (1)...(19): siRNA sense strand
ggaggaagaagacccauau

SEQ ID NO: 1683663 - RNA, 19 nt, Homo sapiens
  misc_RNA (1)...(19): siRNA sense strand
ggagcaaccugggcaucua

SEQ ID NO: 1683664 - RNA, 19 nt, Homo sapiens
  misc_RNA (1)...(19): siRNA sense strand
gagaaaggaaauugaagaa

SEQ ID NO: 1683665 - RNA, 19 nt, Homo sapiens
  misc_RNA (1)...(19): siRNA sense strand
uaugaugacuuguaugugu

SEQ ID NO: 1683666 - RNA, 19 nt, Homo sapiens
  misc_RNA (1)...(19): siRNA sense strand
gcagugagaguucugaaga

SEQ ID NO: 1683667 - RNA, 19 nt, Homo sapiens
  misc_RNA (1)...(19): siRNA sense strand
cguuaaagcuacaaccaaa

SEQ ID NO: 1683668 - RNA, 19 nt, Homo sapiens
  misc_RNA (1)...(19): siRNA sense strand
aagaagacccauauacuuu

SEQ ID NO: 1683669 - RNA, 19 nt, Homo sapiens
  misc_RNA (1)...(19): siRNA sense strand
uaucagaagcuucaagaaa

SEQ ID NO: 1683670 - RNA, 19 nt, Homo sapiens
  misc_RNA (1)...(19): siRNA sense strand
agacagagcucggauagag

SEQ ID NO: 1683671 - RNA, 19 nt, Homo sapiens
  misc_RNA (1)...(19): siRNA sense strand
ggaagaagacccauauacu

SEQ ID NO: 1683672 - RNA, 19 nt, Homo sapiens
  misc_RNA (1)...(19): siRNA sense strand
ccaguaugaugacuuguau

SEQ ID NO: 1683673 - RNA, 19 nt, Homo sapiens
  misc_RNA (1)...(19): siRNA sense strand
gaaaaugucuauggaugaa

SEQ ID NO: 1683674 - RNA, 19 nt, Homo sapiens
  misc_RNA (1)...(19): siRNA sense strand
gaagcucuggagaaauuua

SEQ ID NO: 1683675 - RNA, 19 nt, Homo sapiens
  misc_RNA (1)...(19): siRNA sense strand
guaguuacuuugcuuugug

SEQ ID NO: 1683676 - RNA, 19 nt, Homo sapiens
  misc_RNA (1)...(19): siRNA sense strand
gaauuugguuucuguugca

SEQ ID NO: 1683677 - RNA, 19 nt, Homo sapiens
  misc_RNA (1)...(19): siRNA sense strand
caaauggaaagaagucaaa

SEQ ID NO: 1683678 - RNA, 19 nt, Homo sapiens
  misc_RNA (1)...(19): siRNA sense strand
ucaaagauucugaagacua

SEQ ID NO: 1683679 - RNA, 19 nt, Homo sapiens
  misc_RNA (1)...(19): siRNA sense strand
gaucagcucuaugaauuac

SEQ ID NO: 1683680 - RNA, 19 nt, Homo sapiens
  misc_RNA (1)...(19): siRNA sense strand
augaagcucuggagaaauu

SEQ ID NO: 1683681 - RNA, 19 nt, Homo sapiens
  misc_RNA (1)...(19): siRNA sense strand
ucagcucuaugaauuacua

SEQ ID NO: 1683682 - RNA, 19 nt, Homo sapiens
  misc_RNA (1)...(19): siRNA sense strand
aaaggaauuugguuucugu

SEQ ID NO: 1683683 - RNA, 19 nt, Homo sapiens
  misc_RNA (1)...(19): siRNA sense strand
gaaaaggccagaagaagaa

SEQ ID NO: 1683684 - RNA, 19 nt, Homo sapiens
  misc_RNA (1)...(19): siRNA sense strand
ugacuuguauguguucauu

SEQ ID NO: 1683685 - RNA, 19 nt, Homo sapiens
  misc_RNA (1)...(19): siRNA sense strand
gagcugaggcaaaugaaau

SEQ ID NO: 1683686 - RNA, 19 nt, Homo sapiens
  misc_RNA (1)...(19): siRNA sense strand
aagggaagccauccuguua

SEQ ID NO: 1683687 - RNA, 19 nt, Homo sapiens
  misc_RNA (1)...(19): siRNA sense strand
gaacuugaugguguccuua

SEQ ID NO: 1683688 - RNA, 19 nt, Homo sapiens
  misc_RNA (1)...(19): siRNA sense strand
gcaugaaagcuuuagaguu

SEQ ID NO: 1683689 - RNA, 19 nt, Homo sapiens
  misc_RNA (1)...(19): siRNA sense strand
ucaaacaugagauaccaua

SEQ ID NO: 1683690 - RNA, 19 nt, Homo sapiens
  misc_RNA (1)...(19): siRNA sense strand
uuauaucgcuuggagaauu

SEQ ID NO: 1683691 - RNA, 19 nt, Homo sapiens
  misc_RNA (1)...(19): siRNA sense strand
gcuauucauuugcuucaau

SEQ ID NO: 1683692 - RNA, 19 nt, Homo sapiens
  misc_RNA (1)...(19): siRNA sense strand
gaaauaagugagagaaagg

SEQ ID NO: 1683693 - RNA, 19 nt, Homo sapiens
  misc_RNA (1)...(19): siRNA sense strand
uauaucgcuuggagaauuu

SEQ ID NO: 1683694 - RNA, 19 nt, Homo sapiens
  misc_RNA (1)...(19): siRNA sense strand
aagaggaaacuacaccuua

SEQ ID NO: 1683695 - RNA, 19 nt, Homo sapiens
  misc_RNA (1)...(19): siRNA sense strand
ugaggcaaaugaaauggaa

SEQ ID NO: 1683696 - RNA, 19 nt, Homo sapiens
  misc_RNA (1)...(19): siRNA sense strand
gaagccauccuguuauauc

SEQ ID NO: 1683697 - RNA, 19 nt, Homo sapiens
  misc_RNA (1)...(19): siRNA sense strand
cuuaacgucuuacaaaugu

SEQ ID NO: 1683698 - RNA, 19 nt, Homo sapiens
  misc_RNA (1)...(19): siRNA sense strand
guccuuacauccauauuca

SEQ ID NO: 1683699 - RNA, 19 nt, Homo sapiens
  misc_RNA (1)...(19): siRNA sense strand
aaaguggccuggaaaugau

SEQ ID NO: 1683700 - RNA, 19 nt, Homo sapiens
  misc_RNA (1)...(19): siRNA sense strand
ugagauugaugacagugaa

SEQ ID NO: 1683701 - RNA, 19 nt, Homo sapiens
  misc_RNA (1)...(19): siRNA sense strand
aacaggagaugaacccaaa

SEQ ID NO: 1683702 - RNA, 19 nt, Homo sapiens
  misc_RNA (1)...(19): siRNA sense strand
ucacaagagccacucauga

SEQ ID NO: 1683703 - RNA, 19 nt, Homo sapiens
  misc_RNA (1)...(19): siRNA sense strand
gaacccagcauuucaucau

SEQ ID NO: 1683704 - RNA, 19 nt, Homo sapiens
  misc_RNA (1)...(19): siRNA sense strand
uuaaagaaccuggcuauuc

SEQ ID NO: 1683705 - RNA, 19 nt, Homo sapiens
  misc_RNA (1)...(19): siRNA sense strand
cuacugugauggaaucguu

SEQ ID NO: 1683706 - RNA, 19 nt, Homo sapiens
  misc_RNA (1)...(19): siRNA sense strand
guaaggaaacugcccacaa

SEQ ID NO: 1683707 - RNA, 19 nt, Homo sapiens
  misc_RNA (1)...(19): siRNA sense strand
caacagcaaaggcaaagga

SEQ ID NO: 1683708 - RNA, 19 nt, Homo sapiens
  misc_RNA (1)...(19): siRNA sense strand
guaggaagguggccaaguu

SEQ ID NO: 1683709 - RNA, 19 nt, Homo sapiens
  misc_RNA (1)...(19): siRNA sense strand
ugaaaguccugcaccauau

SEQ ID NO: 1683710 - RNA, 19 nt, Homo sapiens
  misc_RNA (1)...(19): siRNA sense strand
agaagcugcucacccaaua

SEQ ID NO: 1683711 - RNA, 19 nt, Homo sapiens
  misc_RNA (1)...(19): siRNA sense strand
gaaaccagcuaugugaaag

SEQ ID NO: 1683712 - RNA, 19 nt, Homo sapiens
  misc_RNA (1)...(19): siRNA sense strand
ccagggagccggucacaaa

SEQ ID NO: 1683713 - RNA, 19 nt, Homo sapiens
  misc_RNA (1)...(19): siRNA sense strand
gggaggagcugaguguguu

SEQ ID NO: 1683714 - RNA, 19 nt, Homo sapiens
  misc_RNA (1)...(19): siRNA sense strand
gugaaaguccugcaccaua

SEQ ID NO: 1683715 - RNA, 19 nt, Homo sapiens
  misc_RNA (1)...(19): siRNA sense strand
ccaagggcccucauugaaa

SEQ ID NO: 1683716 - RNA, 19 nt, Homo sapiens
  misc_RNA (1)...(19): siRNA sense strand
gcacugcaagccugaagaa

SEQ ID NO: 1683717 - RNA, 19 nt, Homo sapiens
  misc_RNA (1)...(19): siRNA sense strand
ggagugucgucggaaauug

SEQ ID NO: 1683718 - RNA, 19 nt, Homo sapiens
  misc_RNA (1)...(19): siRNA sense strand
caagggcccucauugaaac

SEQ ID NO: 1683719 - RNA, 19 nt, Homo sapiens
  misc_RNA (1)...(19): siRNA sense strand
ucccugaccuggagucuga

SEQ ID NO: 1683720 - RNA, 19 nt, Homo sapiens
  misc_RNA (1)...(19): siRNA sense strand
gaaaguccugcaccauaug

SEQ ID NO: 1683721 - RNA, 19 nt, Homo sapiens
  misc_RNA (1)...(19): siRNA sense strand
gauaaucauccuggccaua

SEQ ID NO: 1683722 - RNA, 19 nt, Homo sapiens
  misc_RNA (1)...(19): siRNA sense strand
ugaaaccagcuaugugaaa

SEQ ID NO: 1683723 - RNA, 19 nt, Homo sapiens
  misc_RNA (1)...(19): siRNA sense strand
gauccugcaugcuaugagu

SEQ ID NO: 1683724 - RNA, 19 nt, Homo sapiens
  misc_RNA (1)...(19): siRNA sense strand
ggucacaaaggcagaaaug

SEQ ID NO: 1683725 - RNA, 19 nt, Homo sapiens
  misc_RNA (1)...(19): siRNA sense strand
aagcagcacucaguaggaa

SEQ ID NO: 1683726 - RNA, 19 nt, Homo sapiens
  misc_RNA (1)...(19): siRNA sense strand
aaucagaucaugcccaaga

SEQ ID NO: 1683727 - RNA, 19 nt, Homo sapiens
  misc_RNA (1)...(19): siRNA sense strand
ggaggagcugaguguguua

SEQ ID NO: 1683728 - RNA, 19 nt, Homo sapiens
  misc_RNA (1)...(19): siRNA sense strand
ggacuccagcaaccaagaa

SEQ ID NO: 1683729 - RNA, 19 nt, Homo sapiens
  misc_RNA (1)...(19): siRNA sense strand
gguccaagggcccucauug

SEQ ID NO: 1683730 - RNA, 19 nt, Homo sapiens
  misc_RNA (1)...(19): siRNA sense strand
gggagugucgucggaaauu

SEQ ID NO: 1683731 - RNA, 19 nt, Homo sapiens
  misc_RNA (1)...(19): siRNA sense strand
gaagcugcucacccaauau

SEQ ID NO: 1683732 - RNA, 19 nt, Homo sapiens
  misc_RNA (1)...(19): siRNA sense strand
guccaagggcccucauuga

SEQ ID NO: 1683733 - RNA, 19 nt, Homo sapiens
  misc_RNA (1)...(19): siRNA sense strand
ccuacccacuccugcauga

SEQ ID NO: 1683734 - RNA, 19 nt, Homo sapiens
  misc_RNA (1)...(19): siRNA sense strand
auaaucauccuggccauaa

SEQ ID NO: 1683735 - RNA, 19 nt, Homo sapiens
  misc_RNA (1)...(19): siRNA sense strand
uaaucauccuggccauaau

SEQ ID NO: 1683736 - RNA, 19 nt, Homo sapiens
  misc_RNA (1)...(19): siRNA sense strand
ggccacguguacaucuuug

SEQ ID NO: 1683737 - RNA, 19 nt, Homo sapiens
  misc_RNA (1)...(19): siRNA sense strand
uccaagggcccucauugaa

SEQ ID NO: 1683738 - RNA, 19 nt, Homo sapiens
  misc_RNA (1)...(19): siRNA sense strand
ggagcugaguguguuagag

SEQ ID NO: 1683739 - RNA, 19 nt, Homo sapiens
  misc_RNA (1)...(19): siRNA sense strand
gcugcucacccaauauuuc

SEQ ID NO: 1683740 - RNA, 19 nt, Homo sapiens
  misc_RNA (1)...(19): siRNA sense strand
caagcagcacucaguagga

SEQ ID NO: 1683741 - RNA, 19 nt, Homo sapiens
  misc_RNA (1)...(19): siRNA sense strand
cugcaugagugggcuuuga

SEQ ID NO: 1683742 - RNA, 19 nt, Homo sapiens
  misc_RNA (1)...(19): siRNA sense strand
ucacaaaggcagaaaugcu

SEQ ID NO: 1683743 - RNA, 19 nt, Homo sapiens
  misc_RNA (1)...(19): siRNA sense strand
gcaugagugggcuuugaga

SEQ ID NO: 1683744 - RNA, 19 nt, Homo sapiens
  misc_RNA (1)...(19): siRNA sense strand
cagugauccugcaugcuau

SEQ ID NO: 1683745 - RNA, 19 nt, Homo sapiens
  misc_RNA (1)...(19): siRNA sense strand
aagcugcucacccaauauu

SEQ ID NO: 1683746 - RNA, 19 nt, Homo sapiens
  misc_RNA (1)...(19): siRNA sense strand
ccuugcagcuggucuuugg

SEQ ID NO: 1683747 - RNA, 19 nt, Homo sapiens
  misc_RNA (1)...(19): siRNA sense strand
ccucuucuacucuaguuga

SEQ ID NO: 1683748 - RNA, 19 nt, Homo sapiens
  misc_RNA (1)...(19): siRNA sense strand
guuccaagcagcacucagu

SEQ ID NO: 1683749 - RNA, 19 nt, Homo sapiens
  misc_RNA (1)...(19): siRNA sense strand
gcugccuccuccucuucua

SEQ ID NO: 1683750 - RNA, 19 nt, Homo sapiens
  misc_RNA (1)...(19): siRNA sense strand
auugaaaccagcuauguga

SEQ ID NO: 1683751 - RNA, 19 nt, Homo sapiens
  misc_RNA (1)...(19): siRNA sense strand
gggugacaaucagaucaug

SEQ ID NO: 1683752 - RNA, 19 nt, Homo sapiens
  misc_RNA (1)...(19): siRNA sense strand
ccuaugaggacuccagcaa

SEQ ID NO: 1683753 - RNA, 19 nt, Homo sapiens
  misc_RNA (1)...(19): siRNA sense strand
guaggaagguggccaaguu

SEQ ID NO: 1683754 - RNA, 19 nt, Homo sapiens
  misc_RNA (1)...(19): siRNA sense strand
ugaaaguccugcaccauau

SEQ ID NO: 1683755 - RNA, 19 nt, Homo sapiens
  misc_RNA (1)...(19): siRNA sense strand
agaagcugcucacccaaua

SEQ ID NO: 1683756 - RNA, 19 nt, Homo sapiens
  misc_RNA (1)...(19): siRNA sense strand
gaaaccagcuaugugaaag

SEQ ID NO: 1683757 - RNA, 19 nt, Homo sapiens
  misc_RNA (1)...(19): siRNA sense strand
ccagggagccggucacaaa

SEQ ID NO: 1683758 - RNA, 19 nt, Homo sapiens
  misc_RNA (1)...(19): siRNA sense strand
gggaggagcugaguguguu

SEQ ID NO: 1683759 - RNA, 19 nt, Homo sapiens
  misc_RNA (1)...(19): siRNA sense strand
gugaaaguccugcaccaua

SEQ ID NO: 1683760 - RNA, 19 nt, Homo sapiens
  misc_RNA (1)...(19): siRNA sense strand
ccaagggcccucauugaaa

SEQ ID NO: 1683761 - RNA, 19 nt, Homo sapiens
  misc_RNA (1)...(19): siRNA sense strand
gcacugcaagccugaagaa

SEQ ID NO: 1683762 - RNA, 19 nt, Homo sapiens
  misc_RNA (1)...(19): siRNA sense strand
ggagugucgucggaaauug

SEQ ID NO: 1683763 - RNA, 19 nt, Homo sapiens
  misc_RNA (1)...(19): siRNA sense strand
caagggcccucauugaaac

SEQ ID NO: 1683764 - RNA, 19 nt, Homo sapiens
  misc_RNA (1)...(19): siRNA sense strand
ucccugaccuggagucuga

SEQ ID NO: 1683765 - RNA, 19 nt, Homo sapiens
  misc_RNA (1)...(19): siRNA sense strand
gaaaguccugcaccauaug

SEQ ID NO: 1683766 - RNA, 19 nt, Homo sapiens
  misc_RNA (1)...(19): siRNA sense strand
gauaaucauccuggccaua

SEQ ID NO: 1683767 - RNA, 19 nt, Homo sapiens
  misc_RNA (1)...(19): siRNA sense strand
ugaaaccagcuaugugaaa

SEQ ID NO: 1683768 - RNA, 19 nt, Homo sapiens
  misc_RNA (1)...(19): siRNA sense strand
gauccugcaugcuaugagu

SEQ ID NO: 1683769 - RNA, 19 nt, Homo sapiens
  misc_RNA (1)...(19): siRNA sense strand
ggucacaaaggcagaaaug

SEQ ID NO: 1683770 - RNA, 19 nt, Homo sapiens
  misc_RNA (1)...(19): siRNA sense strand
aagcagcacucaguaggaa

SEQ ID NO: 1683771 - RNA, 19 nt, Homo sapiens
  misc_RNA (1)...(19): siRNA sense strand
aaucagaucaugcccaaga

SEQ ID NO: 1683772 - RNA, 19 nt, Homo sapiens
  misc_RNA (1)...(19): siRNA sense strand
ggaggagcugaguguguua

SEQ ID NO: 1683773 - RNA, 19 nt, Homo sapiens
  misc_RNA (1)...(19): siRNA sense strand
ggacuccagcaaccaagaa

SEQ ID NO: 1683774 - RNA, 19 nt, Homo sapiens
  misc_RNA (1)...(19): siRNA sense strand
gguccaagggcccucauug

SEQ ID NO: 1683775 - RNA, 19 nt, Homo sapiens
  misc_RNA (1)...(19): siRNA sense strand
gggagugucgucggaaauu

SEQ ID NO: 1683776 - RNA, 19 nt, Homo sapiens
  misc_RNA (1)...(19): siRNA sense strand
gaagcugcucacccaauau

SEQ ID NO: 1683777 - RNA, 19 nt, Homo sapiens
  misc_RNA (1)...(19): siRNA sense strand
guccaagggcccucauuga

SEQ ID NO: 1683778 - RNA, 19 nt, Homo sapiens
  misc_RNA (1)...(19): siRNA sense strand
ccuacccacuccugcauga

SEQ ID NO: 1683779 - RNA, 19 nt, Homo sapiens
  misc_RNA (1)...(19): siRNA sense strand
auaaucauccuggccauaa

SEQ ID NO: 1683780 - RNA, 19 nt, Homo sapiens
  misc_RNA (1)...(19): siRNA sense strand
uaaucauccuggccauaau

SEQ ID NO: 1683781 - RNA, 19 nt, Homo sapiens
  misc_RNA (1)...(19): siRNA sense strand
ggccacguguacaucuuug

SEQ ID NO: 1683782 - RNA, 19 nt, Homo sapiens
  misc_RNA (1)...(19): siRNA sense strand
uccaagggcccucauugaa

SEQ ID NO: 1683783 - RNA, 19 nt, Homo sapiens
  misc_RNA (1)...(19): siRNA sense strand
ggagcugaguguguuagag

SEQ ID NO: 1683784 - RNA, 19 nt, Homo sapiens
  misc_RNA (1)...(19): siRNA sense strand
gcugcucacccaauauuuc

SEQ ID NO: 1683785 - RNA, 19 nt, Homo sapiens
  misc_RNA (1)...(19): siRNA sense strand
caagcagcacucaguagga

SEQ ID NO: 1683786 - RNA, 19 nt, Homo sapiens
  misc_RNA (1)...(19): siRNA sense strand
cugcaugagugggcuuuga

SEQ ID NO: 1683787 - RNA, 19 nt, Homo sapiens
  misc_RNA (1)...(19): siRNA sense strand
ucacaaaggcagaaaugcu

SEQ ID NO: 1683788 - RNA, 19 nt, Homo sapiens
  misc_RNA (1)...(19): siRNA sense strand
gcaugagugggcuuugaga

SEQ ID NO: 1683789 - RNA, 19 nt, Homo sapiens
  misc_RNA (1)...(19): siRNA sense strand
cagugauccugcaugcuau

SEQ ID NO: 1683790 - RNA, 19 nt, Homo sapiens
  misc_RNA (1)...(19): siRNA sense strand
aagcugcucacccaauauu

SEQ ID NO: 1683791 - RNA, 19 nt, Homo sapiens
  misc_RNA (1)...(19): siRNA sense strand
ccuugcagcuggucuuugg

SEQ ID NO: 1683792 - RNA, 19 nt, Homo sapiens
  misc_RNA (1)...(19): siRNA sense strand
ccucuucuacucuaguuga

SEQ ID NO: 1683793 - RNA, 19 nt, Homo sapiens
  misc_RNA (1)...(19): siRNA sense strand
guuccaagcagcacucagu

SEQ ID NO: 1683794 - RNA, 19 nt, Homo sapiens
  misc_RNA (1)...(19): siRNA sense strand
gcugccuccuccucuucua

SEQ ID NO: 1683795 - RNA, 19 nt, Homo sapiens
  misc_RNA (1)...(19): siRNA sense strand
auugaaaccagcuauguga

SEQ ID NO: 1683796 - RNA, 19 nt, Homo sapiens
  misc_RNA (1)...(19): siRNA sense strand
gggugacaaucagaucaug

SEQ ID NO: 1683797 - RNA, 19 nt, Homo sapiens
  misc_RNA (1)...(19): siRNA sense strand
ccuaugaggacuccagcaa

SEQ ID NO: 1683798 - RNA, 19 nt, Homo sapiens
  misc_RNA (1)...(19): siRNA sense strand
guaggaagguggccaaguu

SEQ ID NO: 1683799 - RNA, 19 nt, Homo sapiens
  misc_RNA (1)...(19): siRNA sense strand
ugaaaguccugcaccauau

SEQ ID NO: 1683800 - RNA, 19 nt, Homo sapiens
  misc_RNA (1)...(19): siRNA sense strand
agaagcugcucacccaaua

SEQ ID NO: 1683801 - RNA, 19 nt, Homo sapiens
  misc_RNA (1)...(19): siRNA sense strand
gaaaccagcuaugugaaag

SEQ ID NO: 1683802 - RNA, 19 nt, Homo sapiens
  misc_RNA (1)...(19): siRNA sense strand
ccagggagccggucacaaa

SEQ ID NO: 1683803 - RNA, 19 nt, Homo sapiens
  misc_RNA (1)...(19): siRNA sense strand
gggaggagcugaguguguu

SEQ ID NO: 1683804 - RNA, 19 nt, Homo sapiens
  misc_RNA (1)...(19): siRNA sense strand
gugaaaguccugcaccaua

SEQ ID NO: 1683805 - RNA, 19 nt, Homo sapiens
  misc_RNA (1)...(19): siRNA sense strand
ccaagggcccucauugaaa

SEQ ID NO: 1683806 - RNA, 19 nt, Homo sapiens
  misc_RNA (1)...(19): siRNA sense strand
gcacugcaagccugaagaa

SEQ ID NO: 1683807 - RNA, 19 nt, Homo sapiens
  misc_RNA (1)...(19): siRNA sense strand
ggagugucgucggaaauug

SEQ ID NO: 1683808 - RNA, 19 nt, Homo sapiens
  misc_RNA (1)...(19): siRNA sense strand
caagggcccucauugaaac

SEQ ID NO: 1683809 - RNA, 19 nt, Homo sapiens
  misc_RNA (1)...(19): siRNA sense strand
ucccugaccuggagucuga

SEQ ID NO: 1683810 - RNA, 19 nt, Homo sapiens
  misc_RNA (1)...(19): siRNA sense strand
gaaaguccugcaccauaug

SEQ ID NO: 1683811 - RNA, 19 nt, Homo sapiens
  misc_RNA (1)...(19): siRNA sense strand
gauaaucauccuggccaua

SEQ ID NO: 1683812 - RNA, 19 nt, Homo sapiens
  misc_RNA (1)...(19): siRNA sense strand
ugaaaccagcuaugugaaa

SEQ ID NO: 1683813 - RNA, 19 nt, Homo sapiens
  misc_RNA (1)...(19): siRNA sense strand
gauccugcaugcuaugagu

SEQ ID NO: 1683814 - RNA, 19 nt, Homo sapiens
  misc_RNA (1)...(19): siRNA sense strand
ggucacaaaggcagaaaug

SEQ ID NO: 1683815 - RNA, 19 nt, Homo sapiens
  misc_RNA (1)...(19): siRNA sense strand
aagcagcacucaguaggaa

SEQ ID NO: 1683816 - RNA, 19 nt, Homo sapiens
  misc_RNA (1)...(19): siRNA sense strand
aaucagaucaugcccaaga

SEQ ID NO: 1683817 - RNA, 19 nt, Homo sapiens
  misc_RNA (1)...(19): siRNA sense strand
ggaggagcugaguguguua

SEQ ID NO: 1683818 - RNA, 19 nt, Homo sapiens
  misc_RNA (1)...(19): siRNA sense strand
ggacuccagcaaccaagaa

SEQ ID NO: 1683819 - RNA, 19 nt, Homo sapiens
  misc_RNA (1)...(19): siRNA sense strand
gguccaagggcccucauug

SEQ ID NO: 1683820 - RNA, 19 nt, Homo sapiens
  misc_RNA (1)...(19): siRNA sense strand
gggagugucgucggaaauu

SEQ ID NO: 1683821 - RNA, 19 nt, Homo sapiens
  misc_RNA (1)...(19): siRNA sense strand
gaagcugcucacccaauau

SEQ ID NO: 1683822 - RNA, 19 nt, Homo sapiens
  misc_RNA (1)...(19): siRNA sense strand
guccaagggcccucauuga

SEQ ID NO: 1683823 - RNA, 19 nt, Homo sapiens
  misc_RNA (1)...(19): siRNA sense strand
ccuacccacuccugcauga

SEQ ID NO: 1683824 - RNA, 19 nt, Homo sapiens
  misc_RNA (1)...(19): siRNA sense strand
auaaucauccuggccauaa

SEQ ID NO: 1683825 - RNA, 19 nt, Homo sapiens
  misc_RNA (1)...(19): siRNA sense strand
uaaucauccuggccauaau

SEQ ID NO: 1683826 - RNA, 19 nt, Homo sapiens
  misc_RNA (1)...(19): siRNA sense strand
ggccacguguacaucuuug

SEQ ID NO: 1683827 - RNA, 19 nt, Homo sapiens
  misc_RNA (1)...(19): siRNA sense strand
uccaagggcccucauugaa

SEQ ID NO: 1683828 - RNA, 19 nt, Homo sapiens
  misc_RNA (1)...(19): siRNA sense strand
ggagcugaguguguuagag

SEQ ID NO: 1683829 - RNA, 19 nt, Homo sapiens
  misc_RNA (1)...(19): siRNA sense strand
gcugcucacccaauauuuc

SEQ ID NO: 1683830 - RNA, 19 nt, Homo sapiens
  misc_RNA (1)...(19): siRNA sense strand
caagcagcacucaguagga

SEQ ID NO: 1683831 - RNA, 19 nt, Homo sapiens
  misc_RNA (1)...(19): siRNA sense strand
cugcaugagugggcuuuga

SEQ ID NO: 1683832 - RNA, 19 nt, Homo sapiens
  misc_RNA (1)...(19): siRNA sense strand
ucacaaaggcagaaaugcu

SEQ ID NO: 1683833 - RNA, 19 nt, Homo sapiens
  misc_RNA (1)...(19): siRNA sense strand
gcaugagugggcuuugaga

SEQ ID NO: 1683834 - RNA, 19 nt, Homo sapiens
  misc_RNA (1)...(19): siRNA sense strand
cagugauccugcaugcuau

SEQ ID NO: 1683835 - RNA, 19 nt, Homo sapiens
  misc_RNA (1)...(19): siRNA sense strand
aagcugcucacccaauauu

SEQ ID NO: 1683836 - RNA, 19 nt, Homo sapiens
  misc_RNA (1)...(19): siRNA sense strand
ccuugcagcuggucuuugg

SEQ ID NO: 1683837 - RNA, 19 nt, Homo sapiens
  misc_RNA (1)...(19): siRNA sense strand
ccucuucuacucuaguuga

SEQ ID NO: 1683838 - RNA, 19 nt, Homo sapiens
  misc_RNA (1)...(19): siRNA sense strand
guuccaagcagcacucagu

SEQ ID NO: 1683839 - RNA, 19 nt, Homo sapiens
  misc_RNA (1)...(19): siRNA sense strand
gcugccuccuccucuucua

SEQ ID NO: 1683840 - RNA, 19 nt, Homo sapiens
  misc_RNA (1)...(19): siRNA sense strand
auugaaaccagcuauguga

SEQ ID NO: 1683841 - RNA, 19 nt, Homo sapiens
  misc_RNA (1)...(19): siRNA sense strand
gggugacaaucagaucaug

SEQ ID NO: 1683842 - RNA, 19 nt, Homo sapiens
  misc_RNA (1)...(19): siRNA sense strand
ccuaugaggacuccagcaa

SEQ ID NO: 1683843 - RNA, 19 nt, Homo sapiens
  misc_RNA (1)...(19): siRNA sense strand
guaggaagguggccaaguu

SEQ ID NO: 1683844 - RNA, 19 nt, Homo sapiens
  misc_RNA (1)...(19): siRNA sense strand
ugaaaguccugcaccauau

SEQ ID NO: 1683845 - RNA, 19 nt, Homo sapiens
  misc_RNA (1)...(19): siRNA sense strand
agaagcugcucacccaaua

SEQ ID NO: 1683846 - RNA, 19 nt, Homo sapiens
  misc_RNA (1)...(19): siRNA sense strand
gaaaccagcuaugugaaag

SEQ ID NO: 1683847 - RNA, 19 nt, Homo sapiens
  misc_RNA (1)...(19): siRNA sense strand
ccagggagccggucacaaa

SEQ ID NO: 1683848 - RNA, 19 nt, Homo sapiens
  misc_RNA (1)...(19): siRNA sense strand
gggaggagcugaguguguu

SEQ ID NO: 1683849 - RNA, 19 nt, Homo sapiens
  misc_RNA (1)...(19): siRNA sense strand
gugaaaguccugcaccaua

SEQ ID NO: 1683850 - RNA, 19 nt, Homo sapiens
  misc_RNA (1)...(19): siRNA sense strand
ccaagggcccucauugaaa

SEQ ID NO: 1683851 - RNA, 19 nt, Homo sapiens
  misc_RNA (1)...(19): siRNA sense strand
gcacugcaagccugaagaa

SEQ ID NO: 1683852 - RNA, 19 nt, Homo sapiens
  misc_RNA (1)...(19): siRNA sense strand
ggagugucgucggaaauug

SEQ ID NO: 1683853 - RNA, 19 nt, Homo sapiens
  misc_RNA (1)...(19): siRNA sense strand
caagggcccucauugaaac

SEQ ID NO: 1683854 - RNA, 19 nt, Homo sapiens
  misc_RNA (1)...(19): siRNA sense strand
ucccugaccuggagucuga

SEQ ID NO: 1683855 - RNA, 19 nt, Homo sapiens
  misc_RNA (1)...(19): siRNA sense strand
gaaaguccugcaccauaug

SEQ ID NO: 1683856 - RNA, 19 nt, Homo sapiens
  misc_RNA (1)...(19): siRNA sense strand
gauaaucauccuggccaua

SEQ ID NO: 1683857 - RNA, 19 nt, Homo sapiens
  misc_RNA (1)...(19): siRNA sense strand
ugaaaccagcuaugugaaa

SEQ ID NO: 1683858 - RNA, 19 nt, Homo sapiens
  misc_RNA (1)...(19): siRNA sense strand
gauccugcaugcuaugagu

SEQ ID NO: 1683859 - RNA, 19 nt, Homo sapiens
  misc_RNA (1)...(19): siRNA sense strand
ggucacaaaggcagaaaug

SEQ ID NO: 1683860 - RNA, 19 nt, Homo sapiens
  misc_RNA (1)...(19): siRNA sense strand
aagcagcacucaguaggaa

SEQ ID NO: 1683861 - RNA, 19 nt, Homo sapiens
  misc_RNA (1)...(19): siRNA sense strand
aaucagaucaugcccaaga

SEQ ID NO: 1683862 - RNA, 19 nt, Homo sapiens
  misc_RNA (1)...(19): siRNA sense strand
ggaggagcugaguguguua

SEQ ID NO: 1683863 - RNA, 19 nt, Homo sapiens
  misc_RNA (1)...(19): siRNA sense strand
ggacuccagcaaccaagaa

SEQ ID NO: 1683864 - RNA, 19 nt, Homo sapiens
  misc_RNA (1)...(19): siRNA sense strand
gguccaagggcccucauug

SEQ ID NO: 1683865 - RNA, 19 nt, Homo sapiens
  misc_RNA (1)...(19): siRNA sense strand
gggagugucgucggaaauu

SEQ ID NO: 1683866 - RNA, 19 nt, Homo sapiens
  misc_RNA (1)...(19): siRNA sense strand
gaagcugcucacccaauau

SEQ ID NO: 1683867 - RNA, 19 nt, Homo sapiens
  misc_RNA (1)...(19): siRNA sense strand
guccaagggcccucauuga

SEQ ID NO: 1683868 - RNA, 19 nt, Homo sapiens
  misc_RNA (1)...(19): siRNA sense strand
ccuacccacuccugcauga

SEQ ID NO: 1683869 - RNA, 19 nt, Homo sapiens
  misc_RNA (1)...(19): siRNA sense strand
auaaucauccuggccauaa

SEQ ID NO: 1683870 - RNA, 19 nt, Homo sapiens
  misc_RNA (1)...(19): siRNA sense strand
uaaucauccuggccauaau

SEQ ID NO: 1683871 - RNA, 19 nt, Homo sapiens
  misc_RNA (1)...(19): siRNA sense strand
ggccacguguacaucuuug

SEQ ID NO: 1683872 - RNA, 19 nt, Homo sapiens
  misc_RNA (1)...(19): siRNA sense strand
uccaagggcccucauugaa

SEQ ID NO: 1683873 - RNA, 19 nt, Homo sapiens
  misc_RNA (1)...(19): siRNA sense strand
ggagcugaguguguuagag

SEQ ID NO: 1683874 - RNA, 19 nt, Homo sapiens
  misc_RNA (1)...(19): siRNA sense strand
gcugcucacccaauauuuc

SEQ ID NO: 1683875 - RNA, 19 nt, Homo sapiens
  misc_RNA (1)...(19): siRNA sense strand
caagcagcacucaguagga

SEQ ID NO: 1683876 - RNA, 19 nt, Homo sapiens
  misc_RNA (1)...(19): siRNA sense strand
cugcaugagugggcuuuga

SEQ ID NO: 1683877 - RNA, 19 nt, Homo sapiens
  misc_RNA (1)...(19): siRNA sense strand
ucacaaaggcagaaaugcu

SEQ ID NO: 1683878 - RNA, 19 nt, Homo sapiens
  misc_RNA (1)...(19): siRNA sense strand
gcaugagugggcuuugaga

SEQ ID NO: 1683879 - RNA, 19 nt, Homo sapiens
  misc_RNA (1)...(19): siRNA sense strand
cagugauccugcaugcuau

SEQ ID NO: 1683880 - RNA, 19 nt, Homo sapiens
  misc_RNA (1)...(19): siRNA sense strand
aagcugcucacccaauauu

SEQ ID NO: 1683881 - RNA, 19 nt, Homo sapiens
  misc_RNA (1)...(19): siRNA sense strand
ccuugcagcuggucuuugg

SEQ ID NO: 1683882 - RNA, 19 nt, Homo sapiens
  misc_RNA (1)...(19): siRNA sense strand
ccucuucuacucuaguuga

SEQ ID NO: 1683883 - RNA, 19 nt, Homo sapiens
  misc_RNA (1)...(19): siRNA sense strand
guuccaagcagcacucagu

SEQ ID NO: 1683884 - RNA, 19 nt, Homo sapiens
  misc_RNA (1)...(19): siRNA sense strand
gcugccuccuccucuucua

SEQ ID NO: 1683885 - RNA, 19 nt, Homo sapiens
  misc_RNA (1)...(19): siRNA sense strand
auugaaaccagcuauguga

SEQ ID NO: 1683886 - RNA, 19 nt, Homo sapiens
  misc_RNA (1)...(19): siRNA sense strand
gggugacaaucagaucaug

SEQ ID NO: 1683887 - RNA, 19 nt, Homo sapiens
  misc_RNA (1)...(19): siRNA sense strand
ccuaugaggacuccagcaa

SEQ ID NO: 1683888 - RNA, 19 nt, Homo sapiens
  misc_RNA (1)...(19): siRNA sense strand
ggaauaccgucugguuaaa

SEQ ID NO: 1683889 - RNA, 19 nt, Homo sapiens
  misc_RNA (1)...(19): siRNA sense strand
gaacgugacccuccagugu

SEQ ID NO: 1683890 - RNA, 19 nt, Homo sapiens
  misc_RNA (1)...(19): siRNA sense strand
ggagauaccgcuguuacua

SEQ ID NO: 1683891 - RNA, 19 nt, Homo sapiens
  misc_RNA (1)...(19): siRNA sense strand
caacaaacccacccucuca

SEQ ID NO: 1683892 - RNA, 19 nt, Homo sapiens
  misc_RNA (1)...(19): siRNA sense strand
caggaauaccgucugguua

SEQ ID NO: 1683893 - RNA, 19 nt, Homo sapiens
  misc_RNA (1)...(19): siRNA sense strand
ccaagaacaaggccagauu

SEQ ID NO: 1683894 - RNA, 19 nt, Homo sapiens
  misc_RNA (1)...(19): siRNA sense strand
acagguggaugcucagaug

SEQ ID NO: 1683895 - RNA, 19 nt, Homo sapiens
  misc_RNA (1)...(19): siRNA sense strand
gguggaugcucagaugcua

SEQ ID NO: 1683896 - RNA, 19 nt, Homo sapiens
  misc_RNA (1)...(19): siRNA sense strand
aggaauaccgucugguuaa

SEQ ID NO: 1683897 - RNA, 19 nt, Homo sapiens
  misc_RNA (1)...(19): siRNA sense strand
caagaacaaggccagauuc

SEQ ID NO: 1683898 - RNA, 19 nt, Homo sapiens
  misc_RNA (1)...(19): siRNA sense strand
aauaccgucugguuaaaga

SEQ ID NO: 1683899 - RNA, 19 nt, Homo sapiens
  misc_RNA (1)...(19): siRNA sense strand
guggugaccucaggagaga

SEQ ID NO: 1683900 - RNA, 19 nt, Homo sapiens
  misc_RNA (1)...(19): siRNA sense strand
gagauucgacagguucauu

SEQ ID NO: 1683901 - RNA, 19 nt, Homo sapiens
  misc_RNA (1)...(19): siRNA sense strand
acagguucauucugacuga

SEQ ID NO: 1683902 - RNA, 19 nt, Homo sapiens
  misc_RNA (1)...(19): siRNA sense strand
gagauaccgcuguuacuac

SEQ ID NO: 1683903 - RNA, 19 nt, Homo sapiens
  misc_RNA (1)...(19): siRNA sense strand
aggcauauccugcagguau

SEQ ID NO: 1683904 - RNA, 19 nt, Homo sapiens
  misc_RNA (1)...(19): siRNA sense strand
uucgacagguucauucuga

SEQ ID NO: 1683905 - RNA, 19 nt, Homo sapiens
  misc_RNA (1)...(19): siRNA sense strand
uaaagagggaagcccagaa

SEQ ID NO: 1683906 - RNA, 19 nt, Homo sapiens
  misc_RNA (1)...(19): siRNA sense strand
cacuggagcccaagaacaa

SEQ ID NO: 1683907 - RNA, 19 nt, Homo sapiens
  misc_RNA (1)...(19): siRNA sense strand
gcccugcccucaugguucu

SEQ ID NO: 1683908 - RNA, 19 nt, Homo sapiens
  misc_RNA (1)...(19): siRNA sense strand
gaauaccgucugguuaaag

SEQ ID NO: 1683909 - RNA, 19 nt, Homo sapiens
  misc_RNA (1)...(19): siRNA sense strand
ccacuggagcccaagaaca

SEQ ID NO: 1683910 - RNA, 19 nt, Homo sapiens
  misc_RNA (1)...(19): siRNA sense strand
gagcccugcccucaugguu

SEQ ID NO: 1683911 - RNA, 19 nt, Homo sapiens
  misc_RNA (1)...(19): siRNA sense strand
agauaccgcuguuacuacu

SEQ ID NO: 1683912 - RNA, 19 nt, Homo sapiens
  misc_RNA (1)...(19): siRNA sense strand
ggaauaccgucugguuaaa

SEQ ID NO: 1683913 - RNA, 19 nt, Homo sapiens
  misc_RNA (1)...(19): siRNA sense strand
gaacgugacccuccagugu

SEQ ID NO: 1683914 - RNA, 19 nt, Homo sapiens
  misc_RNA (1)...(19): siRNA sense strand
ggagauaccgcuguuacua

SEQ ID NO: 1683915 - RNA, 19 nt, Homo sapiens
  misc_RNA (1)...(19): siRNA sense strand
caacaaacccacccucuca

SEQ ID NO: 1683916 - RNA, 19 nt, Homo sapiens
  misc_RNA (1)...(19): siRNA sense strand
caggaauaccgucugguua

SEQ ID NO: 1683917 - RNA, 19 nt, Homo sapiens
  misc_RNA (1)...(19): siRNA sense strand
ccaagaacaaggccagauu

SEQ ID NO: 1683918 - RNA, 19 nt, Homo sapiens
  misc_RNA (1)...(19): siRNA sense strand
acagguggaugcucagaug

SEQ ID NO: 1683919 - RNA, 19 nt, Homo sapiens
  misc_RNA (1)...(19): siRNA sense strand
gguggaugcucagaugcua

SEQ ID NO: 1683920 - RNA, 19 nt, Homo sapiens
  misc_RNA (1)...(19): siRNA sense strand
aggaauaccgucugguuaa

SEQ ID NO: 1683921 - RNA, 19 nt, Homo sapiens
  misc_RNA (1)...(19): siRNA sense strand
caagaacaaggccagauuc

SEQ ID NO: 1683922 - RNA, 19 nt, Homo sapiens
  misc_RNA (1)...(19): siRNA sense strand
aauaccgucugguuaaaga

SEQ ID NO: 1683923 - RNA, 19 nt, Homo sapiens
  misc_RNA (1)...(19): siRNA sense strand
guggugaccucaggagaga

SEQ ID NO: 1683924 - RNA, 19 nt, Homo sapiens
  misc_RNA (1)...(19): siRNA sense strand
gagauucgacagguucauu

SEQ ID NO: 1683925 - RNA, 19 nt, Homo sapiens
  misc_RNA (1)...(19): siRNA sense strand
acagguucauucugacuga

SEQ ID NO: 1683926 - RNA, 19 nt, Homo sapiens
  misc_RNA (1)...(19): siRNA sense strand
gagauaccgcuguuacuac

SEQ ID NO: 1683927 - RNA, 19 nt, Homo sapiens
  misc_RNA (1)...(19): siRNA sense strand
aggcauauccugcagguau

SEQ ID NO: 1683928 - RNA, 19 nt, Homo sapiens
  misc_RNA (1)...(19): siRNA sense strand
uucgacagguucauucuga

SEQ ID NO: 1683929 - RNA, 19 nt, Homo sapiens
  misc_RNA (1)...(19): siRNA sense strand
uaaagagggaagcccagaa

SEQ ID NO: 1683930 - RNA, 19 nt, Homo sapiens
  misc_RNA (1)...(19): siRNA sense strand
cacuggagcccaagaacaa

SEQ ID NO: 1683931 - RNA, 19 nt, Homo sapiens
  misc_RNA (1)...(19): siRNA sense strand
gcccugcccucaugguucu

SEQ ID NO: 1683932 - RNA, 19 nt, Homo sapiens
  misc_RNA (1)...(19): siRNA sense strand
gaauaccgucugguuaaag

SEQ ID NO: 1683933 - RNA, 19 nt, Homo sapiens
  misc_RNA (1)...(19): siRNA sense strand
ccacuggagcccaagaaca

SEQ ID NO: 1683934 - RNA, 19 nt, Homo sapiens
  misc_RNA (1)...(19): siRNA sense strand
gagcccugcccucaugguu

SEQ ID NO: 1683935 - RNA, 19 nt, Homo sapiens
  misc_RNA (1)...(19): siRNA sense strand
agauaccgcuguuacuacu

SEQ ID NO: 1683936 - RNA, 19 nt, Homo sapiens
  misc_RNA (1)...(19): siRNA sense strand
ggaauaccgucugguuaaa

SEQ ID NO: 1683937 - RNA, 19 nt, Homo sapiens
  misc_RNA (1)...(19): siRNA sense strand
gaacgugacccuccagugu

SEQ ID NO: 1683938 - RNA, 19 nt, Homo sapiens
  misc_RNA (1)...(19): siRNA sense strand
ggagauaccgcuguuacua

SEQ ID NO: 1683939 - RNA, 19 nt, Homo sapiens
  misc_RNA (1)...(19): siRNA sense strand
caacaaacccacccucuca

SEQ ID NO: 1683940 - RNA, 19 nt, Homo sapiens
  misc_RNA (1)...(19): siRNA sense strand
caggaauaccgucugguua

SEQ ID NO: 1683941 - RNA, 19 nt, Homo sapiens
  misc_RNA (1)...(19): siRNA sense strand
ccaagaacaaggccagauu

SEQ ID NO: 1683942 - RNA, 19 nt, Homo sapiens
  misc_RNA (1)...(19): siRNA sense strand
acagguggaugcucagaug

SEQ ID NO: 1683943 - RNA, 19 nt, Homo sapiens
  misc_RNA (1)...(19): siRNA sense strand
gguggaugcucagaugcua

SEQ ID NO: 1683944 - RNA, 19 nt, Homo sapiens
  misc_RNA (1)...(19): siRNA sense strand
aggaauaccgucugguuaa

SEQ ID NO: 1683945 - RNA, 19 nt, Homo sapiens
  misc_RNA (1)...(19): siRNA sense strand
caagaacaaggccagauuc

SEQ ID NO: 1683946 - RNA, 19 nt, Homo sapiens
  misc_RNA (1)...(19): siRNA sense strand
aauaccgucugguuaaaga

SEQ ID NO: 1683947 - RNA, 19 nt, Homo sapiens
  misc_RNA (1)...(19): siRNA sense strand
guggugaccucaggagaga

SEQ ID NO: 1683948 - RNA, 19 nt, Homo sapiens
  misc_RNA (1)...(19): siRNA sense strand
gagauucgacagguucauu

SEQ ID NO: 1683949 - RNA, 19 nt, Homo sapiens
  misc_RNA (1)...(19): siRNA sense strand
acagguucauucugacuga

SEQ ID NO: 1683950 - RNA, 19 nt, Homo sapiens
  misc_RNA (1)...(19): siRNA sense strand
gagauaccgcuguuacuac

SEQ ID NO: 1683951 - RNA, 19 nt, Homo sapiens
  misc_RNA (1)...(19): siRNA sense strand
aggcauauccugcagguau

SEQ ID NO: 1683952 - RNA, 19 nt, Homo sapiens
  misc_RNA (1)...(19): siRNA sense strand
uucgacagguucauucuga

SEQ ID NO: 1683953 - RNA, 19 nt, Homo sapiens
  misc_RNA (1)...(19): siRNA sense strand
uaaagagggaagcccagaa

SEQ ID NO: 1683954 - RNA, 19 nt, Homo sapiens
  misc_RNA (1)...(19): siRNA sense strand
cacuggagcccaagaacaa

SEQ ID NO: 1683955 - RNA, 19 nt, Homo sapiens
  misc_RNA (1)...(19): siRNA sense strand
gcccugcccucaugguucu

SEQ ID NO: 1683956 - RNA, 19 nt, Homo sapiens
  misc_RNA (1)...(19): siRNA sense strand
gaauaccgucugguuaaag

SEQ ID NO: 1683957 - RNA, 19 nt, Homo sapiens
  misc_RNA (1)...(19): siRNA sense strand
ccacuggagcccaagaaca

SEQ ID NO: 1683958 - RNA, 19 nt, Homo sapiens
  misc_RNA (1)...(19): siRNA sense strand
gagcccugcccucaugguu

SEQ ID NO: 1683959 - RNA, 19 nt, Homo sapiens
  misc_RNA (1)...(19): siRNA sense strand
agauaccgcuguuacuacu

SEQ ID NO: 1683960 - RNA, 19 nt, Homo sapiens
  misc_RNA (1)...(19): siRNA sense strand
ggaauaccgucugguuaaa

SEQ ID NO: 1683961 - RNA, 19 nt, Homo sapiens
  misc_RNA (1)...(19): siRNA sense strand
gaacgugacccuccagugu

SEQ ID NO: 1683962 - RNA, 19 nt, Homo sapiens
  misc_RNA (1)...(19): siRNA sense strand
ggagauaccgcuguuacua

SEQ ID NO: 1683963 - RNA, 19 nt, Homo sapiens
  misc_RNA (1)...(19): siRNA sense strand
caacaaacccacccucuca

SEQ ID NO: 1683964 - RNA, 19 nt, Homo sapiens
  misc_RNA (1)...(19): siRNA sense strand
caggaauaccgucugguua

SEQ ID NO: 1683965 - RNA, 19 nt, Homo sapiens
  misc_RNA (1)...(19): siRNA sense strand
ccaagaacaaggccagauu

SEQ ID NO: 1683966 - RNA, 19 nt, Homo sapiens
  misc_RNA (1)...(19): siRNA sense strand
acagguggaugcucagaug

SEQ ID NO: 1683967 - RNA, 19 nt, Homo sapiens
  misc_RNA (1)...(19): siRNA sense strand
gguggaugcucagaugcua

SEQ ID NO: 1683968 - RNA, 19 nt, Homo sapiens
  misc_RNA (1)...(19): siRNA sense strand
aggaauaccgucugguuaa

SEQ ID NO: 1683969 - RNA, 19 nt, Homo sapiens
  misc_RNA (1)...(19): siRNA sense strand
caagaacaaggccagauuc

SEQ ID NO: 1683970 - RNA, 19 nt, Homo sapiens
  misc_RNA (1)...(19): siRNA sense strand
aauaccgucugguuaaaga

SEQ ID NO: 1683971 - RNA, 19 nt, Homo sapiens
  misc_RNA (1)...(19): siRNA sense strand
guggugaccucaggagaga

SEQ ID NO: 1683972 - RNA, 19 nt, Homo sapiens
  misc_RNA (1)...(19): siRNA sense strand
gagauucgacagguucauu

SEQ ID NO: 1683973 - RNA, 19 nt, Homo sapiens
  misc_RNA (1)...(19): siRNA sense strand
acagguucauucugacuga

SEQ ID NO: 1683974 - RNA, 19 nt, Homo sapiens
  misc_RNA (1)...(19): siRNA sense strand
gagauaccgcuguuacuac

SEQ ID NO: 1683975 - RNA, 19 nt, Homo sapiens
  misc_RNA (1)...(19): siRNA sense strand
aggcauauccugcagguau

SEQ ID NO: 1683976 - RNA, 19 nt, Homo sapiens
  misc_RNA (1)...(19): siRNA sense strand
uucgacagguucauucuga

SEQ ID NO: 1683977 - RNA, 19 nt, Homo sapiens
  misc_RNA (1)...(19): siRNA sense strand
uaaagagggaagcccagaa

SEQ ID NO: 1683978 - RNA, 19 nt, Homo sapiens
  misc_RNA (1)...(19): siRNA sense strand
cacuggagcccaagaacaa

SEQ ID NO: 1683979 - RNA, 19 nt, Homo sapiens
  misc_RNA (1)...(19): siRNA sense strand
gcccugcccucaugguucu

SEQ ID NO: 1683980 - RNA, 19 nt, Homo sapiens
  misc_RNA (1)...(19): siRNA sense strand
gaauaccgucugguuaaag

SEQ ID NO: 1683981 - RNA, 19 nt, Homo sapiens
  misc_RNA (1)...(19): siRNA sense strand
ccacuggagcccaagaaca

SEQ ID NO: 1683982 - RNA, 19 nt, Homo sapiens
  misc_RNA (1)...(19): siRNA sense strand
gagcccugcccucaugguu

SEQ ID NO: 1683983 - RNA, 19 nt, Homo sapiens
  misc_RNA (1)...(19): siRNA sense strand
agauaccgcuguuacuacu

SEQ ID NO: 1683984 - RNA, 19 nt, Homo sapiens
  misc_RNA (1)...(19): siRNA sense strand
ggacaaaccaguucaaaua

SEQ ID NO: 1683985 - RNA, 19 nt, Homo sapiens
  misc_RNA (1)...(19): siRNA sense strand
ucacuugccugcaguauua

SEQ ID NO: 1683986 - RNA, 19 nt, Homo sapiens
  misc_RNA (1)...(19): siRNA sense strand
gaacagacaacaauaguaa

SEQ ID NO: 1683987 - RNA, 19 nt, Homo sapiens
  misc_RNA (1)...(19): siRNA sense strand
gaugauggcuugcuugaug

SEQ ID NO: 1683988 - RNA, 19 nt, Homo sapiens
  misc_RNA (1)...(19): siRNA sense strand
uaaauucacccaccuguua

SEQ ID NO: 1683989 - RNA, 19 nt, Homo sapiens
  misc_RNA (1)...(19): siRNA sense strand
gacaaucuguugauguuaa

SEQ ID NO: 1683990 - RNA, 19 nt, Homo sapiens
  misc_RNA (1)...(19): siRNA sense strand
aaucagauaucuccauuga

SEQ ID NO: 1683991 - RNA, 19 nt, Homo sapiens
  misc_RNA (1)...(19): siRNA sense strand
ucagauaucuccauugaag

SEQ ID NO: 1683992 - RNA, 19 nt, Homo sapiens
  misc_RNA (1)...(19): siRNA sense strand
gaaauuuacucgcucaacu

SEQ ID NO: 1683993 - RNA, 19 nt, Homo sapiens
  misc_RNA (1)...(19): siRNA sense strand
gcagaaagcaaguccuauu

SEQ ID NO: 1683994 - RNA, 19 nt, Homo sapiens
  misc_RNA (1)...(19): siRNA sense strand
gaagaugaaauaacugcua

SEQ ID NO: 1683995 - RNA, 19 nt, Homo sapiens
  misc_RNA (1)...(19): siRNA sense strand
gaagauaauguguucagaa

SEQ ID NO: 1683996 - RNA, 19 nt, Homo sapiens
  misc_RNA (1)...(19): siRNA sense strand
ucaaauacguccuuggaau

SEQ ID NO: 1683997 - RNA, 19 nt, Homo sapiens
  misc_RNA (1)...(19): siRNA sense strand
guaguagauuggccucaua

SEQ ID NO: 1683998 - RNA, 19 nt, Homo sapiens
  misc_RNA (1)...(19): siRNA sense strand
ccaccagccucuucugaaa

SEQ ID NO: 1683999 - RNA, 19 nt, Homo sapiens
  misc_RNA (1)...(19): siRNA sense strand
gauugaagauaauguguuc

SEQ ID NO: 1684000 - RNA, 19 nt, Homo sapiens
  misc_RNA (1)...(19): siRNA sense strand
ugaaucagauaucuccauu

SEQ ID NO: 1684001 - RNA, 19 nt, Homo sapiens
  misc_RNA (1)...(19): siRNA sense strand
caaauacguccuuggaauu

SEQ ID NO: 1684002 - RNA, 19 nt, Homo sapiens
  misc_RNA (1)...(19): siRNA sense strand
gaaaauucccuuaucgaua

SEQ ID NO: 1684003 - RNA, 19 nt, Homo sapiens
  misc_RNA (1)...(19): siRNA sense strand
gaauaugcacucuuuggaa

SEQ ID NO: 1684004 - RNA, 19 nt, Homo sapiens
  misc_RNA (1)...(19): siRNA sense strand
uagaauguaugacaguuug

SEQ ID NO: 1684005 - RNA, 19 nt, Homo sapiens
  misc_RNA (1)...(19): siRNA sense strand
gaacugacaaucuguugau

SEQ ID NO: 1684006 - RNA, 19 nt, Homo sapiens
  misc_RNA (1)...(19): siRNA sense strand
guuugaauaugcacucuuu

SEQ ID NO: 1684007 - RNA, 19 nt, Homo sapiens
  misc_RNA (1)...(19): siRNA sense strand
ugauacagauccugagcua

SEQ ID NO: 1684008 - RNA, 19 nt, Homo sapiens
  misc_RNA (1)...(19): siRNA sense strand
gcauggugauauugauaaa

SEQ ID NO: 1684009 - RNA, 19 nt, Homo sapiens
  misc_RNA (1)...(19): siRNA sense strand
aauaugcacucuuuggaaa

SEQ ID NO: 1684010 - RNA, 19 nt, Homo sapiens
  misc_RNA (1)...(19): siRNA sense strand
gaccagaugugugaugaau

SEQ ID NO: 1684011 - RNA, 19 nt, Homo sapiens
  misc_RNA (1)...(19): siRNA sense strand
uggcagagaucaucguaga

SEQ ID NO: 1684012 - RNA, 19 nt, Homo sapiens
  misc_RNA (1)...(19): siRNA sense strand
ggaucgaaguagaauguau

SEQ ID NO: 1684013 - RNA, 19 nt, Homo sapiens
  misc_RNA (1)...(19): siRNA sense strand
cgauugagcuauccacauc

SEQ ID NO: 1684014 - RNA, 19 nt, Homo sapiens
  misc_RNA (1)...(19): siRNA sense strand
ggacgugaguuccauaagc

SEQ ID NO: 1684015 - RNA, 19 nt, Homo sapiens
  misc_RNA (1)...(19): siRNA sense strand
gguaaagccauaugugcua

SEQ ID NO: 1684016 - RNA, 19 nt, Homo sapiens
  misc_RNA (1)...(19): siRNA sense strand
gcgaguugcuuucuccaau

SEQ ID NO: 1684017 - RNA, 19 nt, Homo sapiens
  misc_RNA (1)...(19): siRNA sense strand
cagaaagcaaguccuauuu

SEQ ID NO: 1684018 - RNA, 19 nt, Homo sapiens
  misc_RNA (1)...(19): siRNA sense strand
gaaauaacugcuagcuuca

SEQ ID NO: 1684019 - RNA, 19 nt, Homo sapiens
  misc_RNA (1)...(19): siRNA sense strand
gauguuaaauggucguucu

SEQ ID NO: 1684020 - RNA, 19 nt, Homo sapiens
  misc_RNA (1)...(19): siRNA sense strand
gaacuaugaaucagauauc

SEQ ID NO: 1684021 - RNA, 19 nt, Homo sapiens
  misc_RNA (1)...(19): siRNA sense strand
ugauaaacguguggaggua

SEQ ID NO: 1684022 - RNA, 19 nt, Homo sapiens
  misc_RNA (1)...(19): siRNA sense strand
ggaauuuaagugauaguga

SEQ ID NO: 1684023 - RNA, 19 nt, Homo sapiens
  misc_RNA (1)...(19): siRNA sense strand
ggaaucccaggaacuauga

SEQ ID NO: 1684024 - RNA, 19 nt, Homo sapiens
  misc_RNA (1)...(19): siRNA sense strand
auacagauccugagcuaaa

SEQ ID NO: 1684025 - RNA, 19 nt, Homo sapiens
  misc_RNA (1)...(19): siRNA sense strand
ggaacuugcuaugaucaug

SEQ ID NO: 1684026 - RNA, 19 nt, Homo sapiens
  misc_RNA (1)...(19): siRNA sense strand
ccuuggaauuuaagugaua

SEQ ID NO: 1684027 - RNA, 19 nt, Homo sapiens
  misc_RNA (1)...(19): siRNA sense strand
uaauacacucuuacccuua

SEQ ID NO: 1684028 - RNA, 19 nt, Homo sapiens
  misc_RNA (1)...(19): siRNA sense strand
ccagaugugugaugaaugc

SEQ ID NO: 1684029 - RNA, 19 nt, Homo sapiens
  misc_RNA (1)...(19): siRNA sense strand
ccaaucagcagagcuauau

SEQ ID NO: 1684030 - RNA, 19 nt, Homo sapiens
  misc_RNA (1)...(19): siRNA sense strand
guucuucccucuuuccaau

SEQ ID NO: 1684031 - RNA, 19 nt, Homo sapiens
  misc_RNA (1)...(19): siRNA sense strand
ggaacuaugaaucagauau

SEQ ID NO: 1684032 - RNA, 19 nt, Homo sapiens
  misc_RNA (1)...(19): siRNA sense strand
gaucauggaccggcuguau

SEQ ID NO: 1684033 - RNA, 19 nt, Homo sapiens
  misc_RNA (1)...(19): siRNA sense strand
auacguccuuggaauuuaa

SEQ ID NO: 1684034 - RNA, 19 nt, Homo sapiens
  misc_RNA (1)...(19): siRNA sense strand
cauugaugcuuguauugaa

SEQ ID NO: 1684035 - RNA, 19 nt, Homo sapiens
  misc_RNA (1)...(19): siRNA sense strand
cgaaguagaauguaugaca

SEQ ID NO: 1684036 - RNA, 19 nt, Homo sapiens
  misc_RNA (1)...(19): siRNA sense strand
guguggagguaaagccaua

SEQ ID NO: 1684037 - RNA, 19 nt, Homo sapiens
  misc_RNA (1)...(19): siRNA sense strand
agccauaugugcuagauga

SEQ ID NO: 1684038 - RNA, 19 nt, Homo sapiens
  misc_RNA (1)...(19): siRNA sense strand
cugacaaucuguugauguu

SEQ ID NO: 1684039 - RNA, 19 nt, Homo sapiens
  misc_RNA (1)...(19): siRNA sense strand
uagaugaccagauguguga

SEQ ID NO: 1684040 - RNA, 19 nt, Homo sapiens
  misc_RNA (1)...(19): siRNA sense strand
gagcuauauugcugccauu

SEQ ID NO: 1684041 - RNA, 19 nt, Homo sapiens
  misc_RNA (1)...(19): siRNA sense strand
caaaccaguucaaauacgu

SEQ ID NO: 1684042 - RNA, 19 nt, Homo sapiens
  misc_RNA (1)...(19): siRNA sense strand
caggaacuaugaaucagau

SEQ ID NO: 1684043 - RNA, 19 nt, Homo sapiens
  misc_RNA (1)...(19): siRNA sense strand
gaguugcuuucuccaauca

SEQ ID NO: 1684044 - RNA, 19 nt, Homo sapiens
  misc_RNA (1)...(19): siRNA sense strand
cuccagauauugaugaaga

SEQ ID NO: 1684045 - RNA, 19 nt, Homo sapiens
  misc_RNA (1)...(19): siRNA sense strand
guagaauguaugacaguuu

SEQ ID NO: 1684046 - RNA, 19 nt, Homo sapiens
  misc_RNA (1)...(19): siRNA sense strand
gaucgaaguagaauguaug

SEQ ID NO: 1684047 - RNA, 19 nt, Homo sapiens
  misc_RNA (1)...(19): siRNA sense strand
ugucauagcaccaccgaaa

SEQ ID NO: 1684048 - RNA, 19 nt, Homo sapiens
  misc_RNA (1)...(19): siRNA sense strand
cagaagauuugggccuuug

SEQ ID NO: 1684049 - RNA, 19 nt, Homo sapiens
  misc_RNA (1)...(19): siRNA sense strand
cuaugcauuucuucucuuu

SEQ ID NO: 1684050 - RNA, 19 nt, Homo sapiens
  misc_RNA (1)...(19): siRNA sense strand
cagcauggugauauugaua

SEQ ID NO: 1684051 - RNA, 19 nt, Homo sapiens
  misc_RNA (1)...(19): siRNA sense strand
aauacguccuuggaauuua

SEQ ID NO: 1684052 - RNA, 19 nt, Homo sapiens
  misc_RNA (1)...(19): siRNA sense strand
gauaaacguguggagguaa

SEQ ID NO: 1684053 - RNA, 19 nt, Homo sapiens
  misc_RNA (1)...(19): siRNA sense strand
ggagguaaagccauaugug

SEQ ID NO: 1684054 - RNA, 19 nt, Homo sapiens
  misc_RNA (1)...(19): siRNA sense strand
gaauguaugacaguuugaa

SEQ ID NO: 1684055 - RNA, 19 nt, Homo sapiens
  misc_RNA (1)...(19): siRNA sense strand
cuauauugcugccauuagu

SEQ ID NO: 1684056 - RNA, 19 nt, Homo sapiens
  misc_RNA (1)...(19): siRNA sense strand
gcuguaugguggaguuugu

SEQ ID NO: 1684057 - RNA, 19 nt, Homo sapiens
  misc_RNA (1)...(19): siRNA sense strand
guucaaauacguccuugga

SEQ ID NO: 1684058 - RNA, 19 nt, Homo sapiens
  misc_RNA (1)...(19): siRNA sense strand
acucauugaugcuuguauu

SEQ ID NO: 1684059 - RNA, 19 nt, Homo sapiens
  misc_RNA (1)...(19): siRNA sense strand
aaauggagagcgaauagaa

SEQ ID NO: 1684060 - RNA, 19 nt, Homo sapiens
  misc_RNA (1)...(19): siRNA sense strand
ggaacugacaaucuguuga

SEQ ID NO: 1684061 - RNA, 19 nt, Homo sapiens
  misc_RNA (1)...(19): siRNA sense strand
uaugacaguuugaauaugc

SEQ ID NO: 1684062 - RNA, 19 nt, Homo sapiens
  misc_RNA (1)...(19): siRNA sense strand
cauagcaccaccgaaauuu

SEQ ID NO: 1684063 - RNA, 19 nt, Homo sapiens
  misc_RNA (1)...(19): siRNA sense strand
gcccuacuaucaaggacaa

SEQ ID NO: 1684064 - RNA, 19 nt, Homo sapiens
  misc_RNA (1)...(19): siRNA sense strand
guagauuggccucauaaag

SEQ ID NO: 1684065 - RNA, 19 nt, Homo sapiens
  misc_RNA (1)...(19): siRNA sense strand
ggccuuugguaguagauug

SEQ ID NO: 1684066 - RNA, 19 nt, Homo sapiens
  misc_RNA (1)...(19): siRNA sense strand
ccuuaucgauauuaugaga

SEQ ID NO: 1684067 - RNA, 19 nt, Homo sapiens
  misc_RNA (1)...(19): siRNA sense strand
ggauugaagauaauguguu

SEQ ID NO: 1684068 - RNA, 19 nt, Homo sapiens
  misc_RNA (1)...(19): siRNA sense strand
cuccaucacugacuccaaa

SEQ ID NO: 1684069 - RNA, 19 nt, Homo sapiens
  misc_RNA (1)...(19): siRNA sense strand
guaugacaguuugaauaug

SEQ ID NO: 1684070 - RNA, 19 nt, Homo sapiens
  misc_RNA (1)...(19): siRNA sense strand
auaaacguguggagguaaa

SEQ ID NO: 1684071 - RNA, 19 nt, Homo sapiens
  misc_RNA (1)...(19): siRNA sense strand
caagaagagagcucaguuc

SEQ ID NO: 1684072 - RNA, 19 nt, Homo sapiens
  misc_RNA (1)...(19): siRNA sense strand
gcuaugcauuucuucucuu

SEQ ID NO: 1684073 - RNA, 19 nt, Homo sapiens
  misc_RNA (1)...(19): siRNA sense strand
ucagaagauuugggccuuu

SEQ ID NO: 1684074 - RNA, 19 nt, Homo sapiens
  misc_RNA (1)...(19): siRNA sense strand
aauaacugcuagcuucaga

SEQ ID NO: 1684075 - RNA, 19 nt, Homo sapiens
  misc_RNA (1)...(19): siRNA sense strand
ccaugaauauaccucaaca

SEQ ID NO: 1684076 - RNA, 19 nt, Homo sapiens
  misc_RNA (1)...(19): siRNA sense strand
ucauagcaccaccgaaauu

SEQ ID NO: 1684077 - RNA, 19 nt, Homo sapiens
  misc_RNA (1)...(19): siRNA sense strand
ggaugguucucagccuuug

SEQ ID NO: 1684078 - RNA, 19 nt, Homo sapiens
  misc_RNA (1)...(19): siRNA sense strand
gaacgcuucucucgaaaag

SEQ ID NO: 1684079 - RNA, 19 nt, Homo sapiens
  misc_RNA (1)...(19): siRNA sense strand
gacaaaccaguucaaauac

SEQ ID NO: 1684080 - RNA, 19 nt, Homo sapiens
  misc_RNA (1)...(19): siRNA sense strand
ucaagaagagagcucaguu

SEQ ID NO: 1684081 - RNA, 19 nt, Homo sapiens
  misc_RNA (1)...(19): siRNA sense strand
gguaguagauuggccucau

SEQ ID NO: 1684082 - RNA, 19 nt, Homo sapiens
  misc_RNA (1)...(19): siRNA sense strand
gcuucagcauggugauauu

SEQ ID NO: 1684083 - RNA, 19 nt, Homo sapiens
  misc_RNA (1)...(19): siRNA sense strand
cauaagccauugguaaagg

SEQ ID NO: 1684084 - RNA, 19 nt, Homo sapiens
  misc_RNA (1)...(19): siRNA sense strand
ggacaaaccaguucaaaua

SEQ ID NO: 1684085 - RNA, 19 nt, Homo sapiens
  misc_RNA (1)...(19): siRNA sense strand
ucacuugccugcaguauua

SEQ ID NO: 1684086 - RNA, 19 nt, Homo sapiens
  misc_RNA (1)...(19): siRNA sense strand
gaacagacaacaauaguaa

SEQ ID NO: 1684087 - RNA, 19 nt, Homo sapiens
  misc_RNA (1)...(19): siRNA sense strand
gaugauggcuugcuugaug

SEQ ID NO: 1684088 - RNA, 19 nt, Homo sapiens
  misc_RNA (1)...(19): siRNA sense strand
uaaauucacccaccuguua

SEQ ID NO: 1684089 - RNA, 19 nt, Homo sapiens
  misc_RNA (1)...(19): siRNA sense strand
gacaaucuguugauguuaa

SEQ ID NO: 1684090 - RNA, 19 nt, Homo sapiens
  misc_RNA (1)...(19): siRNA sense strand
aaucagauaucuccauuga

SEQ ID NO: 1684091 - RNA, 19 nt, Homo sapiens
  misc_RNA (1)...(19): siRNA sense strand
ucagauaucuccauugaag

SEQ ID NO: 1684092 - RNA, 19 nt, Homo sapiens
  misc_RNA (1)...(19): siRNA sense strand
gaaauuuacucgcucaacu

SEQ ID NO: 1684093 - RNA, 19 nt, Homo sapiens
  misc_RNA (1)...(19): siRNA sense strand
gcagaaagcaaguccuauu

SEQ ID NO: 1684094 - RNA, 19 nt, Homo sapiens
  misc_RNA (1)...(19): siRNA sense strand
gaagaugaaauaacugcua

SEQ ID NO: 1684095 - RNA, 19 nt, Homo sapiens
  misc_RNA (1)...(19): siRNA sense strand
gaagauaauguguucagaa

SEQ ID NO: 1684096 - RNA, 19 nt, Homo sapiens
  misc_RNA (1)...(19): siRNA sense strand
ucaaauacguccuuggaau

SEQ ID NO: 1684097 - RNA, 19 nt, Homo sapiens
  misc_RNA (1)...(19): siRNA sense strand
guaguagauuggccucaua

SEQ ID NO: 1684098 - RNA, 19 nt, Homo sapiens
  misc_RNA (1)...(19): siRNA sense strand
ccaccagccucuucugaaa

SEQ ID NO: 1684099 - RNA, 19 nt, Homo sapiens
  misc_RNA (1)...(19): siRNA sense strand
gauugaagauaauguguuc

SEQ ID NO: 1684100 - RNA, 19 nt, Homo sapiens
  misc_RNA (1)...(19): siRNA sense strand
ugaaucagauaucuccauu

SEQ ID NO: 1684101 - RNA, 19 nt, Homo sapiens
  misc_RNA (1)...(19): siRNA sense strand
caaauacguccuuggaauu

SEQ ID NO: 1684102 - RNA, 19 nt, Homo sapiens
  misc_RNA (1)...(19): siRNA sense strand
gaaaauucccuuaucgaua

SEQ ID NO: 1684103 - RNA, 19 nt, Homo sapiens
  misc_RNA (1)...(19): siRNA sense strand
gaauaugcacucuuuggaa

SEQ ID NO: 1684104 - RNA, 19 nt, Homo sapiens
  misc_RNA (1)...(19): siRNA sense strand
uagaauguaugacaguuug

SEQ ID NO: 1684105 - RNA, 19 nt, Homo sapiens
  misc_RNA (1)...(19): siRNA sense strand
gaacugacaaucuguugau

SEQ ID NO: 1684106 - RNA, 19 nt, Homo sapiens
  misc_RNA (1)...(19): siRNA sense strand
guuugaauaugcacucuuu

SEQ ID NO: 1684107 - RNA, 19 nt, Homo sapiens
  misc_RNA (1)...(19): siRNA sense strand
ugauacagauccugagcua

SEQ ID NO: 1684108 - RNA, 19 nt, Homo sapiens
  misc_RNA (1)...(19): siRNA sense strand
gcauggugauauugauaaa

SEQ ID NO: 1684109 - RNA, 19 nt, Homo sapiens
  misc_RNA (1)...(19): siRNA sense strand
aauaugcacucuuuggaaa

SEQ ID NO: 1684110 - RNA, 19 nt, Homo sapiens
  misc_RNA (1)...(19): siRNA sense strand
gaccagaugugugaugaau

SEQ ID NO: 1684111 - RNA, 19 nt, Homo sapiens
  misc_RNA (1)...(19): siRNA sense strand
uggcagagaucaucguaga

SEQ ID NO: 1684112 - RNA, 19 nt, Homo sapiens
  misc_RNA (1)...(19): siRNA sense strand
ggaucgaaguagaauguau

SEQ ID NO: 1684113 - RNA, 19 nt, Homo sapiens
  misc_RNA (1)...(19): siRNA sense strand
cgauugagcuauccacauc

SEQ ID NO: 1684114 - RNA, 19 nt, Homo sapiens
  misc_RNA (1)...(19): siRNA sense strand
ggacgugaguuccauaagc

SEQ ID NO: 1684115 - RNA, 19 nt, Homo sapiens
  misc_RNA (1)...(19): siRNA sense strand
gguaaagccauaugugcua

SEQ ID NO: 1684116 - RNA, 19 nt, Homo sapiens
  misc_RNA (1)...(19): siRNA sense strand
gcgaguugcuuucuccaau

SEQ ID NO: 1684117 - RNA, 19 nt, Homo sapiens
  misc_RNA (1)...(19): siRNA sense strand
cagaaagcaaguccuauuu

SEQ ID NO: 1684118 - RNA, 19 nt, Homo sapiens
  misc_RNA (1)...(19): siRNA sense strand
gaaauaacugcuagcuuca

SEQ ID NO: 1684119 - RNA, 19 nt, Homo sapiens
  misc_RNA (1)...(19): siRNA sense strand
gauguuaaauggucguucu

SEQ ID NO: 1684120 - RNA, 19 nt, Homo sapiens
  misc_RNA (1)...(19): siRNA sense strand
gaacuaugaaucagauauc

SEQ ID NO: 1684121 - RNA, 19 nt, Homo sapiens
  misc_RNA (1)...(19): siRNA sense strand
ugauaaacguguggaggua

SEQ ID NO: 1684122 - RNA, 19 nt, Homo sapiens
  misc_RNA (1)...(19): siRNA sense strand
ggaauuuaagugauaguga

SEQ ID NO: 1684123 - RNA, 19 nt, Homo sapiens
  misc_RNA (1)...(19): siRNA sense strand
ggaaucccaggaacuauga

SEQ ID NO: 1684124 - RNA, 19 nt, Homo sapiens
  misc_RNA (1)...(19): siRNA sense strand
auacagauccugagcuaaa

SEQ ID NO: 1684125 - RNA, 19 nt, Homo sapiens
  misc_RNA (1)...(19): siRNA sense strand
ggaacuugcuaugaucaug

SEQ ID NO: 1684126 - RNA, 19 nt, Homo sapiens
  misc_RNA (1)...(19): siRNA sense strand
ccuuggaauuuaagugaua

SEQ ID NO: 1684127 - RNA, 19 nt, Homo sapiens
  misc_RNA (1)...(19): siRNA sense strand
uaauacacucuuacccuua

SEQ ID NO: 1684128 - RNA, 19 nt, Homo sapiens
  misc_RNA (1)...(19): siRNA sense strand
ccagaugugugaugaaugc

SEQ ID NO: 1684129 - RNA, 19 nt, Homo sapiens
  misc_RNA (1)...(19): siRNA sense strand
ccaaucagcagagcuauau

SEQ ID NO: 1684130 - RNA, 19 nt, Homo sapiens
  misc_RNA (1)...(19): siRNA sense strand
guucuucccucuuuccaau

SEQ ID NO: 1684131 - RNA, 19 nt, Homo sapiens
  misc_RNA (1)...(19): siRNA sense strand
ggaacuaugaaucagauau

SEQ ID NO: 1684132 - RNA, 19 nt, Homo sapiens
  misc_RNA (1)...(19): siRNA sense strand
gaucauggaccggcuguau

SEQ ID NO: 1684133 - RNA, 19 nt, Homo sapiens
  misc_RNA (1)...(19): siRNA sense strand
auacguccuuggaauuuaa

SEQ ID NO: 1684134 - RNA, 19 nt, Homo sapiens
  misc_RNA (1)...(19): siRNA sense strand
cauugaugcuuguauugaa

SEQ ID NO: 1684135 - RNA, 19 nt, Homo sapiens
  misc_RNA (1)...(19): siRNA sense strand
cgaaguagaauguaugaca

SEQ ID NO: 1684136 - RNA, 19 nt, Homo sapiens
  misc_RNA (1)...(19): siRNA sense strand
guguggagguaaagccaua

SEQ ID NO: 1684137 - RNA, 19 nt, Homo sapiens
  misc_RNA (1)...(19): siRNA sense strand
agccauaugugcuagauga

SEQ ID NO: 1684138 - RNA, 19 nt, Homo sapiens
  misc_RNA (1)...(19): siRNA sense strand
cugacaaucuguugauguu

SEQ ID NO: 1684139 - RNA, 19 nt, Homo sapiens
  misc_RNA (1)...(19): siRNA sense strand
uagaugaccagauguguga

SEQ ID NO: 1684140 - RNA, 19 nt, Homo sapiens
  misc_RNA (1)...(19): siRNA sense strand
gagcuauauugcugccauu

SEQ ID NO: 1684141 - RNA, 19 nt, Homo sapiens
  misc_RNA (1)...(19): siRNA sense strand
caaaccaguucaaauacgu

SEQ ID NO: 1684142 - RNA, 19 nt, Homo sapiens
  misc_RNA (1)...(19): siRNA sense strand
caggaacuaugaaucagau

SEQ ID NO: 1684143 - RNA, 19 nt, Homo sapiens
  misc_RNA (1)...(19): siRNA sense strand
gaguugcuuucuccaauca

SEQ ID NO: 1684144 - RNA, 19 nt, Homo sapiens
  misc_RNA (1)...(19): siRNA sense strand
cuccagauauugaugaaga

SEQ ID NO: 1684145 - RNA, 19 nt, Homo sapiens
  misc_RNA (1)...(19): siRNA sense strand
guagaauguaugacaguuu

SEQ ID NO: 1684146 - RNA, 19 nt, Homo sapiens
  misc_RNA (1)...(19): siRNA sense strand
gaucgaaguagaauguaug

SEQ ID NO: 1684147 - RNA, 19 nt, Homo sapiens
  misc_RNA (1)...(19): siRNA sense strand
ugucauagcaccaccgaaa

SEQ ID NO: 1684148 - RNA, 19 nt, Homo sapiens
  misc_RNA (1)...(19): siRNA sense strand
cagaagauuugggccuuug

SEQ ID NO: 1684149 - RNA, 19 nt, Homo sapiens
  misc_RNA (1)...(19): siRNA sense strand
cuaugcauuucuucucuuu

SEQ ID NO: 1684150 - RNA, 19 nt, Homo sapiens
  misc_RNA (1)...(19): siRNA sense strand
cagcauggugauauugaua

SEQ ID NO: 1684151 - RNA, 19 nt, Homo sapiens
  misc_RNA (1)...(19): siRNA sense strand
aauacguccuuggaauuua

SEQ ID NO: 1684152 - RNA, 19 nt, Homo sapiens
  misc_RNA (1)...(19): siRNA sense strand
gauaaacguguggagguaa

SEQ ID NO: 1684153 - RNA, 19 nt, Homo sapiens
  misc_RNA (1)...(19): siRNA sense strand
ggagguaaagccauaugug

SEQ ID NO: 1684154 - RNA, 19 nt, Homo sapiens
  misc_RNA (1)...(19): siRNA sense strand
gaauguaugacaguuugaa

SEQ ID NO: 1684155 - RNA, 19 nt, Homo sapiens
  misc_RNA (1)...(19): siRNA sense strand
cuauauugcugccauuagu

SEQ ID NO: 1684156 - RNA, 19 nt, Homo sapiens
  misc_RNA (1)...(19): siRNA sense strand
gcuguaugguggaguuugu

SEQ ID NO: 1684157 - RNA, 19 nt, Homo sapiens
  misc_RNA (1)...(19): siRNA sense strand
guucaaauacguccuugga

SEQ ID NO: 1684158 - RNA, 19 nt, Homo sapiens
  misc_RNA (1)...(19): siRNA sense strand
acucauugaugcuuguauu

SEQ ID NO: 1684159 - RNA, 19 nt, Homo sapiens
  misc_RNA (1)...(19): siRNA sense strand
aaauggagagcgaauagaa

SEQ ID NO: 1684160 - RNA, 19 nt, Homo sapiens
  misc_RNA (1)...(19): siRNA sense strand
ggaacugacaaucuguuga

SEQ ID NO: 1684161 - RNA, 19 nt, Homo sapiens
  misc_RNA (1)...(19): siRNA sense strand
uaugacaguuugaauaugc

SEQ ID NO: 1684162 - RNA, 19 nt, Homo sapiens
  misc_RNA (1)...(19): siRNA sense strand
cauagcaccaccgaaauuu

SEQ ID NO: 1684163 - RNA, 19 nt, Homo sapiens
  misc_RNA (1)...(19): siRNA sense strand
gcccuacuaucaaggacaa

SEQ ID NO: 1684164 - RNA, 19 nt, Homo sapiens
  misc_RNA (1)...(19): siRNA sense strand
guagauuggccucauaaag

SEQ ID NO: 1684165 - RNA, 19 nt, Homo sapiens
  misc_RNA (1)...(19): siRNA sense strand
ggccuuugguaguagauug

SEQ ID NO: 1684166 - RNA, 19 nt, Homo sapiens
  misc_RNA (1)...(19): siRNA sense strand
ccuuaucgauauuaugaga

SEQ ID NO: 1684167 - RNA, 19 nt, Homo sapiens
  misc_RNA (1)...(19): siRNA sense strand
ggauugaagauaauguguu

SEQ ID NO: 1684168 - RNA, 19 nt, Homo sapiens
  misc_RNA (1)...(19): siRNA sense strand
cuccaucacugacuccaaa

SEQ ID NO: 1684169 - RNA, 19 nt, Homo sapiens
  misc_RNA (1)...(19): siRNA sense strand
guaugacaguuugaauaug

SEQ ID NO: 1684170 - RNA, 19 nt, Homo sapiens
  misc_RNA (1)...(19): siRNA sense strand
auaaacguguggagguaaa

SEQ ID NO: 1684171 - RNA, 19 nt, Homo sapiens
  misc_RNA (1)...(19): siRNA sense strand
caagaagagagcucaguuc

SEQ ID NO: 1684172 - RNA, 19 nt, Homo sapiens
  misc_RNA (1)...(19): siRNA sense strand
gcuaugcauuucuucucuu

SEQ ID NO: 1684173 - RNA, 19 nt, Homo sapiens
  misc_RNA (1)...(19): siRNA sense strand
ucagaagauuugggccuuu

SEQ ID NO: 1684174 - RNA, 19 nt, Homo sapiens
  misc_RNA (1)...(19): siRNA sense strand
aauaacugcuagcuucaga

SEQ ID NO: 1684175 - RNA, 19 nt, Homo sapiens
  misc_RNA (1)...(19): siRNA sense strand
ccaugaauauaccucaaca

SEQ ID NO: 1684176 - RNA, 19 nt, Homo sapiens
  misc_RNA (1)...(19): siRNA sense strand
ucauagcaccaccgaaauu

SEQ ID NO: 1684177 - RNA, 19 nt, Homo sapiens
  misc_RNA (1)...(19): siRNA sense strand
ggaugguucucagccuuug

SEQ ID NO: 1684178 - RNA, 19 nt, Homo sapiens
  misc_RNA (1)...(19): siRNA sense strand
gaacgcuucucucgaaaag

SEQ ID NO: 1684179 - RNA, 19 nt, Homo sapiens
  misc_RNA (1)...(19): siRNA sense strand
gacaaaccaguucaaauac

SEQ ID NO: 1684180 - RNA, 19 nt, Homo sapiens
  misc_RNA (1)...(19): siRNA sense strand
ucaagaagagagcucaguu

SEQ ID NO: 1684181 - RNA, 19 nt, Homo sapiens
  misc_RNA (1)...(19): siRNA sense strand
gguaguagauuggccucau

SEQ ID NO: 1684182 - RNA, 19 nt, Homo sapiens
  misc_RNA (1)...(19): siRNA sense strand
gcuucagcauggugauauu

SEQ ID NO: 1684183 - RNA, 19 nt, Homo sapiens
  misc_RNA (1)...(19): siRNA sense strand
cauaagccauugguaaagg

SEQ ID NO: 1684184 - RNA, 19 nt, Homo sapiens
  misc_RNA (1)...(19): siRNA sense strand
ggacaaaccaguucaaaua

SEQ ID NO: 1684185 - RNA, 19 nt, Homo sapiens
  misc_RNA (1)...(19): siRNA sense strand
ucacuugccugcaguauua

SEQ ID NO: 1684186 - RNA, 19 nt, Homo sapiens
  misc_RNA (1)...(19): siRNA sense strand
gaacagacaacaauaguaa

SEQ ID NO: 1684187 - RNA, 19 nt, Homo sapiens
  misc_RNA (1)...(19): siRNA sense strand
gaugauggcuugcuugaug

SEQ ID NO: 1684188 - RNA, 19 nt, Homo sapiens
  misc_RNA (1)...(19): siRNA sense strand
uaaauucacccaccuguua

SEQ ID NO: 1684189 - RNA, 19 nt, Homo sapiens
  misc_RNA (1)...(19): siRNA sense strand
gacaaucuguugauguuaa

SEQ ID NO: 1684190 - RNA, 19 nt, Homo sapiens
  misc_RNA (1)...(19): siRNA sense strand
aaucagauaucuccauuga

SEQ ID NO: 1684191 - RNA, 19 nt, Homo sapiens
  misc_RNA (1)...(19): siRNA sense strand
ucagauaucuccauugaag

SEQ ID NO: 1684192 - RNA, 19 nt, Homo sapiens
  misc_RNA (1)...(19): siRNA sense strand
gaaauuuacucgcucaacu

SEQ ID NO: 1684193 - RNA, 19 nt, Homo sapiens
  misc_RNA (1)...(19): siRNA sense strand
gcagaaagcaaguccuauu

SEQ ID NO: 1684194 - RNA, 19 nt, Homo sapiens
  misc_RNA (1)...(19): siRNA sense strand
gaagaugaaauaacugcua

SEQ ID NO: 1684195 - RNA, 19 nt, Homo sapiens
  misc_RNA (1)...(19): siRNA sense strand
gaagauaauguguucagaa

SEQ ID NO: 1684196 - RNA, 19 nt, Homo sapiens
  misc_RNA (1)...(19): siRNA sense strand
ucaaauacguccuuggaau

SEQ ID NO: 1684197 - RNA, 19 nt, Homo sapiens
  misc_RNA (1)...(19): siRNA sense strand
guaguagauuggccucaua

SEQ ID NO: 1684198 - RNA, 19 nt, Homo sapiens
  misc_RNA (1)...(19): siRNA sense strand
ccaccagccucuucugaaa

SEQ ID NO: 1684199 - RNA, 19 nt, Homo sapiens
  misc_RNA (1)...(19): siRNA sense strand
gauugaagauaauguguuc

SEQ ID NO: 1684200 - RNA, 19 nt, Homo sapiens
  misc_RNA (1)...(19): siRNA sense strand
ugaaucagauaucuccauu

SEQ ID NO: 1684201 - RNA, 19 nt, Homo sapiens
  misc_RNA (1)...(19): siRNA sense strand
caaauacguccuuggaauu

SEQ ID NO: 1684202 - RNA, 19 nt, Homo sapiens
  misc_RNA (1)...(19): siRNA sense strand
gaaaauucccuuaucgaua

SEQ ID NO: 1684203 - RNA, 19 nt, Homo sapiens
  misc_RNA (1)...(19): siRNA sense strand
gaauaugcacucuuuggaa

SEQ ID NO: 1684204 - RNA, 19 nt, Homo sapiens
  misc_RNA (1)...(19): siRNA sense strand
uagaauguaugacaguuug

SEQ ID NO: 1684205 - RNA, 19 nt, Homo sapiens
  misc_RNA (1)...(19): siRNA sense strand
gaacugacaaucuguugau

SEQ ID NO: 1684206 - RNA, 19 nt, Homo sapiens
  misc_RNA (1)...(19): siRNA sense strand
guuugaauaugcacucuuu

SEQ ID NO: 1684207 - RNA, 19 nt, Homo sapiens
  misc_RNA (1)...(19): siRNA sense strand
ugauacagauccugagcua

SEQ ID NO: 1684208 - RNA, 19 nt, Homo sapiens
  misc_RNA (1)...(19): siRNA sense strand
gcauggugauauugauaaa

SEQ ID NO: 1684209 - RNA, 19 nt, Homo sapiens
  misc_RNA (1)...(19): siRNA sense strand
aauaugcacucuuuggaaa

SEQ ID NO: 1684210 - RNA, 19 nt, Homo sapiens
  misc_RNA (1)...(19): siRNA sense strand
gaccagaugugugaugaau

SEQ ID NO: 1684211 - RNA, 19 nt, Homo sapiens
  misc_RNA (1)...(19): siRNA sense strand
uggcagagaucaucguaga

SEQ ID NO: 1684212 - RNA, 19 nt, Homo sapiens
  misc_RNA (1)...(19): siRNA sense strand
ggaucgaaguagaauguau

SEQ ID NO: 1684213 - RNA, 19 nt, Homo sapiens
  misc_RNA (1)...(19): siRNA sense strand
cgauugagcuauccacauc

SEQ ID NO: 1684214 - RNA, 19 nt, Homo sapiens
  misc_RNA (1)...(19): siRNA sense strand
ggacgugaguuccauaagc

SEQ ID NO: 1684215 - RNA, 19 nt, Homo sapiens
  misc_RNA (1)...(19): siRNA sense strand
gguaaagccauaugugcua

SEQ ID NO: 1684216 - RNA, 19 nt, Homo sapiens
  misc_RNA (1)...(19): siRNA sense strand
gcgaguugcuuucuccaau

SEQ ID NO: 1684217 - RNA, 19 nt, Homo sapiens
  misc_RNA (1)...(19): siRNA sense strand
cagaaagcaaguccuauuu

SEQ ID NO: 1684218 - RNA, 19 nt, Homo sapiens
  misc_RNA (1)...(19): siRNA sense strand
gaaauaacugcuagcuuca

SEQ ID NO: 1684219 - RNA, 19 nt, Homo sapiens
  misc_RNA (1)...(19): siRNA sense strand
gauguuaaauggucguucu

SEQ ID NO: 1684220 - RNA, 19 nt, Homo sapiens
  misc_RNA (1)...(19): siRNA sense strand
gaacuaugaaucagauauc

SEQ ID NO: 1684221 - RNA, 19 nt, Homo sapiens
  misc_RNA (1)...(19): siRNA sense strand
ugauaaacguguggaggua

SEQ ID NO: 1684222 - RNA, 19 nt, Homo sapiens
  misc_RNA (1)...(19): siRNA sense strand
ggaauuuaagugauaguga

SEQ ID NO: 1684223 - RNA, 19 nt, Homo sapiens
  misc_RNA (1)...(19): siRNA sense strand
ggaaucccaggaacuauga

SEQ ID NO: 1684224 - RNA, 19 nt, Homo sapiens
  misc_RNA (1)...(19): siRNA sense strand
auacagauccugagcuaaa

SEQ ID NO: 1684225 - RNA, 19 nt, Homo sapiens
  misc_RNA (1)...(19): siRNA sense strand
ggaacuugcuaugaucaug

SEQ ID NO: 1684226 - RNA, 19 nt, Homo sapiens
  misc_RNA (1)...(19): siRNA sense strand
ccuuggaauuuaagugaua

SEQ ID NO: 1684227 - RNA, 19 nt, Homo sapiens
  misc_RNA (1)...(19): siRNA sense strand
uaauacacucuuacccuua

SEQ ID NO: 1684228 - RNA, 19 nt, Homo sapiens
  misc_RNA (1)...(19): siRNA sense strand
ccagaugugugaugaaugc

SEQ ID NO: 1684229 - RNA, 19 nt, Homo sapiens
  misc_RNA (1)...(19): siRNA sense strand
ccaaucagcagagcuauau

SEQ ID NO: 1684230 - RNA, 19 nt, Homo sapiens
  misc_RNA (1)...(19): siRNA sense strand
guucuucccucuuuccaau

SEQ ID NO: 1684231 - RNA, 19 nt, Homo sapiens
  misc_RNA (1)...(19): siRNA sense strand
ggaacuaugaaucagauau

SEQ ID NO: 1684232 - RNA, 19 nt, Homo sapiens
  misc_RNA (1)...(19): siRNA sense strand
gaucauggaccggcuguau

SEQ ID NO: 1684233 - RNA, 19 nt, Homo sapiens
  misc_RNA (1)...(19): siRNA sense strand
auacguccuuggaauuuaa

SEQ ID NO: 1684234 - RNA, 19 nt, Homo sapiens
  misc_RNA (1)...(19): siRNA sense strand
cauugaugcuuguauugaa

SEQ ID NO: 1684235 - RNA, 19 nt, Homo sapiens
  misc_RNA (1)...(19): siRNA sense strand
cgaaguagaauguaugaca

SEQ ID NO: 1684236 - RNA, 19 nt, Homo sapiens
  misc_RNA (1)...(19): siRNA sense strand
guguggagguaaagccaua

SEQ ID NO: 1684237 - RNA, 19 nt, Homo sapiens
  misc_RNA (1)...(19): siRNA sense strand
agccauaugugcuagauga

SEQ ID NO: 1684238 - RNA, 19 nt, Homo sapiens
  misc_RNA (1)...(19): siRNA sense strand
cugacaaucuguugauguu

SEQ ID NO: 1684239 - RNA, 19 nt, Homo sapiens
  misc_RNA (1)...(19): siRNA sense strand
uagaugaccagauguguga

SEQ ID NO: 1684240 - RNA, 19 nt, Homo sapiens
  misc_RNA (1)...(19): siRNA sense strand
gagcuauauugcugccauu

SEQ ID NO: 1684241 - RNA, 19 nt, Homo sapiens
  misc_RNA (1)...(19): siRNA sense strand
caaaccaguucaaauacgu

SEQ ID NO: 1684242 - RNA, 19 nt, Homo sapiens
  misc_RNA (1)...(19): siRNA sense strand
caggaacuaugaaucagau

SEQ ID NO: 1684243 - RNA, 19 nt, Homo sapiens
  misc_RNA (1)...(19): siRNA sense strand
gaguugcuuucuccaauca

SEQ ID NO: 1684244 - RNA, 19 nt, Homo sapiens
  misc_RNA (1)...(19): siRNA sense strand
cuccagauauugaugaaga

SEQ ID NO: 1684245 - RNA, 19 nt, Homo sapiens
  misc_RNA (1)...(19): siRNA sense strand
guagaauguaugacaguuu

SEQ ID NO: 1684246 - RNA, 19 nt, Homo sapiens
  misc_RNA (1)...(19): siRNA sense strand
gaucgaaguagaauguaug

SEQ ID NO: 1684247 - RNA, 19 nt, Homo sapiens
  misc_RNA (1)...(19): siRNA sense strand
ugucauagcaccaccgaaa

SEQ ID NO: 1684248 - RNA, 19 nt, Homo sapiens
  misc_RNA (1)...(19): siRNA sense strand
cagaagauuugggccuuug

SEQ ID NO: 1684249 - RNA, 19 nt, Homo sapiens
  misc_RNA (1)...(19): siRNA sense strand
cuaugcauuucuucucuuu

SEQ ID NO: 1684250 - RNA, 19 nt, Homo sapiens
  misc_RNA (1)...(19): siRNA sense strand
cagcauggugauauugaua

SEQ ID NO: 1684251 - RNA, 19 nt, Homo sapiens
  misc_RNA (1)...(19): siRNA sense strand
aauacguccuuggaauuua

SEQ ID NO: 1684252 - RNA, 19 nt, Homo sapiens
  misc_RNA (1)...(19): siRNA sense strand
gauaaacguguggagguaa

SEQ ID NO: 1684253 - RNA, 19 nt, Homo sapiens
  misc_RNA (1)...(19): siRNA sense strand
ggagguaaagccauaugug

SEQ ID NO: 1684254 - RNA, 19 nt, Homo sapiens
  misc_RNA (1)...(19): siRNA sense strand
gaauguaugacaguuugaa

SEQ ID NO: 1684255 - RNA, 19 nt, Homo sapiens
  misc_RNA (1)...(19): siRNA sense strand
cuauauugcugccauuagu

SEQ ID NO: 1684256 - RNA, 19 nt, Homo sapiens
  misc_RNA (1)...(19): siRNA sense strand
gcuguaugguggaguuugu

SEQ ID NO: 1684257 - RNA, 19 nt, Homo sapiens
  misc_RNA (1)...(19): siRNA sense strand
guucaaauacguccuugga

SEQ ID NO: 1684258 - RNA, 19 nt, Homo sapiens
  misc_RNA (1)...(19): siRNA sense strand
acucauugaugcuuguauu

SEQ ID NO: 1684259 - RNA, 19 nt, Homo sapiens
  misc_RNA (1)...(19): siRNA sense strand
aaauggagagcgaauagaa

SEQ ID NO: 1684260 - RNA, 19 nt, Homo sapiens
  misc_RNA (1)...(19): siRNA sense strand
ggaacugacaaucuguuga

SEQ ID NO: 1684261 - RNA, 19 nt, Homo sapiens
  misc_RNA (1)...(19): siRNA sense strand
uaugacaguuugaauaugc

SEQ ID NO: 1684262 - RNA, 19 nt, Homo sapiens
  misc_RNA (1)...(19): siRNA sense strand
cauagcaccaccgaaauuu

SEQ ID NO: 1684263 - RNA, 19 nt, Homo sapiens
  misc_RNA (1)...(19): siRNA sense strand
gcccuacuaucaaggacaa

SEQ ID NO: 1684264 - RNA, 19 nt, Homo sapiens
  misc_RNA (1)...(19): siRNA sense strand
guagauuggccucauaaag

SEQ ID NO: 1684265 - RNA, 19 nt, Homo sapiens
  misc_RNA (1)...(19): siRNA sense strand
ggccuuugguaguagauug

SEQ ID NO: 1684266 - RNA, 19 nt, Homo sapiens
  misc_RNA (1)...(19): siRNA sense strand
ccuuaucgauauuaugaga

SEQ ID NO: 1684267 - RNA, 19 nt, Homo sapiens
  misc_RNA (1)...(19): siRNA sense strand
ggauugaagauaauguguu

SEQ ID NO: 1684268 - RNA, 19 nt, Homo sapiens
  misc_RNA (1)...(19): siRNA sense strand
cuccaucacugacuccaaa

SEQ ID NO: 1684269 - RNA, 19 nt, Homo sapiens
  misc_RNA (1)...(19): siRNA sense strand
guaugacaguuugaauaug

SEQ ID NO: 1684270 - RNA, 19 nt, Homo sapiens
  misc_RNA (1)...(19): siRNA sense strand
auaaacguguggagguaaa

SEQ ID NO: 1684271 - RNA, 19 nt, Homo sapiens
  misc_RNA (1)...(19): siRNA sense strand
caagaagagagcucaguuc

SEQ ID NO: 1684272 - RNA, 19 nt, Homo sapiens
  misc_RNA (1)...(19): siRNA sense strand
gcuaugcauuucuucucuu

SEQ ID NO: 1684273 - RNA, 19 nt, Homo sapiens
  misc_RNA (1)...(19): siRNA sense strand
ucagaagauuugggccuuu

SEQ ID NO: 1684274 - RNA, 19 nt, Homo sapiens
  misc_RNA (1)...(19): siRNA sense strand
aauaacugcuagcuucaga

SEQ ID NO: 1684275 - RNA, 19 nt, Homo sapiens
  misc_RNA (1)...(19): siRNA sense strand
ccaugaauauaccucaaca

SEQ ID NO: 1684276 - RNA, 19 nt, Homo sapiens
  misc_RNA (1)...(19): siRNA sense strand
ucauagcaccaccgaaauu

SEQ ID NO: 1684277 - RNA, 19 nt, Homo sapiens
  misc_RNA (1)...(19): siRNA sense strand
ggaugguucucagccuuug

SEQ ID NO: 1684278 - RNA, 19 nt, Homo sapiens
  misc_RNA (1)...(19): siRNA sense strand
gaacgcuucucucgaaaag

SEQ ID NO: 1684279 - RNA, 19 nt, Homo sapiens
  misc_RNA (1)...(19): siRNA sense strand
gacaaaccaguucaaauac

SEQ ID NO: 1684280 - RNA, 19 nt, Homo sapiens
  misc_RNA (1)...(19): siRNA sense strand
ucaagaagagagcucaguu

SEQ ID NO: 1684281 - RNA, 19 nt, Homo sapiens
  misc_RNA (1)...(19): siRNA sense strand
gguaguagauuggccucau

SEQ ID NO: 1684282 - RNA, 19 nt, Homo sapiens
  misc_RNA (1)...(19): siRNA sense strand
gcuucagcauggugauauu

SEQ ID NO: 1684283 - RNA, 19 nt, Homo sapiens
  misc_RNA (1)...(19): siRNA sense strand
cauaagccauugguaaagg

SEQ ID NO: 1684284 - RNA, 19 nt, Homo sapiens
  misc_RNA (1)...(19): siRNA sense strand
ggaauggacucagaaguau

SEQ ID NO: 1684285 - RNA, 19 nt, Homo sapiens
  misc_RNA (1)...(19): siRNA sense strand
gggaauggacucagaagua

SEQ ID NO: 1684286 - RNA, 19 nt, Homo sapiens
  misc_RNA (1)...(19): siRNA sense strand
ucagaaguaugccauguga

SEQ ID NO: 1684287 - RNA, 19 nt, Homo sapiens
  misc_RNA (1)...(19): siRNA sense strand
aaacagacagagauaagua

SEQ ID NO: 1684288 - RNA, 19 nt, Homo sapiens
  misc_RNA (1)...(19): siRNA sense strand
cagaauaucucgggaaugg

SEQ ID NO: 1684289 - RNA, 19 nt, Homo sapiens
  misc_RNA (1)...(19): siRNA sense strand
gcauuugucucgauauucu

SEQ ID NO: 1684290 - RNA, 19 nt, Homo sapiens
  misc_RNA (1)...(19): siRNA sense strand
cagcauuugucucgauauu

SEQ ID NO: 1684291 - RNA, 19 nt, Homo sapiens
  misc_RNA (1)...(19): siRNA sense strand
ccacaauuaugggaccuaa

SEQ ID NO: 1684292 - RNA, 19 nt, Homo sapiens
  misc_RNA (1)...(19): siRNA sense strand
ggcagcauuugucucgaua

SEQ ID NO: 1684293 - RNA, 19 nt, Homo sapiens
  misc_RNA (1)...(19): siRNA sense strand
ucacaguggucgccugcuu

SEQ ID NO: 1684294 - RNA, 19 nt, Homo sapiens
  misc_RNA (1)...(19): siRNA sense strand
ucgccugcuuuaacaauuu

SEQ ID NO: 1684295 - RNA, 19 nt, Homo sapiens
  misc_RNA (1)...(19): siRNA sense strand
cuaaugacagcccauauca

SEQ ID NO: 1684296 - RNA, 19 nt, Homo sapiens
  misc_RNA (1)...(19): siRNA sense strand
acaguggucgccugcuuua

SEQ ID NO: 1684297 - RNA, 19 nt, Homo sapiens
  misc_RNA (1)...(19): siRNA sense strand
gauauucuaagaucacagu

SEQ ID NO: 1684298 - RNA, 19 nt, Homo sapiens
  misc_RNA (1)...(19): siRNA sense strand
gaccuaaugacagcccaua

SEQ ID NO: 1684299 - RNA, 19 nt, Homo sapiens
  misc_RNA (1)...(19): siRNA sense strand
guggucgccugcuuuaaca

SEQ ID NO: 1684300 - RNA, 19 nt, Homo sapiens
  misc_RNA (1)...(19): siRNA sense strand
aacagaauaucucgggaau

SEQ ID NO: 1684301 - RNA, 19 nt, Homo sapiens
  misc_RNA (1)...(19): siRNA sense strand
gaauggacucagaaguaug

SEQ ID NO: 1684302 - RNA, 19 nt, Homo sapiens
  misc_RNA (1)...(19): siRNA sense strand
ucucgggaauggacucaga

SEQ ID NO: 1684303 - RNA, 19 nt, Homo sapiens
  misc_RNA (1)...(19): siRNA sense strand
aaugacagcccauaucaag

SEQ ID NO: 1684304 - RNA, 19 nt, Homo sapiens
  misc_RNA (1)...(19): siRNA sense strand
ccuaaugacagcccauauc

SEQ ID NO: 1684305 - RNA, 19 nt, Homo sapiens
  misc_RNA (1)...(19): siRNA sense strand
gucgccugcuuuaacaauu

SEQ ID NO: 1684306 - RNA, 19 nt, Homo sapiens
  misc_RNA (1)...(19): siRNA sense strand
uggcagcauuugucucgau

SEQ ID NO: 1684307 - RNA, 19 nt, Homo sapiens
  misc_RNA (1)...(19): siRNA sense strand
ggucgccugcuuuaacaau

SEQ ID NO: 1684308 - RNA, 19 nt, Homo sapiens
  misc_RNA (1)...(19): siRNA sense strand
ggaauggacucagaaguau

SEQ ID NO: 1684309 - RNA, 19 nt, Homo sapiens
  misc_RNA (1)...(19): siRNA sense strand
gggaauggacucagaagua

SEQ ID NO: 1684310 - RNA, 19 nt, Homo sapiens
  misc_RNA (1)...(19): siRNA sense strand
ucagaaguaugccauguga

SEQ ID NO: 1684311 - RNA, 19 nt, Homo sapiens
  misc_RNA (1)...(19): siRNA sense strand
aaacagacagagauaagua

SEQ ID NO: 1684312 - RNA, 19 nt, Homo sapiens
  misc_RNA (1)...(19): siRNA sense strand
cagaauaucucgggaaugg

SEQ ID NO: 1684313 - RNA, 19 nt, Homo sapiens
  misc_RNA (1)...(19): siRNA sense strand
gcauuugucucgauauucu

SEQ ID NO: 1684314 - RNA, 19 nt, Homo sapiens
  misc_RNA (1)...(19): siRNA sense strand
cagcauuugucucgauauu

SEQ ID NO: 1684315 - RNA, 19 nt, Homo sapiens
  misc_RNA (1)...(19): siRNA sense strand
ccacaauuaugggaccuaa

SEQ ID NO: 1684316 - RNA, 19 nt, Homo sapiens
  misc_RNA (1)...(19): siRNA sense strand
ggcagcauuugucucgaua

SEQ ID NO: 1684317 - RNA, 19 nt, Homo sapiens
  misc_RNA (1)...(19): siRNA sense strand
ucacaguggucgccugcuu

SEQ ID NO: 1684318 - RNA, 19 nt, Homo sapiens
  misc_RNA (1)...(19): siRNA sense strand
ucgccugcuuuaacaauuu

SEQ ID NO: 1684319 - RNA, 19 nt, Homo sapiens
  misc_RNA (1)...(19): siRNA sense strand
cuaaugacagcccauauca

SEQ ID NO: 1684320 - RNA, 19 nt, Homo sapiens
  misc_RNA (1)...(19): siRNA sense strand
acaguggucgccugcuuua

SEQ ID NO: 1684321 - RNA, 19 nt, Homo sapiens
  misc_RNA (1)...(19): siRNA sense strand
gauauucuaagaucacagu

SEQ ID NO: 1684322 - RNA, 19 nt, Homo sapiens
  misc_RNA (1)...(19): siRNA sense strand
gaccuaaugacagcccaua

SEQ ID NO: 1684323 - RNA, 19 nt, Homo sapiens
  misc_RNA (1)...(19): siRNA sense strand
guggucgccugcuuuaaca

SEQ ID NO: 1684324 - RNA, 19 nt, Homo sapiens
  misc_RNA (1)...(19): siRNA sense strand
aacagaauaucucgggaau

SEQ ID NO: 1684325 - RNA, 19 nt, Homo sapiens
  misc_RNA (1)...(19): siRNA sense strand
gaauggacucagaaguaug

SEQ ID NO: 1684326 - RNA, 19 nt, Homo sapiens
  misc_RNA (1)...(19): siRNA sense strand
ucucgggaauggacucaga

SEQ ID NO: 1684327 - RNA, 19 nt, Homo sapiens
  misc_RNA (1)...(19): siRNA sense strand
aaugacagcccauaucaag

SEQ ID NO: 1684328 - RNA, 19 nt, Homo sapiens
  misc_RNA (1)...(19): siRNA sense strand
ccuaaugacagcccauauc

SEQ ID NO: 1684329 - RNA, 19 nt, Homo sapiens
  misc_RNA (1)...(19): siRNA sense strand
gucgccugcuuuaacaauu

SEQ ID NO: 1684330 - RNA, 19 nt, Homo sapiens
  misc_RNA (1)...(19): siRNA sense strand
uggcagcauuugucucgau

SEQ ID NO: 1684331 - RNA, 19 nt, Homo sapiens
  misc_RNA (1)...(19): siRNA sense strand
ggucgccugcuuuaacaau

SEQ ID NO: 1684332 - RNA, 19 nt, Homo sapiens
  misc_RNA (1)...(19): siRNA sense strand
ggaauggacucagaaguau

SEQ ID NO: 1684333 - RNA, 19 nt, Homo sapiens
  misc_RNA (1)...(19): siRNA sense strand
gggaauggacucagaagua

SEQ ID NO: 1684334 - RNA, 19 nt, Homo sapiens
  misc_RNA (1)...(19): siRNA sense strand
ucagaaguaugccauguga

SEQ ID NO: 1684335 - RNA, 19 nt, Homo sapiens
  misc_RNA (1)...(19): siRNA sense strand
aaacagacagagauaagua

SEQ ID NO: 1684336 - RNA, 19 nt, Homo sapiens
  misc_RNA (1)...(19): siRNA sense strand
cagaauaucucgggaaugg

SEQ ID NO: 1684337 - RNA, 19 nt, Homo sapiens
  misc_RNA (1)...(19): siRNA sense strand
gcauuugucucgauauucu

SEQ ID NO: 1684338 - RNA, 19 nt, Homo sapiens
  misc_RNA (1)...(19): siRNA sense strand
cagcauuugucucgauauu

SEQ ID NO: 1684339 - RNA, 19 nt, Homo sapiens
  misc_RNA (1)...(19): siRNA sense strand
ccacaauuaugggaccuaa

SEQ ID NO: 1684340 - RNA, 19 nt, Homo sapiens
  misc_RNA (1)...(19): siRNA sense strand
ggcagcauuugucucgaua

SEQ ID NO: 1684341 - RNA, 19 nt, Homo sapiens
  misc_RNA (1)...(19): siRNA sense strand
ucacaguggucgccugcuu

SEQ ID NO: 1684342 - RNA, 19 nt, Homo sapiens
  misc_RNA (1)...(19): siRNA sense strand
ucgccugcuuuaacaauuu

SEQ ID NO: 1684343 - RNA, 19 nt, Homo sapiens
  misc_RNA (1)...(19): siRNA sense strand
cuaaugacagcccauauca

SEQ ID NO: 1684344 - RNA, 19 nt, Homo sapiens
  misc_RNA (1)...(19): siRNA sense strand
acaguggucgccugcuuua

SEQ ID NO: 1684345 - RNA, 19 nt, Homo sapiens
  misc_RNA (1)...(19): siRNA sense strand
gauauucuaagaucacagu

SEQ ID NO: 1684346 - RNA, 19 nt, Homo sapiens
  misc_RNA (1)...(19): siRNA sense strand
gaccuaaugacagcccaua

SEQ ID NO: 1684347 - RNA, 19 nt, Homo sapiens
  misc_RNA (1)...(19): siRNA sense strand
guggucgccugcuuuaaca

SEQ ID NO: 1684348 - RNA, 19 nt, Homo sapiens
  misc_RNA (1)...(19): siRNA sense strand
aacagaauaucucgggaau

SEQ ID NO: 1684349 - RNA, 19 nt, Homo sapiens
  misc_RNA (1)...(19): siRNA sense strand
gaauggacucagaaguaug

SEQ ID NO: 1684350 - RNA, 19 nt, Homo sapiens
  misc_RNA (1)...(19): siRNA sense strand
ucucgggaauggacucaga

SEQ ID NO: 1684351 - RNA, 19 nt, Homo sapiens
  misc_RNA (1)...(19): siRNA sense strand
aaugacagcccauaucaag

SEQ ID NO: 1684352 - RNA, 19 nt, Homo sapiens
  misc_RNA (1)...(19): siRNA sense strand
ccuaaugacagcccauauc

SEQ ID NO: 1684353 - RNA, 19 nt, Homo sapiens
  misc_RNA (1)...(19): siRNA sense strand
gucgccugcuuuaacaauu

SEQ ID NO: 1684354 - RNA, 19 nt, Homo sapiens
  misc_RNA (1)...(19): siRNA sense strand
uggcagcauuugucucgau

SEQ ID NO: 1684355 - RNA, 19 nt, Homo sapiens
  misc_RNA (1)...(19): siRNA sense strand
ggucgccugcuuuaacaau

SEQ ID NO: 1684356 - RNA, 19 nt, Homo sapiens
  misc_RNA (1)...(19): siRNA sense strand
ggaauggacucagaaguau

SEQ ID NO: 1684357 - RNA, 19 nt, Homo sapiens
  misc_RNA (1)...(19): siRNA sense strand
gggaauggacucagaagua

SEQ ID NO: 1684358 - RNA, 19 nt, Homo sapiens
  misc_RNA (1)...(19): siRNA sense strand
ucagaaguaugccauguga

SEQ ID NO: 1684359 - RNA, 19 nt, Homo sapiens
  misc_RNA (1)...(19): siRNA sense strand
aaacagacagagauaagua

SEQ ID NO: 1684360 - RNA, 19 nt, Homo sapiens
  misc_RNA (1)...(19): siRNA sense strand
cagaauaucucgggaaugg

SEQ ID NO: 1684361 - RNA, 19 nt, Homo sapiens
  misc_RNA (1)...(19): siRNA sense strand
gcauuugucucgauauucu

SEQ ID NO: 1684362 - RNA, 19 nt, Homo sapiens
  misc_RNA (1)...(19): siRNA sense strand
cagcauuugucucgauauu

SEQ ID NO: 1684363 - RNA, 19 nt, Homo sapiens
  misc_RNA (1)...(19): siRNA sense strand
ccacaauuaugggaccuaa

SEQ ID NO: 1684364 - RNA, 19 nt, Homo sapiens
  misc_RNA (1)...(19): siRNA sense strand
ggcagcauuugucucgaua

SEQ ID NO: 1684365 - RNA, 19 nt, Homo sapiens
  misc_RNA (1)...(19): siRNA sense strand
ucacaguggucgccugcuu

SEQ ID NO: 1684366 - RNA, 19 nt, Homo sapiens
  misc_RNA (1)...(19): siRNA sense strand
ucgccugcuuuaacaauuu

SEQ ID NO: 1684367 - RNA, 19 nt, Homo sapiens
  misc_RNA (1)...(19): siRNA sense strand
cuaaugacagcccauauca

SEQ ID NO: 1684368 - RNA, 19 nt, Homo sapiens
  misc_RNA (1)...(19): siRNA sense strand
acaguggucgccugcuuua

SEQ ID NO: 1684369 - RNA, 19 nt, Homo sapiens
  misc_RNA (1)...(19): siRNA sense strand
gauauucuaagaucacagu

SEQ ID NO: 1684370 - RNA, 19 nt, Homo sapiens
  misc_RNA (1)...(19): siRNA sense strand
gaccuaaugacagcccaua

SEQ ID NO: 1684371 - RNA, 19 nt, Homo sapiens
  misc_RNA (1)...(19): siRNA sense strand
guggucgccugcuuuaaca

SEQ ID NO: 1684372 - RNA, 19 nt, Homo sapiens
  misc_RNA (1)...(19): siRNA sense strand
aacagaauaucucgggaau

SEQ ID NO: 1684373 - RNA, 19 nt, Homo sapiens
  misc_RNA (1)...(19): siRNA sense strand
gaauggacucagaaguaug

SEQ ID NO: 1684374 - RNA, 19 nt, Homo sapiens
  misc_RNA (1)...(19): siRNA sense strand
ucucgggaauggacucaga

SEQ ID NO: 1684375 - RNA, 19 nt, Homo sapiens
  misc_RNA (1)...(19): siRNA sense strand
aaugacagcccauaucaag

SEQ ID NO: 1684376 - RNA, 19 nt, Homo sapiens
  misc_RNA (1)...(19): siRNA sense strand
ccuaaugacagcccauauc

SEQ ID NO: 1684377 - RNA, 19 nt, Homo sapiens
  misc_RNA (1)...(19): siRNA sense strand
gucgccugcuuuaacaauu

SEQ ID NO: 1684378 - RNA, 19 nt, Homo sapiens
  misc_RNA (1)...(19): siRNA sense strand
uggcagcauuugucucgau

SEQ ID NO: 1684379 - RNA, 19 nt, Homo sapiens
  misc_RNA (1)...(19): siRNA sense strand
ggucgccugcuuuaacaau

SEQ ID NO: 1684380 - RNA, 19 nt, Homo sapiens
  misc_RNA (1)...(19): siRNA sense strand
ggaauggacucagaaguau

SEQ ID NO: 1684381 - RNA, 19 nt, Homo sapiens
  misc_RNA (1)...(19): siRNA sense strand
gggaauggacucagaagua

SEQ ID NO: 1684382 - RNA, 19 nt, Homo sapiens
  misc_RNA (1)...(19): siRNA sense strand
ucagaaguaugccauguga

SEQ ID NO: 1684383 - RNA, 19 nt, Homo sapiens
  misc_RNA (1)...(19): siRNA sense strand
aaacagacagagauaagua

SEQ ID NO: 1684384 - RNA, 19 nt, Homo sapiens
  misc_RNA (1)...(19): siRNA sense strand
cagaauaucucgggaaugg

SEQ ID NO: 1684385 - RNA, 19 nt, Homo sapiens
  misc_RNA (1)...(19): siRNA sense strand
gcauuugucucgauauucu

SEQ ID NO: 1684386 - RNA, 19 nt, Homo sapiens
  misc_RNA (1)...(19): siRNA sense strand
cagcauuugucucgauauu

SEQ ID NO: 1684387 - RNA, 19 nt, Homo sapiens
  misc_RNA (1)...(19): siRNA sense strand
ccacaauuaugggaccuaa

SEQ ID NO: 1684388 - RNA, 19 nt, Homo sapiens
  misc_RNA (1)...(19): siRNA sense strand
ggcagcauuugucucgaua

SEQ ID NO: 1684389 - RNA, 19 nt, Homo sapiens
  misc_RNA (1)...(19): siRNA sense strand
ucacaguggucgccugcuu

SEQ ID NO: 1684390 - RNA, 19 nt, Homo sapiens
  misc_RNA (1)...(19): siRNA sense strand
ucgccugcuuuaacaauuu

SEQ ID NO: 1684391 - RNA, 19 nt, Homo sapiens
  misc_RNA (1)...(19): siRNA sense strand
cuaaugacagcccauauca

SEQ ID NO: 1684392 - RNA, 19 nt, Homo sapiens
  misc_RNA (1)...(19): siRNA sense strand
acaguggucgccugcuuua

SEQ ID NO: 1684393 - RNA, 19 nt, Homo sapiens
  misc_RNA (1)...(19): siRNA sense strand
gauauucuaagaucacagu

SEQ ID NO: 1684394 - RNA, 19 nt, Homo sapiens
  misc_RNA (1)...(19): siRNA sense strand
gaccuaaugacagcccaua

SEQ ID NO: 1684395 - RNA, 19 nt, Homo sapiens
  misc_RNA (1)...(19): siRNA sense strand
guggucgccugcuuuaaca

SEQ ID NO: 1684396 - RNA, 19 nt, Homo sapiens
  misc_RNA (1)...(19): siRNA sense strand
aacagaauaucucgggaau

SEQ ID NO: 1684397 - RNA, 19 nt, Homo sapiens
  misc_RNA (1)...(19): siRNA sense strand
gaauggacucagaaguaug

SEQ ID NO: 1684398 - RNA, 19 nt, Homo sapiens
  misc_RNA (1)...(19): siRNA sense strand
ucucgggaauggacucaga

SEQ ID NO: 1684399 - RNA, 19 nt, Homo sapiens
  misc_RNA (1)...(19): siRNA sense strand
aaugacagcccauaucaag

SEQ ID NO: 1684400 - RNA, 19 nt, Homo sapiens
  misc_RNA (1)...(19): siRNA sense strand
ccuaaugacagcccauauc

SEQ ID NO: 1684401 - RNA, 19 nt, Homo sapiens
  misc_RNA (1)...(19): siRNA sense strand
gucgccugcuuuaacaauu

SEQ ID NO: 1684402 - RNA, 19 nt, Homo sapiens
  misc_RNA (1)...(19): siRNA sense strand
uggcagcauuugucucgau

SEQ ID NO: 1684403 - RNA, 19 nt, Homo sapiens
  misc_RNA (1)...(19): siRNA sense strand
ggucgccugcuuuaacaau

SEQ ID NO: 1684404 - RNA, 19 nt, Homo sapiens
  misc_RNA (1)...(19): siRNA sense strand
ggaauggacucagaaguau

SEQ ID NO: 1684405 - RNA, 19 nt, Homo sapiens
  misc_RNA (1)...(19): siRNA sense strand
gggaauggacucagaagua

SEQ ID NO: 1684406 - RNA, 19 nt, Homo sapiens
  misc_RNA (1)...(19): siRNA sense strand
ucagaaguaugccauguga

SEQ ID NO: 1684407 - RNA, 19 nt, Homo sapiens
  misc_RNA (1)...(19): siRNA sense strand
aaacagacagagauaagua

SEQ ID NO: 1684408 - RNA, 19 nt, Homo sapiens
  misc_RNA (1)...(19): siRNA sense strand
cagaauaucucgggaaugg

SEQ ID NO: 1684409 - RNA, 19 nt, Homo sapiens
  misc_RNA (1)...(19): siRNA sense strand
gcauuugucucgauauucu

SEQ ID NO: 1684410 - RNA, 19 nt, Homo sapiens
  misc_RNA (1)...(19): siRNA sense strand
cagcauuugucucgauauu

SEQ ID NO: 1684411 - RNA, 19 nt, Homo sapiens
  misc_RNA (1)...(19): siRNA sense strand
ccacaauuaugggaccuaa

SEQ ID NO: 1684412 - RNA, 19 nt, Homo sapiens
  misc_RNA (1)...(19): siRNA sense strand
ggcagcauuugucucgaua

SEQ ID NO: 1684413 - RNA, 19 nt, Homo sapiens
  misc_RNA (1)...(19): siRNA sense strand
ucacaguggucgccugcuu

SEQ ID NO: 1684414 - RNA, 19 nt, Homo sapiens
  misc_RNA (1)...(19): siRNA sense strand
ucgccugcuuuaacaauuu

SEQ ID NO: 1684415 - RNA, 19 nt, Homo sapiens
  misc_RNA (1)...(19): siRNA sense strand
cuaaugacagcccauauca

SEQ ID NO: 1684416 - RNA, 19 nt, Homo sapiens
  misc_RNA (1)...(19): siRNA sense strand
acaguggucgccugcuuua

SEQ ID NO: 1684417 - RNA, 19 nt, Homo sapiens
  misc_RNA (1)...(19): siRNA sense strand
gauauucuaagaucacagu

SEQ ID NO: 1684418 - RNA, 19 nt, Homo sapiens
  misc_RNA (1)...(19): siRNA sense strand
gaccuaaugacagcccaua

SEQ ID NO: 1684419 - RNA, 19 nt, Homo sapiens
  misc_RNA (1)...(19): siRNA sense strand
guggucgccugcuuuaaca

SEQ ID NO: 1684420 - RNA, 19 nt, Homo sapiens
  misc_RNA (1)...(19): siRNA sense strand
aacagaauaucucgggaau

SEQ ID NO: 1684421 - RNA, 19 nt, Homo sapiens
  misc_RNA (1)...(19): siRNA sense strand
gaauggacucagaaguaug

SEQ ID NO: 1684422 - RNA, 19 nt, Homo sapiens
  misc_RNA (1)...(19): siRNA sense strand
ucucgggaauggacucaga

SEQ ID NO: 1684423 - RNA, 19 nt, Homo sapiens
  misc_RNA (1)...(19): siRNA sense strand
aaugacagcccauaucaag

SEQ ID NO: 1684424 - RNA, 19 nt, Homo sapiens
  misc_RNA (1)...(19): siRNA sense strand
ccuaaugacagcccauauc

SEQ ID NO: 1684425 - RNA, 19 nt, Homo sapiens
  misc_RNA (1)...(19): siRNA sense strand
gucgccugcuuuaacaauu

SEQ ID NO: 1684426 - RNA, 19 nt, Homo sapiens
  misc_RNA (1)...(19): siRNA sense strand
uggcagcauuugucucgau

SEQ ID NO: 1684427 - RNA, 19 nt, Homo sapiens
  misc_RNA (1)...(19): siRNA sense strand
ggucgccugcuuuaacaau

SEQ ID NO: 1684428 - RNA, 19 nt, Homo sapiens
  misc_RNA (1)...(19): siRNA sense strand
ggaauggacucagaaguau

SEQ ID NO: 1684429 - RNA, 19 nt, Homo sapiens
  misc_RNA (1)...(19): siRNA sense strand
gggaauggacucagaagua

SEQ ID NO: 1684430 - RNA, 19 nt, Homo sapiens
  misc_RNA (1)...(19): siRNA sense strand
ucagaaguaugccauguga

SEQ ID NO: 1684431 - RNA, 19 nt, Homo sapiens
  misc_RNA (1)...(19): siRNA sense strand
aaacagacagagauaagua

SEQ ID NO: 1684432 - RNA, 19 nt, Homo sapiens
  misc_RNA (1)...(19): siRNA sense strand
cagaauaucucgggaaugg

SEQ ID NO: 1684433 - RNA, 19 nt, Homo sapiens
  misc_RNA (1)...(19): siRNA sense strand
gcauuugucucgauauucu

SEQ ID NO: 1684434 - RNA, 19 nt, Homo sapiens
  misc_RNA (1)...(19): siRNA sense strand
cagcauuugucucgauauu

SEQ ID NO: 1684435 - RNA, 19 nt, Homo sapiens
  misc_RNA (1)...(19): siRNA sense strand
ccacaauuaugggaccuaa

SEQ ID NO: 1684436 - RNA, 19 nt, Homo sapiens
  misc_RNA (1)...(19): siRNA sense strand
ggcagcauuugucucgaua

SEQ ID NO: 1684437 - RNA, 19 nt, Homo sapiens
  misc_RNA (1)...(19): siRNA sense strand
ucacaguggucgccugcuu

SEQ ID NO: 1684438 - RNA, 19 nt, Homo sapiens
  misc_RNA (1)...(19): siRNA sense strand
ucgccugcuuuaacaauuu

SEQ ID NO: 1684439 - RNA, 19 nt, Homo sapiens
  misc_RNA (1)...(19): siRNA sense strand
cuaaugacagcccauauca

SEQ ID NO: 1684440 - RNA, 19 nt, Homo sapiens
  misc_RNA (1)...(19): siRNA sense strand
acaguggucgccugcuuua

SEQ ID NO: 1684441 - RNA, 19 nt, Homo sapiens
  misc_RNA (1)...(19): siRNA sense strand
gauauucuaagaucacagu

SEQ ID NO: 1684442 - RNA, 19 nt, Homo sapiens
  misc_RNA (1)...(19): siRNA sense strand
gaccuaaugacagcccaua

SEQ ID NO: 1684443 - RNA, 19 nt, Homo sapiens
  misc_RNA (1)...(19): siRNA sense strand
guggucgccugcuuuaaca

SEQ ID NO: 1684444 - RNA, 19 nt, Homo sapiens
  misc_RNA (1)...(19): siRNA sense strand
aacagaauaucucgggaau

SEQ ID NO: 1684445 - RNA, 19 nt, Homo sapiens
  misc_RNA (1)...(19): siRNA sense strand
gaauggacucagaaguaug

SEQ ID NO: 1684446 - RNA, 19 nt, Homo sapiens
  misc_RNA (1)...(19): siRNA sense strand
ucucgggaauggacucaga

SEQ ID NO: 1684447 - RNA, 19 nt, Homo sapiens
  misc_RNA (1)...(19): siRNA sense strand
aaugacagcccauaucaag

SEQ ID NO: 1684448 - RNA, 19 nt, Homo sapiens
  misc_RNA (1)...(19): siRNA sense strand
ccuaaugacagcccauauc

SEQ ID NO: 1684449 - RNA, 19 nt, Homo sapiens
  misc_RNA (1)...(19): siRNA sense strand
gucgccugcuuuaacaauu

SEQ ID NO: 1684450 - RNA, 19 nt, Homo sapiens
  misc_RNA (1)...(19): siRNA sense strand
uggcagcauuugucucgau

SEQ ID NO: 1684451 - RNA, 19 nt, Homo sapiens
  misc_RNA (1)...(19): siRNA sense strand
ggucgccugcuuuaacaau

SEQ ID NO: 1684452 - RNA, 19 nt, Homo sapiens
  misc_RNA (1)...(19): siRNA sense strand
aaacagacagagauaagua

SEQ ID NO: 1684453 - RNA, 19 nt, Homo sapiens
  misc_RNA (1)...(19): siRNA sense strand
gcauuugucucgauauucu

SEQ ID NO: 1684454 - RNA, 19 nt, Homo sapiens
  misc_RNA (1)...(19): siRNA sense strand
cagcauuugucucgauauu

SEQ ID NO: 1684455 - RNA, 19 nt, Homo sapiens
  misc_RNA (1)...(19): siRNA sense strand
ccacaauuaugggaccuaa

SEQ ID NO: 1684456 - RNA, 19 nt, Homo sapiens
  misc_RNA (1)...(19): siRNA sense strand
ggcagcauuugucucgaua

SEQ ID NO: 1684457 - RNA, 19 nt, Homo sapiens
  misc_RNA (1)...(19): siRNA sense strand
ucacaguggucgccugcuu

SEQ ID NO: 1684458 - RNA, 19 nt, Homo sapiens
  misc_RNA (1)...(19): siRNA sense strand
gcacggaucuauaaaacag

SEQ ID NO: 1684459 - RNA, 19 nt, Homo sapiens
  misc_RNA (1)...(19): siRNA sense strand
ucgccugcuuuaacaauuu

SEQ ID NO: 1684460 - RNA, 19 nt, Homo sapiens
  misc_RNA (1)...(19): siRNA sense strand
cuaaugacagcccauauca

SEQ ID NO: 1684461 - RNA, 19 nt, Homo sapiens
  misc_RNA (1)...(19): siRNA sense strand
acaguggucgccugcuuua

SEQ ID NO: 1684462 - RNA, 19 nt, Homo sapiens
  misc_RNA (1)...(19): siRNA sense strand
gauauucuaagaucacagu

SEQ ID NO: 1684463 - RNA, 19 nt, Homo sapiens
  misc_RNA (1)...(19): siRNA sense strand
gaccuaaugacagcccaua

SEQ ID NO: 1684464 - RNA, 19 nt, Homo sapiens
  misc_RNA (1)...(19): siRNA sense strand
guggucgccugcuuuaaca

SEQ ID NO: 1684465 - RNA, 19 nt, Homo sapiens
  misc_RNA (1)...(19): siRNA sense strand
aaugacagcccauaucaag

SEQ ID NO: 1684466 - RNA, 19 nt, Homo sapiens
  misc_RNA (1)...(19): siRNA sense strand
ccuaaugacagcccauauc

SEQ ID NO: 1684467 - RNA, 19 nt, Homo sapiens
  misc_RNA (1)...(19): siRNA sense strand
gucgccugcuuuaacaauu

SEQ ID NO: 1684468 - RNA, 19 nt, Homo sapiens
  misc_RNA (1)...(19): siRNA sense strand
uggcagcauuugucucgau

SEQ ID NO: 1684469 - RNA, 19 nt, Homo sapiens
  misc_RNA (1)...(19): siRNA sense strand
ggucgccugcuuuaacaau

SEQ ID NO: 1684470 - RNA, 19 nt, Homo sapiens
  misc_RNA (1)...(19): siRNA sense strand
ggaauggacucagaaguau

SEQ ID NO: 1684471 - RNA, 19 nt, Homo sapiens
  misc_RNA (1)...(19): siRNA sense strand
gggaauggacucagaagua

SEQ ID NO: 1684472 - RNA, 19 nt, Homo sapiens
  misc_RNA (1)...(19): siRNA sense strand
ucagaaguaugccauguga

SEQ ID NO: 1684473 - RNA, 19 nt, Homo sapiens
  misc_RNA (1)...(19): siRNA sense strand
aaacagacagagauaagua

SEQ ID NO: 1684474 - RNA, 19 nt, Homo sapiens
  misc_RNA (1)...(19): siRNA sense strand
cagaauaucucgggaaugg

SEQ ID NO: 1684475 - RNA, 19 nt, Homo sapiens
  misc_RNA (1)...(19): siRNA sense strand
gcauuugucucgauauucu

SEQ ID NO: 1684476 - RNA, 19 nt, Homo sapiens
  misc_RNA (1)...(19): siRNA sense strand
cagcauuugucucgauauu

SEQ ID NO: 1684477 - RNA, 19 nt, Homo sapiens
  misc_RNA (1)...(19): siRNA sense strand
ccacaauuaugggaccuaa

SEQ ID NO: 1684478 - RNA, 19 nt, Homo sapiens
  misc_RNA (1)...(19): siRNA sense strand
ggcagcauuugucucgaua

SEQ ID NO: 1684479 - RNA, 19 nt, Homo sapiens
  misc_RNA (1)...(19): siRNA sense strand
ucacaguggucgccugcuu

SEQ ID NO: 1684480 - RNA, 19 nt, Homo sapiens
  misc_RNA (1)...(19): siRNA sense strand
ucgccugcuuuaacaauuu

SEQ ID NO: 1684481 - RNA, 19 nt, Homo sapiens
  misc_RNA (1)...(19): siRNA sense strand
cuaaugacagcccauauca

SEQ ID NO: 1684482 - RNA, 19 nt, Homo sapiens
  misc_RNA (1)...(19): siRNA sense strand
acaguggucgccugcuuua

SEQ ID NO: 1684483 - RNA, 19 nt, Homo sapiens
  misc_RNA (1)...(19): siRNA sense strand
gauauucuaagaucacagu

SEQ ID NO: 1684484 - RNA, 19 nt, Homo sapiens
  misc_RNA (1)...(19): siRNA sense strand
gaccuaaugacagcccaua

SEQ ID NO: 1684485 - RNA, 19 nt, Homo sapiens
  misc_RNA (1)...(19): siRNA sense strand
guggucgccugcuuuaaca

SEQ ID NO: 1684486 - RNA, 19 nt, Homo sapiens
  misc_RNA (1)...(19): siRNA sense strand
aacagaauaucucgggaau

SEQ ID NO: 1684487 - RNA, 19 nt, Homo sapiens
  misc_RNA (1)...(19): siRNA sense strand
gaauggacucagaaguaug

SEQ ID NO: 1684488 - RNA, 19 nt, Homo sapiens
  misc_RNA (1)...(19): siRNA sense strand
ucucgggaauggacucaga

SEQ ID NO: 1684489 - RNA, 19 nt, Homo sapiens
  misc_RNA (1)...(19): siRNA sense strand
aaugacagcccauaucaag

SEQ ID NO: 1684490 - RNA, 19 nt, Homo sapiens
  misc_RNA (1)...(19): siRNA sense strand
ccuaaugacagcccauauc

SEQ ID NO: 1684491 - RNA, 19 nt, Homo sapiens
  misc_RNA (1)...(19): siRNA sense strand
gucgccugcuuuaacaauu

SEQ ID NO: 1684492 - RNA, 19 nt, Homo sapiens
  misc_RNA (1)...(19): siRNA sense strand
uggcagcauuugucucgau

SEQ ID NO: 1684493 - RNA, 19 nt, Homo sapiens
  misc_RNA (1)...(19): siRNA sense strand
ggucgccugcuuuaacaau

SEQ ID NO: 1684494 - RNA, 19 nt, Homo sapiens
  misc_RNA (1)...(19): siRNA sense strand
ggaauggacucagaaguau

SEQ ID NO: 1684495 - RNA, 19 nt, Homo sapiens
  misc_RNA (1)...(19): siRNA sense strand
gggaauggacucagaagua

SEQ ID NO: 1684496 - RNA, 19 nt, Homo sapiens
  misc_RNA (1)...(19): siRNA sense strand
ucagaaguaugccauguga

SEQ ID NO: 1684497 - RNA, 19 nt, Homo sapiens
  misc_RNA (1)...(19): siRNA sense strand
aaacagacagagauaagua

SEQ ID NO: 1684498 - RNA, 19 nt, Homo sapiens
  misc_RNA (1)...(19): siRNA sense strand
cagaauaucucgggaaugg

SEQ ID NO: 1684499 - RNA, 19 nt, Homo sapiens
  misc_RNA (1)...(19): siRNA sense strand
gcauuugucucgauauucu

SEQ ID NO: 1684500 - RNA, 19 nt, Homo sapiens
  misc_RNA (1)...(19): siRNA sense strand
cagcauuugucucgauauu

SEQ ID NO: 1684501 - RNA, 19 nt, Homo sapiens
  misc_RNA (1)...(19): siRNA sense strand
ccacaauuaugggaccuaa

SEQ ID NO: 1684502 - RNA, 19 nt, Homo sapiens
  misc_RNA (1)...(19): siRNA sense strand
ggcagcauuugucucgaua

SEQ ID NO: 1684503 - RNA, 19 nt, Homo sapiens
  misc_RNA (1)...(19): siRNA sense strand
ucacaguggucgccugcuu

SEQ ID NO: 1684504 - RNA, 19 nt, Homo sapiens
  misc_RNA (1)...(19): siRNA sense strand
ucgccugcuuuaacaauuu

SEQ ID NO: 1684505 - RNA, 19 nt, Homo sapiens
  misc_RNA (1)...(19): siRNA sense strand
cuaaugacagcccauauca

SEQ ID NO: 1684506 - RNA, 19 nt, Homo sapiens
  misc_RNA (1)...(19): siRNA sense strand
acaguggucgccugcuuua

SEQ ID NO: 1684507 - RNA, 19 nt, Homo sapiens
  misc_RNA (1)...(19): siRNA sense strand
gauauucuaagaucacagu

SEQ ID NO: 1684508 - RNA, 19 nt, Homo sapiens
  misc_RNA (1)...(19): siRNA sense strand
gaccuaaugacagcccaua

SEQ ID NO: 1684509 - RNA, 19 nt, Homo sapiens
  misc_RNA (1)...(19): siRNA sense strand
guggucgccugcuuuaaca

SEQ ID NO: 1684510 - RNA, 19 nt, Homo sapiens
  misc_RNA (1)...(19): siRNA sense strand
aacagaauaucucgggaau

SEQ ID NO: 1684511 - RNA, 19 nt, Homo sapiens
  misc_RNA (1)...(19): siRNA sense strand
gaauggacucagaaguaug

SEQ ID NO: 1684512 - RNA, 19 nt, Homo sapiens
  misc_RNA (1)...(19): siRNA sense strand
ucucgggaauggacucaga

SEQ ID NO: 1684513 - RNA, 19 nt, Homo sapiens
  misc_RNA (1)...(19): siRNA sense strand
aaugacagcccauaucaag

SEQ ID NO: 1684514 - RNA, 19 nt, Homo sapiens
  misc_RNA (1)...(19): siRNA sense strand
ccuaaugacagcccauauc

SEQ ID NO: 1684515 - RNA, 19 nt, Homo sapiens
  misc_RNA (1)...(19): siRNA sense strand
gucgccugcuuuaacaauu

SEQ ID NO: 1684516 - RNA, 19 nt, Homo sapiens
  misc_RNA (1)...(19): siRNA sense strand
uggcagcauuugucucgau

SEQ ID NO: 1684517 - RNA, 19 nt, Homo sapiens
  misc_RNA (1)...(19): siRNA sense strand
ggucgccugcuuuaacaau

SEQ ID NO: 1684518 - RNA, 19 nt, Homo sapiens
  misc_RNA (1)...(19): siRNA sense strand
ggaauggacucagaaguau

SEQ ID NO: 1684519 - RNA, 19 nt, Homo sapiens
  misc_RNA (1)...(19): siRNA sense strand
gggaauggacucagaagua

SEQ ID NO: 1684520 - RNA, 19 nt, Homo sapiens
  misc_RNA (1)...(19): siRNA sense strand
ucagaaguaugccauguga

SEQ ID NO: 1684521 - RNA, 19 nt, Homo sapiens
  misc_RNA (1)...(19): siRNA sense strand
aaacagacagagauaagua

SEQ ID NO: 1684522 - RNA, 19 nt, Homo sapiens
  misc_RNA (1)...(19): siRNA sense strand
cagaauaucucgggaaugg

SEQ ID NO: 1684523 - RNA, 19 nt, Homo sapiens
  misc_RNA (1)...(19): siRNA sense strand
gcauuugucucgauauucu

SEQ ID NO: 1684524 - RNA, 19 nt, Homo sapiens
  misc_RNA (1)...(19): siRNA sense strand
cagcauuugucucgauauu

SEQ ID NO: 1684525 - RNA, 19 nt, Homo sapiens
  misc_RNA (1)...(19): siRNA sense strand
ccacaauuaugggaccuaa

SEQ ID NO: 1684526 - RNA, 19 nt, Homo sapiens
  misc_RNA (1)...(19): siRNA sense strand
ggcagcauuugucucgaua

SEQ ID NO: 1684527 - RNA, 19 nt, Homo sapiens
  misc_RNA (1)...(19): siRNA sense strand
ucacaguggucgccugcuu

SEQ ID NO: 1684528 - RNA, 19 nt, Homo sapiens
  misc_RNA (1)...(19): siRNA sense strand
ucgccugcuuuaacaauuu

SEQ ID NO: 1684529 - RNA, 19 nt, Homo sapiens
  misc_RNA (1)...(19): siRNA sense strand
cuaaugacagcccauauca

SEQ ID NO: 1684530 - RNA, 19 nt, Homo sapiens
  misc_RNA (1)...(19): siRNA sense strand
acaguggucgccugcuuua

SEQ ID NO: 1684531 - RNA, 19 nt, Homo sapiens
  misc_RNA (1)...(19): siRNA sense strand
gauauucuaagaucacagu

SEQ ID NO: 1684532 - RNA, 19 nt, Homo sapiens
  misc_RNA (1)...(19): siRNA sense strand
gaccuaaugacagcccaua

SEQ ID NO: 1684533 - RNA, 19 nt, Homo sapiens
  misc_RNA (1)...(19): siRNA sense strand
guggucgccugcuuuaaca

SEQ ID NO: 1684534 - RNA, 19 nt, Homo sapiens
  misc_RNA (1)...(19): siRNA sense strand
aacagaauaucucgggaau

SEQ ID NO: 1684535 - RNA, 19 nt, Homo sapiens
  misc_RNA (1)...(19): siRNA sense strand
gaauggacucagaaguaug

SEQ ID NO: 1684536 - RNA, 19 nt, Homo sapiens
  misc_RNA (1)...(19): siRNA sense strand
ucucgggaauggacucaga

SEQ ID NO: 1684537 - RNA, 19 nt, Homo sapiens
  misc_RNA (1)...(19): siRNA sense strand
aaugacagcccauaucaag

SEQ ID NO: 1684538 - RNA, 19 nt, Homo sapiens
  misc_RNA (1)...(19): siRNA sense strand
ccuaaugacagcccauauc

SEQ ID NO: 1684539 - RNA, 19 nt, Homo sapiens
  misc_RNA (1)...(19): siRNA sense strand
gucgccugcuuuaacaauu

SEQ ID NO: 1684540 - RNA, 19 nt, Homo sapiens
  misc_RNA (1)...(19): siRNA sense strand
uggcagcauuugucucgau

SEQ ID NO: 1684541 - RNA, 19 nt, Homo sapiens
  misc_RNA (1)...(19): siRNA sense strand
ggucgccugcuuuaacaau

SEQ ID NO: 1684542 - RNA, 19 nt, Homo sapiens
  misc_RNA (1)...(19): siRNA sense strand
ggaauggacucagaaguau

SEQ ID NO: 1684543 - RNA, 19 nt, Homo sapiens
  misc_RNA (1)...(19): siRNA sense strand
gggaauggacucagaagua

SEQ ID NO: 1684544 - RNA, 19 nt, Homo sapiens
  misc_RNA (1)...(19): siRNA sense strand
ucagaaguaugccauguga

SEQ ID NO: 1684545 - RNA, 19 nt, Homo sapiens
  misc_RNA (1)...(19): siRNA sense strand
aaacagacagagauaagua

SEQ ID NO: 1684546 - RNA, 19 nt, Homo sapiens
  misc_RNA (1)...(19): siRNA sense strand
cagaauaucucgggaaugg

SEQ ID NO: 1684547 - RNA, 19 nt, Homo sapiens
  misc_RNA (1)...(19): siRNA sense strand
gcauuugucucgauauucu

SEQ ID NO: 1684548 - RNA, 19 nt, Homo sapiens
  misc_RNA (1)...(19): siRNA sense strand
cagcauuugucucgauauu

SEQ ID NO: 1684549 - RNA, 19 nt, Homo sapiens
  misc_RNA (1)...(19): siRNA sense strand
ccacaauuaugggaccuaa

SEQ ID NO: 1684550 - RNA, 19 nt, Homo sapiens
  misc_RNA (1)...(19): siRNA sense strand
ggcagcauuugucucgaua

SEQ ID NO: 1684551 - RNA, 19 nt, Homo sapiens
  misc_RNA (1)...(19): siRNA sense strand
ucacaguggucgccugcuu

SEQ ID NO: 1684552 - RNA, 19 nt, Homo sapiens
  misc_RNA (1)...(19): siRNA sense strand
ucgccugcuuuaacaauuu

SEQ ID NO: 1684553 - RNA, 19 nt, Homo sapiens
  misc_RNA (1)...(19): siRNA sense strand
cuaaugacagcccauauca

SEQ ID NO: 1684554 - RNA, 19 nt, Homo sapiens
  misc_RNA (1)...(19): siRNA sense strand
acaguggucgccugcuuua

SEQ ID NO: 1684555 - RNA, 19 nt, Homo sapiens
  misc_RNA (1)...(19): siRNA sense strand
gauauucuaagaucacagu

SEQ ID NO: 1684556 - RNA, 19 nt, Homo sapiens
  misc_RNA (1)...(19): siRNA sense strand
gaccuaaugacagcccaua

SEQ ID NO: 1684557 - RNA, 19 nt, Homo sapiens
  misc_RNA (1)...(19): siRNA sense strand
guggucgccugcuuuaaca

SEQ ID NO: 1684558 - RNA, 19 nt, Homo sapiens
  misc_RNA (1)...(19): siRNA sense strand
aacagaauaucucgggaau

SEQ ID NO: 1684559 - RNA, 19 nt, Homo sapiens
  misc_RNA (1)...(19): siRNA sense strand
gaauggacucagaaguaug

SEQ ID NO: 1684560 - RNA, 19 nt, Homo sapiens
  misc_RNA (1)...(19): siRNA sense strand
ucucgggaauggacucaga

SEQ ID NO: 1684561 - RNA, 19 nt, Homo sapiens
  misc_RNA (1)...(19): siRNA sense strand
aaugacagcccauaucaag

SEQ ID NO: 1684562 - RNA, 19 nt, Homo sapiens
  misc_RNA (1)...(19): siRNA sense strand
ccuaaugacagcccauauc

SEQ ID NO: 1684563 - RNA, 19 nt, Homo sapiens
  misc_RNA (1)...(19): siRNA sense strand
gucgccugcuuuaacaauu

SEQ ID NO: 1684564 - RNA, 19 nt, Homo sapiens
  misc_RNA (1)...(19): siRNA sense strand
uggcagcauuugucucgau

SEQ ID NO: 1684565 - RNA, 19 nt, Homo sapiens
  misc_RNA (1)...(19): siRNA sense strand
ggucgccugcuuuaacaau

SEQ ID NO: 1684566 - RNA, 19 nt, Homo sapiens
  misc_RNA (1)...(19): siRNA sense strand
ggaauggacucagaaguau

SEQ ID NO: 1684567 - RNA, 19 nt, Homo sapiens
  misc_RNA (1)...(19): siRNA sense strand
gggaauggacucagaagua

SEQ ID NO: 1684568 - RNA, 19 nt, Homo sapiens
  misc_RNA (1)...(19): siRNA sense strand
ucagaaguaugccauguga

SEQ ID NO: 1684569 - RNA, 19 nt, Homo sapiens
  misc_RNA (1)...(19): siRNA sense strand
aaacagacagagauaagua

SEQ ID NO: 1684570 - RNA, 19 nt, Homo sapiens
  misc_RNA (1)...(19): siRNA sense strand
cagaauaucucgggaaugg

SEQ ID NO: 1684571 - RNA, 19 nt, Homo sapiens
  misc_RNA (1)...(19): siRNA sense strand
gcauuugucucgauauucu

SEQ ID NO: 1684572 - RNA, 19 nt, Homo sapiens
  misc_RNA (1)...(19): siRNA sense strand
cagcauuugucucgauauu

SEQ ID NO: 1684573 - RNA, 19 nt, Homo sapiens
  misc_RNA (1)...(19): siRNA sense strand
ccacaauuaugggaccuaa

SEQ ID NO: 1684574 - RNA, 19 nt, Homo sapiens
  misc_RNA (1)...(19): siRNA sense strand
ggcagcauuugucucgaua

SEQ ID NO: 1684575 - RNA, 19 nt, Homo sapiens
  misc_RNA (1)...(19): siRNA sense strand
ucacaguggucgccugcuu

SEQ ID NO: 1684576 - RNA, 19 nt, Homo sapiens
  misc_RNA (1)...(19): siRNA sense strand
ucgccugcuuuaacaauuu

SEQ ID NO: 1684577 - RNA, 19 nt, Homo sapiens
  misc_RNA (1)...(19): siRNA sense strand
cuaaugacagcccauauca

SEQ ID NO: 1684578 - RNA, 19 nt, Homo sapiens
  misc_RNA (1)...(19): siRNA sense strand
acaguggucgccugcuuua

SEQ ID NO: 1684579 - RNA, 19 nt, Homo sapiens
  misc_RNA (1)...(19): siRNA sense strand
gauauucuaagaucacagu

SEQ ID NO: 1684580 - RNA, 19 nt, Homo sapiens
  misc_RNA (1)...(19): siRNA sense strand
gaccuaaugacagcccaua

SEQ ID NO: 1684581 - RNA, 19 nt, Homo sapiens
  misc_RNA (1)...(19): siRNA sense strand
guggucgccugcuuuaaca

SEQ ID NO: 1684582 - RNA, 19 nt, Homo sapiens
  misc_RNA (1)...(19): siRNA sense strand
aacagaauaucucgggaau

SEQ ID NO: 1684583 - RNA, 19 nt, Homo sapiens
  misc_RNA (1)...(19): siRNA sense strand
gaauggacucagaaguaug

SEQ ID NO: 1684584 - RNA, 19 nt, Homo sapiens
  misc_RNA (1)...(19): siRNA sense strand
ucucgggaauggacucaga

SEQ ID NO: 1684585 - RNA, 19 nt, Homo sapiens
  misc_RNA (1)...(19): siRNA sense strand
aaugacagcccauaucaag

SEQ ID NO: 1684586 - RNA, 19 nt, Homo sapiens
  misc_RNA (1)...(19): siRNA sense strand
ccuaaugacagcccauauc

SEQ ID NO: 1684587 - RNA, 19 nt, Homo sapiens
  misc_RNA (1)...(19): siRNA sense strand
gucgccugcuuuaacaauu

SEQ ID NO: 1684588 - RNA, 19 nt, Homo sapiens
  misc_RNA (1)...(19): siRNA sense strand
uggcagcauuugucucgau

SEQ ID NO: 1684589 - RNA, 19 nt, Homo sapiens
  misc_RNA (1)...(19): siRNA sense strand
ggucgccugcuuuaacaau

SEQ ID NO: 1684590 - RNA, 19 nt, Homo sapiens
  misc_RNA (1)...(19): siRNA sense strand
ggaauggacucagaaguau

SEQ ID NO: 1684591 - RNA, 19 nt, Homo sapiens
  misc_RNA (1)...(19): siRNA sense strand
gggaauggacucagaagua

SEQ ID NO: 1684592 - RNA, 19 nt, Homo sapiens
  misc_RNA (1)...(19): siRNA sense strand
ucagaaguaugccauguga

SEQ ID NO: 1684593 - RNA, 19 nt, Homo sapiens
  misc_RNA (1)...(19): siRNA sense strand
aaacagacagagauaagua

SEQ ID NO: 1684594 - RNA, 19 nt, Homo sapiens
  misc_RNA (1)...(19): siRNA sense strand
cagaauaucucgggaaugg

SEQ ID NO: 1684595 - RNA, 19 nt, Homo sapiens
  misc_RNA (1)...(19): siRNA sense strand
gcauuugucucgauauucu

SEQ ID NO: 1684596 - RNA, 19 nt, Homo sapiens
  misc_RNA (1)...(19): siRNA sense strand
cagcauuugucucgauauu

SEQ ID NO: 1684597 - RNA, 19 nt, Homo sapiens
  misc_RNA (1)...(19): siRNA sense strand
ccacaauuaugggaccuaa

SEQ ID NO: 1684598 - RNA, 19 nt, Homo sapiens
  misc_RNA (1)...(19): siRNA sense strand
ggcagcauuugucucgaua

SEQ ID NO: 1684599 - RNA, 19 nt, Homo sapiens
  misc_RNA (1)...(19): siRNA sense strand
ucacaguggucgccugcuu

SEQ ID NO: 1684600 - RNA, 19 nt, Homo sapiens
  misc_RNA (1)...(19): siRNA sense strand
ucgccugcuuuaacaauuu

SEQ ID NO: 1684601 - RNA, 19 nt, Homo sapiens
  misc_RNA (1)...(19): siRNA sense strand
cuaaugacagcccauauca

SEQ ID NO: 1684602 - RNA, 19 nt, Homo sapiens
  misc_RNA (1)...(19): siRNA sense strand
acaguggucgccugcuuua

SEQ ID NO: 1684603 - RNA, 19 nt, Homo sapiens
  misc_RNA (1)...(19): siRNA sense strand
gauauucuaagaucacagu

SEQ ID NO: 1684604 - RNA, 19 nt, Homo sapiens
  misc_RNA (1)...(19): siRNA sense strand
gaccuaaugacagcccaua

SEQ ID NO: 1684605 - RNA, 19 nt, Homo sapiens
  misc_RNA (1)...(19): siRNA sense strand
guggucgccugcuuuaaca

SEQ ID NO: 1684606 - RNA, 19 nt, Homo sapiens
  misc_RNA (1)...(19): siRNA sense strand
aacagaauaucucgggaau

SEQ ID NO: 1684607 - RNA, 19 nt, Homo sapiens
  misc_RNA (1)...(19): siRNA sense strand
gaauggacucagaaguaug

SEQ ID NO: 1684608 - RNA, 19 nt, Homo sapiens
  misc_RNA (1)...(19): siRNA sense strand
ucucgggaauggacucaga

SEQ ID NO: 1684609 - RNA, 19 nt, Homo sapiens
  misc_RNA (1)...(19): siRNA sense strand
aaugacagcccauaucaag

SEQ ID NO: 1684610 - RNA, 19 nt, Homo sapiens
  misc_RNA (1)...(19): siRNA sense strand
ccuaaugacagcccauauc

SEQ ID NO: 1684611 - RNA, 19 nt, Homo sapiens
  misc_RNA (1)...(19): siRNA sense strand
gucgccugcuuuaacaauu

SEQ ID NO: 1684612 - RNA, 19 nt, Homo sapiens
  misc_RNA (1)...(19): siRNA sense strand
uggcagcauuugucucgau

SEQ ID NO: 1684613 - RNA, 19 nt, Homo sapiens
  misc_RNA (1)...(19): siRNA sense strand
ggucgccugcuuuaacaau

SEQ ID NO: 1684614 - RNA, 19 nt, Homo sapiens
  misc_RNA (1)...(19): siRNA sense strand
ggaauggacucagaaguau

SEQ ID NO: 1684615 - RNA, 19 nt, Homo sapiens
  misc_RNA (1)...(19): siRNA sense strand
gggaauggacucagaagua

SEQ ID NO: 1684616 - RNA, 19 nt, Homo sapiens
  misc_RNA (1)...(19): siRNA sense strand
ucagaaguaugccauguga

SEQ ID NO: 1684617 - RNA, 19 nt, Homo sapiens
  misc_RNA (1)...(19): siRNA sense strand
aaacagacagagauaagua

SEQ ID NO: 1684618 - RNA, 19 nt, Homo sapiens
  misc_RNA (1)...(19): siRNA sense strand
cagaauaucucgggaaugg

SEQ ID NO: 1684619 - RNA, 19 nt, Homo sapiens
  misc_RNA (1)...(19): siRNA sense strand
gcauuugucucgauauucu

SEQ ID NO: 1684620 - RNA, 19 nt, Homo sapiens
  misc_RNA (1)...(19): siRNA sense strand
cagcauuugucucgauauu

SEQ ID NO: 1684621 - RNA, 19 nt, Homo sapiens
  misc_RNA (1)...(19): siRNA sense strand
ccacaauuaugggaccuaa

SEQ ID NO: 1684622 - RNA, 19 nt, Homo sapiens
  misc_RNA (1)...(19): siRNA sense strand
ggcagcauuugucucgaua

SEQ ID NO: 1684623 - RNA, 19 nt, Homo sapiens
  misc_RNA (1)...(19): siRNA sense strand
ucacaguggucgccugcuu

SEQ ID NO: 1684624 - RNA, 19 nt, Homo sapiens
  misc_RNA (1)...(19): siRNA sense strand
ucgccugcuuuaacaauuu

SEQ ID NO: 1684625 - RNA, 19 nt, Homo sapiens
  misc_RNA (1)...(19): siRNA sense strand
cuaaugacagcccauauca

SEQ ID NO: 1684626 - RNA, 19 nt, Homo sapiens
  misc_RNA (1)...(19): siRNA sense strand
acaguggucgccugcuuua

SEQ ID NO: 1684627 - RNA, 19 nt, Homo sapiens
  misc_RNA (1)...(19): siRNA sense strand
gauauucuaagaucacagu

SEQ ID NO: 1684628 - RNA, 19 nt, Homo sapiens
  misc_RNA (1)...(19): siRNA sense strand
gaccuaaugacagcccaua

SEQ ID NO: 1684629 - RNA, 19 nt, Homo sapiens
  misc_RNA (1)...(19): siRNA sense strand
guggucgccugcuuuaaca

SEQ ID NO: 1684630 - RNA, 19 nt, Homo sapiens
  misc_RNA (1)...(19): siRNA sense strand
aacagaauaucucgggaau

SEQ ID NO: 1684631 - RNA, 19 nt, Homo sapiens
  misc_RNA (1)...(19): siRNA sense strand
gaauggacucagaaguaug

SEQ ID NO: 1684632 - RNA, 19 nt, Homo sapiens
  misc_RNA (1)...(19): siRNA sense strand
ucucgggaauggacucaga

SEQ ID NO: 1684633 - RNA, 19 nt, Homo sapiens
  misc_RNA (1)...(19): siRNA sense strand
aaugacagcccauaucaag

SEQ ID NO: 1684634 - RNA, 19 nt, Homo sapiens
  misc_RNA (1)...(19): siRNA sense strand
ccuaaugacagcccauauc

SEQ ID NO: 1684635 - RNA, 19 nt, Homo sapiens
  misc_RNA (1)...(19): siRNA sense strand
gucgccugcuuuaacaauu

SEQ ID NO: 1684636 - RNA, 19 nt, Homo sapiens
  misc_RNA (1)...(19): siRNA sense strand
uggcagcauuugucucgau

SEQ ID NO: 1684637 - RNA, 19 nt, Homo sapiens
  misc_RNA (1)...(19): siRNA sense strand
ggucgccugcuuuaacaau

SEQ ID NO: 1684638 - RNA, 19 nt, Homo sapiens
  misc_RNA (1)...(19): siRNA sense strand
ggaauggacucagaaguau

SEQ ID NO: 1684639 - RNA, 19 nt, Homo sapiens
  misc_RNA (1)...(19): siRNA sense strand
gggaauggacucagaagua

SEQ ID NO: 1684640 - RNA, 19 nt, Homo sapiens
  misc_RNA (1)...(19): siRNA sense strand
ucagaaguaugccauguga

SEQ ID NO: 1684641 - RNA, 19 nt, Homo sapiens
  misc_RNA (1)...(19): siRNA sense strand
aaacagacagagauaagua

SEQ ID NO: 1684642 - RNA, 19 nt, Homo sapiens
  misc_RNA (1)...(19): siRNA sense strand
cagaauaucucgggaaugg

SEQ ID NO: 1684643 - RNA, 19 nt, Homo sapiens
  misc_RNA (1)...(19): siRNA sense strand
gcauuugucucgauauucu

SEQ ID NO: 1684644 - RNA, 19 nt, Homo sapiens
  misc_RNA (1)...(19): siRNA sense strand
cagcauuugucucgauauu

SEQ ID NO: 1684645 - RNA, 19 nt, Homo sapiens
  misc_RNA (1)...(19): siRNA sense strand
ccacaauuaugggaccuaa

SEQ ID NO: 1684646 - RNA, 19 nt, Homo sapiens
  misc_RNA (1)...(19): siRNA sense strand
ggcagcauuugucucgaua

SEQ ID NO: 1684647 - RNA, 19 nt, Homo sapiens
  misc_RNA (1)...(19): siRNA sense strand
ucacaguggucgccugcuu

SEQ ID NO: 1684648 - RNA, 19 nt, Homo sapiens
  misc_RNA (1)...(19): siRNA sense strand
ucgccugcuuuaacaauuu

SEQ ID NO: 1684649 - RNA, 19 nt, Homo sapiens
  misc_RNA (1)...(19): siRNA sense strand
cuaaugacagcccauauca

SEQ ID NO: 1684650 - RNA, 19 nt, Homo sapiens
  misc_RNA (1)...(19): siRNA sense strand
acaguggucgccugcuuua

SEQ ID NO: 1684651 - RNA, 19 nt, Homo sapiens
  misc_RNA (1)...(19): siRNA sense strand
gauauucuaagaucacagu

SEQ ID NO: 1684652 - RNA, 19 nt, Homo sapiens
  misc_RNA (1)...(19): siRNA sense strand
gaccuaaugacagcccaua

SEQ ID NO: 1684653 - RNA, 19 nt, Homo sapiens
  misc_RNA (1)...(19): siRNA sense strand
guggucgccugcuuuaaca

SEQ ID NO: 1684654 - RNA, 19 nt, Homo sapiens
  misc_RNA (1)...(19): siRNA sense strand
aacagaauaucucgggaau

SEQ ID NO: 1684655 - RNA, 19 nt, Homo sapiens
  misc_RNA (1)...(19): siRNA sense strand
gaauggacucagaaguaug

SEQ ID NO: 1684656 - RNA, 19 nt, Homo sapiens
  misc_RNA (1)...(19): siRNA sense strand
ucucgggaauggacucaga

SEQ ID NO: 1684657 - RNA, 19 nt, Homo sapiens
  misc_RNA (1)...(19): siRNA sense strand
aaugacagcccauaucaag

SEQ ID NO: 1684658 - RNA, 19 nt, Homo sapiens
  misc_RNA (1)...(19): siRNA sense strand
ccuaaugacagcccauauc

SEQ ID NO: 1684659 - RNA, 19 nt, Homo sapiens
  misc_RNA (1)...(19): siRNA sense strand
gucgccugcuuuaacaauu

SEQ ID NO: 1684660 - RNA, 19 nt, Homo sapiens
  misc_RNA (1)...(19): siRNA sense strand
uggcagcauuugucucgau

SEQ ID NO: 1684661 - RNA, 19 nt, Homo sapiens
  misc_RNA (1)...(19): siRNA sense strand
ggucgccugcuuuaacaau

SEQ ID NO: 1684662 - RNA, 19 nt, Homo sapiens
  misc_RNA (1)...(19): siRNA sense strand
aaacagacagagauaagua

SEQ ID NO: 1684663 - RNA, 19 nt, Homo sapiens
  misc_RNA (1)...(19): siRNA sense strand
gcauuugucucgauauucu

SEQ ID NO: 1684664 - RNA, 19 nt, Homo sapiens
  misc_RNA (1)...(19): siRNA sense strand
cagcauuugucucgauauu

SEQ ID NO: 1684665 - RNA, 19 nt, Homo sapiens
  misc_RNA (1)...(19): siRNA sense strand
ccacaauuaugggaccuaa

SEQ ID NO: 1684666 - RNA, 19 nt, Homo sapiens
  misc_RNA (1)...(19): siRNA sense strand
ggcagcauuugucucgaua

SEQ ID NO: 1684667 - RNA, 19 nt, Homo sapiens
  misc_RNA (1)...(19): siRNA sense strand
ucacaguggucgccugcuu

SEQ ID NO: 1684668 - RNA, 19 nt, Homo sapiens
  misc_RNA (1)...(19): siRNA sense strand
gcacggaucuauaaaacag

SEQ ID NO: 1684669 - RNA, 19 nt, Homo sapiens
  misc_RNA (1)...(19): siRNA sense strand
ucgccugcuuuaacaauuu

SEQ ID NO: 1684670 - RNA, 19 nt, Homo sapiens
  misc_RNA (1)...(19): siRNA sense strand
cuaaugacagcccauauca

SEQ ID NO: 1684671 - RNA, 19 nt, Homo sapiens
  misc_RNA (1)...(19): siRNA sense strand
acaguggucgccugcuuua

SEQ ID NO: 1684672 - RNA, 19 nt, Homo sapiens
  misc_RNA (1)...(19): siRNA sense strand
gauauucuaagaucacagu

SEQ ID NO: 1684673 - RNA, 19 nt, Homo sapiens
  misc_RNA (1)...(19): siRNA sense strand
gaccuaaugacagcccaua

SEQ ID NO: 1684674 - RNA, 19 nt, Homo sapiens
  misc_RNA (1)...(19): siRNA sense strand
guggucgccugcuuuaaca

SEQ ID NO: 1684675 - RNA, 19 nt, Homo sapiens
  misc_RNA (1)...(19): siRNA sense strand
aaugacagcccauaucaag

SEQ ID NO: 1684676 - RNA, 19 nt, Homo sapiens
  misc_RNA (1)...(19): siRNA sense strand
ccuaaugacagcccauauc

SEQ ID NO: 1684677 - RNA, 19 nt, Homo sapiens
  misc_RNA (1)...(19): siRNA sense strand
gucgccugcuuuaacaauu

SEQ ID NO: 1684678 - RNA, 19 nt, Homo sapiens
  misc_RNA (1)...(19): siRNA sense strand
uggcagcauuugucucgau

SEQ ID NO: 1684679 - RNA, 19 nt, Homo sapiens
  misc_RNA (1)...(19): siRNA sense strand
ggucgccugcuuuaacaau

SEQ ID NO: 1684680 - RNA, 19 nt, Homo sapiens
  misc_RNA (1)...(19): siRNA sense strand
ggaauggacucagaaguau

SEQ ID NO: 1684681 - RNA, 19 nt, Homo sapiens
  misc_RNA (1)...(19): siRNA sense strand
gggaauggacucagaagua

SEQ ID NO: 1684682 - RNA, 19 nt, Homo sapiens
  misc_RNA (1)...(19): siRNA sense strand
ucagaaguaugccauguga

SEQ ID NO: 1684683 - RNA, 19 nt, Homo sapiens
  misc_RNA (1)...(19): siRNA sense strand
aaacagacagagauaagua

SEQ ID NO: 1684684 - RNA, 19 nt, Homo sapiens
  misc_RNA (1)...(19): siRNA sense strand
cagaauaucucgggaaugg

SEQ ID NO: 1684685 - RNA, 19 nt, Homo sapiens
  misc_RNA (1)...(19): siRNA sense strand
gcauuugucucgauauucu

SEQ ID NO: 1684686 - RNA, 19 nt, Homo sapiens
  misc_RNA (1)...(19): siRNA sense strand
cagcauuugucucgauauu

SEQ ID NO: 1684687 - RNA, 19 nt, Homo sapiens
  misc_RNA (1)...(19): siRNA sense strand
ccacaauuaugggaccuaa

SEQ ID NO: 1684688 - RNA, 19 nt, Homo sapiens
  misc_RNA (1)...(19): siRNA sense strand
ggcagcauuugucucgaua

SEQ ID NO: 1684689 - RNA, 19 nt, Homo sapiens
  misc_RNA (1)...(19): siRNA sense strand
ucacaguggucgccugcuu

SEQ ID NO: 1684690 - RNA, 19 nt, Homo sapiens
  misc_RNA (1)...(19): siRNA sense strand
ucgccugcuuuaacaauuu

SEQ ID NO: 1684691 - RNA, 19 nt, Homo sapiens
  misc_RNA (1)...(19): siRNA sense strand
cuaaugacagcccauauca

SEQ ID NO: 1684692 - RNA, 19 nt, Homo sapiens
  misc_RNA (1)...(19): siRNA sense strand
acaguggucgccugcuuua

SEQ ID NO: 1684693 - RNA, 19 nt, Homo sapiens
  misc_RNA (1)...(19): siRNA sense strand
gauauucuaagaucacagu

SEQ ID NO: 1684694 - RNA, 19 nt, Homo sapiens
  misc_RNA (1)...(19): siRNA sense strand
gaccuaaugacagcccaua

SEQ ID NO: 1684695 - RNA, 19 nt, Homo sapiens
  misc_RNA (1)...(19): siRNA sense strand
guggucgccugcuuuaaca

SEQ ID NO: 1684696 - RNA, 19 nt, Homo sapiens
  misc_RNA (1)...(19): siRNA sense strand
aacagaauaucucgggaau

SEQ ID NO: 1684697 - RNA, 19 nt, Homo sapiens
  misc_RNA (1)...(19): siRNA sense strand
gaauggacucagaaguaug

SEQ ID NO: 1684698 - RNA, 19 nt, Homo sapiens
  misc_RNA (1)...(19): siRNA sense strand
ucucgggaauggacucaga

SEQ ID NO: 1684699 - RNA, 19 nt, Homo sapiens
  misc_RNA (1)...(19): siRNA sense strand
aaugacagcccauaucaag

SEQ ID NO: 1684700 - RNA, 19 nt, Homo sapiens
  misc_RNA (1)...(19): siRNA sense strand
ccuaaugacagcccauauc

SEQ ID NO: 1684701 - RNA, 19 nt, Homo sapiens
  misc_RNA (1)...(19): siRNA sense strand
gucgccugcuuuaacaauu

SEQ ID NO: 1684702 - RNA, 19 nt, Homo sapiens
  misc_RNA (1)...(19): siRNA sense strand
uggcagcauuugucucgau

SEQ ID NO: 1684703 - RNA, 19 nt, Homo sapiens
  misc_RNA (1)...(19): siRNA sense strand
ggucgccugcuuuaacaau

SEQ ID NO: 1684704 - RNA, 19 nt, Homo sapiens
  misc_RNA (1)...(19): siRNA sense strand
gaagauugcugaagaauua

SEQ ID NO: 1684705 - RNA, 19 nt, Homo sapiens
  misc_RNA (1)...(19): siRNA sense strand
gaaaguaaguugcaagaaa

SEQ ID NO: 1684706 - RNA, 19 nt, Homo sapiens
  misc_RNA (1)...(19): siRNA sense strand
gcaagcaacugaauguuua

SEQ ID NO: 1684707 - RNA, 19 nt, Homo sapiens
  misc_RNA (1)...(19): siRNA sense strand
ggaaauaaaugacaaggaa

SEQ ID NO: 1684708 - RNA, 19 nt, Homo sapiens
  misc_RNA (1)...(19): siRNA sense strand
gaacagaacagcaaagauu

SEQ ID NO: 1684709 - RNA, 19 nt, Homo sapiens
  misc_RNA (1)...(19): siRNA sense strand
agaaagagacucagaauua

SEQ ID NO: 1684710 - RNA, 19 nt, Homo sapiens
  misc_RNA (1)...(19): siRNA sense strand
gaaauuggauucuaaagca

SEQ ID NO: 1684711 - RNA, 19 nt, Homo sapiens
  misc_RNA (1)...(19): siRNA sense strand
gcaacaagcuuucacuaga

SEQ ID NO: 1684712 - RNA, 19 nt, Homo sapiens
  misc_RNA (1)...(19): siRNA sense strand
gaagagaugacuaagcuua

SEQ ID NO: 1684713 - RNA, 19 nt, Homo sapiens
  misc_RNA (1)...(19): siRNA sense strand
aaacacagcuacucuuaaa

SEQ ID NO: 1684714 - RNA, 19 nt, Homo sapiens
  misc_RNA (1)...(19): siRNA sense strand
gaacugagacagaaagaaa

SEQ ID NO: 1684715 - RNA, 19 nt, Homo sapiens
  misc_RNA (1)...(19): siRNA sense strand
gaaagaaauugaggacaaa

SEQ ID NO: 1684716 - RNA, 19 nt, Homo sapiens
  misc_RNA (1)...(19): siRNA sense strand
agaggaagauuuacagaua

SEQ ID NO: 1684717 - RNA, 19 nt, Homo sapiens
  misc_RNA (1)...(19): siRNA sense strand
gagcaugguuucagaagaa

SEQ ID NO: 1684718 - RNA, 19 nt, Homo sapiens
  misc_RNA (1)...(19): siRNA sense strand
gaaagagacucagaauuag

SEQ ID NO: 1684719 - RNA, 19 nt, Homo sapiens
  misc_RNA (1)...(19): siRNA sense strand
gaagcaacuugaaauagaa

SEQ ID NO: 1684720 - RNA, 19 nt, Homo sapiens
  misc_RNA (1)...(19): siRNA sense strand
caacaaauguacugaagau

SEQ ID NO: 1684721 - RNA, 19 nt, Homo sapiens
  misc_RNA (1)...(19): siRNA sense strand
gaauauacccauugaagaa

SEQ ID NO: 1684722 - RNA, 19 nt, Homo sapiens
  misc_RNA (1)...(19): siRNA sense strand
gaagaaggaauacaagaaa

SEQ ID NO: 1684723 - RNA, 19 nt, Homo sapiens
  misc_RNA (1)...(19): siRNA sense strand
caacaagcuuucacuagaa

SEQ ID NO: 1684724 - RNA, 19 nt, Homo sapiens
  misc_RNA (1)...(19): siRNA sense strand
gaaagaaguacaugauuug

SEQ ID NO: 1684725 - RNA, 19 nt, Homo sapiens
  misc_RNA (1)...(19): siRNA sense strand
caagugagcuggaagagau

SEQ ID NO: 1684726 - RNA, 19 nt, Homo sapiens
  misc_RNA (1)...(19): siRNA sense strand
ccacaaggcauuuauguaa

SEQ ID NO: 1684727 - RNA, 19 nt, Homo sapiens
  misc_RNA (1)...(19): siRNA sense strand
caaacuguaucucgaaauu

SEQ ID NO: 1684728 - RNA, 19 nt, Homo sapiens
  misc_RNA (1)...(19): siRNA sense strand
ccaaaucacugagaaagaa

SEQ ID NO: 1684729 - RNA, 19 nt, Homo sapiens
  misc_RNA (1)...(19): siRNA sense strand
gaaacccaauuaagaaaug

SEQ ID NO: 1684730 - RNA, 19 nt, Homo sapiens
  misc_RNA (1)...(19): siRNA sense strand
gcagguaucacuacuauug

SEQ ID NO: 1684731 - RNA, 19 nt, Homo sapiens
  misc_RNA (1)...(19): siRNA sense strand
ggaagaaucuaauaaagcu

SEQ ID NO: 1684732 - RNA, 19 nt, Homo sapiens
  misc_RNA (1)...(19): siRNA sense strand
gcagaaagcaagcaacuga

SEQ ID NO: 1684733 - RNA, 19 nt, Homo sapiens
  misc_RNA (1)...(19): siRNA sense strand
gcaccaauaugauaagauc

SEQ ID NO: 1684734 - RNA, 19 nt, Homo sapiens
  misc_RNA (1)...(19): siRNA sense strand
gaaaucaagugagcuggaa

SEQ ID NO: 1684735 - RNA, 19 nt, Homo sapiens
  misc_RNA (1)...(19): siRNA sense strand
gaaagaaaguaaguugcaa

SEQ ID NO: 1684736 - RNA, 19 nt, Homo sapiens
  misc_RNA (1)...(19): siRNA sense strand
gaacagaacaagaacuaau

SEQ ID NO: 1684737 - RNA, 19 nt, Homo sapiens
  misc_RNA (1)...(19): siRNA sense strand
gaaaguaaguacagaagcu

SEQ ID NO: 1684738 - RNA, 19 nt, Homo sapiens
  misc_RNA (1)...(19): siRNA sense strand
gagaagagcuaaaacagaa

SEQ ID NO: 1684739 - RNA, 19 nt, Homo sapiens
  misc_RNA (1)...(19): siRNA sense strand
gaacagcaaagauuggaaa

SEQ ID NO: 1684740 - RNA, 19 nt, Homo sapiens
  misc_RNA (1)...(19): siRNA sense strand
gauaacagcuuuugaggaa

SEQ ID NO: 1684741 - RNA, 19 nt, Homo sapiens
  misc_RNA (1)...(19): siRNA sense strand
cuagaggaauccagagaua

SEQ ID NO: 1684742 - RNA, 19 nt, Homo sapiens
  misc_RNA (1)...(19): siRNA sense strand
gaucuacacugaaguuugg

SEQ ID NO: 1684743 - RNA, 19 nt, Homo sapiens
  misc_RNA (1)...(19): siRNA sense strand
ccaaaggcauauacaguga

SEQ ID NO: 1684744 - RNA, 19 nt, Homo sapiens
  misc_RNA (1)...(19): siRNA sense strand
caagugaacaguauuauuc

SEQ ID NO: 1684745 - RNA, 19 nt, Homo sapiens
  misc_RNA (1)...(19): siRNA sense strand
agaaagaaauugaggacaa

SEQ ID NO: 1684746 - RNA, 19 nt, Homo sapiens
  misc_RNA (1)...(19): siRNA sense strand
ugauucagauccugcuuua

SEQ ID NO: 1684747 - RNA, 19 nt, Homo sapiens
  misc_RNA (1)...(19): siRNA sense strand
agaagcaacuugaaauaga

SEQ ID NO: 1684748 - RNA, 19 nt, Homo sapiens
  misc_RNA (1)...(19): siRNA sense strand
gaagaaagagacucagaau

SEQ ID NO: 1684749 - RNA, 19 nt, Homo sapiens
  misc_RNA (1)...(19): siRNA sense strand
gaaacagaaacccaauuaa

SEQ ID NO: 1684750 - RNA, 19 nt, Homo sapiens
  misc_RNA (1)...(19): siRNA sense strand
caagugauaugacccuaga

SEQ ID NO: 1684751 - RNA, 19 nt, Homo sapiens
  misc_RNA (1)...(19): siRNA sense strand
agaaguacaugauuuggaa

SEQ ID NO: 1684752 - RNA, 19 nt, Homo sapiens
  misc_RNA (1)...(19): siRNA sense strand
caaagaaaccugugcuaga

SEQ ID NO: 1684753 - RNA, 19 nt, Homo sapiens
  misc_RNA (1)...(19): siRNA sense strand
uacagaagcugaacugaga

SEQ ID NO: 1684754 - RNA, 19 nt, Homo sapiens
  misc_RNA (1)...(19): siRNA sense strand
uaaggaggcugaaaagaua

SEQ ID NO: 1684755 - RNA, 19 nt, Homo sapiens
  misc_RNA (1)...(19): siRNA sense strand
ccacaagugaacaguauua

SEQ ID NO: 1684756 - RNA, 19 nt, Homo sapiens
  misc_RNA (1)...(19): siRNA sense strand
caaauguacugaagaugau

SEQ ID NO: 1684757 - RNA, 19 nt, Homo sapiens
  misc_RNA (1)...(19): siRNA sense strand
aguaauagcugaugaagca

SEQ ID NO: 1684758 - RNA, 19 nt, Homo sapiens
  misc_RNA (1)...(19): siRNA sense strand
agaaacagaaacccaauua

SEQ ID NO: 1684759 - RNA, 19 nt, Homo sapiens
  misc_RNA (1)...(19): siRNA sense strand
aaagaaaccugugcuagau

SEQ ID NO: 1684760 - RNA, 19 nt, Homo sapiens
  misc_RNA (1)...(19): siRNA sense strand
gaaaacacagcuacucuua

SEQ ID NO: 1684761 - RNA, 19 nt, Homo sapiens
  misc_RNA (1)...(19): siRNA sense strand
ucacuacuauugauccaaa

SEQ ID NO: 1684762 - RNA, 19 nt, Homo sapiens
  misc_RNA (1)...(19): siRNA sense strand
gaagaaaggauguugaaac

SEQ ID NO: 1684763 - RNA, 19 nt, Homo sapiens
  misc_RNA (1)...(19): siRNA sense strand
gaagaauuauugagaacag

SEQ ID NO: 1684764 - RNA, 19 nt, Homo sapiens
  misc_RNA (1)...(19): siRNA sense strand
caaaagagguuaaagaucu

SEQ ID NO: 1684765 - RNA, 19 nt, Homo sapiens
  misc_RNA (1)...(19): siRNA sense strand
gagaaagaaguacaugauu

SEQ ID NO: 1684766 - RNA, 19 nt, Homo sapiens
  misc_RNA (1)...(19): siRNA sense strand
uaaagcaguuccuucacaa

SEQ ID NO: 1684767 - RNA, 19 nt, Homo sapiens
  misc_RNA (1)...(19): siRNA sense strand
ggacaagagugaagaaaau

SEQ ID NO: 1684768 - RNA, 19 nt, Homo sapiens
  misc_RNA (1)...(19): siRNA sense strand
acgagaagcuuaagaauac

SEQ ID NO: 1684769 - RNA, 19 nt, Homo sapiens
  misc_RNA (1)...(19): siRNA sense strand
gaauccagagauaaaguua

SEQ ID NO: 1684770 - RNA, 19 nt, Homo sapiens
  misc_RNA (1)...(19): siRNA sense strand
gaacuucagcaggagaaua

SEQ ID NO: 1684771 - RNA, 19 nt, Homo sapiens
  misc_RNA (1)...(19): siRNA sense strand
gcucauucguuugugguua

SEQ ID NO: 1684772 - RNA, 19 nt, Homo sapiens
  misc_RNA (1)...(19): siRNA sense strand
gaaacagcaucauuugacu

SEQ ID NO: 1684773 - RNA, 19 nt, Homo sapiens
  misc_RNA (1)...(19): siRNA sense strand
ggaagaaaccaggcaaguu

SEQ ID NO: 1684774 - RNA, 19 nt, Homo sapiens
  misc_RNA (1)...(19): siRNA sense strand
ucaagaguuucaacaaaug

SEQ ID NO: 1684775 - RNA, 19 nt, Homo sapiens
  misc_RNA (1)...(19): siRNA sense strand
gaggaagauuuacagauag

SEQ ID NO: 1684776 - RNA, 19 nt, Homo sapiens
  misc_RNA (1)...(19): siRNA sense strand
gaaagugccaaacagaaau

SEQ ID NO: 1684777 - RNA, 19 nt, Homo sapiens
  misc_RNA (1)...(19): siRNA sense strand
gaucauggcauauccaaag

SEQ ID NO: 1684778 - RNA, 19 nt, Homo sapiens
  misc_RNA (1)...(19): siRNA sense strand
gagaaacagcaucauuuga

SEQ ID NO: 1684779 - RNA, 19 nt, Homo sapiens
  misc_RNA (1)...(19): siRNA sense strand
gaaguuuggagcuauaaga

SEQ ID NO: 1684780 - RNA, 19 nt, Homo sapiens
  misc_RNA (1)...(19): siRNA sense strand
gaaagcaagcaacugaaug

SEQ ID NO: 1684781 - RNA, 19 nt, Homo sapiens
  misc_RNA (1)...(19): siRNA sense strand
uagaauaugugagagaaga

SEQ ID NO: 1684782 - RNA, 19 nt, Homo sapiens
  misc_RNA (1)...(19): siRNA sense strand
ugagaagauugcugaagaa

SEQ ID NO: 1684783 - RNA, 19 nt, Homo sapiens
  misc_RNA (1)...(19): siRNA sense strand
aaacucaaauggaagaauc

SEQ ID NO: 1684784 - RNA, 19 nt, Homo sapiens
  misc_RNA (1)...(19): siRNA sense strand
ucacagacaccuaucagaa

SEQ ID NO: 1684785 - RNA, 19 nt, Homo sapiens
  misc_RNA (1)...(19): siRNA sense strand
gaaaugguagcacuuaugg

SEQ ID NO: 1684786 - RNA, 19 nt, Homo sapiens
  misc_RNA (1)...(19): siRNA sense strand
aaacugagcuugaaaacga

SEQ ID NO: 1684787 - RNA, 19 nt, Homo sapiens
  misc_RNA (1)...(19): siRNA sense strand
gagacuaucuguggacauc

SEQ ID NO: 1684788 - RNA, 19 nt, Homo sapiens
  misc_RNA (1)...(19): siRNA sense strand
caaagaacaagaacaguca

SEQ ID NO: 1684789 - RNA, 19 nt, Homo sapiens
  misc_RNA (1)...(19): siRNA sense strand
cuucaagaguuucaacaaa

SEQ ID NO: 1684790 - RNA, 19 nt, Homo sapiens
  misc_RNA (1)...(19): siRNA sense strand
guaaauuggacaagaguga

SEQ ID NO: 1684791 - RNA, 19 nt, Homo sapiens
  misc_RNA (1)...(19): siRNA sense strand
acagaaacccaauuaagaa

SEQ ID NO: 1684792 - RNA, 19 nt, Homo sapiens
  misc_RNA (1)...(19): siRNA sense strand
gauaugacccuagaacuca

SEQ ID NO: 1684793 - RNA, 19 nt, Homo sapiens
  misc_RNA (1)...(19): siRNA sense strand
aagcagguaucacuacuau

SEQ ID NO: 1684794 - RNA, 19 nt, Homo sapiens
  misc_RNA (1)...(19): siRNA sense strand
ccaccagcuucucaucuuu

SEQ ID NO: 1684795 - RNA, 19 nt, Homo sapiens
  misc_RNA (1)...(19): siRNA sense strand
gcaacugaauguuuaugag

SEQ ID NO: 1684796 - RNA, 19 nt, Homo sapiens
  misc_RNA (1)...(19): siRNA sense strand
uaacugccauuaccacaag

SEQ ID NO: 1684797 - RNA, 19 nt, Homo sapiens
  misc_RNA (1)...(19): siRNA sense strand
gggaggcgauuccacuuuc

SEQ ID NO: 1684798 - RNA, 19 nt, Homo sapiens
  misc_RNA (1)...(19): siRNA sense strand
acaaauguacugaagauga

SEQ ID NO: 1684799 - RNA, 19 nt, Homo sapiens
  misc_RNA (1)...(19): siRNA sense strand
gaaagagaagagaaggaaa

SEQ ID NO: 1684800 - RNA, 19 nt, Homo sapiens
  misc_RNA (1)...(19): siRNA sense strand
gcugaaaugguagcacuua

SEQ ID NO: 1684801 - RNA, 19 nt, Homo sapiens
  misc_RNA (1)...(19): siRNA sense strand
ggaagagguugagaaagca

SEQ ID NO: 1684802 - RNA, 19 nt, Homo sapiens
  misc_RNA (1)...(19): siRNA sense strand
ucaagaaucagcaagaaga

SEQ ID NO: 1684803 - RNA, 19 nt, Homo sapiens
  misc_RNA (1)...(19): siRNA sense strand
gaauaugaacgggaagaaa

SEQ ID NO: 1684804 - RNA, 19 nt, Homo sapiens
  misc_RNA (1)...(19): siRNA sense strand
caagauugcugaauacaaa

SEQ ID NO: 1684805 - RNA, 19 nt, Homo sapiens
  misc_RNA (1)...(19): siRNA sense strand
gaagucaagucgagucuau

SEQ ID NO: 1684806 - RNA, 19 nt, Homo sapiens
  misc_RNA (1)...(19): siRNA sense strand
ggacaagauugcugaauac

SEQ ID NO: 1684807 - RNA, 19 nt, Homo sapiens
  misc_RNA (1)...(19): siRNA sense strand
caacgaggcuuggagauuc

SEQ ID NO: 1684808 - RNA, 19 nt, Homo sapiens
  misc_RNA (1)...(19): siRNA sense strand
cgacagaacccgacuaugu

SEQ ID NO: 1684809 - RNA, 19 nt, Homo sapiens
  misc_RNA (1)...(19): siRNA sense strand
uggacaagauugcugaaua

SEQ ID NO: 1684810 - RNA, 19 nt, Homo sapiens
  misc_RNA (1)...(19): siRNA sense strand
caucagagcacaucaaauc

SEQ ID NO: 1684811 - RNA, 19 nt, Homo sapiens
  misc_RNA (1)...(19): siRNA sense strand
acacagacauacccaguug

SEQ ID NO: 1684812 - RNA, 19 nt, Homo sapiens
  misc_RNA (1)...(19): siRNA sense strand
ccaaagugguggacaagau

SEQ ID NO: 1684813 - RNA, 19 nt, Homo sapiens
  misc_RNA (1)...(19): siRNA sense strand
caauggagauucccagagu

SEQ ID NO: 1684814 - RNA, 19 nt, Homo sapiens
  misc_RNA (1)...(19): siRNA sense strand
gaagaggaaacgugaugaa

SEQ ID NO: 1684815 - RNA, 19 nt, Homo sapiens
  misc_RNA (1)...(19): siRNA sense strand
gacagaacccgacuauguu

SEQ ID NO: 1684816 - RNA, 19 nt, Homo sapiens
  misc_RNA (1)...(19): siRNA sense strand
gagaagaggaaacgugaug

SEQ ID NO: 1684817 - RNA, 19 nt, Homo sapiens
  misc_RNA (1)...(19): siRNA sense strand
cagagcacaucaaaucaga

SEQ ID NO: 1684818 - RNA, 19 nt, Homo sapiens
  misc_RNA (1)...(19): siRNA sense strand
agagugguguggacaguuu

SEQ ID NO: 1684819 - RNA, 19 nt, Homo sapiens
  misc_RNA (1)...(19): siRNA sense strand
gagggcaucugugacaaug

SEQ ID NO: 1684820 - RNA, 19 nt, Homo sapiens
  misc_RNA (1)...(19): siRNA sense strand
caaagugguggacaagauu

SEQ ID NO: 1684821 - RNA, 19 nt, Homo sapiens
  misc_RNA (1)...(19): siRNA sense strand
cagcgucucuuccaucaac

SEQ ID NO: 1684822 - RNA, 19 nt, Homo sapiens
  misc_RNA (1)...(19): siRNA sense strand
gcacaucaaaucagaacag

SEQ ID NO: 1684823 - RNA, 19 nt, Homo sapiens
  misc_RNA (1)...(19): siRNA sense strand
gggcaucugugacaaugac

SEQ ID NO: 1684824 - RNA, 19 nt, Homo sapiens
  misc_RNA (1)...(19): siRNA sense strand
ucucuuccaucaacagaau

SEQ ID NO: 1684825 - RNA, 19 nt, Homo sapiens
  misc_RNA (1)...(19): siRNA sense strand
ggauccuacuccaucaaug

SEQ ID NO: 1684826 - RNA, 19 nt, Homo sapiens
  misc_RNA (1)...(19): siRNA sense strand
ggcaucagagcacaucaaa

SEQ ID NO: 1684827 - RNA, 19 nt, Homo sapiens
  misc_RNA (1)...(19): siRNA sense strand
ccaauggugagaagaggaa

SEQ ID NO: 1684828 - RNA, 19 nt, Homo sapiens
  misc_RNA (1)...(19): siRNA sense strand
gagcacaucaaaucagaac

SEQ ID NO: 1684829 - RNA, 19 nt, Homo sapiens
  misc_RNA (1)...(19): siRNA sense strand
agaaucauccggaccaaag

SEQ ID NO: 1684830 - RNA, 19 nt, Homo sapiens
  misc_RNA (1)...(19): siRNA sense strand
acaacgaggcuuggagauu

SEQ ID NO: 1684831 - RNA, 19 nt, Homo sapiens
  misc_RNA (1)...(19): siRNA sense strand
uauguucgccugggagauu

SEQ ID NO: 1684832 - RNA, 19 nt, Homo sapiens
  misc_RNA (1)...(19): siRNA sense strand
ccagagugguguggacagu

SEQ ID NO: 1684833 - RNA, 19 nt, Homo sapiens
  misc_RNA (1)...(19): siRNA sense strand
cccagcgucucuuccauca

SEQ ID NO: 1684834 - RNA, 19 nt, Homo sapiens
  misc_RNA (1)...(19): siRNA sense strand
acaagauugcugaauacaa

SEQ ID NO: 1684835 - RNA, 19 nt, Homo sapiens
  misc_RNA (1)...(19): siRNA sense strand
gggauccuacuccaucaau

SEQ ID NO: 1684836 - RNA, 19 nt, Homo sapiens
  misc_RNA (1)...(19): siRNA sense strand
ccacuggccagggaagcua

SEQ ID NO: 1684837 - RNA, 19 nt, Homo sapiens
  misc_RNA (1)...(19): siRNA sense strand
ucuuugagcguccuuccua

SEQ ID NO: 1684838 - RNA, 19 nt, Homo sapiens
  misc_RNA (1)...(19): siRNA sense strand
caagauugcugaauacaaa

SEQ ID NO: 1684839 - RNA, 19 nt, Homo sapiens
  misc_RNA (1)...(19): siRNA sense strand
gaagucaagucgagucuau

SEQ ID NO: 1684840 - RNA, 19 nt, Homo sapiens
  misc_RNA (1)...(19): siRNA sense strand
ggacaagauugcugaauac

SEQ ID NO: 1684841 - RNA, 19 nt, Homo sapiens
  misc_RNA (1)...(19): siRNA sense strand
caacgaggcuuggagauuc

SEQ ID NO: 1684842 - RNA, 19 nt, Homo sapiens
  misc_RNA (1)...(19): siRNA sense strand
cgacagaacccgacuaugu

SEQ ID NO: 1684843 - RNA, 19 nt, Homo sapiens
  misc_RNA (1)...(19): siRNA sense strand
uggacaagauugcugaaua

SEQ ID NO: 1684844 - RNA, 19 nt, Homo sapiens
  misc_RNA (1)...(19): siRNA sense strand
caucagagcacaucaaauc

SEQ ID NO: 1684845 - RNA, 19 nt, Homo sapiens
  misc_RNA (1)...(19): siRNA sense strand
acacagacauacccaguug

SEQ ID NO: 1684846 - RNA, 19 nt, Homo sapiens
  misc_RNA (1)...(19): siRNA sense strand
ccaaagugguggacaagau

SEQ ID NO: 1684847 - RNA, 19 nt, Homo sapiens
  misc_RNA (1)...(19): siRNA sense strand
caauggagauucccagagu

SEQ ID NO: 1684848 - RNA, 19 nt, Homo sapiens
  misc_RNA (1)...(19): siRNA sense strand
gaagaggaaacgugaugaa

SEQ ID NO: 1684849 - RNA, 19 nt, Homo sapiens
  misc_RNA (1)...(19): siRNA sense strand
gacagaacccgacuauguu

SEQ ID NO: 1684850 - RNA, 19 nt, Homo sapiens
  misc_RNA (1)...(19): siRNA sense strand
gagaagaggaaacgugaug

SEQ ID NO: 1684851 - RNA, 19 nt, Homo sapiens
  misc_RNA (1)...(19): siRNA sense strand
cagagcacaucaaaucaga

SEQ ID NO: 1684852 - RNA, 19 nt, Homo sapiens
  misc_RNA (1)...(19): siRNA sense strand
agagugguguggacaguuu

SEQ ID NO: 1684853 - RNA, 19 nt, Homo sapiens
  misc_RNA (1)...(19): siRNA sense strand
gagggcaucugugacaaug

SEQ ID NO: 1684854 - RNA, 19 nt, Homo sapiens
  misc_RNA (1)...(19): siRNA sense strand
caaagugguggacaagauu

SEQ ID NO: 1684855 - RNA, 19 nt, Homo sapiens
  misc_RNA (1)...(19): siRNA sense strand
cagcgucucuuccaucaac

SEQ ID NO: 1684856 - RNA, 19 nt, Homo sapiens
  misc_RNA (1)...(19): siRNA sense strand
gcacaucaaaucagaacag

SEQ ID NO: 1684857 - RNA, 19 nt, Homo sapiens
  misc_RNA (1)...(19): siRNA sense strand
gggcaucugugacaaugac

SEQ ID NO: 1684858 - RNA, 19 nt, Homo sapiens
  misc_RNA (1)...(19): siRNA sense strand
ucucuuccaucaacagaau

SEQ ID NO: 1684859 - RNA, 19 nt, Homo sapiens
  misc_RNA (1)...(19): siRNA sense strand
ggauccuacuccaucaaug

SEQ ID NO: 1684860 - RNA, 19 nt, Homo sapiens
  misc_RNA (1)...(19): siRNA sense strand
ggcaucagagcacaucaaa

SEQ ID NO: 1684861 - RNA, 19 nt, Homo sapiens
  misc_RNA (1)...(19): siRNA sense strand
ccaauggugagaagaggaa

SEQ ID NO: 1684862 - RNA, 19 nt, Homo sapiens
  misc_RNA (1)...(19): siRNA sense strand
gagcacaucaaaucagaac

SEQ ID NO: 1684863 - RNA, 19 nt, Homo sapiens
  misc_RNA (1)...(19): siRNA sense strand
agaaucauccggaccaaag

SEQ ID NO: 1684864 - RNA, 19 nt, Homo sapiens
  misc_RNA (1)...(19): siRNA sense strand
acaacgaggcuuggagauu

SEQ ID NO: 1684865 - RNA, 19 nt, Homo sapiens
  misc_RNA (1)...(19): siRNA sense strand
uauguucgccugggagauu

SEQ ID NO: 1684866 - RNA, 19 nt, Homo sapiens
  misc_RNA (1)...(19): siRNA sense strand
ccagagugguguggacagu

SEQ ID NO: 1684867 - RNA, 19 nt, Homo sapiens
  misc_RNA (1)...(19): siRNA sense strand
cccagcgucucuuccauca

SEQ ID NO: 1684868 - RNA, 19 nt, Homo sapiens
  misc_RNA (1)...(19): siRNA sense strand
acaagauugcugaauacaa

SEQ ID NO: 1684869 - RNA, 19 nt, Homo sapiens
  misc_RNA (1)...(19): siRNA sense strand
gggauccuacuccaucaau

SEQ ID NO: 1684870 - RNA, 19 nt, Homo sapiens
  misc_RNA (1)...(19): siRNA sense strand
ccacuggccagggaagcua

SEQ ID NO: 1684871 - RNA, 19 nt, Homo sapiens
  misc_RNA (1)...(19): siRNA sense strand
ucuuugagcguccuuccua

SEQ ID NO: 1684872 - RNA, 19 nt, Homo sapiens
  misc_RNA (1)...(19): siRNA sense strand
caagauugcugaauacaaa

SEQ ID NO: 1684873 - RNA, 19 nt, Homo sapiens
  misc_RNA (1)...(19): siRNA sense strand
gaagucaagucgagucuau

SEQ ID NO: 1684874 - RNA, 19 nt, Homo sapiens
  misc_RNA (1)...(19): siRNA sense strand
ggacaagauugcugaauac

SEQ ID NO: 1684875 - RNA, 19 nt, Homo sapiens
  misc_RNA (1)...(19): siRNA sense strand
caacgaggcuuggagauuc

SEQ ID NO: 1684876 - RNA, 19 nt, Homo sapiens
  misc_RNA (1)...(19): siRNA sense strand
cgacagaacccgacuaugu

SEQ ID NO: 1684877 - RNA, 19 nt, Homo sapiens
  misc_RNA (1)...(19): siRNA sense strand
uggacaagauugcugaaua

SEQ ID NO: 1684878 - RNA, 19 nt, Homo sapiens
  misc_RNA (1)...(19): siRNA sense strand
caucagagcacaucaaauc

SEQ ID NO: 1684879 - RNA, 19 nt, Homo sapiens
  misc_RNA (1)...(19): siRNA sense strand
acacagacauacccaguug

SEQ ID NO: 1684880 - RNA, 19 nt, Homo sapiens
  misc_RNA (1)...(19): siRNA sense strand
ccaaagugguggacaagau

SEQ ID NO: 1684881 - RNA, 19 nt, Homo sapiens
  misc_RNA (1)...(19): siRNA sense strand
caauggagauucccagagu

SEQ ID NO: 1684882 - RNA, 19 nt, Homo sapiens
  misc_RNA (1)...(19): siRNA sense strand
gaagaggaaacgugaugaa

SEQ ID NO: 1684883 - RNA, 19 nt, Homo sapiens
  misc_RNA (1)...(19): siRNA sense strand
gacagaacccgacuauguu

SEQ ID NO: 1684884 - RNA, 19 nt, Homo sapiens
  misc_RNA (1)...(19): siRNA sense strand
gagaagaggaaacgugaug

SEQ ID NO: 1684885 - RNA, 19 nt, Homo sapiens
  misc_RNA (1)...(19): siRNA sense strand
cagagcacaucaaaucaga

SEQ ID NO: 1684886 - RNA, 19 nt, Homo sapiens
  misc_RNA (1)...(19): siRNA sense strand
agagugguguggacaguuu

SEQ ID NO: 1684887 - RNA, 19 nt, Homo sapiens
  misc_RNA (1)...(19): siRNA sense strand
gagggcaucugugacaaug

SEQ ID NO: 1684888 - RNA, 19 nt, Homo sapiens
  misc_RNA (1)...(19): siRNA sense strand
caaagugguggacaagauu

SEQ ID NO: 1684889 - RNA, 19 nt, Homo sapiens
  misc_RNA (1)...(19): siRNA sense strand
cagcgucucuuccaucaac

SEQ ID NO: 1684890 - RNA, 19 nt, Homo sapiens
  misc_RNA (1)...(19): siRNA sense strand
gcacaucaaaucagaacag

SEQ ID NO: 1684891 - RNA, 19 nt, Homo sapiens
  misc_RNA (1)...(19): siRNA sense strand
gggcaucugugacaaugac

SEQ ID NO: 1684892 - RNA, 19 nt, Homo sapiens
  misc_RNA (1)...(19): siRNA sense strand
ucucuuccaucaacagaau

SEQ ID NO: 1684893 - RNA, 19 nt, Homo sapiens
  misc_RNA (1)...(19): siRNA sense strand
ggauccuacuccaucaaug

SEQ ID NO: 1684894 - RNA, 19 nt, Homo sapiens
  misc_RNA (1)...(19): siRNA sense strand
ggcaucagagcacaucaaa

SEQ ID NO: 1684895 - RNA, 19 nt, Homo sapiens
  misc_RNA (1)...(19): siRNA sense strand
ccaauggugagaagaggaa

SEQ ID NO: 1684896 - RNA, 19 nt, Homo sapiens
  misc_RNA (1)...(19): siRNA sense strand
gagcacaucaaaucagaac

SEQ ID NO: 1684897 - RNA, 19 nt, Homo sapiens
  misc_RNA (1)...(19): siRNA sense strand
agaaucauccggaccaaag

SEQ ID NO: 1684898 - RNA, 19 nt, Homo sapiens
  misc_RNA (1)...(19): siRNA sense strand
acaacgaggcuuggagauu

SEQ ID NO: 1684899 - RNA, 19 nt, Homo sapiens
  misc_RNA (1)...(19): siRNA sense strand
uauguucgccugggagauu

SEQ ID NO: 1684900 - RNA, 19 nt, Homo sapiens
  misc_RNA (1)...(19): siRNA sense strand
ccagagugguguggacagu

SEQ ID NO: 1684901 - RNA, 19 nt, Homo sapiens
  misc_RNA (1)...(19): siRNA sense strand
cccagcgucucuuccauca

SEQ ID NO: 1684902 - RNA, 19 nt, Homo sapiens
  misc_RNA (1)...(19): siRNA sense strand
acaagauugcugaauacaa

SEQ ID NO: 1684903 - RNA, 19 nt, Homo sapiens
  misc_RNA (1)...(19): siRNA sense strand
gggauccuacuccaucaau

SEQ ID NO: 1684904 - RNA, 19 nt, Homo sapiens
  misc_RNA (1)...(19): siRNA sense strand
ccacuggccagggaagcua

SEQ ID NO: 1684905 - RNA, 19 nt, Homo sapiens
  misc_RNA (1)...(19): siRNA sense strand
ucuuugagcguccuuccua

SEQ ID NO: 1684906 - RNA, 19 nt, Homo sapiens
  misc_RNA (1)...(19): siRNA sense strand
caagauugcugaauacaaa

SEQ ID NO: 1684907 - RNA, 19 nt, Homo sapiens
  misc_RNA (1)...(19): siRNA sense strand
gaagucaagucgagucuau

SEQ ID NO: 1684908 - RNA, 19 nt, Homo sapiens
  misc_RNA (1)...(19): siRNA sense strand
ggacaagauugcugaauac

SEQ ID NO: 1684909 - RNA, 19 nt, Homo sapiens
  misc_RNA (1)...(19): siRNA sense strand
caacgaggcuuggagauuc

SEQ ID NO: 1684910 - RNA, 19 nt, Homo sapiens
  misc_RNA (1)...(19): siRNA sense strand
cgacagaacccgacuaugu

SEQ ID NO: 1684911 - RNA, 19 nt, Homo sapiens
  misc_RNA (1)...(19): siRNA sense strand
uggacaagauugcugaaua

SEQ ID NO: 1684912 - RNA, 19 nt, Homo sapiens
  misc_RNA (1)...(19): siRNA sense strand
caucagagcacaucaaauc

SEQ ID NO: 1684913 - RNA, 19 nt, Homo sapiens
  misc_RNA (1)...(19): siRNA sense strand
acacagacauacccaguug

SEQ ID NO: 1684914 - RNA, 19 nt, Homo sapiens
  misc_RNA (1)...(19): siRNA sense strand
ccaaagugguggacaagau

SEQ ID NO: 1684915 - RNA, 19 nt, Homo sapiens
  misc_RNA (1)...(19): siRNA sense strand
caauggagauucccagagu

SEQ ID NO: 1684916 - RNA, 19 nt, Homo sapiens
  misc_RNA (1)...(19): siRNA sense strand
gaagaggaaacgugaugaa

SEQ ID NO: 1684917 - RNA, 19 nt, Homo sapiens
  misc_RNA (1)...(19): siRNA sense strand
gacagaacccgacuauguu

SEQ ID NO: 1684918 - RNA, 19 nt, Homo sapiens
  misc_RNA (1)...(19): siRNA sense strand
gagaagaggaaacgugaug

SEQ ID NO: 1684919 - RNA, 19 nt, Homo sapiens
  misc_RNA (1)...(19): siRNA sense strand
cagagcacaucaaaucaga

SEQ ID NO: 1684920 - RNA, 19 nt, Homo sapiens
  misc_RNA (1)...(19): siRNA sense strand
agagugguguggacaguuu

SEQ ID NO: 1684921 - RNA, 19 nt, Homo sapiens
  misc_RNA (1)...(19): siRNA sense strand
gagggcaucugugacaaug

SEQ ID NO: 1684922 - RNA, 19 nt, Homo sapiens
  misc_RNA (1)...(19): siRNA sense strand
caaagugguggacaagauu

SEQ ID NO: 1684923 - RNA, 19 nt, Homo sapiens
  misc_RNA (1)...(19): siRNA sense strand
cagcgucucuuccaucaac

SEQ ID NO: 1684924 - RNA, 19 nt, Homo sapiens
  misc_RNA (1)...(19): siRNA sense strand
gcacaucaaaucagaacag

SEQ ID NO: 1684925 - RNA, 19 nt, Homo sapiens
  misc_RNA (1)...(19): siRNA sense strand
ccuaugaccgccacuaguu

SEQ ID NO: 1684926 - RNA, 19 nt, Homo sapiens
  misc_RNA (1)...(19): siRNA sense strand
gggcaucugugacaaugac

SEQ ID NO: 1684927 - RNA, 19 nt, Homo sapiens
  misc_RNA (1)...(19): siRNA sense strand
ucucuuccaucaacagaau

SEQ ID NO: 1684928 - RNA, 19 nt, Homo sapiens
  misc_RNA (1)...(19): siRNA sense strand
ggauccuacuccaucaaug

SEQ ID NO: 1684929 - RNA, 19 nt, Homo sapiens
  misc_RNA (1)...(19): siRNA sense strand
gggaccacaucaagcuuca

SEQ ID NO: 1684930 - RNA, 19 nt, Homo sapiens
  misc_RNA (1)...(19): siRNA sense strand
cuaugaccgccacuaguua

SEQ ID NO: 1684931 - RNA, 19 nt, Homo sapiens
  misc_RNA (1)...(19): siRNA sense strand
ggcaucagagcacaucaaa

SEQ ID NO: 1684932 - RNA, 19 nt, Homo sapiens
  misc_RNA (1)...(19): siRNA sense strand
ccaauggugagaagaggaa

SEQ ID NO: 1684933 - RNA, 19 nt, Homo sapiens
  misc_RNA (1)...(19): siRNA sense strand
gagcacaucaaaucagaac

SEQ ID NO: 1684934 - RNA, 19 nt, Homo sapiens
  misc_RNA (1)...(19): siRNA sense strand
agaaucauccggaccaaag

SEQ ID NO: 1684935 - RNA, 19 nt, Homo sapiens
  misc_RNA (1)...(19): siRNA sense strand
acaacgaggcuuggagauu

SEQ ID NO: 1684936 - RNA, 19 nt, Homo sapiens
  misc_RNA (1)...(19): siRNA sense strand
uauguucgccugggagauu

SEQ ID NO: 1684937 - RNA, 19 nt, Homo sapiens
  misc_RNA (1)...(19): siRNA sense strand
ccagagugguguggacagu

SEQ ID NO: 1684938 - RNA, 19 nt, Homo sapiens
  misc_RNA (1)...(19): siRNA sense strand
cccagcgucucuuccauca

SEQ ID NO: 1684939 - RNA, 19 nt, Homo sapiens
  misc_RNA (1)...(19): siRNA sense strand
acaagauugcugaauacaa

SEQ ID NO: 1684940 - RNA, 19 nt, Homo sapiens
  misc_RNA (1)...(19): siRNA sense strand
gggauccuacuccaucaau

SEQ ID NO: 1684941 - RNA, 19 nt, Homo sapiens
  misc_RNA (1)...(19): siRNA sense strand
cagcuucggccuccacauc

SEQ ID NO: 1684942 - RNA, 19 nt, Homo sapiens
  misc_RNA (1)...(19): siRNA sense strand
ccacuggccagggaagcua

SEQ ID NO: 1684943 - RNA, 19 nt, Homo sapiens
  misc_RNA (1)...(19): siRNA sense strand
ucuuugagcguccuuccua

SEQ ID NO: 1684944 - RNA, 19 nt, Homo sapiens
  misc_RNA (1)...(19): siRNA sense strand
caagauugcugaauacaaa

SEQ ID NO: 1684945 - RNA, 19 nt, Homo sapiens
  misc_RNA (1)...(19): siRNA sense strand
gaagucaagucgagucuau

SEQ ID NO: 1684946 - RNA, 19 nt, Homo sapiens
  misc_RNA (1)...(19): siRNA sense strand
ggacaagauugcugaauac

SEQ ID NO: 1684947 - RNA, 19 nt, Homo sapiens
  misc_RNA (1)...(19): siRNA sense strand
caacgaggcuuggagauuc

SEQ ID NO: 1684948 - RNA, 19 nt, Homo sapiens
  misc_RNA (1)...(19): siRNA sense strand
cgacagaacccgacuaugu

SEQ ID NO: 1684949 - RNA, 19 nt, Homo sapiens
  misc_RNA (1)...(19): siRNA sense strand
uggacaagauugcugaaua

SEQ ID NO: 1684950 - RNA, 19 nt, Homo sapiens
  misc_RNA (1)...(19): siRNA sense strand
caucagagcacaucaaauc

SEQ ID NO: 1684951 - RNA, 19 nt, Homo sapiens
  misc_RNA (1)...(19): siRNA sense strand
acacagacauacccaguug

SEQ ID NO: 1684952 - RNA, 19 nt, Homo sapiens
  misc_RNA (1)...(19): siRNA sense strand
ccaaagugguggacaagau

SEQ ID NO: 1684953 - RNA, 19 nt, Homo sapiens
  misc_RNA (1)...(19): siRNA sense strand
caauggagauucccagagu

SEQ ID NO: 1684954 - RNA, 19 nt, Homo sapiens
  misc_RNA (1)...(19): siRNA sense strand
gaagaggaaacgugaugaa

SEQ ID NO: 1684955 - RNA, 19 nt, Homo sapiens
  misc_RNA (1)...(19): siRNA sense strand
gacagaacccgacuauguu

SEQ ID NO: 1684956 - RNA, 19 nt, Homo sapiens
  misc_RNA (1)...(19): siRNA sense strand
gagaagaggaaacgugaug

SEQ ID NO: 1684957 - RNA, 19 nt, Homo sapiens
  misc_RNA (1)...(19): siRNA sense strand
cagagcacaucaaaucaga

SEQ ID NO: 1684958 - RNA, 19 nt, Homo sapiens
  misc_RNA (1)...(19): siRNA sense strand
agagugguguggacaguuu

SEQ ID NO: 1684959 - RNA, 19 nt, Homo sapiens
  misc_RNA (1)...(19): siRNA sense strand
gagggcaucugugacaaug

SEQ ID NO: 1684960 - RNA, 19 nt, Homo sapiens
  misc_RNA (1)...(19): siRNA sense strand
caaagugguggacaagauu

SEQ ID NO: 1684961 - RNA, 19 nt, Homo sapiens
  misc_RNA (1)...(19): siRNA sense strand
cagcgucucuuccaucaac

SEQ ID NO: 1684962 - RNA, 19 nt, Homo sapiens
  misc_RNA (1)...(19): siRNA sense strand
gcacaucaaaucagaacag

SEQ ID NO: 1684963 - RNA, 19 nt, Homo sapiens
  misc_RNA (1)...(19): siRNA sense strand
ccuaugaccgccacuaguu

SEQ ID NO: 1684964 - RNA, 19 nt, Homo sapiens
  misc_RNA (1)...(19): siRNA sense strand
gggcaucugugacaaugac

SEQ ID NO: 1684965 - RNA, 19 nt, Homo sapiens
  misc_RNA (1)...(19): siRNA sense strand
ucucuuccaucaacagaau

SEQ ID NO: 1684966 - RNA, 19 nt, Homo sapiens
  misc_RNA (1)...(19): siRNA sense strand
ggauccuacuccaucaaug

SEQ ID NO: 1684967 - RNA, 19 nt, Homo sapiens
  misc_RNA (1)...(19): siRNA sense strand
gggaccacaucaagcuuca

SEQ ID NO: 1684968 - RNA, 19 nt, Homo sapiens
  misc_RNA (1)...(19): siRNA sense strand
cuaugaccgccacuaguua

SEQ ID NO: 1684969 - RNA, 19 nt, Homo sapiens
  misc_RNA (1)...(19): siRNA sense strand
ggcaucagagcacaucaaa

SEQ ID NO: 1684970 - RNA, 19 nt, Homo sapiens
  misc_RNA (1)...(19): siRNA sense strand
ccaauggugagaagaggaa

SEQ ID NO: 1684971 - RNA, 19 nt, Homo sapiens
  misc_RNA (1)...(19): siRNA sense strand
gagcacaucaaaucagaac

SEQ ID NO: 1684972 - RNA, 19 nt, Homo sapiens
  misc_RNA (1)...(19): siRNA sense strand
agaaucauccggaccaaag

SEQ ID NO: 1684973 - RNA, 19 nt, Homo sapiens
  misc_RNA (1)...(19): siRNA sense strand
acaacgaggcuuggagauu

SEQ ID NO: 1684974 - RNA, 19 nt, Homo sapiens
  misc_RNA (1)...(19): siRNA sense strand
uauguucgccugggagauu

SEQ ID NO: 1684975 - RNA, 19 nt, Homo sapiens
  misc_RNA (1)...(19): siRNA sense strand
ccagagugguguggacagu

SEQ ID NO: 1684976 - RNA, 19 nt, Homo sapiens
  misc_RNA (1)...(19): siRNA sense strand
cccagcgucucuuccauca

SEQ ID NO: 1684977 - RNA, 19 nt, Homo sapiens
  misc_RNA (1)...(19): siRNA sense strand
acaagauugcugaauacaa

SEQ ID NO: 1684978 - RNA, 19 nt, Homo sapiens
  misc_RNA (1)...(19): siRNA sense strand
gggauccuacuccaucaau

SEQ ID NO: 1684979 - RNA, 19 nt, Homo sapiens
  misc_RNA (1)...(19): siRNA sense strand
cagcuucggccuccacauc

SEQ ID NO: 1684980 - RNA, 19 nt, Homo sapiens
  misc_RNA (1)...(19): siRNA sense strand
ccacuggccagggaagcua

SEQ ID NO: 1684981 - RNA, 19 nt, Homo sapiens
  misc_RNA (1)...(19): siRNA sense strand
ucuuugagcguccuuccua

SEQ ID NO: 1684982 - RNA, 19 nt, Homo sapiens
  misc_RNA (1)...(19): siRNA sense strand
ggaauaagcuugaaagaaa

SEQ ID NO: 1684983 - RNA, 19 nt, Homo sapiens
  misc_RNA (1)...(19): siRNA sense strand
ggaaucagaucgugaagaa

SEQ ID NO: 1684984 - RNA, 19 nt, Homo sapiens
  misc_RNA (1)...(19): siRNA sense strand
ggaaugggcugaugaaugg

SEQ ID NO: 1684985 - RNA, 19 nt, Homo sapiens
  misc_RNA (1)...(19): siRNA sense strand
ccacagagauucagcaaug

SEQ ID NO: 1684986 - RNA, 19 nt, Homo sapiens
  misc_RNA (1)...(19): siRNA sense strand
gaucaucguuugacagaaa

SEQ ID NO: 1684987 - RNA, 19 nt, Homo sapiens
  misc_RNA (1)...(19): siRNA sense strand
gcuaaagaaucuggaauaa

SEQ ID NO: 1684988 - RNA, 19 nt, Homo sapiens
  misc_RNA (1)...(19): siRNA sense strand
ccaagaagccacaaacuuu

SEQ ID NO: 1684989 - RNA, 19 nt, Homo sapiens
  misc_RNA (1)...(19): siRNA sense strand
ggagagaagagaauaguuu

SEQ ID NO: 1684990 - RNA, 19 nt, Homo sapiens
  misc_RNA (1)...(19): siRNA sense strand
cagaagaagcugugaauaa

SEQ ID NO: 1684991 - RNA, 19 nt, Homo sapiens
  misc_RNA (1)...(19): siRNA sense strand
uaaagaaucuggaauaagc

SEQ ID NO: 1684992 - RNA, 19 nt, Homo sapiens
  misc_RNA (1)...(19): siRNA sense strand
gugaagaacucaacuacug

SEQ ID NO: 1684993 - RNA, 19 nt, Homo sapiens
  misc_RNA (1)...(19): siRNA sense strand
caucugcacucacaaauca

SEQ ID NO: 1684994 - RNA, 19 nt, Homo sapiens
  misc_RNA (1)...(19): siRNA sense strand
gaacucaacuacuggaaaa

SEQ ID NO: 1684995 - RNA, 19 nt, Homo sapiens
  misc_RNA (1)...(19): siRNA sense strand
gaaagggaaugggcugaug

SEQ ID NO: 1684996 - RNA, 19 nt, Homo sapiens
  misc_RNA (1)...(19): siRNA sense strand
gaacucaacagugacaauu

SEQ ID NO: 1684997 - RNA, 19 nt, Homo sapiens
  misc_RNA (1)...(19): siRNA sense strand
cagauucucucagcaauga

SEQ ID NO: 1684998 - RNA, 19 nt, Homo sapiens
  misc_RNA (1)...(19): siRNA sense strand
gcuagagcaucgagaaguu

SEQ ID NO: 1684999 - RNA, 19 nt, Homo sapiens
  misc_RNA (1)...(19): siRNA sense strand
guugguagaucaucguuug

SEQ ID NO: 1685000 - RNA, 19 nt, Homo sapiens
  misc_RNA (1)...(19): siRNA sense strand
uagaggauauugcaacuuc

SEQ ID NO: 1685001 - RNA, 19 nt, Homo sapiens
  misc_RNA (1)...(19): siRNA sense strand
auacguaccuguggaguuu

SEQ ID NO: 1685002 - RNA, 19 nt, Homo sapiens
  misc_RNA (1)...(19): siRNA sense strand
agaagaagcugugaauaag

SEQ ID NO: 1685003 - RNA, 19 nt, Homo sapiens
  misc_RNA (1)...(19): siRNA sense strand
gcacaguccugcucucacu

SEQ ID NO: 1685004 - RNA, 19 nt, Homo sapiens
  misc_RNA (1)...(19): siRNA sense strand
gagaaggugcggacucuug

SEQ ID NO: 1685005 - RNA, 19 nt, Homo sapiens
  misc_RNA (1)...(19): siRNA sense strand
ugacagcuaucgacaccaa

SEQ ID NO: 1685006 - RNA, 19 nt, Homo sapiens
  misc_RNA (1)...(19): siRNA sense strand
gcgcugaauugcauuaugg

SEQ ID NO: 1685007 - RNA, 19 nt, Homo sapiens
  misc_RNA (1)...(19): siRNA sense strand
guaccuggcucagcacgaa

SEQ ID NO: 1685008 - RNA, 19 nt, Homo sapiens
  misc_RNA (1)...(19): siRNA sense strand
cuccaccucuucagcauua

SEQ ID NO: 1685009 - RNA, 19 nt, Homo sapiens
  misc_RNA (1)...(19): siRNA sense strand
ggaaaagacgguacaauga

SEQ ID NO: 1685010 - RNA, 19 nt, Homo sapiens
  misc_RNA (1)...(19): siRNA sense strand
cauuacaccuuagaggaua

SEQ ID NO: 1685011 - RNA, 19 nt, Homo sapiens
  misc_RNA (1)...(19): siRNA sense strand
gagaggagagaagagaaua

SEQ ID NO: 1685012 - RNA, 19 nt, Homo sapiens
  misc_RNA (1)...(19): siRNA sense strand
gaagugauugcaacagaga

SEQ ID NO: 1685013 - RNA, 19 nt, Homo sapiens
  misc_RNA (1)...(19): siRNA sense strand
cuggugaacucaacaguga

SEQ ID NO: 1685014 - RNA, 19 nt, Homo sapiens
  misc_RNA (1)...(19): siRNA sense strand
gggaaugggcugaugaaug

SEQ ID NO: 1685015 - RNA, 19 nt, Homo sapiens
  misc_RNA (1)...(19): siRNA sense strand
aagaugaguugguagauca

SEQ ID NO: 1685016 - RNA, 19 nt, Homo sapiens
  misc_RNA (1)...(19): siRNA sense strand
ccacagucuuggucuaaau

SEQ ID NO: 1685017 - RNA, 19 nt, Homo sapiens
  misc_RNA (1)...(19): siRNA sense strand
ucauggaggugcacggaaa

SEQ ID NO: 1685018 - RNA, 19 nt, Homo sapiens
  misc_RNA (1)...(19): siRNA sense strand
cgucagaguugcucaugga

SEQ ID NO: 1685019 - RNA, 19 nt, Homo sapiens
  misc_RNA (1)...(19): siRNA sense strand
ggcuaaagaaucuggaaua

SEQ ID NO: 1685020 - RNA, 19 nt, Homo sapiens
  misc_RNA (1)...(19): siRNA sense strand
caagaugaguugguagauc

SEQ ID NO: 1685021 - RNA, 19 nt, Homo sapiens
  misc_RNA (1)...(19): siRNA sense strand
gcaaagccagcgagacaug

SEQ ID NO: 1685022 - RNA, 19 nt, Homo sapiens
  misc_RNA (1)...(19): siRNA sense strand
gaaaagacgguacaaugaa

SEQ ID NO: 1685023 - RNA, 19 nt, Homo sapiens
  misc_RNA (1)...(19): siRNA sense strand
gacaagaccucggcaacca

SEQ ID NO: 1685024 - RNA, 19 nt, Homo sapiens
  misc_RNA (1)...(19): siRNA sense strand
ucgagaaguucgugauaga

SEQ ID NO: 1685025 - RNA, 19 nt, Homo sapiens
  misc_RNA (1)...(19): siRNA sense strand
caacagagagagcacgaau

SEQ ID NO: 1685026 - RNA, 19 nt, Homo sapiens
  misc_RNA (1)...(19): siRNA sense strand
caagaagccacaaacuuuc

SEQ ID NO: 1685027 - RNA, 19 nt, Homo sapiens
  misc_RNA (1)...(19): siRNA sense strand
gcgauacuguggcucuuuc

SEQ ID NO: 1685028 - RNA, 19 nt, Homo sapiens
  misc_RNA (1)...(19): siRNA sense strand
uuaccacucugcaacaguu

SEQ ID NO: 1685029 - RNA, 19 nt, Homo sapiens
  misc_RNA (1)...(19): siRNA sense strand
gaucgccuguggaagugaa

SEQ ID NO: 1685030 - RNA, 19 nt, Homo sapiens
  misc_RNA (1)...(19): siRNA sense strand
cuucacuccuacugcauua

SEQ ID NO: 1685031 - RNA, 19 nt, Homo sapiens
  misc_RNA (1)...(19): siRNA sense strand
gaacaccuucugcucaaca

SEQ ID NO: 1685032 - RNA, 19 nt, Homo sapiens
  misc_RNA (1)...(19): siRNA sense strand
uugaggaauuccacuguaa

SEQ ID NO: 1685033 - RNA, 19 nt, Homo sapiens
  misc_RNA (1)...(19): siRNA sense strand
gcaauugccagccacuugu

SEQ ID NO: 1685034 - RNA, 19 nt, Homo sapiens
  misc_RNA (1)...(19): siRNA sense strand
uuauggaaaugguagagaa

SEQ ID NO: 1685035 - RNA, 19 nt, Homo sapiens
  misc_RNA (1)...(19): siRNA sense strand
cacaucaucugcacucaca

SEQ ID NO: 1685036 - RNA, 19 nt, Homo sapiens
  misc_RNA (1)...(19): siRNA sense strand
gagcacgaauggagcaaac

SEQ ID NO: 1685037 - RNA, 19 nt, Homo sapiens
  misc_RNA (1)...(19): siRNA sense strand
cuaucaagaugaguuggua

SEQ ID NO: 1685038 - RNA, 19 nt, Homo sapiens
  misc_RNA (1)...(19): siRNA sense strand
caucgagaaguucgugaua

SEQ ID NO: 1685039 - RNA, 19 nt, Homo sapiens
  misc_RNA (1)...(19): siRNA sense strand
gaaucuggaauaagcuuga

SEQ ID NO: 1685040 - RNA, 19 nt, Homo sapiens
  misc_RNA (1)...(19): siRNA sense strand
caucaccgccacagagauu

SEQ ID NO: 1685041 - RNA, 19 nt, Homo sapiens
  misc_RNA (1)...(19): siRNA sense strand
aauggaggcuaucaagaug

SEQ ID NO: 1685042 - RNA, 19 nt, Homo sapiens
  misc_RNA (1)...(19): siRNA sense strand
gcauuacaccuuagaggau

SEQ ID NO: 1685043 - RNA, 19 nt, Homo sapiens
  misc_RNA (1)...(19): siRNA sense strand
aagagaguauguaccauca

SEQ ID NO: 1685044 - RNA, 19 nt, Homo sapiens
  misc_RNA (1)...(19): siRNA sense strand
acucacaaaucagcaauug

SEQ ID NO: 1685045 - RNA, 19 nt, Homo sapiens
  misc_RNA (1)...(19): siRNA sense strand
gggagaaggugcggacucu

SEQ ID NO: 1685046 - RNA, 19 nt, Homo sapiens
  misc_RNA (1)...(19): siRNA sense strand
cgacaccaacggacucuga

SEQ ID NO: 1685047 - RNA, 19 nt, Homo sapiens
  misc_RNA (1)...(19): siRNA sense strand
aagaagcugugaauaaggu

SEQ ID NO: 1685048 - RNA, 19 nt, Homo sapiens
  misc_RNA (1)...(19): siRNA sense strand
uaaauggaggcuaucaaga

SEQ ID NO: 1685049 - RNA, 19 nt, Homo sapiens
  misc_RNA (1)...(19): siRNA sense strand
gagaaguucgugauagaca

SEQ ID NO: 1685050 - RNA, 19 nt, Homo sapiens
  misc_RNA (1)...(19): siRNA sense strand
gaagaagcugugaauaagg

SEQ ID NO: 1685051 - RNA, 19 nt, Homo sapiens
  misc_RNA (1)...(19): siRNA sense strand
aaaagacgguacaaugaaa

SEQ ID NO: 1685052 - RNA, 19 nt, Homo sapiens
  misc_RNA (1)...(19): siRNA sense strand
gguagaucaucguuugaca

SEQ ID NO: 1685053 - RNA, 19 nt, Homo sapiens
  misc_RNA (1)...(19): siRNA sense strand
caucaucugcacucacaaa

SEQ ID NO: 1685054 - RNA, 19 nt, Homo sapiens
  misc_RNA (1)...(19): siRNA sense strand
aaauggaggcuaucaagau

SEQ ID NO: 1685055 - RNA, 19 nt, Homo sapiens
  misc_RNA (1)...(19): siRNA sense strand
caacuucucaccuguaucg

SEQ ID NO: 1685056 - RNA, 19 nt, Homo sapiens
  misc_RNA (1)...(19): siRNA sense strand
ggugcggacucuuguucuu

SEQ ID NO: 1685057 - RNA, 19 nt, Homo sapiens
  misc_RNA (1)...(19): siRNA sense strand
gagaauaguuuugauagag

SEQ ID NO: 1685058 - RNA, 19 nt, Homo sapiens
  misc_RNA (1)...(19): siRNA sense strand
ccacaucgcguuccucaac

SEQ ID NO: 1685059 - RNA, 19 nt, Homo sapiens
  misc_RNA (1)...(19): siRNA sense strand
uggaauaagcuugaaagaa

SEQ ID NO: 1685060 - RNA, 19 nt, Homo sapiens
  misc_RNA (1)...(19): siRNA sense strand
ccucaacaccugcuucugu

SEQ ID NO: 1685061 - RNA, 19 nt, Homo sapiens
  misc_RNA (1)...(19): siRNA sense strand
ggagaacugcuggaacugu

SEQ ID NO: 1685062 - RNA, 19 nt, Homo sapiens
  misc_RNA (1)...(19): siRNA sense strand
uugaagugauugcaacaga

SEQ ID NO: 1685063 - RNA, 19 nt, Homo sapiens
  misc_RNA (1)...(19): siRNA sense strand
gagaagagaauaguuuuga

SEQ ID NO: 1685064 - RNA, 19 nt, Homo sapiens
  misc_RNA (1)...(19): siRNA sense strand
ugcaacaguuuggcaauga

SEQ ID NO: 1685065 - RNA, 19 nt, Homo sapiens
  misc_RNA (1)...(19): siRNA sense strand
acgaacaccuucugcucaa

SEQ ID NO: 1685066 - RNA, 19 nt, Homo sapiens
  misc_RNA (1)...(19): siRNA sense strand
gauacguaccuguggaguu

SEQ ID NO: 1685067 - RNA, 19 nt, Homo sapiens
  misc_RNA (1)...(19): siRNA sense strand
gcaggccagguacaggaua

SEQ ID NO: 1685068 - RNA, 19 nt, Homo sapiens
  misc_RNA (1)...(19): siRNA sense strand
gcagauucucucagcaaug

SEQ ID NO: 1685069 - RNA, 19 nt, Homo sapiens
  misc_RNA (1)...(19): siRNA sense strand
aaacacagagcugaggaaa

SEQ ID NO: 1685070 - RNA, 19 nt, Homo sapiens
  misc_RNA (1)...(19): siRNA sense strand
ucaggaaucagaucgugaa

SEQ ID NO: 1685071 - RNA, 19 nt, Homo sapiens
  misc_RNA (1)...(19): siRNA sense strand
ccagagaggagagaagaga

SEQ ID NO: 1685072 - RNA, 19 nt, Homo sapiens
  misc_RNA (1)...(19): siRNA sense strand
gaaggugcggacucuuguu

SEQ ID NO: 1685073 - RNA, 19 nt, Homo sapiens
  misc_RNA (1)...(19): siRNA sense strand
ccgcaaagccagcgagaca

SEQ ID NO: 1685074 - RNA, 19 nt, Homo sapiens
  misc_RNA (1)...(19): siRNA sense strand
uagaucaucguuugacaga

SEQ ID NO: 1685075 - RNA, 19 nt, Homo sapiens
  misc_RNA (1)...(19): siRNA sense strand
gaggagagaagagaauagu

SEQ ID NO: 1685076 - RNA, 19 nt, Homo sapiens
  misc_RNA (1)...(19): siRNA sense strand
gaggcuaucaagaugaguu

SEQ ID NO: 1685077 - RNA, 19 nt, Homo sapiens
  misc_RNA (1)...(19): siRNA sense strand
acagagagagcacgaaugg

SEQ ID NO: 1685078 - RNA, 19 nt, Homo sapiens
  misc_RNA (1)...(19): siRNA sense strand
cuaaauggaggcuaucaag

SEQ ID NO: 1685079 - RNA, 19 nt, Homo sapiens
  misc_RNA (1)...(19): siRNA sense strand
ccacggagaacugcuggaa

SEQ ID NO: 1685080 - RNA, 19 nt, Homo sapiens
  misc_RNA (1)...(19): siRNA sense strand
gguccugccuccuccacau

SEQ ID NO: 1685081 - RNA, 19 nt, Homo sapiens
  misc_RNA (1)...(19): siRNA sense strand
gauucucucagcaaugauu

SEQ ID NO: 1685082 - RNA, 19 nt, Homo sapiens
  misc_RNA (1)...(19): siRNA sense strand
ggaaucagaucgugaagaa

SEQ ID NO: 1685083 - RNA, 19 nt, Homo sapiens
  misc_RNA (1)...(19): siRNA sense strand
ggaaugggcugaugaaugg

SEQ ID NO: 1685084 - RNA, 19 nt, Homo sapiens
  misc_RNA (1)...(19): siRNA sense strand
ccacagagauucagcaaug

SEQ ID NO: 1685085 - RNA, 19 nt, Homo sapiens
  misc_RNA (1)...(19): siRNA sense strand
gaucaucguuugacagaaa

SEQ ID NO: 1685086 - RNA, 19 nt, Homo sapiens
  misc_RNA (1)...(19): siRNA sense strand
ccaagaagccacaaacuuu

SEQ ID NO: 1685087 - RNA, 19 nt, Homo sapiens
  misc_RNA (1)...(19): siRNA sense strand
ggagagaagagaauaguuu

SEQ ID NO: 1685088 - RNA, 19 nt, Homo sapiens
  misc_RNA (1)...(19): siRNA sense strand
cagaagaagcugugaauaa

SEQ ID NO: 1685089 - RNA, 19 nt, Homo sapiens
  misc_RNA (1)...(19): siRNA sense strand
gugaagaacucaacuacug

SEQ ID NO: 1685090 - RNA, 19 nt, Homo sapiens
  misc_RNA (1)...(19): siRNA sense strand
caucugcacucacaaauca

SEQ ID NO: 1685091 - RNA, 19 nt, Homo sapiens
  misc_RNA (1)...(19): siRNA sense strand
gaacucaacuacuggaaaa

SEQ ID NO: 1685092 - RNA, 19 nt, Homo sapiens
  misc_RNA (1)...(19): siRNA sense strand
gaaagggaaugggcugaug

SEQ ID NO: 1685093 - RNA, 19 nt, Homo sapiens
  misc_RNA (1)...(19): siRNA sense strand
gaacucaacagugacaauu

SEQ ID NO: 1685094 - RNA, 19 nt, Homo sapiens
  misc_RNA (1)...(19): siRNA sense strand
cagauucucucagcaauga

SEQ ID NO: 1685095 - RNA, 19 nt, Homo sapiens
  misc_RNA (1)...(19): siRNA sense strand
gcuagagcaucgagaaguu

SEQ ID NO: 1685096 - RNA, 19 nt, Homo sapiens
  misc_RNA (1)...(19): siRNA sense strand
guugguagaucaucguuug

SEQ ID NO: 1685097 - RNA, 19 nt, Homo sapiens
  misc_RNA (1)...(19): siRNA sense strand
uagaggauauugcaacuuc

SEQ ID NO: 1685098 - RNA, 19 nt, Homo sapiens
  misc_RNA (1)...(19): siRNA sense strand
auacguaccuguggaguuu

SEQ ID NO: 1685099 - RNA, 19 nt, Homo sapiens
  misc_RNA (1)...(19): siRNA sense strand
agaagaagcugugaauaag

SEQ ID NO: 1685100 - RNA, 19 nt, Homo sapiens
  misc_RNA (1)...(19): siRNA sense strand
gcacaguccugcucucacu

SEQ ID NO: 1685101 - RNA, 19 nt, Homo sapiens
  misc_RNA (1)...(19): siRNA sense strand
gagaaggugcggacucuug

SEQ ID NO: 1685102 - RNA, 19 nt, Homo sapiens
  misc_RNA (1)...(19): siRNA sense strand
ugacagcuaucgacaccaa

SEQ ID NO: 1685103 - RNA, 19 nt, Homo sapiens
  misc_RNA (1)...(19): siRNA sense strand
gcgcugaauugcauuaugg

SEQ ID NO: 1685104 - RNA, 19 nt, Homo sapiens
  misc_RNA (1)...(19): siRNA sense strand
guaccuggcucagcacgaa

SEQ ID NO: 1685105 - RNA, 19 nt, Homo sapiens
  misc_RNA (1)...(19): siRNA sense strand
cuccaccucuucagcauua

SEQ ID NO: 1685106 - RNA, 19 nt, Homo sapiens
  misc_RNA (1)...(19): siRNA sense strand
ggaaaagacgguacaauga

SEQ ID NO: 1685107 - RNA, 19 nt, Homo sapiens
  misc_RNA (1)...(19): siRNA sense strand
cauuacaccuuagaggaua

SEQ ID NO: 1685108 - RNA, 19 nt, Homo sapiens
  misc_RNA (1)...(19): siRNA sense strand
gagaggagagaagagaaua

SEQ ID NO: 1685109 - RNA, 19 nt, Homo sapiens
  misc_RNA (1)...(19): siRNA sense strand
gaagugauugcaacagaga

SEQ ID NO: 1685110 - RNA, 19 nt, Homo sapiens
  misc_RNA (1)...(19): siRNA sense strand
cuggugaacucaacaguga

SEQ ID NO: 1685111 - RNA, 19 nt, Homo sapiens
  misc_RNA (1)...(19): siRNA sense strand
gggaaugggcugaugaaug

SEQ ID NO: 1685112 - RNA, 19 nt, Homo sapiens
  misc_RNA (1)...(19): siRNA sense strand
aagaugaguugguagauca

SEQ ID NO: 1685113 - RNA, 19 nt, Homo sapiens
  misc_RNA (1)...(19): siRNA sense strand
ccacagucuuggucuaaau

SEQ ID NO: 1685114 - RNA, 19 nt, Homo sapiens
  misc_RNA (1)...(19): siRNA sense strand
ucauggaggugcacggaaa

SEQ ID NO: 1685115 - RNA, 19 nt, Homo sapiens
  misc_RNA (1)...(19): siRNA sense strand
cgucagaguugcucaugga

SEQ ID NO: 1685116 - RNA, 19 nt, Homo sapiens
  misc_RNA (1)...(19): siRNA sense strand
caagaugaguugguagauc

SEQ ID NO: 1685117 - RNA, 19 nt, Homo sapiens
  misc_RNA (1)...(19): siRNA sense strand
gcaaagccagcgagacaug

SEQ ID NO: 1685118 - RNA, 19 nt, Homo sapiens
  misc_RNA (1)...(19): siRNA sense strand
gaaaagacgguacaaugaa

SEQ ID NO: 1685119 - RNA, 19 nt, Homo sapiens
  misc_RNA (1)...(19): siRNA sense strand
gacaagaccucggcaacca

SEQ ID NO: 1685120 - RNA, 19 nt, Homo sapiens
  misc_RNA (1)...(19): siRNA sense strand
ucgagaaguucgugauaga

SEQ ID NO: 1685121 - RNA, 19 nt, Homo sapiens
  misc_RNA (1)...(19): siRNA sense strand
caacagagagagcacgaau

SEQ ID NO: 1685122 - RNA, 19 nt, Homo sapiens
  misc_RNA (1)...(19): siRNA sense strand
caagaagccacaaacuuuc

SEQ ID NO: 1685123 - RNA, 19 nt, Homo sapiens
  misc_RNA (1)...(19): siRNA sense strand
gcgauacuguggcucuuuc

SEQ ID NO: 1685124 - RNA, 19 nt, Homo sapiens
  misc_RNA (1)...(19): siRNA sense strand
uuaccacucugcaacaguu

SEQ ID NO: 1685125 - RNA, 19 nt, Homo sapiens
  misc_RNA (1)...(19): siRNA sense strand
gaucgccuguggaagugaa

SEQ ID NO: 1685126 - RNA, 19 nt, Homo sapiens
  misc_RNA (1)...(19): siRNA sense strand
gcaauugccagccacuugu

SEQ ID NO: 1685127 - RNA, 19 nt, Homo sapiens
  misc_RNA (1)...(19): siRNA sense strand
gaacaccuucugcucaaca

SEQ ID NO: 1685128 - RNA, 19 nt, Homo sapiens
  misc_RNA (1)...(19): siRNA sense strand
uugaggaauuccacuguaa

SEQ ID NO: 1685129 - RNA, 19 nt, Homo sapiens
  misc_RNA (1)...(19): siRNA sense strand
cuucacuccuacugcauua

SEQ ID NO: 1685130 - RNA, 19 nt, Homo sapiens
  misc_RNA (1)...(19): siRNA sense strand
uuauggaaaugguagagaa

SEQ ID NO: 1685131 - RNA, 19 nt, Homo sapiens
  misc_RNA (1)...(19): siRNA sense strand
cacaucaucugcacucaca

SEQ ID NO: 1685132 - RNA, 19 nt, Homo sapiens
  misc_RNA (1)...(19): siRNA sense strand
gagcacgaauggagcaaac

SEQ ID NO: 1685133 - RNA, 19 nt, Homo sapiens
  misc_RNA (1)...(19): siRNA sense strand
cuaucaagaugaguuggua

SEQ ID NO: 1685134 - RNA, 19 nt, Homo sapiens
  misc_RNA (1)...(19): siRNA sense strand
caucgagaaguucgugaua

SEQ ID NO: 1685135 - RNA, 19 nt, Homo sapiens
  misc_RNA (1)...(19): siRNA sense strand
acucacaaaucagcaauug

SEQ ID NO: 1685136 - RNA, 19 nt, Homo sapiens
  misc_RNA (1)...(19): siRNA sense strand
caucaccgccacagagauu

SEQ ID NO: 1685137 - RNA, 19 nt, Homo sapiens
  misc_RNA (1)...(19): siRNA sense strand
aauggaggcuaucaagaug

SEQ ID NO: 1685138 - RNA, 19 nt, Homo sapiens
  misc_RNA (1)...(19): siRNA sense strand
gcauuacaccuuagaggau

SEQ ID NO: 1685139 - RNA, 19 nt, Homo sapiens
  misc_RNA (1)...(19): siRNA sense strand
aagagaguauguaccauca

SEQ ID NO: 1685140 - RNA, 19 nt, Homo sapiens
  misc_RNA (1)...(19): siRNA sense strand
gggagaaggugcggacucu

SEQ ID NO: 1685141 - RNA, 19 nt, Homo sapiens
  misc_RNA (1)...(19): siRNA sense strand
cgacaccaacggacucuga

SEQ ID NO: 1685142 - RNA, 19 nt, Homo sapiens
  misc_RNA (1)...(19): siRNA sense strand
aagaagcugugaauaaggu

SEQ ID NO: 1685143 - RNA, 19 nt, Homo sapiens
  misc_RNA (1)...(19): siRNA sense strand
uaaauggaggcuaucaaga

SEQ ID NO: 1685144 - RNA, 19 nt, Homo sapiens
  misc_RNA (1)...(19): siRNA sense strand
gagaaguucgugauagaca

SEQ ID NO: 1685145 - RNA, 19 nt, Homo sapiens
  misc_RNA (1)...(19): siRNA sense strand
gaagaagcugugaauaagg

SEQ ID NO: 1685146 - RNA, 19 nt, Homo sapiens
  misc_RNA (1)...(19): siRNA sense strand
aaaagacgguacaaugaaa

SEQ ID NO: 1685147 - RNA, 19 nt, Homo sapiens
  misc_RNA (1)...(19): siRNA sense strand
gguagaucaucguuugaca

SEQ ID NO: 1685148 - RNA, 19 nt, Homo sapiens
  misc_RNA (1)...(19): siRNA sense strand
caucaucugcacucacaaa

SEQ ID NO: 1685149 - RNA, 19 nt, Homo sapiens
  misc_RNA (1)...(19): siRNA sense strand
aaauggaggcuaucaagau

SEQ ID NO: 1685150 - RNA, 19 nt, Homo sapiens
  misc_RNA (1)...(19): siRNA sense strand
caacuucucaccuguaucg

SEQ ID NO: 1685151 - RNA, 19 nt, Homo sapiens
  misc_RNA (1)...(19): siRNA sense strand
ggugcggacucuuguucuu

SEQ ID NO: 1685152 - RNA, 19 nt, Homo sapiens
  misc_RNA (1)...(19): siRNA sense strand
gagaauaguuuugauagag

SEQ ID NO: 1685153 - RNA, 19 nt, Homo sapiens
  misc_RNA (1)...(19): siRNA sense strand
ccacaucgcguuccucaac

SEQ ID NO: 1685154 - RNA, 19 nt, Homo sapiens
  misc_RNA (1)...(19): siRNA sense strand
ugcaacaguuuggcaauga

SEQ ID NO: 1685155 - RNA, 19 nt, Homo sapiens
  misc_RNA (1)...(19): siRNA sense strand
ccucaacaccugcuucugu

SEQ ID NO: 1685156 - RNA, 19 nt, Homo sapiens
  misc_RNA (1)...(19): siRNA sense strand
ggagaacugcuggaacugu

SEQ ID NO: 1685157 - RNA, 19 nt, Homo sapiens
  misc_RNA (1)...(19): siRNA sense strand
uugaagugauugcaacaga

SEQ ID NO: 1685158 - RNA, 19 nt, Homo sapiens
  misc_RNA (1)...(19): siRNA sense strand
gagaagagaauaguuuuga

SEQ ID NO: 1685159 - RNA, 19 nt, Homo sapiens
  misc_RNA (1)...(19): siRNA sense strand
acgaacaccuucugcucaa

SEQ ID NO: 1685160 - RNA, 19 nt, Homo sapiens
  misc_RNA (1)...(19): siRNA sense strand
gauacguaccuguggaguu

SEQ ID NO: 1685161 - RNA, 19 nt, Homo sapiens
  misc_RNA (1)...(19): siRNA sense strand
gcaggccagguacaggaua

SEQ ID NO: 1685162 - RNA, 19 nt, Homo sapiens
  misc_RNA (1)...(19): siRNA sense strand
gcagauucucucagcaaug

SEQ ID NO: 1685163 - RNA, 19 nt, Homo sapiens
  misc_RNA (1)...(19): siRNA sense strand
aaacacagagcugaggaaa

SEQ ID NO: 1685164 - RNA, 19 nt, Homo sapiens
  misc_RNA (1)...(19): siRNA sense strand
ucaggaaucagaucgugaa

SEQ ID NO: 1685165 - RNA, 19 nt, Homo sapiens
  misc_RNA (1)...(19): siRNA sense strand
ccagagaggagagaagaga

SEQ ID NO: 1685166 - RNA, 19 nt, Homo sapiens
  misc_RNA (1)...(19): siRNA sense strand
gaaggugcggacucuuguu

SEQ ID NO: 1685167 - RNA, 19 nt, Homo sapiens
  misc_RNA (1)...(19): siRNA sense strand
ccgcaaagccagcgagaca

SEQ ID NO: 1685168 - RNA, 19 nt, Homo sapiens
  misc_RNA (1)...(19): siRNA sense strand
uagaucaucguuugacaga

SEQ ID NO: 1685169 - RNA, 19 nt, Homo sapiens
  misc_RNA (1)...(19): siRNA sense strand
gaggagagaagagaauagu

SEQ ID NO: 1685170 - RNA, 19 nt, Homo sapiens
  misc_RNA (1)...(19): siRNA sense strand
gaggcuaucaagaugaguu

SEQ ID NO: 1685171 - RNA, 19 nt, Homo sapiens
  misc_RNA (1)...(19): siRNA sense strand
acagagagagcacgaaugg

SEQ ID NO: 1685172 - RNA, 19 nt, Homo sapiens
  misc_RNA (1)...(19): siRNA sense strand
gcaacaguuuggcaaugac

SEQ ID NO: 1685173 - RNA, 19 nt, Homo sapiens
  misc_RNA (1)...(19): siRNA sense strand
gguccugccuccuccacau

SEQ ID NO: 1685174 - RNA, 19 nt, Homo sapiens
  misc_RNA (1)...(19): siRNA sense strand
ccacggagaacugcuggaa

SEQ ID NO: 1685175 - RNA, 19 nt, Homo sapiens
  misc_RNA (1)...(19): siRNA sense strand
gauucucucagcaaugauu

SEQ ID NO: 1685176 - RNA, 19 nt, Homo sapiens
  misc_RNA (1)...(19): siRNA sense strand
cuaaauggaggcuaucaag

SEQ ID NO: 1685177 - RNA, 19 nt, Homo sapiens
  misc_RNA (1)...(19): siRNA sense strand
gccaagagaguauguacca

SEQ ID NO: 1685178 - RNA, 19 nt, Homo sapiens
  misc_RNA (1)...(19): siRNA sense strand
gagagaagagaauaguuuu

SEQ ID NO: 1685179 - RNA, 19 nt, Homo sapiens
  misc_RNA (1)...(19): siRNA sense strand
ucuucagcauuacaccuua

SEQ ID NO: 1685180 - RNA, 19 nt, Homo sapiens
  misc_RNA (1)...(19): siRNA sense strand
aaauucaggccaugucaga

SEQ ID NO: 1685181 - RNA, 19 nt, Homo sapiens
  misc_RNA (1)...(19): siRNA sense strand
gcacgaauggagcaaacca

SEQ ID NO: 1685182 - RNA, 19 nt, Homo sapiens
  misc_RNA (1)...(19): siRNA sense strand
gcagagaucuuauugcaua

SEQ ID NO: 1685183 - RNA, 19 nt, Homo sapiens
  misc_RNA (1)...(19): siRNA sense strand
agaaagagcugacgaguuu

SEQ ID NO: 1685184 - RNA, 19 nt, Homo sapiens
  misc_RNA (1)...(19): siRNA sense strand
gaacucacuuccucuuuau

SEQ ID NO: 1685185 - RNA, 19 nt, Homo sapiens
  misc_RNA (1)...(19): siRNA sense strand
cauaugaagucaaggcuaa

SEQ ID NO: 1685186 - RNA, 19 nt, Homo sapiens
  misc_RNA (1)...(19): siRNA sense strand
agaacucacuuccucuuua

SEQ ID NO: 1685187 - RNA, 19 nt, Homo sapiens
  misc_RNA (1)...(19): siRNA sense strand
gagaucuuauugcauauga

SEQ ID NO: 1685188 - RNA, 19 nt, Homo sapiens
  misc_RNA (1)...(19): siRNA sense strand
gagagacgcugcucaucug

SEQ ID NO: 1685189 - RNA, 19 nt, Homo sapiens
  misc_RNA (1)...(19): siRNA sense strand
gcggaagucuccagguuca

SEQ ID NO: 1685190 - RNA, 19 nt, Homo sapiens
  misc_RNA (1)...(19): siRNA sense strand
ugaagcaugugguugaugu

SEQ ID NO: 1685191 - RNA, 19 nt, Homo sapiens
  misc_RNA (1)...(19): siRNA sense strand
gcacugggcucugguuucg

SEQ ID NO: 1685192 - RNA, 19 nt, Homo sapiens
  misc_RNA (1)...(19): siRNA sense strand
gagcaacaucccagccaua

SEQ ID NO: 1685193 - RNA, 19 nt, Homo sapiens
  misc_RNA (1)...(19): siRNA sense strand
ggagagacgcugcucaucu

SEQ ID NO: 1685194 - RNA, 19 nt, Homo sapiens
  misc_RNA (1)...(19): siRNA sense strand
uggaugcccucuuccugua

SEQ ID NO: 1685195 - RNA, 19 nt, Homo sapiens
  misc_RNA (1)...(19): siRNA sense strand
cgggacaacugaagcaugu

SEQ ID NO: 1685196 - RNA, 19 nt, Homo sapiens
  misc_RNA (1)...(19): siRNA sense strand
gggacaggcagagaucuua

SEQ ID NO: 1685197 - RNA, 19 nt, Homo sapiens
  misc_RNA (1)...(19): siRNA sense strand
caacaucccagccauaagg

SEQ ID NO: 1685198 - RNA, 19 nt, Homo sapiens
  misc_RNA (1)...(19): siRNA sense strand
aggcagagaucuuauugca

SEQ ID NO: 1685199 - RNA, 19 nt, Homo sapiens
  misc_RNA (1)...(19): siRNA sense strand
gcuaaccagcgaaauauag

SEQ ID NO: 1685200 - RNA, 19 nt, Homo sapiens
  misc_RNA (1)...(19): siRNA sense strand
ggacaggcagagaucuuau

SEQ ID NO: 1685201 - RNA, 19 nt, Homo sapiens
  misc_RNA (1)...(19): siRNA sense strand
uggacaaucuggugcugaa

SEQ ID NO: 1685202 - RNA, 19 nt, Homo sapiens
  misc_RNA (1)...(19): siRNA sense strand
ccuaagagaauauuucaag

SEQ ID NO: 1685203 - RNA, 19 nt, Homo sapiens
  misc_RNA (1)...(19): siRNA sense strand
guuccuggaugcccucuuc

SEQ ID NO: 1685204 - RNA, 19 nt, Homo sapiens
  misc_RNA (1)...(19): siRNA sense strand
gggcucugguuucggaaga

SEQ ID NO: 1685205 - RNA, 19 nt, Homo sapiens
  misc_RNA (1)...(19): siRNA sense strand
ggauguucguggacaaucu

SEQ ID NO: 1685206 - RNA, 19 nt, Homo sapiens
  misc_RNA (1)...(19): siRNA sense strand
gaucuuauugcauaugaag

SEQ ID NO: 1685207 - RNA, 19 nt, Homo sapiens
  misc_RNA (1)...(19): siRNA sense strand
aaggcuaaccagcgaaaua

SEQ ID NO: 1685208 - RNA, 19 nt, Homo sapiens
  misc_RNA (1)...(19): siRNA sense strand
ccaagcuggugaagaacug

SEQ ID NO: 1685209 - RNA, 19 nt, Homo sapiens
  misc_RNA (1)...(19): siRNA sense strand
acaaucuggugcugaacaa

SEQ ID NO: 1685210 - RNA, 19 nt, Homo sapiens
  misc_RNA (1)...(19): siRNA sense strand
gcugacgaguuugggcuuu

SEQ ID NO: 1685211 - RNA, 19 nt, Homo sapiens
  misc_RNA (1)...(19): siRNA sense strand
uagaagacaucugcaucug

SEQ ID NO: 1685212 - RNA, 19 nt, Homo sapiens
  misc_RNA (1)...(19): siRNA sense strand
acucacuuccucuuuauaa

SEQ ID NO: 1685213 - RNA, 19 nt, Homo sapiens
  misc_RNA (1)...(19): siRNA sense strand
cugcggaagucuccagguu

SEQ ID NO: 1685214 - RNA, 19 nt, Homo sapiens
  misc_RNA (1)...(19): siRNA sense strand
gacaggcagagaucuuauu

SEQ ID NO: 1685215 - RNA, 19 nt, Homo sapiens
  misc_RNA (1)...(19): siRNA sense strand
gcucucaagcuccguuuca

SEQ ID NO: 1685216 - RNA, 19 nt, Homo sapiens
  misc_RNA (1)...(19): siRNA sense strand
cagaacucacuuccucuuu

SEQ ID NO: 1685217 - RNA, 19 nt, Homo sapiens
  misc_RNA (1)...(19): siRNA sense strand
ggaagucuccagguucaca

SEQ ID NO: 1685218 - RNA, 19 nt, Homo sapiens
  misc_RNA (1)...(19): siRNA sense strand
gcggauccuugcagaaugc

SEQ ID NO: 1685219 - RNA, 19 nt, Homo sapiens
  misc_RNA (1)...(19): siRNA sense strand
ggcggauccuugcagaaug

SEQ ID NO: 1685220 - RNA, 19 nt, Homo sapiens
  misc_RNA (1)...(19): siRNA sense strand
gcuacugcuucgagugugu

SEQ ID NO: 1685221 - RNA, 19 nt, Homo sapiens
  misc_RNA (1)...(19): siRNA sense strand
cagagaucuuauugcauau

SEQ ID NO: 1685222 - RNA, 19 nt, Homo sapiens
  misc_RNA (1)...(19): siRNA sense strand
ggcuaaccagcgaaauaua

SEQ ID NO: 1685223 - RNA, 19 nt, Homo sapiens
  misc_RNA (1)...(19): siRNA sense strand
aagaaagagcugacgaguu

SEQ ID NO: 1685224 - RNA, 19 nt, Homo sapiens
  misc_RNA (1)...(19): siRNA sense strand
uaaccagcgaaauauagaa

SEQ ID NO: 1685225 - RNA, 19 nt, Homo sapiens
  misc_RNA (1)...(19): siRNA sense strand
ggaaggugcacgccaugag

SEQ ID NO: 1685226 - RNA, 19 nt, Homo sapiens
  misc_RNA (1)...(19): siRNA sense strand
gaaauauagaagacaucug

SEQ ID NO: 1685227 - RNA, 19 nt, Homo sapiens
  misc_RNA (1)...(19): siRNA sense strand
gacaaucuggugcugaaca

SEQ ID NO: 1685228 - RNA, 19 nt, Homo sapiens
  misc_RNA (1)...(19): siRNA sense strand
cuaaccagcgaaauauaga

SEQ ID NO: 1685229 - RNA, 19 nt, Homo sapiens
  misc_RNA (1)...(19): siRNA sense strand
gcaacugggugugcuaccu

SEQ ID NO: 1685230 - RNA, 19 nt, Homo sapiens
  misc_RNA (1)...(19): siRNA sense strand
ccagcgaaauauagaagac

SEQ ID NO: 1685231 - RNA, 19 nt, Homo sapiens
  misc_RNA (1)...(19): siRNA sense strand
uccaccggcuccugcagua

SEQ ID NO: 1685232 - RNA, 19 nt, Homo sapiens
  misc_RNA (1)...(19): siRNA sense strand
acaggcagagaucuuauug

SEQ ID NO: 1685233 - RNA, 19 nt, Homo sapiens
  misc_RNA (1)...(19): siRNA sense strand
gacgaugacggguaccaau

SEQ ID NO: 1685234 - RNA, 19 nt, Homo sapiens
  misc_RNA (1)...(19): siRNA sense strand
ucaaggcuaaccagcgaaa

SEQ ID NO: 1685235 - RNA, 19 nt, Homo sapiens
  misc_RNA (1)...(19): siRNA sense strand
agaacaagcagagcucgaa

SEQ ID NO: 1685236 - RNA, 19 nt, Homo sapiens
  misc_RNA (1)...(19): siRNA sense strand
gguuucggaagaagaauug

SEQ ID NO: 1685237 - RNA, 19 nt, Homo sapiens
  misc_RNA (1)...(19): siRNA sense strand
cgaaauauagaagacaucu

SEQ ID NO: 1685238 - RNA, 19 nt, Homo sapiens
  misc_RNA (1)...(19): siRNA sense strand
uauugcauaugaagucaag

SEQ ID NO: 1685239 - RNA, 19 nt, Homo sapiens
  misc_RNA (1)...(19): siRNA sense strand
cagacacagugaggaagga

SEQ ID NO: 1685240 - RNA, 19 nt, Homo sapiens
  misc_RNA (1)...(19): siRNA sense strand
gcagagaucuuauugcaua

SEQ ID NO: 1685241 - RNA, 19 nt, Homo sapiens
  misc_RNA (1)...(19): siRNA sense strand
agaaagagcugacgaguuu

SEQ ID NO: 1685242 - RNA, 19 nt, Homo sapiens
  misc_RNA (1)...(19): siRNA sense strand
gaacucacuuccucuuuau

SEQ ID NO: 1685243 - RNA, 19 nt, Homo sapiens
  misc_RNA (1)...(19): siRNA sense strand
cauaugaagucaaggcuaa

SEQ ID NO: 1685244 - RNA, 19 nt, Homo sapiens
  misc_RNA (1)...(19): siRNA sense strand
agaacucacuuccucuuua

SEQ ID NO: 1685245 - RNA, 19 nt, Homo sapiens
  misc_RNA (1)...(19): siRNA sense strand
gagaucuuauugcauauga

SEQ ID NO: 1685246 - RNA, 19 nt, Homo sapiens
  misc_RNA (1)...(19): siRNA sense strand
gagagacgcugcucaucug

SEQ ID NO: 1685247 - RNA, 19 nt, Homo sapiens
  misc_RNA (1)...(19): siRNA sense strand
gcggaagucuccagguuca

SEQ ID NO: 1685248 - RNA, 19 nt, Homo sapiens
  misc_RNA (1)...(19): siRNA sense strand
ugaagcaugugguugaugu

SEQ ID NO: 1685249 - RNA, 19 nt, Homo sapiens
  misc_RNA (1)...(19): siRNA sense strand
gcacugggcucugguuucg

SEQ ID NO: 1685250 - RNA, 19 nt, Homo sapiens
  misc_RNA (1)...(19): siRNA sense strand
gagcaacaucccagccaua

SEQ ID NO: 1685251 - RNA, 19 nt, Homo sapiens
  misc_RNA (1)...(19): siRNA sense strand
ggagagacgcugcucaucu

SEQ ID NO: 1685252 - RNA, 19 nt, Homo sapiens
  misc_RNA (1)...(19): siRNA sense strand
uggaugcccucuuccugua

SEQ ID NO: 1685253 - RNA, 19 nt, Homo sapiens
  misc_RNA (1)...(19): siRNA sense strand
cgggacaacugaagcaugu

SEQ ID NO: 1685254 - RNA, 19 nt, Homo sapiens
  misc_RNA (1)...(19): siRNA sense strand
gggacaggcagagaucuua

SEQ ID NO: 1685255 - RNA, 19 nt, Homo sapiens
  misc_RNA (1)...(19): siRNA sense strand
caacaucccagccauaagg

SEQ ID NO: 1685256 - RNA, 19 nt, Homo sapiens
  misc_RNA (1)...(19): siRNA sense strand
aggcagagaucuuauugca

SEQ ID NO: 1685257 - RNA, 19 nt, Homo sapiens
  misc_RNA (1)...(19): siRNA sense strand
gcuaaccagcgaaauauag

SEQ ID NO: 1685258 - RNA, 19 nt, Homo sapiens
  misc_RNA (1)...(19): siRNA sense strand
ggacaggcagagaucuuau

SEQ ID NO: 1685259 - RNA, 19 nt, Homo sapiens
  misc_RNA (1)...(19): siRNA sense strand
uggacaaucuggugcugaa

SEQ ID NO: 1685260 - RNA, 19 nt, Homo sapiens
  misc_RNA (1)...(19): siRNA sense strand
ccuaagagaauauuucaag

SEQ ID NO: 1685261 - RNA, 19 nt, Homo sapiens
  misc_RNA (1)...(19): siRNA sense strand
guuccuggaugcccucuuc

SEQ ID NO: 1685262 - RNA, 19 nt, Homo sapiens
  misc_RNA (1)...(19): siRNA sense strand
gggcucugguuucggaaga

SEQ ID NO: 1685263 - RNA, 19 nt, Homo sapiens
  misc_RNA (1)...(19): siRNA sense strand
ggauguucguggacaaucu

SEQ ID NO: 1685264 - RNA, 19 nt, Homo sapiens
  misc_RNA (1)...(19): siRNA sense strand
gaucuuauugcauaugaag

SEQ ID NO: 1685265 - RNA, 19 nt, Homo sapiens
  misc_RNA (1)...(19): siRNA sense strand
aaggcuaaccagcgaaaua

SEQ ID NO: 1685266 - RNA, 19 nt, Homo sapiens
  misc_RNA (1)...(19): siRNA sense strand
ccaagcuggugaagaacug

SEQ ID NO: 1685267 - RNA, 19 nt, Homo sapiens
  misc_RNA (1)...(19): siRNA sense strand
acaaucuggugcugaacaa

SEQ ID NO: 1685268 - RNA, 19 nt, Homo sapiens
  misc_RNA (1)...(19): siRNA sense strand
gcugacgaguuugggcuuu

SEQ ID NO: 1685269 - RNA, 19 nt, Homo sapiens
  misc_RNA (1)...(19): siRNA sense strand
uagaagacaucugcaucug

SEQ ID NO: 1685270 - RNA, 19 nt, Homo sapiens
  misc_RNA (1)...(19): siRNA sense strand
acucacuuccucuuuauaa

SEQ ID NO: 1685271 - RNA, 19 nt, Homo sapiens
  misc_RNA (1)...(19): siRNA sense strand
cugcggaagucuccagguu

SEQ ID NO: 1685272 - RNA, 19 nt, Homo sapiens
  misc_RNA (1)...(19): siRNA sense strand
gacaggcagagaucuuauu

SEQ ID NO: 1685273 - RNA, 19 nt, Homo sapiens
  misc_RNA (1)...(19): siRNA sense strand
gcucucaagcuccguuuca

SEQ ID NO: 1685274 - RNA, 19 nt, Homo sapiens
  misc_RNA (1)...(19): siRNA sense strand
cagaacucacuuccucuuu

SEQ ID NO: 1685275 - RNA, 19 nt, Homo sapiens
  misc_RNA (1)...(19): siRNA sense strand
ggaagucuccagguucaca

SEQ ID NO: 1685276 - RNA, 19 nt, Homo sapiens
  misc_RNA (1)...(19): siRNA sense strand
gcggauccuugcagaaugc

SEQ ID NO: 1685277 - RNA, 19 nt, Homo sapiens
  misc_RNA (1)...(19): siRNA sense strand
ggcggauccuugcagaaug

SEQ ID NO: 1685278 - RNA, 19 nt, Homo sapiens
  misc_RNA (1)...(19): siRNA sense strand
gcuacugcuucgagugugu

SEQ ID NO: 1685279 - RNA, 19 nt, Homo sapiens
  misc_RNA (1)...(19): siRNA sense strand
cagagaucuuauugcauau

SEQ ID NO: 1685280 - RNA, 19 nt, Homo sapiens
  misc_RNA (1)...(19): siRNA sense strand
ggcuaaccagcgaaauaua

SEQ ID NO: 1685281 - RNA, 19 nt, Homo sapiens
  misc_RNA (1)...(19): siRNA sense strand
aagaaagagcugacgaguu

SEQ ID NO: 1685282 - RNA, 19 nt, Homo sapiens
  misc_RNA (1)...(19): siRNA sense strand
uaaccagcgaaauauagaa

SEQ ID NO: 1685283 - RNA, 19 nt, Homo sapiens
  misc_RNA (1)...(19): siRNA sense strand
ggaaggugcacgccaugag

SEQ ID NO: 1685284 - RNA, 19 nt, Homo sapiens
  misc_RNA (1)...(19): siRNA sense strand
gaaauauagaagacaucug

SEQ ID NO: 1685285 - RNA, 19 nt, Homo sapiens
  misc_RNA (1)...(19): siRNA sense strand
gacaaucuggugcugaaca

SEQ ID NO: 1685286 - RNA, 19 nt, Homo sapiens
  misc_RNA (1)...(19): siRNA sense strand
cuaaccagcgaaauauaga

SEQ ID NO: 1685287 - RNA, 19 nt, Homo sapiens
  misc_RNA (1)...(19): siRNA sense strand
gcaacugggugugcuaccu

SEQ ID NO: 1685288 - RNA, 19 nt, Homo sapiens
  misc_RNA (1)...(19): siRNA sense strand
ccagcgaaauauagaagac

SEQ ID NO: 1685289 - RNA, 19 nt, Homo sapiens
  misc_RNA (1)...(19): siRNA sense strand
uccaccggcuccugcagua

SEQ ID NO: 1685290 - RNA, 19 nt, Homo sapiens
  misc_RNA (1)...(19): siRNA sense strand
acaggcagagaucuuauug

SEQ ID NO: 1685291 - RNA, 19 nt, Homo sapiens
  misc_RNA (1)...(19): siRNA sense strand
gacgaugacggguaccaau

SEQ ID NO: 1685292 - RNA, 19 nt, Homo sapiens
  misc_RNA (1)...(19): siRNA sense strand
ucaaggcuaaccagcgaaa

SEQ ID NO: 1685293 - RNA, 19 nt, Homo sapiens
  misc_RNA (1)...(19): siRNA sense strand
agaacaagcagagcucgaa

SEQ ID NO: 1685294 - RNA, 19 nt, Homo sapiens
  misc_RNA (1)...(19): siRNA sense strand
gguuucggaagaagaauug

SEQ ID NO: 1685295 - RNA, 19 nt, Homo sapiens
  misc_RNA (1)...(19): siRNA sense strand
cgaaauauagaagacaucu

SEQ ID NO: 1685296 - RNA, 19 nt, Homo sapiens
  misc_RNA (1)...(19): siRNA sense strand
uauugcauaugaagucaag

SEQ ID NO: 1685297 - RNA, 19 nt, Homo sapiens
  misc_RNA (1)...(19): siRNA sense strand
cagacacagugaggaagga

SEQ ID NO: 1685298 - RNA, 19 nt, Homo sapiens
  misc_RNA (1)...(19): siRNA sense strand
gcaaagggcacucagaauc

SEQ ID NO: 1685299 - RNA, 19 nt, Homo sapiens
  misc_RNA (1)...(19): siRNA sense strand
ggaccagucuguguauuuc

SEQ ID NO: 1685300 - RNA, 19 nt, Homo sapiens
  misc_RNA (1)...(19): siRNA sense strand
gccaagcagugacuucuga

SEQ ID NO: 1685301 - RNA, 19 nt, Homo sapiens
  misc_RNA (1)...(19): siRNA sense strand
ggaaggaggaccagucugu

SEQ ID NO: 1685302 - RNA, 19 nt, Homo sapiens
  misc_RNA (1)...(19): siRNA sense strand
caaagggcacucagaauca

SEQ ID NO: 1685303 - RNA, 19 nt, Homo sapiens
  misc_RNA (1)...(19): siRNA sense strand
ggaccaaacucaccaucac

SEQ ID NO: 1685304 - RNA, 19 nt, Homo sapiens
  misc_RNA (1)...(19): siRNA sense strand
ucagaaucauggcaccuaa

SEQ ID NO: 1685305 - RNA, 19 nt, Homo sapiens
  misc_RNA (1)...(19): siRNA sense strand
gaucagggaggcagcaguu

SEQ ID NO: 1685306 - RNA, 19 nt, Homo sapiens
  misc_RNA (1)...(19): siRNA sense strand
ucucaaaccugcggaagga

SEQ ID NO: 1685307 - RNA, 19 nt, Homo sapiens
  misc_RNA (1)...(19): siRNA sense strand
ugaaccggcucuuucugaa

SEQ ID NO: 1685308 - RNA, 19 nt, Homo sapiens
  misc_RNA (1)...(19): siRNA sense strand
ggaggaccagucuguguau

SEQ ID NO: 1685309 - RNA, 19 nt, Homo sapiens
  misc_RNA (1)...(19): siRNA sense strand
gaggaccagucuguguauu

SEQ ID NO: 1685310 - RNA, 19 nt, Homo sapiens
  misc_RNA (1)...(19): siRNA sense strand
gugaaccggcucuuucuga

SEQ ID NO: 1685311 - RNA, 19 nt, Homo sapiens
  misc_RNA (1)...(19): siRNA sense strand
gcaccuaagucuggacacu

SEQ ID NO: 1685312 - RNA, 19 nt, Homo sapiens
  misc_RNA (1)...(19): siRNA sense strand
cagcagcacaaccaccaua

SEQ ID NO: 1685313 - RNA, 19 nt, Homo sapiens
  misc_RNA (1)...(19): siRNA sense strand
aagcaaagggcacucagaa

SEQ ID NO: 1685314 - RNA, 19 nt, Homo sapiens
  misc_RNA (1)...(19): siRNA sense strand
uggaggagaaggaaaggua

SEQ ID NO: 1685315 - RNA, 19 nt, Homo sapiens
  misc_RNA (1)...(19): siRNA sense strand
ggcugucgcugugcucaaa

SEQ ID NO: 1685316 - RNA, 19 nt, Homo sapiens
  misc_RNA (1)...(19): siRNA sense strand
ggccucagggucacagaaa

SEQ ID NO: 1685317 - RNA, 19 nt, Homo sapiens
  misc_RNA (1)...(19): siRNA sense strand
uaugugaaccggcucuuuc

SEQ ID NO: 1685318 - RNA, 19 nt, Homo sapiens
  misc_RNA (1)...(19): siRNA sense strand
gagcuggacacccggagau

SEQ ID NO: 1685319 - RNA, 19 nt, Homo sapiens
  misc_RNA (1)...(19): siRNA sense strand
aaagggcacucagaaucau

SEQ ID NO: 1685320 - RNA, 19 nt, Homo sapiens
  misc_RNA (1)...(19): siRNA sense strand
aaucauggcaccuaagucu

SEQ ID NO: 1685321 - RNA, 19 nt, Homo sapiens
  misc_RNA (1)...(19): siRNA sense strand
gcaguugcaguccaucaag

SEQ ID NO: 1685322 - RNA, 19 nt, Homo sapiens
  misc_RNA (1)...(19): siRNA sense strand
cagggucacagaaagcaaa

SEQ ID NO: 1685323 - RNA, 19 nt, Homo sapiens
  misc_RNA (1)...(19): siRNA sense strand
gaaccggcucuuucugaac

SEQ ID NO: 1685324 - RNA, 19 nt, Homo sapiens
  misc_RNA (1)...(19): siRNA sense strand
ggcagcaguugcaguccau

SEQ ID NO: 1685325 - RNA, 19 nt, Homo sapiens
  misc_RNA (1)...(19): siRNA sense strand
gggaccaaacucaccauca

SEQ ID NO: 1685326 - RNA, 19 nt, Homo sapiens
  misc_RNA (1)...(19): siRNA sense strand
gcaaagggcacucagaauc

SEQ ID NO: 1685327 - RNA, 19 nt, Homo sapiens
  misc_RNA (1)...(19): siRNA sense strand
ggaccagucuguguauuuc

SEQ ID NO: 1685328 - RNA, 19 nt, Homo sapiens
  misc_RNA (1)...(19): siRNA sense strand
ggaaggaggaccagucugu

SEQ ID NO: 1685329 - RNA, 19 nt, Homo sapiens
  misc_RNA (1)...(19): siRNA sense strand
caaagggcacucagaauca

SEQ ID NO: 1685330 - RNA, 19 nt, Homo sapiens
  misc_RNA (1)...(19): siRNA sense strand
ggaccaaacucaccaucac

SEQ ID NO: 1685331 - RNA, 19 nt, Homo sapiens
  misc_RNA (1)...(19): siRNA sense strand
ucagaaucauggcaccuaa

SEQ ID NO: 1685332 - RNA, 19 nt, Homo sapiens
  misc_RNA (1)...(19): siRNA sense strand
gaucagggaggcagcaguu

SEQ ID NO: 1685333 - RNA, 19 nt, Homo sapiens
  misc_RNA (1)...(19): siRNA sense strand
ucucaaaccugcggaagga

SEQ ID NO: 1685334 - RNA, 19 nt, Homo sapiens
  misc_RNA (1)...(19): siRNA sense strand
ugaaccggcucuuucugaa

SEQ ID NO: 1685335 - RNA, 19 nt, Homo sapiens
  misc_RNA (1)...(19): siRNA sense strand
ggaggaccagucuguguau

SEQ ID NO: 1685336 - RNA, 19 nt, Homo sapiens
  misc_RNA (1)...(19): siRNA sense strand
gaggaccagucuguguauu

SEQ ID NO: 1685337 - RNA, 19 nt, Homo sapiens
  misc_RNA (1)...(19): siRNA sense strand
gugaaccggcucuuucuga

SEQ ID NO: 1685338 - RNA, 19 nt, Homo sapiens
  misc_RNA (1)...(19): siRNA sense strand
gcaccuaagucuggacacu

SEQ ID NO: 1685339 - RNA, 19 nt, Homo sapiens
  misc_RNA (1)...(19): siRNA sense strand
cagcagcacaaccaccaua

SEQ ID NO: 1685340 - RNA, 19 nt, Homo sapiens
  misc_RNA (1)...(19): siRNA sense strand
aagcaaagggcacucagaa

SEQ ID NO: 1685341 - RNA, 19 nt, Homo sapiens
  misc_RNA (1)...(19): siRNA sense strand
uggaggagaaggaaaggua

SEQ ID NO: 1685342 - RNA, 19 nt, Homo sapiens
  misc_RNA (1)...(19): siRNA sense strand
ggcugucgcugugcucaaa

SEQ ID NO: 1685343 - RNA, 19 nt, Homo sapiens
  misc_RNA (1)...(19): siRNA sense strand
uaugugaaccggcucuuuc

SEQ ID NO: 1685344 - RNA, 19 nt, Homo sapiens
  misc_RNA (1)...(19): siRNA sense strand
ggccucagggucacagaaa

SEQ ID NO: 1685345 - RNA, 19 nt, Homo sapiens
  misc_RNA (1)...(19): siRNA sense strand
gagcuggacacccggagau

SEQ ID NO: 1685346 - RNA, 19 nt, Homo sapiens
  misc_RNA (1)...(19): siRNA sense strand
aaagggcacucagaaucau

SEQ ID NO: 1685347 - RNA, 19 nt, Homo sapiens
  misc_RNA (1)...(19): siRNA sense strand
aaucauggcaccuaagucu

SEQ ID NO: 1685348 - RNA, 19 nt, Homo sapiens
  misc_RNA (1)...(19): siRNA sense strand
gcaguugcaguccaucaag

SEQ ID NO: 1685349 - RNA, 19 nt, Homo sapiens
  misc_RNA (1)...(19): siRNA sense strand
cagggucacagaaagcaaa

SEQ ID NO: 1685350 - RNA, 19 nt, Homo sapiens
  misc_RNA (1)...(19): siRNA sense strand
gaaccggcucuuucugaac

SEQ ID NO: 1685351 - RNA, 19 nt, Homo sapiens
  misc_RNA (1)...(19): siRNA sense strand
ggcagcaguugcaguccau

SEQ ID NO: 1685352 - RNA, 19 nt, Homo sapiens
  misc_RNA (1)...(19): siRNA sense strand
gggaccaaacucaccauca

SEQ ID NO: 1685353 - RNA, 19 nt, Homo sapiens
  misc_RNA (1)...(19): siRNA sense strand
gcaaagggcacucagaauc

SEQ ID NO: 1685354 - RNA, 19 nt, Homo sapiens
  misc_RNA (1)...(19): siRNA sense strand
ggaccagucuguguauuuc

SEQ ID NO: 1685355 - RNA, 19 nt, Homo sapiens
  misc_RNA (1)...(19): siRNA sense strand
gccaagcagugacuucuga

SEQ ID NO: 1685356 - RNA, 19 nt, Homo sapiens
  misc_RNA (1)...(19): siRNA sense strand
ggaaggaggaccagucugu

SEQ ID NO: 1685357 - RNA, 19 nt, Homo sapiens
  misc_RNA (1)...(19): siRNA sense strand
caaagggcacucagaauca

SEQ ID NO: 1685358 - RNA, 19 nt, Homo sapiens
  misc_RNA (1)...(19): siRNA sense strand
ggaccaaacucaccaucac

SEQ ID NO: 1685359 - RNA, 19 nt, Homo sapiens
  misc_RNA (1)...(19): siRNA sense strand
ucagaaucauggcaccuaa

SEQ ID NO: 1685360 - RNA, 19 nt, Homo sapiens
  misc_RNA (1)...(19): siRNA sense strand
gaucagggaggcagcaguu

SEQ ID NO: 1685361 - RNA, 19 nt, Homo sapiens
  misc_RNA (1)...(19): siRNA sense strand
ucucaaaccugcggaagga

SEQ ID NO: 1685362 - RNA, 19 nt, Homo sapiens
  misc_RNA (1)...(19): siRNA sense strand
ugaaccggcucuuucugaa

SEQ ID NO: 1685363 - RNA, 19 nt, Homo sapiens
  misc_RNA (1)...(19): siRNA sense strand
ggaggaccagucuguguau

SEQ ID NO: 1685364 - RNA, 19 nt, Homo sapiens
  misc_RNA (1)...(19): siRNA sense strand
gaggaccagucuguguauu

SEQ ID NO: 1685365 - RNA, 19 nt, Homo sapiens
  misc_RNA (1)...(19): siRNA sense strand
gugaaccggcucuuucuga

SEQ ID NO: 1685366 - RNA, 19 nt, Homo sapiens
  misc_RNA (1)...(19): siRNA sense strand
gcaccuaagucuggacacu

SEQ ID NO: 1685367 - RNA, 19 nt, Homo sapiens
  misc_RNA (1)...(19): siRNA sense strand
cagcagcacaaccaccaua

SEQ ID NO: 1685368 - RNA, 19 nt, Homo sapiens
  misc_RNA (1)...(19): siRNA sense strand
aagcaaagggcacucagaa

SEQ ID NO: 1685369 - RNA, 19 nt, Homo sapiens
  misc_RNA (1)...(19): siRNA sense strand
uggaggagaaggaaaggua

SEQ ID NO: 1685370 - RNA, 19 nt, Homo sapiens
  misc_RNA (1)...(19): siRNA sense strand
ggcugucgcugugcucaaa

SEQ ID NO: 1685371 - RNA, 19 nt, Homo sapiens
  misc_RNA (1)...(19): siRNA sense strand
ggccucagggucacagaaa

SEQ ID NO: 1685372 - RNA, 19 nt, Homo sapiens
  misc_RNA (1)...(19): siRNA sense strand
uaugugaaccggcucuuuc

SEQ ID NO: 1685373 - RNA, 19 nt, Homo sapiens
  misc_RNA (1)...(19): siRNA sense strand
gagcuggacacccggagau

SEQ ID NO: 1685374 - RNA, 19 nt, Homo sapiens
  misc_RNA (1)...(19): siRNA sense strand
aaagggcacucagaaucau

SEQ ID NO: 1685375 - RNA, 19 nt, Homo sapiens
  misc_RNA (1)...(19): siRNA sense strand
aaucauggcaccuaagucu

SEQ ID NO: 1685376 - RNA, 19 nt, Homo sapiens
  misc_RNA (1)...(19): siRNA sense strand
gcaguugcaguccaucaag

SEQ ID NO: 1685377 - RNA, 19 nt, Homo sapiens
  misc_RNA (1)...(19): siRNA sense strand
cagggucacagaaagcaaa

SEQ ID NO: 1685378 - RNA, 19 nt, Homo sapiens
  misc_RNA (1)...(19): siRNA sense strand
gaaccggcucuuucugaac

SEQ ID NO: 1685379 - RNA, 19 nt, Homo sapiens
  misc_RNA (1)...(19): siRNA sense strand
ggcagcaguugcaguccau

SEQ ID NO: 1685380 - RNA, 19 nt, Homo sapiens
  misc_RNA (1)...(19): siRNA sense strand
gggaccaaacucaccauca

SEQ ID NO: 1685381 - RNA, 19 nt, Homo sapiens
  misc_RNA (1)...(19): siRNA sense strand
gaauucaacuaucgaguau

SEQ ID NO: 1685382 - RNA, 19 nt, Homo sapiens
  misc_RNA (1)...(19): siRNA sense strand
ggaaauggaagaagaagaa

SEQ ID NO: 1685383 - RNA, 19 nt, Homo sapiens
  misc_RNA (1)...(19): siRNA sense strand
gcucaucuauacacgguua

SEQ ID NO: 1685384 - RNA, 19 nt, Homo sapiens
  misc_RNA (1)...(19): siRNA sense strand
gaaccaagaauucaacuau

SEQ ID NO: 1685385 - RNA, 19 nt, Homo sapiens
  misc_RNA (1)...(19): siRNA sense strand
ugagugagcuaguaguauu

SEQ ID NO: 1685386 - RNA, 19 nt, Homo sapiens
  misc_RNA (1)...(19): siRNA sense strand
gaugaauucugaacuguca

SEQ ID NO: 1685387 - RNA, 19 nt, Homo sapiens
  misc_RNA (1)...(19): siRNA sense strand
cagucaaccugaaauagua

SEQ ID NO: 1685388 - RNA, 19 nt, Homo sapiens
  misc_RNA (1)...(19): siRNA sense strand
ucgcaacucuuauaaaugu

SEQ ID NO: 1685389 - RNA, 19 nt, Homo sapiens
  misc_RNA (1)...(19): siRNA sense strand
ccauauaccugaaagaucu

SEQ ID NO: 1685390 - RNA, 19 nt, Homo sapiens
  misc_RNA (1)...(19): siRNA sense strand
cagcuugucuguuucauuc

SEQ ID NO: 1685391 - RNA, 19 nt, Homo sapiens
  misc_RNA (1)...(19): siRNA sense strand
gaagaugaguguuuugcua

SEQ ID NO: 1685392 - RNA, 19 nt, Homo sapiens
  misc_RNA (1)...(19): siRNA sense strand
gaccacauuccuuggauua

SEQ ID NO: 1685393 - RNA, 19 nt, Homo sapiens
  misc_RNA (1)...(19): siRNA sense strand
uccaucagcuugucuguuu

SEQ ID NO: 1685394 - RNA, 19 nt, Homo sapiens
  misc_RNA (1)...(19): siRNA sense strand
ccucgcaacucuuauaaau

SEQ ID NO: 1685395 - RNA, 19 nt, Homo sapiens
  misc_RNA (1)...(19): siRNA sense strand
guacuuccaacaguuauua

SEQ ID NO: 1685396 - RNA, 19 nt, Homo sapiens
  misc_RNA (1)...(19): siRNA sense strand
ugaguaacauucucuuugu

SEQ ID NO: 1685397 - RNA, 19 nt, Homo sapiens
  misc_RNA (1)...(19): siRNA sense strand
gauguuacgagcaauauga

SEQ ID NO: 1685398 - RNA, 19 nt, Homo sapiens
  misc_RNA (1)...(19): siRNA sense strand
gaccugccaugccaauuug

SEQ ID NO: 1685399 - RNA, 19 nt, Homo sapiens
  misc_RNA (1)...(19): siRNA sense strand
gaugaagcccagcguguuu

SEQ ID NO: 1685400 - RNA, 19 nt, Homo sapiens
  misc_RNA (1)...(19): siRNA sense strand
gaagcggccucgcaacucu

SEQ ID NO: 1685401 - RNA, 19 nt, Homo sapiens
  misc_RNA (1)...(19): siRNA sense strand
cgaguaugaugguauuaug

SEQ ID NO: 1685402 - RNA, 19 nt, Homo sapiens
  misc_RNA (1)...(19): siRNA sense strand
ugucagugcuugcuaacuu

SEQ ID NO: 1685403 - RNA, 19 nt, Homo sapiens
  misc_RNA (1)...(19): siRNA sense strand
cuaauucuauggaaaugga

SEQ ID NO: 1685404 - RNA, 19 nt, Homo sapiens
  misc_RNA (1)...(19): siRNA sense strand
ugaaugagguauacuuagg

SEQ ID NO: 1685405 - RNA, 19 nt, Homo sapiens
  misc_RNA (1)...(19): siRNA sense strand
cgacaaaagugauacaugu

SEQ ID NO: 1685406 - RNA, 19 nt, Homo sapiens
  misc_RNA (1)...(19): siRNA sense strand
gaagauucaagcuuauuuc

SEQ ID NO: 1685407 - RNA, 19 nt, Homo sapiens
  misc_RNA (1)...(19): siRNA sense strand
ucaagauaaugucacagaa

SEQ ID NO: 1685408 - RNA, 19 nt, Homo sapiens
  misc_RNA (1)...(19): siRNA sense strand
uaucgaguaugaugguauu

SEQ ID NO: 1685409 - RNA, 19 nt, Homo sapiens
  misc_RNA (1)...(19): siRNA sense strand
ccuaagaagaugaguguuu

SEQ ID NO: 1685410 - RNA, 19 nt, Homo sapiens
  misc_RNA (1)...(19): siRNA sense strand
agagaaauuugacaguguu

SEQ ID NO: 1685411 - RNA, 19 nt, Homo sapiens
  misc_RNA (1)...(19): siRNA sense strand
aauuugaccugcucaucua

SEQ ID NO: 1685412 - RNA, 19 nt, Homo sapiens
  misc_RNA (1)...(19): siRNA sense strand
auucaacuaucgaguauga

SEQ ID NO: 1685413 - RNA, 19 nt, Homo sapiens
  misc_RNA (1)...(19): siRNA sense strand
agaauucaacuaucgagua

SEQ ID NO: 1685414 - RNA, 19 nt, Homo sapiens
  misc_RNA (1)...(19): siRNA sense strand
cuauggaaauggaagaaga

SEQ ID NO: 1685415 - RNA, 19 nt, Homo sapiens
  misc_RNA (1)...(19): siRNA sense strand
gcuaagaaccaagaauuca

SEQ ID NO: 1685416 - RNA, 19 nt, Homo sapiens
  misc_RNA (1)...(19): siRNA sense strand
ccacauuccuuggauuaca

SEQ ID NO: 1685417 - RNA, 19 nt, Homo sapiens
  misc_RNA (1)...(19): siRNA sense strand
uaucuucaccuuucucuau

SEQ ID NO: 1685418 - RNA, 19 nt, Homo sapiens
  misc_RNA (1)...(19): siRNA sense strand
caucuucuguauucuggaa

SEQ ID NO: 1685419 - RNA, 19 nt, Homo sapiens
  misc_RNA (1)...(19): siRNA sense strand
cgagcaauaugaccaucuu

SEQ ID NO: 1685420 - RNA, 19 nt, Homo sapiens
  misc_RNA (1)...(19): siRNA sense strand
gggcuuguaucaauguauc

SEQ ID NO: 1685421 - RNA, 19 nt, Homo sapiens
  misc_RNA (1)...(19): siRNA sense strand
uauacacgguuacccagaa

SEQ ID NO: 1685422 - RNA, 19 nt, Homo sapiens
  misc_RNA (1)...(19): siRNA sense strand
gaguaacauucucuuugug

SEQ ID NO: 1685423 - RNA, 19 nt, Homo sapiens
  misc_RNA (1)...(19): siRNA sense strand
guaacauucucuuugugau

SEQ ID NO: 1685424 - RNA, 19 nt, Homo sapiens
  misc_RNA (1)...(19): siRNA sense strand
aagagaaauuugacagugu

SEQ ID NO: 1685425 - RNA, 19 nt, Homo sapiens
  misc_RNA (1)...(19): siRNA sense strand
ugagguauacuuaggcaaa

SEQ ID NO: 1685426 - RNA, 19 nt, Homo sapiens
  misc_RNA (1)...(19): siRNA sense strand
aauaugaccaucuucugua

SEQ ID NO: 1685427 - RNA, 19 nt, Homo sapiens
  misc_RNA (1)...(19): siRNA sense strand
caauaugaccaucuucugu

SEQ ID NO: 1685428 - RNA, 19 nt, Homo sapiens
  misc_RNA (1)...(19): siRNA sense strand
auacuuaggcaaagagaaa

SEQ ID NO: 1685429 - RNA, 19 nt, Homo sapiens
  misc_RNA (1)...(19): siRNA sense strand
agagugaacagaccaagaa

SEQ ID NO: 1685430 - RNA, 19 nt, Homo sapiens
  misc_RNA (1)...(19): siRNA sense strand
gcaauaugaccaucuucug

SEQ ID NO: 1685431 - RNA, 19 nt, Homo sapiens
  misc_RNA (1)...(19): siRNA sense strand
gaaauuugacaguguucau

SEQ ID NO: 1685432 - RNA, 19 nt, Homo sapiens
  misc_RNA (1)...(19): siRNA sense strand
caauguaucauccaucaca

SEQ ID NO: 1685433 - RNA, 19 nt, Homo sapiens
  misc_RNA (1)...(19): siRNA sense strand
ucuguauucuggaaacuga

SEQ ID NO: 1685434 - RNA, 19 nt, Homo sapiens
  misc_RNA (1)...(19): siRNA sense strand
ccugaaagaucugaugaag

SEQ ID NO: 1685435 - RNA, 19 nt, Homo sapiens
  misc_RNA (1)...(19): siRNA sense strand
caagcuuauuucaaugaga

SEQ ID NO: 1685436 - RNA, 19 nt, Homo sapiens
  misc_RNA (1)...(19): siRNA sense strand
agaccugccaugccaauuu

SEQ ID NO: 1685437 - RNA, 19 nt, Homo sapiens
  misc_RNA (1)...(19): siRNA sense strand
cuaagaagaugaguguuuu

SEQ ID NO: 1685438 - RNA, 19 nt, Homo sapiens
  misc_RNA (1)...(19): siRNA sense strand
caggaaaacuugguucuga

SEQ ID NO: 1685439 - RNA, 19 nt, Homo sapiens
  misc_RNA (1)...(19): siRNA sense strand
ggacugaguaacauucucu

SEQ ID NO: 1685440 - RNA, 19 nt, Homo sapiens
  misc_RNA (1)...(19): siRNA sense strand
uaacauucucuuugugaug

SEQ ID NO: 1685441 - RNA, 19 nt, Homo sapiens
  misc_RNA (1)...(19): siRNA sense strand
ccugagacuucacaaucuu

SEQ ID NO: 1685442 - RNA, 19 nt, Homo sapiens
  misc_RNA (1)...(19): siRNA sense strand
ucugaaugagguauacuua

SEQ ID NO: 1685443 - RNA, 19 nt, Homo sapiens
  misc_RNA (1)...(19): siRNA sense strand
aagauaaugucacagaacu

SEQ ID NO: 1685444 - RNA, 19 nt, Homo sapiens
  misc_RNA (1)...(19): siRNA sense strand
gaacagaccaagaaaagag

SEQ ID NO: 1685445 - RNA, 19 nt, Homo sapiens
  misc_RNA (1)...(19): siRNA sense strand
gagagugaacagaccaaga

SEQ ID NO: 1685446 - RNA, 19 nt, Homo sapiens
  misc_RNA (1)...(19): siRNA sense strand
aaaacuugguucugaauga

SEQ ID NO: 1685447 - RNA, 19 nt, Homo sapiens
  misc_RNA (1)...(19): siRNA sense strand
gaugguauuaugcagaaau

SEQ ID NO: 1685448 - RNA, 19 nt, Homo sapiens
  misc_RNA (1)...(19): siRNA sense strand
gagugagcuaguaguauuu

SEQ ID NO: 1685449 - RNA, 19 nt, Homo sapiens
  misc_RNA (1)...(19): siRNA sense strand
gagguauacuuaggcaaag

SEQ ID NO: 1685450 - RNA, 19 nt, Homo sapiens
  misc_RNA (1)...(19): siRNA sense strand
cuaagaaccaagaauucaa

SEQ ID NO: 1685451 - RNA, 19 nt, Homo sapiens
  misc_RNA (1)...(19): siRNA sense strand
guauuaugcagaaaucuca

SEQ ID NO: 1685452 - RNA, 19 nt, Homo sapiens
  misc_RNA (1)...(19): siRNA sense strand
acaguguucauuccaagua

SEQ ID NO: 1685453 - RNA, 19 nt, Homo sapiens
  misc_RNA (1)...(19): siRNA sense strand
ggagagggaagagagugaa

SEQ ID NO: 1685454 - RNA, 19 nt, Homo sapiens
  misc_RNA (1)...(19): siRNA sense strand
ucaacuaucgaguaugaug

SEQ ID NO: 1685455 - RNA, 19 nt, Homo sapiens
  misc_RNA (1)...(19): siRNA sense strand
aguguucauuccaaguaua

SEQ ID NO: 1685456 - RNA, 19 nt, Homo sapiens
  misc_RNA (1)...(19): siRNA sense strand
agaccacauuccuuggauu

SEQ ID NO: 1685457 - RNA, 19 nt, Homo sapiens
  misc_RNA (1)...(19): siRNA sense strand
augaccaucuucuguauuc

SEQ ID NO: 1685458 - RNA, 19 nt, Homo sapiens
  misc_RNA (1)...(19): siRNA sense strand
gugcugcuccucugaagau

SEQ ID NO: 1685459 - RNA, 19 nt, Homo sapiens
  misc_RNA (1)...(19): siRNA sense strand
caagauaaugucacagaac

SEQ ID NO: 1685460 - RNA, 19 nt, Homo sapiens
  misc_RNA (1)...(19): siRNA sense strand
uugcuaagaaccaagaauu

SEQ ID NO: 1685461 - RNA, 19 nt, Homo sapiens
  misc_RNA (1)...(19): siRNA sense strand
gagugaacagaccaagaaa

SEQ ID NO: 1685462 - RNA, 19 nt, Homo sapiens
  misc_RNA (1)...(19): siRNA sense strand
aaacuugguucugaaugag

SEQ ID NO: 1685463 - RNA, 19 nt, Homo sapiens
  misc_RNA (1)...(19): siRNA sense strand
cagaccacauuccuuggau

SEQ ID NO: 1685464 - RNA, 19 nt, Homo sapiens
  misc_RNA (1)...(19): siRNA sense strand
auaugaccaucuucuguau

SEQ ID NO: 1685465 - RNA, 19 nt, Homo sapiens
  misc_RNA (1)...(19): siRNA sense strand
aagccugagugagcuagua

SEQ ID NO: 1685466 - RNA, 19 nt, Homo sapiens
  misc_RNA (1)...(19): siRNA sense strand
aaccaagaauucaacuauc

SEQ ID NO: 1685467 - RNA, 19 nt, Homo sapiens
  misc_RNA (1)...(19): siRNA sense strand
cugaguaacauucucuuug

SEQ ID NO: 1685468 - RNA, 19 nt, Homo sapiens
  misc_RNA (1)...(19): siRNA sense strand
caguguucauuccaaguau

SEQ ID NO: 1685469 - RNA, 19 nt, Homo sapiens
  misc_RNA (1)...(19): siRNA sense strand
ggccucgcaacucuuauaa

SEQ ID NO: 1685470 - RNA, 19 nt, Homo sapiens
  misc_RNA (1)...(19): siRNA sense strand
gcuuuuaucuucaccuuuc

SEQ ID NO: 1685471 - RNA, 19 nt, Homo sapiens
  misc_RNA (1)...(19): siRNA sense strand
ccugagugagcuaguagua

SEQ ID NO: 1685472 - RNA, 19 nt, Homo sapiens
  misc_RNA (1)...(19): siRNA sense strand
ucccugauguuacgagcaa

SEQ ID NO: 1685473 - RNA, 19 nt, Homo sapiens
  misc_RNA (1)...(19): siRNA sense strand
cccagaaccuaagaagaug

SEQ ID NO: 1685474 - RNA, 19 nt, Homo sapiens
  misc_RNA (1)...(19): siRNA sense strand
ggacaguuggacccugaga

SEQ ID NO: 1685475 - RNA, 19 nt, Homo sapiens
  misc_RNA (1)...(19): siRNA sense strand
guaucaauguaucauccau

SEQ ID NO: 1685476 - RNA, 19 nt, Homo sapiens
  misc_RNA (1)...(19): siRNA sense strand
gaaauggaagaagaagaag

SEQ ID NO: 1685477 - RNA, 19 nt, Homo sapiens
  misc_RNA (1)...(19): siRNA sense strand
augaugguauuaugcagaa

SEQ ID NO: 1685478 - RNA, 19 nt, Homo sapiens
  misc_RNA (1)...(19): siRNA sense strand
acccagaaccuaagaagau

SEQ ID NO: 1685479 - RNA, 19 nt, Homo sapiens
  misc_RNA (1)...(19): siRNA sense strand
gugaugguuuucugucuaa

SEQ ID NO: 1685480 - RNA, 19 nt, Homo sapiens
  misc_RNA (1)...(19): siRNA sense strand
cggccucgcaacucuuaua

SEQ ID NO: 1685481 - RNA, 19 nt, Homo sapiens
  misc_RNA (1)...(19): siRNA sense strand
gaauucaacuaucgaguau

SEQ ID NO: 1685482 - RNA, 19 nt, Homo sapiens
  misc_RNA (1)...(19): siRNA sense strand
ggaaauggaagaagaagaa

SEQ ID NO: 1685483 - RNA, 19 nt, Homo sapiens
  misc_RNA (1)...(19): siRNA sense strand
gcucaucuauacacgguua

SEQ ID NO: 1685484 - RNA, 19 nt, Homo sapiens
  misc_RNA (1)...(19): siRNA sense strand
gaaccaagaauucaacuau

SEQ ID NO: 1685485 - RNA, 19 nt, Homo sapiens
  misc_RNA (1)...(19): siRNA sense strand
ugagugagcuaguaguauu

SEQ ID NO: 1685486 - RNA, 19 nt, Homo sapiens
  misc_RNA (1)...(19): siRNA sense strand
gaugaauucugaacuguca

SEQ ID NO: 1685487 - RNA, 19 nt, Homo sapiens
  misc_RNA (1)...(19): siRNA sense strand
cagucaaccugaaauagua

SEQ ID NO: 1685488 - RNA, 19 nt, Homo sapiens
  misc_RNA (1)...(19): siRNA sense strand
ucgcaacucuuauaaaugu

SEQ ID NO: 1685489 - RNA, 19 nt, Homo sapiens
  misc_RNA (1)...(19): siRNA sense strand
ccauauaccugaaagaucu

SEQ ID NO: 1685490 - RNA, 19 nt, Homo sapiens
  misc_RNA (1)...(19): siRNA sense strand
cagcuugucuguuucauuc

SEQ ID NO: 1685491 - RNA, 19 nt, Homo sapiens
  misc_RNA (1)...(19): siRNA sense strand
gaagaugaguguuuugcua

SEQ ID NO: 1685492 - RNA, 19 nt, Homo sapiens
  misc_RNA (1)...(19): siRNA sense strand
gaccacauuccuuggauua

SEQ ID NO: 1685493 - RNA, 19 nt, Homo sapiens
  misc_RNA (1)...(19): siRNA sense strand
uccaucagcuugucuguuu

SEQ ID NO: 1685494 - RNA, 19 nt, Homo sapiens
  misc_RNA (1)...(19): siRNA sense strand
ccucgcaacucuuauaaau

SEQ ID NO: 1685495 - RNA, 19 nt, Homo sapiens
  misc_RNA (1)...(19): siRNA sense strand
guacuuccaacaguuauua

SEQ ID NO: 1685496 - RNA, 19 nt, Homo sapiens
  misc_RNA (1)...(19): siRNA sense strand
ugaguaacauucucuuugu

SEQ ID NO: 1685497 - RNA, 19 nt, Homo sapiens
  misc_RNA (1)...(19): siRNA sense strand
gauguuacgagcaauauga

SEQ ID NO: 1685498 - RNA, 19 nt, Homo sapiens
  misc_RNA (1)...(19): siRNA sense strand
gaccugccaugccaauuug

SEQ ID NO: 1685499 - RNA, 19 nt, Homo sapiens
  misc_RNA (1)...(19): siRNA sense strand
gaugaagcccagcguguuu

SEQ ID NO: 1685500 - RNA, 19 nt, Homo sapiens
  misc_RNA (1)...(19): siRNA sense strand
gaagcggccucgcaacucu

SEQ ID NO: 1685501 - RNA, 19 nt, Homo sapiens
  misc_RNA (1)...(19): siRNA sense strand
cgaguaugaugguauuaug

SEQ ID NO: 1685502 - RNA, 19 nt, Homo sapiens
  misc_RNA (1)...(19): siRNA sense strand
ugucagugcuugcuaacuu

SEQ ID NO: 1685503 - RNA, 19 nt, Homo sapiens
  misc_RNA (1)...(19): siRNA sense strand
cuaauucuauggaaaugga

SEQ ID NO: 1685504 - RNA, 19 nt, Homo sapiens
  misc_RNA (1)...(19): siRNA sense strand
ugaaugagguauacuuagg

SEQ ID NO: 1685505 - RNA, 19 nt, Homo sapiens
  misc_RNA (1)...(19): siRNA sense strand
cgacaaaagugauacaugu

SEQ ID NO: 1685506 - RNA, 19 nt, Homo sapiens
  misc_RNA (1)...(19): siRNA sense strand
ucaagauaaugucacagaa

SEQ ID NO: 1685507 - RNA, 19 nt, Homo sapiens
  misc_RNA (1)...(19): siRNA sense strand
uaucgaguaugaugguauu

SEQ ID NO: 1685508 - RNA, 19 nt, Homo sapiens
  misc_RNA (1)...(19): siRNA sense strand
ccuaagaagaugaguguuu

SEQ ID NO: 1685509 - RNA, 19 nt, Homo sapiens
  misc_RNA (1)...(19): siRNA sense strand
gaagauucaagcuuauuuc

SEQ ID NO: 1685510 - RNA, 19 nt, Homo sapiens
  misc_RNA (1)...(19): siRNA sense strand
agagaaauuugacaguguu

SEQ ID NO: 1685511 - RNA, 19 nt, Homo sapiens
  misc_RNA (1)...(19): siRNA sense strand
aauuugaccugcucaucua

SEQ ID NO: 1685512 - RNA, 19 nt, Homo sapiens
  misc_RNA (1)...(19): siRNA sense strand
auucaacuaucgaguauga

SEQ ID NO: 1685513 - RNA, 19 nt, Homo sapiens
  misc_RNA (1)...(19): siRNA sense strand
gcacuaugggacugaguaa

SEQ ID NO: 1685514 - RNA, 19 nt, Homo sapiens
  misc_RNA (1)...(19): siRNA sense strand
agaauucaacuaucgagua

SEQ ID NO: 1685515 - RNA, 19 nt, Homo sapiens
  misc_RNA (1)...(19): siRNA sense strand
cuauggaaauggaagaaga

SEQ ID NO: 1685516 - RNA, 19 nt, Homo sapiens
  misc_RNA (1)...(19): siRNA sense strand
gcuaagaaccaagaauuca

SEQ ID NO: 1685517 - RNA, 19 nt, Homo sapiens
  misc_RNA (1)...(19): siRNA sense strand
ccacauuccuuggauuaca

SEQ ID NO: 1685518 - RNA, 19 nt, Homo sapiens
  misc_RNA (1)...(19): siRNA sense strand
uaucuucaccuuucucuau

SEQ ID NO: 1685519 - RNA, 19 nt, Homo sapiens
  misc_RNA (1)...(19): siRNA sense strand
caucuucuguauucuggaa

SEQ ID NO: 1685520 - RNA, 19 nt, Homo sapiens
  misc_RNA (1)...(19): siRNA sense strand
cgagcaauaugaccaucuu

SEQ ID NO: 1685521 - RNA, 19 nt, Homo sapiens
  misc_RNA (1)...(19): siRNA sense strand
gggcuuguaucaauguauc

SEQ ID NO: 1685522 - RNA, 19 nt, Homo sapiens
  misc_RNA (1)...(19): siRNA sense strand
uauacacgguuacccagaa

SEQ ID NO: 1685523 - RNA, 19 nt, Homo sapiens
  misc_RNA (1)...(19): siRNA sense strand
gaguaacauucucuuugug

SEQ ID NO: 1685524 - RNA, 19 nt, Homo sapiens
  misc_RNA (1)...(19): siRNA sense strand
guaacauucucuuugugau

SEQ ID NO: 1685525 - RNA, 19 nt, Homo sapiens
  misc_RNA (1)...(19): siRNA sense strand
aagagaaauuugacagugu

SEQ ID NO: 1685526 - RNA, 19 nt, Homo sapiens
  misc_RNA (1)...(19): siRNA sense strand
ugagguauacuuaggcaaa

SEQ ID NO: 1685527 - RNA, 19 nt, Homo sapiens
  misc_RNA (1)...(19): siRNA sense strand
aauaugaccaucuucugua

SEQ ID NO: 1685528 - RNA, 19 nt, Homo sapiens
  misc_RNA (1)...(19): siRNA sense strand
caauaugaccaucuucugu

SEQ ID NO: 1685529 - RNA, 19 nt, Homo sapiens
  misc_RNA (1)...(19): siRNA sense strand
auacuuaggcaaagagaaa

SEQ ID NO: 1685530 - RNA, 19 nt, Homo sapiens
  misc_RNA (1)...(19): siRNA sense strand
agagugaacagaccaagaa

SEQ ID NO: 1685531 - RNA, 19 nt, Homo sapiens
  misc_RNA (1)...(19): siRNA sense strand
gcaauaugaccaucuucug

SEQ ID NO: 1685532 - RNA, 19 nt, Homo sapiens
  misc_RNA (1)...(19): siRNA sense strand
gaaauuugacaguguucau

SEQ ID NO: 1685533 - RNA, 19 nt, Homo sapiens
  misc_RNA (1)...(19): siRNA sense strand
caauguaucauccaucaca

SEQ ID NO: 1685534 - RNA, 19 nt, Homo sapiens
  misc_RNA (1)...(19): siRNA sense strand
ucuguauucuggaaacuga

SEQ ID NO: 1685535 - RNA, 19 nt, Homo sapiens
  misc_RNA (1)...(19): siRNA sense strand
ccugaaagaucugaugaag

SEQ ID NO: 1685536 - RNA, 19 nt, Homo sapiens
  misc_RNA (1)...(19): siRNA sense strand
caagcuuauuucaaugaga

SEQ ID NO: 1685537 - RNA, 19 nt, Homo sapiens
  misc_RNA (1)...(19): siRNA sense strand
agaccugccaugccaauuu

SEQ ID NO: 1685538 - RNA, 19 nt, Homo sapiens
  misc_RNA (1)...(19): siRNA sense strand
cuaagaagaugaguguuuu

SEQ ID NO: 1685539 - RNA, 19 nt, Homo sapiens
  misc_RNA (1)...(19): siRNA sense strand
caggaaaacuugguucuga

SEQ ID NO: 1685540 - RNA, 19 nt, Homo sapiens
  misc_RNA (1)...(19): siRNA sense strand
ggacugaguaacauucucu

SEQ ID NO: 1685541 - RNA, 19 nt, Homo sapiens
  misc_RNA (1)...(19): siRNA sense strand
uaacauucucuuugugaug

SEQ ID NO: 1685542 - RNA, 19 nt, Homo sapiens
  misc_RNA (1)...(19): siRNA sense strand
ccugagacuucacaaucuu

SEQ ID NO: 1685543 - RNA, 19 nt, Homo sapiens
  misc_RNA (1)...(19): siRNA sense strand
ucugaaugagguauacuua

SEQ ID NO: 1685544 - RNA, 19 nt, Homo sapiens
  misc_RNA (1)...(19): siRNA sense strand
aagauaaugucacagaacu

SEQ ID NO: 1685545 - RNA, 19 nt, Homo sapiens
  misc_RNA (1)...(19): siRNA sense strand
gaacagaccaagaaaagag

SEQ ID NO: 1685546 - RNA, 19 nt, Homo sapiens
  misc_RNA (1)...(19): siRNA sense strand
gagagugaacagaccaaga

SEQ ID NO: 1685547 - RNA, 19 nt, Homo sapiens
  misc_RNA (1)...(19): siRNA sense strand
aaaacuugguucugaauga

SEQ ID NO: 1685548 - RNA, 19 nt, Homo sapiens
  misc_RNA (1)...(19): siRNA sense strand
gagugagcuaguaguauuu

SEQ ID NO: 1685549 - RNA, 19 nt, Homo sapiens
  misc_RNA (1)...(19): siRNA sense strand
gaugguauuaugcagaaau

SEQ ID NO: 1685550 - RNA, 19 nt, Homo sapiens
  misc_RNA (1)...(19): siRNA sense strand
gagguauacuuaggcaaag

SEQ ID NO: 1685551 - RNA, 19 nt, Homo sapiens
  misc_RNA (1)...(19): siRNA sense strand
cuaagaaccaagaauucaa

SEQ ID NO: 1685552 - RNA, 19 nt, Homo sapiens
  misc_RNA (1)...(19): siRNA sense strand
guauuaugcagaaaucuca

SEQ ID NO: 1685553 - RNA, 19 nt, Homo sapiens
  misc_RNA (1)...(19): siRNA sense strand
acaguguucauuccaagua

SEQ ID NO: 1685554 - RNA, 19 nt, Homo sapiens
  misc_RNA (1)...(19): siRNA sense strand
ggagagggaagagagugaa

SEQ ID NO: 1685555 - RNA, 19 nt, Homo sapiens
  misc_RNA (1)...(19): siRNA sense strand
ucaacuaucgaguaugaug

SEQ ID NO: 1685556 - RNA, 19 nt, Homo sapiens
  misc_RNA (1)...(19): siRNA sense strand
aguguucauuccaaguaua

SEQ ID NO: 1685557 - RNA, 19 nt, Homo sapiens
  misc_RNA (1)...(19): siRNA sense strand
gugcugcuccucugaagau

SEQ ID NO: 1685558 - RNA, 19 nt, Homo sapiens
  misc_RNA (1)...(19): siRNA sense strand
agaccacauuccuuggauu

SEQ ID NO: 1685559 - RNA, 19 nt, Homo sapiens
  misc_RNA (1)...(19): siRNA sense strand
augaccaucuucuguauuc

SEQ ID NO: 1685560 - RNA, 19 nt, Homo sapiens
  misc_RNA (1)...(19): siRNA sense strand
caagauaaugucacagaac

SEQ ID NO: 1685561 - RNA, 19 nt, Homo sapiens
  misc_RNA (1)...(19): siRNA sense strand
aagccugagugagcuagua

SEQ ID NO: 1685562 - RNA, 19 nt, Homo sapiens
  misc_RNA (1)...(19): siRNA sense strand
aaacuugguucugaaugag

SEQ ID NO: 1685563 - RNA, 19 nt, Homo sapiens
  misc_RNA (1)...(19): siRNA sense strand
gagugaacagaccaagaaa

SEQ ID NO: 1685564 - RNA, 19 nt, Homo sapiens
  misc_RNA (1)...(19): siRNA sense strand
cugaguaacauucucuuug

SEQ ID NO: 1685565 - RNA, 19 nt, Homo sapiens
  misc_RNA (1)...(19): siRNA sense strand
cagaccacauuccuuggau

SEQ ID NO: 1685566 - RNA, 19 nt, Homo sapiens
  misc_RNA (1)...(19): siRNA sense strand
auaugaccaucuucuguau

SEQ ID NO: 1685567 - RNA, 19 nt, Homo sapiens
  misc_RNA (1)...(19): siRNA sense strand
aaccaagaauucaacuauc

SEQ ID NO: 1685568 - RNA, 19 nt, Homo sapiens
  misc_RNA (1)...(19): siRNA sense strand
uugcuaagaaccaagaauu

SEQ ID NO: 1685569 - RNA, 19 nt, Homo sapiens
  misc_RNA (1)...(19): siRNA sense strand
caguguucauuccaaguau

SEQ ID NO: 1685570 - RNA, 19 nt, Homo sapiens
  misc_RNA (1)...(19): siRNA sense strand
ggccucgcaacucuuauaa

SEQ ID NO: 1685571 - RNA, 19 nt, Homo sapiens
  misc_RNA (1)...(19): siRNA sense strand
gcuuuuaucuucaccuuuc

SEQ ID NO: 1685572 - RNA, 19 nt, Homo sapiens
  misc_RNA (1)...(19): siRNA sense strand
ucccugauguuacgagcaa

SEQ ID NO: 1685573 - RNA, 19 nt, Homo sapiens
  misc_RNA (1)...(19): siRNA sense strand
ccugagugagcuaguagua

SEQ ID NO: 1685574 - RNA, 19 nt, Homo sapiens
  misc_RNA (1)...(19): siRNA sense strand
cccagaaccuaagaagaug

SEQ ID NO: 1685575 - RNA, 19 nt, Homo sapiens
  misc_RNA (1)...(19): siRNA sense strand
ggacaguuggacccugaga

SEQ ID NO: 1685576 - RNA, 19 nt, Homo sapiens
  misc_RNA (1)...(19): siRNA sense strand
guaucaauguaucauccau

SEQ ID NO: 1685577 - RNA, 19 nt, Homo sapiens
  misc_RNA (1)...(19): siRNA sense strand
gaaauggaagaagaagaag

SEQ ID NO: 1685578 - RNA, 19 nt, Homo sapiens
  misc_RNA (1)...(19): siRNA sense strand
augaugguauuaugcagaa

SEQ ID NO: 1685579 - RNA, 19 nt, Homo sapiens
  misc_RNA (1)...(19): siRNA sense strand
acccagaaccuaagaagau

SEQ ID NO: 1685580 - RNA, 19 nt, Homo sapiens
  misc_RNA (1)...(19): siRNA sense strand
cggccucgcaacucuuaua

SEQ ID NO: 1685581 - RNA, 19 nt, Homo sapiens
  misc_RNA (1)...(19): siRNA sense strand
ggaauggacucagaaguau

SEQ ID NO: 1685582 - RNA, 19 nt, Homo sapiens
  misc_RNA (1)...(19): siRNA sense strand
gggaauggacucagaagua

SEQ ID NO: 1685583 - RNA, 19 nt, Homo sapiens
  misc_RNA (1)...(19): siRNA sense strand
ucagaaguaugccauguga

SEQ ID NO: 1685584 - RNA, 19 nt, Homo sapiens
  misc_RNA (1)...(19): siRNA sense strand
aaacagacagagauaagua

SEQ ID NO: 1685585 - RNA, 19 nt, Homo sapiens
  misc_RNA (1)...(19): siRNA sense strand
cagaauaucucgggaaugg

SEQ ID NO: 1685586 - RNA, 19 nt, Homo sapiens
  misc_RNA (1)...(19): siRNA sense strand
gcauuugucucgauauucu

SEQ ID NO: 1685587 - RNA, 19 nt, Homo sapiens
  misc_RNA (1)...(19): siRNA sense strand
cagcauuugucucgauauu

SEQ ID NO: 1685588 - RNA, 19 nt, Homo sapiens
  misc_RNA (1)...(19): siRNA sense strand
ccacaauuaugggaccuaa

SEQ ID NO: 1685589 - RNA, 19 nt, Homo sapiens
  misc_RNA (1)...(19): siRNA sense strand
ggcagcauuugucucgaua

SEQ ID NO: 1685590 - RNA, 19 nt, Homo sapiens
  misc_RNA (1)...(19): siRNA sense strand
ucacaguggucgccugcuu

SEQ ID NO: 1685591 - RNA, 19 nt, Homo sapiens
  misc_RNA (1)...(19): siRNA sense strand
ucgccugcuuuaacaauuu

SEQ ID NO: 1685592 - RNA, 19 nt, Homo sapiens
  misc_RNA (1)...(19): siRNA sense strand
cuaaugacagcccauauca

SEQ ID NO: 1685593 - RNA, 19 nt, Homo sapiens
  misc_RNA (1)...(19): siRNA sense strand
acaguggucgccugcuuua

SEQ ID NO: 1685594 - RNA, 19 nt, Homo sapiens
  misc_RNA (1)...(19): siRNA sense strand
gauauucuaagaucacagu

SEQ ID NO: 1685595 - RNA, 19 nt, Homo sapiens
  misc_RNA (1)...(19): siRNA sense strand
gaccuaaugacagcccaua

SEQ ID NO: 1685596 - RNA, 19 nt, Homo sapiens
  misc_RNA (1)...(19): siRNA sense strand
guggucgccugcuuuaaca

SEQ ID NO: 1685597 - RNA, 19 nt, Homo sapiens
  misc_RNA (1)...(19): siRNA sense strand
aacagaauaucucgggaau

SEQ ID NO: 1685598 - RNA, 19 nt, Homo sapiens
  misc_RNA (1)...(19): siRNA sense strand
gaauggacucagaaguaug

SEQ ID NO: 1685599 - RNA, 19 nt, Homo sapiens
  misc_RNA (1)...(19): siRNA sense strand
ucucgggaauggacucaga

SEQ ID NO: 1685600 - RNA, 19 nt, Homo sapiens
  misc_RNA (1)...(19): siRNA sense strand
aaugacagcccauaucaag

SEQ ID NO: 1685601 - RNA, 19 nt, Homo sapiens
  misc_RNA (1)...(19): siRNA sense strand
ccuaaugacagcccauauc

SEQ ID NO: 1685602 - RNA, 19 nt, Homo sapiens
  misc_RNA (1)...(19): siRNA sense strand
gucgccugcuuuaacaauu

SEQ ID NO: 1685603 - RNA, 19 nt, Homo sapiens
  misc_RNA (1)...(19): siRNA sense strand
uggcagcauuugucucgau

SEQ ID NO: 1685604 - RNA, 19 nt, Homo sapiens
  misc_RNA (1)...(19): siRNA sense strand
ggucgccugcuuuaacaau

SEQ ID NO: 1685605 - RNA, 19 nt, Homo sapiens
  misc_RNA (1)...(19): siRNA sense strand
ggaauggacucagaaguau

SEQ ID NO: 1685606 - RNA, 19 nt, Homo sapiens
  misc_RNA (1)...(19): siRNA sense strand
gggaauggacucagaagua

SEQ ID NO: 1685607 - RNA, 19 nt, Homo sapiens
  misc_RNA (1)...(19): siRNA sense strand
ucagaaguaugccauguga

SEQ ID NO: 1685608 - RNA, 19 nt, Homo sapiens
  misc_RNA (1)...(19): siRNA sense strand
aaacagacagagauaagua

SEQ ID NO: 1685609 - RNA, 19 nt, Homo sapiens
  misc_RNA (1)...(19): siRNA sense strand
cagaauaucucgggaaugg

SEQ ID NO: 1685610 - RNA, 19 nt, Homo sapiens
  misc_RNA (1)...(19): siRNA sense strand
gcauuugucucgauauucu

SEQ ID NO: 1685611 - RNA, 19 nt, Homo sapiens
  misc_RNA (1)...(19): siRNA sense strand
cagcauuugucucgauauu

SEQ ID NO: 1685612 - RNA, 19 nt, Homo sapiens
  misc_RNA (1)...(19): siRNA sense strand
ccacaauuaugggaccuaa

SEQ ID NO: 1685613 - RNA, 19 nt, Homo sapiens
  misc_RNA (1)...(19): siRNA sense strand
ggcagcauuugucucgaua

SEQ ID NO: 1685614 - RNA, 19 nt, Homo sapiens
  misc_RNA (1)...(19): siRNA sense strand
ucacaguggucgccugcuu

SEQ ID NO: 1685615 - RNA, 19 nt, Homo sapiens
  misc_RNA (1)...(19): siRNA sense strand
ucgccugcuuuaacaauuu

SEQ ID NO: 1685616 - RNA, 19 nt, Homo sapiens
  misc_RNA (1)...(19): siRNA sense strand
cuaaugacagcccauauca

SEQ ID NO: 1685617 - RNA, 19 nt, Homo sapiens
  misc_RNA (1)...(19): siRNA sense strand
acaguggucgccugcuuua

SEQ ID NO: 1685618 - RNA, 19 nt, Homo sapiens
  misc_RNA (1)...(19): siRNA sense strand
gauauucuaagaucacagu

SEQ ID NO: 1685619 - RNA, 19 nt, Homo sapiens
  misc_RNA (1)...(19): siRNA sense strand
gaccuaaugacagcccaua

SEQ ID NO: 1685620 - RNA, 19 nt, Homo sapiens
  misc_RNA (1)...(19): siRNA sense strand
guggucgccugcuuuaaca

SEQ ID NO: 1685621 - RNA, 19 nt, Homo sapiens
  misc_RNA (1)...(19): siRNA sense strand
aacagaauaucucgggaau

SEQ ID NO: 1685622 - RNA, 19 nt, Homo sapiens
  misc_RNA (1)...(19): siRNA sense strand
gaauggacucagaaguaug

SEQ ID NO: 1685623 - RNA, 19 nt, Homo sapiens
  misc_RNA (1)...(19): siRNA sense strand
ucucgggaauggacucaga

SEQ ID NO: 1685624 - RNA, 19 nt, Homo sapiens
  misc_RNA (1)...(19): siRNA sense strand
aaugacagcccauaucaag

SEQ ID NO: 1685625 - RNA, 19 nt, Homo sapiens
  misc_RNA (1)...(19): siRNA sense strand
ccuaaugacagcccauauc

SEQ ID NO: 1685626 - RNA, 19 nt, Homo sapiens
  misc_RNA (1)...(19): siRNA sense strand
gucgccugcuuuaacaauu

SEQ ID NO: 1685627 - RNA, 19 nt, Homo sapiens
  misc_RNA (1)...(19): siRNA sense strand
uggcagcauuugucucgau

SEQ ID NO: 1685628 - RNA, 19 nt, Homo sapiens
  misc_RNA (1)...(19): siRNA sense strand
ggucgccugcuuuaacaau

SEQ ID NO: 1685629 - RNA, 19 nt, Homo sapiens
  misc_RNA (1)...(19): siRNA sense strand
ggaauggacucagaaguau

SEQ ID NO: 1685630 - RNA, 19 nt, Homo sapiens
  misc_RNA (1)...(19): siRNA sense strand
gggaauggacucagaagua

SEQ ID NO: 1685631 - RNA, 19 nt, Homo sapiens
  misc_RNA (1)...(19): siRNA sense strand
ucagaaguaugccauguga

SEQ ID NO: 1685632 - RNA, 19 nt, Homo sapiens
  misc_RNA (1)...(19): siRNA sense strand
aaacagacagagauaagua

SEQ ID NO: 1685633 - RNA, 19 nt, Homo sapiens
  misc_RNA (1)...(19): siRNA sense strand
cagaauaucucgggaaugg

SEQ ID NO: 1685634 - RNA, 19 nt, Homo sapiens
  misc_RNA (1)...(19): siRNA sense strand
gcauuugucucgauauucu

SEQ ID NO: 1685635 - RNA, 19 nt, Homo sapiens
  misc_RNA (1)...(19): siRNA sense strand
cagcauuugucucgauauu

SEQ ID NO: 1685636 - RNA, 19 nt, Homo sapiens
  misc_RNA (1)...(19): siRNA sense strand
ccacaauuaugggaccuaa

SEQ ID NO: 1685637 - RNA, 19 nt, Homo sapiens
  misc_RNA (1)...(19): siRNA sense strand
ggcagcauuugucucgaua

SEQ ID NO: 1685638 - RNA, 19 nt, Homo sapiens
  misc_RNA (1)...(19): siRNA sense strand
ucacaguggucgccugcuu

SEQ ID NO: 1685639 - RNA, 19 nt, Homo sapiens
  misc_RNA (1)...(19): siRNA sense strand
ucgccugcuuuaacaauuu

SEQ ID NO: 1685640 - RNA, 19 nt, Homo sapiens
  misc_RNA (1)...(19): siRNA sense strand
cuaaugacagcccauauca

SEQ ID NO: 1685641 - RNA, 19 nt, Homo sapiens
  misc_RNA (1)...(19): siRNA sense strand
acaguggucgccugcuuua

SEQ ID NO: 1685642 - RNA, 19 nt, Homo sapiens
  misc_RNA (1)...(19): siRNA sense strand
gauauucuaagaucacagu

SEQ ID NO: 1685643 - RNA, 19 nt, Homo sapiens
  misc_RNA (1)...(19): siRNA sense strand
gaccuaaugacagcccaua

SEQ ID NO: 1685644 - RNA, 19 nt, Homo sapiens
  misc_RNA (1)...(19): siRNA sense strand
guggucgccugcuuuaaca

SEQ ID NO: 1685645 - RNA, 19 nt, Homo sapiens
  misc_RNA (1)...(19): siRNA sense strand
aacagaauaucucgggaau

SEQ ID NO: 1685646 - RNA, 19 nt, Homo sapiens
  misc_RNA (1)...(19): siRNA sense strand
gaauggacucagaaguaug

SEQ ID NO: 1685647 - RNA, 19 nt, Homo sapiens
  misc_RNA (1)...(19): siRNA sense strand
ucucgggaauggacucaga

SEQ ID NO: 1685648 - RNA, 19 nt, Homo sapiens
  misc_RNA (1)...(19): siRNA sense strand
aaugacagcccauaucaag

SEQ ID NO: 1685649 - RNA, 19 nt, Homo sapiens
  misc_RNA (1)...(19): siRNA sense strand
ccuaaugacagcccauauc

SEQ ID NO: 1685650 - RNA, 19 nt, Homo sapiens
  misc_RNA (1)...(19): siRNA sense strand
gucgccugcuuuaacaauu

SEQ ID NO: 1685651 - RNA, 19 nt, Homo sapiens
  misc_RNA (1)...(19): siRNA sense strand
uggcagcauuugucucgau

SEQ ID NO: 1685652 - RNA, 19 nt, Homo sapiens
  misc_RNA (1)...(19): siRNA sense strand
ggucgccugcuuuaacaau

SEQ ID NO: 1685653 - RNA, 19 nt, Homo sapiens
  misc_RNA (1)...(19): siRNA sense strand
ggaauggacucagaaguau

SEQ ID NO: 1685654 - RNA, 19 nt, Homo sapiens
  misc_RNA (1)...(19): siRNA sense strand
gggaauggacucagaagua

SEQ ID NO: 1685655 - RNA, 19 nt, Homo sapiens
  misc_RNA (1)...(19): siRNA sense strand
ucagaaguaugccauguga

SEQ ID NO: 1685656 - RNA, 19 nt, Homo sapiens
  misc_RNA (1)...(19): siRNA sense strand
aaacagacagagauaagua

SEQ ID NO: 1685657 - RNA, 19 nt, Homo sapiens
  misc_RNA (1)...(19): siRNA sense strand
cagaauaucucgggaaugg

SEQ ID NO: 1685658 - RNA, 19 nt, Homo sapiens
  misc_RNA (1)...(19): siRNA sense strand
gcauuugucucgauauucu

SEQ ID NO: 1685659 - RNA, 19 nt, Homo sapiens
  misc_RNA (1)...(19): siRNA sense strand
cagcauuugucucgauauu

SEQ ID NO: 1685660 - RNA, 19 nt, Homo sapiens
  misc_RNA (1)...(19): siRNA sense strand
ccacaauuaugggaccuaa

SEQ ID NO: 1685661 - RNA, 19 nt, Homo sapiens
  misc_RNA (1)...(19): siRNA sense strand
ggcagcauuugucucgaua

SEQ ID NO: 1685662 - RNA, 19 nt, Homo sapiens
  misc_RNA (1)...(19): siRNA sense strand
ucacaguggucgccugcuu

SEQ ID NO: 1685663 - RNA, 19 nt, Homo sapiens
  misc_RNA (1)...(19): siRNA sense strand
ucgccugcuuuaacaauuu

SEQ ID NO: 1685664 - RNA, 19 nt, Homo sapiens
  misc_RNA (1)...(19): siRNA sense strand
cuaaugacagcccauauca

SEQ ID NO: 1685665 - RNA, 19 nt, Homo sapiens
  misc_RNA (1)...(19): siRNA sense strand
acaguggucgccugcuuua

SEQ ID NO: 1685666 - RNA, 19 nt, Homo sapiens
  misc_RNA (1)...(19): siRNA sense strand
gauauucuaagaucacagu

SEQ ID NO: 1685667 - RNA, 19 nt, Homo sapiens
  misc_RNA (1)...(19): siRNA sense strand
gaccuaaugacagcccaua

SEQ ID NO: 1685668 - RNA, 19 nt, Homo sapiens
  misc_RNA (1)...(19): siRNA sense strand
guggucgccugcuuuaaca

SEQ ID NO: 1685669 - RNA, 19 nt, Homo sapiens
  misc_RNA (1)...(19): siRNA sense strand
aacagaauaucucgggaau

SEQ ID NO: 1685670 - RNA, 19 nt, Homo sapiens
  misc_RNA (1)...(19): siRNA sense strand
gaauggacucagaaguaug

SEQ ID NO: 1685671 - RNA, 19 nt, Homo sapiens
  misc_RNA (1)...(19): siRNA sense strand
ucucgggaauggacucaga

SEQ ID NO: 1685672 - RNA, 19 nt, Homo sapiens
  misc_RNA (1)...(19): siRNA sense strand
aaugacagcccauaucaag

SEQ ID NO: 1685673 - RNA, 19 nt, Homo sapiens
  misc_RNA (1)...(19): siRNA sense strand
ccuaaugacagcccauauc

SEQ ID NO: 1685674 - RNA, 19 nt, Homo sapiens
  misc_RNA (1)...(19): siRNA sense strand
gucgccugcuuuaacaauu

SEQ ID NO: 1685675 - RNA, 19 nt, Homo sapiens
  misc_RNA (1)...(19): siRNA sense strand
uggcagcauuugucucgau

SEQ ID NO: 1685676 - RNA, 19 nt, Homo sapiens
  misc_RNA (1)...(19): siRNA sense strand
ggucgccugcuuuaacaau

SEQ ID NO: 1685677 - RNA, 19 nt, Homo sapiens
  misc_RNA (1)...(19): siRNA sense strand
ggaauggacucagaaguau

SEQ ID NO: 1685678 - RNA, 19 nt, Homo sapiens
  misc_RNA (1)...(19): siRNA sense strand
gggaauggacucagaagua

SEQ ID NO: 1685679 - RNA, 19 nt, Homo sapiens
  misc_RNA (1)...(19): siRNA sense strand
ucagaaguaugccauguga

SEQ ID NO: 1685680 - RNA, 19 nt, Homo sapiens
  misc_RNA (1)...(19): siRNA sense strand
aaacagacagagauaagua

SEQ ID NO: 1685681 - RNA, 19 nt, Homo sapiens
  misc_RNA (1)...(19): siRNA sense strand
cagaauaucucgggaaugg

SEQ ID NO: 1685682 - RNA, 19 nt, Homo sapiens
  misc_RNA (1)...(19): siRNA sense strand
gcauuugucucgauauucu

SEQ ID NO: 1685683 - RNA, 19 nt, Homo sapiens
  misc_RNA (1)...(19): siRNA sense strand
cagcauuugucucgauauu

SEQ ID NO: 1685684 - RNA, 19 nt, Homo sapiens
  misc_RNA (1)...(19): siRNA sense strand
ccacaauuaugggaccuaa

SEQ ID NO: 1685685 - RNA, 19 nt, Homo sapiens
  misc_RNA (1)...(19): siRNA sense strand
ggcagcauuugucucgaua

SEQ ID NO: 1685686 - RNA, 19 nt, Homo sapiens
  misc_RNA (1)...(19): siRNA sense strand
ucacaguggucgccugcuu

SEQ ID NO: 1685687 - RNA, 19 nt, Homo sapiens
  misc_RNA (1)...(19): siRNA sense strand
ucgccugcuuuaacaauuu

SEQ ID NO: 1685688 - RNA, 19 nt, Homo sapiens
  misc_RNA (1)...(19): siRNA sense strand
cuaaugacagcccauauca

SEQ ID NO: 1685689 - RNA, 19 nt, Homo sapiens
  misc_RNA (1)...(19): siRNA sense strand
acaguggucgccugcuuua

SEQ ID NO: 1685690 - RNA, 19 nt, Homo sapiens
  misc_RNA (1)...(19): siRNA sense strand
gauauucuaagaucacagu

SEQ ID NO: 1685691 - RNA, 19 nt, Homo sapiens
  misc_RNA (1)...(19): siRNA sense strand
gaccuaaugacagcccaua

SEQ ID NO: 1685692 - RNA, 19 nt, Homo sapiens
  misc_RNA (1)...(19): siRNA sense strand
guggucgccugcuuuaaca

SEQ ID NO: 1685693 - RNA, 19 nt, Homo sapiens
  misc_RNA (1)...(19): siRNA sense strand
aacagaauaucucgggaau

SEQ ID NO: 1685694 - RNA, 19 nt, Homo sapiens
  misc_RNA (1)...(19): siRNA sense strand
gaauggacucagaaguaug

SEQ ID NO: 1685695 - RNA, 19 nt, Homo sapiens
  misc_RNA (1)...(19): siRNA sense strand
ucucgggaauggacucaga

SEQ ID NO: 1685696 - RNA, 19 nt, Homo sapiens
  misc_RNA (1)...(19): siRNA sense strand
aaugacagcccauaucaag

SEQ ID NO: 1685697 - RNA, 19 nt, Homo sapiens
  misc_RNA (1)...(19): siRNA sense strand
ccuaaugacagcccauauc

SEQ ID NO: 1685698 - RNA, 19 nt, Homo sapiens
  misc_RNA (1)...(19): siRNA sense strand
gucgccugcuuuaacaauu

SEQ ID NO: 1685699 - RNA, 19 nt, Homo sapiens
  misc_RNA (1)...(19): siRNA sense strand
uggcagcauuugucucgau

SEQ ID NO: 1685700 - RNA, 19 nt, Homo sapiens
  misc_RNA (1)...(19): siRNA sense strand
ggucgccugcuuuaacaau

SEQ ID NO: 1685701 - RNA, 19 nt, Homo sapiens
  misc_RNA (1)...(19): siRNA sense strand
ggaauggacucagaaguau

SEQ ID NO: 1685702 - RNA, 19 nt, Homo sapiens
  misc_RNA (1)...(19): siRNA sense strand
gggaauggacucagaagua

SEQ ID NO: 1685703 - RNA, 19 nt, Homo sapiens
  misc_RNA (1)...(19): siRNA sense strand
ucagaaguaugccauguga

SEQ ID NO: 1685704 - RNA, 19 nt, Homo sapiens
  misc_RNA (1)...(19): siRNA sense strand
aaacagacagagauaagua

SEQ ID NO: 1685705 - RNA, 19 nt, Homo sapiens
  misc_RNA (1)...(19): siRNA sense strand
cagaauaucucgggaaugg

SEQ ID NO: 1685706 - RNA, 19 nt, Homo sapiens
  misc_RNA (1)...(19): siRNA sense strand
gcauuugucucgauauucu

SEQ ID NO: 1685707 - RNA, 19 nt, Homo sapiens
  misc_RNA (1)...(19): siRNA sense strand
cagcauuugucucgauauu

SEQ ID NO: 1685708 - RNA, 19 nt, Homo sapiens
  misc_RNA (1)...(19): siRNA sense strand
ccacaauuaugggaccuaa

SEQ ID NO: 1685709 - RNA, 19 nt, Homo sapiens
  misc_RNA (1)...(19): siRNA sense strand
ggcagcauuugucucgaua

SEQ ID NO: 1685710 - RNA, 19 nt, Homo sapiens
  misc_RNA (1)...(19): siRNA sense strand
ucacaguggucgccugcuu

SEQ ID NO: 1685711 - RNA, 19 nt, Homo sapiens
  misc_RNA (1)...(19): siRNA sense strand
ucgccugcuuuaacaauuu

SEQ ID NO: 1685712 - RNA, 19 nt, Homo sapiens
  misc_RNA (1)...(19): siRNA sense strand
cuaaugacagcccauauca

SEQ ID NO: 1685713 - RNA, 19 nt, Homo sapiens
  misc_RNA (1)...(19): siRNA sense strand
acaguggucgccugcuuua

SEQ ID NO: 1685714 - RNA, 19 nt, Homo sapiens
  misc_RNA (1)...(19): siRNA sense strand
gauauucuaagaucacagu

SEQ ID NO: 1685715 - RNA, 19 nt, Homo sapiens
  misc_RNA (1)...(19): siRNA sense strand
gaccuaaugacagcccaua

SEQ ID NO: 1685716 - RNA, 19 nt, Homo sapiens
  misc_RNA (1)...(19): siRNA sense strand
guggucgccugcuuuaaca

SEQ ID NO: 1685717 - RNA, 19 nt, Homo sapiens
  misc_RNA (1)...(19): siRNA sense strand
aacagaauaucucgggaau

SEQ ID NO: 1685718 - RNA, 19 nt, Homo sapiens
  misc_RNA (1)...(19): siRNA sense strand
gaauggacucagaaguaug

SEQ ID NO: 1685719 - RNA, 19 nt, Homo sapiens
  misc_RNA (1)...(19): siRNA sense strand
ucucgggaauggacucaga

SEQ ID NO: 1685720 - RNA, 19 nt, Homo sapiens
  misc_RNA (1)...(19): siRNA sense strand
aaugacagcccauaucaag

SEQ ID NO: 1685721 - RNA, 19 nt, Homo sapiens
  misc_RNA (1)...(19): siRNA sense strand
ccuaaugacagcccauauc

SEQ ID NO: 1685722 - RNA, 19 nt, Homo sapiens
  misc_RNA (1)...(19): siRNA sense strand
gucgccugcuuuaacaauu

SEQ ID NO: 1685723 - RNA, 19 nt, Homo sapiens
  misc_RNA (1)...(19): siRNA sense strand
uggcagcauuugucucgau

SEQ ID NO: 1685724 - RNA, 19 nt, Homo sapiens
  misc_RNA (1)...(19): siRNA sense strand
ggucgccugcuuuaacaau

SEQ ID NO: 1685725 - RNA, 19 nt, Homo sapiens
  misc_RNA (1)...(19): siRNA sense strand
ggaauggacucagaaguau

SEQ ID NO: 1685726 - RNA, 19 nt, Homo sapiens
  misc_RNA (1)...(19): siRNA sense strand
gggaauggacucagaagua

SEQ ID NO: 1685727 - RNA, 19 nt, Homo sapiens
  misc_RNA (1)...(19): siRNA sense strand
ucagaaguaugccauguga

SEQ ID NO: 1685728 - RNA, 19 nt, Homo sapiens
  misc_RNA (1)...(19): siRNA sense strand
aaacagacagagauaagua

SEQ ID NO: 1685729 - RNA, 19 nt, Homo sapiens
  misc_RNA (1)...(19): siRNA sense strand
cagaauaucucgggaaugg

SEQ ID NO: 1685730 - RNA, 19 nt, Homo sapiens
  misc_RNA (1)...(19): siRNA sense strand
gcauuugucucgauauucu

SEQ ID NO: 1685731 - RNA, 19 nt, Homo sapiens
  misc_RNA (1)...(19): siRNA sense strand
cagcauuugucucgauauu

SEQ ID NO: 1685732 - RNA, 19 nt, Homo sapiens
  misc_RNA (1)...(19): siRNA sense strand
ccacaauuaugggaccuaa

SEQ ID NO: 1685733 - RNA, 19 nt, Homo sapiens
  misc_RNA (1)...(19): siRNA sense strand
ggcagcauuugucucgaua

SEQ ID NO: 1685734 - RNA, 19 nt, Homo sapiens
  misc_RNA (1)...(19): siRNA sense strand
ucacaguggucgccugcuu

SEQ ID NO: 1685735 - RNA, 19 nt, Homo sapiens
  misc_RNA (1)...(19): siRNA sense strand
ucgccugcuuuaacaauuu

SEQ ID NO: 1685736 - RNA, 19 nt, Homo sapiens
  misc_RNA (1)...(19): siRNA sense strand
cuaaugacagcccauauca

SEQ ID NO: 1685737 - RNA, 19 nt, Homo sapiens
  misc_RNA (1)...(19): siRNA sense strand
acaguggucgccugcuuua

SEQ ID NO: 1685738 - RNA, 19 nt, Homo sapiens
  misc_RNA (1)...(19): siRNA sense strand
gauauucuaagaucacagu

SEQ ID NO: 1685739 - RNA, 19 nt, Homo sapiens
  misc_RNA (1)...(19): siRNA sense strand
gaccuaaugacagcccaua

SEQ ID NO: 1685740 - RNA, 19 nt, Homo sapiens
  misc_RNA (1)...(19): siRNA sense strand
guggucgccugcuuuaaca

SEQ ID NO: 1685741 - RNA, 19 nt, Homo sapiens
  misc_RNA (1)...(19): siRNA sense strand
aacagaauaucucgggaau

SEQ ID NO: 1685742 - RNA, 19 nt, Homo sapiens
  misc_RNA (1)...(19): siRNA sense strand
gaauggacucagaaguaug

SEQ ID NO: 1685743 - RNA, 19 nt, Homo sapiens
  misc_RNA (1)...(19): siRNA sense strand
ucucgggaauggacucaga

SEQ ID NO: 1685744 - RNA, 19 nt, Homo sapiens
  misc_RNA (1)...(19): siRNA sense strand
aaugacagcccauaucaag

SEQ ID NO: 1685745 - RNA, 19 nt, Homo sapiens
  misc_RNA (1)...(19): siRNA sense strand
ccuaaugacagcccauauc

SEQ ID NO: 1685746 - RNA, 19 nt, Homo sapiens
  misc_RNA (1)...(19): siRNA sense strand
gucgccugcuuuaacaauu

SEQ ID NO: 1685747 - RNA, 19 nt, Homo sapiens
  misc_RNA (1)...(19): siRNA sense strand
uggcagcauuugucucgau

SEQ ID NO: 1685748 - RNA, 19 nt, Homo sapiens
  misc_RNA (1)...(19): siRNA sense strand
ggucgccugcuuuaacaau

SEQ ID NO: 1685749 - RNA, 19 nt, Homo sapiens
  misc_RNA (1)...(19): siRNA sense strand
aaacagacagagauaagua

SEQ ID NO: 1685750 - RNA, 19 nt, Homo sapiens
  misc_RNA (1)...(19): siRNA sense strand
gcauuugucucgauauucu

SEQ ID NO: 1685751 - RNA, 19 nt, Homo sapiens
  misc_RNA (1)...(19): siRNA sense strand
cagcauuugucucgauauu

SEQ ID NO: 1685752 - RNA, 19 nt, Homo sapiens
  misc_RNA (1)...(19): siRNA sense strand
ccacaauuaugggaccuaa

SEQ ID NO: 1685753 - RNA, 19 nt, Homo sapiens
  misc_RNA (1)...(19): siRNA sense strand
ggcagcauuugucucgaua

SEQ ID NO: 1685754 - RNA, 19 nt, Homo sapiens
  misc_RNA (1)...(19): siRNA sense strand
ucacaguggucgccugcuu

SEQ ID NO: 1685755 - RNA, 19 nt, Homo sapiens
  misc_RNA (1)...(19): siRNA sense strand
gcacggaucuauaaaacag

SEQ ID NO: 1685756 - RNA, 19 nt, Homo sapiens
  misc_RNA (1)...(19): siRNA sense strand
ucgccugcuuuaacaauuu

SEQ ID NO: 1685757 - RNA, 19 nt, Homo sapiens
  misc_RNA (1)...(19): siRNA sense strand
cuaaugacagcccauauca

SEQ ID NO: 1685758 - RNA, 19 nt, Homo sapiens
  misc_RNA (1)...(19): siRNA sense strand
acaguggucgccugcuuua

SEQ ID NO: 1685759 - RNA, 19 nt, Homo sapiens
  misc_RNA (1)...(19): siRNA sense strand
gauauucuaagaucacagu

SEQ ID NO: 1685760 - RNA, 19 nt, Homo sapiens
  misc_RNA (1)...(19): siRNA sense strand
gaccuaaugacagcccaua

SEQ ID NO: 1685761 - RNA, 19 nt, Homo sapiens
  misc_RNA (1)...(19): siRNA sense strand
guggucgccugcuuuaaca

SEQ ID NO: 1685762 - RNA, 19 nt, Homo sapiens
  misc_RNA (1)...(19): siRNA sense strand
aaugacagcccauaucaag

SEQ ID NO: 1685763 - RNA, 19 nt, Homo sapiens
  misc_RNA (1)...(19): siRNA sense strand
ccuaaugacagcccauauc

SEQ ID NO: 1685764 - RNA, 19 nt, Homo sapiens
  misc_RNA (1)...(19): siRNA sense strand
gucgccugcuuuaacaauu

SEQ ID NO: 1685765 - RNA, 19 nt, Homo sapiens
  misc_RNA (1)...(19): siRNA sense strand
uggcagcauuugucucgau

SEQ ID NO: 1685766 - RNA, 19 nt, Homo sapiens
  misc_RNA (1)...(19): siRNA sense strand
ggucgccugcuuuaacaau

SEQ ID NO: 1685767 - RNA, 19 nt, Homo sapiens
  misc_RNA (1)...(19): siRNA sense strand
ggaauggacucagaaguau

SEQ ID NO: 1685768 - RNA, 19 nt, Homo sapiens
  misc_RNA (1)...(19): siRNA sense strand
gggaauggacucagaagua

SEQ ID NO: 1685769 - RNA, 19 nt, Homo sapiens
  misc_RNA (1)...(19): siRNA sense strand
ucagaaguaugccauguga

SEQ ID NO: 1685770 - RNA, 19 nt, Homo sapiens
  misc_RNA (1)...(19): siRNA sense strand
aaacagacagagauaagua

SEQ ID NO: 1685771 - RNA, 19 nt, Homo sapiens
  misc_RNA (1)...(19): siRNA sense strand
cagaauaucucgggaaugg

SEQ ID NO: 1685772 - RNA, 19 nt, Homo sapiens
  misc_RNA (1)...(19): siRNA sense strand
gcauuugucucgauauucu

SEQ ID NO: 1685773 - RNA, 19 nt, Homo sapiens
  misc_RNA (1)...(19): siRNA sense strand
cagcauuugucucgauauu

SEQ ID NO: 1685774 - RNA, 19 nt, Homo sapiens
  misc_RNA (1)...(19): siRNA sense strand
ccacaauuaugggaccuaa

SEQ ID NO: 1685775 - RNA, 19 nt, Homo sapiens
  misc_RNA (1)...(19): siRNA sense strand
ggcagcauuugucucgaua

SEQ ID NO: 1685776 - RNA, 19 nt, Homo sapiens
  misc_RNA (1)...(19): siRNA sense strand
ucacaguggucgccugcuu

SEQ ID NO: 1685777 - RNA, 19 nt, Homo sapiens
  misc_RNA (1)...(19): siRNA sense strand
ucgccugcuuuaacaauuu

SEQ ID NO: 1685778 - RNA, 19 nt, Homo sapiens
  misc_RNA (1)...(19): siRNA sense strand
cuaaugacagcccauauca

SEQ ID NO: 1685779 - RNA, 19 nt, Homo sapiens
  misc_RNA (1)...(19): siRNA sense strand
acaguggucgccugcuuua

SEQ ID NO: 1685780 - RNA, 19 nt, Homo sapiens
  misc_RNA (1)...(19): siRNA sense strand
gauauucuaagaucacagu

SEQ ID NO: 1685781 - RNA, 19 nt, Homo sapiens
  misc_RNA (1)...(19): siRNA sense strand
gaccuaaugacagcccaua

SEQ ID NO: 1685782 - RNA, 19 nt, Homo sapiens
  misc_RNA (1)...(19): siRNA sense strand
guggucgccugcuuuaaca

SEQ ID NO: 1685783 - RNA, 19 nt, Homo sapiens
  misc_RNA (1)...(19): siRNA sense strand
aacagaauaucucgggaau

SEQ ID NO: 1685784 - RNA, 19 nt, Homo sapiens
  misc_RNA (1)...(19): siRNA sense strand
gaauggacucagaaguaug

SEQ ID NO: 1685785 - RNA, 19 nt, Homo sapiens
  misc_RNA (1)...(19): siRNA sense strand
ucucgggaauggacucaga

SEQ ID NO: 1685786 - RNA, 19 nt, Homo sapiens
  misc_RNA (1)...(19): siRNA sense strand
aaugacagcccauaucaag

SEQ ID NO: 1685787 - RNA, 19 nt, Homo sapiens
  misc_RNA (1)...(19): siRNA sense strand
ccuaaugacagcccauauc

SEQ ID NO: 1685788 - RNA, 19 nt, Homo sapiens
  misc_RNA (1)...(19): siRNA sense strand
gucgccugcuuuaacaauu

SEQ ID NO: 1685789 - RNA, 19 nt, Homo sapiens
  misc_RNA (1)...(19): siRNA sense strand
uggcagcauuugucucgau

SEQ ID NO: 1685790 - RNA, 19 nt, Homo sapiens
  misc_RNA (1)...(19): siRNA sense strand
ggucgccugcuuuaacaau

SEQ ID NO: 1685791 - RNA, 19 nt, Homo sapiens
  misc_RNA (1)...(19): siRNA sense strand
ggaauggacucagaaguau

SEQ ID NO: 1685792 - RNA, 19 nt, Homo sapiens
  misc_RNA (1)...(19): siRNA sense strand
gggaauggacucagaagua

SEQ ID NO: 1685793 - RNA, 19 nt, Homo sapiens
  misc_RNA (1)...(19): siRNA sense strand
ucagaaguaugccauguga

SEQ ID NO: 1685794 - RNA, 19 nt, Homo sapiens
  misc_RNA (1)...(19): siRNA sense strand
aaacagacagagauaagua

SEQ ID NO: 1685795 - RNA, 19 nt, Homo sapiens
  misc_RNA (1)...(19): siRNA sense strand
cagaauaucucgggaaugg

SEQ ID NO: 1685796 - RNA, 19 nt, Homo sapiens
  misc_RNA (1)...(19): siRNA sense strand
gcauuugucucgauauucu

SEQ ID NO: 1685797 - RNA, 19 nt, Homo sapiens
  misc_RNA (1)...(19): siRNA sense strand
cagcauuugucucgauauu

SEQ ID NO: 1685798 - RNA, 19 nt, Homo sapiens
  misc_RNA (1)...(19): siRNA sense strand
ccacaauuaugggaccuaa

SEQ ID NO: 1685799 - RNA, 19 nt, Homo sapiens
  misc_RNA (1)...(19): siRNA sense strand
ggcagcauuugucucgaua

SEQ ID NO: 1685800 - RNA, 19 nt, Homo sapiens
  misc_RNA (1)...(19): siRNA sense strand
ucacaguggucgccugcuu

SEQ ID NO: 1685801 - RNA, 19 nt, Homo sapiens
  misc_RNA (1)...(19): siRNA sense strand
ucgccugcuuuaacaauuu

SEQ ID NO: 1685802 - RNA, 19 nt, Homo sapiens
  misc_RNA (1)...(19): siRNA sense strand
cuaaugacagcccauauca

SEQ ID NO: 1685803 - RNA, 19 nt, Homo sapiens
  misc_RNA (1)...(19): siRNA sense strand
acaguggucgccugcuuua

SEQ ID NO: 1685804 - RNA, 19 nt, Homo sapiens
  misc_RNA (1)...(19): siRNA sense strand
gauauucuaagaucacagu

SEQ ID NO: 1685805 - RNA, 19 nt, Homo sapiens
  misc_RNA (1)...(19): siRNA sense strand
gaccuaaugacagcccaua

SEQ ID NO: 1685806 - RNA, 19 nt, Homo sapiens
  misc_RNA (1)...(19): siRNA sense strand
guggucgccugcuuuaaca

SEQ ID NO: 1685807 - RNA, 19 nt, Homo sapiens
  misc_RNA (1)...(19): siRNA sense strand
aacagaauaucucgggaau

SEQ ID NO: 1685808 - RNA, 19 nt, Homo sapiens
  misc_RNA (1)...(19): siRNA sense strand
gaauggacucagaaguaug

SEQ ID NO: 1685809 - RNA, 19 nt, Homo sapiens
  misc_RNA (1)...(19): siRNA sense strand
ucucgggaauggacucaga

SEQ ID NO: 1685810 - RNA, 19 nt, Homo sapiens
  misc_RNA (1)...(19): siRNA sense strand
aaugacagcccauaucaag

SEQ ID NO: 1685811 - RNA, 19 nt, Homo sapiens
  misc_RNA (1)...(19): siRNA sense strand
ccuaaugacagcccauauc

SEQ ID NO: 1685812 - RNA, 19 nt, Homo sapiens
  misc_RNA (1)...(19): siRNA sense strand
gucgccugcuuuaacaauu

SEQ ID NO: 1685813 - RNA, 19 nt, Homo sapiens
  misc_RNA (1)...(19): siRNA sense strand
uggcagcauuugucucgau

SEQ ID NO: 1685814 - RNA, 19 nt, Homo sapiens
  misc_RNA (1)...(19): siRNA sense strand
ggucgccugcuuuaacaau

SEQ ID NO: 1685815 - RNA, 19 nt, Homo sapiens
  misc_RNA (1)...(19): siRNA sense strand
ggaauggacucagaaguau

SEQ ID NO: 1685816 - RNA, 19 nt, Homo sapiens
  misc_RNA (1)...(19): siRNA sense strand
gggaauggacucagaagua

SEQ ID NO: 1685817 - RNA, 19 nt, Homo sapiens
  misc_RNA (1)...(19): siRNA sense strand
ucagaaguaugccauguga

SEQ ID NO: 1685818 - RNA, 19 nt, Homo sapiens
  misc_RNA (1)...(19): siRNA sense strand
aaacagacagagauaagua

SEQ ID NO: 1685819 - RNA, 19 nt, Homo sapiens
  misc_RNA (1)...(19): siRNA sense strand
cagaauaucucgggaaugg

SEQ ID NO: 1685820 - RNA, 19 nt, Homo sapiens
  misc_RNA (1)...(19): siRNA sense strand
gcauuugucucgauauucu

SEQ ID NO: 1685821 - RNA, 19 nt, Homo sapiens
  misc_RNA (1)...(19): siRNA sense strand
cagcauuugucucgauauu

SEQ ID NO: 1685822 - RNA, 19 nt, Homo sapiens
  misc_RNA (1)...(19): siRNA sense strand
ccacaauuaugggaccuaa

SEQ ID NO: 1685823 - RNA, 19 nt, Homo sapiens
  misc_RNA (1)...(19): siRNA sense strand
ggcagcauuugucucgaua

SEQ ID NO: 1685824 - RNA, 19 nt, Homo sapiens
  misc_RNA (1)...(19): siRNA sense strand
ucacaguggucgccugcuu

SEQ ID NO: 1685825 - RNA, 19 nt, Homo sapiens
  misc_RNA (1)...(19): siRNA sense strand
ucgccugcuuuaacaauuu

SEQ ID NO: 1685826 - RNA, 19 nt, Homo sapiens
  misc_RNA (1)...(19): siRNA sense strand
cuaaugacagcccauauca

SEQ ID NO: 1685827 - RNA, 19 nt, Homo sapiens
  misc_RNA (1)...(19): siRNA sense strand
acaguggucgccugcuuua

SEQ ID NO: 1685828 - RNA, 19 nt, Homo sapiens
  misc_RNA (1)...(19): siRNA sense strand
gauauucuaagaucacagu

SEQ ID NO: 1685829 - RNA, 19 nt, Homo sapiens
  misc_RNA (1)...(19): siRNA sense strand
gaccuaaugacagcccaua

SEQ ID NO: 1685830 - RNA, 19 nt, Homo sapiens
  misc_RNA (1)...(19): siRNA sense strand
guggucgccugcuuuaaca

SEQ ID NO: 1685831 - RNA, 19 nt, Homo sapiens
  misc_RNA (1)...(19): siRNA sense strand
aacagaauaucucgggaau

SEQ ID NO: 1685832 - RNA, 19 nt, Homo sapiens
  misc_RNA (1)...(19): siRNA sense strand
gaauggacucagaaguaug

SEQ ID NO: 1685833 - RNA, 19 nt, Homo sapiens
  misc_RNA (1)...(19): siRNA sense strand
ucucgggaauggacucaga

SEQ ID NO: 1685834 - RNA, 19 nt, Homo sapiens
  misc_RNA (1)...(19): siRNA sense strand
aaugacagcccauaucaag

SEQ ID NO: 1685835 - RNA, 19 nt, Homo sapiens
  misc_RNA (1)...(19): siRNA sense strand
ccuaaugacagcccauauc

SEQ ID NO: 1685836 - RNA, 19 nt, Homo sapiens
  misc_RNA (1)...(19): siRNA sense strand
gucgccugcuuuaacaauu

SEQ ID NO: 1685837 - RNA, 19 nt, Homo sapiens
  misc_RNA (1)...(19): siRNA sense strand
uggcagcauuugucucgau

SEQ ID NO: 1685838 - RNA, 19 nt, Homo sapiens
  misc_RNA (1)...(19): siRNA sense strand
ggucgccugcuuuaacaau

SEQ ID NO: 1685839 - RNA, 19 nt, Homo sapiens
  misc_RNA (1)...(19): siRNA sense strand
ggaauggacucagaaguau

SEQ ID NO: 1685840 - RNA, 19 nt, Homo sapiens
  misc_RNA (1)...(19): siRNA sense strand
gggaauggacucagaagua

SEQ ID NO: 1685841 - RNA, 19 nt, Homo sapiens
  misc_RNA (1)...(19): siRNA sense strand
ucagaaguaugccauguga

SEQ ID NO: 1685842 - RNA, 19 nt, Homo sapiens
  misc_RNA (1)...(19): siRNA sense strand
aaacagacagagauaagua

SEQ ID NO: 1685843 - RNA, 19 nt, Homo sapiens
  misc_RNA (1)...(19): siRNA sense strand
cagaauaucucgggaaugg

SEQ ID NO: 1685844 - RNA, 19 nt, Homo sapiens
  misc_RNA (1)...(19): siRNA sense strand
gcauuugucucgauauucu

SEQ ID NO: 1685845 - RNA, 19 nt, Homo sapiens
  misc_RNA (1)...(19): siRNA sense strand
cagcauuugucucgauauu

SEQ ID NO: 1685846 - RNA, 19 nt, Homo sapiens
  misc_RNA (1)...(19): siRNA sense strand
ccacaauuaugggaccuaa

SEQ ID NO: 1685847 - RNA, 19 nt, Homo sapiens
  misc_RNA (1)...(19): siRNA sense strand
ggcagcauuugucucgaua

SEQ ID NO: 1685848 - RNA, 19 nt, Homo sapiens
  misc_RNA (1)...(19): siRNA sense strand
ucacaguggucgccugcuu

SEQ ID NO: 1685849 - RNA, 19 nt, Homo sapiens
  misc_RNA (1)...(19): siRNA sense strand
ucgccugcuuuaacaauuu

SEQ ID NO: 1685850 - RNA, 19 nt, Homo sapiens
  misc_RNA (1)...(19): siRNA sense strand
cuaaugacagcccauauca

SEQ ID NO: 1685851 - RNA, 19 nt, Homo sapiens
  misc_RNA (1)...(19): siRNA sense strand
acaguggucgccugcuuua

SEQ ID NO: 1685852 - RNA, 19 nt, Homo sapiens
  misc_RNA (1)...(19): siRNA sense strand
gauauucuaagaucacagu

SEQ ID NO: 1685853 - RNA, 19 nt, Homo sapiens
  misc_RNA (1)...(19): siRNA sense strand
gaccuaaugacagcccaua

SEQ ID NO: 1685854 - RNA, 19 nt, Homo sapiens
  misc_RNA (1)...(19): siRNA sense strand
guggucgccugcuuuaaca

SEQ ID NO: 1685855 - RNA, 19 nt, Homo sapiens
  misc_RNA (1)...(19): siRNA sense strand
aacagaauaucucgggaau

SEQ ID NO: 1685856 - RNA, 19 nt, Homo sapiens
  misc_RNA (1)...(19): siRNA sense strand
gaauggacucagaaguaug

SEQ ID NO: 1685857 - RNA, 19 nt, Homo sapiens
  misc_RNA (1)...(19): siRNA sense strand
ucucgggaauggacucaga

SEQ ID NO: 1685858 - RNA, 19 nt, Homo sapiens
  misc_RNA (1)...(19): siRNA sense strand
aaugacagcccauaucaag

SEQ ID NO: 1685859 - RNA, 19 nt, Homo sapiens
  misc_RNA (1)...(19): siRNA sense strand
ccuaaugacagcccauauc

SEQ ID NO: 1685860 - RNA, 19 nt, Homo sapiens
  misc_RNA (1)...(19): siRNA sense strand
gucgccugcuuuaacaauu

SEQ ID NO: 1685861 - RNA, 19 nt, Homo sapiens
  misc_RNA (1)...(19): siRNA sense strand
uggcagcauuugucucgau

SEQ ID NO: 1685862 - RNA, 19 nt, Homo sapiens
  misc_RNA (1)...(19): siRNA sense strand
ggucgccugcuuuaacaau

SEQ ID NO: 1685863 - RNA, 19 nt, Homo sapiens
  misc_RNA (1)...(19): siRNA sense strand
ggaauggacucagaaguau

SEQ ID NO: 1685864 - RNA, 19 nt, Homo sapiens
  misc_RNA (1)...(19): siRNA sense strand
gggaauggacucagaagua

SEQ ID NO: 1685865 - RNA, 19 nt, Homo sapiens
  misc_RNA (1)...(19): siRNA sense strand
ucagaaguaugccauguga

SEQ ID NO: 1685866 - RNA, 19 nt, Homo sapiens
  misc_RNA (1)...(19): siRNA sense strand
aaacagacagagauaagua

SEQ ID NO: 1685867 - RNA, 19 nt, Homo sapiens
  misc_RNA (1)...(19): siRNA sense strand
cagaauaucucgggaaugg

SEQ ID NO: 1685868 - RNA, 19 nt, Homo sapiens
  misc_RNA (1)...(19): siRNA sense strand
gcauuugucucgauauucu

SEQ ID NO: 1685869 - RNA, 19 nt, Homo sapiens
  misc_RNA (1)...(19): siRNA sense strand
cagcauuugucucgauauu

SEQ ID NO: 1685870 - RNA, 19 nt, Homo sapiens
  misc_RNA (1)...(19): siRNA sense strand
ccacaauuaugggaccuaa

SEQ ID NO: 1685871 - RNA, 19 nt, Homo sapiens
  misc_RNA (1)...(19): siRNA sense strand
ggcagcauuugucucgaua

SEQ ID NO: 1685872 - RNA, 19 nt, Homo sapiens
  misc_RNA (1)...(19): siRNA sense strand
ucacaguggucgccugcuu

SEQ ID NO: 1685873 - RNA, 19 nt, Homo sapiens
  misc_RNA (1)...(19): siRNA sense strand
ucgccugcuuuaacaauuu

SEQ ID NO: 1685874 - RNA, 19 nt, Homo sapiens
  misc_RNA (1)...(19): siRNA sense strand
cuaaugacagcccauauca

SEQ ID NO: 1685875 - RNA, 19 nt, Homo sapiens
  misc_RNA (1)...(19): siRNA sense strand
acaguggucgccugcuuua

SEQ ID NO: 1685876 - RNA, 19 nt, Homo sapiens
  misc_RNA (1)...(19): siRNA sense strand
gauauucuaagaucacagu

SEQ ID NO: 1685877 - RNA, 19 nt, Homo sapiens
  misc_RNA (1)...(19): siRNA sense strand
gaccuaaugacagcccaua

SEQ ID NO: 1685878 - RNA, 19 nt, Homo sapiens
  misc_RNA (1)...(19): siRNA sense strand
guggucgccugcuuuaaca

SEQ ID NO: 1685879 - RNA, 19 nt, Homo sapiens
  misc_RNA (1)...(19): siRNA sense strand
aacagaauaucucgggaau

SEQ ID NO: 1685880 - RNA, 19 nt, Homo sapiens
  misc_RNA (1)...(19): siRNA sense strand
gaauggacucagaaguaug

SEQ ID NO: 1685881 - RNA, 19 nt, Homo sapiens
  misc_RNA (1)...(19): siRNA sense strand
ucucgggaauggacucaga

SEQ ID NO: 1685882 - RNA, 19 nt, Homo sapiens
  misc_RNA (1)...(19): siRNA sense strand
aaugacagcccauaucaag

SEQ ID NO: 1685883 - RNA, 19 nt, Homo sapiens
  misc_RNA (1)...(19): siRNA sense strand
ccuaaugacagcccauauc

SEQ ID NO: 1685884 - RNA, 19 nt, Homo sapiens
  misc_RNA (1)...(19): siRNA sense strand
gucgccugcuuuaacaauu

SEQ ID NO: 1685885 - RNA, 19 nt, Homo sapiens
  misc_RNA (1)...(19): siRNA sense strand
uggcagcauuugucucgau

SEQ ID NO: 1685886 - RNA, 19 nt, Homo sapiens
  misc_RNA (1)...(19): siRNA sense strand
ggucgccugcuuuaacaau

SEQ ID NO: 1685887 - RNA, 19 nt, Homo sapiens
  misc_RNA (1)...(19): siRNA sense strand
ggaauggacucagaaguau

SEQ ID NO: 1685888 - RNA, 19 nt, Homo sapiens
  misc_RNA (1)...(19): siRNA sense strand
gggaauggacucagaagua

SEQ ID NO: 1685889 - RNA, 19 nt, Homo sapiens
  misc_RNA (1)...(19): siRNA sense strand
ucagaaguaugccauguga

SEQ ID NO: 1685890 - RNA, 19 nt, Homo sapiens
  misc_RNA (1)...(19): siRNA sense strand
aaacagacagagauaagua

SEQ ID NO: 1685891 - RNA, 19 nt, Homo sapiens
  misc_RNA (1)...(19): siRNA sense strand
cagaauaucucgggaaugg

SEQ ID NO: 1685892 - RNA, 19 nt, Homo sapiens
  misc_RNA (1)...(19): siRNA sense strand
gcauuugucucgauauucu

SEQ ID NO: 1685893 - RNA, 19 nt, Homo sapiens
  misc_RNA (1)...(19): siRNA sense strand
cagcauuugucucgauauu

SEQ ID NO: 1685894 - RNA, 19 nt, Homo sapiens
  misc_RNA (1)...(19): siRNA sense strand
ccacaauuaugggaccuaa

SEQ ID NO: 1685895 - RNA, 19 nt, Homo sapiens
  misc_RNA (1)...(19): siRNA sense strand
ggcagcauuugucucgaua

SEQ ID NO: 1685896 - RNA, 19 nt, Homo sapiens
  misc_RNA (1)...(19): siRNA sense strand
ucacaguggucgccugcuu

SEQ ID NO: 1685897 - RNA, 19 nt, Homo sapiens
  misc_RNA (1)...(19): siRNA sense strand
ucgccugcuuuaacaauuu

SEQ ID NO: 1685898 - RNA, 19 nt, Homo sapiens
  misc_RNA (1)...(19): siRNA sense strand
cuaaugacagcccauauca

SEQ ID NO: 1685899 - RNA, 19 nt, Homo sapiens
  misc_RNA (1)...(19): siRNA sense strand
acaguggucgccugcuuua

SEQ ID NO: 1685900 - RNA, 19 nt, Homo sapiens
  misc_RNA (1)...(19): siRNA sense strand
gauauucuaagaucacagu

SEQ ID NO: 1685901 - RNA, 19 nt, Homo sapiens
  misc_RNA (1)...(19): siRNA sense strand
gaccuaaugacagcccaua

SEQ ID NO: 1685902 - RNA, 19 nt, Homo sapiens
  misc_RNA (1)...(19): siRNA sense strand
guggucgccugcuuuaaca

SEQ ID NO: 1685903 - RNA, 19 nt, Homo sapiens
  misc_RNA (1)...(19): siRNA sense strand
aacagaauaucucgggaau

SEQ ID NO: 1685904 - RNA, 19 nt, Homo sapiens
  misc_RNA (1)...(19): siRNA sense strand
gaauggacucagaaguaug

SEQ ID NO: 1685905 - RNA, 19 nt, Homo sapiens
  misc_RNA (1)...(19): siRNA sense strand
ucucgggaauggacucaga

SEQ ID NO: 1685906 - RNA, 19 nt, Homo sapiens
  misc_RNA (1)...(19): siRNA sense strand
aaugacagcccauaucaag

SEQ ID NO: 1685907 - RNA, 19 nt, Homo sapiens
  misc_RNA (1)...(19): siRNA sense strand
ccuaaugacagcccauauc

SEQ ID NO: 1685908 - RNA, 19 nt, Homo sapiens
  misc_RNA (1)...(19): siRNA sense strand
gucgccugcuuuaacaauu

SEQ ID NO: 1685909 - RNA, 19 nt, Homo sapiens
  misc_RNA (1)...(19): siRNA sense strand
uggcagcauuugucucgau

SEQ ID NO: 1685910 - RNA, 19 nt, Homo sapiens
  misc_RNA (1)...(19): siRNA sense strand
ggucgccugcuuuaacaau

SEQ ID NO: 1685911 - RNA, 19 nt, Homo sapiens
  misc_RNA (1)...(19): siRNA sense strand
ggaauggacucagaaguau

SEQ ID NO: 1685912 - RNA, 19 nt, Homo sapiens
  misc_RNA (1)...(19): siRNA sense strand
gggaauggacucagaagua

SEQ ID NO: 1685913 - RNA, 19 nt, Homo sapiens
  misc_RNA (1)...(19): siRNA sense strand
ucagaaguaugccauguga

SEQ ID NO: 1685914 - RNA, 19 nt, Homo sapiens
  misc_RNA (1)...(19): siRNA sense strand
aaacagacagagauaagua

SEQ ID NO: 1685915 - RNA, 19 nt, Homo sapiens
  misc_RNA (1)...(19): siRNA sense strand
cagaauaucucgggaaugg

SEQ ID NO: 1685916 - RNA, 19 nt, Homo sapiens
  misc_RNA (1)...(19): siRNA sense strand
gcauuugucucgauauucu

SEQ ID NO: 1685917 - RNA, 19 nt, Homo sapiens
  misc_RNA (1)...(19): siRNA sense strand
cagcauuugucucgauauu

SEQ ID NO: 1685918 - RNA, 19 nt, Homo sapiens
  misc_RNA (1)...(19): siRNA sense strand
ccacaauuaugggaccuaa

SEQ ID NO: 1685919 - RNA, 19 nt, Homo sapiens
  misc_RNA (1)...(19): siRNA sense strand
ggcagcauuugucucgaua

SEQ ID NO: 1685920 - RNA, 19 nt, Homo sapiens
  misc_RNA (1)...(19): siRNA sense strand
ucacaguggucgccugcuu

SEQ ID NO: 1685921 - RNA, 19 nt, Homo sapiens
  misc_RNA (1)...(19): siRNA sense strand
ucgccugcuuuaacaauuu

SEQ ID NO: 1685922 - RNA, 19 nt, Homo sapiens
  misc_RNA (1)...(19): siRNA sense strand
cuaaugacagcccauauca

SEQ ID NO: 1685923 - RNA, 19 nt, Homo sapiens
  misc_RNA (1)...(19): siRNA sense strand
acaguggucgccugcuuua

SEQ ID NO: 1685924 - RNA, 19 nt, Homo sapiens
  misc_RNA (1)...(19): siRNA sense strand
gauauucuaagaucacagu

SEQ ID NO: 1685925 - RNA, 19 nt, Homo sapiens
  misc_RNA (1)...(19): siRNA sense strand
gaccuaaugacagcccaua

SEQ ID NO: 1685926 - RNA, 19 nt, Homo sapiens
  misc_RNA (1)...(19): siRNA sense strand
guggucgccugcuuuaaca

SEQ ID NO: 1685927 - RNA, 19 nt, Homo sapiens
  misc_RNA (1)...(19): siRNA sense strand
aacagaauaucucgggaau

SEQ ID NO: 1685928 - RNA, 19 nt, Homo sapiens
  misc_RNA (1)...(19): siRNA sense strand
gaauggacucagaaguaug

SEQ ID NO: 1685929 - RNA, 19 nt, Homo sapiens
  misc_RNA (1)...(19): siRNA sense strand
ucucgggaauggacucaga

SEQ ID NO: 1685930 - RNA, 19 nt, Homo sapiens
  misc_RNA (1)...(19): siRNA sense strand
aaugacagcccauaucaag

SEQ ID NO: 1685931 - RNA, 19 nt, Homo sapiens
  misc_RNA (1)...(19): siRNA sense strand
ccuaaugacagcccauauc

SEQ ID NO: 1685932 - RNA, 19 nt, Homo sapiens
  misc_RNA (1)...(19): siRNA sense strand
gucgccugcuuuaacaauu

SEQ ID NO: 1685933 - RNA, 19 nt, Homo sapiens
  misc_RNA (1)...(19): siRNA sense strand
uggcagcauuugucucgau

SEQ ID NO: 1685934 - RNA, 19 nt, Homo sapiens
  misc_RNA (1)...(19): siRNA sense strand
ggucgccugcuuuaacaau

SEQ ID NO: 1685935 - RNA, 19 nt, Homo sapiens
  misc_RNA (1)...(19): siRNA sense strand
ggaauggacucagaaguau

SEQ ID NO: 1685936 - RNA, 19 nt, Homo sapiens
  misc_RNA (1)...(19): siRNA sense strand
gggaauggacucagaagua

SEQ ID NO: 1685937 - RNA, 19 nt, Homo sapiens
  misc_RNA (1)...(19): siRNA sense strand
ucagaaguaugccauguga

SEQ ID NO: 1685938 - RNA, 19 nt, Homo sapiens
  misc_RNA (1)...(19): siRNA sense strand
aaacagacagagauaagua

SEQ ID NO: 1685939 - RNA, 19 nt, Homo sapiens
  misc_RNA (1)...(19): siRNA sense strand
cagaauaucucgggaaugg

SEQ ID NO: 1685940 - RNA, 19 nt, Homo sapiens
  misc_RNA (1)...(19): siRNA sense strand
gcauuugucucgauauucu

SEQ ID NO: 1685941 - RNA, 19 nt, Homo sapiens
  misc_RNA (1)...(19): siRNA sense strand
cagcauuugucucgauauu

SEQ ID NO: 1685942 - RNA, 19 nt, Homo sapiens
  misc_RNA (1)...(19): siRNA sense strand
ccacaauuaugggaccuaa

SEQ ID NO: 1685943 - RNA, 19 nt, Homo sapiens
  misc_RNA (1)...(19): siRNA sense strand
ggcagcauuugucucgaua

SEQ ID NO: 1685944 - RNA, 19 nt, Homo sapiens
  misc_RNA (1)...(19): siRNA sense strand
ucacaguggucgccugcuu

SEQ ID NO: 1685945 - RNA, 19 nt, Homo sapiens
  misc_RNA (1)...(19): siRNA sense strand
ucgccugcuuuaacaauuu

SEQ ID NO: 1685946 - RNA, 19 nt, Homo sapiens
  misc_RNA (1)...(19): siRNA sense strand
cuaaugacagcccauauca

SEQ ID NO: 1685947 - RNA, 19 nt, Homo sapiens
  misc_RNA (1)...(19): siRNA sense strand
acaguggucgccugcuuua

SEQ ID NO: 1685948 - RNA, 19 nt, Homo sapiens
  misc_RNA (1)...(19): siRNA sense strand
gauauucuaagaucacagu

SEQ ID NO: 1685949 - RNA, 19 nt, Homo sapiens
  misc_RNA (1)...(19): siRNA sense strand
gaccuaaugacagcccaua

SEQ ID NO: 1685950 - RNA, 19 nt, Homo sapiens
  misc_RNA (1)...(19): siRNA sense strand
guggucgccugcuuuaaca

SEQ ID NO: 1685951 - RNA, 19 nt, Homo sapiens
  misc_RNA (1)...(19): siRNA sense strand
aacagaauaucucgggaau

SEQ ID NO: 1685952 - RNA, 19 nt, Homo sapiens
  misc_RNA (1)...(19): siRNA sense strand
gaauggacucagaaguaug

SEQ ID NO: 1685953 - RNA, 19 nt, Homo sapiens
  misc_RNA (1)...(19): siRNA sense strand
ucucgggaauggacucaga

SEQ ID NO: 1685954 - RNA, 19 nt, Homo sapiens
  misc_RNA (1)...(19): siRNA sense strand
aaugacagcccauaucaag

SEQ ID NO: 1685955 - RNA, 19 nt, Homo sapiens
  misc_RNA (1)...(19): siRNA sense strand
ccuaaugacagcccauauc

SEQ ID NO: 1685956 - RNA, 19 nt, Homo sapiens
  misc_RNA (1)...(19): siRNA sense strand
gucgccugcuuuaacaauu

SEQ ID NO: 1685957 - RNA, 19 nt, Homo sapiens
  misc_RNA (1)...(19): siRNA sense strand
uggcagcauuugucucgau

SEQ ID NO: 1685958 - RNA, 19 nt, Homo sapiens
  misc_RNA (1)...(19): siRNA sense strand
ggucgccugcuuuaacaau

SEQ ID NO: 1685959 - RNA, 19 nt, Homo sapiens
  misc_RNA (1)...(19): siRNA sense strand
aaacagacagagauaagua

SEQ ID NO: 1685960 - RNA, 19 nt, Homo sapiens
  misc_RNA (1)...(19): siRNA sense strand
gcauuugucucgauauucu

SEQ ID NO: 1685961 - RNA, 19 nt, Homo sapiens
  misc_RNA (1)...(19): siRNA sense strand
cagcauuugucucgauauu

SEQ ID NO: 1685962 - RNA, 19 nt, Homo sapiens
  misc_RNA (1)...(19): siRNA sense strand
ccacaauuaugggaccuaa

SEQ ID NO: 1685963 - RNA, 19 nt, Homo sapiens
  misc_RNA (1)...(19): siRNA sense strand
ggcagcauuugucucgaua

SEQ ID NO: 1685964 - RNA, 19 nt, Homo sapiens
  misc_RNA (1)...(19): siRNA sense strand
ucacaguggucgccugcuu

SEQ ID NO: 1685965 - RNA, 19 nt, Homo sapiens
  misc_RNA (1)...(19): siRNA sense strand
gcacggaucuauaaaacag

SEQ ID NO: 1685966 - RNA, 19 nt, Homo sapiens
  misc_RNA (1)...(19): siRNA sense strand
ucgccugcuuuaacaauuu

SEQ ID NO: 1685967 - RNA, 19 nt, Homo sapiens
  misc_RNA (1)...(19): siRNA sense strand
cuaaugacagcccauauca

SEQ ID NO: 1685968 - RNA, 19 nt, Homo sapiens
  misc_RNA (1)...(19): siRNA sense strand
acaguggucgccugcuuua

SEQ ID NO: 1685969 - RNA, 19 nt, Homo sapiens
  misc_RNA (1)...(19): siRNA sense strand
gauauucuaagaucacagu

SEQ ID NO: 1685970 - RNA, 19 nt, Homo sapiens
  misc_RNA (1)...(19): siRNA sense strand
gaccuaaugacagcccaua

SEQ ID NO: 1685971 - RNA, 19 nt, Homo sapiens
  misc_RNA (1)...(19): siRNA sense strand
guggucgccugcuuuaaca

SEQ ID NO: 1685972 - RNA, 19 nt, Homo sapiens
  misc_RNA (1)...(19): siRNA sense strand
aaugacagcccauaucaag

SEQ ID NO: 1685973 - RNA, 19 nt, Homo sapiens
  misc_RNA (1)...(19): siRNA sense strand
ccuaaugacagcccauauc

SEQ ID NO: 1685974 - RNA, 19 nt, Homo sapiens
  misc_RNA (1)...(19): siRNA sense strand
gucgccugcuuuaacaauu

SEQ ID NO: 1685975 - RNA, 19 nt, Homo sapiens
  misc_RNA (1)...(19): siRNA sense strand
uggcagcauuugucucgau

SEQ ID NO: 1685976 - RNA, 19 nt, Homo sapiens
  misc_RNA (1)...(19): siRNA sense strand
ggucgccugcuuuaacaau

SEQ ID NO: 1685977 - RNA, 19 nt, Homo sapiens
  misc_RNA (1)...(19): siRNA sense strand
ggaauggacucagaaguau

SEQ ID NO: 1685978 - RNA, 19 nt, Homo sapiens
  misc_RNA (1)...(19): siRNA sense strand
gggaauggacucagaagua

SEQ ID NO: 1685979 - RNA, 19 nt, Homo sapiens
  misc_RNA (1)...(19): siRNA sense strand
ucagaaguaugccauguga

SEQ ID NO: 1685980 - RNA, 19 nt, Homo sapiens
  misc_RNA (1)...(19): siRNA sense strand
aaacagacagagauaagua

SEQ ID NO: 1685981 - RNA, 19 nt, Homo sapiens
  misc_RNA (1)...(19): siRNA sense strand
cagaauaucucgggaaugg

SEQ ID NO: 1685982 - RNA, 19 nt, Homo sapiens
  misc_RNA (1)...(19): siRNA sense strand
gcauuugucucgauauucu

SEQ ID NO: 1685983 - RNA, 19 nt, Homo sapiens
  misc_RNA (1)...(19): siRNA sense strand
cagcauuugucucgauauu

SEQ ID NO: 1685984 - RNA, 19 nt, Homo sapiens
  misc_RNA (1)...(19): siRNA sense strand
ccacaauuaugggaccuaa

SEQ ID NO: 1685985 - RNA, 19 nt, Homo sapiens
  misc_RNA (1)...(19): siRNA sense strand
ggcagcauuugucucgaua

SEQ ID NO: 1685986 - RNA, 19 nt, Homo sapiens
  misc_RNA (1)...(19): siRNA sense strand
ucacaguggucgccugcuu

SEQ ID NO: 1685987 - RNA, 19 nt, Homo sapiens
  misc_RNA (1)...(19): siRNA sense strand
ucgccugcuuuaacaauuu

SEQ ID NO: 1685988 - RNA, 19 nt, Homo sapiens
  misc_RNA (1)...(19): siRNA sense strand
cuaaugacagcccauauca

SEQ ID NO: 1685989 - RNA, 19 nt, Homo sapiens
  misc_RNA (1)...(19): siRNA sense strand
acaguggucgccugcuuua

SEQ ID NO: 1685990 - RNA, 19 nt, Homo sapiens
  misc_RNA (1)...(19): siRNA sense strand
gauauucuaagaucacagu

SEQ ID NO: 1685991 - RNA, 19 nt, Homo sapiens
  misc_RNA (1)...(19): siRNA sense strand
gaccuaaugacagcccaua

SEQ ID NO: 1685992 - RNA, 19 nt, Homo sapiens
  misc_RNA (1)...(19): siRNA sense strand
guggucgccugcuuuaaca

SEQ ID NO: 1685993 - RNA, 19 nt, Homo sapiens
  misc_RNA (1)...(19): siRNA sense strand
aacagaauaucucgggaau

SEQ ID NO: 1685994 - RNA, 19 nt, Homo sapiens
  misc_RNA (1)...(19): siRNA sense strand
gaauggacucagaaguaug

SEQ ID NO: 1685995 - RNA, 19 nt, Homo sapiens
  misc_RNA (1)...(19): siRNA sense strand
ucucgggaauggacucaga

SEQ ID NO: 1685996 - RNA, 19 nt, Homo sapiens
  misc_RNA (1)...(19): siRNA sense strand
aaugacagcccauaucaag

SEQ ID NO: 1685997 - RNA, 19 nt, Homo sapiens
  misc_RNA (1)...(19): siRNA sense strand
ccuaaugacagcccauauc

SEQ ID NO: 1685998 - RNA, 19 nt, Homo sapiens
  misc_RNA (1)...(19): siRNA sense strand
gucgccugcuuuaacaauu

SEQ ID NO: 1685999 - RNA, 19 nt, Homo sapiens
  misc_RNA (1)...(19): siRNA sense strand
uggcagcauuugucucgau

SEQ ID NO: 1686000 - RNA, 19 nt, Homo sapiens
  misc_RNA (1)...(19): siRNA sense strand
ggucgccugcuuuaacaau

SEQ ID NO: 1686001 - RNA, 19 nt, Homo sapiens
  misc_RNA (1)...(19): siRNA sense strand
caagauugcugaauacaaa

SEQ ID NO: 1686002 - RNA, 19 nt, Homo sapiens
  misc_RNA (1)...(19): siRNA sense strand
gaagucaagucgagucuau

SEQ ID NO: 1686003 - RNA, 19 nt, Homo sapiens
  misc_RNA (1)...(19): siRNA sense strand
ggacaagauugcugaauac

SEQ ID NO: 1686004 - RNA, 19 nt, Homo sapiens
  misc_RNA (1)...(19): siRNA sense strand
caacgaggcuuggagauuc

SEQ ID NO: 1686005 - RNA, 19 nt, Homo sapiens
  misc_RNA (1)...(19): siRNA sense strand
cgacagaacccgacuaugu

SEQ ID NO: 1686006 - RNA, 19 nt, Homo sapiens
  misc_RNA (1)...(19): siRNA sense strand
uggacaagauugcugaaua

SEQ ID NO: 1686007 - RNA, 19 nt, Homo sapiens
  misc_RNA (1)...(19): siRNA sense strand
caucagagcacaucaaauc

SEQ ID NO: 1686008 - RNA, 19 nt, Homo sapiens
  misc_RNA (1)...(19): siRNA sense strand
acacagacauacccaguug

SEQ ID NO: 1686009 - RNA, 19 nt, Homo sapiens
  misc_RNA (1)...(19): siRNA sense strand
ccaaagugguggacaagau

SEQ ID NO: 1686010 - RNA, 19 nt, Homo sapiens
  misc_RNA (1)...(19): siRNA sense strand
caauggagauucccagagu

SEQ ID NO: 1686011 - RNA, 19 nt, Homo sapiens
  misc_RNA (1)...(19): siRNA sense strand
gaagaggaaacgugaugaa

SEQ ID NO: 1686012 - RNA, 19 nt, Homo sapiens
  misc_RNA (1)...(19): siRNA sense strand
gacagaacccgacuauguu

SEQ ID NO: 1686013 - RNA, 19 nt, Homo sapiens
  misc_RNA (1)...(19): siRNA sense strand
gagaagaggaaacgugaug

SEQ ID NO: 1686014 - RNA, 19 nt, Homo sapiens
  misc_RNA (1)...(19): siRNA sense strand
cagagcacaucaaaucaga

SEQ ID NO: 1686015 - RNA, 19 nt, Homo sapiens
  misc_RNA (1)...(19): siRNA sense strand
agagugguguggacaguuu

SEQ ID NO: 1686016 - RNA, 19 nt, Homo sapiens
  misc_RNA (1)...(19): siRNA sense strand
gagggcaucugugacaaug

SEQ ID NO: 1686017 - RNA, 19 nt, Homo sapiens
  misc_RNA (1)...(19): siRNA sense strand
caaagugguggacaagauu

SEQ ID NO: 1686018 - RNA, 19 nt, Homo sapiens
  misc_RNA (1)...(19): siRNA sense strand
cagcgucucuuccaucaac

SEQ ID NO: 1686019 - RNA, 19 nt, Homo sapiens
  misc_RNA (1)...(19): siRNA sense strand
gcacaucaaaucagaacag

SEQ ID NO: 1686020 - RNA, 19 nt, Homo sapiens
  misc_RNA (1)...(19): siRNA sense strand
gggcaucugugacaaugac

SEQ ID NO: 1686021 - RNA, 19 nt, Homo sapiens
  misc_RNA (1)...(19): siRNA sense strand
ucucuuccaucaacagaau

SEQ ID NO: 1686022 - RNA, 19 nt, Homo sapiens
  misc_RNA (1)...(19): siRNA sense strand
ggauccuacuccaucaaug

SEQ ID NO: 1686023 - RNA, 19 nt, Homo sapiens
  misc_RNA (1)...(19): siRNA sense strand
ggcaucagagcacaucaaa

SEQ ID NO: 1686024 - RNA, 19 nt, Homo sapiens
  misc_RNA (1)...(19): siRNA sense strand
ccaauggugagaagaggaa

SEQ ID NO: 1686025 - RNA, 19 nt, Homo sapiens
  misc_RNA (1)...(19): siRNA sense strand
gagcacaucaaaucagaac

SEQ ID NO: 1686026 - RNA, 19 nt, Homo sapiens
  misc_RNA (1)...(19): siRNA sense strand
agaaucauccggaccaaag

SEQ ID NO: 1686027 - RNA, 19 nt, Homo sapiens
  misc_RNA (1)...(19): siRNA sense strand
acaacgaggcuuggagauu

SEQ ID NO: 1686028 - RNA, 19 nt, Homo sapiens
  misc_RNA (1)...(19): siRNA sense strand
uauguucgccugggagauu

SEQ ID NO: 1686029 - RNA, 19 nt, Homo sapiens
  misc_RNA (1)...(19): siRNA sense strand
ccagagugguguggacagu

SEQ ID NO: 1686030 - RNA, 19 nt, Homo sapiens
  misc_RNA (1)...(19): siRNA sense strand
cccagcgucucuuccauca

SEQ ID NO: 1686031 - RNA, 19 nt, Homo sapiens
  misc_RNA (1)...(19): siRNA sense strand
acaagauugcugaauacaa

SEQ ID NO: 1686032 - RNA, 19 nt, Homo sapiens
  misc_RNA (1)...(19): siRNA sense strand
gggauccuacuccaucaau

SEQ ID NO: 1686033 - RNA, 19 nt, Homo sapiens
  misc_RNA (1)...(19): siRNA sense strand
ccacuggccagggaagcua

SEQ ID NO: 1686034 - RNA, 19 nt, Homo sapiens
  misc_RNA (1)...(19): siRNA sense strand
ucuuugagcguccuuccua

SEQ ID NO: 1686035 - RNA, 19 nt, Homo sapiens
  misc_RNA (1)...(19): siRNA sense strand
caagauugcugaauacaaa

SEQ ID NO: 1686036 - RNA, 19 nt, Homo sapiens
  misc_RNA (1)...(19): siRNA sense strand
gaagucaagucgagucuau

SEQ ID NO: 1686037 - RNA, 19 nt, Homo sapiens
  misc_RNA (1)...(19): siRNA sense strand
ggacaagauugcugaauac

SEQ ID NO: 1686038 - RNA, 19 nt, Homo sapiens
  misc_RNA (1)...(19): siRNA sense strand
caacgaggcuuggagauuc

SEQ ID NO: 1686039 - RNA, 19 nt, Homo sapiens
  misc_RNA (1)...(19): siRNA sense strand
cgacagaacccgacuaugu

SEQ ID NO: 1686040 - RNA, 19 nt, Homo sapiens
  misc_RNA (1)...(19): siRNA sense strand
uggacaagauugcugaaua

SEQ ID NO: 1686041 - RNA, 19 nt, Homo sapiens
  misc_RNA (1)...(19): siRNA sense strand
caucagagcacaucaaauc

SEQ ID NO: 1686042 - RNA, 19 nt, Homo sapiens
  misc_RNA (1)...(19): siRNA sense strand
acacagacauacccaguug

SEQ ID NO: 1686043 - RNA, 19 nt, Homo sapiens
  misc_RNA (1)...(19): siRNA sense strand
ccaaagugguggacaagau

SEQ ID NO: 1686044 - RNA, 19 nt, Homo sapiens
  misc_RNA (1)...(19): siRNA sense strand
caauggagauucccagagu

SEQ ID NO: 1686045 - RNA, 19 nt, Homo sapiens
  misc_RNA (1)...(19): siRNA sense strand
gaagaggaaacgugaugaa

SEQ ID NO: 1686046 - RNA, 19 nt, Homo sapiens
  misc_RNA (1)...(19): siRNA sense strand
gacagaacccgacuauguu

SEQ ID NO: 1686047 - RNA, 19 nt, Homo sapiens
  misc_RNA (1)...(19): siRNA sense strand
gagaagaggaaacgugaug

SEQ ID NO: 1686048 - RNA, 19 nt, Homo sapiens
  misc_RNA (1)...(19): siRNA sense strand
cagagcacaucaaaucaga

SEQ ID NO: 1686049 - RNA, 19 nt, Homo sapiens
  misc_RNA (1)...(19): siRNA sense strand
agagugguguggacaguuu

SEQ ID NO: 1686050 - RNA, 19 nt, Homo sapiens
  misc_RNA (1)...(19): siRNA sense strand
gagggcaucugugacaaug

SEQ ID NO: 1686051 - RNA, 19 nt, Homo sapiens
  misc_RNA (1)...(19): siRNA sense strand
caaagugguggacaagauu

SEQ ID NO: 1686052 - RNA, 19 nt, Homo sapiens
  misc_RNA (1)...(19): siRNA sense strand
cagcgucucuuccaucaac

SEQ ID NO: 1686053 - RNA, 19 nt, Homo sapiens
  misc_RNA (1)...(19): siRNA sense strand
gcacaucaaaucagaacag

SEQ ID NO: 1686054 - RNA, 19 nt, Homo sapiens
  misc_RNA (1)...(19): siRNA sense strand
gggcaucugugacaaugac

SEQ ID NO: 1686055 - RNA, 19 nt, Homo sapiens
  misc_RNA (1)...(19): siRNA sense strand
ucucuuccaucaacagaau

SEQ ID NO: 1686056 - RNA, 19 nt, Homo sapiens
  misc_RNA (1)...(19): siRNA sense strand
ggauccuacuccaucaaug

SEQ ID NO: 1686057 - RNA, 19 nt, Homo sapiens
  misc_RNA (1)...(19): siRNA sense strand
ggcaucagagcacaucaaa

SEQ ID NO: 1686058 - RNA, 19 nt, Homo sapiens
  misc_RNA (1)...(19): siRNA sense strand
ccaauggugagaagaggaa

SEQ ID NO: 1686059 - RNA, 19 nt, Homo sapiens
  misc_RNA (1)...(19): siRNA sense strand
gagcacaucaaaucagaac

SEQ ID NO: 1686060 - RNA, 19 nt, Homo sapiens
  misc_RNA (1)...(19): siRNA sense strand
agaaucauccggaccaaag

SEQ ID NO: 1686061 - RNA, 19 nt, Homo sapiens
  misc_RNA (1)...(19): siRNA sense strand
acaacgaggcuuggagauu

SEQ ID NO: 1686062 - RNA, 19 nt, Homo sapiens
  misc_RNA (1)...(19): siRNA sense strand
uauguucgccugggagauu

SEQ ID NO: 1686063 - RNA, 19 nt, Homo sapiens
  misc_RNA (1)...(19): siRNA sense strand
ccagagugguguggacagu

SEQ ID NO: 1686064 - RNA, 19 nt, Homo sapiens
  misc_RNA (1)...(19): siRNA sense strand
cccagcgucucuuccauca

SEQ ID NO: 1686065 - RNA, 19 nt, Homo sapiens
  misc_RNA (1)...(19): siRNA sense strand
acaagauugcugaauacaa

SEQ ID NO: 1686066 - RNA, 19 nt, Homo sapiens
  misc_RNA (1)...(19): siRNA sense strand
gggauccuacuccaucaau

SEQ ID NO: 1686067 - RNA, 19 nt, Homo sapiens
  misc_RNA (1)...(19): siRNA sense strand
ccacuggccagggaagcua

SEQ ID NO: 1686068 - RNA, 19 nt, Homo sapiens
  misc_RNA (1)...(19): siRNA sense strand
ucuuugagcguccuuccua

SEQ ID NO: 1686069 - RNA, 19 nt, Homo sapiens
  misc_RNA (1)...(19): siRNA sense strand
caagauugcugaauacaaa

SEQ ID NO: 1686070 - RNA, 19 nt, Homo sapiens
  misc_RNA (1)...(19): siRNA sense strand
gaagucaagucgagucuau

SEQ ID NO: 1686071 - RNA, 19 nt, Homo sapiens
  misc_RNA (1)...(19): siRNA sense strand
ggacaagauugcugaauac

SEQ ID NO: 1686072 - RNA, 19 nt, Homo sapiens
  misc_RNA (1)...(19): siRNA sense strand
caacgaggcuuggagauuc

SEQ ID NO: 1686073 - RNA, 19 nt, Homo sapiens
  misc_RNA (1)...(19): siRNA sense strand
cgacagaacccgacuaugu

SEQ ID NO: 1686074 - RNA, 19 nt, Homo sapiens
  misc_RNA (1)...(19): siRNA sense strand
uggacaagauugcugaaua

SEQ ID NO: 1686075 - RNA, 19 nt, Homo sapiens
  misc_RNA (1)...(19): siRNA sense strand
caucagagcacaucaaauc

SEQ ID NO: 1686076 - RNA, 19 nt, Homo sapiens
  misc_RNA (1)...(19): siRNA sense strand
acacagacauacccaguug

SEQ ID NO: 1686077 - RNA, 19 nt, Homo sapiens
  misc_RNA (1)...(19): siRNA sense strand
ccaaagugguggacaagau

SEQ ID NO: 1686078 - RNA, 19 nt, Homo sapiens
  misc_RNA (1)...(19): siRNA sense strand
caauggagauucccagagu

SEQ ID NO: 1686079 - RNA, 19 nt, Homo sapiens
  misc_RNA (1)...(19): siRNA sense strand
gaagaggaaacgugaugaa

SEQ ID NO: 1686080 - RNA, 19 nt, Homo sapiens
  misc_RNA (1)...(19): siRNA sense strand
gacagaacccgacuauguu

SEQ ID NO: 1686081 - RNA, 19 nt, Homo sapiens
  misc_RNA (1)...(19): siRNA sense strand
gagaagaggaaacgugaug

SEQ ID NO: 1686082 - RNA, 19 nt, Homo sapiens
  misc_RNA (1)...(19): siRNA sense strand
cagagcacaucaaaucaga

SEQ ID NO: 1686083 - RNA, 19 nt, Homo sapiens
  misc_RNA (1)...(19): siRNA sense strand
agagugguguggacaguuu

SEQ ID NO: 1686084 - RNA, 19 nt, Homo sapiens
  misc_RNA (1)...(19): siRNA sense strand
gagggcaucugugacaaug

SEQ ID NO: 1686085 - RNA, 19 nt, Homo sapiens
  misc_RNA (1)...(19): siRNA sense strand
caaagugguggacaagauu

SEQ ID NO: 1686086 - RNA, 19 nt, Homo sapiens
  misc_RNA (1)...(19): siRNA sense strand
cagcgucucuuccaucaac

SEQ ID NO: 1686087 - RNA, 19 nt, Homo sapiens
  misc_RNA (1)...(19): siRNA sense strand
gcacaucaaaucagaacag

SEQ ID NO: 1686088 - RNA, 19 nt, Homo sapiens
  misc_RNA (1)...(19): siRNA sense strand
gggcaucugugacaaugac

SEQ ID NO: 1686089 - RNA, 19 nt, Homo sapiens
  misc_RNA (1)...(19): siRNA sense strand
ucucuuccaucaacagaau

SEQ ID NO: 1686090 - RNA, 19 nt, Homo sapiens
  misc_RNA (1)...(19): siRNA sense strand
ggauccuacuccaucaaug

SEQ ID NO: 1686091 - RNA, 19 nt, Homo sapiens
  misc_RNA (1)...(19): siRNA sense strand
ggcaucagagcacaucaaa

SEQ ID NO: 1686092 - RNA, 19 nt, Homo sapiens
  misc_RNA (1)...(19): siRNA sense strand
ccaauggugagaagaggaa

SEQ ID NO: 1686093 - RNA, 19 nt, Homo sapiens
  misc_RNA (1)...(19): siRNA sense strand
gagcacaucaaaucagaac

SEQ ID NO: 1686094 - RNA, 19 nt, Homo sapiens
  misc_RNA (1)...(19): siRNA sense strand
agaaucauccggaccaaag

SEQ ID NO: 1686095 - RNA, 19 nt, Homo sapiens
  misc_RNA (1)...(19): siRNA sense strand
acaacgaggcuuggagauu

SEQ ID NO: 1686096 - RNA, 19 nt, Homo sapiens
  misc_RNA (1)...(19): siRNA sense strand
uauguucgccugggagauu

SEQ ID NO: 1686097 - RNA, 19 nt, Homo sapiens
  misc_RNA (1)...(19): siRNA sense strand
ccagagugguguggacagu

SEQ ID NO: 1686098 - RNA, 19 nt, Homo sapiens
  misc_RNA (1)...(19): siRNA sense strand
cccagcgucucuuccauca

SEQ ID NO: 1686099 - RNA, 19 nt, Homo sapiens
  misc_RNA (1)...(19): siRNA sense strand
acaagauugcugaauacaa

SEQ ID NO: 1686100 - RNA, 19 nt, Homo sapiens
  misc_RNA (1)...(19): siRNA sense strand
gggauccuacuccaucaau

SEQ ID NO: 1686101 - RNA, 19 nt, Homo sapiens
  misc_RNA (1)...(19): siRNA sense strand
ccacuggccagggaagcua

SEQ ID NO: 1686102 - RNA, 19 nt, Homo sapiens
  misc_RNA (1)...(19): siRNA sense strand
ucuuugagcguccuuccua

SEQ ID NO: 1686103 - RNA, 19 nt, Homo sapiens
  misc_RNA (1)...(19): siRNA sense strand
caagauugcugaauacaaa

SEQ ID NO: 1686104 - RNA, 19 nt, Homo sapiens
  misc_RNA (1)...(19): siRNA sense strand
gaagucaagucgagucuau

SEQ ID NO: 1686105 - RNA, 19 nt, Homo sapiens
  misc_RNA (1)...(19): siRNA sense strand
ggacaagauugcugaauac

SEQ ID NO: 1686106 - RNA, 19 nt, Homo sapiens
  misc_RNA (1)...(19): siRNA sense strand
caacgaggcuuggagauuc

SEQ ID NO: 1686107 - RNA, 19 nt, Homo sapiens
  misc_RNA (1)...(19): siRNA sense strand
cgacagaacccgacuaugu

SEQ ID NO: 1686108 - RNA, 19 nt, Homo sapiens
  misc_RNA (1)...(19): siRNA sense strand
uggacaagauugcugaaua

SEQ ID NO: 1686109 - RNA, 19 nt, Homo sapiens
  misc_RNA (1)...(19): siRNA sense strand
caucagagcacaucaaauc

SEQ ID NO: 1686110 - RNA, 19 nt, Homo sapiens
  misc_RNA (1)...(19): siRNA sense strand
acacagacauacccaguug

SEQ ID NO: 1686111 - RNA, 19 nt, Homo sapiens
  misc_RNA (1)...(19): siRNA sense strand
ccaaagugguggacaagau

SEQ ID NO: 1686112 - RNA, 19 nt, Homo sapiens
  misc_RNA (1)...(19): siRNA sense strand
caauggagauucccagagu

SEQ ID NO: 1686113 - RNA, 19 nt, Homo sapiens
  misc_RNA (1)...(19): siRNA sense strand
gaagaggaaacgugaugaa

SEQ ID NO: 1686114 - RNA, 19 nt, Homo sapiens
  misc_RNA (1)...(19): siRNA sense strand
gacagaacccgacuauguu

SEQ ID NO: 1686115 - RNA, 19 nt, Homo sapiens
  misc_RNA (1)...(19): siRNA sense strand
gagaagaggaaacgugaug

SEQ ID NO: 1686116 - RNA, 19 nt, Homo sapiens
  misc_RNA (1)...(19): siRNA sense strand
cagagcacaucaaaucaga

SEQ ID NO: 1686117 - RNA, 19 nt, Homo sapiens
  misc_RNA (1)...(19): siRNA sense strand
agagugguguggacaguuu

SEQ ID NO: 1686118 - RNA, 19 nt, Homo sapiens
  misc_RNA (1)...(19): siRNA sense strand
gagggcaucugugacaaug

SEQ ID NO: 1686119 - RNA, 19 nt, Homo sapiens
  misc_RNA (1)...(19): siRNA sense strand
caaagugguggacaagauu

SEQ ID NO: 1686120 - RNA, 19 nt, Homo sapiens
  misc_RNA (1)...(19): siRNA sense strand
cagcgucucuuccaucaac

SEQ ID NO: 1686121 - RNA, 19 nt, Homo sapiens
  misc_RNA (1)...(19): siRNA sense strand
gcacaucaaaucagaacag

SEQ ID NO: 1686122 - RNA, 19 nt, Homo sapiens
  misc_RNA (1)...(19): siRNA sense strand
ccuaugaccgccacuaguu

SEQ ID NO: 1686123 - RNA, 19 nt, Homo sapiens
  misc_RNA (1)...(19): siRNA sense strand
gggcaucugugacaaugac

SEQ ID NO: 1686124 - RNA, 19 nt, Homo sapiens
  misc_RNA (1)...(19): siRNA sense strand
ucucuuccaucaacagaau

SEQ ID NO: 1686125 - RNA, 19 nt, Homo sapiens
  misc_RNA (1)...(19): siRNA sense strand
ggauccuacuccaucaaug

SEQ ID NO: 1686126 - RNA, 19 nt, Homo sapiens
  misc_RNA (1)...(19): siRNA sense strand
gggaccacaucaagcuuca

SEQ ID NO: 1686127 - RNA, 19 nt, Homo sapiens
  misc_RNA (1)...(19): siRNA sense strand
cuaugaccgccacuaguua

SEQ ID NO: 1686128 - RNA, 19 nt, Homo sapiens
  misc_RNA (1)...(19): siRNA sense strand
ggcaucagagcacaucaaa

SEQ ID NO: 1686129 - RNA, 19 nt, Homo sapiens
  misc_RNA (1)...(19): siRNA sense strand
ccaauggugagaagaggaa

SEQ ID NO: 1686130 - RNA, 19 nt, Homo sapiens
  misc_RNA (1)...(19): siRNA sense strand
gagcacaucaaaucagaac

SEQ ID NO: 1686131 - RNA, 19 nt, Homo sapiens
  misc_RNA (1)...(19): siRNA sense strand
agaaucauccggaccaaag

SEQ ID NO: 1686132 - RNA, 19 nt, Homo sapiens
  misc_RNA (1)...(19): siRNA sense strand
acaacgaggcuuggagauu

SEQ ID NO: 1686133 - RNA, 19 nt, Homo sapiens
  misc_RNA (1)...(19): siRNA sense strand
uauguucgccugggagauu

SEQ ID NO: 1686134 - RNA, 19 nt, Homo sapiens
  misc_RNA (1)...(19): siRNA sense strand
ccagagugguguggacagu

SEQ ID NO: 1686135 - RNA, 19 nt, Homo sapiens
  misc_RNA (1)...(19): siRNA sense strand
cccagcgucucuuccauca

SEQ ID NO: 1686136 - RNA, 19 nt, Homo sapiens
  misc_RNA (1)...(19): siRNA sense strand
acaagauugcugaauacaa

SEQ ID NO: 1686137 - RNA, 19 nt, Homo sapiens
  misc_RNA (1)...(19): siRNA sense strand
gggauccuacuccaucaau

SEQ ID NO: 1686138 - RNA, 19 nt, Homo sapiens
  misc_RNA (1)...(19): siRNA sense strand
cagcuucggccuccacauc

SEQ ID NO: 1686139 - RNA, 19 nt, Homo sapiens
  misc_RNA (1)...(19): siRNA sense strand
ccacuggccagggaagcua

SEQ ID NO: 1686140 - RNA, 19 nt, Homo sapiens
  misc_RNA (1)...(19): siRNA sense strand
ucuuugagcguccuuccua

SEQ ID NO: 1686141 - RNA, 19 nt, Homo sapiens
  misc_RNA (1)...(19): siRNA sense strand
caagauugcugaauacaaa

SEQ ID NO: 1686142 - RNA, 19 nt, Homo sapiens
  misc_RNA (1)...(19): siRNA sense strand
gaagucaagucgagucuau

SEQ ID NO: 1686143 - RNA, 19 nt, Homo sapiens
  misc_RNA (1)...(19): siRNA sense strand
ggacaagauugcugaauac

SEQ ID NO: 1686144 - RNA, 19 nt, Homo sapiens
  misc_RNA (1)...(19): siRNA sense strand
caacgaggcuuggagauuc

SEQ ID NO: 1686145 - RNA, 19 nt, Homo sapiens
  misc_RNA (1)...(19): siRNA sense strand
cgacagaacccgacuaugu

SEQ ID NO: 1686146 - RNA, 19 nt, Homo sapiens
  misc_RNA (1)...(19): siRNA sense strand
uggacaagauugcugaaua

SEQ ID NO: 1686147 - RNA, 19 nt, Homo sapiens
  misc_RNA (1)...(19): siRNA sense strand
caucagagcacaucaaauc

SEQ ID NO: 1686148 - RNA, 19 nt, Homo sapiens
  misc_RNA (1)...(19): siRNA sense strand
acacagacauacccaguug

SEQ ID NO: 1686149 - RNA, 19 nt, Homo sapiens
  misc_RNA (1)...(19): siRNA sense strand
ccaaagugguggacaagau

SEQ ID NO: 1686150 - RNA, 19 nt, Homo sapiens
  misc_RNA (1)...(19): siRNA sense strand
caauggagauucccagagu

SEQ ID NO: 1686151 - RNA, 19 nt, Homo sapiens
  misc_RNA (1)...(19): siRNA sense strand
gaagaggaaacgugaugaa

SEQ ID NO: 1686152 - RNA, 19 nt, Homo sapiens
  misc_RNA (1)...(19): siRNA sense strand
gacagaacccgacuauguu

SEQ ID NO: 1686153 - RNA, 19 nt, Homo sapiens
  misc_RNA (1)...(19): siRNA sense strand
gagaagaggaaacgugaug

SEQ ID NO: 1686154 - RNA, 19 nt, Homo sapiens
  misc_RNA (1)...(19): siRNA sense strand
cagagcacaucaaaucaga

SEQ ID NO: 1686155 - RNA, 19 nt, Homo sapiens
  misc_RNA (1)...(19): siRNA sense strand
agagugguguggacaguuu

SEQ ID NO: 1686156 - RNA, 19 nt, Homo sapiens
  misc_RNA (1)...(19): siRNA sense strand
gagggcaucugugacaaug

SEQ ID NO: 1686157 - RNA, 19 nt, Homo sapiens
  misc_RNA (1)...(19): siRNA sense strand
caaagugguggacaagauu

SEQ ID NO: 1686158 - RNA, 19 nt, Homo sapiens
  misc_RNA (1)...(19): siRNA sense strand
cagcgucucuuccaucaac

SEQ ID NO: 1686159 - RNA, 19 nt, Homo sapiens
  misc_RNA (1)...(19): siRNA sense strand
gcacaucaaaucagaacag

SEQ ID NO: 1686160 - RNA, 19 nt, Homo sapiens
  misc_RNA (1)...(19): siRNA sense strand
ccuaugaccgccacuaguu

SEQ ID NO: 1686161 - RNA, 19 nt, Homo sapiens
  misc_RNA (1)...(19): siRNA sense strand
gggcaucugugacaaugac

SEQ ID NO: 1686162 - RNA, 19 nt, Homo sapiens
  misc_RNA (1)...(19): siRNA sense strand
ucucuuccaucaacagaau

SEQ ID NO: 1686163 - RNA, 19 nt, Homo sapiens
  misc_RNA (1)...(19): siRNA sense strand
ggauccuacuccaucaaug

SEQ ID NO: 1686164 - RNA, 19 nt, Homo sapiens
  misc_RNA (1)...(19): siRNA sense strand
gggaccacaucaagcuuca

SEQ ID NO: 1686165 - RNA, 19 nt, Homo sapiens
  misc_RNA (1)...(19): siRNA sense strand
cuaugaccgccacuaguua

SEQ ID NO: 1686166 - RNA, 19 nt, Homo sapiens
  misc_RNA (1)...(19): siRNA sense strand
ggcaucagagcacaucaaa

SEQ ID NO: 1686167 - RNA, 19 nt, Homo sapiens
  misc_RNA (1)...(19): siRNA sense strand
ccaauggugagaagaggaa

SEQ ID NO: 1686168 - RNA, 19 nt, Homo sapiens
  misc_RNA (1)...(19): siRNA sense strand
gagcacaucaaaucagaac

SEQ ID NO: 1686169 - RNA, 19 nt, Homo sapiens
  misc_RNA (1)...(19): siRNA sense strand
agaaucauccggaccaaag

SEQ ID NO: 1686170 - RNA, 19 nt, Homo sapiens
  misc_RNA (1)...(19): siRNA sense strand
acaacgaggcuuggagauu

SEQ ID NO: 1686171 - RNA, 19 nt, Homo sapiens
  misc_RNA (1)...(19): siRNA sense strand
uauguucgccugggagauu

SEQ ID NO: 1686172 - RNA, 19 nt, Homo sapiens
  misc_RNA (1)...(19): siRNA sense strand
ccagagugguguggacagu

SEQ ID NO: 1686173 - RNA, 19 nt, Homo sapiens
  misc_RNA (1)...(19): siRNA sense strand
cccagcgucucuuccauca

SEQ ID NO: 1686174 - RNA, 19 nt, Homo sapiens
  misc_RNA (1)...(19): siRNA sense strand
acaagauugcugaauacaa

SEQ ID NO: 1686175 - RNA, 19 nt, Homo sapiens
  misc_RNA (1)...(19): siRNA sense strand
gggauccuacuccaucaau

SEQ ID NO: 1686176 - RNA, 19 nt, Homo sapiens
  misc_RNA (1)...(19): siRNA sense strand
cagcuucggccuccacauc

SEQ ID NO: 1686177 - RNA, 19 nt, Homo sapiens
  misc_RNA (1)...(19): siRNA sense strand
ccacuggccagggaagcua

SEQ ID NO: 1686178 - RNA, 19 nt, Homo sapiens
  misc_RNA (1)...(19): siRNA sense strand
ucuuugagcguccuuccua

SEQ ID NO: 1686179 - RNA, 19 nt, Homo sapiens
  misc_RNA (1)...(19): siRNA sense strand
caagauugcugaauacaaa

SEQ ID NO: 1686180 - RNA, 19 nt, Homo sapiens
  misc_RNA (1)...(19): siRNA sense strand
gaagucaagucgagucuau

SEQ ID NO: 1686181 - RNA, 19 nt, Homo sapiens
  misc_RNA (1)...(19): siRNA sense strand
ggacaagauugcugaauac

SEQ ID NO: 1686182 - RNA, 19 nt, Homo sapiens
  misc_RNA (1)...(19): siRNA sense strand
caacgaggcuuggagauuc

SEQ ID NO: 1686183 - RNA, 19 nt, Homo sapiens
  misc_RNA (1)...(19): siRNA sense strand
cgacagaacccgacuaugu

SEQ ID NO: 1686184 - RNA, 19 nt, Homo sapiens
  misc_RNA (1)...(19): siRNA sense strand
uggacaagauugcugaaua

SEQ ID NO: 1686185 - RNA, 19 nt, Homo sapiens
  misc_RNA (1)...(19): siRNA sense strand
caucagagcacaucaaauc

SEQ ID NO: 1686186 - RNA, 19 nt, Homo sapiens
  misc_RNA (1)...(19): siRNA sense strand
acacagacauacccaguug

SEQ ID NO: 1686187 - RNA, 19 nt, Homo sapiens
  misc_RNA (1)...(19): siRNA sense strand
ccaaagugguggacaagau

SEQ ID NO: 1686188 - RNA, 19 nt, Homo sapiens
  misc_RNA (1)...(19): siRNA sense strand
caauggagauucccagagu

SEQ ID NO: 1686189 - RNA, 19 nt, Homo sapiens
  misc_RNA (1)...(19): siRNA sense strand
gaagaggaaacgugaugaa

SEQ ID NO: 1686190 - RNA, 19 nt, Homo sapiens
  misc_RNA (1)...(19): siRNA sense strand
gacagaacccgacuauguu

SEQ ID NO: 1686191 - RNA, 19 nt, Homo sapiens
  misc_RNA (1)...(19): siRNA sense strand
gagaagaggaaacgugaug

SEQ ID NO: 1686192 - RNA, 19 nt, Homo sapiens
  misc_RNA (1)...(19): siRNA sense strand
cagagcacaucaaaucaga

SEQ ID NO: 1686193 - RNA, 19 nt, Homo sapiens
  misc_RNA (1)...(19): siRNA sense strand
agagugguguggacaguuu

SEQ ID NO: 1686194 - RNA, 19 nt, Homo sapiens
  misc_RNA (1)...(19): siRNA sense strand
gagggcaucugugacaaug

SEQ ID NO: 1686195 - RNA, 19 nt, Homo sapiens
  misc_RNA (1)...(19): siRNA sense strand
caaagugguggacaagauu

SEQ ID NO: 1686196 - RNA, 19 nt, Homo sapiens
  misc_RNA (1)...(19): siRNA sense strand
cagcgucucuuccaucaac

SEQ ID NO: 1686197 - RNA, 19 nt, Homo sapiens
  misc_RNA (1)...(19): siRNA sense strand
gcacaucaaaucagaacag

SEQ ID NO: 1686198 - RNA, 19 nt, Homo sapiens
  misc_RNA (1)...(19): siRNA sense strand
gggcaucugugacaaugac

SEQ ID NO: 1686199 - RNA, 19 nt, Homo sapiens
  misc_RNA (1)...(19): siRNA sense strand
ucucuuccaucaacagaau

SEQ ID NO: 1686200 - RNA, 19 nt, Homo sapiens
  misc_RNA (1)...(19): siRNA sense strand
ggauccuacuccaucaaug

SEQ ID NO: 1686201 - RNA, 19 nt, Homo sapiens
  misc_RNA (1)...(19): siRNA sense strand
ggcaucagagcacaucaaa

SEQ ID NO: 1686202 - RNA, 19 nt, Homo sapiens
  misc_RNA (1)...(19): siRNA sense strand
ccaauggugagaagaggaa

SEQ ID NO: 1686203 - RNA, 19 nt, Homo sapiens
  misc_RNA (1)...(19): siRNA sense strand
gagcacaucaaaucagaac

SEQ ID NO: 1686204 - RNA, 19 nt, Homo sapiens
  misc_RNA (1)...(19): siRNA sense strand
agaaucauccggaccaaag

SEQ ID NO: 1686205 - RNA, 19 nt, Homo sapiens
  misc_RNA (1)...(19): siRNA sense strand
acaacgaggcuuggagauu

SEQ ID NO: 1686206 - RNA, 19 nt, Homo sapiens
  misc_RNA (1)...(19): siRNA sense strand
uauguucgccugggagauu

SEQ ID NO: 1686207 - RNA, 19 nt, Homo sapiens
  misc_RNA (1)...(19): siRNA sense strand
ccagagugguguggacagu

SEQ ID NO: 1686208 - RNA, 19 nt, Homo sapiens
  misc_RNA (1)...(19): siRNA sense strand
cccagcgucucuuccauca

SEQ ID NO: 1686209 - RNA, 19 nt, Homo sapiens
  misc_RNA (1)...(19): siRNA sense strand
acaagauugcugaauacaa

SEQ ID NO: 1686210 - RNA, 19 nt, Homo sapiens
  misc_RNA (1)...(19): siRNA sense strand
gggauccuacuccaucaau

SEQ ID NO: 1686211 - RNA, 19 nt, Homo sapiens
  misc_RNA (1)...(19): siRNA sense strand
ccacuggccagggaagcua

SEQ ID NO: 1686212 - RNA, 19 nt, Homo sapiens
  misc_RNA (1)...(19): siRNA sense strand
ucuuugagcguccuuccua

SEQ ID NO: 1686213 - RNA, 19 nt, Homo sapiens
  misc_RNA (1)...(19): siRNA sense strand
caagauugcugaauacaaa

SEQ ID NO: 1686214 - RNA, 19 nt, Homo sapiens
  misc_RNA (1)...(19): siRNA sense strand
gaagucaagucgagucuau

SEQ ID NO: 1686215 - RNA, 19 nt, Homo sapiens
  misc_RNA (1)...(19): siRNA sense strand
ggacaagauugcugaauac

SEQ ID NO: 1686216 - RNA, 19 nt, Homo sapiens
  misc_RNA (1)...(19): siRNA sense strand
caacgaggcuuggagauuc

SEQ ID NO: 1686217 - RNA, 19 nt, Homo sapiens
  misc_RNA (1)...(19): siRNA sense strand
cgacagaacccgacuaugu

SEQ ID NO: 1686218 - RNA, 19 nt, Homo sapiens
  misc_RNA (1)...(19): siRNA sense strand
uggacaagauugcugaaua

SEQ ID NO: 1686219 - RNA, 19 nt, Homo sapiens
  misc_RNA (1)...(19): siRNA sense strand
caucagagcacaucaaauc

SEQ ID NO: 1686220 - RNA, 19 nt, Homo sapiens
  misc_RNA (1)...(19): siRNA sense strand
acacagacauacccaguug

SEQ ID NO: 1686221 - RNA, 19 nt, Homo sapiens
  misc_RNA (1)...(19): siRNA sense strand
ccaaagugguggacaagau

SEQ ID NO: 1686222 - RNA, 19 nt, Homo sapiens
  misc_RNA (1)...(19): siRNA sense strand
caauggagauucccagagu

SEQ ID NO: 1686223 - RNA, 19 nt, Homo sapiens
  misc_RNA (1)...(19): siRNA sense strand
gaagaggaaacgugaugaa

SEQ ID NO: 1686224 - RNA, 19 nt, Homo sapiens
  misc_RNA (1)...(19): siRNA sense strand
gacagaacccgacuauguu

SEQ ID NO: 1686225 - RNA, 19 nt, Homo sapiens
  misc_RNA (1)...(19): siRNA sense strand
gagaagaggaaacgugaug

SEQ ID NO: 1686226 - RNA, 19 nt, Homo sapiens
  misc_RNA (1)...(19): siRNA sense strand
cagagcacaucaaaucaga

SEQ ID NO: 1686227 - RNA, 19 nt, Homo sapiens
  misc_RNA (1)...(19): siRNA sense strand
agagugguguggacaguuu

SEQ ID NO: 1686228 - RNA, 19 nt, Homo sapiens
  misc_RNA (1)...(19): siRNA sense strand
gagggcaucugugacaaug

SEQ ID NO: 1686229 - RNA, 19 nt, Homo sapiens
  misc_RNA (1)...(19): siRNA sense strand
caaagugguggacaagauu

SEQ ID NO: 1686230 - RNA, 19 nt, Homo sapiens
  misc_RNA (1)...(19): siRNA sense strand
cagcgucucuuccaucaac

SEQ ID NO: 1686231 - RNA, 19 nt, Homo sapiens
  misc_RNA (1)...(19): siRNA sense strand
gcacaucaaaucagaacag

SEQ ID NO: 1686232 - RNA, 19 nt, Homo sapiens
  misc_RNA (1)...(19): siRNA sense strand
gggcaucugugacaaugac

SEQ ID NO: 1686233 - RNA, 19 nt, Homo sapiens
  misc_RNA (1)...(19): siRNA sense strand
ucucuuccaucaacagaau

SEQ ID NO: 1686234 - RNA, 19 nt, Homo sapiens
  misc_RNA (1)...(19): siRNA sense strand
ggauccuacuccaucaaug

SEQ ID NO: 1686235 - RNA, 19 nt, Homo sapiens
  misc_RNA (1)...(19): siRNA sense strand
ggcaucagagcacaucaaa

SEQ ID NO: 1686236 - RNA, 19 nt, Homo sapiens
  misc_RNA (1)...(19): siRNA sense strand
ccaauggugagaagaggaa

SEQ ID NO: 1686237 - RNA, 19 nt, Homo sapiens
  misc_RNA (1)...(19): siRNA sense strand
gagcacaucaaaucagaac

SEQ ID NO: 1686238 - RNA, 19 nt, Homo sapiens
  misc_RNA (1)...(19): siRNA sense strand
agaaucauccggaccaaag

SEQ ID NO: 1686239 - RNA, 19 nt, Homo sapiens
  misc_RNA (1)...(19): siRNA sense strand
acaacgaggcuuggagauu

SEQ ID NO: 1686240 - RNA, 19 nt, Homo sapiens
  misc_RNA (1)...(19): siRNA sense strand
uauguucgccugggagauu

SEQ ID NO: 1686241 - RNA, 19 nt, Homo sapiens
  misc_RNA (1)...(19): siRNA sense strand
ccagagugguguggacagu

SEQ ID NO: 1686242 - RNA, 19 nt, Homo sapiens
  misc_RNA (1)...(19): siRNA sense strand
cccagcgucucuuccauca

SEQ ID NO: 1686243 - RNA, 19 nt, Homo sapiens
  misc_RNA (1)...(19): siRNA sense strand
acaagauugcugaauacaa

SEQ ID NO: 1686244 - RNA, 19 nt, Homo sapiens
  misc_RNA (1)...(19): siRNA sense strand
gggauccuacuccaucaau

SEQ ID NO: 1686245 - RNA, 19 nt, Homo sapiens
  misc_RNA (1)...(19): siRNA sense strand
ccacuggccagggaagcua

SEQ ID NO: 1686246 - RNA, 19 nt, Homo sapiens
  misc_RNA (1)...(19): siRNA sense strand
ucuuugagcguccuuccua

SEQ ID NO: 1686247 - RNA, 19 nt, Homo sapiens
  misc_RNA (1)...(19): siRNA sense strand
caagauugcugaauacaaa

SEQ ID NO: 1686248 - RNA, 19 nt, Homo sapiens
  misc_RNA (1)...(19): siRNA sense strand
gaagucaagucgagucuau

SEQ ID NO: 1686249 - RNA, 19 nt, Homo sapiens
  misc_RNA (1)...(19): siRNA sense strand
ggacaagauugcugaauac

SEQ ID NO: 1686250 - RNA, 19 nt, Homo sapiens
  misc_RNA (1)...(19): siRNA sense strand
caacgaggcuuggagauuc

SEQ ID NO: 1686251 - RNA, 19 nt, Homo sapiens
  misc_RNA (1)...(19): siRNA sense strand
cgacagaacccgacuaugu

SEQ ID NO: 1686252 - RNA, 19 nt, Homo sapiens
  misc_RNA (1)...(19): siRNA sense strand
uggacaagauugcugaaua

SEQ ID NO: 1686253 - RNA, 19 nt, Homo sapiens
  misc_RNA (1)...(19): siRNA sense strand
caucagagcacaucaaauc

SEQ ID NO: 1686254 - RNA, 19 nt, Homo sapiens
  misc_RNA (1)...(19): siRNA sense strand
acacagacauacccaguug

SEQ ID NO: 1686255 - RNA, 19 nt, Homo sapiens
  misc_RNA (1)...(19): siRNA sense strand
ccaaagugguggacaagau

SEQ ID NO: 1686256 - RNA, 19 nt, Homo sapiens
  misc_RNA (1)...(19): siRNA sense strand
caauggagauucccagagu

SEQ ID NO: 1686257 - RNA, 19 nt, Homo sapiens
  misc_RNA (1)...(19): siRNA sense strand
gaagaggaaacgugaugaa

SEQ ID NO: 1686258 - RNA, 19 nt, Homo sapiens
  misc_RNA (1)...(19): siRNA sense strand
gacagaacccgacuauguu

SEQ ID NO: 1686259 - RNA, 19 nt, Homo sapiens
  misc_RNA (1)...(19): siRNA sense strand
gagaagaggaaacgugaug

SEQ ID NO: 1686260 - RNA, 19 nt, Homo sapiens
  misc_RNA (1)...(19): siRNA sense strand
cagagcacaucaaaucaga

SEQ ID NO: 1686261 - RNA, 19 nt, Homo sapiens
  misc_RNA (1)...(19): siRNA sense strand
agagugguguggacaguuu

SEQ ID NO: 1686262 - RNA, 19 nt, Homo sapiens
  misc_RNA (1)...(19): siRNA sense strand
gagggcaucugugacaaug

SEQ ID NO: 1686263 - RNA, 19 nt, Homo sapiens
  misc_RNA (1)...(19): siRNA sense strand
caaagugguggacaagauu

SEQ ID NO: 1686264 - RNA, 19 nt, Homo sapiens
  misc_RNA (1)...(19): siRNA sense strand
cagcgucucuuccaucaac

SEQ ID NO: 1686265 - RNA, 19 nt, Homo sapiens
  misc_RNA (1)...(19): siRNA sense strand
gcacaucaaaucagaacag

SEQ ID NO: 1686266 - RNA, 19 nt, Homo sapiens
  misc_RNA (1)...(19): siRNA sense strand
gggcaucugugacaaugac

SEQ ID NO: 1686267 - RNA, 19 nt, Homo sapiens
  misc_RNA (1)...(19): siRNA sense strand
ucucuuccaucaacagaau

SEQ ID NO: 1686268 - RNA, 19 nt, Homo sapiens
  misc_RNA (1)...(19): siRNA sense strand
ggauccuacuccaucaaug

SEQ ID NO: 1686269 - RNA, 19 nt, Homo sapiens
  misc_RNA (1)...(19): siRNA sense strand
ggcaucagagcacaucaaa

SEQ ID NO: 1686270 - RNA, 19 nt, Homo sapiens
  misc_RNA (1)...(19): siRNA sense strand
ccaauggugagaagaggaa

SEQ ID NO: 1686271 - RNA, 19 nt, Homo sapiens
  misc_RNA (1)...(19): siRNA sense strand
gagcacaucaaaucagaac

SEQ ID NO: 1686272 - RNA, 19 nt, Homo sapiens
  misc_RNA (1)...(19): siRNA sense strand
agaaucauccggaccaaag

SEQ ID NO: 1686273 - RNA, 19 nt, Homo sapiens
  misc_RNA (1)...(19): siRNA sense strand
acaacgaggcuuggagauu

SEQ ID NO: 1686274 - RNA, 19 nt, Homo sapiens
  misc_RNA (1)...(19): siRNA sense strand
uauguucgccugggagauu

SEQ ID NO: 1686275 - RNA, 19 nt, Homo sapiens
  misc_RNA (1)...(19): siRNA sense strand
ccagagugguguggacagu

SEQ ID NO: 1686276 - RNA, 19 nt, Homo sapiens
  misc_RNA (1)...(19): siRNA sense strand
cccagcgucucuuccauca

SEQ ID NO: 1686277 - RNA, 19 nt, Homo sapiens
  misc_RNA (1)...(19): siRNA sense strand
acaagauugcugaauacaa

SEQ ID NO: 1686278 - RNA, 19 nt, Homo sapiens
  misc_RNA (1)...(19): siRNA sense strand
gggauccuacuccaucaau

SEQ ID NO: 1686279 - RNA, 19 nt, Homo sapiens
  misc_RNA (1)...(19): siRNA sense strand
ccacuggccagggaagcua

SEQ ID NO: 1686280 - RNA, 19 nt, Homo sapiens
  misc_RNA (1)...(19): siRNA sense strand
ucuuugagcguccuuccua

SEQ ID NO: 1686281 - RNA, 19 nt, Homo sapiens
  misc_RNA (1)...(19): siRNA sense strand
caagauugcugaauacaaa

SEQ ID NO: 1686282 - RNA, 19 nt, Homo sapiens
  misc_RNA (1)...(19): siRNA sense strand
gaagucaagucgagucuau

SEQ ID NO: 1686283 - RNA, 19 nt, Homo sapiens
  misc_RNA (1)...(19): siRNA sense strand
ggacaagauugcugaauac

SEQ ID NO: 1686284 - RNA, 19 nt, Homo sapiens
  misc_RNA (1)...(19): siRNA sense strand
caacgaggcuuggagauuc

SEQ ID NO: 1686285 - RNA, 19 nt, Homo sapiens
  misc_RNA (1)...(19): siRNA sense strand
cgacagaacccgacuaugu

SEQ ID NO: 1686286 - RNA, 19 nt, Homo sapiens
  misc_RNA (1)...(19): siRNA sense strand
uggacaagauugcugaaua

SEQ ID NO: 1686287 - RNA, 19 nt, Homo sapiens
  misc_RNA (1)...(19): siRNA sense strand
caucagagcacaucaaauc

SEQ ID NO: 1686288 - RNA, 19 nt, Homo sapiens
  misc_RNA (1)...(19): siRNA sense strand
acacagacauacccaguug

SEQ ID NO: 1686289 - RNA, 19 nt, Homo sapiens
  misc_RNA (1)...(19): siRNA sense strand
ccaaagugguggacaagau

SEQ ID NO: 1686290 - RNA, 19 nt, Homo sapiens
  misc_RNA (1)...(19): siRNA sense strand
caauggagauucccagagu

SEQ ID NO: 1686291 - RNA, 19 nt, Homo sapiens
  misc_RNA (1)...(19): siRNA sense strand
gaagaggaaacgugaugaa

SEQ ID NO: 1686292 - RNA, 19 nt, Homo sapiens
  misc_RNA (1)...(19): siRNA sense strand
gacagaacccgacuauguu

SEQ ID NO: 1686293 - RNA, 19 nt, Homo sapiens
  misc_RNA (1)...(19): siRNA sense strand
gagaagaggaaacgugaug

SEQ ID NO: 1686294 - RNA, 19 nt, Homo sapiens
  misc_RNA (1)...(19): siRNA sense strand
cagagcacaucaaaucaga

SEQ ID NO: 1686295 - RNA, 19 nt, Homo sapiens
  misc_RNA (1)...(19): siRNA sense strand
agagugguguggacaguuu

SEQ ID NO: 1686296 - RNA, 19 nt, Homo sapiens
  misc_RNA (1)...(19): siRNA sense strand
gagggcaucugugacaaug

SEQ ID NO: 1686297 - RNA, 19 nt, Homo sapiens
  misc_RNA (1)...(19): siRNA sense strand
caaagugguggacaagauu

SEQ ID NO: 1686298 - RNA, 19 nt, Homo sapiens
  misc_RNA (1)...(19): siRNA sense strand
cagcgucucuuccaucaac

SEQ ID NO: 1686299 - RNA, 19 nt, Homo sapiens
  misc_RNA (1)...(19): siRNA sense strand
gcacaucaaaucagaacag

SEQ ID NO: 1686300 - RNA, 19 nt, Homo sapiens
  misc_RNA (1)...(19): siRNA sense strand
ccuaugaccgccacuaguu

SEQ ID NO: 1686301 - RNA, 19 nt, Homo sapiens
  misc_RNA (1)...(19): siRNA sense strand
gggcaucugugacaaugac

SEQ ID NO: 1686302 - RNA, 19 nt, Homo sapiens
  misc_RNA (1)...(19): siRNA sense strand
ucucuuccaucaacagaau

SEQ ID NO: 1686303 - RNA, 19 nt, Homo sapiens
  misc_RNA (1)...(19): siRNA sense strand
ggauccuacuccaucaaug

SEQ ID NO: 1686304 - RNA, 19 nt, Homo sapiens
  misc_RNA (1)...(19): siRNA sense strand
gggaccacaucaagcuuca

SEQ ID NO: 1686305 - RNA, 19 nt, Homo sapiens
  misc_RNA (1)...(19): siRNA sense strand
cuaugaccgccacuaguua

SEQ ID NO: 1686306 - RNA, 19 nt, Homo sapiens
  misc_RNA (1)...(19): siRNA sense strand
ggcaucagagcacaucaaa

SEQ ID NO: 1686307 - RNA, 19 nt, Homo sapiens
  misc_RNA (1)...(19): siRNA sense strand
ccaauggugagaagaggaa

SEQ ID NO: 1686308 - RNA, 19 nt, Homo sapiens
  misc_RNA (1)...(19): siRNA sense strand
gagcacaucaaaucagaac

SEQ ID NO: 1686309 - RNA, 19 nt, Homo sapiens
  misc_RNA (1)...(19): siRNA sense strand
agaaucauccggaccaaag

SEQ ID NO: 1686310 - RNA, 19 nt, Homo sapiens
  misc_RNA (1)...(19): siRNA sense strand
acaacgaggcuuggagauu

SEQ ID NO: 1686311 - RNA, 19 nt, Homo sapiens
  misc_RNA (1)...(19): siRNA sense strand
uauguucgccugggagauu

SEQ ID NO: 1686312 - RNA, 19 nt, Homo sapiens
  misc_RNA (1)...(19): siRNA sense strand
ccagagugguguggacagu

SEQ ID NO: 1686313 - RNA, 19 nt, Homo sapiens
  misc_RNA (1)...(19): siRNA sense strand
cccagcgucucuuccauca

SEQ ID NO: 1686314 - RNA, 19 nt, Homo sapiens
  misc_RNA (1)...(19): siRNA sense strand
acaagauugcugaauacaa

SEQ ID NO: 1686315 - RNA, 19 nt, Homo sapiens
  misc_RNA (1)...(19): siRNA sense strand
gggauccuacuccaucaau

SEQ ID NO: 1686316 - RNA, 19 nt, Homo sapiens
  misc_RNA (1)...(19): siRNA sense strand
cagcuucggccuccacauc

SEQ ID NO: 1686317 - RNA, 19 nt, Homo sapiens
  misc_RNA (1)...(19): siRNA sense strand
ccacuggccagggaagcua

SEQ ID NO: 1686318 - RNA, 19 nt, Homo sapiens
  misc_RNA (1)...(19): siRNA sense strand
ucuuugagcguccuuccua

SEQ ID NO: 1686319 - RNA, 19 nt, Homo sapiens
  misc_RNA (1)...(19): siRNA sense strand
caagauugcugaauacaaa

SEQ ID NO: 1686320 - RNA, 19 nt, Homo sapiens
  misc_RNA (1)...(19): siRNA sense strand
gaagucaagucgagucuau

SEQ ID NO: 1686321 - RNA, 19 nt, Homo sapiens
  misc_RNA (1)...(19): siRNA sense strand
ggacaagauugcugaauac

SEQ ID NO: 1686322 - RNA, 19 nt, Homo sapiens
  misc_RNA (1)...(19): siRNA sense strand
caacgaggcuuggagauuc

SEQ ID NO: 1686323 - RNA, 19 nt, Homo sapiens
  misc_RNA (1)...(19): siRNA sense strand
cgacagaacccgacuaugu

SEQ ID NO: 1686324 - RNA, 19 nt, Homo sapiens
  misc_RNA (1)...(19): siRNA sense strand
uggacaagauugcugaaua

SEQ ID NO: 1686325 - RNA, 19 nt, Homo sapiens
  misc_RNA (1)...(19): siRNA sense strand
caucagagcacaucaaauc

SEQ ID NO: 1686326 - RNA, 19 nt, Homo sapiens
  misc_RNA (1)...(19): siRNA sense strand
acacagacauacccaguug

SEQ ID NO: 1686327 - RNA, 19 nt, Homo sapiens
  misc_RNA (1)...(19): siRNA sense strand
ccaaagugguggacaagau

SEQ ID NO: 1686328 - RNA, 19 nt, Homo sapiens
  misc_RNA (1)...(19): siRNA sense strand
caauggagauucccagagu

SEQ ID NO: 1686329 - RNA, 19 nt, Homo sapiens
  misc_RNA (1)...(19): siRNA sense strand
gaagaggaaacgugaugaa

SEQ ID NO: 1686330 - RNA, 19 nt, Homo sapiens
  misc_RNA (1)...(19): siRNA sense strand
gacagaacccgacuauguu

SEQ ID NO: 1686331 - RNA, 19 nt, Homo sapiens
  misc_RNA (1)...(19): siRNA sense strand
gagaagaggaaacgugaug

SEQ ID NO: 1686332 - RNA, 19 nt, Homo sapiens
  misc_RNA (1)...(19): siRNA sense strand
cagagcacaucaaaucaga

SEQ ID NO: 1686333 - RNA, 19 nt, Homo sapiens
  misc_RNA (1)...(19): siRNA sense strand
agagugguguggacaguuu

SEQ ID NO: 1686334 - RNA, 19 nt, Homo sapiens
  misc_RNA (1)...(19): siRNA sense strand
gagggcaucugugacaaug

SEQ ID NO: 1686335 - RNA, 19 nt, Homo sapiens
  misc_RNA (1)...(19): siRNA sense strand
caaagugguggacaagauu

SEQ ID NO: 1686336 - RNA, 19 nt, Homo sapiens
  misc_RNA (1)...(19): siRNA sense strand
cagcgucucuuccaucaac

SEQ ID NO: 1686337 - RNA, 19 nt, Homo sapiens
  misc_RNA (1)...(19): siRNA sense strand
gcacaucaaaucagaacag

SEQ ID NO: 1686338 - RNA, 19 nt, Homo sapiens
  misc_RNA (1)...(19): siRNA sense strand
ccuaugaccgccacuaguu

SEQ ID NO: 1686339 - RNA, 19 nt, Homo sapiens
  misc_RNA (1)...(19): siRNA sense strand
gggcaucugugacaaugac

SEQ ID NO: 1686340 - RNA, 19 nt, Homo sapiens
  misc_RNA (1)...(19): siRNA sense strand
ucucuuccaucaacagaau

SEQ ID NO: 1686341 - RNA, 19 nt, Homo sapiens
  misc_RNA (1)...(19): siRNA sense strand
ggauccuacuccaucaaug

SEQ ID NO: 1686342 - RNA, 19 nt, Homo sapiens
  misc_RNA (1)...(19): siRNA sense strand
gggaccacaucaagcuuca

SEQ ID NO: 1686343 - RNA, 19 nt, Homo sapiens
  misc_RNA (1)...(19): siRNA sense strand
cuaugaccgccacuaguua

SEQ ID NO: 1686344 - RNA, 19 nt, Homo sapiens
  misc_RNA (1)...(19): siRNA sense strand
ggcaucagagcacaucaaa

SEQ ID NO: 1686345 - RNA, 19 nt, Homo sapiens
  misc_RNA (1)...(19): siRNA sense strand
ccaauggugagaagaggaa

SEQ ID NO: 1686346 - RNA, 19 nt, Homo sapiens
  misc_RNA (1)...(19): siRNA sense strand
gagcacaucaaaucagaac

SEQ ID NO: 1686347 - RNA, 19 nt, Homo sapiens
  misc_RNA (1)...(19): siRNA sense strand
agaaucauccggaccaaag

SEQ ID NO: 1686348 - RNA, 19 nt, Homo sapiens
  misc_RNA (1)...(19): siRNA sense strand
acaacgaggcuuggagauu

SEQ ID NO: 1686349 - RNA, 19 nt, Homo sapiens
  misc_RNA (1)...(19): siRNA sense strand
uauguucgccugggagauu

SEQ ID NO: 1686350 - RNA, 19 nt, Homo sapiens
  misc_RNA (1)...(19): siRNA sense strand
ccagagugguguggacagu

SEQ ID NO: 1686351 - RNA, 19 nt, Homo sapiens
  misc_RNA (1)...(19): siRNA sense strand
cccagcgucucuuccauca

SEQ ID NO: 1686352 - RNA, 19 nt, Homo sapiens
  misc_RNA (1)...(19): siRNA sense strand
acaagauugcugaauacaa

SEQ ID NO: 1686353 - RNA, 19 nt, Homo sapiens
  misc_RNA (1)...(19): siRNA sense strand
gggauccuacuccaucaau

SEQ ID NO: 1686354 - RNA, 19 nt, Homo sapiens
  misc_RNA (1)...(19): siRNA sense strand
cagcuucggccuccacauc

SEQ ID NO: 1686355 - RNA, 19 nt, Homo sapiens
  misc_RNA (1)...(19): siRNA sense strand
ccacuggccagggaagcua

SEQ ID NO: 1686356 - RNA, 19 nt, Homo sapiens
  misc_RNA (1)...(19): siRNA sense strand
ucuuugagcguccuuccua

SEQ ID NO: 1686357 - RNA, 19 nt, Homo sapiens
  misc_RNA (1)...(19): siRNA sense strand
gcacaacccuggcaauuug

SEQ ID NO: 1686358 - RNA, 19 nt, Homo sapiens
  misc_RNA (1)...(19): siRNA sense strand
gaaacugccuuaacuugaa

SEQ ID NO: 1686359 - RNA, 19 nt, Homo sapiens
  misc_RNA (1)...(19): siRNA sense strand
ggaauaagaagaacuguuu

SEQ ID NO: 1686360 - RNA, 19 nt, Homo sapiens
  misc_RNA (1)...(19): siRNA sense strand
gcaagaaacugccuuaacu

SEQ ID NO: 1686361 - RNA, 19 nt, Homo sapiens
  misc_RNA (1)...(19): siRNA sense strand
ugacagguaugaaagguua

SEQ ID NO: 1686362 - RNA, 19 nt, Homo sapiens
  misc_RNA (1)...(19): siRNA sense strand
gaaccugaaugccuacuug

SEQ ID NO: 1686363 - RNA, 19 nt, Homo sapiens
  misc_RNA (1)...(19): siRNA sense strand
caaguugucccucacauua

SEQ ID NO: 1686364 - RNA, 19 nt, Homo sapiens
  misc_RNA (1)...(19): siRNA sense strand
gaagauauaucagcaugug

SEQ ID NO: 1686365 - RNA, 19 nt, Homo sapiens
  misc_RNA (1)...(19): siRNA sense strand
gaaauauggcugacaggua

SEQ ID NO: 1686366 - RNA, 19 nt, Homo sapiens
  misc_RNA (1)...(19): siRNA sense strand
ugauagaguuugcaagaaa

SEQ ID NO: 1686367 - RNA, 19 nt, Homo sapiens
  misc_RNA (1)...(19): siRNA sense strand
gaagaaagacacagacauc

SEQ ID NO: 1686368 - RNA, 19 nt, Homo sapiens
  misc_RNA (1)...(19): siRNA sense strand
gaaacuuuauggugauguu

SEQ ID NO: 1686369 - RNA, 19 nt, Homo sapiens
  misc_RNA (1)...(19): siRNA sense strand
aaauauggcugacagguau

SEQ ID NO: 1686370 - RNA, 19 nt, Homo sapiens
  misc_RNA (1)...(19): siRNA sense strand
cgaggacccugugaaauuu

SEQ ID NO: 1686371 - RNA, 19 nt, Homo sapiens
  misc_RNA (1)...(19): siRNA sense strand
guacauagacuccauugau

SEQ ID NO: 1686372 - RNA, 19 nt, Homo sapiens
  misc_RNA (1)...(19): siRNA sense strand
ucauugaacuggcaaauca

SEQ ID NO: 1686373 - RNA, 19 nt, Homo sapiens
  misc_RNA (1)...(19): siRNA sense strand
ccacagaguuuaggccaaa

SEQ ID NO: 1686374 - RNA, 19 nt, Homo sapiens
  misc_RNA (1)...(19): siRNA sense strand
ccaguuccauccugaguuu

SEQ ID NO: 1686375 - RNA, 19 nt, Homo sapiens
  misc_RNA (1)...(19): siRNA sense strand
guggagaaguugauuuaga

SEQ ID NO: 1686376 - RNA, 19 nt, Homo sapiens
  misc_RNA (1)...(19): siRNA sense strand
augcaaagcugaugguauu

SEQ ID NO: 1686377 - RNA, 19 nt, Homo sapiens
  misc_RNA (1)...(19): siRNA sense strand
acaaugagacugggaauaa

SEQ ID NO: 1686378 - RNA, 19 nt, Homo sapiens
  misc_RNA (1)...(19): siRNA sense strand
gguaaacccuaaccugauc

SEQ ID NO: 1686379 - RNA, 19 nt, Homo sapiens
  misc_RNA (1)...(19): siRNA sense strand
gcucagugcuaccggagaa

SEQ ID NO: 1686380 - RNA, 19 nt, Homo sapiens
  misc_RNA (1)...(19): siRNA sense strand
agacaucgguucgagguaa

SEQ ID NO: 1686381 - RNA, 19 nt, Homo sapiens
  misc_RNA (1)...(19): siRNA sense strand
gaacaggucauauguaucc

SEQ ID NO: 1686382 - RNA, 19 nt, Homo sapiens
  misc_RNA (1)...(19): siRNA sense strand
cugaacaggucauauguau

SEQ ID NO: 1686383 - RNA, 19 nt, Homo sapiens
  misc_RNA (1)...(19): siRNA sense strand
aaggauagcugaguuggaa

SEQ ID NO: 1686384 - RNA, 19 nt, Homo sapiens
  misc_RNA (1)...(19): siRNA sense strand
gagcacaacccuggcaauu

SEQ ID NO: 1686385 - RNA, 19 nt, Homo sapiens
  misc_RNA (1)...(19): siRNA sense strand
ggauggaaaucauugaacu

SEQ ID NO: 1686386 - RNA, 19 nt, Homo sapiens
  misc_RNA (1)...(19): siRNA sense strand
cagaaugacuuaaguuuug

SEQ ID NO: 1686387 - RNA, 19 nt, Homo sapiens
  misc_RNA (1)...(19): siRNA sense strand
ccgaggacccugugaaauu

SEQ ID NO: 1686388 - RNA, 19 nt, Homo sapiens
  misc_RNA (1)...(19): siRNA sense strand
caaagcugaugguauucuu

SEQ ID NO: 1686389 - RNA, 19 nt, Homo sapiens
  misc_RNA (1)...(19): siRNA sense strand
gaucauugccagcagcauu

SEQ ID NO: 1686390 - RNA, 19 nt, Homo sapiens
  misc_RNA (1)...(19): siRNA sense strand
ugccuuaacuugaaagaug

SEQ ID NO: 1686391 - RNA, 19 nt, Homo sapiens
  misc_RNA (1)...(19): siRNA sense strand
aaacugccuuaacuugaaa

SEQ ID NO: 1686392 - RNA, 19 nt, Homo sapiens
  misc_RNA (1)...(19): siRNA sense strand
ccuuggaaauuaugaaaga

SEQ ID NO: 1686393 - RNA, 19 nt, Homo sapiens
  misc_RNA (1)...(19): siRNA sense strand
gcaaggacaaagaagauuc

SEQ ID NO: 1686394 - RNA, 19 nt, Homo sapiens
  misc_RNA (1)...(19): siRNA sense strand
gcaaguugucccucacauu

SEQ ID NO: 1686395 - RNA, 19 nt, Homo sapiens
  misc_RNA (1)...(19): siRNA sense strand
cagcagcauuggaacgauu

SEQ ID NO: 1686396 - RNA, 19 nt, Homo sapiens
  misc_RNA (1)...(19): siRNA sense strand
gagacaggauggaaaucau

SEQ ID NO: 1686397 - RNA, 19 nt, Homo sapiens
  misc_RNA (1)...(19): siRNA sense strand
gagcagaaugacuuaaguu

SEQ ID NO: 1686398 - RNA, 19 nt, Homo sapiens
  misc_RNA (1)...(19): siRNA sense strand
ugaaucugauguacauaga

SEQ ID NO: 1686399 - RNA, 19 nt, Homo sapiens
  misc_RNA (1)...(19): siRNA sense strand
aaccacaaguugaaucuga

SEQ ID NO: 1686400 - RNA, 19 nt, Homo sapiens
  misc_RNA (1)...(19): siRNA sense strand
cugauugucugccgaaguu

SEQ ID NO: 1686401 - RNA, 19 nt, Homo sapiens
  misc_RNA (1)...(19): siRNA sense strand
uagcugaguuggaaauaag

SEQ ID NO: 1686402 - RNA, 19 nt, Homo sapiens
  misc_RNA (1)...(19): siRNA sense strand
aaagagaggcguggugauu

SEQ ID NO: 1686403 - RNA, 19 nt, Homo sapiens
  misc_RNA (1)...(19): siRNA sense strand
ggagacaggauggaaauca

SEQ ID NO: 1686404 - RNA, 19 nt, Homo sapiens
  misc_RNA (1)...(19): siRNA sense strand
caagaaacugccuuaacuu

SEQ ID NO: 1686405 - RNA, 19 nt, Homo sapiens
  misc_RNA (1)...(19): siRNA sense strand
ggaaucagaggaacauugg

SEQ ID NO: 1686406 - RNA, 19 nt, Homo sapiens
  misc_RNA (1)...(19): siRNA sense strand
gguaugaaagguuacagaa

SEQ ID NO: 1686407 - RNA, 19 nt, Homo sapiens
  misc_RNA (1)...(19): siRNA sense strand
aaaugaugguggagaaguu

SEQ ID NO: 1686408 - RNA, 19 nt, Homo sapiens
  misc_RNA (1)...(19): siRNA sense strand
aggaguggguuaugaauca

SEQ ID NO: 1686409 - RNA, 19 nt, Homo sapiens
  misc_RNA (1)...(19): siRNA sense strand
aaaaucgaccccuauauua

SEQ ID NO: 1686410 - RNA, 19 nt, Homo sapiens
  misc_RNA (1)...(19): siRNA sense strand
ggaaaacagugcaaguugu

SEQ ID NO: 1686411 - RNA, 19 nt, Homo sapiens
  misc_RNA (1)...(19): siRNA sense strand
agaaguugauuuagaccuu

SEQ ID NO: 1686412 - RNA, 19 nt, Homo sapiens
  misc_RNA (1)...(19): siRNA sense strand
gagcugggaggcaccauug

SEQ ID NO: 1686413 - RNA, 19 nt, Homo sapiens
  misc_RNA (1)...(19): siRNA sense strand
gacaucgguucgagguaaa

SEQ ID NO: 1686414 - RNA, 19 nt, Homo sapiens
  misc_RNA (1)...(19): siRNA sense strand
gugauagaguuugcaagaa

SEQ ID NO: 1686415 - RNA, 19 nt, Homo sapiens
  misc_RNA (1)...(19): siRNA sense strand
guaugaaagguuacagaaa

SEQ ID NO: 1686416 - RNA, 19 nt, Homo sapiens
  misc_RNA (1)...(19): siRNA sense strand
ggaggcguuuagacaauuc

SEQ ID NO: 1686417 - RNA, 19 nt, Homo sapiens
  misc_RNA (1)...(19): siRNA sense strand
agugauagauacagugaug

SEQ ID NO: 1686418 - RNA, 19 nt, Homo sapiens
  misc_RNA (1)...(19): siRNA sense strand
gaacaaugagacugggaau

SEQ ID NO: 1686419 - RNA, 19 nt, Homo sapiens
  misc_RNA (1)...(19): siRNA sense strand
gcauuggaacgauucuaaa

SEQ ID NO: 1686420 - RNA, 19 nt, Homo sapiens
  misc_RNA (1)...(19): siRNA sense strand
cuuaaaugaugguggagaa

SEQ ID NO: 1686421 - RNA, 19 nt, Homo sapiens
  misc_RNA (1)...(19): siRNA sense strand
gcaacuagcagugauagag

SEQ ID NO: 1686422 - RNA, 19 nt, Homo sapiens
  misc_RNA (1)...(19): siRNA sense strand
uacauagacuccauugauc

SEQ ID NO: 1686423 - RNA, 19 nt, Homo sapiens
  misc_RNA (1)...(19): siRNA sense strand
cuacgccucuguguucaaa

SEQ ID NO: 1686424 - RNA, 19 nt, Homo sapiens
  misc_RNA (1)...(19): siRNA sense strand
gaccuuggaaauuaugaaa

SEQ ID NO: 1686425 - RNA, 19 nt, Homo sapiens
  misc_RNA (1)...(19): siRNA sense strand
ccuggaggcuuuggaauca

SEQ ID NO: 1686426 - RNA, 19 nt, Homo sapiens
  misc_RNA (1)...(19): siRNA sense strand
caaguugaaucugauguac

SEQ ID NO: 1686427 - RNA, 19 nt, Homo sapiens
  misc_RNA (1)...(19): siRNA sense strand
guggaggcguuuagacaau

SEQ ID NO: 1686428 - RNA, 19 nt, Homo sapiens
  misc_RNA (1)...(19): siRNA sense strand
guccaggaguggguuauga

SEQ ID NO: 1686429 - RNA, 19 nt, Homo sapiens
  misc_RNA (1)...(19): siRNA sense strand
gaacuggcaaaucauccuu

SEQ ID NO: 1686430 - RNA, 19 nt, Homo sapiens
  misc_RNA (1)...(19): siRNA sense strand
gauggagacaggauggaaa

SEQ ID NO: 1686431 - RNA, 19 nt, Homo sapiens
  misc_RNA (1)...(19): siRNA sense strand
cuaaccugaucaaacaauu

SEQ ID NO: 1686432 - RNA, 19 nt, Homo sapiens
  misc_RNA (1)...(19): siRNA sense strand
acccuaaccugaucaaaca

SEQ ID NO: 1686433 - RNA, 19 nt, Homo sapiens
  misc_RNA (1)...(19): siRNA sense strand
agacugggaauaagaagaa

SEQ ID NO: 1686434 - RNA, 19 nt, Homo sapiens
  misc_RNA (1)...(19): siRNA sense strand
agaaacugccuuaacuuga

SEQ ID NO: 1686435 - RNA, 19 nt, Homo sapiens
  misc_RNA (1)...(19): siRNA sense strand
ggaugcaacuagcagugau

SEQ ID NO: 1686436 - RNA, 19 nt, Homo sapiens
  misc_RNA (1)...(19): siRNA sense strand
gggcaaggacaaagaagau

SEQ ID NO: 1686437 - RNA, 19 nt, Homo sapiens
  misc_RNA (1)...(19): siRNA sense strand
ucaugaagcuuggcagaag

SEQ ID NO: 1686438 - RNA, 19 nt, Homo sapiens
  misc_RNA (1)...(19): siRNA sense strand
uaaggaagagccccaaaua

SEQ ID NO: 1686439 - RNA, 19 nt, Homo sapiens
  misc_RNA (1)...(19): siRNA sense strand
aagagaggcguggugauua

SEQ ID NO: 1686440 - RNA, 19 nt, Homo sapiens
  misc_RNA (1)...(19): siRNA sense strand
gauagcugaguuggaaaua

SEQ ID NO: 1686441 - RNA, 19 nt, Homo sapiens
  misc_RNA (1)...(19): siRNA sense strand
caguuccucuggugauuga

SEQ ID NO: 1686442 - RNA, 19 nt, Homo sapiens
  misc_RNA (1)...(19): siRNA sense strand
gaugcaacuagcagugaua

SEQ ID NO: 1686443 - RNA, 19 nt, Homo sapiens
  misc_RNA (1)...(19): siRNA sense strand
uggagaagaucacugaaac

SEQ ID NO: 1686444 - RNA, 19 nt, Homo sapiens
  misc_RNA (1)...(19): siRNA sense strand
caaauacaccaagcucaga

SEQ ID NO: 1686445 - RNA, 19 nt, Homo sapiens
  misc_RNA (1)...(19): siRNA sense strand
guuuagacaauuccaguuu

SEQ ID NO: 1686446 - RNA, 19 nt, Homo sapiens
  misc_RNA (1)...(19): siRNA sense strand
gguggaugguaauaaggaa

SEQ ID NO: 1686447 - RNA, 19 nt, Homo sapiens
  misc_RNA (1)...(19): siRNA sense strand
ggaguggguuaugaaucaa

SEQ ID NO: 1686448 - RNA, 19 nt, Homo sapiens
  misc_RNA (1)...(19): siRNA sense strand
caaugagacugggaauaag

SEQ ID NO: 1686449 - RNA, 19 nt, Homo sapiens
  misc_RNA (1)...(19): siRNA sense strand
aagaaacugccuuaacuug

SEQ ID NO: 1686450 - RNA, 19 nt, Homo sapiens
  misc_RNA (1)...(19): siRNA sense strand
ucgaaggaaugccguuugu

SEQ ID NO: 1686451 - RNA, 19 nt, Homo sapiens
  misc_RNA (1)...(19): siRNA sense strand
gcagaaugacuuaaguuuu

SEQ ID NO: 1686452 - RNA, 19 nt, Homo sapiens
  misc_RNA (1)...(19): siRNA sense strand
gacaggauggaaaucauug

SEQ ID NO: 1686453 - RNA, 19 nt, Homo sapiens
  misc_RNA (1)...(19): siRNA sense strand
ugguggagaaguugauuua

SEQ ID NO: 1686454 - RNA, 19 nt, Homo sapiens
  misc_RNA (1)...(19): siRNA sense strand
ugccagugaugacagcuuu

SEQ ID NO: 1686455 - RNA, 19 nt, Homo sapiens
  misc_RNA (1)...(19): siRNA sense strand
ugagcagaaugacuuaagu

SEQ ID NO: 1686456 - RNA, 19 nt, Homo sapiens
  misc_RNA (1)...(19): siRNA sense strand
gcagugauagaguuugcaa

SEQ ID NO: 1686457 - RNA, 19 nt, Homo sapiens
  misc_RNA (1)...(19): siRNA sense strand
gcacaacccuggcaauuug

SEQ ID NO: 1686458 - RNA, 19 nt, Homo sapiens
  misc_RNA (1)...(19): siRNA sense strand
gaaacugccuuaacuugaa

SEQ ID NO: 1686459 - RNA, 19 nt, Homo sapiens
  misc_RNA (1)...(19): siRNA sense strand
ggaauaagaagaacuguuu

SEQ ID NO: 1686460 - RNA, 19 nt, Homo sapiens
  misc_RNA (1)...(19): siRNA sense strand
gcaagaaacugccuuaacu

SEQ ID NO: 1686461 - RNA, 19 nt, Homo sapiens
  misc_RNA (1)...(19): siRNA sense strand
ugacagguaugaaagguua

SEQ ID NO: 1686462 - RNA, 19 nt, Homo sapiens
  misc_RNA (1)...(19): siRNA sense strand
gaaccugaaugccuacuug

SEQ ID NO: 1686463 - RNA, 19 nt, Homo sapiens
  misc_RNA (1)...(19): siRNA sense strand
caaguugucccucacauua

SEQ ID NO: 1686464 - RNA, 19 nt, Homo sapiens
  misc_RNA (1)...(19): siRNA sense strand
gaagauauaucagcaugug

SEQ ID NO: 1686465 - RNA, 19 nt, Homo sapiens
  misc_RNA (1)...(19): siRNA sense strand
gaaauauggcugacaggua

SEQ ID NO: 1686466 - RNA, 19 nt, Homo sapiens
  misc_RNA (1)...(19): siRNA sense strand
ugauagaguuugcaagaaa

SEQ ID NO: 1686467 - RNA, 19 nt, Homo sapiens
  misc_RNA (1)...(19): siRNA sense strand
gaagaaagacacagacauc

SEQ ID NO: 1686468 - RNA, 19 nt, Homo sapiens
  misc_RNA (1)...(19): siRNA sense strand
gaaacuuuauggugauguu

SEQ ID NO: 1686469 - RNA, 19 nt, Homo sapiens
  misc_RNA (1)...(19): siRNA sense strand
aaauauggcugacagguau

SEQ ID NO: 1686470 - RNA, 19 nt, Homo sapiens
  misc_RNA (1)...(19): siRNA sense strand
cgaggacccugugaaauuu

SEQ ID NO: 1686471 - RNA, 19 nt, Homo sapiens
  misc_RNA (1)...(19): siRNA sense strand
guacauagacuccauugau

SEQ ID NO: 1686472 - RNA, 19 nt, Homo sapiens
  misc_RNA (1)...(19): siRNA sense strand
ucauugaacuggcaaauca

SEQ ID NO: 1686473 - RNA, 19 nt, Homo sapiens
  misc_RNA (1)...(19): siRNA sense strand
ccacagaguuuaggccaaa

SEQ ID NO: 1686474 - RNA, 19 nt, Homo sapiens
  misc_RNA (1)...(19): siRNA sense strand
ccaguuccauccugaguuu

SEQ ID NO: 1686475 - RNA, 19 nt, Homo sapiens
  misc_RNA (1)...(19): siRNA sense strand
guggagaaguugauuuaga

SEQ ID NO: 1686476 - RNA, 19 nt, Homo sapiens
  misc_RNA (1)...(19): siRNA sense strand
augcaaagcugaugguauu

SEQ ID NO: 1686477 - RNA, 19 nt, Homo sapiens
  misc_RNA (1)...(19): siRNA sense strand
acaaugagacugggaauaa

SEQ ID NO: 1686478 - RNA, 19 nt, Homo sapiens
  misc_RNA (1)...(19): siRNA sense strand
gguaaacccuaaccugauc

SEQ ID NO: 1686479 - RNA, 19 nt, Homo sapiens
  misc_RNA (1)...(19): siRNA sense strand
gcucagugcuaccggagaa

SEQ ID NO: 1686480 - RNA, 19 nt, Homo sapiens
  misc_RNA (1)...(19): siRNA sense strand
agacaucgguucgagguaa

SEQ ID NO: 1686481 - RNA, 19 nt, Homo sapiens
  misc_RNA (1)...(19): siRNA sense strand
gaacaggucauauguaucc

SEQ ID NO: 1686482 - RNA, 19 nt, Homo sapiens
  misc_RNA (1)...(19): siRNA sense strand
cugaacaggucauauguau

SEQ ID NO: 1686483 - RNA, 19 nt, Homo sapiens
  misc_RNA (1)...(19): siRNA sense strand
aaggauagcugaguuggaa

SEQ ID NO: 1686484 - RNA, 19 nt, Homo sapiens
  misc_RNA (1)...(19): siRNA sense strand
gagcacaacccuggcaauu

SEQ ID NO: 1686485 - RNA, 19 nt, Homo sapiens
  misc_RNA (1)...(19): siRNA sense strand
ggauggaaaucauugaacu

SEQ ID NO: 1686486 - RNA, 19 nt, Homo sapiens
  misc_RNA (1)...(19): siRNA sense strand
cagaaugacuuaaguuuug

SEQ ID NO: 1686487 - RNA, 19 nt, Homo sapiens
  misc_RNA (1)...(19): siRNA sense strand
ccgaggacccugugaaauu

SEQ ID NO: 1686488 - RNA, 19 nt, Homo sapiens
  misc_RNA (1)...(19): siRNA sense strand
caaagcugaugguauucuu

SEQ ID NO: 1686489 - RNA, 19 nt, Homo sapiens
  misc_RNA (1)...(19): siRNA sense strand
gaucauugccagcagcauu

SEQ ID NO: 1686490 - RNA, 19 nt, Homo sapiens
  misc_RNA (1)...(19): siRNA sense strand
ugccuuaacuugaaagaug

SEQ ID NO: 1686491 - RNA, 19 nt, Homo sapiens
  misc_RNA (1)...(19): siRNA sense strand
aaacugccuuaacuugaaa

SEQ ID NO: 1686492 - RNA, 19 nt, Homo sapiens
  misc_RNA (1)...(19): siRNA sense strand
ccuuggaaauuaugaaaga

SEQ ID NO: 1686493 - RNA, 19 nt, Homo sapiens
  misc_RNA (1)...(19): siRNA sense strand
gcaaggacaaagaagauuc

SEQ ID NO: 1686494 - RNA, 19 nt, Homo sapiens
  misc_RNA (1)...(19): siRNA sense strand
gcaaguugucccucacauu

SEQ ID NO: 1686495 - RNA, 19 nt, Homo sapiens
  misc_RNA (1)...(19): siRNA sense strand
cagcagcauuggaacgauu

SEQ ID NO: 1686496 - RNA, 19 nt, Homo sapiens
  misc_RNA (1)...(19): siRNA sense strand
gagacaggauggaaaucau

SEQ ID NO: 1686497 - RNA, 19 nt, Homo sapiens
  misc_RNA (1)...(19): siRNA sense strand
gagcagaaugacuuaaguu

SEQ ID NO: 1686498 - RNA, 19 nt, Homo sapiens
  misc_RNA (1)...(19): siRNA sense strand
ugaaucugauguacauaga

SEQ ID NO: 1686499 - RNA, 19 nt, Homo sapiens
  misc_RNA (1)...(19): siRNA sense strand
aaccacaaguugaaucuga

SEQ ID NO: 1686500 - RNA, 19 nt, Homo sapiens
  misc_RNA (1)...(19): siRNA sense strand
cugauugucugccgaaguu

SEQ ID NO: 1686501 - RNA, 19 nt, Homo sapiens
  misc_RNA (1)...(19): siRNA sense strand
uagcugaguuggaaauaag

SEQ ID NO: 1686502 - RNA, 19 nt, Homo sapiens
  misc_RNA (1)...(19): siRNA sense strand
aaagagaggcguggugauu

SEQ ID NO: 1686503 - RNA, 19 nt, Homo sapiens
  misc_RNA (1)...(19): siRNA sense strand
ggagacaggauggaaauca

SEQ ID NO: 1686504 - RNA, 19 nt, Homo sapiens
  misc_RNA (1)...(19): siRNA sense strand
caagaaacugccuuaacuu

SEQ ID NO: 1686505 - RNA, 19 nt, Homo sapiens
  misc_RNA (1)...(19): siRNA sense strand
ggaaucagaggaacauugg

SEQ ID NO: 1686506 - RNA, 19 nt, Homo sapiens
  misc_RNA (1)...(19): siRNA sense strand
gguaugaaagguuacagaa

SEQ ID NO: 1686507 - RNA, 19 nt, Homo sapiens
  misc_RNA (1)...(19): siRNA sense strand
aaaugaugguggagaaguu

SEQ ID NO: 1686508 - RNA, 19 nt, Homo sapiens
  misc_RNA (1)...(19): siRNA sense strand
aggaguggguuaugaauca

SEQ ID NO: 1686509 - RNA, 19 nt, Homo sapiens
  misc_RNA (1)...(19): siRNA sense strand
aaaaucgaccccuauauua

SEQ ID NO: 1686510 - RNA, 19 nt, Homo sapiens
  misc_RNA (1)...(19): siRNA sense strand
ggaaaacagugcaaguugu

SEQ ID NO: 1686511 - RNA, 19 nt, Homo sapiens
  misc_RNA (1)...(19): siRNA sense strand
agaaguugauuuagaccuu

SEQ ID NO: 1686512 - RNA, 19 nt, Homo sapiens
  misc_RNA (1)...(19): siRNA sense strand
gagcugggaggcaccauug

SEQ ID NO: 1686513 - RNA, 19 nt, Homo sapiens
  misc_RNA (1)...(19): siRNA sense strand
gacaucgguucgagguaaa

SEQ ID NO: 1686514 - RNA, 19 nt, Homo sapiens
  misc_RNA (1)...(19): siRNA sense strand
gugauagaguuugcaagaa

SEQ ID NO: 1686515 - RNA, 19 nt, Homo sapiens
  misc_RNA (1)...(19): siRNA sense strand
guaugaaagguuacagaaa

SEQ ID NO: 1686516 - RNA, 19 nt, Homo sapiens
  misc_RNA (1)...(19): siRNA sense strand
ggaggcguuuagacaauuc

SEQ ID NO: 1686517 - RNA, 19 nt, Homo sapiens
  misc_RNA (1)...(19): siRNA sense strand
agugauagauacagugaug

SEQ ID NO: 1686518 - RNA, 19 nt, Homo sapiens
  misc_RNA (1)...(19): siRNA sense strand
gaacaaugagacugggaau

SEQ ID NO: 1686519 - RNA, 19 nt, Homo sapiens
  misc_RNA (1)...(19): siRNA sense strand
gcauuggaacgauucuaaa

SEQ ID NO: 1686520 - RNA, 19 nt, Homo sapiens
  misc_RNA (1)...(19): siRNA sense strand
cuuaaaugaugguggagaa

SEQ ID NO: 1686521 - RNA, 19 nt, Homo sapiens
  misc_RNA (1)...(19): siRNA sense strand
gcaacuagcagugauagag

SEQ ID NO: 1686522 - RNA, 19 nt, Homo sapiens
  misc_RNA (1)...(19): siRNA sense strand
uacauagacuccauugauc

SEQ ID NO: 1686523 - RNA, 19 nt, Homo sapiens
  misc_RNA (1)...(19): siRNA sense strand
cuacgccucuguguucaaa

SEQ ID NO: 1686524 - RNA, 19 nt, Homo sapiens
  misc_RNA (1)...(19): siRNA sense strand
gaccuuggaaauuaugaaa

SEQ ID NO: 1686525 - RNA, 19 nt, Homo sapiens
  misc_RNA (1)...(19): siRNA sense strand
ccuggaggcuuuggaauca

SEQ ID NO: 1686526 - RNA, 19 nt, Homo sapiens
  misc_RNA (1)...(19): siRNA sense strand
caaguugaaucugauguac

SEQ ID NO: 1686527 - RNA, 19 nt, Homo sapiens
  misc_RNA (1)...(19): siRNA sense strand
guggaggcguuuagacaau

SEQ ID NO: 1686528 - RNA, 19 nt, Homo sapiens
  misc_RNA (1)...(19): siRNA sense strand
guccaggaguggguuauga

SEQ ID NO: 1686529 - RNA, 19 nt, Homo sapiens
  misc_RNA (1)...(19): siRNA sense strand
gaacuggcaaaucauccuu

SEQ ID NO: 1686530 - RNA, 19 nt, Homo sapiens
  misc_RNA (1)...(19): siRNA sense strand
gauggagacaggauggaaa

SEQ ID NO: 1686531 - RNA, 19 nt, Homo sapiens
  misc_RNA (1)...(19): siRNA sense strand
cuaaccugaucaaacaauu

SEQ ID NO: 1686532 - RNA, 19 nt, Homo sapiens
  misc_RNA (1)...(19): siRNA sense strand
acccuaaccugaucaaaca

SEQ ID NO: 1686533 - RNA, 19 nt, Homo sapiens
  misc_RNA (1)...(19): siRNA sense strand
agacugggaauaagaagaa

SEQ ID NO: 1686534 - RNA, 19 nt, Homo sapiens
  misc_RNA (1)...(19): siRNA sense strand
agaaacugccuuaacuuga

SEQ ID NO: 1686535 - RNA, 19 nt, Homo sapiens
  misc_RNA (1)...(19): siRNA sense strand
ggaugcaacuagcagugau

SEQ ID NO: 1686536 - RNA, 19 nt, Homo sapiens
  misc_RNA (1)...(19): siRNA sense strand
gggcaaggacaaagaagau

SEQ ID NO: 1686537 - RNA, 19 nt, Homo sapiens
  misc_RNA (1)...(19): siRNA sense strand
ucaugaagcuuggcagaag

SEQ ID NO: 1686538 - RNA, 19 nt, Homo sapiens
  misc_RNA (1)...(19): siRNA sense strand
uaaggaagagccccaaaua

SEQ ID NO: 1686539 - RNA, 19 nt, Homo sapiens
  misc_RNA (1)...(19): siRNA sense strand
aagagaggcguggugauua

SEQ ID NO: 1686540 - RNA, 19 nt, Homo sapiens
  misc_RNA (1)...(19): siRNA sense strand
gauagcugaguuggaaaua

SEQ ID NO: 1686541 - RNA, 19 nt, Homo sapiens
  misc_RNA (1)...(19): siRNA sense strand
caguuccucuggugauuga

SEQ ID NO: 1686542 - RNA, 19 nt, Homo sapiens
  misc_RNA (1)...(19): siRNA sense strand
gaugcaacuagcagugaua

SEQ ID NO: 1686543 - RNA, 19 nt, Homo sapiens
  misc_RNA (1)...(19): siRNA sense strand
uggagaagaucacugaaac

SEQ ID NO: 1686544 - RNA, 19 nt, Homo sapiens
  misc_RNA (1)...(19): siRNA sense strand
caaauacaccaagcucaga

SEQ ID NO: 1686545 - RNA, 19 nt, Homo sapiens
  misc_RNA (1)...(19): siRNA sense strand
guuuagacaauuccaguuu

SEQ ID NO: 1686546 - RNA, 19 nt, Homo sapiens
  misc_RNA (1)...(19): siRNA sense strand
gguggaugguaauaaggaa

SEQ ID NO: 1686547 - RNA, 19 nt, Homo sapiens
  misc_RNA (1)...(19): siRNA sense strand
ggaguggguuaugaaucaa

SEQ ID NO: 1686548 - RNA, 19 nt, Homo sapiens
  misc_RNA (1)...(19): siRNA sense strand
caaugagacugggaauaag

SEQ ID NO: 1686549 - RNA, 19 nt, Homo sapiens
  misc_RNA (1)...(19): siRNA sense strand
aagaaacugccuuaacuug

SEQ ID NO: 1686550 - RNA, 19 nt, Homo sapiens
  misc_RNA (1)...(19): siRNA sense strand
ucgaaggaaugccguuugu

SEQ ID NO: 1686551 - RNA, 19 nt, Homo sapiens
  misc_RNA (1)...(19): siRNA sense strand
gcagaaugacuuaaguuuu

SEQ ID NO: 1686552 - RNA, 19 nt, Homo sapiens
  misc_RNA (1)...(19): siRNA sense strand
gacaggauggaaaucauug

SEQ ID NO: 1686553 - RNA, 19 nt, Homo sapiens
  misc_RNA (1)...(19): siRNA sense strand
ugguggagaaguugauuua

SEQ ID NO: 1686554 - RNA, 19 nt, Homo sapiens
  misc_RNA (1)...(19): siRNA sense strand
ugccagugaugacagcuuu

SEQ ID NO: 1686555 - RNA, 19 nt, Homo sapiens
  misc_RNA (1)...(19): siRNA sense strand
ugagcagaaugacuuaagu

SEQ ID NO: 1686556 - RNA, 19 nt, Homo sapiens
  misc_RNA (1)...(19): siRNA sense strand
gcagugauagaguuugcaa

SEQ ID NO: 1686557 - RNA, 19 nt, Homo sapiens
  misc_RNA (1)...(19): siRNA sense strand
ggaauggacucagaaguau

SEQ ID NO: 1686558 - RNA, 19 nt, Homo sapiens
  misc_RNA (1)...(19): siRNA sense strand
gggaauggacucagaagua

SEQ ID NO: 1686559 - RNA, 19 nt, Homo sapiens
  misc_RNA (1)...(19): siRNA sense strand
ucagaaguaugccauguga

SEQ ID NO: 1686560 - RNA, 19 nt, Homo sapiens
  misc_RNA (1)...(19): siRNA sense strand
aaacagacagagauaagua

SEQ ID NO: 1686561 - RNA, 19 nt, Homo sapiens
  misc_RNA (1)...(19): siRNA sense strand
cagaauaucucgggaaugg

SEQ ID NO: 1686562 - RNA, 19 nt, Homo sapiens
  misc_RNA (1)...(19): siRNA sense strand
gcauuugucucgauauucu

SEQ ID NO: 1686563 - RNA, 19 nt, Homo sapiens
  misc_RNA (1)...(19): siRNA sense strand
cagcauuugucucgauauu

SEQ ID NO: 1686564 - RNA, 19 nt, Homo sapiens
  misc_RNA (1)...(19): siRNA sense strand
ccacaauuaugggaccuaa

SEQ ID NO: 1686565 - RNA, 19 nt, Homo sapiens
  misc_RNA (1)...(19): siRNA sense strand
ggcagcauuugucucgaua

SEQ ID NO: 1686566 - RNA, 19 nt, Homo sapiens
  misc_RNA (1)...(19): siRNA sense strand
ucacaguggucgccugcuu

SEQ ID NO: 1686567 - RNA, 19 nt, Homo sapiens
  misc_RNA (1)...(19): siRNA sense strand
ucgccugcuuuaacaauuu

SEQ ID NO: 1686568 - RNA, 19 nt, Homo sapiens
  misc_RNA (1)...(19): siRNA sense strand
cuaaugacagcccauauca

SEQ ID NO: 1686569 - RNA, 19 nt, Homo sapiens
  misc_RNA (1)...(19): siRNA sense strand
acaguggucgccugcuuua

SEQ ID NO: 1686570 - RNA, 19 nt, Homo sapiens
  misc_RNA (1)...(19): siRNA sense strand
gauauucuaagaucacagu

SEQ ID NO: 1686571 - RNA, 19 nt, Homo sapiens
  misc_RNA (1)...(19): siRNA sense strand
gaccuaaugacagcccaua

SEQ ID NO: 1686572 - RNA, 19 nt, Homo sapiens
  misc_RNA (1)...(19): siRNA sense strand
guggucgccugcuuuaaca

SEQ ID NO: 1686573 - RNA, 19 nt, Homo sapiens
  misc_RNA (1)...(19): siRNA sense strand
aacagaauaucucgggaau

SEQ ID NO: 1686574 - RNA, 19 nt, Homo sapiens
  misc_RNA (1)...(19): siRNA sense strand
gaauggacucagaaguaug

SEQ ID NO: 1686575 - RNA, 19 nt, Homo sapiens
  misc_RNA (1)...(19): siRNA sense strand
ucucgggaauggacucaga

SEQ ID NO: 1686576 - RNA, 19 nt, Homo sapiens
  misc_RNA (1)...(19): siRNA sense strand
aaugacagcccauaucaag

SEQ ID NO: 1686577 - RNA, 19 nt, Homo sapiens
  misc_RNA (1)...(19): siRNA sense strand
ccuaaugacagcccauauc

SEQ ID NO: 1686578 - RNA, 19 nt, Homo sapiens
  misc_RNA (1)...(19): siRNA sense strand
gucgccugcuuuaacaauu

SEQ ID NO: 1686579 - RNA, 19 nt, Homo sapiens
  misc_RNA (1)...(19): siRNA sense strand
uggcagcauuugucucgau

SEQ ID NO: 1686580 - RNA, 19 nt, Homo sapiens
  misc_RNA (1)...(19): siRNA sense strand
ggucgccugcuuuaacaau

SEQ ID NO: 1686581 - RNA, 19 nt, Homo sapiens
  misc_RNA (1)...(19): siRNA sense strand
ggaauggacucagaaguau

SEQ ID NO: 1686582 - RNA, 19 nt, Homo sapiens
  misc_RNA (1)...(19): siRNA sense strand
gggaauggacucagaagua

SEQ ID NO: 1686583 - RNA, 19 nt, Homo sapiens
  misc_RNA (1)...(19): siRNA sense strand
ucagaaguaugccauguga

SEQ ID NO: 1686584 - RNA, 19 nt, Homo sapiens
  misc_RNA (1)...(19): siRNA sense strand
aaacagacagagauaagua

SEQ ID NO: 1686585 - RNA, 19 nt, Homo sapiens
  misc_RNA (1)...(19): siRNA sense strand
cagaauaucucgggaaugg

SEQ ID NO: 1686586 - RNA, 19 nt, Homo sapiens
  misc_RNA (1)...(19): siRNA sense strand
gcauuugucucgauauucu

SEQ ID NO: 1686587 - RNA, 19 nt, Homo sapiens
  misc_RNA (1)...(19): siRNA sense strand
cagcauuugucucgauauu

SEQ ID NO: 1686588 - RNA, 19 nt, Homo sapiens
  misc_RNA (1)...(19): siRNA sense strand
ccacaauuaugggaccuaa

SEQ ID NO: 1686589 - RNA, 19 nt, Homo sapiens
  misc_RNA (1)...(19): siRNA sense strand
ggcagcauuugucucgaua

SEQ ID NO: 1686590 - RNA, 19 nt, Homo sapiens
  misc_RNA (1)...(19): siRNA sense strand
ucacaguggucgccugcuu

SEQ ID NO: 1686591 - RNA, 19 nt, Homo sapiens
  misc_RNA (1)...(19): siRNA sense strand
ucgccugcuuuaacaauuu

SEQ ID NO: 1686592 - RNA, 19 nt, Homo sapiens
  misc_RNA (1)...(19): siRNA sense strand
cuaaugacagcccauauca

SEQ ID NO: 1686593 - RNA, 19 nt, Homo sapiens
  misc_RNA (1)...(19): siRNA sense strand
acaguggucgccugcuuua

SEQ ID NO: 1686594 - RNA, 19 nt, Homo sapiens
  misc_RNA (1)...(19): siRNA sense strand
gauauucuaagaucacagu

SEQ ID NO: 1686595 - RNA, 19 nt, Homo sapiens
  misc_RNA (1)...(19): siRNA sense strand
gaccuaaugacagcccaua

SEQ ID NO: 1686596 - RNA, 19 nt, Homo sapiens
  misc_RNA (1)...(19): siRNA sense strand
guggucgccugcuuuaaca

SEQ ID NO: 1686597 - RNA, 19 nt, Homo sapiens
  misc_RNA (1)...(19): siRNA sense strand
aacagaauaucucgggaau

SEQ ID NO: 1686598 - RNA, 19 nt, Homo sapiens
  misc_RNA (1)...(19): siRNA sense strand
gaauggacucagaaguaug

SEQ ID NO: 1686599 - RNA, 19 nt, Homo sapiens
  misc_RNA (1)...(19): siRNA sense strand
ucucgggaauggacucaga

SEQ ID NO: 1686600 - RNA, 19 nt, Homo sapiens
  misc_RNA (1)...(19): siRNA sense strand
aaugacagcccauaucaag

SEQ ID NO: 1686601 - RNA, 19 nt, Homo sapiens
  misc_RNA (1)...(19): siRNA sense strand
ccuaaugacagcccauauc

SEQ ID NO: 1686602 - RNA, 19 nt, Homo sapiens
  misc_RNA (1)...(19): siRNA sense strand
gucgccugcuuuaacaauu

SEQ ID NO: 1686603 - RNA, 19 nt, Homo sapiens
  misc_RNA (1)...(19): siRNA sense strand
uggcagcauuugucucgau

SEQ ID NO: 1686604 - RNA, 19 nt, Homo sapiens
  misc_RNA (1)...(19): siRNA sense strand
ggucgccugcuuuaacaau

SEQ ID NO: 1686605 - RNA, 19 nt, Homo sapiens
  misc_RNA (1)...(19): siRNA sense strand
ggaauggacucagaaguau

SEQ ID NO: 1686606 - RNA, 19 nt, Homo sapiens
  misc_RNA (1)...(19): siRNA sense strand
gggaauggacucagaagua

SEQ ID NO: 1686607 - RNA, 19 nt, Homo sapiens
  misc_RNA (1)...(19): siRNA sense strand
ucagaaguaugccauguga

SEQ ID NO: 1686608 - RNA, 19 nt, Homo sapiens
  misc_RNA (1)...(19): siRNA sense strand
aaacagacagagauaagua

SEQ ID NO: 1686609 - RNA, 19 nt, Homo sapiens
  misc_RNA (1)...(19): siRNA sense strand
cagaauaucucgggaaugg

SEQ ID NO: 1686610 - RNA, 19 nt, Homo sapiens
  misc_RNA (1)...(19): siRNA sense strand
gcauuugucucgauauucu

SEQ ID NO: 1686611 - RNA, 19 nt, Homo sapiens
  misc_RNA (1)...(19): siRNA sense strand
cagcauuugucucgauauu

SEQ ID NO: 1686612 - RNA, 19 nt, Homo sapiens
  misc_RNA (1)...(19): siRNA sense strand
ccacaauuaugggaccuaa

SEQ ID NO: 1686613 - RNA, 19 nt, Homo sapiens
  misc_RNA (1)...(19): siRNA sense strand
ggcagcauuugucucgaua

SEQ ID NO: 1686614 - RNA, 19 nt, Homo sapiens
  misc_RNA (1)...(19): siRNA sense strand
ucacaguggucgccugcuu

SEQ ID NO: 1686615 - RNA, 19 nt, Homo sapiens
  misc_RNA (1)...(19): siRNA sense strand
ucgccugcuuuaacaauuu

SEQ ID NO: 1686616 - RNA, 19 nt, Homo sapiens
  misc_RNA (1)...(19): siRNA sense strand
cuaaugacagcccauauca

SEQ ID NO: 1686617 - RNA, 19 nt, Homo sapiens
  misc_RNA (1)...(19): siRNA sense strand
acaguggucgccugcuuua

SEQ ID NO: 1686618 - RNA, 19 nt, Homo sapiens
  misc_RNA (1)...(19): siRNA sense strand
gauauucuaagaucacagu

SEQ ID NO: 1686619 - RNA, 19 nt, Homo sapiens
  misc_RNA (1)...(19): siRNA sense strand
gaccuaaugacagcccaua

SEQ ID NO: 1686620 - RNA, 19 nt, Homo sapiens
  misc_RNA (1)...(19): siRNA sense strand
guggucgccugcuuuaaca

SEQ ID NO: 1686621 - RNA, 19 nt, Homo sapiens
  misc_RNA (1)...(19): siRNA sense strand
aacagaauaucucgggaau

SEQ ID NO: 1686622 - RNA, 19 nt, Homo sapiens
  misc_RNA (1)...(19): siRNA sense strand
gaauggacucagaaguaug

SEQ ID NO: 1686623 - RNA, 19 nt, Homo sapiens
  misc_RNA (1)...(19): siRNA sense strand
ucucgggaauggacucaga

SEQ ID NO: 1686624 - RNA, 19 nt, Homo sapiens
  misc_RNA (1)...(19): siRNA sense strand
aaugacagcccauaucaag

SEQ ID NO: 1686625 - RNA, 19 nt, Homo sapiens
  misc_RNA (1)...(19): siRNA sense strand
ccuaaugacagcccauauc

SEQ ID NO: 1686626 - RNA, 19 nt, Homo sapiens
  misc_RNA (1)...(19): siRNA sense strand
gucgccugcuuuaacaauu

SEQ ID NO: 1686627 - RNA, 19 nt, Homo sapiens
  misc_RNA (1)...(19): siRNA sense strand
uggcagcauuugucucgau

SEQ ID NO: 1686628 - RNA, 19 nt, Homo sapiens
  misc_RNA (1)...(19): siRNA sense strand
ggucgccugcuuuaacaau

SEQ ID NO: 1686629 - RNA, 19 nt, Homo sapiens
  misc_RNA (1)...(19): siRNA sense strand
ggaauggacucagaaguau

SEQ ID NO: 1686630 - RNA, 19 nt, Homo sapiens
  misc_RNA (1)...(19): siRNA sense strand
gggaauggacucagaagua

SEQ ID NO: 1686631 - RNA, 19 nt, Homo sapiens
  misc_RNA (1)...(19): siRNA sense strand
ucagaaguaugccauguga

SEQ ID NO: 1686632 - RNA, 19 nt, Homo sapiens
  misc_RNA (1)...(19): siRNA sense strand
aaacagacagagauaagua

SEQ ID NO: 1686633 - RNA, 19 nt, Homo sapiens
  misc_RNA (1)...(19): siRNA sense strand
cagaauaucucgggaaugg

SEQ ID NO: 1686634 - RNA, 19 nt, Homo sapiens
  misc_RNA (1)...(19): siRNA sense strand
gcauuugucucgauauucu

SEQ ID NO: 1686635 - RNA, 19 nt, Homo sapiens
  misc_RNA (1)...(19): siRNA sense strand
cagcauuugucucgauauu

SEQ ID NO: 1686636 - RNA, 19 nt, Homo sapiens
  misc_RNA (1)...(19): siRNA sense strand
ccacaauuaugggaccuaa

SEQ ID NO: 1686637 - RNA, 19 nt, Homo sapiens
  misc_RNA (1)...(19): siRNA sense strand
ggcagcauuugucucgaua

SEQ ID NO: 1686638 - RNA, 19 nt, Homo sapiens
  misc_RNA (1)...(19): siRNA sense strand
ucacaguggucgccugcuu

SEQ ID NO: 1686639 - RNA, 19 nt, Homo sapiens
  misc_RNA (1)...(19): siRNA sense strand
ucgccugcuuuaacaauuu

SEQ ID NO: 1686640 - RNA, 19 nt, Homo sapiens
  misc_RNA (1)...(19): siRNA sense strand
cuaaugacagcccauauca

SEQ ID NO: 1686641 - RNA, 19 nt, Homo sapiens
  misc_RNA (1)...(19): siRNA sense strand
acaguggucgccugcuuua

SEQ ID NO: 1686642 - RNA, 19 nt, Homo sapiens
  misc_RNA (1)...(19): siRNA sense strand
gauauucuaagaucacagu

SEQ ID NO: 1686643 - RNA, 19 nt, Homo sapiens
  misc_RNA (1)...(19): siRNA sense strand
gaccuaaugacagcccaua

SEQ ID NO: 1686644 - RNA, 19 nt, Homo sapiens
  misc_RNA (1)...(19): siRNA sense strand
guggucgccugcuuuaaca

SEQ ID NO: 1686645 - RNA, 19 nt, Homo sapiens
  misc_RNA (1)...(19): siRNA sense strand
aacagaauaucucgggaau

SEQ ID NO: 1686646 - RNA, 19 nt, Homo sapiens
  misc_RNA (1)...(19): siRNA sense strand
gaauggacucagaaguaug

SEQ ID NO: 1686647 - RNA, 19 nt, Homo sapiens
  misc_RNA (1)...(19): siRNA sense strand
ucucgggaauggacucaga

SEQ ID NO: 1686648 - RNA, 19 nt, Homo sapiens
  misc_RNA (1)...(19): siRNA sense strand
aaugacagcccauaucaag

SEQ ID NO: 1686649 - RNA, 19 nt, Homo sapiens
  misc_RNA (1)...(19): siRNA sense strand
ccuaaugacagcccauauc

SEQ ID NO: 1686650 - RNA, 19 nt, Homo sapiens
  misc_RNA (1)...(19): siRNA sense strand
gucgccugcuuuaacaauu

SEQ ID NO: 1686651 - RNA, 19 nt, Homo sapiens
  misc_RNA (1)...(19): siRNA sense strand
uggcagcauuugucucgau

SEQ ID NO: 1686652 - RNA, 19 nt, Homo sapiens
  misc_RNA (1)...(19): siRNA sense strand
ggucgccugcuuuaacaau

SEQ ID NO: 1686653 - RNA, 19 nt, Homo sapiens
  misc_RNA (1)...(19): siRNA sense strand
ggaauggacucagaaguau

SEQ ID NO: 1686654 - RNA, 19 nt, Homo sapiens
  misc_RNA (1)...(19): siRNA sense strand
gggaauggacucagaagua

SEQ ID NO: 1686655 - RNA, 19 nt, Homo sapiens
  misc_RNA (1)...(19): siRNA sense strand
ucagaaguaugccauguga

SEQ ID NO: 1686656 - RNA, 19 nt, Homo sapiens
  misc_RNA (1)...(19): siRNA sense strand
aaacagacagagauaagua

SEQ ID NO: 1686657 - RNA, 19 nt, Homo sapiens
  misc_RNA (1)...(19): siRNA sense strand
cagaauaucucgggaaugg

SEQ ID NO: 1686658 - RNA, 19 nt, Homo sapiens
  misc_RNA (1)...(19): siRNA sense strand
gcauuugucucgauauucu

SEQ ID NO: 1686659 - RNA, 19 nt, Homo sapiens
  misc_RNA (1)...(19): siRNA sense strand
cagcauuugucucgauauu

SEQ ID NO: 1686660 - RNA, 19 nt, Homo sapiens
  misc_RNA (1)...(19): siRNA sense strand
ccacaauuaugggaccuaa

SEQ ID NO: 1686661 - RNA, 19 nt, Homo sapiens
  misc_RNA (1)...(19): siRNA sense strand
ggcagcauuugucucgaua

SEQ ID NO: 1686662 - RNA, 19 nt, Homo sapiens
  misc_RNA (1)...(19): siRNA sense strand
ucacaguggucgccugcuu

SEQ ID NO: 1686663 - RNA, 19 nt, Homo sapiens
  misc_RNA (1)...(19): siRNA sense strand
ucgccugcuuuaacaauuu

SEQ ID NO: 1686664 - RNA, 19 nt, Homo sapiens
  misc_RNA (1)...(19): siRNA sense strand
cuaaugacagcccauauca

SEQ ID NO: 1686665 - RNA, 19 nt, Homo sapiens
  misc_RNA (1)...(19): siRNA sense strand
acaguggucgccugcuuua

SEQ ID NO: 1686666 - RNA, 19 nt, Homo sapiens
  misc_RNA (1)...(19): siRNA sense strand
gauauucuaagaucacagu

SEQ ID NO: 1686667 - RNA, 19 nt, Homo sapiens
  misc_RNA (1)...(19): siRNA sense strand
gaccuaaugacagcccaua

SEQ ID NO: 1686668 - RNA, 19 nt, Homo sapiens
  misc_RNA (1)...(19): siRNA sense strand
guggucgccugcuuuaaca

SEQ ID NO: 1686669 - RNA, 19 nt, Homo sapiens
  misc_RNA (1)...(19): siRNA sense strand
aacagaauaucucgggaau

SEQ ID NO: 1686670 - RNA, 19 nt, Homo sapiens
  misc_RNA (1)...(19): siRNA sense strand
gaauggacucagaaguaug

SEQ ID NO: 1686671 - RNA, 19 nt, Homo sapiens
  misc_RNA (1)...(19): siRNA sense strand
ucucgggaauggacucaga

SEQ ID NO: 1686672 - RNA, 19 nt, Homo sapiens
  misc_RNA (1)...(19): siRNA sense strand
aaugacagcccauaucaag

SEQ ID NO: 1686673 - RNA, 19 nt, Homo sapiens
  misc_RNA (1)...(19): siRNA sense strand
ccuaaugacagcccauauc

SEQ ID NO: 1686674 - RNA, 19 nt, Homo sapiens
  misc_RNA (1)...(19): siRNA sense strand
gucgccugcuuuaacaauu

SEQ ID NO: 1686675 - RNA, 19 nt, Homo sapiens
  misc_RNA (1)...(19): siRNA sense strand
uggcagcauuugucucgau

SEQ ID NO: 1686676 - RNA, 19 nt, Homo sapiens
  misc_RNA (1)...(19): siRNA sense strand
ggucgccugcuuuaacaau

SEQ ID NO: 1686677 - RNA, 19 nt, Homo sapiens
  misc_RNA (1)...(19): siRNA sense strand
ggaauggacucagaaguau

SEQ ID NO: 1686678 - RNA, 19 nt, Homo sapiens
  misc_RNA (1)...(19): siRNA sense strand
gggaauggacucagaagua

SEQ ID NO: 1686679 - RNA, 19 nt, Homo sapiens
  misc_RNA (1)...(19): siRNA sense strand
ucagaaguaugccauguga

SEQ ID NO: 1686680 - RNA, 19 nt, Homo sapiens
  misc_RNA (1)...(19): siRNA sense strand
aaacagacagagauaagua

SEQ ID NO: 1686681 - RNA, 19 nt, Homo sapiens
  misc_RNA (1)...(19): siRNA sense strand
cagaauaucucgggaaugg

SEQ ID NO: 1686682 - RNA, 19 nt, Homo sapiens
  misc_RNA (1)...(19): siRNA sense strand
gcauuugucucgauauucu

SEQ ID NO: 1686683 - RNA, 19 nt, Homo sapiens
  misc_RNA (1)...(19): siRNA sense strand
cagcauuugucucgauauu

SEQ ID NO: 1686684 - RNA, 19 nt, Homo sapiens
  misc_RNA (1)...(19): siRNA sense strand
ccacaauuaugggaccuaa

SEQ ID NO: 1686685 - RNA, 19 nt, Homo sapiens
  misc_RNA (1)...(19): siRNA sense strand
ggcagcauuugucucgaua

SEQ ID NO: 1686686 - RNA, 19 nt, Homo sapiens
  misc_RNA (1)...(19): siRNA sense strand
ucacaguggucgccugcuu

SEQ ID NO: 1686687 - RNA, 19 nt, Homo sapiens
  misc_RNA (1)...(19): siRNA sense strand
ucgccugcuuuaacaauuu

SEQ ID NO: 1686688 - RNA, 19 nt, Homo sapiens
  misc_RNA (1)...(19): siRNA sense strand
cuaaugacagcccauauca

SEQ ID NO: 1686689 - RNA, 19 nt, Homo sapiens
  misc_RNA (1)...(19): siRNA sense strand
acaguggucgccugcuuua

SEQ ID NO: 1686690 - RNA, 19 nt, Homo sapiens
  misc_RNA (1)...(19): siRNA sense strand
gauauucuaagaucacagu

SEQ ID NO: 1686691 - RNA, 19 nt, Homo sapiens
  misc_RNA (1)...(19): siRNA sense strand
gaccuaaugacagcccaua

SEQ ID NO: 1686692 - RNA, 19 nt, Homo sapiens
  misc_RNA (1)...(19): siRNA sense strand
guggucgccugcuuuaaca

SEQ ID NO: 1686693 - RNA, 19 nt, Homo sapiens
  misc_RNA (1)...(19): siRNA sense strand
aacagaauaucucgggaau

SEQ ID NO: 1686694 - RNA, 19 nt, Homo sapiens
  misc_RNA (1)...(19): siRNA sense strand
gaauggacucagaaguaug

SEQ ID NO: 1686695 - RNA, 19 nt, Homo sapiens
  misc_RNA (1)...(19): siRNA sense strand
ucucgggaauggacucaga

SEQ ID NO: 1686696 - RNA, 19 nt, Homo sapiens
  misc_RNA (1)...(19): siRNA sense strand
aaugacagcccauaucaag

SEQ ID NO: 1686697 - RNA, 19 nt, Homo sapiens
  misc_RNA (1)...(19): siRNA sense strand
ccuaaugacagcccauauc

SEQ ID NO: 1686698 - RNA, 19 nt, Homo sapiens
  misc_RNA (1)...(19): siRNA sense strand
gucgccugcuuuaacaauu

SEQ ID NO: 1686699 - RNA, 19 nt, Homo sapiens
  misc_RNA (1)...(19): siRNA sense strand
uggcagcauuugucucgau

SEQ ID NO: 1686700 - RNA, 19 nt, Homo sapiens
  misc_RNA (1)...(19): siRNA sense strand
ggucgccugcuuuaacaau

SEQ ID NO: 1686701 - RNA, 19 nt, Homo sapiens
  misc_RNA (1)...(19): siRNA sense strand
ggaauggacucagaaguau

SEQ ID NO: 1686702 - RNA, 19 nt, Homo sapiens
  misc_RNA (1)...(19): siRNA sense strand
gggaauggacucagaagua

SEQ ID NO: 1686703 - RNA, 19 nt, Homo sapiens
  misc_RNA (1)...(19): siRNA sense strand
ucagaaguaugccauguga

SEQ ID NO: 1686704 - RNA, 19 nt, Homo sapiens
  misc_RNA (1)...(19): siRNA sense strand
aaacagacagagauaagua

SEQ ID NO: 1686705 - RNA, 19 nt, Homo sapiens
  misc_RNA (1)...(19): siRNA sense strand
cagaauaucucgggaaugg

SEQ ID NO: 1686706 - RNA, 19 nt, Homo sapiens
  misc_RNA (1)...(19): siRNA sense strand
gcauuugucucgauauucu

SEQ ID NO: 1686707 - RNA, 19 nt, Homo sapiens
  misc_RNA (1)...(19): siRNA sense strand
cagcauuugucucgauauu

SEQ ID NO: 1686708 - RNA, 19 nt, Homo sapiens
  misc_RNA (1)...(19): siRNA sense strand
ccacaauuaugggaccuaa

SEQ ID NO: 1686709 - RNA, 19 nt, Homo sapiens
  misc_RNA (1)...(19): siRNA sense strand
ggcagcauuugucucgaua

SEQ ID NO: 1686710 - RNA, 19 nt, Homo sapiens
  misc_RNA (1)...(19): siRNA sense strand
ucacaguggucgccugcuu

SEQ ID NO: 1686711 - RNA, 19 nt, Homo sapiens
  misc_RNA (1)...(19): siRNA sense strand
ucgccugcuuuaacaauuu

SEQ ID NO: 1686712 - RNA, 19 nt, Homo sapiens
  misc_RNA (1)...(19): siRNA sense strand
cuaaugacagcccauauca

SEQ ID NO: 1686713 - RNA, 19 nt, Homo sapiens
  misc_RNA (1)...(19): siRNA sense strand
acaguggucgccugcuuua

SEQ ID NO: 1686714 - RNA, 19 nt, Homo sapiens
  misc_RNA (1)...(19): siRNA sense strand
gauauucuaagaucacagu

SEQ ID NO: 1686715 - RNA, 19 nt, Homo sapiens
  misc_RNA (1)...(19): siRNA sense strand
gaccuaaugacagcccaua

SEQ ID NO: 1686716 - RNA, 19 nt, Homo sapiens
  misc_RNA (1)...(19): siRNA sense strand
guggucgccugcuuuaaca

SEQ ID NO: 1686717 - RNA, 19 nt, Homo sapiens
  misc_RNA (1)...(19): siRNA sense strand
aacagaauaucucgggaau

SEQ ID NO: 1686718 - RNA, 19 nt, Homo sapiens
  misc_RNA (1)...(19): siRNA sense strand
gaauggacucagaaguaug

SEQ ID NO: 1686719 - RNA, 19 nt, Homo sapiens
  misc_RNA (1)...(19): siRNA sense strand
ucucgggaauggacucaga

SEQ ID NO: 1686720 - RNA, 19 nt, Homo sapiens
  misc_RNA (1)...(19): siRNA sense strand
aaugacagcccauaucaag

SEQ ID NO: 1686721 - RNA, 19 nt, Homo sapiens
  misc_RNA (1)...(19): siRNA sense strand
ccuaaugacagcccauauc

SEQ ID NO: 1686722 - RNA, 19 nt, Homo sapiens
  misc_RNA (1)...(19): siRNA sense strand
gucgccugcuuuaacaauu

SEQ ID NO: 1686723 - RNA, 19 nt, Homo sapiens
  misc_RNA (1)...(19): siRNA sense strand
uggcagcauuugucucgau

SEQ ID NO: 1686724 - RNA, 19 nt, Homo sapiens
  misc_RNA (1)...(19): siRNA sense strand
ggucgccugcuuuaacaau

SEQ ID NO: 1686725 - RNA, 19 nt, Homo sapiens
  misc_RNA (1)...(19): siRNA sense strand
aaacagacagagauaagua

SEQ ID NO: 1686726 - RNA, 19 nt, Homo sapiens
  misc_RNA (1)...(19): siRNA sense strand
gcauuugucucgauauucu

SEQ ID NO: 1686727 - RNA, 19 nt, Homo sapiens
  misc_RNA (1)...(19): siRNA sense strand
cagcauuugucucgauauu

SEQ ID NO: 1686728 - RNA, 19 nt, Homo sapiens
  misc_RNA (1)...(19): siRNA sense strand
ccacaauuaugggaccuaa

SEQ ID NO: 1686729 - RNA, 19 nt, Homo sapiens
  misc_RNA (1)...(19): siRNA sense strand
ggcagcauuugucucgaua

SEQ ID NO: 1686730 - RNA, 19 nt, Homo sapiens
  misc_RNA (1)...(19): siRNA sense strand
ucacaguggucgccugcuu

SEQ ID NO: 1686731 - RNA, 19 nt, Homo sapiens
  misc_RNA (1)...(19): siRNA sense strand
gcacggaucuauaaaacag

SEQ ID NO: 1686732 - RNA, 19 nt, Homo sapiens
  misc_RNA (1)...(19): siRNA sense strand
ucgccugcuuuaacaauuu

SEQ ID NO: 1686733 - RNA, 19 nt, Homo sapiens
  misc_RNA (1)...(19): siRNA sense strand
cuaaugacagcccauauca

SEQ ID NO: 1686734 - RNA, 19 nt, Homo sapiens
  misc_RNA (1)...(19): siRNA sense strand
acaguggucgccugcuuua

SEQ ID NO: 1686735 - RNA, 19 nt, Homo sapiens
  misc_RNA (1)...(19): siRNA sense strand
gauauucuaagaucacagu

SEQ ID NO: 1686736 - RNA, 19 nt, Homo sapiens
  misc_RNA (1)...(19): siRNA sense strand
gaccuaaugacagcccaua

SEQ ID NO: 1686737 - RNA, 19 nt, Homo sapiens
  misc_RNA (1)...(19): siRNA sense strand
guggucgccugcuuuaaca

SEQ ID NO: 1686738 - RNA, 19 nt, Homo sapiens
  misc_RNA (1)...(19): siRNA sense strand
aaugacagcccauaucaag

SEQ ID NO: 1686739 - RNA, 19 nt, Homo sapiens
  misc_RNA (1)...(19): siRNA sense strand
ccuaaugacagcccauauc

SEQ ID NO: 1686740 - RNA, 19 nt, Homo sapiens
  misc_RNA (1)...(19): siRNA sense strand
gucgccugcuuuaacaauu

SEQ ID NO: 1686741 - RNA, 19 nt, Homo sapiens
  misc_RNA (1)...(19): siRNA sense strand
uggcagcauuugucucgau

SEQ ID NO: 1686742 - RNA, 19 nt, Homo sapiens
  misc_RNA (1)...(19): siRNA sense strand
ggucgccugcuuuaacaau

SEQ ID NO: 1686743 - RNA, 19 nt, Homo sapiens
  misc_RNA (1)...(19): siRNA sense strand
ggaauggacucagaaguau

SEQ ID NO: 1686744 - RNA, 19 nt, Homo sapiens
  misc_RNA (1)...(19): siRNA sense strand
gggaauggacucagaagua

SEQ ID NO: 1686745 - RNA, 19 nt, Homo sapiens
  misc_RNA (1)...(19): siRNA sense strand
ucagaaguaugccauguga

SEQ ID NO: 1686746 - RNA, 19 nt, Homo sapiens
  misc_RNA (1)...(19): siRNA sense strand
aaacagacagagauaagua

SEQ ID NO: 1686747 - RNA, 19 nt, Homo sapiens
  misc_RNA (1)...(19): siRNA sense strand
cagaauaucucgggaaugg

SEQ ID NO: 1686748 - RNA, 19 nt, Homo sapiens
  misc_RNA (1)...(19): siRNA sense strand
gcauuugucucgauauucu

SEQ ID NO: 1686749 - RNA, 19 nt, Homo sapiens
  misc_RNA (1)...(19): siRNA sense strand
cagcauuugucucgauauu

SEQ ID NO: 1686750 - RNA, 19 nt, Homo sapiens
  misc_RNA (1)...(19): siRNA sense strand
ccacaauuaugggaccuaa

SEQ ID NO: 1686751 - RNA, 19 nt, Homo sapiens
  misc_RNA (1)...(19): siRNA sense strand
ggcagcauuugucucgaua

SEQ ID NO: 1686752 - RNA, 19 nt, Homo sapiens
  misc_RNA (1)...(19): siRNA sense strand
ucacaguggucgccugcuu

SEQ ID NO: 1686753 - RNA, 19 nt, Homo sapiens
  misc_RNA (1)...(19): siRNA sense strand
ucgccugcuuuaacaauuu

SEQ ID NO: 1686754 - RNA, 19 nt, Homo sapiens
  misc_RNA (1)...(19): siRNA sense strand
cuaaugacagcccauauca

SEQ ID NO: 1686755 - RNA, 19 nt, Homo sapiens
  misc_RNA (1)...(19): siRNA sense strand
acaguggucgccugcuuua

SEQ ID NO: 1686756 - RNA, 19 nt, Homo sapiens
  misc_RNA (1)...(19): siRNA sense strand
gauauucuaagaucacagu

SEQ ID NO: 1686757 - RNA, 19 nt, Homo sapiens
  misc_RNA (1)...(19): siRNA sense strand
gaccuaaugacagcccaua

SEQ ID NO: 1686758 - RNA, 19 nt, Homo sapiens
  misc_RNA (1)...(19): siRNA sense strand
guggucgccugcuuuaaca

SEQ ID NO: 1686759 - RNA, 19 nt, Homo sapiens
  misc_RNA (1)...(19): siRNA sense strand
aacagaauaucucgggaau

SEQ ID NO: 1686760 - RNA, 19 nt, Homo sapiens
  misc_RNA (1)...(19): siRNA sense strand
gaauggacucagaaguaug

SEQ ID NO: 1686761 - RNA, 19 nt, Homo sapiens
  misc_RNA (1)...(19): siRNA sense strand
ucucgggaauggacucaga

SEQ ID NO: 1686762 - RNA, 19 nt, Homo sapiens
  misc_RNA (1)...(19): siRNA sense strand
aaugacagcccauaucaag

SEQ ID NO: 1686763 - RNA, 19 nt, Homo sapiens
  misc_RNA (1)...(19): siRNA sense strand
ccuaaugacagcccauauc

SEQ ID NO: 1686764 - RNA, 19 nt, Homo sapiens
  misc_RNA (1)...(19): siRNA sense strand
gucgccugcuuuaacaauu

SEQ ID NO: 1686765 - RNA, 19 nt, Homo sapiens
  misc_RNA (1)...(19): siRNA sense strand
uggcagcauuugucucgau

SEQ ID NO: 1686766 - RNA, 19 nt, Homo sapiens
  misc_RNA (1)...(19): siRNA sense strand
ggucgccugcuuuaacaau

SEQ ID NO: 1686767 - RNA, 19 nt, Homo sapiens
  misc_RNA (1)...(19): siRNA sense strand
ggaauggacucagaaguau

SEQ ID NO: 1686768 - RNA, 19 nt, Homo sapiens
  misc_RNA (1)...(19): siRNA sense strand
gggaauggacucagaagua

SEQ ID NO: 1686769 - RNA, 19 nt, Homo sapiens
  misc_RNA (1)...(19): siRNA sense strand
ucagaaguaugccauguga

SEQ ID NO: 1686770 - RNA, 19 nt, Homo sapiens
  misc_RNA (1)...(19): siRNA sense strand
aaacagacagagauaagua

SEQ ID NO: 1686771 - RNA, 19 nt, Homo sapiens
  misc_RNA (1)...(19): siRNA sense strand
cagaauaucucgggaaugg

SEQ ID NO: 1686772 - RNA, 19 nt, Homo sapiens
  misc_RNA (1)...(19): siRNA sense strand
gcauuugucucgauauucu

SEQ ID NO: 1686773 - RNA, 19 nt, Homo sapiens
  misc_RNA (1)...(19): siRNA sense strand
cagcauuugucucgauauu

SEQ ID NO: 1686774 - RNA, 19 nt, Homo sapiens
  misc_RNA (1)...(19): siRNA sense strand
ccacaauuaugggaccuaa

SEQ ID NO: 1686775 - RNA, 19 nt, Homo sapiens
  misc_RNA (1)...(19): siRNA sense strand
ggcagcauuugucucgaua

SEQ ID NO: 1686776 - RNA, 19 nt, Homo sapiens
  misc_RNA (1)...(19): siRNA sense strand
ucacaguggucgccugcuu

SEQ ID NO: 1686777 - RNA, 19 nt, Homo sapiens
  misc_RNA (1)...(19): siRNA sense strand
ucgccugcuuuaacaauuu

SEQ ID NO: 1686778 - RNA, 19 nt, Homo sapiens
  misc_RNA (1)...(19): siRNA sense strand
cuaaugacagcccauauca

SEQ ID NO: 1686779 - RNA, 19 nt, Homo sapiens
  misc_RNA (1)...(19): siRNA sense strand
acaguggucgccugcuuua

SEQ ID NO: 1686780 - RNA, 19 nt, Homo sapiens
  misc_RNA (1)...(19): siRNA sense strand
gauauucuaagaucacagu

SEQ ID NO: 1686781 - RNA, 19 nt, Homo sapiens
  misc_RNA (1)...(19): siRNA sense strand
gaccuaaugacagcccaua

SEQ ID NO: 1686782 - RNA, 19 nt, Homo sapiens
  misc_RNA (1)...(19): siRNA sense strand
guggucgccugcuuuaaca

SEQ ID NO: 1686783 - RNA, 19 nt, Homo sapiens
  misc_RNA (1)...(19): siRNA sense strand
aacagaauaucucgggaau

SEQ ID NO: 1686784 - RNA, 19 nt, Homo sapiens
  misc_RNA (1)...(19): siRNA sense strand
gaauggacucagaaguaug

SEQ ID NO: 1686785 - RNA, 19 nt, Homo sapiens
  misc_RNA (1)...(19): siRNA sense strand
ucucgggaauggacucaga

SEQ ID NO: 1686786 - RNA, 19 nt, Homo sapiens
  misc_RNA (1)...(19): siRNA sense strand
aaugacagcccauaucaag

SEQ ID NO: 1686787 - RNA, 19 nt, Homo sapiens
  misc_RNA (1)...(19): siRNA sense strand
ccuaaugacagcccauauc

SEQ ID NO: 1686788 - RNA, 19 nt, Homo sapiens
  misc_RNA (1)...(19): siRNA sense strand
gucgccugcuuuaacaauu

SEQ ID NO: 1686789 - RNA, 19 nt, Homo sapiens
  misc_RNA (1)...(19): siRNA sense strand
uggcagcauuugucucgau

SEQ ID NO: 1686790 - RNA, 19 nt, Homo sapiens
  misc_RNA (1)...(19): siRNA sense strand
ggucgccugcuuuaacaau

SEQ ID NO: 1686791 - RNA, 19 nt, Homo sapiens
  misc_RNA (1)...(19): siRNA sense strand
ggaauggacucagaaguau

SEQ ID NO: 1686792 - RNA, 19 nt, Homo sapiens
  misc_RNA (1)...(19): siRNA sense strand
gggaauggacucagaagua

SEQ ID NO: 1686793 - RNA, 19 nt, Homo sapiens
  misc_RNA (1)...(19): siRNA sense strand
ucagaaguaugccauguga

SEQ ID NO: 1686794 - RNA, 19 nt, Homo sapiens
  misc_RNA (1)...(19): siRNA sense strand
aaacagacagagauaagua

SEQ ID NO: 1686795 - RNA, 19 nt, Homo sapiens
  misc_RNA (1)...(19): siRNA sense strand
cagaauaucucgggaaugg

SEQ ID NO: 1686796 - RNA, 19 nt, Homo sapiens
  misc_RNA (1)...(19): siRNA sense strand
gcauuugucucgauauucu

SEQ ID NO: 1686797 - RNA, 19 nt, Homo sapiens
  misc_RNA (1)...(19): siRNA sense strand
cagcauuugucucgauauu

SEQ ID NO: 1686798 - RNA, 19 nt, Homo sapiens
  misc_RNA (1)...(19): siRNA sense strand
ccacaauuaugggaccuaa

SEQ ID NO: 1686799 - RNA, 19 nt, Homo sapiens
  misc_RNA (1)...(19): siRNA sense strand
ggcagcauuugucucgaua

SEQ ID NO: 1686800 - RNA, 19 nt, Homo sapiens
  misc_RNA (1)...(19): siRNA sense strand
ucacaguggucgccugcuu

SEQ ID NO: 1686801 - RNA, 19 nt, Homo sapiens
  misc_RNA (1)...(19): siRNA sense strand
ucgccugcuuuaacaauuu

SEQ ID NO: 1686802 - RNA, 19 nt, Homo sapiens
  misc_RNA (1)...(19): siRNA sense strand
cuaaugacagcccauauca

SEQ ID NO: 1686803 - RNA, 19 nt, Homo sapiens
  misc_RNA (1)...(19): siRNA sense strand
acaguggucgccugcuuua

SEQ ID NO: 1686804 - RNA, 19 nt, Homo sapiens
  misc_RNA (1)...(19): siRNA sense strand
gauauucuaagaucacagu

SEQ ID NO: 1686805 - RNA, 19 nt, Homo sapiens
  misc_RNA (1)...(19): siRNA sense strand
gaccuaaugacagcccaua

SEQ ID NO: 1686806 - RNA, 19 nt, Homo sapiens
  misc_RNA (1)...(19): siRNA sense strand
guggucgccugcuuuaaca

SEQ ID NO: 1686807 - RNA, 19 nt, Homo sapiens
  misc_RNA (1)...(19): siRNA sense strand
aacagaauaucucgggaau

SEQ ID NO: 1686808 - RNA, 19 nt, Homo sapiens
  misc_RNA (1)...(19): siRNA sense strand
gaauggacucagaaguaug

SEQ ID NO: 1686809 - RNA, 19 nt, Homo sapiens
  misc_RNA (1)...(19): siRNA sense strand
ucucgggaauggacucaga

SEQ ID NO: 1686810 - RNA, 19 nt, Homo sapiens
  misc_RNA (1)...(19): siRNA sense strand
aaugacagcccauaucaag

SEQ ID NO: 1686811 - RNA, 19 nt, Homo sapiens
  misc_RNA (1)...(19): siRNA sense strand
ccuaaugacagcccauauc

SEQ ID NO: 1686812 - RNA, 19 nt, Homo sapiens
  misc_RNA (1)...(19): siRNA sense strand
gucgccugcuuuaacaauu

SEQ ID NO: 1686813 - RNA, 19 nt, Homo sapiens
  misc_RNA (1)...(19): siRNA sense strand
uggcagcauuugucucgau

SEQ ID NO: 1686814 - RNA, 19 nt, Homo sapiens
  misc_RNA (1)...(19): siRNA sense strand
ggucgccugcuuuaacaau

SEQ ID NO: 1686815 - RNA, 19 nt, Homo sapiens
  misc_RNA (1)...(19): siRNA sense strand
ggaauggacucagaaguau

SEQ ID NO: 1686816 - RNA, 19 nt, Homo sapiens
  misc_RNA (1)...(19): siRNA sense strand
gggaauggacucagaagua

SEQ ID NO: 1686817 - RNA, 19 nt, Homo sapiens
  misc_RNA (1)...(19): siRNA sense strand
ucagaaguaugccauguga

SEQ ID NO: 1686818 - RNA, 19 nt, Homo sapiens
  misc_RNA (1)...(19): siRNA sense strand
aaacagacagagauaagua

SEQ ID NO: 1686819 - RNA, 19 nt, Homo sapiens
  misc_RNA (1)...(19): siRNA sense strand
cagaauaucucgggaaugg

SEQ ID NO: 1686820 - RNA, 19 nt, Homo sapiens
  misc_RNA (1)...(19): siRNA sense strand
gcauuugucucgauauucu

SEQ ID NO: 1686821 - RNA, 19 nt, Homo sapiens
  misc_RNA (1)...(19): siRNA sense strand
cagcauuugucucgauauu

SEQ ID NO: 1686822 - RNA, 19 nt, Homo sapiens
  misc_RNA (1)...(19): siRNA sense strand
ccacaauuaugggaccuaa

SEQ ID NO: 1686823 - RNA, 19 nt, Homo sapiens
  misc_RNA (1)...(19): siRNA sense strand
ggcagcauuugucucgaua

SEQ ID NO: 1686824 - RNA, 19 nt, Homo sapiens
  misc_RNA (1)...(19): siRNA sense strand
ucacaguggucgccugcuu

SEQ ID NO: 1686825 - RNA, 19 nt, Homo sapiens
  misc_RNA (1)...(19): siRNA sense strand
ucgccugcuuuaacaauuu

SEQ ID NO: 1686826 - RNA, 19 nt, Homo sapiens
  misc_RNA (1)...(19): siRNA sense strand
cuaaugacagcccauauca

SEQ ID NO: 1686827 - RNA, 19 nt, Homo sapiens
  misc_RNA (1)...(19): siRNA sense strand
acaguggucgccugcuuua

SEQ ID NO: 1686828 - RNA, 19 nt, Homo sapiens
  misc_RNA (1)...(19): siRNA sense strand
gauauucuaagaucacagu

SEQ ID NO: 1686829 - RNA, 19 nt, Homo sapiens
  misc_RNA (1)...(19): siRNA sense strand
gaccuaaugacagcccaua

SEQ ID NO: 1686830 - RNA, 19 nt, Homo sapiens
  misc_RNA (1)...(19): siRNA sense strand
guggucgccugcuuuaaca

SEQ ID NO: 1686831 - RNA, 19 nt, Homo sapiens
  misc_RNA (1)...(19): siRNA sense strand
aacagaauaucucgggaau

SEQ ID NO: 1686832 - RNA, 19 nt, Homo sapiens
  misc_RNA (1)...(19): siRNA sense strand
gaauggacucagaaguaug

SEQ ID NO: 1686833 - RNA, 19 nt, Homo sapiens
  misc_RNA (1)...(19): siRNA sense strand
ucucgggaauggacucaga

SEQ ID NO: 1686834 - RNA, 19 nt, Homo sapiens
  misc_RNA (1)...(19): siRNA sense strand
aaugacagcccauaucaag

SEQ ID NO: 1686835 - RNA, 19 nt, Homo sapiens
  misc_RNA (1)...(19): siRNA sense strand
ccuaaugacagcccauauc

SEQ ID NO: 1686836 - RNA, 19 nt, Homo sapiens
  misc_RNA (1)...(19): siRNA sense strand
gucgccugcuuuaacaauu

SEQ ID NO: 1686837 - RNA, 19 nt, Homo sapiens
  misc_RNA (1)...(19): siRNA sense strand
uggcagcauuugucucgau

SEQ ID NO: 1686838 - RNA, 19 nt, Homo sapiens
  misc_RNA (1)...(19): siRNA sense strand
ggucgccugcuuuaacaau

SEQ ID NO: 1686839 - RNA, 19 nt, Homo sapiens
  misc_RNA (1)...(19): siRNA sense strand
ggaauggacucagaaguau

SEQ ID NO: 1686840 - RNA, 19 nt, Homo sapiens
  misc_RNA (1)...(19): siRNA sense strand
gggaauggacucagaagua

SEQ ID NO: 1686841 - RNA, 19 nt, Homo sapiens
  misc_RNA (1)...(19): siRNA sense strand
ucagaaguaugccauguga

SEQ ID NO: 1686842 - RNA, 19 nt, Homo sapiens
  misc_RNA (1)...(19): siRNA sense strand
aaacagacagagauaagua

SEQ ID NO: 1686843 - RNA, 19 nt, Homo sapiens
  misc_RNA (1)...(19): siRNA sense strand
cagaauaucucgggaaugg

SEQ ID NO: 1686844 - RNA, 19 nt, Homo sapiens
  misc_RNA (1)...(19): siRNA sense strand
gcauuugucucgauauucu

SEQ ID NO: 1686845 - RNA, 19 nt, Homo sapiens
  misc_RNA (1)...(19): siRNA sense strand
cagcauuugucucgauauu

SEQ ID NO: 1686846 - RNA, 19 nt, Homo sapiens
  misc_RNA (1)...(19): siRNA sense strand
ccacaauuaugggaccuaa

SEQ ID NO: 1686847 - RNA, 19 nt, Homo sapiens
  misc_RNA (1)...(19): siRNA sense strand
ggcagcauuugucucgaua

SEQ ID NO: 1686848 - RNA, 19 nt, Homo sapiens
  misc_RNA (1)...(19): siRNA sense strand
ucacaguggucgccugcuu

SEQ ID NO: 1686849 - RNA, 19 nt, Homo sapiens
  misc_RNA (1)...(19): siRNA sense strand
ucgccugcuuuaacaauuu

SEQ ID NO: 1686850 - RNA, 19 nt, Homo sapiens
  misc_RNA (1)...(19): siRNA sense strand
cuaaugacagcccauauca

SEQ ID NO: 1686851 - RNA, 19 nt, Homo sapiens
  misc_RNA (1)...(19): siRNA sense strand
acaguggucgccugcuuua

SEQ ID NO: 1686852 - RNA, 19 nt, Homo sapiens
  misc_RNA (1)...(19): siRNA sense strand
gauauucuaagaucacagu

SEQ ID NO: 1686853 - RNA, 19 nt, Homo sapiens
  misc_RNA (1)...(19): siRNA sense strand
gaccuaaugacagcccaua

SEQ ID NO: 1686854 - RNA, 19 nt, Homo sapiens
  misc_RNA (1)...(19): siRNA sense strand
guggucgccugcuuuaaca

SEQ ID NO: 1686855 - RNA, 19 nt, Homo sapiens
  misc_RNA (1)...(19): siRNA sense strand
aacagaauaucucgggaau

SEQ ID NO: 1686856 - RNA, 19 nt, Homo sapiens
  misc_RNA (1)...(19): siRNA sense strand
gaauggacucagaaguaug

SEQ ID NO: 1686857 - RNA, 19 nt, Homo sapiens
  misc_RNA (1)...(19): siRNA sense strand
ucucgggaauggacucaga

SEQ ID NO: 1686858 - RNA, 19 nt, Homo sapiens
  misc_RNA (1)...(19): siRNA sense strand
aaugacagcccauaucaag

SEQ ID NO: 1686859 - RNA, 19 nt, Homo sapiens
  misc_RNA (1)...(19): siRNA sense strand
ccuaaugacagcccauauc

SEQ ID NO: 1686860 - RNA, 19 nt, Homo sapiens
  misc_RNA (1)...(19): siRNA sense strand
gucgccugcuuuaacaauu

SEQ ID NO: 1686861 - RNA, 19 nt, Homo sapiens
  misc_RNA (1)...(19): siRNA sense strand
uggcagcauuugucucgau

SEQ ID NO: 1686862 - RNA, 19 nt, Homo sapiens
  misc_RNA (1)...(19): siRNA sense strand
ggucgccugcuuuaacaau

SEQ ID NO: 1686863 - RNA, 19 nt, Homo sapiens
  misc_RNA (1)...(19): siRNA sense strand
ggaauggacucagaaguau

SEQ ID NO: 1686864 - RNA, 19 nt, Homo sapiens
  misc_RNA (1)...(19): siRNA sense strand
gggaauggacucagaagua

SEQ ID NO: 1686865 - RNA, 19 nt, Homo sapiens
  misc_RNA (1)...(19): siRNA sense strand
ucagaaguaugccauguga

SEQ ID NO: 1686866 - RNA, 19 nt, Homo sapiens
  misc_RNA (1)...(19): siRNA sense strand
aaacagacagagauaagua

SEQ ID NO: 1686867 - RNA, 19 nt, Homo sapiens
  misc_RNA (1)...(19): siRNA sense strand
cagaauaucucgggaaugg

SEQ ID NO: 1686868 - RNA, 19 nt, Homo sapiens
  misc_RNA (1)...(19): siRNA sense strand
gcauuugucucgauauucu

SEQ ID NO: 1686869 - RNA, 19 nt, Homo sapiens
  misc_RNA (1)...(19): siRNA sense strand
cagcauuugucucgauauu

SEQ ID NO: 1686870 - RNA, 19 nt, Homo sapiens
  misc_RNA (1)...(19): siRNA sense strand
ccacaauuaugggaccuaa

SEQ ID NO: 1686871 - RNA, 19 nt, Homo sapiens
  misc_RNA (1)...(19): siRNA sense strand
ggcagcauuugucucgaua

SEQ ID NO: 1686872 - RNA, 19 nt, Homo sapiens
  misc_RNA (1)...(19): siRNA sense strand
ucacaguggucgccugcuu

SEQ ID NO: 1686873 - RNA, 19 nt, Homo sapiens
  misc_RNA (1)...(19): siRNA sense strand
ucgccugcuuuaacaauuu

SEQ ID NO: 1686874 - RNA, 19 nt, Homo sapiens
  misc_RNA (1)...(19): siRNA sense strand
cuaaugacagcccauauca

SEQ ID NO: 1686875 - RNA, 19 nt, Homo sapiens
  misc_RNA (1)...(19): siRNA sense strand
acaguggucgccugcuuua

SEQ ID NO: 1686876 - RNA, 19 nt, Homo sapiens
  misc_RNA (1)...(19): siRNA sense strand
gauauucuaagaucacagu

SEQ ID NO: 1686877 - RNA, 19 nt, Homo sapiens
  misc_RNA (1)...(19): siRNA sense strand
gaccuaaugacagcccaua

SEQ ID NO: 1686878 - RNA, 19 nt, Homo sapiens
  misc_RNA (1)...(19): siRNA sense strand
guggucgccugcuuuaaca

SEQ ID NO: 1686879 - RNA, 19 nt, Homo sapiens
  misc_RNA (1)...(19): siRNA sense strand
aacagaauaucucgggaau

SEQ ID NO: 1686880 - RNA, 19 nt, Homo sapiens
  misc_RNA (1)...(19): siRNA sense strand
gaauggacucagaaguaug

SEQ ID NO: 1686881 - RNA, 19 nt, Homo sapiens
  misc_RNA (1)...(19): siRNA sense strand
ucucgggaauggacucaga

SEQ ID NO: 1686882 - RNA, 19 nt, Homo sapiens
  misc_RNA (1)...(19): siRNA sense strand
aaugacagcccauaucaag

SEQ ID NO: 1686883 - RNA, 19 nt, Homo sapiens
  misc_RNA (1)...(19): siRNA sense strand
ccuaaugacagcccauauc

SEQ ID NO: 1686884 - RNA, 19 nt, Homo sapiens
  misc_RNA (1)...(19): siRNA sense strand
gucgccugcuuuaacaauu

SEQ ID NO: 1686885 - RNA, 19 nt, Homo sapiens
  misc_RNA (1)...(19): siRNA sense strand
uggcagcauuugucucgau

SEQ ID NO: 1686886 - RNA, 19 nt, Homo sapiens
  misc_RNA (1)...(19): siRNA sense strand
ggucgccugcuuuaacaau

SEQ ID NO: 1686887 - RNA, 19 nt, Homo sapiens
  misc_RNA (1)...(19): siRNA sense strand
ggaauggacucagaaguau

SEQ ID NO: 1686888 - RNA, 19 nt, Homo sapiens
  misc_RNA (1)...(19): siRNA sense strand
gggaauggacucagaagua

SEQ ID NO: 1686889 - RNA, 19 nt, Homo sapiens
  misc_RNA (1)...(19): siRNA sense strand
ucagaaguaugccauguga

SEQ ID NO: 1686890 - RNA, 19 nt, Homo sapiens
  misc_RNA (1)...(19): siRNA sense strand
aaacagacagagauaagua

SEQ ID NO: 1686891 - RNA, 19 nt, Homo sapiens
  misc_RNA (1)...(19): siRNA sense strand
cagaauaucucgggaaugg

SEQ ID NO: 1686892 - RNA, 19 nt, Homo sapiens
  misc_RNA (1)...(19): siRNA sense strand
gcauuugucucgauauucu

SEQ ID NO: 1686893 - RNA, 19 nt, Homo sapiens
  misc_RNA (1)...(19): siRNA sense strand
cagcauuugucucgauauu

SEQ ID NO: 1686894 - RNA, 19 nt, Homo sapiens
  misc_RNA (1)...(19): siRNA sense strand
ccacaauuaugggaccuaa

SEQ ID NO: 1686895 - RNA, 19 nt, Homo sapiens
  misc_RNA (1)...(19): siRNA sense strand
ggcagcauuugucucgaua

SEQ ID NO: 1686896 - RNA, 19 nt, Homo sapiens
  misc_RNA (1)...(19): siRNA sense strand
ucacaguggucgccugcuu

SEQ ID NO: 1686897 - RNA, 19 nt, Homo sapiens
  misc_RNA (1)...(19): siRNA sense strand
ucgccugcuuuaacaauuu

SEQ ID NO: 1686898 - RNA, 19 nt, Homo sapiens
  misc_RNA (1)...(19): siRNA sense strand
cuaaugacagcccauauca

SEQ ID NO: 1686899 - RNA, 19 nt, Homo sapiens
  misc_RNA (1)...(19): siRNA sense strand
acaguggucgccugcuuua

SEQ ID NO: 1686900 - RNA, 19 nt, Homo sapiens
  misc_RNA (1)...(19): siRNA sense strand
gauauucuaagaucacagu

SEQ ID NO: 1686901 - RNA, 19 nt, Homo sapiens
  misc_RNA (1)...(19): siRNA sense strand
gaccuaaugacagcccaua

SEQ ID NO: 1686902 - RNA, 19 nt, Homo sapiens
  misc_RNA (1)...(19): siRNA sense strand
guggucgccugcuuuaaca

SEQ ID NO: 1686903 - RNA, 19 nt, Homo sapiens
  misc_RNA (1)...(19): siRNA sense strand
aacagaauaucucgggaau

SEQ ID NO: 1686904 - RNA, 19 nt, Homo sapiens
  misc_RNA (1)...(19): siRNA sense strand
gaauggacucagaaguaug

SEQ ID NO: 1686905 - RNA, 19 nt, Homo sapiens
  misc_RNA (1)...(19): siRNA sense strand
ucucgggaauggacucaga

SEQ ID NO: 1686906 - RNA, 19 nt, Homo sapiens
  misc_RNA (1)...(19): siRNA sense strand
aaugacagcccauaucaag

SEQ ID NO: 1686907 - RNA, 19 nt, Homo sapiens
  misc_RNA (1)...(19): siRNA sense strand
ccuaaugacagcccauauc

SEQ ID NO: 1686908 - RNA, 19 nt, Homo sapiens
  misc_RNA (1)...(19): siRNA sense strand
gucgccugcuuuaacaauu

SEQ ID NO: 1686909 - RNA, 19 nt, Homo sapiens
  misc_RNA (1)...(19): siRNA sense strand
uggcagcauuugucucgau

SEQ ID NO: 1686910 - RNA, 19 nt, Homo sapiens
  misc_RNA (1)...(19): siRNA sense strand
ggucgccugcuuuaacaau

SEQ ID NO: 1686911 - RNA, 19 nt, Homo sapiens
  misc_RNA (1)...(19): siRNA sense strand
ggaauggacucagaaguau

SEQ ID NO: 1686912 - RNA, 19 nt, Homo sapiens
  misc_RNA (1)...(19): siRNA sense strand
gggaauggacucagaagua

SEQ ID NO: 1686913 - RNA, 19 nt, Homo sapiens
  misc_RNA (1)...(19): siRNA sense strand
ucagaaguaugccauguga

SEQ ID NO: 1686914 - RNA, 19 nt, Homo sapiens
  misc_RNA (1)...(19): siRNA sense strand
aaacagacagagauaagua

SEQ ID NO: 1686915 - RNA, 19 nt, Homo sapiens
  misc_RNA (1)...(19): siRNA sense strand
cagaauaucucgggaaugg

SEQ ID NO: 1686916 - RNA, 19 nt, Homo sapiens
  misc_RNA (1)...(19): siRNA sense strand
gcauuugucucgauauucu

SEQ ID NO: 1686917 - RNA, 19 nt, Homo sapiens
  misc_RNA (1)...(19): siRNA sense strand
cagcauuugucucgauauu

SEQ ID NO: 1686918 - RNA, 19 nt, Homo sapiens
  misc_RNA (1)...(19): siRNA sense strand
ccacaauuaugggaccuaa

SEQ ID NO: 1686919 - RNA, 19 nt, Homo sapiens
  misc_RNA (1)...(19): siRNA sense strand
ggcagcauuugucucgaua

SEQ ID NO: 1686920 - RNA, 19 nt, Homo sapiens
  misc_RNA (1)...(19): siRNA sense strand
ucacaguggucgccugcuu

SEQ ID NO: 1686921 - RNA, 19 nt, Homo sapiens
  misc_RNA (1)...(19): siRNA sense strand
ucgccugcuuuaacaauuu

SEQ ID NO: 1686922 - RNA, 19 nt, Homo sapiens
  misc_RNA (1)...(19): siRNA sense strand
cuaaugacagcccauauca

SEQ ID NO: 1686923 - RNA, 19 nt, Homo sapiens
  misc_RNA (1)...(19): siRNA sense strand
acaguggucgccugcuuua

SEQ ID NO: 1686924 - RNA, 19 nt, Homo sapiens
  misc_RNA (1)...(19): siRNA sense strand
gauauucuaagaucacagu

SEQ ID NO: 1686925 - RNA, 19 nt, Homo sapiens
  misc_RNA (1)...(19): siRNA sense strand
gaccuaaugacagcccaua

SEQ ID NO: 1686926 - RNA, 19 nt, Homo sapiens
  misc_RNA (1)...(19): siRNA sense strand
guggucgccugcuuuaaca

SEQ ID NO: 1686927 - RNA, 19 nt, Homo sapiens
  misc_RNA (1)...(19): siRNA sense strand
aacagaauaucucgggaau

SEQ ID NO: 1686928 - RNA, 19 nt, Homo sapiens
  misc_RNA (1)...(19): siRNA sense strand
gaauggacucagaaguaug

SEQ ID NO: 1686929 - RNA, 19 nt, Homo sapiens
  misc_RNA (1)...(19): siRNA sense strand
ucucgggaauggacucaga

SEQ ID NO: 1686930 - RNA, 19 nt, Homo sapiens
  misc_RNA (1)...(19): siRNA sense strand
aaugacagcccauaucaag

SEQ ID NO: 1686931 - RNA, 19 nt, Homo sapiens
  misc_RNA (1)...(19): siRNA sense strand
ccuaaugacagcccauauc

SEQ ID NO: 1686932 - RNA, 19 nt, Homo sapiens
  misc_RNA (1)...(19): siRNA sense strand
gucgccugcuuuaacaauu

SEQ ID NO: 1686933 - RNA, 19 nt, Homo sapiens
  misc_RNA (1)...(19): siRNA sense strand
uggcagcauuugucucgau

SEQ ID NO: 1686934 - RNA, 19 nt, Homo sapiens
  misc_RNA (1)...(19): siRNA sense strand
ggucgccugcuuuaacaau

SEQ ID NO: 1686935 - RNA, 19 nt, Homo sapiens
  misc_RNA (1)...(19): siRNA sense strand
aaacagacagagauaagua

SEQ ID NO: 1686936 - RNA, 19 nt, Homo sapiens
  misc_RNA (1)...(19): siRNA sense strand
gcauuugucucgauauucu

SEQ ID NO: 1686937 - RNA, 19 nt, Homo sapiens
  misc_RNA (1)...(19): siRNA sense strand
cagcauuugucucgauauu

SEQ ID NO: 1686938 - RNA, 19 nt, Homo sapiens
  misc_RNA (1)...(19): siRNA sense strand
ccacaauuaugggaccuaa

SEQ ID NO: 1686939 - RNA, 19 nt, Homo sapiens
  misc_RNA (1)...(19): siRNA sense strand
ggcagcauuugucucgaua

SEQ ID NO: 1686940 - RNA, 19 nt, Homo sapiens
  misc_RNA (1)...(19): siRNA sense strand
ucacaguggucgccugcuu

SEQ ID NO: 1686941 - RNA, 19 nt, Homo sapiens
  misc_RNA (1)...(19): siRNA sense strand
gcacggaucuauaaaacag

SEQ ID NO: 1686942 - RNA, 19 nt, Homo sapiens
  misc_RNA (1)...(19): siRNA sense strand
ucgccugcuuuaacaauuu

SEQ ID NO: 1686943 - RNA, 19 nt, Homo sapiens
  misc_RNA (1)...(19): siRNA sense strand
cuaaugacagcccauauca

SEQ ID NO: 1686944 - RNA, 19 nt, Homo sapiens
  misc_RNA (1)...(19): siRNA sense strand
acaguggucgccugcuuua

SEQ ID NO: 1686945 - RNA, 19 nt, Homo sapiens
  misc_RNA (1)...(19): siRNA sense strand
gauauucuaagaucacagu

SEQ ID NO: 1686946 - RNA, 19 nt, Homo sapiens
  misc_RNA (1)...(19): siRNA sense strand
gaccuaaugacagcccaua

SEQ ID NO: 1686947 - RNA, 19 nt, Homo sapiens
  misc_RNA (1)...(19): siRNA sense strand
guggucgccugcuuuaaca

SEQ ID NO: 1686948 - RNA, 19 nt, Homo sapiens
  misc_RNA (1)...(19): siRNA sense strand
aaugacagcccauaucaag

SEQ ID NO: 1686949 - RNA, 19 nt, Homo sapiens
  misc_RNA (1)...(19): siRNA sense strand
ccuaaugacagcccauauc

SEQ ID NO: 1686950 - RNA, 19 nt, Homo sapiens
  misc_RNA (1)...(19): siRNA sense strand
gucgccugcuuuaacaauu

SEQ ID NO: 1686951 - RNA, 19 nt, Homo sapiens
  misc_RNA (1)...(19): siRNA sense strand
uggcagcauuugucucgau

SEQ ID NO: 1686952 - RNA, 19 nt, Homo sapiens
  misc_RNA (1)...(19): siRNA sense strand
ggucgccugcuuuaacaau

SEQ ID NO: 1686953 - RNA, 19 nt, Homo sapiens
  misc_RNA (1)...(19): siRNA sense strand
ggaauggacucagaaguau

SEQ ID NO: 1686954 - RNA, 19 nt, Homo sapiens
  misc_RNA (1)...(19): siRNA sense strand
gggaauggacucagaagua

SEQ ID NO: 1686955 - RNA, 19 nt, Homo sapiens
  misc_RNA (1)...(19): siRNA sense strand
ucagaaguaugccauguga

SEQ ID NO: 1686956 - RNA, 19 nt, Homo sapiens
  misc_RNA (1)...(19): siRNA sense strand
aaacagacagagauaagua

SEQ ID NO: 1686957 - RNA, 19 nt, Homo sapiens
  misc_RNA (1)...(19): siRNA sense strand
cagaauaucucgggaaugg

SEQ ID NO: 1686958 - RNA, 19 nt, Homo sapiens
  misc_RNA (1)...(19): siRNA sense strand
gcauuugucucgauauucu

SEQ ID NO: 1686959 - RNA, 19 nt, Homo sapiens
  misc_RNA (1)...(19): siRNA sense strand
cagcauuugucucgauauu

SEQ ID NO: 1686960 - RNA, 19 nt, Homo sapiens
  misc_RNA (1)...(19): siRNA sense strand
ccacaauuaugggaccuaa

SEQ ID NO: 1686961 - RNA, 19 nt, Homo sapiens
  misc_RNA (1)...(19): siRNA sense strand
ggcagcauuugucucgaua

SEQ ID NO: 1686962 - RNA, 19 nt, Homo sapiens
  misc_RNA (1)...(19): siRNA sense strand
ucacaguggucgccugcuu

SEQ ID NO: 1686963 - RNA, 19 nt, Homo sapiens
  misc_RNA (1)...(19): siRNA sense strand
ucgccugcuuuaacaauuu

SEQ ID NO: 1686964 - RNA, 19 nt, Homo sapiens
  misc_RNA (1)...(19): siRNA sense strand
cuaaugacagcccauauca

SEQ ID NO: 1686965 - RNA, 19 nt, Homo sapiens
  misc_RNA (1)...(19): siRNA sense strand
acaguggucgccugcuuua

SEQ ID NO: 1686966 - RNA, 19 nt, Homo sapiens
  misc_RNA (1)...(19): siRNA sense strand
gauauucuaagaucacagu

SEQ ID NO: 1686967 - RNA, 19 nt, Homo sapiens
  misc_RNA (1)...(19): siRNA sense strand
gaccuaaugacagcccaua

SEQ ID NO: 1686968 - RNA, 19 nt, Homo sapiens
  misc_RNA (1)...(19): siRNA sense strand
guggucgccugcuuuaaca

SEQ ID NO: 1686969 - RNA, 19 nt, Homo sapiens
  misc_RNA (1)...(19): siRNA sense strand
aacagaauaucucgggaau

SEQ ID NO: 1686970 - RNA, 19 nt, Homo sapiens
  misc_RNA (1)...(19): siRNA sense strand
gaauggacucagaaguaug

SEQ ID NO: 1686971 - RNA, 19 nt, Homo sapiens
  misc_RNA (1)...(19): siRNA sense strand
ucucgggaauggacucaga

SEQ ID NO: 1686972 - RNA, 19 nt, Homo sapiens
  misc_RNA (1)...(19): siRNA sense strand
aaugacagcccauaucaag

SEQ ID NO: 1686973 - RNA, 19 nt, Homo sapiens
  misc_RNA (1)...(19): siRNA sense strand
ccuaaugacagcccauauc

SEQ ID NO: 1686974 - RNA, 19 nt, Homo sapiens
  misc_RNA (1)...(19): siRNA sense strand
gucgccugcuuuaacaauu

SEQ ID NO: 1686975 - RNA, 19 nt, Homo sapiens
  misc_RNA (1)...(19): siRNA sense strand
uggcagcauuugucucgau

SEQ ID NO: 1686976 - RNA, 19 nt, Homo sapiens
  misc_RNA (1)...(19): siRNA sense strand
ggucgccugcuuuaacaau

SEQ ID NO: 1686977 - RNA, 19 nt, Homo sapiens
  misc_RNA (1)...(19): siRNA sense strand
gcaagcaguuccaguuaua

SEQ ID NO: 1686978 - RNA, 19 nt, Homo sapiens
  misc_RNA (1)...(19): siRNA sense strand
ucaagaccaucaucacuuu

SEQ ID NO: 1686979 - RNA, 19 nt, Homo sapiens
  misc_RNA (1)...(19): siRNA sense strand
gcuacuaccugguggucua

SEQ ID NO: 1686980 - RNA, 19 nt, Homo sapiens
  misc_RNA (1)...(19): siRNA sense strand
caucaucacuuucauuguc

SEQ ID NO: 1686981 - RNA, 19 nt, Homo sapiens
  misc_RNA (1)...(19): siRNA sense strand
gauugcaucuucucugucu

SEQ ID NO: 1686982 - RNA, 19 nt, Homo sapiens
  misc_RNA (1)...(19): siRNA sense strand
ucauggagcucuucuacag

SEQ ID NO: 1686983 - RNA, 19 nt, Homo sapiens
  misc_RNA (1)...(19): siRNA sense strand
gcgacgguguucagaaugu

SEQ ID NO: 1686984 - RNA, 19 nt, Homo sapiens
  misc_RNA (1)...(19): siRNA sense strand
gcccugaggcugcagauga

SEQ ID NO: 1686985 - RNA, 19 nt, Homo sapiens
  misc_RNA (1)...(19): siRNA sense strand
ccgcaagcaguuccaguua

SEQ ID NO: 1686986 - RNA, 19 nt, Homo sapiens
  misc_RNA (1)...(19): siRNA sense strand
aagcgacgguguucagaau

SEQ ID NO: 1686987 - RNA, 19 nt, Homo sapiens
  misc_RNA (1)...(19): siRNA sense strand
caagcuggguuugcagugu

SEQ ID NO: 1686988 - RNA, 19 nt, Homo sapiens
  misc_RNA (1)...(19): siRNA sense strand
caucgccaccuuucagauu

SEQ ID NO: 1686989 - RNA, 19 nt, Homo sapiens
  misc_RNA (1)...(19): siRNA sense strand
gaccaucaucacuuucauu

SEQ ID NO: 1686990 - RNA, 19 nt, Homo sapiens
  misc_RNA (1)...(19): siRNA sense strand
agagacagagcgacccaua

SEQ ID NO: 1686991 - RNA, 19 nt, Homo sapiens
  misc_RNA (1)...(19): siRNA sense strand
cgcaagcaguuccaguuau

SEQ ID NO: 1686992 - RNA, 19 nt, Homo sapiens
  misc_RNA (1)...(19): siRNA sense strand
ucuccacgcucaacuacau

SEQ ID NO: 1686993 - RNA, 19 nt, Homo sapiens
  misc_RNA (1)...(19): siRNA sense strand
gagcuggagcgcaugaauc

SEQ ID NO: 1686994 - RNA, 19 nt, Homo sapiens
  misc_RNA (1)...(19): siRNA sense strand
gguuugcagugucuuccaa

SEQ ID NO: 1686995 - RNA, 19 nt, Homo sapiens
  misc_RNA (1)...(19): siRNA sense strand
ccaguuauacuccguguac

SEQ ID NO: 1686996 - RNA, 19 nt, Homo sapiens
  misc_RNA (1)...(19): siRNA sense strand
gucaagaccaucaucacuu

SEQ ID NO: 1686997 - RNA, 19 nt, Homo sapiens
  misc_RNA (1)...(19): siRNA sense strand
gaauuccugagcccaguga

SEQ ID NO: 1686998 - RNA, 19 nt, Homo sapiens
  misc_RNA (1)...(19): siRNA sense strand
caagcgacgguguucagaa

SEQ ID NO: 1686999 - RNA, 19 nt, Homo sapiens
  misc_RNA (1)...(19): siRNA sense strand
ccuccuacaucuucucucu

SEQ ID NO: 1687000 - RNA, 19 nt, Homo sapiens
  misc_RNA (1)...(19): siRNA sense strand
ggagcuggagcgcaugaau

SEQ ID NO: 1687001 - RNA, 19 nt, Homo sapiens
  misc_RNA (1)...(19): siRNA sense strand
aagcgcagccucuucuuca

SEQ ID NO: 1687002 - RNA, 19 nt, Homo sapiens
  misc_RNA (1)...(19): siRNA sense strand
gauccuguccaucaucuac

SEQ ID NO: 1687003 - RNA, 19 nt, Homo sapiens
  misc_RNA (1)...(19): siRNA sense strand
guuauacuccguguacuuc

SEQ ID NO: 1687004 - RNA, 19 nt, Homo sapiens
  misc_RNA (1)...(19): siRNA sense strand
guccaucaucuacuucuug

SEQ ID NO: 1687005 - RNA, 19 nt, Homo sapiens
  misc_RNA (1)...(19): siRNA sense strand
caagcgcagccucuucuuc

SEQ ID NO: 1687006 - RNA, 19 nt, Homo sapiens
  misc_RNA (1)...(19): siRNA sense strand
uugcaucuucucugucuaa

SEQ ID NO: 1687007 - RNA, 19 nt, Homo sapiens
  misc_RNA (1)...(19): siRNA sense strand
cgacgguguucagaaugug

SEQ ID NO: 1687008 - RNA, 19 nt, Homo sapiens
  misc_RNA (1)...(19): siRNA sense strand
gccuauuccuccuacaucu

SEQ ID NO: 1687009 - RNA, 19 nt, Homo sapiens
  misc_RNA (1)...(19): siRNA sense strand
gcaagcaguuccaguuaua

SEQ ID NO: 1687010 - RNA, 19 nt, Homo sapiens
  misc_RNA (1)...(19): siRNA sense strand
ucaagaccaucaucacuuu

SEQ ID NO: 1687011 - RNA, 19 nt, Homo sapiens
  misc_RNA (1)...(19): siRNA sense strand
gcuacuaccugguggucua

SEQ ID NO: 1687012 - RNA, 19 nt, Homo sapiens
  misc_RNA (1)...(19): siRNA sense strand
caucaucacuuucauuguc

SEQ ID NO: 1687013 - RNA, 19 nt, Homo sapiens
  misc_RNA (1)...(19): siRNA sense strand
ucacgccggugcugucgua

SEQ ID NO: 1687014 - RNA, 19 nt, Homo sapiens
  misc_RNA (1)...(19): siRNA sense strand
gauugcaucuucucugucu

SEQ ID NO: 1687015 - RNA, 19 nt, Homo sapiens
  misc_RNA (1)...(19): siRNA sense strand
ucauggagcucuucuacag

SEQ ID NO: 1687016 - RNA, 19 nt, Homo sapiens
  misc_RNA (1)...(19): siRNA sense strand
gcgacgguguucagaaugu

SEQ ID NO: 1687017 - RNA, 19 nt, Homo sapiens
  misc_RNA (1)...(19): siRNA sense strand
gcccugaggcugcagauga

SEQ ID NO: 1687018 - RNA, 19 nt, Homo sapiens
  misc_RNA (1)...(19): siRNA sense strand
ccgcaagcaguuccaguua

SEQ ID NO: 1687019 - RNA, 19 nt, Homo sapiens
  misc_RNA (1)...(19): siRNA sense strand
aagcgacgguguucagaau

SEQ ID NO: 1687020 - RNA, 19 nt, Homo sapiens
  misc_RNA (1)...(19): siRNA sense strand
caagcuggguuugcagugu

SEQ ID NO: 1687021 - RNA, 19 nt, Homo sapiens
  misc_RNA (1)...(19): siRNA sense strand
caucgccaccuuucagauu

SEQ ID NO: 1687022 - RNA, 19 nt, Homo sapiens
  misc_RNA (1)...(19): siRNA sense strand
gaccaucaucacuuucauu

SEQ ID NO: 1687023 - RNA, 19 nt, Homo sapiens
  misc_RNA (1)...(19): siRNA sense strand
agagacagagcgacccaua

SEQ ID NO: 1687024 - RNA, 19 nt, Homo sapiens
  misc_RNA (1)...(19): siRNA sense strand
cgcaagcaguuccaguuau

SEQ ID NO: 1687025 - RNA, 19 nt, Homo sapiens
  misc_RNA (1)...(19): siRNA sense strand
ucuccacgcucaacuacau

SEQ ID NO: 1687026 - RNA, 19 nt, Homo sapiens
  misc_RNA (1)...(19): siRNA sense strand
gagcuggagcgcaugaauc

SEQ ID NO: 1687027 - RNA, 19 nt, Homo sapiens
  misc_RNA (1)...(19): siRNA sense strand
gguuugcagugucuuccaa

SEQ ID NO: 1687028 - RNA, 19 nt, Homo sapiens
  misc_RNA (1)...(19): siRNA sense strand
ccaguuauacuccguguac

SEQ ID NO: 1687029 - RNA, 19 nt, Homo sapiens
  misc_RNA (1)...(19): siRNA sense strand
gucaagaccaucaucacuu

SEQ ID NO: 1687030 - RNA, 19 nt, Homo sapiens
  misc_RNA (1)...(19): siRNA sense strand
gaauuccugagcccaguga

SEQ ID NO: 1687031 - RNA, 19 nt, Homo sapiens
  misc_RNA (1)...(19): siRNA sense strand
caagcgacgguguucagaa

SEQ ID NO: 1687032 - RNA, 19 nt, Homo sapiens
  misc_RNA (1)...(19): siRNA sense strand
ccuccuacaucuucucucu

SEQ ID NO: 1687033 - RNA, 19 nt, Homo sapiens
  misc_RNA (1)...(19): siRNA sense strand
gaagcaggugcccguggaa

SEQ ID NO: 1687034 - RNA, 19 nt, Homo sapiens
  misc_RNA (1)...(19): siRNA sense strand
ugugcuaccuuugcuucua

SEQ ID NO: 1687035 - RNA, 19 nt, Homo sapiens
  misc_RNA (1)...(19): siRNA sense strand
ggagcuggagcgcaugaau

SEQ ID NO: 1687036 - RNA, 19 nt, Homo sapiens
  misc_RNA (1)...(19): siRNA sense strand
gugcuaccuuugcuucuac

SEQ ID NO: 1687037 - RNA, 19 nt, Homo sapiens
  misc_RNA (1)...(19): siRNA sense strand
gauccuguccaucaucuac

SEQ ID NO: 1687038 - RNA, 19 nt, Homo sapiens
  misc_RNA (1)...(19): siRNA sense strand
guuauacuccguguacuuc

SEQ ID NO: 1687039 - RNA, 19 nt, Homo sapiens
  misc_RNA (1)...(19): siRNA sense strand
aagcgcagccucuucuuca

SEQ ID NO: 1687040 - RNA, 19 nt, Homo sapiens
  misc_RNA (1)...(19): siRNA sense strand
guccaucaucuacuucuug

SEQ ID NO: 1687041 - RNA, 19 nt, Homo sapiens
  misc_RNA (1)...(19): siRNA sense strand
caagcgcagccucuucuuc

SEQ ID NO: 1687042 - RNA, 19 nt, Homo sapiens
  misc_RNA (1)...(19): siRNA sense strand
gccuauuccuccuacaucu

SEQ ID NO: 1687043 - RNA, 19 nt, Homo sapiens
  misc_RNA (1)...(19): siRNA sense strand
cgacgguguucagaaugug

SEQ ID NO: 1687044 - RNA, 19 nt, Homo sapiens
  misc_RNA (1)...(19): siRNA sense strand
uugcaucuucucugucuaa

SEQ ID NO: 1687045 - RNA, 19 nt, Homo sapiens
  misc_RNA (1)...(19): siRNA sense strand
gauagccgccuuuccaucu

SEQ ID NO: 1687046 - RNA, 19 nt, Homo sapiens
  misc_RNA (1)...(19): siRNA sense strand
ccugcuggcugccuuaugg

SEQ ID NO: 1687047 - RNA, 19 nt, Homo sapiens
  misc_RNA (1)...(19): siRNA sense strand
gcucggacucucuggauag

SEQ ID NO: 1687048 - RNA, 19 nt, Homo sapiens
  misc_RNA (1)...(19): siRNA sense strand
ucaccugggucgccuacuc

SEQ ID NO: 1687049 - RNA, 19 nt, Homo sapiens
  misc_RNA (1)...(19): siRNA sense strand
uagccgccuuuccaucuug

SEQ ID NO: 1687050 - RNA, 19 nt, Homo sapiens
  misc_RNA (1)...(19): siRNA sense strand
gaaaguacgucgcuucuga

SEQ ID NO: 1687051 - RNA, 19 nt, Homo sapiens
  misc_RNA (1)...(19): siRNA sense strand
gcaacgaucucucaaaugu

SEQ ID NO: 1687052 - RNA, 19 nt, Homo sapiens
  misc_RNA (1)...(19): siRNA sense strand
ucaauaagcucgucuccua

SEQ ID NO: 1687053 - RNA, 19 nt, Homo sapiens
  misc_RNA (1)...(19): siRNA sense strand
gcauaaagguaggaaagua

SEQ ID NO: 1687054 - RNA, 19 nt, Homo sapiens
  misc_RNA (1)...(19): siRNA sense strand
acaaauggcuucagauguu

SEQ ID NO: 1687055 - RNA, 19 nt, Homo sapiens
  misc_RNA (1)...(19): siRNA sense strand
gaucagagccgagaacaaa

SEQ ID NO: 1687056 - RNA, 19 nt, Homo sapiens
  misc_RNA (1)...(19): siRNA sense strand
gaacaaauggcuucagaug

SEQ ID NO: 1687057 - RNA, 19 nt, Homo sapiens
  misc_RNA (1)...(19): siRNA sense strand
gagaacaaauggcuucaga

SEQ ID NO: 1687058 - RNA, 19 nt, Homo sapiens
  misc_RNA (1)...(19): siRNA sense strand
ucaaagaguugggcauaaa

SEQ ID NO: 1687059 - RNA, 19 nt, Homo sapiens
  misc_RNA (1)...(19): siRNA sense strand
gccgagagcugcugcuuug

SEQ ID NO: 1687060 - RNA, 19 nt, Homo sapiens
  misc_RNA (1)...(19): siRNA sense strand
ugaggaacaucacaaagaa

SEQ ID NO: 1687061 - RNA, 19 nt, Homo sapiens
  misc_RNA (1)...(19): siRNA sense strand
ccucccagcucuuaccuua

SEQ ID NO: 1687062 - RNA, 19 nt, Homo sapiens
  misc_RNA (1)...(19): siRNA sense strand
gcucuuaccuuaccaucga

SEQ ID NO: 1687063 - RNA, 19 nt, Homo sapiens
  misc_RNA (1)...(19): siRNA sense strand
ccaagcgccucaagacaaa

SEQ ID NO: 1687064 - RNA, 19 nt, Homo sapiens
  misc_RNA (1)...(19): siRNA sense strand
ggacuacuuugcaugugaa

SEQ ID NO: 1687065 - RNA, 19 nt, Homo sapiens
  misc_RNA (1)...(19): siRNA sense strand
uuuaccaccugcugaauua

SEQ ID NO: 1687066 - RNA, 19 nt, Homo sapiens
  misc_RNA (1)...(19): siRNA sense strand
cagcagcccuggagacuca

SEQ ID NO: 1687067 - RNA, 19 nt, Homo sapiens
  misc_RNA (1)...(19): siRNA sense strand
caagacaaauugcuauaac

SEQ ID NO: 1687068 - RNA, 19 nt, Homo sapiens
  misc_RNA (1)...(19): siRNA sense strand
gaaggacuacuuugcaugu

SEQ ID NO: 1687069 - RNA, 19 nt, Homo sapiens
  misc_RNA (1)...(19): siRNA sense strand
guaccaugcucuggagaaa

SEQ ID NO: 1687070 - RNA, 19 nt, Homo sapiens
  misc_RNA (1)...(19): siRNA sense strand
ggaguguaauccagugaug

SEQ ID NO: 1687071 - RNA, 19 nt, Homo sapiens
  misc_RNA (1)...(19): siRNA sense strand
caaauggcuucagauguug

SEQ ID NO: 1687072 - RNA, 19 nt, Homo sapiens
  misc_RNA (1)...(19): siRNA sense strand
gggaaggaguuuggaauag

SEQ ID NO: 1687073 - RNA, 19 nt, Homo sapiens
  misc_RNA (1)...(19): siRNA sense strand
ggaaggaguuuggaauagg

SEQ ID NO: 1687074 - RNA, 19 nt, Homo sapiens
  misc_RNA (1)...(19): siRNA sense strand
ucagccagcacuuuaauuu

SEQ ID NO: 1687075 - RNA, 19 nt, Homo sapiens
  misc_RNA (1)...(19): siRNA sense strand
aacgaucucucaaauguga

SEQ ID NO: 1687076 - RNA, 19 nt, Homo sapiens
  misc_RNA (1)...(19): siRNA sense strand
gacgauggcuaucagucuu

SEQ ID NO: 1687077 - RNA, 19 nt, Homo sapiens
  misc_RNA (1)...(19): siRNA sense strand
acacggggcuugaauauga

SEQ ID NO: 1687078 - RNA, 19 nt, Homo sapiens
  misc_RNA (1)...(19): siRNA sense strand
acgcacagcugacgacuca

SEQ ID NO: 1687079 - RNA, 19 nt, Homo sapiens
  misc_RNA (1)...(19): siRNA sense strand
ccuggaagauggcuguuug

SEQ ID NO: 1687080 - RNA, 19 nt, Homo sapiens
  misc_RNA (1)...(19): siRNA sense strand
uuacauguaugaugacgau

SEQ ID NO: 1687081 - RNA, 19 nt, Homo sapiens
  misc_RNA (1)...(19): siRNA sense strand
ccauuugacuuggugauug

SEQ ID NO: 1687082 - RNA, 19 nt, Homo sapiens
  misc_RNA (1)...(19): siRNA sense strand
aaccaggacucguucagaa

SEQ ID NO: 1687083 - RNA, 19 nt, Homo sapiens
  misc_RNA (1)...(19): siRNA sense strand
ggagguguccagucugcua

SEQ ID NO: 1687084 - RNA, 19 nt, Homo sapiens
  misc_RNA (1)...(19): siRNA sense strand
ggagacaguucagaguauc

SEQ ID NO: 1687085 - RNA, 19 nt, Homo sapiens
  misc_RNA (1)...(19): siRNA sense strand
gcaacagcaucggcaggaa

SEQ ID NO: 1687086 - RNA, 19 nt, Homo sapiens
  misc_RNA (1)...(19): siRNA sense strand
cgaaauaacaacagugucu

SEQ ID NO: 1687087 - RNA, 19 nt, Homo sapiens
  misc_RNA (1)...(19): siRNA sense strand
caacaagagcagccuggaa

SEQ ID NO: 1687088 - RNA, 19 nt, Homo sapiens
  misc_RNA (1)...(19): siRNA sense strand
gcuguccgaacucgaaaua

SEQ ID NO: 1687089 - RNA, 19 nt, Homo sapiens
  misc_RNA (1)...(19): siRNA sense strand
ggagaucagaggccgaaga

SEQ ID NO: 1687090 - RNA, 19 nt, Homo sapiens
  misc_RNA (1)...(19): siRNA sense strand
cacgguuccuggaguguaa

SEQ ID NO: 1687091 - RNA, 19 nt, Homo sapiens
  misc_RNA (1)...(19): siRNA sense strand
cgaguccugucauuguuug

SEQ ID NO: 1687092 - RNA, 19 nt, Homo sapiens
  misc_RNA (1)...(19): siRNA sense strand
uggagacaguucagaguau

SEQ ID NO: 1687093 - RNA, 19 nt, Homo sapiens
  misc_RNA (1)...(19): siRNA sense strand
ggaagauggcuguuugucu

SEQ ID NO: 1687094 - RNA, 19 nt, Homo sapiens
  misc_RNA (1)...(19): siRNA sense strand
gagaucagaggccgaagau

SEQ ID NO: 1687095 - RNA, 19 nt, Homo sapiens
  misc_RNA (1)...(19): siRNA sense strand
gaggaacaucacaaagaaa

SEQ ID NO: 1687096 - RNA, 19 nt, Homo sapiens
  misc_RNA (1)...(19): siRNA sense strand
uguccagucugcuaagcua

SEQ ID NO: 1687097 - RNA, 19 nt, Homo sapiens
  misc_RNA (1)...(19): siRNA sense strand
agagggagguguccagucu

SEQ ID NO: 1687098 - RNA, 19 nt, Homo sapiens
  misc_RNA (1)...(19): siRNA sense strand
aagcucgucuccuaucgaa

SEQ ID NO: 1687099 - RNA, 19 nt, Homo sapiens
  misc_RNA (1)...(19): siRNA sense strand
ccucaaagaguugggcaua

SEQ ID NO: 1687100 - RNA, 19 nt, Homo sapiens
  misc_RNA (1)...(19): siRNA sense strand
caccaggcaucucaaugga

SEQ ID NO: 1687101 - RNA, 19 nt, Homo sapiens
  misc_RNA (1)...(19): siRNA sense strand
caguggagauggagacagu

SEQ ID NO: 1687102 - RNA, 19 nt, Homo sapiens
  misc_RNA (1)...(19): siRNA sense strand
cuacuuugcaugugaauag

SEQ ID NO: 1687103 - RNA, 19 nt, Homo sapiens
  misc_RNA (1)...(19): siRNA sense strand
ccaugaagguuggcgacaa

SEQ ID NO: 1687104 - RNA, 19 nt, Homo sapiens
  misc_RNA (1)...(19): siRNA sense strand
gggcauaaagguaggaaag

SEQ ID NO: 1687105 - RNA, 19 nt, Homo sapiens
  misc_RNA (1)...(19): siRNA sense strand
ccauucgaguccugucauu

SEQ ID NO: 1687106 - RNA, 19 nt, Homo sapiens
  misc_RNA (1)...(19): siRNA sense strand
cccuggagcuguuacaugu

SEQ ID NO: 1687107 - RNA, 19 nt, Homo sapiens
  misc_RNA (1)...(19): siRNA sense strand
gcacccaagcgccucaaga

SEQ ID NO: 1687108 - RNA, 19 nt, Homo sapiens
  misc_RNA (1)...(19): siRNA sense strand
ugggaaggaguuuggaaua

SEQ ID NO: 1687109 - RNA, 19 nt, Homo sapiens
  misc_RNA (1)...(19): siRNA sense strand
cgacaagagggacaucuca

SEQ ID NO: 1687110 - RNA, 19 nt, Homo sapiens
  misc_RNA (1)...(19): siRNA sense strand
caugaagguuggcgacaag

SEQ ID NO: 1687111 - RNA, 19 nt, Homo sapiens
  misc_RNA (1)...(19): siRNA sense strand
augcaacgaucucucaaau

SEQ ID NO: 1687112 - RNA, 19 nt, Homo sapiens
  misc_RNA (1)...(19): siRNA sense strand
gaauaucaaauacgugaac

SEQ ID NO: 1687113 - RNA, 19 nt, Homo sapiens
  misc_RNA (1)...(19): siRNA sense strand
ccaugguggugucuuggaa

SEQ ID NO: 1687114 - RNA, 19 nt, Homo sapiens
  misc_RNA (1)...(19): siRNA sense strand
uaauuuggccaccuucaau

SEQ ID NO: 1687115 - RNA, 19 nt, Homo sapiens
  misc_RNA (1)...(19): siRNA sense strand
gauguuugagaauguugua

SEQ ID NO: 1687116 - RNA, 19 nt, Homo sapiens
  misc_RNA (1)...(19): siRNA sense strand
ggcagacaguggagaugga

SEQ ID NO: 1687117 - RNA, 19 nt, Homo sapiens
  misc_RNA (1)...(19): siRNA sense strand
gaagaucagagccgagaac

SEQ ID NO: 1687118 - RNA, 19 nt, Homo sapiens
  misc_RNA (1)...(19): siRNA sense strand
gcuauaacaacggcaaaga

SEQ ID NO: 1687119 - RNA, 19 nt, Homo sapiens
  misc_RNA (1)...(19): siRNA sense strand
guuuggcgauggcaaguuc

SEQ ID NO: 1687120 - RNA, 19 nt, Homo sapiens
  misc_RNA (1)...(19): siRNA sense strand
gagaauguuguagccauga

SEQ ID NO: 1687121 - RNA, 19 nt, Homo sapiens
  misc_RNA (1)...(19): siRNA sense strand
gaacucgaaauaacaacag

SEQ ID NO: 1687122 - RNA, 19 nt, Homo sapiens
  misc_RNA (1)...(19): siRNA sense strand
agaucaagcucgcgacucu

SEQ ID NO: 1687123 - RNA, 19 nt, Homo sapiens
  misc_RNA (1)...(19): siRNA sense strand
gagguguccagucugcuaa

SEQ ID NO: 1687124 - RNA, 19 nt, Homo sapiens
  misc_RNA (1)...(19): siRNA sense strand
agaguugggcauaaaggua

SEQ ID NO: 1687125 - RNA, 19 nt, Homo sapiens
  misc_RNA (1)...(19): siRNA sense strand
ggaaagaucaagggcuucu

SEQ ID NO: 1687126 - RNA, 19 nt, Homo sapiens
  misc_RNA (1)...(19): siRNA sense strand
gcuaccuaguccucaaaga

SEQ ID NO: 1687127 - RNA, 19 nt, Homo sapiens
  misc_RNA (1)...(19): siRNA sense strand
cucaaagaguugggcauaa

SEQ ID NO: 1687128 - RNA, 19 nt, Homo sapiens
  misc_RNA (1)...(19): siRNA sense strand
ggaggcagacaguggagau

SEQ ID NO: 1687129 - RNA, 19 nt, Homo sapiens
  misc_RNA (1)...(19): siRNA sense strand
aggacuacuuugcauguga

SEQ ID NO: 1687130 - RNA, 19 nt, Homo sapiens
  misc_RNA (1)...(19): siRNA sense strand
agaauguuguagccaugaa

SEQ ID NO: 1687131 - RNA, 19 nt, Homo sapiens
  misc_RNA (1)...(19): siRNA sense strand
uguccgaacucgaaauaac

SEQ ID NO: 1687132 - RNA, 19 nt, Homo sapiens
  misc_RNA (1)...(19): siRNA sense strand
caaagaguugggcauaaag

SEQ ID NO: 1687133 - RNA, 19 nt, Homo sapiens
  misc_RNA (1)...(19): siRNA sense strand
ucagagccgagaacaaaug

SEQ ID NO: 1687134 - RNA, 19 nt, Homo sapiens
  misc_RNA (1)...(19): siRNA sense strand
agccagcacuuuaauuugg

SEQ ID NO: 1687135 - RNA, 19 nt, Homo sapiens
  misc_RNA (1)...(19): siRNA sense strand
gaugggaaggaguuuggaa

SEQ ID NO: 1687136 - RNA, 19 nt, Homo sapiens
  misc_RNA (1)...(19): siRNA sense strand
cgacacagaggacacacau

SEQ ID NO: 1687137 - RNA, 19 nt, Homo sapiens
  misc_RNA (1)...(19): siRNA sense strand
caauaagcucgucuccuau

SEQ ID NO: 1687138 - RNA, 19 nt, Homo sapiens
  misc_RNA (1)...(19): siRNA sense strand
cagccagcacuuuaauuug

SEQ ID NO: 1687139 - RNA, 19 nt, Homo sapiens
  misc_RNA (1)...(19): siRNA sense strand
gauggagacaguucagagu

SEQ ID NO: 1687140 - RNA, 19 nt, Homo sapiens
  misc_RNA (1)...(19): siRNA sense strand
gcagguggaggcagacagu

SEQ ID NO: 1687141 - RNA, 19 nt, Homo sapiens
  misc_RNA (1)...(19): siRNA sense strand
ccagcuguccgaacucgaa

SEQ ID NO: 1687142 - RNA, 19 nt, Homo sapiens
  misc_RNA (1)...(19): siRNA sense strand
cgggaaaccaggacucguu

SEQ ID NO: 1687143 - RNA, 19 nt, Homo sapiens
  misc_RNA (1)...(19): siRNA sense strand
cccaagcgccucaagacaa

SEQ ID NO: 1687144 - RNA, 19 nt, Homo sapiens
  misc_RNA (1)...(19): siRNA sense strand
caagagcagccuggaagau

SEQ ID NO: 1687145 - RNA, 19 nt, Homo sapiens
  misc_RNA (1)...(19): siRNA sense strand
ugaacgacgugaggaacau

SEQ ID NO: 1687146 - RNA, 19 nt, Homo sapiens
  misc_RNA (1)...(19): siRNA sense strand
ggaauaucaaauacgugaa

SEQ ID NO: 1687147 - RNA, 19 nt, Homo sapiens
  misc_RNA (1)...(19): siRNA sense strand
caagcuguacccugccauu

SEQ ID NO: 1687148 - RNA, 19 nt, Homo sapiens
  misc_RNA (1)...(19): siRNA sense strand
cuggagcuguuacaugugu

SEQ ID NO: 1687149 - RNA, 19 nt, Homo sapiens
  misc_RNA (1)...(19): siRNA sense strand
gauggcuguuugucuugug

SEQ ID NO: 1687150 - RNA, 19 nt, Homo sapiens
  misc_RNA (1)...(19): siRNA sense strand
gaaaguacgucgcuucuga

SEQ ID NO: 1687151 - RNA, 19 nt, Homo sapiens
  misc_RNA (1)...(19): siRNA sense strand
gcaacgaucucucaaaugu

SEQ ID NO: 1687152 - RNA, 19 nt, Homo sapiens
  misc_RNA (1)...(19): siRNA sense strand
ucaauaagcucgucuccua

SEQ ID NO: 1687153 - RNA, 19 nt, Homo sapiens
  misc_RNA (1)...(19): siRNA sense strand
gcauaaagguaggaaagua

SEQ ID NO: 1687154 - RNA, 19 nt, Homo sapiens
  misc_RNA (1)...(19): siRNA sense strand
acaaauggcuucagauguu

SEQ ID NO: 1687155 - RNA, 19 nt, Homo sapiens
  misc_RNA (1)...(19): siRNA sense strand
gaucagagccgagaacaaa

SEQ ID NO: 1687156 - RNA, 19 nt, Homo sapiens
  misc_RNA (1)...(19): siRNA sense strand
gaacaaauggcuucagaug

SEQ ID NO: 1687157 - RNA, 19 nt, Homo sapiens
  misc_RNA (1)...(19): siRNA sense strand
gagaacaaauggcuucaga

SEQ ID NO: 1687158 - RNA, 19 nt, Homo sapiens
  misc_RNA (1)...(19): siRNA sense strand
ucaaagaguugggcauaaa

SEQ ID NO: 1687159 - RNA, 19 nt, Homo sapiens
  misc_RNA (1)...(19): siRNA sense strand
gccgagagcugcugcuuug

SEQ ID NO: 1687160 - RNA, 19 nt, Homo sapiens
  misc_RNA (1)...(19): siRNA sense strand
ugaggaacaucacaaagaa

SEQ ID NO: 1687161 - RNA, 19 nt, Homo sapiens
  misc_RNA (1)...(19): siRNA sense strand
ccucccagcucuuaccuua

SEQ ID NO: 1687162 - RNA, 19 nt, Homo sapiens
  misc_RNA (1)...(19): siRNA sense strand
gcucuuaccuuaccaucga

SEQ ID NO: 1687163 - RNA, 19 nt, Homo sapiens
  misc_RNA (1)...(19): siRNA sense strand
ccaagcgccucaagacaaa

SEQ ID NO: 1687164 - RNA, 19 nt, Homo sapiens
  misc_RNA (1)...(19): siRNA sense strand
ggacuacuuugcaugugaa

SEQ ID NO: 1687165 - RNA, 19 nt, Homo sapiens
  misc_RNA (1)...(19): siRNA sense strand
uuuaccaccugcugaauua

SEQ ID NO: 1687166 - RNA, 19 nt, Homo sapiens
  misc_RNA (1)...(19): siRNA sense strand
cagcagcccuggagacuca

SEQ ID NO: 1687167 - RNA, 19 nt, Homo sapiens
  misc_RNA (1)...(19): siRNA sense strand
caagacaaauugcuauaac

SEQ ID NO: 1687168 - RNA, 19 nt, Homo sapiens
  misc_RNA (1)...(19): siRNA sense strand
gaaggacuacuuugcaugu

SEQ ID NO: 1687169 - RNA, 19 nt, Homo sapiens
  misc_RNA (1)...(19): siRNA sense strand
guaccaugcucuggagaaa

SEQ ID NO: 1687170 - RNA, 19 nt, Homo sapiens
  misc_RNA (1)...(19): siRNA sense strand
ggaguguaauccagugaug

SEQ ID NO: 1687171 - RNA, 19 nt, Homo sapiens
  misc_RNA (1)...(19): siRNA sense strand
caaauggcuucagauguug

SEQ ID NO: 1687172 - RNA, 19 nt, Homo sapiens
  misc_RNA (1)...(19): siRNA sense strand
gggaaggaguuuggaauag

SEQ ID NO: 1687173 - RNA, 19 nt, Homo sapiens
  misc_RNA (1)...(19): siRNA sense strand
ggaaggaguuuggaauagg

SEQ ID NO: 1687174 - RNA, 19 nt, Homo sapiens
  misc_RNA (1)...(19): siRNA sense strand
ucagccagcacuuuaauuu

SEQ ID NO: 1687175 - RNA, 19 nt, Homo sapiens
  misc_RNA (1)...(19): siRNA sense strand
aacgaucucucaaauguga

SEQ ID NO: 1687176 - RNA, 19 nt, Homo sapiens
  misc_RNA (1)...(19): siRNA sense strand
gacgauggcuaucagucuu

SEQ ID NO: 1687177 - RNA, 19 nt, Homo sapiens
  misc_RNA (1)...(19): siRNA sense strand
acacggggcuugaauauga

SEQ ID NO: 1687178 - RNA, 19 nt, Homo sapiens
  misc_RNA (1)...(19): siRNA sense strand
acgcacagcugacgacuca

SEQ ID NO: 1687179 - RNA, 19 nt, Homo sapiens
  misc_RNA (1)...(19): siRNA sense strand
ccuggaagauggcuguuug

SEQ ID NO: 1687180 - RNA, 19 nt, Homo sapiens
  misc_RNA (1)...(19): siRNA sense strand
uuacauguaugaugacgau

SEQ ID NO: 1687181 - RNA, 19 nt, Homo sapiens
  misc_RNA (1)...(19): siRNA sense strand
ccauuugacuuggugauug

SEQ ID NO: 1687182 - RNA, 19 nt, Homo sapiens
  misc_RNA (1)...(19): siRNA sense strand
aaccaggacucguucagaa

SEQ ID NO: 1687183 - RNA, 19 nt, Homo sapiens
  misc_RNA (1)...(19): siRNA sense strand
ggagguguccagucugcua

SEQ ID NO: 1687184 - RNA, 19 nt, Homo sapiens
  misc_RNA (1)...(19): siRNA sense strand
ggagacaguucagaguauc

SEQ ID NO: 1687185 - RNA, 19 nt, Homo sapiens
  misc_RNA (1)...(19): siRNA sense strand
gcaacagcaucggcaggaa

SEQ ID NO: 1687186 - RNA, 19 nt, Homo sapiens
  misc_RNA (1)...(19): siRNA sense strand
cgaaauaacaacagugucu

SEQ ID NO: 1687187 - RNA, 19 nt, Homo sapiens
  misc_RNA (1)...(19): siRNA sense strand
caacaagagcagccuggaa

SEQ ID NO: 1687188 - RNA, 19 nt, Homo sapiens
  misc_RNA (1)...(19): siRNA sense strand
gcuguccgaacucgaaaua

SEQ ID NO: 1687189 - RNA, 19 nt, Homo sapiens
  misc_RNA (1)...(19): siRNA sense strand
ggagaucagaggccgaaga

SEQ ID NO: 1687190 - RNA, 19 nt, Homo sapiens
  misc_RNA (1)...(19): siRNA sense strand
cacgguuccuggaguguaa

SEQ ID NO: 1687191 - RNA, 19 nt, Homo sapiens
  misc_RNA (1)...(19): siRNA sense strand
cgaguccugucauuguuug

SEQ ID NO: 1687192 - RNA, 19 nt, Homo sapiens
  misc_RNA (1)...(19): siRNA sense strand
uggagacaguucagaguau

SEQ ID NO: 1687193 - RNA, 19 nt, Homo sapiens
  misc_RNA (1)...(19): siRNA sense strand
ggaagauggcuguuugucu

SEQ ID NO: 1687194 - RNA, 19 nt, Homo sapiens
  misc_RNA (1)...(19): siRNA sense strand
gagaucagaggccgaagau

SEQ ID NO: 1687195 - RNA, 19 nt, Homo sapiens
  misc_RNA (1)...(19): siRNA sense strand
gaggaacaucacaaagaaa

SEQ ID NO: 1687196 - RNA, 19 nt, Homo sapiens
  misc_RNA (1)...(19): siRNA sense strand
uguccagucugcuaagcua

SEQ ID NO: 1687197 - RNA, 19 nt, Homo sapiens
  misc_RNA (1)...(19): siRNA sense strand
agagggagguguccagucu

SEQ ID NO: 1687198 - RNA, 19 nt, Homo sapiens
  misc_RNA (1)...(19): siRNA sense strand
aagcucgucuccuaucgaa

SEQ ID NO: 1687199 - RNA, 19 nt, Homo sapiens
  misc_RNA (1)...(19): siRNA sense strand
ccucaaagaguugggcaua

SEQ ID NO: 1687200 - RNA, 19 nt, Homo sapiens
  misc_RNA (1)...(19): siRNA sense strand
caccaggcaucucaaugga

SEQ ID NO: 1687201 - RNA, 19 nt, Homo sapiens
  misc_RNA (1)...(19): siRNA sense strand
caguggagauggagacagu

SEQ ID NO: 1687202 - RNA, 19 nt, Homo sapiens
  misc_RNA (1)...(19): siRNA sense strand
cuacuuugcaugugaauag

SEQ ID NO: 1687203 - RNA, 19 nt, Homo sapiens
  misc_RNA (1)...(19): siRNA sense strand
ccaugaagguuggcgacaa

SEQ ID NO: 1687204 - RNA, 19 nt, Homo sapiens
  misc_RNA (1)...(19): siRNA sense strand
gggcauaaagguaggaaag

SEQ ID NO: 1687205 - RNA, 19 nt, Homo sapiens
  misc_RNA (1)...(19): siRNA sense strand
ccauucgaguccugucauu

SEQ ID NO: 1687206 - RNA, 19 nt, Homo sapiens
  misc_RNA (1)...(19): siRNA sense strand
cccuggagcuguuacaugu

SEQ ID NO: 1687207 - RNA, 19 nt, Homo sapiens
  misc_RNA (1)...(19): siRNA sense strand
gcacccaagcgccucaaga

SEQ ID NO: 1687208 - RNA, 19 nt, Homo sapiens
  misc_RNA (1)...(19): siRNA sense strand
ugggaaggaguuuggaaua

SEQ ID NO: 1687209 - RNA, 19 nt, Homo sapiens
  misc_RNA (1)...(19): siRNA sense strand
cgacaagagggacaucuca

SEQ ID NO: 1687210 - RNA, 19 nt, Homo sapiens
  misc_RNA (1)...(19): siRNA sense strand
caugaagguuggcgacaag

SEQ ID NO: 1687211 - RNA, 19 nt, Homo sapiens
  misc_RNA (1)...(19): siRNA sense strand
augcaacgaucucucaaau

SEQ ID NO: 1687212 - RNA, 19 nt, Homo sapiens
  misc_RNA (1)...(19): siRNA sense strand
gaauaucaaauacgugaac

SEQ ID NO: 1687213 - RNA, 19 nt, Homo sapiens
  misc_RNA (1)...(19): siRNA sense strand
ccaugguggugucuuggaa

SEQ ID NO: 1687214 - RNA, 19 nt, Homo sapiens
  misc_RNA (1)...(19): siRNA sense strand
uaauuuggccaccuucaau

SEQ ID NO: 1687215 - RNA, 19 nt, Homo sapiens
  misc_RNA (1)...(19): siRNA sense strand
gauguuugagaauguugua

SEQ ID NO: 1687216 - RNA, 19 nt, Homo sapiens
  misc_RNA (1)...(19): siRNA sense strand
ggcagacaguggagaugga

SEQ ID NO: 1687217 - RNA, 19 nt, Homo sapiens
  misc_RNA (1)...(19): siRNA sense strand
gaagaucagagccgagaac

SEQ ID NO: 1687218 - RNA, 19 nt, Homo sapiens
  misc_RNA (1)...(19): siRNA sense strand
gcuauaacaacggcaaaga

SEQ ID NO: 1687219 - RNA, 19 nt, Homo sapiens
  misc_RNA (1)...(19): siRNA sense strand
guuuggcgauggcaaguuc

SEQ ID NO: 1687220 - RNA, 19 nt, Homo sapiens
  misc_RNA (1)...(19): siRNA sense strand
gagaauguuguagccauga

SEQ ID NO: 1687221 - RNA, 19 nt, Homo sapiens
  misc_RNA (1)...(19): siRNA sense strand
gaacucgaaauaacaacag

SEQ ID NO: 1687222 - RNA, 19 nt, Homo sapiens
  misc_RNA (1)...(19): siRNA sense strand
agaucaagcucgcgacucu

SEQ ID NO: 1687223 - RNA, 19 nt, Homo sapiens
  misc_RNA (1)...(19): siRNA sense strand
gagguguccagucugcuaa

SEQ ID NO: 1687224 - RNA, 19 nt, Homo sapiens
  misc_RNA (1)...(19): siRNA sense strand
agaguugggcauaaaggua

SEQ ID NO: 1687225 - RNA, 19 nt, Homo sapiens
  misc_RNA (1)...(19): siRNA sense strand
ggaaagaucaagggcuucu

SEQ ID NO: 1687226 - RNA, 19 nt, Homo sapiens
  misc_RNA (1)...(19): siRNA sense strand
gcuaccuaguccucaaaga

SEQ ID NO: 1687227 - RNA, 19 nt, Homo sapiens
  misc_RNA (1)...(19): siRNA sense strand
cucaaagaguugggcauaa

SEQ ID NO: 1687228 - RNA, 19 nt, Homo sapiens
  misc_RNA (1)...(19): siRNA sense strand
ggaggcagacaguggagau

SEQ ID NO: 1687229 - RNA, 19 nt, Homo sapiens
  misc_RNA (1)...(19): siRNA sense strand
aggacuacuuugcauguga

SEQ ID NO: 1687230 - RNA, 19 nt, Homo sapiens
  misc_RNA (1)...(19): siRNA sense strand
agaauguuguagccaugaa

SEQ ID NO: 1687231 - RNA, 19 nt, Homo sapiens
  misc_RNA (1)...(19): siRNA sense strand
uguccgaacucgaaauaac

SEQ ID NO: 1687232 - RNA, 19 nt, Homo sapiens
  misc_RNA (1)...(19): siRNA sense strand
caaagaguugggcauaaag

SEQ ID NO: 1687233 - RNA, 19 nt, Homo sapiens
  misc_RNA (1)...(19): siRNA sense strand
ucagagccgagaacaaaug

SEQ ID NO: 1687234 - RNA, 19 nt, Homo sapiens
  misc_RNA (1)...(19): siRNA sense strand
agccagcacuuuaauuugg

SEQ ID NO: 1687235 - RNA, 19 nt, Homo sapiens
  misc_RNA (1)...(19): siRNA sense strand
gaugggaaggaguuuggaa

SEQ ID NO: 1687236 - RNA, 19 nt, Homo sapiens
  misc_RNA (1)...(19): siRNA sense strand
cgacacagaggacacacau

SEQ ID NO: 1687237 - RNA, 19 nt, Homo sapiens
  misc_RNA (1)...(19): siRNA sense strand
caauaagcucgucuccuau

SEQ ID NO: 1687238 - RNA, 19 nt, Homo sapiens
  misc_RNA (1)...(19): siRNA sense strand
cagccagcacuuuaauuug

SEQ ID NO: 1687239 - RNA, 19 nt, Homo sapiens
  misc_RNA (1)...(19): siRNA sense strand
gauggagacaguucagagu

SEQ ID NO: 1687240 - RNA, 19 nt, Homo sapiens
  misc_RNA (1)...(19): siRNA sense strand
gcagguggaggcagacagu

SEQ ID NO: 1687241 - RNA, 19 nt, Homo sapiens
  misc_RNA (1)...(19): siRNA sense strand
ccagcuguccgaacucgaa

SEQ ID NO: 1687242 - RNA, 19 nt, Homo sapiens
  misc_RNA (1)...(19): siRNA sense strand
cgggaaaccaggacucguu

SEQ ID NO: 1687243 - RNA, 19 nt, Homo sapiens
  misc_RNA (1)...(19): siRNA sense strand
cccaagcgccucaagacaa

SEQ ID NO: 1687244 - RNA, 19 nt, Homo sapiens
  misc_RNA (1)...(19): siRNA sense strand
caagagcagccuggaagau

SEQ ID NO: 1687245 - RNA, 19 nt, Homo sapiens
  misc_RNA (1)...(19): siRNA sense strand
ugaacgacgugaggaacau

SEQ ID NO: 1687246 - RNA, 19 nt, Homo sapiens
  misc_RNA (1)...(19): siRNA sense strand
ggaauaucaaauacgugaa

SEQ ID NO: 1687247 - RNA, 19 nt, Homo sapiens
  misc_RNA (1)...(19): siRNA sense strand
caagcuguacccugccauu

SEQ ID NO: 1687248 - RNA, 19 nt, Homo sapiens
  misc_RNA (1)...(19): siRNA sense strand
cuggagcuguuacaugugu

SEQ ID NO: 1687249 - RNA, 19 nt, Homo sapiens
  misc_RNA (1)...(19): siRNA sense strand
gauggcuguuugucuugug

SEQ ID NO: 1687250 - RNA, 19 nt, Homo sapiens
  misc_RNA (1)...(19): siRNA sense strand
gaaaguacgucgcuucuga

SEQ ID NO: 1687251 - RNA, 19 nt, Homo sapiens
  misc_RNA (1)...(19): siRNA sense strand
gcaacgaucucucaaaugu

SEQ ID NO: 1687252 - RNA, 19 nt, Homo sapiens
  misc_RNA (1)...(19): siRNA sense strand
ucaauaagcucgucuccua

SEQ ID NO: 1687253 - RNA, 19 nt, Homo sapiens
  misc_RNA (1)...(19): siRNA sense strand
gcauaaagguaggaaagua

SEQ ID NO: 1687254 - RNA, 19 nt, Homo sapiens
  misc_RNA (1)...(19): siRNA sense strand
acaaauggcuucagauguu

SEQ ID NO: 1687255 - RNA, 19 nt, Homo sapiens
  misc_RNA (1)...(19): siRNA sense strand
gaucagagccgagaacaaa

SEQ ID NO: 1687256 - RNA, 19 nt, Homo sapiens
  misc_RNA (1)...(19): siRNA sense strand
gaacaaauggcuucagaug

SEQ ID NO: 1687257 - RNA, 19 nt, Homo sapiens
  misc_RNA (1)...(19): siRNA sense strand
gagaacaaauggcuucaga

SEQ ID NO: 1687258 - RNA, 19 nt, Homo sapiens
  misc_RNA (1)...(19): siRNA sense strand
ucaaagaguugggcauaaa

SEQ ID NO: 1687259 - RNA, 19 nt, Homo sapiens
  misc_RNA (1)...(19): siRNA sense strand
gccgagagcugcugcuuug

SEQ ID NO: 1687260 - RNA, 19 nt, Homo sapiens
  misc_RNA (1)...(19): siRNA sense strand
ugaggaacaucacaaagaa

SEQ ID NO: 1687261 - RNA, 19 nt, Homo sapiens
  misc_RNA (1)...(19): siRNA sense strand
ccucccagcucuuaccuua

SEQ ID NO: 1687262 - RNA, 19 nt, Homo sapiens
  misc_RNA (1)...(19): siRNA sense strand
gcucuuaccuuaccaucga

SEQ ID NO: 1687263 - RNA, 19 nt, Homo sapiens
  misc_RNA (1)...(19): siRNA sense strand
ccaagcgccucaagacaaa

SEQ ID NO: 1687264 - RNA, 19 nt, Homo sapiens
  misc_RNA (1)...(19): siRNA sense strand
ggacuacuuugcaugugaa

SEQ ID NO: 1687265 - RNA, 19 nt, Homo sapiens
  misc_RNA (1)...(19): siRNA sense strand
uuuaccaccugcugaauua

SEQ ID NO: 1687266 - RNA, 19 nt, Homo sapiens
  misc_RNA (1)...(19): siRNA sense strand
cagcagcccuggagacuca

SEQ ID NO: 1687267 - RNA, 19 nt, Homo sapiens
  misc_RNA (1)...(19): siRNA sense strand
caagacaaauugcuauaac

SEQ ID NO: 1687268 - RNA, 19 nt, Homo sapiens
  misc_RNA (1)...(19): siRNA sense strand
gaaggacuacuuugcaugu

SEQ ID NO: 1687269 - RNA, 19 nt, Homo sapiens
  misc_RNA (1)...(19): siRNA sense strand
guaccaugcucuggagaaa

SEQ ID NO: 1687270 - RNA, 19 nt, Homo sapiens
  misc_RNA (1)...(19): siRNA sense strand
ggaguguaauccagugaug

SEQ ID NO: 1687271 - RNA, 19 nt, Homo sapiens
  misc_RNA (1)...(19): siRNA sense strand
caaauggcuucagauguug

SEQ ID NO: 1687272 - RNA, 19 nt, Homo sapiens
  misc_RNA (1)...(19): siRNA sense strand
gggaaggaguuuggaauag

SEQ ID NO: 1687273 - RNA, 19 nt, Homo sapiens
  misc_RNA (1)...(19): siRNA sense strand
ggaaggaguuuggaauagg

SEQ ID NO: 1687274 - RNA, 19 nt, Homo sapiens
  misc_RNA (1)...(19): siRNA sense strand
ucagccagcacuuuaauuu

SEQ ID NO: 1687275 - RNA, 19 nt, Homo sapiens
  misc_RNA (1)...(19): siRNA sense strand
aacgaucucucaaauguga

SEQ ID NO: 1687276 - RNA, 19 nt, Homo sapiens
  misc_RNA (1)...(19): siRNA sense strand
gacgauggcuaucagucuu

SEQ ID NO: 1687277 - RNA, 19 nt, Homo sapiens
  misc_RNA (1)...(19): siRNA sense strand
acacggggcuugaauauga

SEQ ID NO: 1687278 - RNA, 19 nt, Homo sapiens
  misc_RNA (1)...(19): siRNA sense strand
acgcacagcugacgacuca

SEQ ID NO: 1687279 - RNA, 19 nt, Homo sapiens
  misc_RNA (1)...(19): siRNA sense strand
ccuggaagauggcuguuug

SEQ ID NO: 1687280 - RNA, 19 nt, Homo sapiens
  misc_RNA (1)...(19): siRNA sense strand
uuacauguaugaugacgau

SEQ ID NO: 1687281 - RNA, 19 nt, Homo sapiens
  misc_RNA (1)...(19): siRNA sense strand
ccauuugacuuggugauug

SEQ ID NO: 1687282 - RNA, 19 nt, Homo sapiens
  misc_RNA (1)...(19): siRNA sense strand
aaccaggacucguucagaa

SEQ ID NO: 1687283 - RNA, 19 nt, Homo sapiens
  misc_RNA (1)...(19): siRNA sense strand
ggagguguccagucugcua

SEQ ID NO: 1687284 - RNA, 19 nt, Homo sapiens
  misc_RNA (1)...(19): siRNA sense strand
ggagacaguucagaguauc

SEQ ID NO: 1687285 - RNA, 19 nt, Homo sapiens
  misc_RNA (1)...(19): siRNA sense strand
gcaacagcaucggcaggaa

SEQ ID NO: 1687286 - RNA, 19 nt, Homo sapiens
  misc_RNA (1)...(19): siRNA sense strand
cgaaauaacaacagugucu

SEQ ID NO: 1687287 - RNA, 19 nt, Homo sapiens
  misc_RNA (1)...(19): siRNA sense strand
caacaagagcagccuggaa

SEQ ID NO: 1687288 - RNA, 19 nt, Homo sapiens
  misc_RNA (1)...(19): siRNA sense strand
gcuguccgaacucgaaaua

SEQ ID NO: 1687289 - RNA, 19 nt, Homo sapiens
  misc_RNA (1)...(19): siRNA sense strand
ggagaucagaggccgaaga

SEQ ID NO: 1687290 - RNA, 19 nt, Homo sapiens
  misc_RNA (1)...(19): siRNA sense strand
cacgguuccuggaguguaa

SEQ ID NO: 1687291 - RNA, 19 nt, Homo sapiens
  misc_RNA (1)...(19): siRNA sense strand
cgaguccugucauuguuug

SEQ ID NO: 1687292 - RNA, 19 nt, Homo sapiens
  misc_RNA (1)...(19): siRNA sense strand
uggagacaguucagaguau

SEQ ID NO: 1687293 - RNA, 19 nt, Homo sapiens
  misc_RNA (1)...(19): siRNA sense strand
ggaagauggcuguuugucu

SEQ ID NO: 1687294 - RNA, 19 nt, Homo sapiens
  misc_RNA (1)...(19): siRNA sense strand
gagaucagaggccgaagau

SEQ ID NO: 1687295 - RNA, 19 nt, Homo sapiens
  misc_RNA (1)...(19): siRNA sense strand
gaggaacaucacaaagaaa

SEQ ID NO: 1687296 - RNA, 19 nt, Homo sapiens
  misc_RNA (1)...(19): siRNA sense strand
uguccagucugcuaagcua

SEQ ID NO: 1687297 - RNA, 19 nt, Homo sapiens
  misc_RNA (1)...(19): siRNA sense strand
agagggagguguccagucu

SEQ ID NO: 1687298 - RNA, 19 nt, Homo sapiens
  misc_RNA (1)...(19): siRNA sense strand
aagcucgucuccuaucgaa

SEQ ID NO: 1687299 - RNA, 19 nt, Homo sapiens
  misc_RNA (1)...(19): siRNA sense strand
ccucaaagaguugggcaua

SEQ ID NO: 1687300 - RNA, 19 nt, Homo sapiens
  misc_RNA (1)...(19): siRNA sense strand
caccaggcaucucaaugga

SEQ ID NO: 1687301 - RNA, 19 nt, Homo sapiens
  misc_RNA (1)...(19): siRNA sense strand
caguggagauggagacagu

SEQ ID NO: 1687302 - RNA, 19 nt, Homo sapiens
  misc_RNA (1)...(19): siRNA sense strand
cuacuuugcaugugaauag

SEQ ID NO: 1687303 - RNA, 19 nt, Homo sapiens
  misc_RNA (1)...(19): siRNA sense strand
ccaugaagguuggcgacaa

SEQ ID NO: 1687304 - RNA, 19 nt, Homo sapiens
  misc_RNA (1)...(19): siRNA sense strand
gggcauaaagguaggaaag

SEQ ID NO: 1687305 - RNA, 19 nt, Homo sapiens
  misc_RNA (1)...(19): siRNA sense strand
ccauucgaguccugucauu

SEQ ID NO: 1687306 - RNA, 19 nt, Homo sapiens
  misc_RNA (1)...(19): siRNA sense strand
cccuggagcuguuacaugu

SEQ ID NO: 1687307 - RNA, 19 nt, Homo sapiens
  misc_RNA (1)...(19): siRNA sense strand
gcacccaagcgccucaaga

SEQ ID NO: 1687308 - RNA, 19 nt, Homo sapiens
  misc_RNA (1)...(19): siRNA sense strand
ugggaaggaguuuggaaua

SEQ ID NO: 1687309 - RNA, 19 nt, Homo sapiens
  misc_RNA (1)...(19): siRNA sense strand
cgacaagagggacaucuca

SEQ ID NO: 1687310 - RNA, 19 nt, Homo sapiens
  misc_RNA (1)...(19): siRNA sense strand
caugaagguuggcgacaag

SEQ ID NO: 1687311 - RNA, 19 nt, Homo sapiens
  misc_RNA (1)...(19): siRNA sense strand
augcaacgaucucucaaau

SEQ ID NO: 1687312 - RNA, 19 nt, Homo sapiens
  misc_RNA (1)...(19): siRNA sense strand
gaauaucaaauacgugaac

SEQ ID NO: 1687313 - RNA, 19 nt, Homo sapiens
  misc_RNA (1)...(19): siRNA sense strand
ccaugguggugucuuggaa

SEQ ID NO: 1687314 - RNA, 19 nt, Homo sapiens
  misc_RNA (1)...(19): siRNA sense strand
uaauuuggccaccuucaau

SEQ ID NO: 1687315 - RNA, 19 nt, Homo sapiens
  misc_RNA (1)...(19): siRNA sense strand
gauguuugagaauguugua

SEQ ID NO: 1687316 - RNA, 19 nt, Homo sapiens
  misc_RNA (1)...(19): siRNA sense strand
ggcagacaguggagaugga

SEQ ID NO: 1687317 - RNA, 19 nt, Homo sapiens
  misc_RNA (1)...(19): siRNA sense strand
gaagaucagagccgagaac

SEQ ID NO: 1687318 - RNA, 19 nt, Homo sapiens
  misc_RNA (1)...(19): siRNA sense strand
gcuauaacaacggcaaaga

SEQ ID NO: 1687319 - RNA, 19 nt, Homo sapiens
  misc_RNA (1)...(19): siRNA sense strand
guuuggcgauggcaaguuc

SEQ ID NO: 1687320 - RNA, 19 nt, Homo sapiens
  misc_RNA (1)...(19): siRNA sense strand
gagaauguuguagccauga

SEQ ID NO: 1687321 - RNA, 19 nt, Homo sapiens
  misc_RNA (1)...(19): siRNA sense strand
gaacucgaaauaacaacag

SEQ ID NO: 1687322 - RNA, 19 nt, Homo sapiens
  misc_RNA (1)...(19): siRNA sense strand
agaucaagcucgcgacucu

SEQ ID NO: 1687323 - RNA, 19 nt, Homo sapiens
  misc_RNA (1)...(19): siRNA sense strand
gagguguccagucugcuaa

SEQ ID NO: 1687324 - RNA, 19 nt, Homo sapiens
  misc_RNA (1)...(19): siRNA sense strand
agaguugggcauaaaggua

SEQ ID NO: 1687325 - RNA, 19 nt, Homo sapiens
  misc_RNA (1)...(19): siRNA sense strand
ggaaagaucaagggcuucu

SEQ ID NO: 1687326 - RNA, 19 nt, Homo sapiens
  misc_RNA (1)...(19): siRNA sense strand
gcuaccuaguccucaaaga

SEQ ID NO: 1687327 - RNA, 19 nt, Homo sapiens
  misc_RNA (1)...(19): siRNA sense strand
cucaaagaguugggcauaa

SEQ ID NO: 1687328 - RNA, 19 nt, Homo sapiens
  misc_RNA (1)...(19): siRNA sense strand
ggaggcagacaguggagau

SEQ ID NO: 1687329 - RNA, 19 nt, Homo sapiens
  misc_RNA (1)...(19): siRNA sense strand
aggacuacuuugcauguga

SEQ ID NO: 1687330 - RNA, 19 nt, Homo sapiens
  misc_RNA (1)...(19): siRNA sense strand
agaauguuguagccaugaa

SEQ ID NO: 1687331 - RNA, 19 nt, Homo sapiens
  misc_RNA (1)...(19): siRNA sense strand
uguccgaacucgaaauaac

SEQ ID NO: 1687332 - RNA, 19 nt, Homo sapiens
  misc_RNA (1)...(19): siRNA sense strand
caaagaguugggcauaaag

SEQ ID NO: 1687333 - RNA, 19 nt, Homo sapiens
  misc_RNA (1)...(19): siRNA sense strand
ucagagccgagaacaaaug

SEQ ID NO: 1687334 - RNA, 19 nt, Homo sapiens
  misc_RNA (1)...(19): siRNA sense strand
agccagcacuuuaauuugg

SEQ ID NO: 1687335 - RNA, 19 nt, Homo sapiens
  misc_RNA (1)...(19): siRNA sense strand
gaugggaaggaguuuggaa

SEQ ID NO: 1687336 - RNA, 19 nt, Homo sapiens
  misc_RNA (1)...(19): siRNA sense strand
cgacacagaggacacacau

SEQ ID NO: 1687337 - RNA, 19 nt, Homo sapiens
  misc_RNA (1)...(19): siRNA sense strand
caauaagcucgucuccuau

SEQ ID NO: 1687338 - RNA, 19 nt, Homo sapiens
  misc_RNA (1)...(19): siRNA sense strand
cagccagcacuuuaauuug

SEQ ID NO: 1687339 - RNA, 19 nt, Homo sapiens
  misc_RNA (1)...(19): siRNA sense strand
gauggagacaguucagagu

SEQ ID NO: 1687340 - RNA, 19 nt, Homo sapiens
  misc_RNA (1)...(19): siRNA sense strand
gcagguggaggcagacagu

SEQ ID NO: 1687341 - RNA, 19 nt, Homo sapiens
  misc_RNA (1)...(19): siRNA sense strand
ccagcuguccgaacucgaa

SEQ ID NO: 1687342 - RNA, 19 nt, Homo sapiens
  misc_RNA (1)...(19): siRNA sense strand
cgggaaaccaggacucguu

SEQ ID NO: 1687343 - RNA, 19 nt, Homo sapiens
  misc_RNA (1)...(19): siRNA sense strand
cccaagcgccucaagacaa

SEQ ID NO: 1687344 - RNA, 19 nt, Homo sapiens
  misc_RNA (1)...(19): siRNA sense strand
caagagcagccuggaagau

SEQ ID NO: 1687345 - RNA, 19 nt, Homo sapiens
  misc_RNA (1)...(19): siRNA sense strand
ugaacgacgugaggaacau

SEQ ID NO: 1687346 - RNA, 19 nt, Homo sapiens
  misc_RNA (1)...(19): siRNA sense strand
ggaauaucaaauacgugaa

SEQ ID NO: 1687347 - RNA, 19 nt, Homo sapiens
  misc_RNA (1)...(19): siRNA sense strand
caagcuguacccugccauu

SEQ ID NO: 1687348 - RNA, 19 nt, Homo sapiens
  misc_RNA (1)...(19): siRNA sense strand
cuggagcuguuacaugugu

SEQ ID NO: 1687349 - RNA, 19 nt, Homo sapiens
  misc_RNA (1)...(19): siRNA sense strand
gauggcuguuugucuugug

SEQ ID NO: 1687350 - RNA, 19 nt, Homo sapiens
  misc_RNA (1)...(19): siRNA sense strand
gaaaguacgucgcuucuga

SEQ ID NO: 1687351 - RNA, 19 nt, Homo sapiens
  misc_RNA (1)...(19): siRNA sense strand
gcaacgaucucucaaaugu

SEQ ID NO: 1687352 - RNA, 19 nt, Homo sapiens
  misc_RNA (1)...(19): siRNA sense strand
ucaauaagcucgucuccua

SEQ ID NO: 1687353 - RNA, 19 nt, Homo sapiens
  misc_RNA (1)...(19): siRNA sense strand
gcauaaagguaggaaagua

SEQ ID NO: 1687354 - RNA, 19 nt, Homo sapiens
  misc_RNA (1)...(19): siRNA sense strand
acaaauggcuucagauguu

SEQ ID NO: 1687355 - RNA, 19 nt, Homo sapiens
  misc_RNA (1)...(19): siRNA sense strand
gaucagagccgagaacaaa

SEQ ID NO: 1687356 - RNA, 19 nt, Homo sapiens
  misc_RNA (1)...(19): siRNA sense strand
gaacaaauggcuucagaug

SEQ ID NO: 1687357 - RNA, 19 nt, Homo sapiens
  misc_RNA (1)...(19): siRNA sense strand
gagaacaaauggcuucaga

SEQ ID NO: 1687358 - RNA, 19 nt, Homo sapiens
  misc_RNA (1)...(19): siRNA sense strand
ucaaagaguugggcauaaa

SEQ ID NO: 1687359 - RNA, 19 nt, Homo sapiens
  misc_RNA (1)...(19): siRNA sense strand
gccgagagcugcugcuuug

SEQ ID NO: 1687360 - RNA, 19 nt, Homo sapiens
  misc_RNA (1)...(19): siRNA sense strand
ugaggaacaucacaaagaa

SEQ ID NO: 1687361 - RNA, 19 nt, Homo sapiens
  misc_RNA (1)...(19): siRNA sense strand
ccucccagcucuuaccuua

SEQ ID NO: 1687362 - RNA, 19 nt, Homo sapiens
  misc_RNA (1)...(19): siRNA sense strand
gcucuuaccuuaccaucga

SEQ ID NO: 1687363 - RNA, 19 nt, Homo sapiens
  misc_RNA (1)...(19): siRNA sense strand
ccaagcgccucaagacaaa

SEQ ID NO: 1687364 - RNA, 19 nt, Homo sapiens
  misc_RNA (1)...(19): siRNA sense strand
ggacuacuuugcaugugaa

SEQ ID NO: 1687365 - RNA, 19 nt, Homo sapiens
  misc_RNA (1)...(19): siRNA sense strand
uuuaccaccugcugaauua

SEQ ID NO: 1687366 - RNA, 19 nt, Homo sapiens
  misc_RNA (1)...(19): siRNA sense strand
cagcagcccuggagacuca

SEQ ID NO: 1687367 - RNA, 19 nt, Homo sapiens
  misc_RNA (1)...(19): siRNA sense strand
caagacaaauugcuauaac

SEQ ID NO: 1687368 - RNA, 19 nt, Homo sapiens
  misc_RNA (1)...(19): siRNA sense strand
gaaggacuacuuugcaugu

SEQ ID NO: 1687369 - RNA, 19 nt, Homo sapiens
  misc_RNA (1)...(19): siRNA sense strand
guaccaugcucuggagaaa

SEQ ID NO: 1687370 - RNA, 19 nt, Homo sapiens
  misc_RNA (1)...(19): siRNA sense strand
ggaguguaauccagugaug

SEQ ID NO: 1687371 - RNA, 19 nt, Homo sapiens
  misc_RNA (1)...(19): siRNA sense strand
caaauggcuucagauguug

SEQ ID NO: 1687372 - RNA, 19 nt, Homo sapiens
  misc_RNA (1)...(19): siRNA sense strand
gggaaggaguuuggaauag

SEQ ID NO: 1687373 - RNA, 19 nt, Homo sapiens
  misc_RNA (1)...(19): siRNA sense strand
ggaaggaguuuggaauagg

SEQ ID NO: 1687374 - RNA, 19 nt, Homo sapiens
  misc_RNA (1)...(19): siRNA sense strand
ucagccagcacuuuaauuu

SEQ ID NO: 1687375 - RNA, 19 nt, Homo sapiens
  misc_RNA (1)...(19): siRNA sense strand
aacgaucucucaaauguga

SEQ ID NO: 1687376 - RNA, 19 nt, Homo sapiens
  misc_RNA (1)...(19): siRNA sense strand
gacgauggcuaucagucuu

SEQ ID NO: 1687377 - RNA, 19 nt, Homo sapiens
  misc_RNA (1)...(19): siRNA sense strand
acacggggcuugaauauga

SEQ ID NO: 1687378 - RNA, 19 nt, Homo sapiens
  misc_RNA (1)...(19): siRNA sense strand
acgcacagcugacgacuca

SEQ ID NO: 1687379 - RNA, 19 nt, Homo sapiens
  misc_RNA (1)...(19): siRNA sense strand
ccuggaagauggcuguuug

SEQ ID NO: 1687380 - RNA, 19 nt, Homo sapiens
  misc_RNA (1)...(19): siRNA sense strand
uuacauguaugaugacgau

SEQ ID NO: 1687381 - RNA, 19 nt, Homo sapiens
  misc_RNA (1)...(19): siRNA sense strand
ccauuugacuuggugauug

SEQ ID NO: 1687382 - RNA, 19 nt, Homo sapiens
  misc_RNA (1)...(19): siRNA sense strand
aaccaggacucguucagaa

SEQ ID NO: 1687383 - RNA, 19 nt, Homo sapiens
  misc_RNA (1)...(19): siRNA sense strand
ggagguguccagucugcua

SEQ ID NO: 1687384 - RNA, 19 nt, Homo sapiens
  misc_RNA (1)...(19): siRNA sense strand
ggagacaguucagaguauc

SEQ ID NO: 1687385 - RNA, 19 nt, Homo sapiens
  misc_RNA (1)...(19): siRNA sense strand
gcaacagcaucggcaggaa

SEQ ID NO: 1687386 - RNA, 19 nt, Homo sapiens
  misc_RNA (1)...(19): siRNA sense strand
cgaaauaacaacagugucu

SEQ ID NO: 1687387 - RNA, 19 nt, Homo sapiens
  misc_RNA (1)...(19): siRNA sense strand
caacaagagcagccuggaa

SEQ ID NO: 1687388 - RNA, 19 nt, Homo sapiens
  misc_RNA (1)...(19): siRNA sense strand
gcuguccgaacucgaaaua

SEQ ID NO: 1687389 - RNA, 19 nt, Homo sapiens
  misc_RNA (1)...(19): siRNA sense strand
ggagaucagaggccgaaga

SEQ ID NO: 1687390 - RNA, 19 nt, Homo sapiens
  misc_RNA (1)...(19): siRNA sense strand
cacgguuccuggaguguaa

SEQ ID NO: 1687391 - RNA, 19 nt, Homo sapiens
  misc_RNA (1)...(19): siRNA sense strand
cgaguccugucauuguuug

SEQ ID NO: 1687392 - RNA, 19 nt, Homo sapiens
  misc_RNA (1)...(19): siRNA sense strand
uggagacaguucagaguau

SEQ ID NO: 1687393 - RNA, 19 nt, Homo sapiens
  misc_RNA (1)...(19): siRNA sense strand
ggaagauggcuguuugucu

SEQ ID NO: 1687394 - RNA, 19 nt, Homo sapiens
  misc_RNA (1)...(19): siRNA sense strand
agagggagguguccagucu

SEQ ID NO: 1687395 - RNA, 19 nt, Homo sapiens
  misc_RNA (1)...(19): siRNA sense strand
gagaucagaggccgaagau

SEQ ID NO: 1687396 - RNA, 19 nt, Homo sapiens
  misc_RNA (1)...(19): siRNA sense strand
gaggaacaucacaaagaaa

SEQ ID NO: 1687397 - RNA, 19 nt, Homo sapiens
  misc_RNA (1)...(19): siRNA sense strand
uguccagucugcuaagcua

SEQ ID NO: 1687398 - RNA, 19 nt, Homo sapiens
  misc_RNA (1)...(19): siRNA sense strand
aagcucgucuccuaucgaa

SEQ ID NO: 1687399 - RNA, 19 nt, Homo sapiens
  misc_RNA (1)...(19): siRNA sense strand
ccucaaagaguugggcaua

SEQ ID NO: 1687400 - RNA, 19 nt, Homo sapiens
  misc_RNA (1)...(19): siRNA sense strand
caccaggcaucucaaugga

SEQ ID NO: 1687401 - RNA, 19 nt, Homo sapiens
  misc_RNA (1)...(19): siRNA sense strand
caguggagauggagacagu

SEQ ID NO: 1687402 - RNA, 19 nt, Homo sapiens
  misc_RNA (1)...(19): siRNA sense strand
cuacuuugcaugugaauag

SEQ ID NO: 1687403 - RNA, 19 nt, Homo sapiens
  misc_RNA (1)...(19): siRNA sense strand
ccaugaagguuggcgacaa

SEQ ID NO: 1687404 - RNA, 19 nt, Homo sapiens
  misc_RNA (1)...(19): siRNA sense strand
gggcauaaagguaggaaag

SEQ ID NO: 1687405 - RNA, 19 nt, Homo sapiens
  misc_RNA (1)...(19): siRNA sense strand
ccauucgaguccugucauu

SEQ ID NO: 1687406 - RNA, 19 nt, Homo sapiens
  misc_RNA (1)...(19): siRNA sense strand
cccuggagcuguuacaugu

SEQ ID NO: 1687407 - RNA, 19 nt, Homo sapiens
  misc_RNA (1)...(19): siRNA sense strand
gcacccaagcgccucaaga

SEQ ID NO: 1687408 - RNA, 19 nt, Homo sapiens
  misc_RNA (1)...(19): siRNA sense strand
ugggaaggaguuuggaaua

SEQ ID NO: 1687409 - RNA, 19 nt, Homo sapiens
  misc_RNA (1)...(19): siRNA sense strand
cgacaagagggacaucuca

SEQ ID NO: 1687410 - RNA, 19 nt, Homo sapiens
  misc_RNA (1)...(19): siRNA sense strand
caugaagguuggcgacaag

SEQ ID NO: 1687411 - RNA, 19 nt, Homo sapiens
  misc_RNA (1)...(19): siRNA sense strand
augcaacgaucucucaaau

SEQ ID NO: 1687412 - RNA, 19 nt, Homo sapiens
  misc_RNA (1)...(19): siRNA sense strand
gaauaucaaauacgugaac

SEQ ID NO: 1687413 - RNA, 19 nt, Homo sapiens
  misc_RNA (1)...(19): siRNA sense strand
ccaugguggugucuuggaa

SEQ ID NO: 1687414 - RNA, 19 nt, Homo sapiens
  misc_RNA (1)...(19): siRNA sense strand
uaauuuggccaccuucaau

SEQ ID NO: 1687415 - RNA, 19 nt, Homo sapiens
  misc_RNA (1)...(19): siRNA sense strand
gauguuugagaauguugua

SEQ ID NO: 1687416 - RNA, 19 nt, Homo sapiens
  misc_RNA (1)...(19): siRNA sense strand
ggcagacaguggagaugga

SEQ ID NO: 1687417 - RNA, 19 nt, Homo sapiens
  misc_RNA (1)...(19): siRNA sense strand
gaagaucagagccgagaac

SEQ ID NO: 1687418 - RNA, 19 nt, Homo sapiens
  misc_RNA (1)...(19): siRNA sense strand
gcuauaacaacggcaaaga

SEQ ID NO: 1687419 - RNA, 19 nt, Homo sapiens
  misc_RNA (1)...(19): siRNA sense strand
guuuggcgauggcaaguuc

SEQ ID NO: 1687420 - RNA, 19 nt, Homo sapiens
  misc_RNA (1)...(19): siRNA sense strand
agaucaagcucgcgacucu

SEQ ID NO: 1687421 - RNA, 19 nt, Homo sapiens
  misc_RNA (1)...(19): siRNA sense strand
gagaauguuguagccauga

SEQ ID NO: 1687422 - RNA, 19 nt, Homo sapiens
  misc_RNA (1)...(19): siRNA sense strand
gaacucgaaauaacaacag

SEQ ID NO: 1687423 - RNA, 19 nt, Homo sapiens
  misc_RNA (1)...(19): siRNA sense strand
gagguguccagucugcuaa

SEQ ID NO: 1687424 - RNA, 19 nt, Homo sapiens
  misc_RNA (1)...(19): siRNA sense strand
agaguugggcauaaaggua

SEQ ID NO: 1687425 - RNA, 19 nt, Homo sapiens
  misc_RNA (1)...(19): siRNA sense strand
ggaaagaucaagggcuucu

SEQ ID NO: 1687426 - RNA, 19 nt, Homo sapiens
  misc_RNA (1)...(19): siRNA sense strand
gcuaccuaguccucaaaga

SEQ ID NO: 1687427 - RNA, 19 nt, Homo sapiens
  misc_RNA (1)...(19): siRNA sense strand
cucaaagaguugggcauaa

SEQ ID NO: 1687428 - RNA, 19 nt, Homo sapiens
  misc_RNA (1)...(19): siRNA sense strand
ggaggcagacaguggagau

SEQ ID NO: 1687429 - RNA, 19 nt, Homo sapiens
  misc_RNA (1)...(19): siRNA sense strand
aggacuacuuugcauguga

SEQ ID NO: 1687430 - RNA, 19 nt, Homo sapiens
  misc_RNA (1)...(19): siRNA sense strand
agaauguuguagccaugaa

SEQ ID NO: 1687431 - RNA, 19 nt, Homo sapiens
  misc_RNA (1)...(19): siRNA sense strand
caaagaguugggcauaaag

SEQ ID NO: 1687432 - RNA, 19 nt, Homo sapiens
  misc_RNA (1)...(19): siRNA sense strand
ucagagccgagaacaaaug

SEQ ID NO: 1687433 - RNA, 19 nt, Homo sapiens
  misc_RNA (1)...(19): siRNA sense strand
agccagcacuuuaauuugg

SEQ ID NO: 1687434 - RNA, 19 nt, Homo sapiens
  misc_RNA (1)...(19): siRNA sense strand
uguccgaacucgaaauaac

SEQ ID NO: 1687435 - RNA, 19 nt, Homo sapiens
  misc_RNA (1)...(19): siRNA sense strand
gaugggaaggaguuuggaa

SEQ ID NO: 1687436 - RNA, 19 nt, Homo sapiens
  misc_RNA (1)...(19): siRNA sense strand
cgacacagaggacacacau

SEQ ID NO: 1687437 - RNA, 19 nt, Homo sapiens
  misc_RNA (1)...(19): siRNA sense strand
caauaagcucgucuccuau

SEQ ID NO: 1687438 - RNA, 19 nt, Homo sapiens
  misc_RNA (1)...(19): siRNA sense strand
cagccagcacuuuaauuug

SEQ ID NO: 1687439 - RNA, 19 nt, Homo sapiens
  misc_RNA (1)...(19): siRNA sense strand
gauggagacaguucagagu

SEQ ID NO: 1687440 - RNA, 19 nt, Homo sapiens
  misc_RNA (1)...(19): siRNA sense strand
gcagguggaggcagacagu

SEQ ID NO: 1687441 - RNA, 19 nt, Homo sapiens
  misc_RNA (1)...(19): siRNA sense strand
ccagcuguccgaacucgaa

SEQ ID NO: 1687442 - RNA, 19 nt, Homo sapiens
  misc_RNA (1)...(19): siRNA sense strand
cccaagcgccucaagacaa

SEQ ID NO: 1687443 - RNA, 19 nt, Homo sapiens
  misc_RNA (1)...(19): siRNA sense strand
cgggaaaccaggacucguu

SEQ ID NO: 1687444 - RNA, 19 nt, Homo sapiens
  misc_RNA (1)...(19): siRNA sense strand
caagagcagccuggaagau

SEQ ID NO: 1687445 - RNA, 19 nt, Homo sapiens
  misc_RNA (1)...(19): siRNA sense strand
ugaacgacgugaggaacau

SEQ ID NO: 1687446 - RNA, 19 nt, Homo sapiens
  misc_RNA (1)...(19): siRNA sense strand
ggaauaucaaauacgugaa

SEQ ID NO: 1687447 - RNA, 19 nt, Homo sapiens
  misc_RNA (1)...(19): siRNA sense strand
caagcuguacccugccauu

SEQ ID NO: 1687448 - RNA, 19 nt, Homo sapiens
  misc_RNA (1)...(19): siRNA sense strand
cuggagcuguuacaugugu

SEQ ID NO: 1687449 - RNA, 19 nt, Homo sapiens
  misc_RNA (1)...(19): siRNA sense strand
gauggcuguuugucuugug

SEQ ID NO: 1687450 - RNA, 19 nt, Homo sapiens
  misc_RNA (1)...(19): siRNA sense strand
gaaaguacgucgcuucuga

SEQ ID NO: 1687451 - RNA, 19 nt, Homo sapiens
  misc_RNA (1)...(19): siRNA sense strand
gcaacgaucucucaaaugu

SEQ ID NO: 1687452 - RNA, 19 nt, Homo sapiens
  misc_RNA (1)...(19): siRNA sense strand
ucaauaagcucgucuccua

SEQ ID NO: 1687453 - RNA, 19 nt, Homo sapiens
  misc_RNA (1)...(19): siRNA sense strand
gcauaaagguaggaaagua

SEQ ID NO: 1687454 - RNA, 19 nt, Homo sapiens
  misc_RNA (1)...(19): siRNA sense strand
acaaauggcuucagauguu

SEQ ID NO: 1687455 - RNA, 19 nt, Homo sapiens
  misc_RNA (1)...(19): siRNA sense strand
gaucagagccgagaacaaa

SEQ ID NO: 1687456 - RNA, 19 nt, Homo sapiens
  misc_RNA (1)...(19): siRNA sense strand
gaacaaauggcuucagaug

SEQ ID NO: 1687457 - RNA, 19 nt, Homo sapiens
  misc_RNA (1)...(19): siRNA sense strand
gagaacaaauggcuucaga

SEQ ID NO: 1687458 - RNA, 19 nt, Homo sapiens
  misc_RNA (1)...(19): siRNA sense strand
ucaaagaguugggcauaaa

SEQ ID NO: 1687459 - RNA, 19 nt, Homo sapiens
  misc_RNA (1)...(19): siRNA sense strand
gccgagagcugcugcuuug

SEQ ID NO: 1687460 - RNA, 19 nt, Homo sapiens
  misc_RNA (1)...(19): siRNA sense strand
ugaggaacaucacaaagaa

SEQ ID NO: 1687461 - RNA, 19 nt, Homo sapiens
  misc_RNA (1)...(19): siRNA sense strand
ccucccagcucuuaccuua

SEQ ID NO: 1687462 - RNA, 19 nt, Homo sapiens
  misc_RNA (1)...(19): siRNA sense strand
gcucuuaccuuaccaucga

SEQ ID NO: 1687463 - RNA, 19 nt, Homo sapiens
  misc_RNA (1)...(19): siRNA sense strand
ccaagcgccucaagacaaa

SEQ ID NO: 1687464 - RNA, 19 nt, Homo sapiens
  misc_RNA (1)...(19): siRNA sense strand
ggacuacuuugcaugugaa

SEQ ID NO: 1687465 - RNA, 19 nt, Homo sapiens
  misc_RNA (1)...(19): siRNA sense strand
uuuaccaccugcugaauua

SEQ ID NO: 1687466 - RNA, 19 nt, Homo sapiens
  misc_RNA (1)...(19): siRNA sense strand
cagcagcccuggagacuca

SEQ ID NO: 1687467 - RNA, 19 nt, Homo sapiens
  misc_RNA (1)...(19): siRNA sense strand
caagacaaauugcuauaac

SEQ ID NO: 1687468 - RNA, 19 nt, Homo sapiens
  misc_RNA (1)...(19): siRNA sense strand
gaaggacuacuuugcaugu

SEQ ID NO: 1687469 - RNA, 19 nt, Homo sapiens
  misc_RNA (1)...(19): siRNA sense strand
guaccaugcucuggagaaa

SEQ ID NO: 1687470 - RNA, 19 nt, Homo sapiens
  misc_RNA (1)...(19): siRNA sense strand
ggaguguaauccagugaug

SEQ ID NO: 1687471 - RNA, 19 nt, Homo sapiens
  misc_RNA (1)...(19): siRNA sense strand
caaauggcuucagauguug

SEQ ID NO: 1687472 - RNA, 19 nt, Homo sapiens
  misc_RNA (1)...(19): siRNA sense strand
gggaaggaguuuggaauag

SEQ ID NO: 1687473 - RNA, 19 nt, Homo sapiens
  misc_RNA (1)...(19): siRNA sense strand
ggaaggaguuuggaauagg

SEQ ID NO: 1687474 - RNA, 19 nt, Homo sapiens
  misc_RNA (1)...(19): siRNA sense strand
ucagccagcacuuuaauuu

SEQ ID NO: 1687475 - RNA, 19 nt, Homo sapiens
  misc_RNA (1)...(19): siRNA sense strand
aacgaucucucaaauguga

SEQ ID NO: 1687476 - RNA, 19 nt, Homo sapiens
  misc_RNA (1)...(19): siRNA sense strand
gacgauggcuaucagucuu

SEQ ID NO: 1687477 - RNA, 19 nt, Homo sapiens
  misc_RNA (1)...(19): siRNA sense strand
acacggggcuugaauauga

SEQ ID NO: 1687478 - RNA, 19 nt, Homo sapiens
  misc_RNA (1)...(19): siRNA sense strand
acgcacagcugacgacuca

SEQ ID NO: 1687479 - RNA, 19 nt, Homo sapiens
  misc_RNA (1)...(19): siRNA sense strand
ccuggaagauggcuguuug

SEQ ID NO: 1687480 - RNA, 19 nt, Homo sapiens
  misc_RNA (1)...(19): siRNA sense strand
uuacauguaugaugacgau

SEQ ID NO: 1687481 - RNA, 19 nt, Homo sapiens
  misc_RNA (1)...(19): siRNA sense strand
ccauuugacuuggugauug

SEQ ID NO: 1687482 - RNA, 19 nt, Homo sapiens
  misc_RNA (1)...(19): siRNA sense strand
aaccaggacucguucagaa

SEQ ID NO: 1687483 - RNA, 19 nt, Homo sapiens
  misc_RNA (1)...(19): siRNA sense strand
ggagguguccagucugcua

SEQ ID NO: 1687484 - RNA, 19 nt, Homo sapiens
  misc_RNA (1)...(19): siRNA sense strand
ggagacaguucagaguauc

SEQ ID NO: 1687485 - RNA, 19 nt, Homo sapiens
  misc_RNA (1)...(19): siRNA sense strand
gcaacagcaucggcaggaa

SEQ ID NO: 1687486 - RNA, 19 nt, Homo sapiens
  misc_RNA (1)...(19): siRNA sense strand
cgaaauaacaacagugucu

SEQ ID NO: 1687487 - RNA, 19 nt, Homo sapiens
  misc_RNA (1)...(19): siRNA sense strand
caacaagagcagccuggaa

SEQ ID NO: 1687488 - RNA, 19 nt, Homo sapiens
  misc_RNA (1)...(19): siRNA sense strand
gcuguccgaacucgaaaua

SEQ ID NO: 1687489 - RNA, 19 nt, Homo sapiens
  misc_RNA (1)...(19): siRNA sense strand
ggagaucagaggccgaaga

SEQ ID NO: 1687490 - RNA, 19 nt, Homo sapiens
  misc_RNA (1)...(19): siRNA sense strand
cacgguuccuggaguguaa

SEQ ID NO: 1687491 - RNA, 19 nt, Homo sapiens
  misc_RNA (1)...(19): siRNA sense strand
cgaguccugucauuguuug

SEQ ID NO: 1687492 - RNA, 19 nt, Homo sapiens
  misc_RNA (1)...(19): siRNA sense strand
uggagacaguucagaguau

SEQ ID NO: 1687493 - RNA, 19 nt, Homo sapiens
  misc_RNA (1)...(19): siRNA sense strand
ggaagauggcuguuugucu

SEQ ID NO: 1687494 - RNA, 19 nt, Homo sapiens
  misc_RNA (1)...(19): siRNA sense strand
gagaucagaggccgaagau

SEQ ID NO: 1687495 - RNA, 19 nt, Homo sapiens
  misc_RNA (1)...(19): siRNA sense strand
gaggaacaucacaaagaaa

SEQ ID NO: 1687496 - RNA, 19 nt, Homo sapiens
  misc_RNA (1)...(19): siRNA sense strand
uguccagucugcuaagcua

SEQ ID NO: 1687497 - RNA, 19 nt, Homo sapiens
  misc_RNA (1)...(19): siRNA sense strand
agagggagguguccagucu

SEQ ID NO: 1687498 - RNA, 19 nt, Homo sapiens
  misc_RNA (1)...(19): siRNA sense strand
aagcucgucuccuaucgaa

SEQ ID NO: 1687499 - RNA, 19 nt, Homo sapiens
  misc_RNA (1)...(19): siRNA sense strand
ccucaaagaguugggcaua

SEQ ID NO: 1687500 - RNA, 19 nt, Homo sapiens
  misc_RNA (1)...(19): siRNA sense strand
caccaggcaucucaaugga

SEQ ID NO: 1687501 - RNA, 19 nt, Homo sapiens
  misc_RNA (1)...(19): siRNA sense strand
caguggagauggagacagu

SEQ ID NO: 1687502 - RNA, 19 nt, Homo sapiens
  misc_RNA (1)...(19): siRNA sense strand
cuacuuugcaugugaauag

SEQ ID NO: 1687503 - RNA, 19 nt, Homo sapiens
  misc_RNA (1)...(19): siRNA sense strand
ccaugaagguuggcgacaa

SEQ ID NO: 1687504 - RNA, 19 nt, Homo sapiens
  misc_RNA (1)...(19): siRNA sense strand
gggcauaaagguaggaaag

SEQ ID NO: 1687505 - RNA, 19 nt, Homo sapiens
  misc_RNA (1)...(19): siRNA sense strand
ccauucgaguccugucauu

SEQ ID NO: 1687506 - RNA, 19 nt, Homo sapiens
  misc_RNA (1)...(19): siRNA sense strand
cccuggagcuguuacaugu

SEQ ID NO: 1687507 - RNA, 19 nt, Homo sapiens
  misc_RNA (1)...(19): siRNA sense strand
gcacccaagcgccucaaga

SEQ ID NO: 1687508 - RNA, 19 nt, Homo sapiens
  misc_RNA (1)...(19): siRNA sense strand
ugggaaggaguuuggaaua

SEQ ID NO: 1687509 - RNA, 19 nt, Homo sapiens
  misc_RNA (1)...(19): siRNA sense strand
cgacaagagggacaucuca

SEQ ID NO: 1687510 - RNA, 19 nt, Homo sapiens
  misc_RNA (1)...(19): siRNA sense strand
caugaagguuggcgacaag

SEQ ID NO: 1687511 - RNA, 19 nt, Homo sapiens
  misc_RNA (1)...(19): siRNA sense strand
augcaacgaucucucaaau

SEQ ID NO: 1687512 - RNA, 19 nt, Homo sapiens
  misc_RNA (1)...(19): siRNA sense strand
gaauaucaaauacgugaac

SEQ ID NO: 1687513 - RNA, 19 nt, Homo sapiens
  misc_RNA (1)...(19): siRNA sense strand
ccaugguggugucuuggaa

SEQ ID NO: 1687514 - RNA, 19 nt, Homo sapiens
  misc_RNA (1)...(19): siRNA sense strand
uaauuuggccaccuucaau

SEQ ID NO: 1687515 - RNA, 19 nt, Homo sapiens
  misc_RNA (1)...(19): siRNA sense strand
gauguuugagaauguugua

SEQ ID NO: 1687516 - RNA, 19 nt, Homo sapiens
  misc_RNA (1)...(19): siRNA sense strand
ggcagacaguggagaugga

SEQ ID NO: 1687517 - RNA, 19 nt, Homo sapiens
  misc_RNA (1)...(19): siRNA sense strand
gaagaucagagccgagaac

SEQ ID NO: 1687518 - RNA, 19 nt, Homo sapiens
  misc_RNA (1)...(19): siRNA sense strand
gcuauaacaacggcaaaga

SEQ ID NO: 1687519 - RNA, 19 nt, Homo sapiens
  misc_RNA (1)...(19): siRNA sense strand
guuuggcgauggcaaguuc

SEQ ID NO: 1687520 - RNA, 19 nt, Homo sapiens
  misc_RNA (1)...(19): siRNA sense strand
gagaauguuguagccauga

SEQ ID NO: 1687521 - RNA, 19 nt, Homo sapiens
  misc_RNA (1)...(19): siRNA sense strand
gaacucgaaauaacaacag

SEQ ID NO: 1687522 - RNA, 19 nt, Homo sapiens
  misc_RNA (1)...(19): siRNA sense strand
agaucaagcucgcgacucu

SEQ ID NO: 1687523 - RNA, 19 nt, Homo sapiens
  misc_RNA (1)...(19): siRNA sense strand
gagguguccagucugcuaa

SEQ ID NO: 1687524 - RNA, 19 nt, Homo sapiens
  misc_RNA (1)...(19): siRNA sense strand
agaguugggcauaaaggua

SEQ ID NO: 1687525 - RNA, 19 nt, Homo sapiens
  misc_RNA (1)...(19): siRNA sense strand
ggaaagaucaagggcuucu

SEQ ID NO: 1687526 - RNA, 19 nt, Homo sapiens
  misc_RNA (1)...(19): siRNA sense strand
gcuaccuaguccucaaaga

SEQ ID NO: 1687527 - RNA, 19 nt, Homo sapiens
  misc_RNA (1)...(19): siRNA sense strand
cucaaagaguugggcauaa

SEQ ID NO: 1687528 - RNA, 19 nt, Homo sapiens
  misc_RNA (1)...(19): siRNA sense strand
ggaggcagacaguggagau

SEQ ID NO: 1687529 - RNA, 19 nt, Homo sapiens
  misc_RNA (1)...(19): siRNA sense strand
aggacuacuuugcauguga

SEQ ID NO: 1687530 - RNA, 19 nt, Homo sapiens
  misc_RNA (1)...(19): siRNA sense strand
agaauguuguagccaugaa

SEQ ID NO: 1687531 - RNA, 19 nt, Homo sapiens
  misc_RNA (1)...(19): siRNA sense strand
uguccgaacucgaaauaac

SEQ ID NO: 1687532 - RNA, 19 nt, Homo sapiens
  misc_RNA (1)...(19): siRNA sense strand
caaagaguugggcauaaag

SEQ ID NO: 1687533 - RNA, 19 nt, Homo sapiens
  misc_RNA (1)...(19): siRNA sense strand
ucagagccgagaacaaaug

SEQ ID NO: 1687534 - RNA, 19 nt, Homo sapiens
  misc_RNA (1)...(19): siRNA sense strand
agccagcacuuuaauuugg

SEQ ID NO: 1687535 - RNA, 19 nt, Homo sapiens
  misc_RNA (1)...(19): siRNA sense strand
gaugggaaggaguuuggaa

SEQ ID NO: 1687536 - RNA, 19 nt, Homo sapiens
  misc_RNA (1)...(19): siRNA sense strand
cgacacagaggacacacau

SEQ ID NO: 1687537 - RNA, 19 nt, Homo sapiens
  misc_RNA (1)...(19): siRNA sense strand
caauaagcucgucuccuau

SEQ ID NO: 1687538 - RNA, 19 nt, Homo sapiens
  misc_RNA (1)...(19): siRNA sense strand
cagccagcacuuuaauuug

SEQ ID NO: 1687539 - RNA, 19 nt, Homo sapiens
  misc_RNA (1)...(19): siRNA sense strand
gauggagacaguucagagu

SEQ ID NO: 1687540 - RNA, 19 nt, Homo sapiens
  misc_RNA (1)...(19): siRNA sense strand
gcagguggaggcagacagu

SEQ ID NO: 1687541 - RNA, 19 nt, Homo sapiens
  misc_RNA (1)...(19): siRNA sense strand
ccagcuguccgaacucgaa

SEQ ID NO: 1687542 - RNA, 19 nt, Homo sapiens
  misc_RNA (1)...(19): siRNA sense strand
cgggaaaccaggacucguu

SEQ ID NO: 1687543 - RNA, 19 nt, Homo sapiens
  misc_RNA (1)...(19): siRNA sense strand
cccaagcgccucaagacaa

SEQ ID NO: 1687544 - RNA, 19 nt, Homo sapiens
  misc_RNA (1)...(19): siRNA sense strand
caagagcagccuggaagau

SEQ ID NO: 1687545 - RNA, 19 nt, Homo sapiens
  misc_RNA (1)...(19): siRNA sense strand
ugaacgacgugaggaacau

SEQ ID NO: 1687546 - RNA, 19 nt, Homo sapiens
  misc_RNA (1)...(19): siRNA sense strand
ggaauaucaaauacgugaa

SEQ ID NO: 1687547 - RNA, 19 nt, Homo sapiens
  misc_RNA (1)...(19): siRNA sense strand
caagcuguacccugccauu

SEQ ID NO: 1687548 - RNA, 19 nt, Homo sapiens
  misc_RNA (1)...(19): siRNA sense strand
cuggagcuguuacaugugu

SEQ ID NO: 1687549 - RNA, 19 nt, Homo sapiens
  misc_RNA (1)...(19): siRNA sense strand
gauggcuguuugucuugug

SEQ ID NO: 1687550 - RNA, 19 nt, Homo sapiens
  misc_RNA (1)...(19): siRNA sense strand
gaaaguacgucgcuucuga

SEQ ID NO: 1687551 - RNA, 19 nt, Homo sapiens
  misc_RNA (1)...(19): siRNA sense strand
gcaacgaucucucaaaugu

SEQ ID NO: 1687552 - RNA, 19 nt, Homo sapiens
  misc_RNA (1)...(19): siRNA sense strand
ucaauaagcucgucuccua

SEQ ID NO: 1687553 - RNA, 19 nt, Homo sapiens
  misc_RNA (1)...(19): siRNA sense strand
gcauaaagguaggaaagua

SEQ ID NO: 1687554 - RNA, 19 nt, Homo sapiens
  misc_RNA (1)...(19): siRNA sense strand
acaaauggcuucagauguu

SEQ ID NO: 1687555 - RNA, 19 nt, Homo sapiens
  misc_RNA (1)...(19): siRNA sense strand
gaucagagccgagaacaaa

SEQ ID NO: 1687556 - RNA, 19 nt, Homo sapiens
  misc_RNA (1)...(19): siRNA sense strand
gaacaaauggcuucagaug

SEQ ID NO: 1687557 - RNA, 19 nt, Homo sapiens
  misc_RNA (1)...(19): siRNA sense strand
gagaacaaauggcuucaga

SEQ ID NO: 1687558 - RNA, 19 nt, Homo sapiens
  misc_RNA (1)...(19): siRNA sense strand
ucaaagaguugggcauaaa

SEQ ID NO: 1687559 - RNA, 19 nt, Homo sapiens
  misc_RNA (1)...(19): siRNA sense strand
gccgagagcugcugcuuug

SEQ ID NO: 1687560 - RNA, 19 nt, Homo sapiens
  misc_RNA (1)...(19): siRNA sense strand
ugaggaacaucacaaagaa

SEQ ID NO: 1687561 - RNA, 19 nt, Homo sapiens
  misc_RNA (1)...(19): siRNA sense strand
ccucccagcucuuaccuua

SEQ ID NO: 1687562 - RNA, 19 nt, Homo sapiens
  misc_RNA (1)...(19): siRNA sense strand
gcucuuaccuuaccaucga

SEQ ID NO: 1687563 - RNA, 19 nt, Homo sapiens
  misc_RNA (1)...(19): siRNA sense strand
ccaagcgccucaagacaaa

SEQ ID NO: 1687564 - RNA, 19 nt, Homo sapiens
  misc_RNA (1)...(19): siRNA sense strand
ggacuacuuugcaugugaa

SEQ ID NO: 1687565 - RNA, 19 nt, Homo sapiens
  misc_RNA (1)...(19): siRNA sense strand
uuuaccaccugcugaauua

SEQ ID NO: 1687566 - RNA, 19 nt, Homo sapiens
  misc_RNA (1)...(19): siRNA sense strand
cagcagcccuggagacuca

SEQ ID NO: 1687567 - RNA, 19 nt, Homo sapiens
  misc_RNA (1)...(19): siRNA sense strand
caagacaaauugcuauaac

SEQ ID NO: 1687568 - RNA, 19 nt, Homo sapiens
  misc_RNA (1)...(19): siRNA sense strand
gaaggacuacuuugcaugu

SEQ ID NO: 1687569 - RNA, 19 nt, Homo sapiens
  misc_RNA (1)...(19): siRNA sense strand
guaccaugcucuggagaaa

SEQ ID NO: 1687570 - RNA, 19 nt, Homo sapiens
  misc_RNA (1)...(19): siRNA sense strand
ggaguguaauccagugaug

SEQ ID NO: 1687571 - RNA, 19 nt, Homo sapiens
  misc_RNA (1)...(19): siRNA sense strand
caaauggcuucagauguug

SEQ ID NO: 1687572 - RNA, 19 nt, Homo sapiens
  misc_RNA (1)...(19): siRNA sense strand
gggaaggaguuuggaauag

SEQ ID NO: 1687573 - RNA, 19 nt, Homo sapiens
  misc_RNA (1)...(19): siRNA sense strand
ggaaggaguuuggaauagg

SEQ ID NO: 1687574 - RNA, 19 nt, Homo sapiens
  misc_RNA (1)...(19): siRNA sense strand
ucagccagcacuuuaauuu

SEQ ID NO: 1687575 - RNA, 19 nt, Homo sapiens
  misc_RNA (1)...(19): siRNA sense strand
aacgaucucucaaauguga

SEQ ID NO: 1687576 - RNA, 19 nt, Homo sapiens
  misc_RNA (1)...(19): siRNA sense strand
gacgauggcuaucagucuu

SEQ ID NO: 1687577 - RNA, 19 nt, Homo sapiens
  misc_RNA (1)...(19): siRNA sense strand
acacggggcuugaauauga

SEQ ID NO: 1687578 - RNA, 19 nt, Homo sapiens
  misc_RNA (1)...(19): siRNA sense strand
acgcacagcugacgacuca

SEQ ID NO: 1687579 - RNA, 19 nt, Homo sapiens
  misc_RNA (1)...(19): siRNA sense strand
ccuggaagauggcuguuug

SEQ ID NO: 1687580 - RNA, 19 nt, Homo sapiens
  misc_RNA (1)...(19): siRNA sense strand
uuacauguaugaugacgau

SEQ ID NO: 1687581 - RNA, 19 nt, Homo sapiens
  misc_RNA (1)...(19): siRNA sense strand
ccauuugacuuggugauug

SEQ ID NO: 1687582 - RNA, 19 nt, Homo sapiens
  misc_RNA (1)...(19): siRNA sense strand
aaccaggacucguucagaa

SEQ ID NO: 1687583 - RNA, 19 nt, Homo sapiens
  misc_RNA (1)...(19): siRNA sense strand
ggagguguccagucugcua

SEQ ID NO: 1687584 - RNA, 19 nt, Homo sapiens
  misc_RNA (1)...(19): siRNA sense strand
ggagacaguucagaguauc

SEQ ID NO: 1687585 - RNA, 19 nt, Homo sapiens
  misc_RNA (1)...(19): siRNA sense strand
gcaacagcaucggcaggaa

SEQ ID NO: 1687586 - RNA, 19 nt, Homo sapiens
  misc_RNA (1)...(19): siRNA sense strand
cgaaauaacaacagugucu

SEQ ID NO: 1687587 - RNA, 19 nt, Homo sapiens
  misc_RNA (1)...(19): siRNA sense strand
caacaagagcagccuggaa

SEQ ID NO: 1687588 - RNA, 19 nt, Homo sapiens
  misc_RNA (1)...(19): siRNA sense strand
gcuguccgaacucgaaaua

SEQ ID NO: 1687589 - RNA, 19 nt, Homo sapiens
  misc_RNA (1)...(19): siRNA sense strand
ggagaucagaggccgaaga

SEQ ID NO: 1687590 - RNA, 19 nt, Homo sapiens
  misc_RNA (1)...(19): siRNA sense strand
cacgguuccuggaguguaa

SEQ ID NO: 1687591 - RNA, 19 nt, Homo sapiens
  misc_RNA (1)...(19): siRNA sense strand
cgaguccugucauuguuug

SEQ ID NO: 1687592 - RNA, 19 nt, Homo sapiens
  misc_RNA (1)...(19): siRNA sense strand
uggagacaguucagaguau

SEQ ID NO: 1687593 - RNA, 19 nt, Homo sapiens
  misc_RNA (1)...(19): siRNA sense strand
ggaagauggcuguuugucu

SEQ ID NO: 1687594 - RNA, 19 nt, Homo sapiens
  misc_RNA (1)...(19): siRNA sense strand
gagaucagaggccgaagau

SEQ ID NO: 1687595 - RNA, 19 nt, Homo sapiens
  misc_RNA (1)...(19): siRNA sense strand
gaggaacaucacaaagaaa

SEQ ID NO: 1687596 - RNA, 19 nt, Homo sapiens
  misc_RNA (1)...(19): siRNA sense strand
uguccagucugcuaagcua

SEQ ID NO: 1687597 - RNA, 19 nt, Homo sapiens
  misc_RNA (1)...(19): siRNA sense strand
agagggagguguccagucu

SEQ ID NO: 1687598 - RNA, 19 nt, Homo sapiens
  misc_RNA (1)...(19): siRNA sense strand
aagcucgucuccuaucgaa

SEQ ID NO: 1687599 - RNA, 19 nt, Homo sapiens
  misc_RNA (1)...(19): siRNA sense strand
ccucaaagaguugggcaua

SEQ ID NO: 1687600 - RNA, 19 nt, Homo sapiens
  misc_RNA (1)...(19): siRNA sense strand
caccaggcaucucaaugga

SEQ ID NO: 1687601 - RNA, 19 nt, Homo sapiens
  misc_RNA (1)...(19): siRNA sense strand
caguggagauggagacagu

SEQ ID NO: 1687602 - RNA, 19 nt, Homo sapiens
  misc_RNA (1)...(19): siRNA sense strand
cuacuuugcaugugaauag

SEQ ID NO: 1687603 - RNA, 19 nt, Homo sapiens
  misc_RNA (1)...(19): siRNA sense strand
ccaugaagguuggcgacaa

SEQ ID NO: 1687604 - RNA, 19 nt, Homo sapiens
  misc_RNA (1)...(19): siRNA sense strand
gggcauaaagguaggaaag

SEQ ID NO: 1687605 - RNA, 19 nt, Homo sapiens
  misc_RNA (1)...(19): siRNA sense strand
ccauucgaguccugucauu

SEQ ID NO: 1687606 - RNA, 19 nt, Homo sapiens
  misc_RNA (1)...(19): siRNA sense strand
cccuggagcuguuacaugu

SEQ ID NO: 1687607 - RNA, 19 nt, Homo sapiens
  misc_RNA (1)...(19): siRNA sense strand
gcacccaagcgccucaaga

SEQ ID NO: 1687608 - RNA, 19 nt, Homo sapiens
  misc_RNA (1)...(19): siRNA sense strand
ugggaaggaguuuggaaua

SEQ ID NO: 1687609 - RNA, 19 nt, Homo sapiens
  misc_RNA (1)...(19): siRNA sense strand
cgacaagagggacaucuca

SEQ ID NO: 1687610 - RNA, 19 nt, Homo sapiens
  misc_RNA (1)...(19): siRNA sense strand
caugaagguuggcgacaag

SEQ ID NO: 1687611 - RNA, 19 nt, Homo sapiens
  misc_RNA (1)...(19): siRNA sense strand
augcaacgaucucucaaau

SEQ ID NO: 1687612 - RNA, 19 nt, Homo sapiens
  misc_RNA (1)...(19): siRNA sense strand
gaauaucaaauacgugaac

SEQ ID NO: 1687613 - RNA, 19 nt, Homo sapiens
  misc_RNA (1)...(19): siRNA sense strand
ccaugguggugucuuggaa

SEQ ID NO: 1687614 - RNA, 19 nt, Homo sapiens
  misc_RNA (1)...(19): siRNA sense strand
uaauuuggccaccuucaau

SEQ ID NO: 1687615 - RNA, 19 nt, Homo sapiens
  misc_RNA (1)...(19): siRNA sense strand
gauguuugagaauguugua

SEQ ID NO: 1687616 - RNA, 19 nt, Homo sapiens
  misc_RNA (1)...(19): siRNA sense strand
ggcagacaguggagaugga

SEQ ID NO: 1687617 - RNA, 19 nt, Homo sapiens
  misc_RNA (1)...(19): siRNA sense strand
gaagaucagagccgagaac

SEQ ID NO: 1687618 - RNA, 19 nt, Homo sapiens
  misc_RNA (1)...(19): siRNA sense strand
gcuauaacaacggcaaaga

SEQ ID NO: 1687619 - RNA, 19 nt, Homo sapiens
  misc_RNA (1)...(19): siRNA sense strand
guuuggcgauggcaaguuc

SEQ ID NO: 1687620 - RNA, 19 nt, Homo sapiens
  misc_RNA (1)...(19): siRNA sense strand
gagaauguuguagccauga

SEQ ID NO: 1687621 - RNA, 19 nt, Homo sapiens
  misc_RNA (1)...(19): siRNA sense strand
gaacucgaaauaacaacag

SEQ ID NO: 1687622 - RNA, 19 nt, Homo sapiens
  misc_RNA (1)...(19): siRNA sense strand
agaucaagcucgcgacucu

SEQ ID NO: 1687623 - RNA, 19 nt, Homo sapiens
  misc_RNA (1)...(19): siRNA sense strand
gagguguccagucugcuaa

SEQ ID NO: 1687624 - RNA, 19 nt, Homo sapiens
  misc_RNA (1)...(19): siRNA sense strand
agaguugggcauaaaggua

SEQ ID NO: 1687625 - RNA, 19 nt, Homo sapiens
  misc_RNA (1)...(19): siRNA sense strand
ggaaagaucaagggcuucu

SEQ ID NO: 1687626 - RNA, 19 nt, Homo sapiens
  misc_RNA (1)...(19): siRNA sense strand
gcuaccuaguccucaaaga

SEQ ID NO: 1687627 - RNA, 19 nt, Homo sapiens
  misc_RNA (1)...(19): siRNA sense strand
cucaaagaguugggcauaa

SEQ ID NO: 1687628 - RNA, 19 nt, Homo sapiens
  misc_RNA (1)...(19): siRNA sense strand
ggaggcagacaguggagau

SEQ ID NO: 1687629 - RNA, 19 nt, Homo sapiens
  misc_RNA (1)...(19): siRNA sense strand
aggacuacuuugcauguga

SEQ ID NO: 1687630 - RNA, 19 nt, Homo sapiens
  misc_RNA (1)...(19): siRNA sense strand
agaauguuguagccaugaa

SEQ ID NO: 1687631 - RNA, 19 nt, Homo sapiens
  misc_RNA (1)...(19): siRNA sense strand
uguccgaacucgaaauaac

SEQ ID NO: 1687632 - RNA, 19 nt, Homo sapiens
  misc_RNA (1)...(19): siRNA sense strand
caaagaguugggcauaaag

SEQ ID NO: 1687633 - RNA, 19 nt, Homo sapiens
  misc_RNA (1)...(19): siRNA sense strand
ucagagccgagaacaaaug

SEQ ID NO: 1687634 - RNA, 19 nt, Homo sapiens
  misc_RNA (1)...(19): siRNA sense strand
agccagcacuuuaauuugg

SEQ ID NO: 1687635 - RNA, 19 nt, Homo sapiens
  misc_RNA (1)...(19): siRNA sense strand
gaugggaaggaguuuggaa

SEQ ID NO: 1687636 - RNA, 19 nt, Homo sapiens
  misc_RNA (1)...(19): siRNA sense strand
cgacacagaggacacacau

SEQ ID NO: 1687637 - RNA, 19 nt, Homo sapiens
  misc_RNA (1)...(19): siRNA sense strand
caauaagcucgucuccuau

SEQ ID NO: 1687638 - RNA, 19 nt, Homo sapiens
  misc_RNA (1)...(19): siRNA sense strand
cagccagcacuuuaauuug

SEQ ID NO: 1687639 - RNA, 19 nt, Homo sapiens
  misc_RNA (1)...(19): siRNA sense strand
gauggagacaguucagagu

SEQ ID NO: 1687640 - RNA, 19 nt, Homo sapiens
  misc_RNA (1)...(19): siRNA sense strand
gcagguggaggcagacagu

SEQ ID NO: 1687641 - RNA, 19 nt, Homo sapiens
  misc_RNA (1)...(19): siRNA sense strand
ccagcuguccgaacucgaa

SEQ ID NO: 1687642 - RNA, 19 nt, Homo sapiens
  misc_RNA (1)...(19): siRNA sense strand
cgggaaaccaggacucguu

SEQ ID NO: 1687643 - RNA, 19 nt, Homo sapiens
  misc_RNA (1)...(19): siRNA sense strand
cccaagcgccucaagacaa

SEQ ID NO: 1687644 - RNA, 19 nt, Homo sapiens
  misc_RNA (1)...(19): siRNA sense strand
caagagcagccuggaagau

SEQ ID NO: 1687645 - RNA, 19 nt, Homo sapiens
  misc_RNA (1)...(19): siRNA sense strand
ugaacgacgugaggaacau

SEQ ID NO: 1687646 - RNA, 19 nt, Homo sapiens
  misc_RNA (1)...(19): siRNA sense strand
ggaauaucaaauacgugaa

SEQ ID NO: 1687647 - RNA, 19 nt, Homo sapiens
  misc_RNA (1)...(19): siRNA sense strand
caagcuguacccugccauu

SEQ ID NO: 1687648 - RNA, 19 nt, Homo sapiens
  misc_RNA (1)...(19): siRNA sense strand
cuggagcuguuacaugugu

SEQ ID NO: 1687649 - RNA, 19 nt, Homo sapiens
  misc_RNA (1)...(19): siRNA sense strand
gauggcuguuugucuugug

SEQ ID NO: 1687650 - RNA, 19 nt, Homo sapiens
  misc_RNA (1)...(19): siRNA sense strand
gaaaguacgucgcuucuga

SEQ ID NO: 1687651 - RNA, 19 nt, Homo sapiens
  misc_RNA (1)...(19): siRNA sense strand
gcaacgaucucucaaaugu

SEQ ID NO: 1687652 - RNA, 19 nt, Homo sapiens
  misc_RNA (1)...(19): siRNA sense strand
ucaauaagcucgucuccua

SEQ ID NO: 1687653 - RNA, 19 nt, Homo sapiens
  misc_RNA (1)...(19): siRNA sense strand
gcauaaagguaggaaagua

SEQ ID NO: 1687654 - RNA, 19 nt, Homo sapiens
  misc_RNA (1)...(19): siRNA sense strand
acaaauggcuucagauguu

SEQ ID NO: 1687655 - RNA, 19 nt, Homo sapiens
  misc_RNA (1)...(19): siRNA sense strand
gaucagagccgagaacaaa

SEQ ID NO: 1687656 - RNA, 19 nt, Homo sapiens
  misc_RNA (1)...(19): siRNA sense strand
gaacaaauggcuucagaug

SEQ ID NO: 1687657 - RNA, 19 nt, Homo sapiens
  misc_RNA (1)...(19): siRNA sense strand
gagaacaaauggcuucaga

SEQ ID NO: 1687658 - RNA, 19 nt, Homo sapiens
  misc_RNA (1)...(19): siRNA sense strand
ucaaagaguugggcauaaa

SEQ ID NO: 1687659 - RNA, 19 nt, Homo sapiens
  misc_RNA (1)...(19): siRNA sense strand
gccgagagcugcugcuuug

SEQ ID NO: 1687660 - RNA, 19 nt, Homo sapiens
  misc_RNA (1)...(19): siRNA sense strand
ugaggaacaucacaaagaa

SEQ ID NO: 1687661 - RNA, 19 nt, Homo sapiens
  misc_RNA (1)...(19): siRNA sense strand
ccucccagcucuuaccuua

SEQ ID NO: 1687662 - RNA, 19 nt, Homo sapiens
  misc_RNA (1)...(19): siRNA sense strand
gcucuuaccuuaccaucga

SEQ ID NO: 1687663 - RNA, 19 nt, Homo sapiens
  misc_RNA (1)...(19): siRNA sense strand
ccaagcgccucaagacaaa

SEQ ID NO: 1687664 - RNA, 19 nt, Homo sapiens
  misc_RNA (1)...(19): siRNA sense strand
ggacuacuuugcaugugaa

SEQ ID NO: 1687665 - RNA, 19 nt, Homo sapiens
  misc_RNA (1)...(19): siRNA sense strand
uuuaccaccugcugaauua

SEQ ID NO: 1687666 - RNA, 19 nt, Homo sapiens
  misc_RNA (1)...(19): siRNA sense strand
cagcagcccuggagacuca

SEQ ID NO: 1687667 - RNA, 19 nt, Homo sapiens
  misc_RNA (1)...(19): siRNA sense strand
caagacaaauugcuauaac

SEQ ID NO: 1687668 - RNA, 19 nt, Homo sapiens
  misc_RNA (1)...(19): siRNA sense strand
gaaggacuacuuugcaugu

SEQ ID NO: 1687669 - RNA, 19 nt, Homo sapiens
  misc_RNA (1)...(19): siRNA sense strand
guaccaugcucuggagaaa

SEQ ID NO: 1687670 - RNA, 19 nt, Homo sapiens
  misc_RNA (1)...(19): siRNA sense strand
ggaguguaauccagugaug

SEQ ID NO: 1687671 - RNA, 19 nt, Homo sapiens
  misc_RNA (1)...(19): siRNA sense strand
caaauggcuucagauguug

SEQ ID NO: 1687672 - RNA, 19 nt, Homo sapiens
  misc_RNA (1)...(19): siRNA sense strand
gggaaggaguuuggaauag

SEQ ID NO: 1687673 - RNA, 19 nt, Homo sapiens
  misc_RNA (1)...(19): siRNA sense strand
ggaaggaguuuggaauagg

SEQ ID NO: 1687674 - RNA, 19 nt, Homo sapiens
  misc_RNA (1)...(19): siRNA sense strand
ucagccagcacuuuaauuu

SEQ ID NO: 1687675 - RNA, 19 nt, Homo sapiens
  misc_RNA (1)...(19): siRNA sense strand
aacgaucucucaaauguga

SEQ ID NO: 1687676 - RNA, 19 nt, Homo sapiens
  misc_RNA (1)...(19): siRNA sense strand
gacgauggcuaucagucuu

SEQ ID NO: 1687677 - RNA, 19 nt, Homo sapiens
  misc_RNA (1)...(19): siRNA sense strand
acacggggcuugaauauga

SEQ ID NO: 1687678 - RNA, 19 nt, Homo sapiens
  misc_RNA (1)...(19): siRNA sense strand
acgcacagcugacgacuca

SEQ ID NO: 1687679 - RNA, 19 nt, Homo sapiens
  misc_RNA (1)...(19): siRNA sense strand
ccuggaagauggcuguuug

SEQ ID NO: 1687680 - RNA, 19 nt, Homo sapiens
  misc_RNA (1)...(19): siRNA sense strand
uuacauguaugaugacgau

SEQ ID NO: 1687681 - RNA, 19 nt, Homo sapiens
  misc_RNA (1)...(19): siRNA sense strand
ccauuugacuuggugauug

SEQ ID NO: 1687682 - RNA, 19 nt, Homo sapiens
  misc_RNA (1)...(19): siRNA sense strand
aaccaggacucguucagaa

SEQ ID NO: 1687683 - RNA, 19 nt, Homo sapiens
  misc_RNA (1)...(19): siRNA sense strand
ggagguguccagucugcua

SEQ ID NO: 1687684 - RNA, 19 nt, Homo sapiens
  misc_RNA (1)...(19): siRNA sense strand
ggagacaguucagaguauc

SEQ ID NO: 1687685 - RNA, 19 nt, Homo sapiens
  misc_RNA (1)...(19): siRNA sense strand
gcaacagcaucggcaggaa

SEQ ID NO: 1687686 - RNA, 19 nt, Homo sapiens
  misc_RNA (1)...(19): siRNA sense strand
cgaaauaacaacagugucu

SEQ ID NO: 1687687 - RNA, 19 nt, Homo sapiens
  misc_RNA (1)...(19): siRNA sense strand
caacaagagcagccuggaa

SEQ ID NO: 1687688 - RNA, 19 nt, Homo sapiens
  misc_RNA (1)...(19): siRNA sense strand
gcuguccgaacucgaaaua

SEQ ID NO: 1687689 - RNA, 19 nt, Homo sapiens
  misc_RNA (1)...(19): siRNA sense strand
ggagaucagaggccgaaga

SEQ ID NO: 1687690 - RNA, 19 nt, Homo sapiens
  misc_RNA (1)...(19): siRNA sense strand
cacgguuccuggaguguaa

SEQ ID NO: 1687691 - RNA, 19 nt, Homo sapiens
  misc_RNA (1)...(19): siRNA sense strand
cgaguccugucauuguuug

SEQ ID NO: 1687692 - RNA, 19 nt, Homo sapiens
  misc_RNA (1)...(19): siRNA sense strand
uggagacaguucagaguau

SEQ ID NO: 1687693 - RNA, 19 nt, Homo sapiens
  misc_RNA (1)...(19): siRNA sense strand
ggaagauggcuguuugucu

SEQ ID NO: 1687694 - RNA, 19 nt, Homo sapiens
  misc_RNA (1)...(19): siRNA sense strand
gagaucagaggccgaagau

SEQ ID NO: 1687695 - RNA, 19 nt, Homo sapiens
  misc_RNA (1)...(19): siRNA sense strand
gaggaacaucacaaagaaa

SEQ ID NO: 1687696 - RNA, 19 nt, Homo sapiens
  misc_RNA (1)...(19): siRNA sense strand
uguccagucugcuaagcua

SEQ ID NO: 1687697 - RNA, 19 nt, Homo sapiens
  misc_RNA (1)...(19): siRNA sense strand
agagggagguguccagucu

SEQ ID NO: 1687698 - RNA, 19 nt, Homo sapiens
  misc_RNA (1)...(19): siRNA sense strand
aagcucgucuccuaucgaa

SEQ ID NO: 1687699 - RNA, 19 nt, Homo sapiens
  misc_RNA (1)...(19): siRNA sense strand
ccucaaagaguugggcaua

SEQ ID NO: 1687700 - RNA, 19 nt, Homo sapiens
  misc_RNA (1)...(19): siRNA sense strand
caccaggcaucucaaugga

SEQ ID NO: 1687701 - RNA, 19 nt, Homo sapiens
  misc_RNA (1)...(19): siRNA sense strand
caguggagauggagacagu

SEQ ID NO: 1687702 - RNA, 19 nt, Homo sapiens
  misc_RNA (1)...(19): siRNA sense strand
cuacuuugcaugugaauag

SEQ ID NO: 1687703 - RNA, 19 nt, Homo sapiens
  misc_RNA (1)...(19): siRNA sense strand
ccaugaagguuggcgacaa

SEQ ID NO: 1687704 - RNA, 19 nt, Homo sapiens
  misc_RNA (1)...(19): siRNA sense strand
gggcauaaagguaggaaag

SEQ ID NO: 1687705 - RNA, 19 nt, Homo sapiens
  misc_RNA (1)...(19): siRNA sense strand
ccauucgaguccugucauu

SEQ ID NO: 1687706 - RNA, 19 nt, Homo sapiens
  misc_RNA (1)...(19): siRNA sense strand
cccuggagcuguuacaugu

SEQ ID NO: 1687707 - RNA, 19 nt, Homo sapiens
  misc_RNA (1)...(19): siRNA sense strand
gcacccaagcgccucaaga

SEQ ID NO: 1687708 - RNA, 19 nt, Homo sapiens
  misc_RNA (1)...(19): siRNA sense strand
ugggaaggaguuuggaaua

SEQ ID NO: 1687709 - RNA, 19 nt, Homo sapiens
  misc_RNA (1)...(19): siRNA sense strand
cgacaagagggacaucuca

SEQ ID NO: 1687710 - RNA, 19 nt, Homo sapiens
  misc_RNA (1)...(19): siRNA sense strand
caugaagguuggcgacaag

SEQ ID NO: 1687711 - RNA, 19 nt, Homo sapiens
  misc_RNA (1)...(19): siRNA sense strand
augcaacgaucucucaaau

SEQ ID NO: 1687712 - RNA, 19 nt, Homo sapiens
  misc_RNA (1)...(19): siRNA sense strand
gaauaucaaauacgugaac

SEQ ID NO: 1687713 - RNA, 19 nt, Homo sapiens
  misc_RNA (1)...(19): siRNA sense strand
ccaugguggugucuuggaa

SEQ ID NO: 1687714 - RNA, 19 nt, Homo sapiens
  misc_RNA (1)...(19): siRNA sense strand
uaauuuggccaccuucaau

SEQ ID NO: 1687715 - RNA, 19 nt, Homo sapiens
  misc_RNA (1)...(19): siRNA sense strand
gauguuugagaauguugua

SEQ ID NO: 1687716 - RNA, 19 nt, Homo sapiens
  misc_RNA (1)...(19): siRNA sense strand
ggcagacaguggagaugga

SEQ ID NO: 1687717 - RNA, 19 nt, Homo sapiens
  misc_RNA (1)...(19): siRNA sense strand
gaagaucagagccgagaac

SEQ ID NO: 1687718 - RNA, 19 nt, Homo sapiens
  misc_RNA (1)...(19): siRNA sense strand
gcuauaacaacggcaaaga

SEQ ID NO: 1687719 - RNA, 19 nt, Homo sapiens
  misc_RNA (1)...(19): siRNA sense strand
guuuggcgauggcaaguuc

SEQ ID NO: 1687720 - RNA, 19 nt, Homo sapiens
  misc_RNA (1)...(19): siRNA sense strand
gagaauguuguagccauga

SEQ ID NO: 1687721 - RNA, 19 nt, Homo sapiens
  misc_RNA (1)...(19): siRNA sense strand
gaacucgaaauaacaacag

SEQ ID NO: 1687722 - RNA, 19 nt, Homo sapiens
  misc_RNA (1)...(19): siRNA sense strand
agaucaagcucgcgacucu

SEQ ID NO: 1687723 - RNA, 19 nt, Homo sapiens
  misc_RNA (1)...(19): siRNA sense strand
gagguguccagucugcuaa

SEQ ID NO: 1687724 - RNA, 19 nt, Homo sapiens
  misc_RNA (1)...(19): siRNA sense strand
agaguugggcauaaaggua

SEQ ID NO: 1687725 - RNA, 19 nt, Homo sapiens
  misc_RNA (1)...(19): siRNA sense strand
ggaaagaucaagggcuucu

SEQ ID NO: 1687726 - RNA, 19 nt, Homo sapiens
  misc_RNA (1)...(19): siRNA sense strand
gcuaccuaguccucaaaga

SEQ ID NO: 1687727 - RNA, 19 nt, Homo sapiens
  misc_RNA (1)...(19): siRNA sense strand
cucaaagaguugggcauaa

SEQ ID NO: 1687728 - RNA, 19 nt, Homo sapiens
  misc_RNA (1)...(19): siRNA sense strand
ggaggcagacaguggagau

SEQ ID NO: 1687729 - RNA, 19 nt, Homo sapiens
  misc_RNA (1)...(19): siRNA sense strand
aggacuacuuugcauguga

SEQ ID NO: 1687730 - RNA, 19 nt, Homo sapiens
  misc_RNA (1)...(19): siRNA sense strand
agaauguuguagccaugaa

SEQ ID NO: 1687731 - RNA, 19 nt, Homo sapiens
  misc_RNA (1)...(19): siRNA sense strand
uguccgaacucgaaauaac

SEQ ID NO: 1687732 - RNA, 19 nt, Homo sapiens
  misc_RNA (1)...(19): siRNA sense strand
caaagaguugggcauaaag

SEQ ID NO: 1687733 - RNA, 19 nt, Homo sapiens
  misc_RNA (1)...(19): siRNA sense strand
ucagagccgagaacaaaug

SEQ ID NO: 1687734 - RNA, 19 nt, Homo sapiens
  misc_RNA (1)...(19): siRNA sense strand
agccagcacuuuaauuugg

SEQ ID NO: 1687735 - RNA, 19 nt, Homo sapiens
  misc_RNA (1)...(19): siRNA sense strand
gaugggaaggaguuuggaa

SEQ ID NO: 1687736 - RNA, 19 nt, Homo sapiens
  misc_RNA (1)...(19): siRNA sense strand
cgacacagaggacacacau

SEQ ID NO: 1687737 - RNA, 19 nt, Homo sapiens
  misc_RNA (1)...(19): siRNA sense strand
caauaagcucgucuccuau

SEQ ID NO: 1687738 - RNA, 19 nt, Homo sapiens
  misc_RNA (1)...(19): siRNA sense strand
cagccagcacuuuaauuug

SEQ ID NO: 1687739 - RNA, 19 nt, Homo sapiens
  misc_RNA (1)...(19): siRNA sense strand
gauggagacaguucagagu

SEQ ID NO: 1687740 - RNA, 19 nt, Homo sapiens
  misc_RNA (1)...(19): siRNA sense strand
gcagguggaggcagacagu

SEQ ID NO: 1687741 - RNA, 19 nt, Homo sapiens
  misc_RNA (1)...(19): siRNA sense strand
ccagcuguccgaacucgaa

SEQ ID NO: 1687742 - RNA, 19 nt, Homo sapiens
  misc_RNA (1)...(19): siRNA sense strand
cgggaaaccaggacucguu

SEQ ID NO: 1687743 - RNA, 19 nt, Homo sapiens
  misc_RNA (1)...(19): siRNA sense strand
cccaagcgccucaagacaa

SEQ ID NO: 1687744 - RNA, 19 nt, Homo sapiens
  misc_RNA (1)...(19): siRNA sense strand
caagagcagccuggaagau

SEQ ID NO: 1687745 - RNA, 19 nt, Homo sapiens
  misc_RNA (1)...(19): siRNA sense strand
ugaacgacgugaggaacau

SEQ ID NO: 1687746 - RNA, 19 nt, Homo sapiens
  misc_RNA (1)...(19): siRNA sense strand
ggaauaucaaauacgugaa

SEQ ID NO: 1687747 - RNA, 19 nt, Homo sapiens
  misc_RNA (1)...(19): siRNA sense strand
caagcuguacccugccauu

SEQ ID NO: 1687748 - RNA, 19 nt, Homo sapiens
  misc_RNA (1)...(19): siRNA sense strand
cuggagcuguuacaugugu

SEQ ID NO: 1687749 - RNA, 19 nt, Homo sapiens
  misc_RNA (1)...(19): siRNA sense strand
gauggcuguuugucuugug

SEQ ID NO: 1687750 - RNA, 19 nt, Homo sapiens
  misc_RNA (1)...(19): siRNA sense strand
gaaaguacgucgcuucuga

SEQ ID NO: 1687751 - RNA, 19 nt, Homo sapiens
  misc_RNA (1)...(19): siRNA sense strand
gcaacgaucucucaaaugu

SEQ ID NO: 1687752 - RNA, 19 nt, Homo sapiens
  misc_RNA (1)...(19): siRNA sense strand
ucaauaagcucgucuccua

SEQ ID NO: 1687753 - RNA, 19 nt, Homo sapiens
  misc_RNA (1)...(19): siRNA sense strand
gcauaaagguaggaaagua

SEQ ID NO: 1687754 - RNA, 19 nt, Homo sapiens
  misc_RNA (1)...(19): siRNA sense strand
acaaauggcuucagauguu

SEQ ID NO: 1687755 - RNA, 19 nt, Homo sapiens
  misc_RNA (1)...(19): siRNA sense strand
gaucagagccgagaacaaa

SEQ ID NO: 1687756 - RNA, 19 nt, Homo sapiens
  misc_RNA (1)...(19): siRNA sense strand
gaacaaauggcuucagaug

SEQ ID NO: 1687757 - RNA, 19 nt, Homo sapiens
  misc_RNA (1)...(19): siRNA sense strand
gagaacaaauggcuucaga

SEQ ID NO: 1687758 - RNA, 19 nt, Homo sapiens
  misc_RNA (1)...(19): siRNA sense strand
ucaaagaguugggcauaaa

SEQ ID NO: 1687759 - RNA, 19 nt, Homo sapiens
  misc_RNA (1)...(19): siRNA sense strand
gccgagagcugcugcuuug

SEQ ID NO: 1687760 - RNA, 19 nt, Homo sapiens
  misc_RNA (1)...(19): siRNA sense strand
ugaggaacaucacaaagaa

SEQ ID NO: 1687761 - RNA, 19 nt, Homo sapiens
  misc_RNA (1)...(19): siRNA sense strand
ccucccagcucuuaccuua

SEQ ID NO: 1687762 - RNA, 19 nt, Homo sapiens
  misc_RNA (1)...(19): siRNA sense strand
gcucuuaccuuaccaucga

SEQ ID NO: 1687763 - RNA, 19 nt, Homo sapiens
  misc_RNA (1)...(19): siRNA sense strand
ccaagcgccucaagacaaa

SEQ ID NO: 1687764 - RNA, 19 nt, Homo sapiens
  misc_RNA (1)...(19): siRNA sense strand
ggacuacuuugcaugugaa

SEQ ID NO: 1687765 - RNA, 19 nt, Homo sapiens
  misc_RNA (1)...(19): siRNA sense strand
uuuaccaccugcugaauua

SEQ ID NO: 1687766 - RNA, 19 nt, Homo sapiens
  misc_RNA (1)...(19): siRNA sense strand
cagcagcccuggagacuca

SEQ ID NO: 1687767 - RNA, 19 nt, Homo sapiens
  misc_RNA (1)...(19): siRNA sense strand
caagacaaauugcuauaac

SEQ ID NO: 1687768 - RNA, 19 nt, Homo sapiens
  misc_RNA (1)...(19): siRNA sense strand
gaaggacuacuuugcaugu

SEQ ID NO: 1687769 - RNA, 19 nt, Homo sapiens
  misc_RNA (1)...(19): siRNA sense strand
guaccaugcucuggagaaa

SEQ ID NO: 1687770 - RNA, 19 nt, Homo sapiens
  misc_RNA (1)...(19): siRNA sense strand
ggaguguaauccagugaug

SEQ ID NO: 1687771 - RNA, 19 nt, Homo sapiens
  misc_RNA (1)...(19): siRNA sense strand
caaauggcuucagauguug

SEQ ID NO: 1687772 - RNA, 19 nt, Homo sapiens
  misc_RNA (1)...(19): siRNA sense strand
gggaaggaguuuggaauag

SEQ ID NO: 1687773 - RNA, 19 nt, Homo sapiens
  misc_RNA (1)...(19): siRNA sense strand
ggaaggaguuuggaauagg

SEQ ID NO: 1687774 - RNA, 19 nt, Homo sapiens
  misc_RNA (1)...(19): siRNA sense strand
ucagccagcacuuuaauuu

SEQ ID NO: 1687775 - RNA, 19 nt, Homo sapiens
  misc_RNA (1)...(19): siRNA sense strand
aacgaucucucaaauguga

SEQ ID NO: 1687776 - RNA, 19 nt, Homo sapiens
  misc_RNA (1)...(19): siRNA sense strand
gacgauggcuaucagucuu

SEQ ID NO: 1687777 - RNA, 19 nt, Homo sapiens
  misc_RNA (1)...(19): siRNA sense strand
acacggggcuugaauauga

SEQ ID NO: 1687778 - RNA, 19 nt, Homo sapiens
  misc_RNA (1)...(19): siRNA sense strand
acgcacagcugacgacuca

SEQ ID NO: 1687779 - RNA, 19 nt, Homo sapiens
  misc_RNA (1)...(19): siRNA sense strand
ccuggaagauggcuguuug

SEQ ID NO: 1687780 - RNA, 19 nt, Homo sapiens
  misc_RNA (1)...(19): siRNA sense strand
uuacauguaugaugacgau

SEQ ID NO: 1687781 - RNA, 19 nt, Homo sapiens
  misc_RNA (1)...(19): siRNA sense strand
ccauuugacuuggugauug

SEQ ID NO: 1687782 - RNA, 19 nt, Homo sapiens
  misc_RNA (1)...(19): siRNA sense strand
aaccaggacucguucagaa

SEQ ID NO: 1687783 - RNA, 19 nt, Homo sapiens
  misc_RNA (1)...(19): siRNA sense strand
ggagguguccagucugcua

SEQ ID NO: 1687784 - RNA, 19 nt, Homo sapiens
  misc_RNA (1)...(19): siRNA sense strand
ggagacaguucagaguauc

SEQ ID NO: 1687785 - RNA, 19 nt, Homo sapiens
  misc_RNA (1)...(19): siRNA sense strand
gcaacagcaucggcaggaa

SEQ ID NO: 1687786 - RNA, 19 nt, Homo sapiens
  misc_RNA (1)...(19): siRNA sense strand
cgaaauaacaacagugucu

SEQ ID NO: 1687787 - RNA, 19 nt, Homo sapiens
  misc_RNA (1)...(19): siRNA sense strand
caacaagagcagccuggaa

SEQ ID NO: 1687788 - RNA, 19 nt, Homo sapiens
  misc_RNA (1)...(19): siRNA sense strand
gcuguccgaacucgaaaua

SEQ ID NO: 1687789 - RNA, 19 nt, Homo sapiens
  misc_RNA (1)...(19): siRNA sense strand
ggagaucagaggccgaaga

SEQ ID NO: 1687790 - RNA, 19 nt, Homo sapiens
  misc_RNA (1)...(19): siRNA sense strand
cacgguuccuggaguguaa

SEQ ID NO: 1687791 - RNA, 19 nt, Homo sapiens
  misc_RNA (1)...(19): siRNA sense strand
cgaguccugucauuguuug

SEQ ID NO: 1687792 - RNA, 19 nt, Homo sapiens
  misc_RNA (1)...(19): siRNA sense strand
uggagacaguucagaguau

SEQ ID NO: 1687793 - RNA, 19 nt, Homo sapiens
  misc_RNA (1)...(19): siRNA sense strand
ggaagauggcuguuugucu

SEQ ID NO: 1687794 - RNA, 19 nt, Homo sapiens
  misc_RNA (1)...(19): siRNA sense strand
agagggagguguccagucu

SEQ ID NO: 1687795 - RNA, 19 nt, Homo sapiens
  misc_RNA (1)...(19): siRNA sense strand
gagaucagaggccgaagau

SEQ ID NO: 1687796 - RNA, 19 nt, Homo sapiens
  misc_RNA (1)...(19): siRNA sense strand
gaggaacaucacaaagaaa

SEQ ID NO: 1687797 - RNA, 19 nt, Homo sapiens
  misc_RNA (1)...(19): siRNA sense strand
uguccagucugcuaagcua

SEQ ID NO: 1687798 - RNA, 19 nt, Homo sapiens
  misc_RNA (1)...(19): siRNA sense strand
aagcucgucuccuaucgaa

SEQ ID NO: 1687799 - RNA, 19 nt, Homo sapiens
  misc_RNA (1)...(19): siRNA sense strand
ccucaaagaguugggcaua

SEQ ID NO: 1687800 - RNA, 19 nt, Homo sapiens
  misc_RNA (1)...(19): siRNA sense strand
caccaggcaucucaaugga

SEQ ID NO: 1687801 - RNA, 19 nt, Homo sapiens
  misc_RNA (1)...(19): siRNA sense strand
caguggagauggagacagu

SEQ ID NO: 1687802 - RNA, 19 nt, Homo sapiens
  misc_RNA (1)...(19): siRNA sense strand
cuacuuugcaugugaauag

SEQ ID NO: 1687803 - RNA, 19 nt, Homo sapiens
  misc_RNA (1)...(19): siRNA sense strand
ccaugaagguuggcgacaa

SEQ ID NO: 1687804 - RNA, 19 nt, Homo sapiens
  misc_RNA (1)...(19): siRNA sense strand
gggcauaaagguaggaaag

SEQ ID NO: 1687805 - RNA, 19 nt, Homo sapiens
  misc_RNA (1)...(19): siRNA sense strand
ccauucgaguccugucauu

SEQ ID NO: 1687806 - RNA, 19 nt, Homo sapiens
  misc_RNA (1)...(19): siRNA sense strand
cccuggagcuguuacaugu

SEQ ID NO: 1687807 - RNA, 19 nt, Homo sapiens
  misc_RNA (1)...(19): siRNA sense strand
gcacccaagcgccucaaga

SEQ ID NO: 1687808 - RNA, 19 nt, Homo sapiens
  misc_RNA (1)...(19): siRNA sense strand
ugggaaggaguuuggaaua

SEQ ID NO: 1687809 - RNA, 19 nt, Homo sapiens
  misc_RNA (1)...(19): siRNA sense strand
cgacaagagggacaucuca

SEQ ID NO: 1687810 - RNA, 19 nt, Homo sapiens
  misc_RNA (1)...(19): siRNA sense strand
caugaagguuggcgacaag

SEQ ID NO: 1687811 - RNA, 19 nt, Homo sapiens
  misc_RNA (1)...(19): siRNA sense strand
augcaacgaucucucaaau

SEQ ID NO: 1687812 - RNA, 19 nt, Homo sapiens
  misc_RNA (1)...(19): siRNA sense strand
gaauaucaaauacgugaac

SEQ ID NO: 1687813 - RNA, 19 nt, Homo sapiens
  misc_RNA (1)...(19): siRNA sense strand
ccaugguggugucuuggaa

SEQ ID NO: 1687814 - RNA, 19 nt, Homo sapiens
  misc_RNA (1)...(19): siRNA sense strand
uaauuuggccaccuucaau

SEQ ID NO: 1687815 - RNA, 19 nt, Homo sapiens
  misc_RNA (1)...(19): siRNA sense strand
gauguuugagaauguugua

SEQ ID NO: 1687816 - RNA, 19 nt, Homo sapiens
  misc_RNA (1)...(19): siRNA sense strand
ggcagacaguggagaugga

SEQ ID NO: 1687817 - RNA, 19 nt, Homo sapiens
  misc_RNA (1)...(19): siRNA sense strand
gaagaucagagccgagaac

SEQ ID NO: 1687818 - RNA, 19 nt, Homo sapiens
  misc_RNA (1)...(19): siRNA sense strand
gcuauaacaacggcaaaga

SEQ ID NO: 1687819 - RNA, 19 nt, Homo sapiens
  misc_RNA (1)...(19): siRNA sense strand
guuuggcgauggcaaguuc

SEQ ID NO: 1687820 - RNA, 19 nt, Homo sapiens
  misc_RNA (1)...(19): siRNA sense strand
agaucaagcucgcgacucu

SEQ ID NO: 1687821 - RNA, 19 nt, Homo sapiens
  misc_RNA (1)...(19): siRNA sense strand
gagaauguuguagccauga

SEQ ID NO: 1687822 - RNA, 19 nt, Homo sapiens
  misc_RNA (1)...(19): siRNA sense strand
gaacucgaaauaacaacag

SEQ ID NO: 1687823 - RNA, 19 nt, Homo sapiens
  misc_RNA (1)...(19): siRNA sense strand
gagguguccagucugcuaa

SEQ ID NO: 1687824 - RNA, 19 nt, Homo sapiens
  misc_RNA (1)...(19): siRNA sense strand
agaguugggcauaaaggua

SEQ ID NO: 1687825 - RNA, 19 nt, Homo sapiens
  misc_RNA (1)...(19): siRNA sense strand
ggaaagaucaagggcuucu

SEQ ID NO: 1687826 - RNA, 19 nt, Homo sapiens
  misc_RNA (1)...(19): siRNA sense strand
gcuaccuaguccucaaaga

SEQ ID NO: 1687827 - RNA, 19 nt, Homo sapiens
  misc_RNA (1)...(19): siRNA sense strand
cucaaagaguugggcauaa

SEQ ID NO: 1687828 - RNA, 19 nt, Homo sapiens
  misc_RNA (1)...(19): siRNA sense strand
ggaggcagacaguggagau

SEQ ID NO: 1687829 - RNA, 19 nt, Homo sapiens
  misc_RNA (1)...(19): siRNA sense strand
aggacuacuuugcauguga

SEQ ID NO: 1687830 - RNA, 19 nt, Homo sapiens
  misc_RNA (1)...(19): siRNA sense strand
agaauguuguagccaugaa

SEQ ID NO: 1687831 - RNA, 19 nt, Homo sapiens
  misc_RNA (1)...(19): siRNA sense strand
caaagaguugggcauaaag

SEQ ID NO: 1687832 - RNA, 19 nt, Homo sapiens
  misc_RNA (1)...(19): siRNA sense strand
ucagagccgagaacaaaug

SEQ ID NO: 1687833 - RNA, 19 nt, Homo sapiens
  misc_RNA (1)...(19): siRNA sense strand
agccagcacuuuaauuugg

SEQ ID NO: 1687834 - RNA, 19 nt, Homo sapiens
  misc_RNA (1)...(19): siRNA sense strand
uguccgaacucgaaauaac

SEQ ID NO: 1687835 - RNA, 19 nt, Homo sapiens
  misc_RNA (1)...(19): siRNA sense strand
gaugggaaggaguuuggaa

SEQ ID NO: 1687836 - RNA, 19 nt, Homo sapiens
  misc_RNA (1)...(19): siRNA sense strand
cgacacagaggacacacau

SEQ ID NO: 1687837 - RNA, 19 nt, Homo sapiens
  misc_RNA (1)...(19): siRNA sense strand
caauaagcucgucuccuau

SEQ ID NO: 1687838 - RNA, 19 nt, Homo sapiens
  misc_RNA (1)...(19): siRNA sense strand
cagccagcacuuuaauuug

SEQ ID NO: 1687839 - RNA, 19 nt, Homo sapiens
  misc_RNA (1)...(19): siRNA sense strand
gauggagacaguucagagu

SEQ ID NO: 1687840 - RNA, 19 nt, Homo sapiens
  misc_RNA (1)...(19): siRNA sense strand
gcagguggaggcagacagu

SEQ ID NO: 1687841 - RNA, 19 nt, Homo sapiens
  misc_RNA (1)...(19): siRNA sense strand
ccagcuguccgaacucgaa

SEQ ID NO: 1687842 - RNA, 19 nt, Homo sapiens
  misc_RNA (1)...(19): siRNA sense strand
cccaagcgccucaagacaa

SEQ ID NO: 1687843 - RNA, 19 nt, Homo sapiens
  misc_RNA (1)...(19): siRNA sense strand
cgggaaaccaggacucguu

SEQ ID NO: 1687844 - RNA, 19 nt, Homo sapiens
  misc_RNA (1)...(19): siRNA sense strand
caagagcagccuggaagau

SEQ ID NO: 1687845 - RNA, 19 nt, Homo sapiens
  misc_RNA (1)...(19): siRNA sense strand
ugaacgacgugaggaacau

SEQ ID NO: 1687846 - RNA, 19 nt, Homo sapiens
  misc_RNA (1)...(19): siRNA sense strand
ggaauaucaaauacgugaa

SEQ ID NO: 1687847 - RNA, 19 nt, Homo sapiens
  misc_RNA (1)...(19): siRNA sense strand
caagcuguacccugccauu

SEQ ID NO: 1687848 - RNA, 19 nt, Homo sapiens
  misc_RNA (1)...(19): siRNA sense strand
cuggagcuguuacaugugu

SEQ ID NO: 1687849 - RNA, 19 nt, Homo sapiens
  misc_RNA (1)...(19): siRNA sense strand
gauggcuguuugucuugug

SEQ ID NO: 1687850 - RNA, 19 nt, Homo sapiens
  misc_RNA (1)...(19): siRNA sense strand
ggaauggacucagaaguau

SEQ ID NO: 1687851 - RNA, 19 nt, Homo sapiens
  misc_RNA (1)...(19): siRNA sense strand
gggaauggacucagaagua

SEQ ID NO: 1687852 - RNA, 19 nt, Homo sapiens
  misc_RNA (1)...(19): siRNA sense strand
ucagaaguaugccauguga

SEQ ID NO: 1687853 - RNA, 19 nt, Homo sapiens
  misc_RNA (1)...(19): siRNA sense strand
aaacagacagagauaagua

SEQ ID NO: 1687854 - RNA, 19 nt, Homo sapiens
  misc_RNA (1)...(19): siRNA sense strand
cagaauaucucgggaaugg

SEQ ID NO: 1687855 - RNA, 19 nt, Homo sapiens
  misc_RNA (1)...(19): siRNA sense strand
gcauuugucucgauauucu

SEQ ID NO: 1687856 - RNA, 19 nt, Homo sapiens
  misc_RNA (1)...(19): siRNA sense strand
cagcauuugucucgauauu

SEQ ID NO: 1687857 - RNA, 19 nt, Homo sapiens
  misc_RNA (1)...(19): siRNA sense strand
ccacaauuaugggaccuaa

SEQ ID NO: 1687858 - RNA, 19 nt, Homo sapiens
  misc_RNA (1)...(19): siRNA sense strand
ggcagcauuugucucgaua

SEQ ID NO: 1687859 - RNA, 19 nt, Homo sapiens
  misc_RNA (1)...(19): siRNA sense strand
ucacaguggucgccugcuu

SEQ ID NO: 1687860 - RNA, 19 nt, Homo sapiens
  misc_RNA (1)...(19): siRNA sense strand
ucgccugcuuuaacaauuu

SEQ ID NO: 1687861 - RNA, 19 nt, Homo sapiens
  misc_RNA (1)...(19): siRNA sense strand
cuaaugacagcccauauca

SEQ ID NO: 1687862 - RNA, 19 nt, Homo sapiens
  misc_RNA (1)...(19): siRNA sense strand
acaguggucgccugcuuua

SEQ ID NO: 1687863 - RNA, 19 nt, Homo sapiens
  misc_RNA (1)...(19): siRNA sense strand
gauauucuaagaucacagu

SEQ ID NO: 1687864 - RNA, 19 nt, Homo sapiens
  misc_RNA (1)...(19): siRNA sense strand
gaccuaaugacagcccaua

SEQ ID NO: 1687865 - RNA, 19 nt, Homo sapiens
  misc_RNA (1)...(19): siRNA sense strand
guggucgccugcuuuaaca

SEQ ID NO: 1687866 - RNA, 19 nt, Homo sapiens
  misc_RNA (1)...(19): siRNA sense strand
aacagaauaucucgggaau

SEQ ID NO: 1687867 - RNA, 19 nt, Homo sapiens
  misc_RNA (1)...(19): siRNA sense strand
gaauggacucagaaguaug

SEQ ID NO: 1687868 - RNA, 19 nt, Homo sapiens
  misc_RNA (1)...(19): siRNA sense strand
ucucgggaauggacucaga

SEQ ID NO: 1687869 - RNA, 19 nt, Homo sapiens
  misc_RNA (1)...(19): siRNA sense strand
aaugacagcccauaucaag

SEQ ID NO: 1687870 - RNA, 19 nt, Homo sapiens
  misc_RNA (1)...(19): siRNA sense strand
ccuaaugacagcccauauc

SEQ ID NO: 1687871 - RNA, 19 nt, Homo sapiens
  misc_RNA (1)...(19): siRNA sense strand
gucgccugcuuuaacaauu

SEQ ID NO: 1687872 - RNA, 19 nt, Homo sapiens
  misc_RNA (1)...(19): siRNA sense strand
uggcagcauuugucucgau

SEQ ID NO: 1687873 - RNA, 19 nt, Homo sapiens
  misc_RNA (1)...(19): siRNA sense strand
ggucgccugcuuuaacaau

SEQ ID NO: 1687874 - RNA, 19 nt, Homo sapiens
  misc_RNA (1)...(19): siRNA sense strand
ggaauggacucagaaguau

SEQ ID NO: 1687875 - RNA, 19 nt, Homo sapiens
  misc_RNA (1)...(19): siRNA sense strand
gggaauggacucagaagua

SEQ ID NO: 1687876 - RNA, 19 nt, Homo sapiens
  misc_RNA (1)...(19): siRNA sense strand
ucagaaguaugccauguga

SEQ ID NO: 1687877 - RNA, 19 nt, Homo sapiens
  misc_RNA (1)...(19): siRNA sense strand
aaacagacagagauaagua

SEQ ID NO: 1687878 - RNA, 19 nt, Homo sapiens
  misc_RNA (1)...(19): siRNA sense strand
cagaauaucucgggaaugg

SEQ ID NO: 1687879 - RNA, 19 nt, Homo sapiens
  misc_RNA (1)...(19): siRNA sense strand
gcauuugucucgauauucu

SEQ ID NO: 1687880 - RNA, 19 nt, Homo sapiens
  misc_RNA (1)...(19): siRNA sense strand
cagcauuugucucgauauu

SEQ ID NO: 1687881 - RNA, 19 nt, Homo sapiens
  misc_RNA (1)...(19): siRNA sense strand
ccacaauuaugggaccuaa

SEQ ID NO: 1687882 - RNA, 19 nt, Homo sapiens
  misc_RNA (1)...(19): siRNA sense strand
ggcagcauuugucucgaua

SEQ ID NO: 1687883 - RNA, 19 nt, Homo sapiens
  misc_RNA (1)...(19): siRNA sense strand
ucacaguggucgccugcuu

SEQ ID NO: 1687884 - RNA, 19 nt, Homo sapiens
  misc_RNA (1)...(19): siRNA sense strand
ucgccugcuuuaacaauuu

SEQ ID NO: 1687885 - RNA, 19 nt, Homo sapiens
  misc_RNA (1)...(19): siRNA sense strand
cuaaugacagcccauauca

SEQ ID NO: 1687886 - RNA, 19 nt, Homo sapiens
  misc_RNA (1)...(19): siRNA sense strand
acaguggucgccugcuuua

SEQ ID NO: 1687887 - RNA, 19 nt, Homo sapiens
  misc_RNA (1)...(19): siRNA sense strand
gauauucuaagaucacagu

SEQ ID NO: 1687888 - RNA, 19 nt, Homo sapiens
  misc_RNA (1)...(19): siRNA sense strand
gaccuaaugacagcccaua

SEQ ID NO: 1687889 - RNA, 19 nt, Homo sapiens
  misc_RNA (1)...(19): siRNA sense strand
guggucgccugcuuuaaca

SEQ ID NO: 1687890 - RNA, 19 nt, Homo sapiens
  misc_RNA (1)...(19): siRNA sense strand
aacagaauaucucgggaau

SEQ ID NO: 1687891 - RNA, 19 nt, Homo sapiens
  misc_RNA (1)...(19): siRNA sense strand
gaauggacucagaaguaug

SEQ ID NO: 1687892 - RNA, 19 nt, Homo sapiens
  misc_RNA (1)...(19): siRNA sense strand
ucucgggaauggacucaga

SEQ ID NO: 1687893 - RNA, 19 nt, Homo sapiens
  misc_RNA (1)...(19): siRNA sense strand
aaugacagcccauaucaag

SEQ ID NO: 1687894 - RNA, 19 nt, Homo sapiens
  misc_RNA (1)...(19): siRNA sense strand
ccuaaugacagcccauauc

SEQ ID NO: 1687895 - RNA, 19 nt, Homo sapiens
  misc_RNA (1)...(19): siRNA sense strand
gucgccugcuuuaacaauu

SEQ ID NO: 1687896 - RNA, 19 nt, Homo sapiens
  misc_RNA (1)...(19): siRNA sense strand
uggcagcauuugucucgau

SEQ ID NO: 1687897 - RNA, 19 nt, Homo sapiens
  misc_RNA (1)...(19): siRNA sense strand
ggucgccugcuuuaacaau

SEQ ID NO: 1687898 - RNA, 19 nt, Homo sapiens
  misc_RNA (1)...(19): siRNA sense strand
ggaauggacucagaaguau

SEQ ID NO: 1687899 - RNA, 19 nt, Homo sapiens
  misc_RNA (1)...(19): siRNA sense strand
gggaauggacucagaagua

SEQ ID NO: 1687900 - RNA, 19 nt, Homo sapiens
  misc_RNA (1)...(19): siRNA sense strand
ucagaaguaugccauguga

SEQ ID NO: 1687901 - RNA, 19 nt, Homo sapiens
  misc_RNA (1)...(19): siRNA sense strand
aaacagacagagauaagua

SEQ ID NO: 1687902 - RNA, 19 nt, Homo sapiens
  misc_RNA (1)...(19): siRNA sense strand
cagaauaucucgggaaugg

SEQ ID NO: 1687903 - RNA, 19 nt, Homo sapiens
  misc_RNA (1)...(19): siRNA sense strand
gcauuugucucgauauucu

SEQ ID NO: 1687904 - RNA, 19 nt, Homo sapiens
  misc_RNA (1)...(19): siRNA sense strand
cagcauuugucucgauauu

SEQ ID NO: 1687905 - RNA, 19 nt, Homo sapiens
  misc_RNA (1)...(19): siRNA sense strand
ccacaauuaugggaccuaa

SEQ ID NO: 1687906 - RNA, 19 nt, Homo sapiens
  misc_RNA (1)...(19): siRNA sense strand
ggcagcauuugucucgaua

SEQ ID NO: 1687907 - RNA, 19 nt, Homo sapiens
  misc_RNA (1)...(19): siRNA sense strand
ucacaguggucgccugcuu

SEQ ID NO: 1687908 - RNA, 19 nt, Homo sapiens
  misc_RNA (1)...(19): siRNA sense strand
ucgccugcuuuaacaauuu

SEQ ID NO: 1687909 - RNA, 19 nt, Homo sapiens
  misc_RNA (1)...(19): siRNA sense strand
cuaaugacagcccauauca

SEQ ID NO: 1687910 - RNA, 19 nt, Homo sapiens
  misc_RNA (1)...(19): siRNA sense strand
acaguggucgccugcuuua

SEQ ID NO: 1687911 - RNA, 19 nt, Homo sapiens
  misc_RNA (1)...(19): siRNA sense strand
gauauucuaagaucacagu

SEQ ID NO: 1687912 - RNA, 19 nt, Homo sapiens
  misc_RNA (1)...(19): siRNA sense strand
gaccuaaugacagcccaua

SEQ ID NO: 1687913 - RNA, 19 nt, Homo sapiens
  misc_RNA (1)...(19): siRNA sense strand
guggucgccugcuuuaaca

SEQ ID NO: 1687914 - RNA, 19 nt, Homo sapiens
  misc_RNA (1)...(19): siRNA sense strand
aacagaauaucucgggaau

SEQ ID NO: 1687915 - RNA, 19 nt, Homo sapiens
  misc_RNA (1)...(19): siRNA sense strand
gaauggacucagaaguaug

SEQ ID NO: 1687916 - RNA, 19 nt, Homo sapiens
  misc_RNA (1)...(19): siRNA sense strand
ucucgggaauggacucaga

SEQ ID NO: 1687917 - RNA, 19 nt, Homo sapiens
  misc_RNA (1)...(19): siRNA sense strand
aaugacagcccauaucaag

SEQ ID NO: 1687918 - RNA, 19 nt, Homo sapiens
  misc_RNA (1)...(19): siRNA sense strand
ccuaaugacagcccauauc

SEQ ID NO: 1687919 - RNA, 19 nt, Homo sapiens
  misc_RNA (1)...(19): siRNA sense strand
gucgccugcuuuaacaauu

SEQ ID NO: 1687920 - RNA, 19 nt, Homo sapiens
  misc_RNA (1)...(19): siRNA sense strand
uggcagcauuugucucgau

SEQ ID NO: 1687921 - RNA, 19 nt, Homo sapiens
  misc_RNA (1)...(19): siRNA sense strand
ggucgccugcuuuaacaau

SEQ ID NO: 1687922 - RNA, 19 nt, Homo sapiens
  misc_RNA (1)...(19): siRNA sense strand
ggaauggacucagaaguau

SEQ ID NO: 1687923 - RNA, 19 nt, Homo sapiens
  misc_RNA (1)...(19): siRNA sense strand
gggaauggacucagaagua

SEQ ID NO: 1687924 - RNA, 19 nt, Homo sapiens
  misc_RNA (1)...(19): siRNA sense strand
ucagaaguaugccauguga

SEQ ID NO: 1687925 - RNA, 19 nt, Homo sapiens
  misc_RNA (1)...(19): siRNA sense strand
aaacagacagagauaagua

SEQ ID NO: 1687926 - RNA, 19 nt, Homo sapiens
  misc_RNA (1)...(19): siRNA sense strand
cagaauaucucgggaaugg

SEQ ID NO: 1687927 - RNA, 19 nt, Homo sapiens
  misc_RNA (1)...(19): siRNA sense strand
gcauuugucucgauauucu

SEQ ID NO: 1687928 - RNA, 19 nt, Homo sapiens
  misc_RNA (1)...(19): siRNA sense strand
cagcauuugucucgauauu

SEQ ID NO: 1687929 - RNA, 19 nt, Homo sapiens
  misc_RNA (1)...(19): siRNA sense strand
ccacaauuaugggaccuaa

SEQ ID NO: 1687930 - RNA, 19 nt, Homo sapiens
  misc_RNA (1)...(19): siRNA sense strand
ggcagcauuugucucgaua

SEQ ID NO: 1687931 - RNA, 19 nt, Homo sapiens
  misc_RNA (1)...(19): siRNA sense strand
ucacaguggucgccugcuu

SEQ ID NO: 1687932 - RNA, 19 nt, Homo sapiens
  misc_RNA (1)...(19): siRNA sense strand
ucgccugcuuuaacaauuu

SEQ ID NO: 1687933 - RNA, 19 nt, Homo sapiens
  misc_RNA (1)...(19): siRNA sense strand
cuaaugacagcccauauca

SEQ ID NO: 1687934 - RNA, 19 nt, Homo sapiens
  misc_RNA (1)...(19): siRNA sense strand
acaguggucgccugcuuua

SEQ ID NO: 1687935 - RNA, 19 nt, Homo sapiens
  misc_RNA (1)...(19): siRNA sense strand
gauauucuaagaucacagu

SEQ ID NO: 1687936 - RNA, 19 nt, Homo sapiens
  misc_RNA (1)...(19): siRNA sense strand
gaccuaaugacagcccaua

SEQ ID NO: 1687937 - RNA, 19 nt, Homo sapiens
  misc_RNA (1)...(19): siRNA sense strand
guggucgccugcuuuaaca

SEQ ID NO: 1687938 - RNA, 19 nt, Homo sapiens
  misc_RNA (1)...(19): siRNA sense strand
aacagaauaucucgggaau

SEQ ID NO: 1687939 - RNA, 19 nt, Homo sapiens
  misc_RNA (1)...(19): siRNA sense strand
gaauggacucagaaguaug

SEQ ID NO: 1687940 - RNA, 19 nt, Homo sapiens
  misc_RNA (1)...(19): siRNA sense strand
ucucgggaauggacucaga

SEQ ID NO: 1687941 - RNA, 19 nt, Homo sapiens
  misc_RNA (1)...(19): siRNA sense strand
aaugacagcccauaucaag

SEQ ID NO: 1687942 - RNA, 19 nt, Homo sapiens
  misc_RNA (1)...(19): siRNA sense strand
ccuaaugacagcccauauc

SEQ ID NO: 1687943 - RNA, 19 nt, Homo sapiens
  misc_RNA (1)...(19): siRNA sense strand
gucgccugcuuuaacaauu

SEQ ID NO: 1687944 - RNA, 19 nt, Homo sapiens
  misc_RNA (1)...(19): siRNA sense strand
uggcagcauuugucucgau

SEQ ID NO: 1687945 - RNA, 19 nt, Homo sapiens
  misc_RNA (1)...(19): siRNA sense strand
ggucgccugcuuuaacaau

SEQ ID NO: 1687946 - RNA, 19 nt, Homo sapiens
  misc_RNA (1)...(19): siRNA sense strand
ggaauggacucagaaguau

SEQ ID NO: 1687947 - RNA, 19 nt, Homo sapiens
  misc_RNA (1)...(19): siRNA sense strand
gggaauggacucagaagua

SEQ ID NO: 1687948 - RNA, 19 nt, Homo sapiens
  misc_RNA (1)...(19): siRNA sense strand
ucagaaguaugccauguga

SEQ ID NO: 1687949 - RNA, 19 nt, Homo sapiens
  misc_RNA (1)...(19): siRNA sense strand
aaacagacagagauaagua

SEQ ID NO: 1687950 - RNA, 19 nt, Homo sapiens
  misc_RNA (1)...(19): siRNA sense strand
cagaauaucucgggaaugg

SEQ ID NO: 1687951 - RNA, 19 nt, Homo sapiens
  misc_RNA (1)...(19): siRNA sense strand
gcauuugucucgauauucu

SEQ ID NO: 1687952 - RNA, 19 nt, Homo sapiens
  misc_RNA (1)...(19): siRNA sense strand
cagcauuugucucgauauu

SEQ ID NO: 1687953 - RNA, 19 nt, Homo sapiens
  misc_RNA (1)...(19): siRNA sense strand
ccacaauuaugggaccuaa

SEQ ID NO: 1687954 - RNA, 19 nt, Homo sapiens
  misc_RNA (1)...(19): siRNA sense strand
ggcagcauuugucucgaua

SEQ ID NO: 1687955 - RNA, 19 nt, Homo sapiens
  misc_RNA (1)...(19): siRNA sense strand
ucacaguggucgccugcuu

SEQ ID NO: 1687956 - RNA, 19 nt, Homo sapiens
  misc_RNA (1)...(19): siRNA sense strand
ucgccugcuuuaacaauuu

SEQ ID NO: 1687957 - RNA, 19 nt, Homo sapiens
  misc_RNA (1)...(19): siRNA sense strand
cuaaugacagcccauauca

SEQ ID NO: 1687958 - RNA, 19 nt, Homo sapiens
  misc_RNA (1)...(19): siRNA sense strand
acaguggucgccugcuuua

SEQ ID NO: 1687959 - RNA, 19 nt, Homo sapiens
  misc_RNA (1)...(19): siRNA sense strand
gauauucuaagaucacagu

SEQ ID NO: 1687960 - RNA, 19 nt, Homo sapiens
  misc_RNA (1)...(19): siRNA sense strand
gaccuaaugacagcccaua

SEQ ID NO: 1687961 - RNA, 19 nt, Homo sapiens
  misc_RNA (1)...(19): siRNA sense strand
guggucgccugcuuuaaca

SEQ ID NO: 1687962 - RNA, 19 nt, Homo sapiens
  misc_RNA (1)...(19): siRNA sense strand
aacagaauaucucgggaau

SEQ ID NO: 1687963 - RNA, 19 nt, Homo sapiens
  misc_RNA (1)...(19): siRNA sense strand
gaauggacucagaaguaug

SEQ ID NO: 1687964 - RNA, 19 nt, Homo sapiens
  misc_RNA (1)...(19): siRNA sense strand
ucucgggaauggacucaga

SEQ ID NO: 1687965 - RNA, 19 nt, Homo sapiens
  misc_RNA (1)...(19): siRNA sense strand
aaugacagcccauaucaag

SEQ ID NO: 1687966 - RNA, 19 nt, Homo sapiens
  misc_RNA (1)...(19): siRNA sense strand
ccuaaugacagcccauauc

SEQ ID NO: 1687967 - RNA, 19 nt, Homo sapiens
  misc_RNA (1)...(19): siRNA sense strand
gucgccugcuuuaacaauu

SEQ ID NO: 1687968 - RNA, 19 nt, Homo sapiens
  misc_RNA (1)...(19): siRNA sense strand
uggcagcauuugucucgau

SEQ ID NO: 1687969 - RNA, 19 nt, Homo sapiens
  misc_RNA (1)...(19): siRNA sense strand
ggucgccugcuuuaacaau

SEQ ID NO: 1687970 - RNA, 19 nt, Homo sapiens
  misc_RNA (1)...(19): siRNA sense strand
ggaauggacucagaaguau

SEQ ID NO: 1687971 - RNA, 19 nt, Homo sapiens
  misc_RNA (1)...(19): siRNA sense strand
gggaauggacucagaagua

SEQ ID NO: 1687972 - RNA, 19 nt, Homo sapiens
  misc_RNA (1)...(19): siRNA sense strand
ucagaaguaugccauguga

SEQ ID NO: 1687973 - RNA, 19 nt, Homo sapiens
  misc_RNA (1)...(19): siRNA sense strand
aaacagacagagauaagua

SEQ ID NO: 1687974 - RNA, 19 nt, Homo sapiens
  misc_RNA (1)...(19): siRNA sense strand
cagaauaucucgggaaugg

SEQ ID NO: 1687975 - RNA, 19 nt, Homo sapiens
  misc_RNA (1)...(19): siRNA sense strand
gcauuugucucgauauucu

SEQ ID NO: 1687976 - RNA, 19 nt, Homo sapiens
  misc_RNA (1)...(19): siRNA sense strand
cagcauuugucucgauauu

SEQ ID NO: 1687977 - RNA, 19 nt, Homo sapiens
  misc_RNA (1)...(19): siRNA sense strand
ccacaauuaugggaccuaa

SEQ ID NO: 1687978 - RNA, 19 nt, Homo sapiens
  misc_RNA (1)...(19): siRNA sense strand
ggcagcauuugucucgaua

SEQ ID NO: 1687979 - RNA, 19 nt, Homo sapiens
  misc_RNA (1)...(19): siRNA sense strand
ucacaguggucgccugcuu

SEQ ID NO: 1687980 - RNA, 19 nt, Homo sapiens
  misc_RNA (1)...(19): siRNA sense strand
ucgccugcuuuaacaauuu

SEQ ID NO: 1687981 - RNA, 19 nt, Homo sapiens
  misc_RNA (1)...(19): siRNA sense strand
cuaaugacagcccauauca

SEQ ID NO: 1687982 - RNA, 19 nt, Homo sapiens
  misc_RNA (1)...(19): siRNA sense strand
acaguggucgccugcuuua

SEQ ID NO: 1687983 - RNA, 19 nt, Homo sapiens
  misc_RNA (1)...(19): siRNA sense strand
gauauucuaagaucacagu

SEQ ID NO: 1687984 - RNA, 19 nt, Homo sapiens
  misc_RNA (1)...(19): siRNA sense strand
gaccuaaugacagcccaua

SEQ ID NO: 1687985 - RNA, 19 nt, Homo sapiens
  misc_RNA (1)...(19): siRNA sense strand
guggucgccugcuuuaaca

SEQ ID NO: 1687986 - RNA, 19 nt, Homo sapiens
  misc_RNA (1)...(19): siRNA sense strand
aacagaauaucucgggaau

SEQ ID NO: 1687987 - RNA, 19 nt, Homo sapiens
  misc_RNA (1)...(19): siRNA sense strand
gaauggacucagaaguaug

SEQ ID NO: 1687988 - RNA, 19 nt, Homo sapiens
  misc_RNA (1)...(19): siRNA sense strand
ucucgggaauggacucaga

SEQ ID NO: 1687989 - RNA, 19 nt, Homo sapiens
  misc_RNA (1)...(19): siRNA sense strand
aaugacagcccauaucaag

SEQ ID NO: 1687990 - RNA, 19 nt, Homo sapiens
  misc_RNA (1)...(19): siRNA sense strand
ccuaaugacagcccauauc

SEQ ID NO: 1687991 - RNA, 19 nt, Homo sapiens
  misc_RNA (1)...(19): siRNA sense strand
gucgccugcuuuaacaauu

SEQ ID NO: 1687992 - RNA, 19 nt, Homo sapiens
  misc_RNA (1)...(19): siRNA sense strand
uggcagcauuugucucgau

SEQ ID NO: 1687993 - RNA, 19 nt, Homo sapiens
  misc_RNA (1)...(19): siRNA sense strand
ggucgccugcuuuaacaau

SEQ ID NO: 1687994 - RNA, 19 nt, Homo sapiens
  misc_RNA (1)...(19): siRNA sense strand
ggaauggacucagaaguau

SEQ ID NO: 1687995 - RNA, 19 nt, Homo sapiens
  misc_RNA (1)...(19): siRNA sense strand
gggaauggacucagaagua

SEQ ID NO: 1687996 - RNA, 19 nt, Homo sapiens
  misc_RNA (1)...(19): siRNA sense strand
ucagaaguaugccauguga

SEQ ID NO: 1687997 - RNA, 19 nt, Homo sapiens
  misc_RNA (1)...(19): siRNA sense strand
aaacagacagagauaagua

SEQ ID NO: 1687998 - RNA, 19 nt, Homo sapiens
  misc_RNA (1)...(19): siRNA sense strand
cagaauaucucgggaaugg

SEQ ID NO: 1687999 - RNA, 19 nt, Homo sapiens
  misc_RNA (1)...(19): siRNA sense strand
gcauuugucucgauauucu

SEQ ID NO: 1688000 - RNA, 19 nt, Homo sapiens
  misc_RNA (1)...(19): siRNA sense strand
cagcauuugucucgauauu

SEQ ID NO: 1688001 - RNA, 19 nt, Homo sapiens
  misc_RNA (1)...(19): siRNA sense strand
ccacaauuaugggaccuaa

SEQ ID NO: 1688002 - RNA, 19 nt, Homo sapiens
  misc_RNA (1)...(19): siRNA sense strand
ggcagcauuugucucgaua

SEQ ID NO: 1688003 - RNA, 19 nt, Homo sapiens
  misc_RNA (1)...(19): siRNA sense strand
ucacaguggucgccugcuu

SEQ ID NO: 1688004 - RNA, 19 nt, Homo sapiens
  misc_RNA (1)...(19): siRNA sense strand
ucgccugcuuuaacaauuu

SEQ ID NO: 1688005 - RNA, 19 nt, Homo sapiens
  misc_RNA (1)...(19): siRNA sense strand
cuaaugacagcccauauca

SEQ ID NO: 1688006 - RNA, 19 nt, Homo sapiens
  misc_RNA (1)...(19): siRNA sense strand
acaguggucgccugcuuua

SEQ ID NO: 1688007 - RNA, 19 nt, Homo sapiens
  misc_RNA (1)...(19): siRNA sense strand
gauauucuaagaucacagu

SEQ ID NO: 1688008 - RNA, 19 nt, Homo sapiens
  misc_RNA (1)...(19): siRNA sense strand
gaccuaaugacagcccaua

SEQ ID NO: 1688009 - RNA, 19 nt, Homo sapiens
  misc_RNA (1)...(19): siRNA sense strand
guggucgccugcuuuaaca

SEQ ID NO: 1688010 - RNA, 19 nt, Homo sapiens
  misc_RNA (1)...(19): siRNA sense strand
aacagaauaucucgggaau

SEQ ID NO: 1688011 - RNA, 19 nt, Homo sapiens
  misc_RNA (1)...(19): siRNA sense strand
gaauggacucagaaguaug

SEQ ID NO: 1688012 - RNA, 19 nt, Homo sapiens
  misc_RNA (1)...(19): siRNA sense strand
ucucgggaauggacucaga

SEQ ID NO: 1688013 - RNA, 19 nt, Homo sapiens
  misc_RNA (1)...(19): siRNA sense strand
aaugacagcccauaucaag

SEQ ID NO: 1688014 - RNA, 19 nt, Homo sapiens
  misc_RNA (1)...(19): siRNA sense strand
ccuaaugacagcccauauc

SEQ ID NO: 1688015 - RNA, 19 nt, Homo sapiens
  misc_RNA (1)...(19): siRNA sense strand
gucgccugcuuuaacaauu

SEQ ID NO: 1688016 - RNA, 19 nt, Homo sapiens
  misc_RNA (1)...(19): siRNA sense strand
uggcagcauuugucucgau

SEQ ID NO: 1688017 - RNA, 19 nt, Homo sapiens
  misc_RNA (1)...(19): siRNA sense strand
ggucgccugcuuuaacaau

SEQ ID NO: 1688018 - RNA, 19 nt, Homo sapiens
  misc_RNA (1)...(19): siRNA sense strand
aaacagacagagauaagua

SEQ ID NO: 1688019 - RNA, 19 nt, Homo sapiens
  misc_RNA (1)...(19): siRNA sense strand
gcauuugucucgauauucu

SEQ ID NO: 1688020 - RNA, 19 nt, Homo sapiens
  misc_RNA (1)...(19): siRNA sense strand
cagcauuugucucgauauu

SEQ ID NO: 1688021 - RNA, 19 nt, Homo sapiens
  misc_RNA (1)...(19): siRNA sense strand
ccacaauuaugggaccuaa

SEQ ID NO: 1688022 - RNA, 19 nt, Homo sapiens
  misc_RNA (1)...(19): siRNA sense strand
ggcagcauuugucucgaua

SEQ ID NO: 1688023 - RNA, 19 nt, Homo sapiens
  misc_RNA (1)...(19): siRNA sense strand
ucacaguggucgccugcuu

SEQ ID NO: 1688024 - RNA, 19 nt, Homo sapiens
  misc_RNA (1)...(19): siRNA sense strand
gcacggaucuauaaaacag

SEQ ID NO: 1688025 - RNA, 19 nt, Homo sapiens
  misc_RNA (1)...(19): siRNA sense strand
ucgccugcuuuaacaauuu

SEQ ID NO: 1688026 - RNA, 19 nt, Homo sapiens
  misc_RNA (1)...(19): siRNA sense strand
cuaaugacagcccauauca

SEQ ID NO: 1688027 - RNA, 19 nt, Homo sapiens
  misc_RNA (1)...(19): siRNA sense strand
acaguggucgccugcuuua

SEQ ID NO: 1688028 - RNA, 19 nt, Homo sapiens
  misc_RNA (1)...(19): siRNA sense strand
gauauucuaagaucacagu

SEQ ID NO: 1688029 - RNA, 19 nt, Homo sapiens
  misc_RNA (1)...(19): siRNA sense strand
gaccuaaugacagcccaua

SEQ ID NO: 1688030 - RNA, 19 nt, Homo sapiens
  misc_RNA (1)...(19): siRNA sense strand
guggucgccugcuuuaaca

SEQ ID NO: 1688031 - RNA, 19 nt, Homo sapiens
  misc_RNA (1)...(19): siRNA sense strand
aaugacagcccauaucaag

SEQ ID NO: 1688032 - RNA, 19 nt, Homo sapiens
  misc_RNA (1)...(19): siRNA sense strand
ccuaaugacagcccauauc

SEQ ID NO: 1688033 - RNA, 19 nt, Homo sapiens
  misc_RNA (1)...(19): siRNA sense strand
gucgccugcuuuaacaauu

SEQ ID NO: 1688034 - RNA, 19 nt, Homo sapiens
  misc_RNA (1)...(19): siRNA sense strand
uggcagcauuugucucgau

SEQ ID NO: 1688035 - RNA, 19 nt, Homo sapiens
  misc_RNA (1)...(19): siRNA sense strand
ggucgccugcuuuaacaau

SEQ ID NO: 1688036 - RNA, 19 nt, Homo sapiens
  misc_RNA (1)...(19): siRNA sense strand
ggaauggacucagaaguau

SEQ ID NO: 1688037 - RNA, 19 nt, Homo sapiens
  misc_RNA (1)...(19): siRNA sense strand
gggaauggacucagaagua

SEQ ID NO: 1688038 - RNA, 19 nt, Homo sapiens
  misc_RNA (1)...(19): siRNA sense strand
ucagaaguaugccauguga

SEQ ID NO: 1688039 - RNA, 19 nt, Homo sapiens
  misc_RNA (1)...(19): siRNA sense strand
aaacagacagagauaagua

SEQ ID NO: 1688040 - RNA, 19 nt, Homo sapiens
  misc_RNA (1)...(19): siRNA sense strand
cagaauaucucgggaaugg

SEQ ID NO: 1688041 - RNA, 19 nt, Homo sapiens
  misc_RNA (1)...(19): siRNA sense strand
gcauuugucucgauauucu

SEQ ID NO: 1688042 - RNA, 19 nt, Homo sapiens
  misc_RNA (1)...(19): siRNA sense strand
cagcauuugucucgauauu

SEQ ID NO: 1688043 - RNA, 19 nt, Homo sapiens
  misc_RNA (1)...(19): siRNA sense strand
ccacaauuaugggaccuaa

SEQ ID NO: 1688044 - RNA, 19 nt, Homo sapiens
  misc_RNA (1)...(19): siRNA sense strand
ggcagcauuugucucgaua

SEQ ID NO: 1688045 - RNA, 19 nt, Homo sapiens
  misc_RNA (1)...(19): siRNA sense strand
ucacaguggucgccugcuu

SEQ ID NO: 1688046 - RNA, 19 nt, Homo sapiens
  misc_RNA (1)...(19): siRNA sense strand
ucgccugcuuuaacaauuu

SEQ ID NO: 1688047 - RNA, 19 nt, Homo sapiens
  misc_RNA (1)...(19): siRNA sense strand
cuaaugacagcccauauca

SEQ ID NO: 1688048 - RNA, 19 nt, Homo sapiens
  misc_RNA (1)...(19): siRNA sense strand
acaguggucgccugcuuua

SEQ ID NO: 1688049 - RNA, 19 nt, Homo sapiens
  misc_RNA (1)...(19): siRNA sense strand
gauauucuaagaucacagu

SEQ ID NO: 1688050 - RNA, 19 nt, Homo sapiens
  misc_RNA (1)...(19): siRNA sense strand
gaccuaaugacagcccaua

SEQ ID NO: 1688051 - RNA, 19 nt, Homo sapiens
  misc_RNA (1)...(19): siRNA sense strand
guggucgccugcuuuaaca

SEQ ID NO: 1688052 - RNA, 19 nt, Homo sapiens
  misc_RNA (1)...(19): siRNA sense strand
aacagaauaucucgggaau

SEQ ID NO: 1688053 - RNA, 19 nt, Homo sapiens
  misc_RNA (1)...(19): siRNA sense strand
gaauggacucagaaguaug

SEQ ID NO: 1688054 - RNA, 19 nt, Homo sapiens
  misc_RNA (1)...(19): siRNA sense strand
ucucgggaauggacucaga

SEQ ID NO: 1688055 - RNA, 19 nt, Homo sapiens
  misc_RNA (1)...(19): siRNA sense strand
aaugacagcccauaucaag

SEQ ID NO: 1688056 - RNA, 19 nt, Homo sapiens
  misc_RNA (1)...(19): siRNA sense strand
ccuaaugacagcccauauc

SEQ ID NO: 1688057 - RNA, 19 nt, Homo sapiens
  misc_RNA (1)...(19): siRNA sense strand
gucgccugcuuuaacaauu

SEQ ID NO: 1688058 - RNA, 19 nt, Homo sapiens
  misc_RNA (1)...(19): siRNA sense strand
uggcagcauuugucucgau

SEQ ID NO: 1688059 - RNA, 19 nt, Homo sapiens
  misc_RNA (1)...(19): siRNA sense strand
ggucgccugcuuuaacaau

SEQ ID NO: 1688060 - RNA, 19 nt, Homo sapiens
  misc_RNA (1)...(19): siRNA sense strand
ggaauggacucagaaguau

SEQ ID NO: 1688061 - RNA, 19 nt, Homo sapiens
  misc_RNA (1)...(19): siRNA sense strand
gggaauggacucagaagua

SEQ ID NO: 1688062 - RNA, 19 nt, Homo sapiens
  misc_RNA (1)...(19): siRNA sense strand
ucagaaguaugccauguga

SEQ ID NO: 1688063 - RNA, 19 nt, Homo sapiens
  misc_RNA (1)...(19): siRNA sense strand
aaacagacagagauaagua

SEQ ID NO: 1688064 - RNA, 19 nt, Homo sapiens
  misc_RNA (1)...(19): siRNA sense strand
cagaauaucucgggaaugg

SEQ ID NO: 1688065 - RNA, 19 nt, Homo sapiens
  misc_RNA (1)...(19): siRNA sense strand
gcauuugucucgauauucu

SEQ ID NO: 1688066 - RNA, 19 nt, Homo sapiens
  misc_RNA (1)...(19): siRNA sense strand
cagcauuugucucgauauu

SEQ ID NO: 1688067 - RNA, 19 nt, Homo sapiens
  misc_RNA (1)...(19): siRNA sense strand
ccacaauuaugggaccuaa

SEQ ID NO: 1688068 - RNA, 19 nt, Homo sapiens
  misc_RNA (1)...(19): siRNA sense strand
ggcagcauuugucucgaua

SEQ ID NO: 1688069 - RNA, 19 nt, Homo sapiens
  misc_RNA (1)...(19): siRNA sense strand
ucacaguggucgccugcuu

SEQ ID NO: 1688070 - RNA, 19 nt, Homo sapiens
  misc_RNA (1)...(19): siRNA sense strand
ucgccugcuuuaacaauuu

SEQ ID NO: 1688071 - RNA, 19 nt, Homo sapiens
  misc_RNA (1)...(19): siRNA sense strand
cuaaugacagcccauauca

SEQ ID NO: 1688072 - RNA, 19 nt, Homo sapiens
  misc_RNA (1)...(19): siRNA sense strand
acaguggucgccugcuuua

SEQ ID NO: 1688073 - RNA, 19 nt, Homo sapiens
  misc_RNA (1)...(19): siRNA sense strand
gauauucuaagaucacagu

SEQ ID NO: 1688074 - RNA, 19 nt, Homo sapiens
  misc_RNA (1)...(19): siRNA sense strand
gaccuaaugacagcccaua

SEQ ID NO: 1688075 - RNA, 19 nt, Homo sapiens
  misc_RNA (1)...(19): siRNA sense strand
guggucgccugcuuuaaca

SEQ ID NO: 1688076 - RNA, 19 nt, Homo sapiens
  misc_RNA (1)...(19): siRNA sense strand
aacagaauaucucgggaau

SEQ ID NO: 1688077 - RNA, 19 nt, Homo sapiens
  misc_RNA (1)...(19): siRNA sense strand
gaauggacucagaaguaug

SEQ ID NO: 1688078 - RNA, 19 nt, Homo sapiens
  misc_RNA (1)...(19): siRNA sense strand
ucucgggaauggacucaga

SEQ ID NO: 1688079 - RNA, 19 nt, Homo sapiens
  misc_RNA (1)...(19): siRNA sense strand
aaugacagcccauaucaag

SEQ ID NO: 1688080 - RNA, 19 nt, Homo sapiens
  misc_RNA (1)...(19): siRNA sense strand
ccuaaugacagcccauauc

SEQ ID NO: 1688081 - RNA, 19 nt, Homo sapiens
  misc_RNA (1)...(19): siRNA sense strand
gucgccugcuuuaacaauu

SEQ ID NO: 1688082 - RNA, 19 nt, Homo sapiens
  misc_RNA (1)...(19): siRNA sense strand
uggcagcauuugucucgau

SEQ ID NO: 1688083 - RNA, 19 nt, Homo sapiens
  misc_RNA (1)...(19): siRNA sense strand
ggucgccugcuuuaacaau

SEQ ID NO: 1688084 - RNA, 19 nt, Homo sapiens
  misc_RNA (1)...(19): siRNA sense strand
ggaauggacucagaaguau

SEQ ID NO: 1688085 - RNA, 19 nt, Homo sapiens
  misc_RNA (1)...(19): siRNA sense strand
gggaauggacucagaagua

SEQ ID NO: 1688086 - RNA, 19 nt, Homo sapiens
  misc_RNA (1)...(19): siRNA sense strand
ucagaaguaugccauguga

SEQ ID NO: 1688087 - RNA, 19 nt, Homo sapiens
  misc_RNA (1)...(19): siRNA sense strand
aaacagacagagauaagua

SEQ ID NO: 1688088 - RNA, 19 nt, Homo sapiens
  misc_RNA (1)...(19): siRNA sense strand
cagaauaucucgggaaugg

SEQ ID NO: 1688089 - RNA, 19 nt, Homo sapiens
  misc_RNA (1)...(19): siRNA sense strand
gcauuugucucgauauucu

SEQ ID NO: 1688090 - RNA, 19 nt, Homo sapiens
  misc_RNA (1)...(19): siRNA sense strand
cagcauuugucucgauauu

SEQ ID NO: 1688091 - RNA, 19 nt, Homo sapiens
  misc_RNA (1)...(19): siRNA sense strand
ccacaauuaugggaccuaa

SEQ ID NO: 1688092 - RNA, 19 nt, Homo sapiens
  misc_RNA (1)...(19): siRNA sense strand
ggcagcauuugucucgaua

SEQ ID NO: 1688093 - RNA, 19 nt, Homo sapiens
  misc_RNA (1)...(19): siRNA sense strand
ucacaguggucgccugcuu

SEQ ID NO: 1688094 - RNA, 19 nt, Homo sapiens
  misc_RNA (1)...(19): siRNA sense strand
ucgccugcuuuaacaauuu

SEQ ID NO: 1688095 - RNA, 19 nt, Homo sapiens
  misc_RNA (1)...(19): siRNA sense strand
cuaaugacagcccauauca

SEQ ID NO: 1688096 - RNA, 19 nt, Homo sapiens
  misc_RNA (1)...(19): siRNA sense strand
acaguggucgccugcuuua

SEQ ID NO: 1688097 - RNA, 19 nt, Homo sapiens
  misc_RNA (1)...(19): siRNA sense strand
gauauucuaagaucacagu

SEQ ID NO: 1688098 - RNA, 19 nt, Homo sapiens
  misc_RNA (1)...(19): siRNA sense strand
gaccuaaugacagcccaua

SEQ ID NO: 1688099 - RNA, 19 nt, Homo sapiens
  misc_RNA (1)...(19): siRNA sense strand
guggucgccugcuuuaaca

SEQ ID NO: 1688100 - RNA, 19 nt, Homo sapiens
  misc_RNA (1)...(19): siRNA sense strand
aacagaauaucucgggaau

SEQ ID NO: 1688101 - RNA, 19 nt, Homo sapiens
  misc_RNA (1)...(19): siRNA sense strand
gaauggacucagaaguaug

SEQ ID NO: 1688102 - RNA, 19 nt, Homo sapiens
  misc_RNA (1)...(19): siRNA sense strand
ucucgggaauggacucaga

SEQ ID NO: 1688103 - RNA, 19 nt, Homo sapiens
  misc_RNA (1)...(19): siRNA sense strand
aaugacagcccauaucaag

SEQ ID NO: 1688104 - RNA, 19 nt, Homo sapiens
  misc_RNA (1)...(19): siRNA sense strand
ccuaaugacagcccauauc

SEQ ID NO: 1688105 - RNA, 19 nt, Homo sapiens
  misc_RNA (1)...(19): siRNA sense strand
gucgccugcuuuaacaauu

SEQ ID NO: 1688106 - RNA, 19 nt, Homo sapiens
  misc_RNA (1)...(19): siRNA sense strand
uggcagcauuugucucgau

SEQ ID NO: 1688107 - RNA, 19 nt, Homo sapiens
  misc_RNA (1)...(19): siRNA sense strand
ggucgccugcuuuaacaau

SEQ ID NO: 1688108 - RNA, 19 nt, Homo sapiens
  misc_RNA (1)...(19): siRNA sense strand
ggaauggacucagaaguau

SEQ ID NO: 1688109 - RNA, 19 nt, Homo sapiens
  misc_RNA (1)...(19): siRNA sense strand
gggaauggacucagaagua

SEQ ID NO: 1688110 - RNA, 19 nt, Homo sapiens
  misc_RNA (1)...(19): siRNA sense strand
ucagaaguaugccauguga

SEQ ID NO: 1688111 - RNA, 19 nt, Homo sapiens
  misc_RNA (1)...(19): siRNA sense strand
aaacagacagagauaagua

SEQ ID NO: 1688112 - RNA, 19 nt, Homo sapiens
  misc_RNA (1)...(19): siRNA sense strand
cagaauaucucgggaaugg

SEQ ID NO: 1688113 - RNA, 19 nt, Homo sapiens
  misc_RNA (1)...(19): siRNA sense strand
gcauuugucucgauauucu

SEQ ID NO: 1688114 - RNA, 19 nt, Homo sapiens
  misc_RNA (1)...(19): siRNA sense strand
cagcauuugucucgauauu

SEQ ID NO: 1688115 - RNA, 19 nt, Homo sapiens
  misc_RNA (1)...(19): siRNA sense strand
ccacaauuaugggaccuaa

SEQ ID NO: 1688116 - RNA, 19 nt, Homo sapiens
  misc_RNA (1)...(19): siRNA sense strand
ggcagcauuugucucgaua

SEQ ID NO: 1688117 - RNA, 19 nt, Homo sapiens
  misc_RNA (1)...(19): siRNA sense strand
ucacaguggucgccugcuu

SEQ ID NO: 1688118 - RNA, 19 nt, Homo sapiens
  misc_RNA (1)...(19): siRNA sense strand
ucgccugcuuuaacaauuu

SEQ ID NO: 1688119 - RNA, 19 nt, Homo sapiens
  misc_RNA (1)...(19): siRNA sense strand
cuaaugacagcccauauca

SEQ ID NO: 1688120 - RNA, 19 nt, Homo sapiens
  misc_RNA (1)...(19): siRNA sense strand
acaguggucgccugcuuua

SEQ ID NO: 1688121 - RNA, 19 nt, Homo sapiens
  misc_RNA (1)...(19): siRNA sense strand
gauauucuaagaucacagu

SEQ ID NO: 1688122 - RNA, 19 nt, Homo sapiens
  misc_RNA (1)...(19): siRNA sense strand
gaccuaaugacagcccaua

SEQ ID NO: 1688123 - RNA, 19 nt, Homo sapiens
  misc_RNA (1)...(19): siRNA sense strand
guggucgccugcuuuaaca

SEQ ID NO: 1688124 - RNA, 19 nt, Homo sapiens
  misc_RNA (1)...(19): siRNA sense strand
aacagaauaucucgggaau

SEQ ID NO: 1688125 - RNA, 19 nt, Homo sapiens
  misc_RNA (1)...(19): siRNA sense strand
gaauggacucagaaguaug

SEQ ID NO: 1688126 - RNA, 19 nt, Homo sapiens
  misc_RNA (1)...(19): siRNA sense strand
ucucgggaauggacucaga

SEQ ID NO: 1688127 - RNA, 19 nt, Homo sapiens
  misc_RNA (1)...(19): siRNA sense strand
aaugacagcccauaucaag

SEQ ID NO: 1688128 - RNA, 19 nt, Homo sapiens
  misc_RNA (1)...(19): siRNA sense strand
ccuaaugacagcccauauc

SEQ ID NO: 1688129 - RNA, 19 nt, Homo sapiens
  misc_RNA (1)...(19): siRNA sense strand
gucgccugcuuuaacaauu

SEQ ID NO: 1688130 - RNA, 19 nt, Homo sapiens
  misc_RNA (1)...(19): siRNA sense strand
uggcagcauuugucucgau

SEQ ID NO: 1688131 - RNA, 19 nt, Homo sapiens
  misc_RNA (1)...(19): siRNA sense strand
ggucgccugcuuuaacaau

SEQ ID NO: 1688132 - RNA, 19 nt, Homo sapiens
  misc_RNA (1)...(19): siRNA sense strand
ggaauggacucagaaguau

SEQ ID NO: 1688133 - RNA, 19 nt, Homo sapiens
  misc_RNA (1)...(19): siRNA sense strand
gggaauggacucagaagua

SEQ ID NO: 1688134 - RNA, 19 nt, Homo sapiens
  misc_RNA (1)...(19): siRNA sense strand
ucagaaguaugccauguga

SEQ ID NO: 1688135 - RNA, 19 nt, Homo sapiens
  misc_RNA (1)...(19): siRNA sense strand
aaacagacagagauaagua

SEQ ID NO: 1688136 - RNA, 19 nt, Homo sapiens
  misc_RNA (1)...(19): siRNA sense strand
cagaauaucucgggaaugg

SEQ ID NO: 1688137 - RNA, 19 nt, Homo sapiens
  misc_RNA (1)...(19): siRNA sense strand
gcauuugucucgauauucu

SEQ ID NO: 1688138 - RNA, 19 nt, Homo sapiens
  misc_RNA (1)...(19): siRNA sense strand
cagcauuugucucgauauu

SEQ ID NO: 1688139 - RNA, 19 nt, Homo sapiens
  misc_RNA (1)...(19): siRNA sense strand
ccacaauuaugggaccuaa

SEQ ID NO: 1688140 - RNA, 19 nt, Homo sapiens
  misc_RNA (1)...(19): siRNA sense strand
ggcagcauuugucucgaua

SEQ ID NO: 1688141 - RNA, 19 nt, Homo sapiens
  misc_RNA (1)...(19): siRNA sense strand
ucacaguggucgccugcuu

SEQ ID NO: 1688142 - RNA, 19 nt, Homo sapiens
  misc_RNA (1)...(19): siRNA sense strand
ucgccugcuuuaacaauuu

SEQ ID NO: 1688143 - RNA, 19 nt, Homo sapiens
  misc_RNA (1)...(19): siRNA sense strand
cuaaugacagcccauauca

SEQ ID NO: 1688144 - RNA, 19 nt, Homo sapiens
  misc_RNA (1)...(19): siRNA sense strand
acaguggucgccugcuuua

SEQ ID NO: 1688145 - RNA, 19 nt, Homo sapiens
  misc_RNA (1)...(19): siRNA sense strand
gauauucuaagaucacagu

SEQ ID NO: 1688146 - RNA, 19 nt, Homo sapiens
  misc_RNA (1)...(19): siRNA sense strand
gaccuaaugacagcccaua

SEQ ID NO: 1688147 - RNA, 19 nt, Homo sapiens
  misc_RNA (1)...(19): siRNA sense strand
guggucgccugcuuuaaca

SEQ ID NO: 1688148 - RNA, 19 nt, Homo sapiens
  misc_RNA (1)...(19): siRNA sense strand
aacagaauaucucgggaau

SEQ ID NO: 1688149 - RNA, 19 nt, Homo sapiens
  misc_RNA (1)...(19): siRNA sense strand
gaauggacucagaaguaug

SEQ ID NO: 1688150 - RNA, 19 nt, Homo sapiens
  misc_RNA (1)...(19): siRNA sense strand
ucucgggaauggacucaga

SEQ ID NO: 1688151 - RNA, 19 nt, Homo sapiens
  misc_RNA (1)...(19): siRNA sense strand
aaugacagcccauaucaag

SEQ ID NO: 1688152 - RNA, 19 nt, Homo sapiens
  misc_RNA (1)...(19): siRNA sense strand
ccuaaugacagcccauauc

SEQ ID NO: 1688153 - RNA, 19 nt, Homo sapiens
  misc_RNA (1)...(19): siRNA sense strand
gucgccugcuuuaacaauu

SEQ ID NO: 1688154 - RNA, 19 nt, Homo sapiens
  misc_RNA (1)...(19): siRNA sense strand
uggcagcauuugucucgau

SEQ ID NO: 1688155 - RNA, 19 nt, Homo sapiens
  misc_RNA (1)...(19): siRNA sense strand
ggucgccugcuuuaacaau

SEQ ID NO: 1688156 - RNA, 19 nt, Homo sapiens
  misc_RNA (1)...(19): siRNA sense strand
ggaauggacucagaaguau

SEQ ID NO: 1688157 - RNA, 19 nt, Homo sapiens
  misc_RNA (1)...(19): siRNA sense strand
gggaauggacucagaagua

SEQ ID NO: 1688158 - RNA, 19 nt, Homo sapiens
  misc_RNA (1)...(19): siRNA sense strand
ucagaaguaugccauguga

SEQ ID NO: 1688159 - RNA, 19 nt, Homo sapiens
  misc_RNA (1)...(19): siRNA sense strand
aaacagacagagauaagua

SEQ ID NO: 1688160 - RNA, 19 nt, Homo sapiens
  misc_RNA (1)...(19): siRNA sense strand
cagaauaucucgggaaugg

SEQ ID NO: 1688161 - RNA, 19 nt, Homo sapiens
  misc_RNA (1)...(19): siRNA sense strand
gcauuugucucgauauucu

SEQ ID NO: 1688162 - RNA, 19 nt, Homo sapiens
  misc_RNA (1)...(19): siRNA sense strand
cagcauuugucucgauauu

SEQ ID NO: 1688163 - RNA, 19 nt, Homo sapiens
  misc_RNA (1)...(19): siRNA sense strand
ccacaauuaugggaccuaa

SEQ ID NO: 1688164 - RNA, 19 nt, Homo sapiens
  misc_RNA (1)...(19): siRNA sense strand
ggcagcauuugucucgaua

SEQ ID NO: 1688165 - RNA, 19 nt, Homo sapiens
  misc_RNA (1)...(19): siRNA sense strand
ucacaguggucgccugcuu

SEQ ID NO: 1688166 - RNA, 19 nt, Homo sapiens
  misc_RNA (1)...(19): siRNA sense strand
ucgccugcuuuaacaauuu

SEQ ID NO: 1688167 - RNA, 19 nt, Homo sapiens
  misc_RNA (1)...(19): siRNA sense strand
cuaaugacagcccauauca

SEQ ID NO: 1688168 - RNA, 19 nt, Homo sapiens
  misc_RNA (1)...(19): siRNA sense strand
acaguggucgccugcuuua

SEQ ID NO: 1688169 - RNA, 19 nt, Homo sapiens
  misc_RNA (1)...(19): siRNA sense strand
gauauucuaagaucacagu

SEQ ID NO: 1688170 - RNA, 19 nt, Homo sapiens
  misc_RNA (1)...(19): siRNA sense strand
gaccuaaugacagcccaua

SEQ ID NO: 1688171 - RNA, 19 nt, Homo sapiens
  misc_RNA (1)...(19): siRNA sense strand
guggucgccugcuuuaaca

SEQ ID NO: 1688172 - RNA, 19 nt, Homo sapiens
  misc_RNA (1)...(19): siRNA sense strand
aacagaauaucucgggaau

SEQ ID NO: 1688173 - RNA, 19 nt, Homo sapiens
  misc_RNA (1)...(19): siRNA sense strand
gaauggacucagaaguaug

SEQ ID NO: 1688174 - RNA, 19 nt, Homo sapiens
  misc_RNA (1)...(19): siRNA sense strand
ucucgggaauggacucaga

SEQ ID NO: 1688175 - RNA, 19 nt, Homo sapiens
  misc_RNA (1)...(19): siRNA sense strand
aaugacagcccauaucaag

SEQ ID NO: 1688176 - RNA, 19 nt, Homo sapiens
  misc_RNA (1)...(19): siRNA sense strand
ccuaaugacagcccauauc

SEQ ID NO: 1688177 - RNA, 19 nt, Homo sapiens
  misc_RNA (1)...(19): siRNA sense strand
gucgccugcuuuaacaauu

SEQ ID NO: 1688178 - RNA, 19 nt, Homo sapiens
  misc_RNA (1)...(19): siRNA sense strand
uggcagcauuugucucgau

SEQ ID NO: 1688179 - RNA, 19 nt, Homo sapiens
  misc_RNA (1)...(19): siRNA sense strand
ggucgccugcuuuaacaau

SEQ ID NO: 1688180 - RNA, 19 nt, Homo sapiens
  misc_RNA (1)...(19): siRNA sense strand
ggaauggacucagaaguau

SEQ ID NO: 1688181 - RNA, 19 nt, Homo sapiens
  misc_RNA (1)...(19): siRNA sense strand
gggaauggacucagaagua

SEQ ID NO: 1688182 - RNA, 19 nt, Homo sapiens
  misc_RNA (1)...(19): siRNA sense strand
ucagaaguaugccauguga

SEQ ID NO: 1688183 - RNA, 19 nt, Homo sapiens
  misc_RNA (1)...(19): siRNA sense strand
aaacagacagagauaagua

SEQ ID NO: 1688184 - RNA, 19 nt, Homo sapiens
  misc_RNA (1)...(19): siRNA sense strand
cagaauaucucgggaaugg

SEQ ID NO: 1688185 - RNA, 19 nt, Homo sapiens
  misc_RNA (1)...(19): siRNA sense strand
gcauuugucucgauauucu

SEQ ID NO: 1688186 - RNA, 19 nt, Homo sapiens
  misc_RNA (1)...(19): siRNA sense strand
cagcauuugucucgauauu

SEQ ID NO: 1688187 - RNA, 19 nt, Homo sapiens
  misc_RNA (1)...(19): siRNA sense strand
ccacaauuaugggaccuaa

SEQ ID NO: 1688188 - RNA, 19 nt, Homo sapiens
  misc_RNA (1)...(19): siRNA sense strand
ggcagcauuugucucgaua

SEQ ID NO: 1688189 - RNA, 19 nt, Homo sapiens
  misc_RNA (1)...(19): siRNA sense strand
ucacaguggucgccugcuu

SEQ ID NO: 1688190 - RNA, 19 nt, Homo sapiens
  misc_RNA (1)...(19): siRNA sense strand
ucgccugcuuuaacaauuu

SEQ ID NO: 1688191 - RNA, 19 nt, Homo sapiens
  misc_RNA (1)...(19): siRNA sense strand
cuaaugacagcccauauca

SEQ ID NO: 1688192 - RNA, 19 nt, Homo sapiens
  misc_RNA (1)...(19): siRNA sense strand
acaguggucgccugcuuua

SEQ ID NO: 1688193 - RNA, 19 nt, Homo sapiens
  misc_RNA (1)...(19): siRNA sense strand
gauauucuaagaucacagu

SEQ ID NO: 1688194 - RNA, 19 nt, Homo sapiens
  misc_RNA (1)...(19): siRNA sense strand
gaccuaaugacagcccaua

SEQ ID NO: 1688195 - RNA, 19 nt, Homo sapiens
  misc_RNA (1)...(19): siRNA sense strand
guggucgccugcuuuaaca

SEQ ID NO: 1688196 - RNA, 19 nt, Homo sapiens
  misc_RNA (1)...(19): siRNA sense strand
aacagaauaucucgggaau

SEQ ID NO: 1688197 - RNA, 19 nt, Homo sapiens
  misc_RNA (1)...(19): siRNA sense strand
gaauggacucagaaguaug

SEQ ID NO: 1688198 - RNA, 19 nt, Homo sapiens
  misc_RNA (1)...(19): siRNA sense strand
ucucgggaauggacucaga

SEQ ID NO: 1688199 - RNA, 19 nt, Homo sapiens
  misc_RNA (1)...(19): siRNA sense strand
aaugacagcccauaucaag

SEQ ID NO: 1688200 - RNA, 19 nt, Homo sapiens
  misc_RNA (1)...(19): siRNA sense strand
ccuaaugacagcccauauc

SEQ ID NO: 1688201 - RNA, 19 nt, Homo sapiens
  misc_RNA (1)...(19): siRNA sense strand
gucgccugcuuuaacaauu

SEQ ID NO: 1688202 - RNA, 19 nt, Homo sapiens
  misc_RNA (1)...(19): siRNA sense strand
uggcagcauuugucucgau

SEQ ID NO: 1688203 - RNA, 19 nt, Homo sapiens
  misc_RNA (1)...(19): siRNA sense strand
ggucgccugcuuuaacaau

SEQ ID NO: 1688204 - RNA, 19 nt, Homo sapiens
  misc_RNA (1)...(19): siRNA sense strand
ggaauggacucagaaguau

SEQ ID NO: 1688205 - RNA, 19 nt, Homo sapiens
  misc_RNA (1)...(19): siRNA sense strand
gggaauggacucagaagua

SEQ ID NO: 1688206 - RNA, 19 nt, Homo sapiens
  misc_RNA (1)...(19): siRNA sense strand
ucagaaguaugccauguga

SEQ ID NO: 1688207 - RNA, 19 nt, Homo sapiens
  misc_RNA (1)...(19): siRNA sense strand
aaacagacagagauaagua

SEQ ID NO: 1688208 - RNA, 19 nt, Homo sapiens
  misc_RNA (1)...(19): siRNA sense strand
cagaauaucucgggaaugg

SEQ ID NO: 1688209 - RNA, 19 nt, Homo sapiens
  misc_RNA (1)...(19): siRNA sense strand
gcauuugucucgauauucu

SEQ ID NO: 1688210 - RNA, 19 nt, Homo sapiens
  misc_RNA (1)...(19): siRNA sense strand
cagcauuugucucgauauu

SEQ ID NO: 1688211 - RNA, 19 nt, Homo sapiens
  misc_RNA (1)...(19): siRNA sense strand
ccacaauuaugggaccuaa

SEQ ID NO: 1688212 - RNA, 19 nt, Homo sapiens
  misc_RNA (1)...(19): siRNA sense strand
ggcagcauuugucucgaua

SEQ ID NO: 1688213 - RNA, 19 nt, Homo sapiens
  misc_RNA (1)...(19): siRNA sense strand
ucacaguggucgccugcuu

SEQ ID NO: 1688214 - RNA, 19 nt, Homo sapiens
  misc_RNA (1)...(19): siRNA sense strand
ucgccugcuuuaacaauuu

SEQ ID NO: 1688215 - RNA, 19 nt, Homo sapiens
  misc_RNA (1)...(19): siRNA sense strand
cuaaugacagcccauauca

SEQ ID NO: 1688216 - RNA, 19 nt, Homo sapiens
  misc_RNA (1)...(19): siRNA sense strand
acaguggucgccugcuuua

SEQ ID NO: 1688217 - RNA, 19 nt, Homo sapiens
  misc_RNA (1)...(19): siRNA sense strand
gauauucuaagaucacagu

SEQ ID NO: 1688218 - RNA, 19 nt, Homo sapiens
  misc_RNA (1)...(19): siRNA sense strand
gaccuaaugacagcccaua

SEQ ID NO: 1688219 - RNA, 19 nt, Homo sapiens
  misc_RNA (1)...(19): siRNA sense strand
guggucgccugcuuuaaca

SEQ ID NO: 1688220 - RNA, 19 nt, Homo sapiens
  misc_RNA (1)...(19): siRNA sense strand
aacagaauaucucgggaau

SEQ ID NO: 1688221 - RNA, 19 nt, Homo sapiens
  misc_RNA (1)...(19): siRNA sense strand
gaauggacucagaaguaug

SEQ ID NO: 1688222 - RNA, 19 nt, Homo sapiens
  misc_RNA (1)...(19): siRNA sense strand
ucucgggaauggacucaga

SEQ ID NO: 1688223 - RNA, 19 nt, Homo sapiens
  misc_RNA (1)...(19): siRNA sense strand
aaugacagcccauaucaag

SEQ ID NO: 1688224 - RNA, 19 nt, Homo sapiens
  misc_RNA (1)...(19): siRNA sense strand
ccuaaugacagcccauauc

SEQ ID NO: 1688225 - RNA, 19 nt, Homo sapiens
  misc_RNA (1)...(19): siRNA sense strand
gucgccugcuuuaacaauu

SEQ ID NO: 1688226 - RNA, 19 nt, Homo sapiens
  misc_RNA (1)...(19): siRNA sense strand
uggcagcauuugucucgau

SEQ ID NO: 1688227 - RNA, 19 nt, Homo sapiens
  misc_RNA (1)...(19): siRNA sense strand
ggucgccugcuuuaacaau

SEQ ID NO: 1688228 - RNA, 19 nt, Homo sapiens
  misc_RNA (1)...(19): siRNA sense strand
aaacagacagagauaagua

SEQ ID NO: 1688229 - RNA, 19 nt, Homo sapiens
  misc_RNA (1)...(19): siRNA sense strand
gcauuugucucgauauucu

SEQ ID NO: 1688230 - RNA, 19 nt, Homo sapiens
  misc_RNA (1)...(19): siRNA sense strand
cagcauuugucucgauauu

SEQ ID NO: 1688231 - RNA, 19 nt, Homo sapiens
  misc_RNA (1)...(19): siRNA sense strand
ccacaauuaugggaccuaa

SEQ ID NO: 1688232 - RNA, 19 nt, Homo sapiens
  misc_RNA (1)...(19): siRNA sense strand
ggcagcauuugucucgaua

SEQ ID NO: 1688233 - RNA, 19 nt, Homo sapiens
  misc_RNA (1)...(19): siRNA sense strand
ucacaguggucgccugcuu

SEQ ID NO: 1688234 - RNA, 19 nt, Homo sapiens
  misc_RNA (1)...(19): siRNA sense strand
gcacggaucuauaaaacag

SEQ ID NO: 1688235 - RNA, 19 nt, Homo sapiens
  misc_RNA (1)...(19): siRNA sense strand
ucgccugcuuuaacaauuu

SEQ ID NO: 1688236 - RNA, 19 nt, Homo sapiens
  misc_RNA (1)...(19): siRNA sense strand
cuaaugacagcccauauca

SEQ ID NO: 1688237 - RNA, 19 nt, Homo sapiens
  misc_RNA (1)...(19): siRNA sense strand
acaguggucgccugcuuua

SEQ ID NO: 1688238 - RNA, 19 nt, Homo sapiens
  misc_RNA (1)...(19): siRNA sense strand
gauauucuaagaucacagu

SEQ ID NO: 1688239 - RNA, 19 nt, Homo sapiens
  misc_RNA (1)...(19): siRNA sense strand
gaccuaaugacagcccaua

SEQ ID NO: 1688240 - RNA, 19 nt, Homo sapiens
  misc_RNA (1)...(19): siRNA sense strand
guggucgccugcuuuaaca

SEQ ID NO: 1688241 - RNA, 19 nt, Homo sapiens
  misc_RNA (1)...(19): siRNA sense strand
aaugacagcccauaucaag

SEQ ID NO: 1688242 - RNA, 19 nt, Homo sapiens
  misc_RNA (1)...(19): siRNA sense strand
ccuaaugacagcccauauc

SEQ ID NO: 1688243 - RNA, 19 nt, Homo sapiens
  misc_RNA (1)...(19): siRNA sense strand
gucgccugcuuuaacaauu

SEQ ID NO: 1688244 - RNA, 19 nt, Homo sapiens
  misc_RNA (1)...(19): siRNA sense strand
uggcagcauuugucucgau

SEQ ID NO: 1688245 - RNA, 19 nt, Homo sapiens
  misc_RNA (1)...(19): siRNA sense strand
ggucgccugcuuuaacaau

SEQ ID NO: 1688246 - RNA, 19 nt, Homo sapiens
  misc_RNA (1)...(19): siRNA sense strand
ggaauggacucagaaguau

SEQ ID NO: 1688247 - RNA, 19 nt, Homo sapiens
  misc_RNA (1)...(19): siRNA sense strand
gggaauggacucagaagua

SEQ ID NO: 1688248 - RNA, 19 nt, Homo sapiens
  misc_RNA (1)...(19): siRNA sense strand
ucagaaguaugccauguga

SEQ ID NO: 1688249 - RNA, 19 nt, Homo sapiens
  misc_RNA (1)...(19): siRNA sense strand
aaacagacagagauaagua

SEQ ID NO: 1688250 - RNA, 19 nt, Homo sapiens
  misc_RNA (1)...(19): siRNA sense strand
cagaauaucucgggaaugg

SEQ ID NO: 1688251 - RNA, 19 nt, Homo sapiens
  misc_RNA (1)...(19): siRNA sense strand
gcauuugucucgauauucu

SEQ ID NO: 1688252 - RNA, 19 nt, Homo sapiens
  misc_RNA (1)...(19): siRNA sense strand
cagcauuugucucgauauu

SEQ ID NO: 1688253 - RNA, 19 nt, Homo sapiens
  misc_RNA (1)...(19): siRNA sense strand
ccacaauuaugggaccuaa

SEQ ID NO: 1688254 - RNA, 19 nt, Homo sapiens
  misc_RNA (1)...(19): siRNA sense strand
ggcagcauuugucucgaua

SEQ ID NO: 1688255 - RNA, 19 nt, Homo sapiens
  misc_RNA (1)...(19): siRNA sense strand
ucacaguggucgccugcuu

SEQ ID NO: 1688256 - RNA, 19 nt, Homo sapiens
  misc_RNA (1)...(19): siRNA sense strand
ucgccugcuuuaacaauuu

SEQ ID NO: 1688257 - RNA, 19 nt, Homo sapiens
  misc_RNA (1)...(19): siRNA sense strand
cuaaugacagcccauauca

SEQ ID NO: 1688258 - RNA, 19 nt, Homo sapiens
  misc_RNA (1)...(19): siRNA sense strand
acaguggucgccugcuuua

SEQ ID NO: 1688259 - RNA, 19 nt, Homo sapiens
  misc_RNA (1)...(19): siRNA sense strand
gauauucuaagaucacagu

SEQ ID NO: 1688260 - RNA, 19 nt, Homo sapiens
  misc_RNA (1)...(19): siRNA sense strand
gaccuaaugacagcccaua

SEQ ID NO: 1688261 - RNA, 19 nt, Homo sapiens
  misc_RNA (1)...(19): siRNA sense strand
guggucgccugcuuuaaca

SEQ ID NO: 1688262 - RNA, 19 nt, Homo sapiens
  misc_RNA (1)...(19): siRNA sense strand
aacagaauaucucgggaau

SEQ ID NO: 1688263 - RNA, 19 nt, Homo sapiens
  misc_RNA (1)...(19): siRNA sense strand
gaauggacucagaaguaug

SEQ ID NO: 1688264 - RNA, 19 nt, Homo sapiens
  misc_RNA (1)...(19): siRNA sense strand
ucucgggaauggacucaga

SEQ ID NO: 1688265 - RNA, 19 nt, Homo sapiens
  misc_RNA (1)...(19): siRNA sense strand
aaugacagcccauaucaag

SEQ ID NO: 1688266 - RNA, 19 nt, Homo sapiens
  misc_RNA (1)...(19): siRNA sense strand
ccuaaugacagcccauauc

SEQ ID NO: 1688267 - RNA, 19 nt, Homo sapiens
  misc_RNA (1)...(19): siRNA sense strand
gucgccugcuuuaacaauu

SEQ ID NO: 1688268 - RNA, 19 nt, Homo sapiens
  misc_RNA (1)...(19): siRNA sense strand
uggcagcauuugucucgau

SEQ ID NO: 1688269 - RNA, 19 nt, Homo sapiens
  misc_RNA (1)...(19): siRNA sense strand
ggucgccugcuuuaacaau

SEQ ID NO: 1688270 - RNA, 19 nt, Homo sapiens
  misc_RNA (1)...(19): siRNA sense strand
gcaagcaguuccaguuaua

SEQ ID NO: 1688271 - RNA, 19 nt, Homo sapiens
  misc_RNA (1)...(19): siRNA sense strand
ucaagaccaucaucacuuu

SEQ ID NO: 1688272 - RNA, 19 nt, Homo sapiens
  misc_RNA (1)...(19): siRNA sense strand
gcuacuaccugguggucua

SEQ ID NO: 1688273 - RNA, 19 nt, Homo sapiens
  misc_RNA (1)...(19): siRNA sense strand
caucaucacuuucauuguc

SEQ ID NO: 1688274 - RNA, 19 nt, Homo sapiens
  misc_RNA (1)...(19): siRNA sense strand
gauugcaucuucucugucu

SEQ ID NO: 1688275 - RNA, 19 nt, Homo sapiens
  misc_RNA (1)...(19): siRNA sense strand
ucauggagcucuucuacag

SEQ ID NO: 1688276 - RNA, 19 nt, Homo sapiens
  misc_RNA (1)...(19): siRNA sense strand
gcgacgguguucagaaugu

SEQ ID NO: 1688277 - RNA, 19 nt, Homo sapiens
  misc_RNA (1)...(19): siRNA sense strand
gcccugaggcugcagauga

SEQ ID NO: 1688278 - RNA, 19 nt, Homo sapiens
  misc_RNA (1)...(19): siRNA sense strand
ccgcaagcaguuccaguua

SEQ ID NO: 1688279 - RNA, 19 nt, Homo sapiens
  misc_RNA (1)...(19): siRNA sense strand
aagcgacgguguucagaau

SEQ ID NO: 1688280 - RNA, 19 nt, Homo sapiens
  misc_RNA (1)...(19): siRNA sense strand
caagcuggguuugcagugu

SEQ ID NO: 1688281 - RNA, 19 nt, Homo sapiens
  misc_RNA (1)...(19): siRNA sense strand
caucgccaccuuucagauu

SEQ ID NO: 1688282 - RNA, 19 nt, Homo sapiens
  misc_RNA (1)...(19): siRNA sense strand
gaccaucaucacuuucauu

SEQ ID NO: 1688283 - RNA, 19 nt, Homo sapiens
  misc_RNA (1)...(19): siRNA sense strand
agagacagagcgacccaua

SEQ ID NO: 1688284 - RNA, 19 nt, Homo sapiens
  misc_RNA (1)...(19): siRNA sense strand
cgcaagcaguuccaguuau

SEQ ID NO: 1688285 - RNA, 19 nt, Homo sapiens
  misc_RNA (1)...(19): siRNA sense strand
ucuccacgcucaacuacau

SEQ ID NO: 1688286 - RNA, 19 nt, Homo sapiens
  misc_RNA (1)...(19): siRNA sense strand
gagcuggagcgcaugaauc

SEQ ID NO: 1688287 - RNA, 19 nt, Homo sapiens
  misc_RNA (1)...(19): siRNA sense strand
gguuugcagugucuuccaa

SEQ ID NO: 1688288 - RNA, 19 nt, Homo sapiens
  misc_RNA (1)...(19): siRNA sense strand
ccaguuauacuccguguac

SEQ ID NO: 1688289 - RNA, 19 nt, Homo sapiens
  misc_RNA (1)...(19): siRNA sense strand
gucaagaccaucaucacuu

SEQ ID NO: 1688290 - RNA, 19 nt, Homo sapiens
  misc_RNA (1)...(19): siRNA sense strand
gaauuccugagcccaguga

SEQ ID NO: 1688291 - RNA, 19 nt, Homo sapiens
  misc_RNA (1)...(19): siRNA sense strand
caagcgacgguguucagaa

SEQ ID NO: 1688292 - RNA, 19 nt, Homo sapiens
  misc_RNA (1)...(19): siRNA sense strand
ccuccuacaucuucucucu

SEQ ID NO: 1688293 - RNA, 19 nt, Homo sapiens
  misc_RNA (1)...(19): siRNA sense strand
ggagcuggagcgcaugaau

SEQ ID NO: 1688294 - RNA, 19 nt, Homo sapiens
  misc_RNA (1)...(19): siRNA sense strand
aagcgcagccucuucuuca

SEQ ID NO: 1688295 - RNA, 19 nt, Homo sapiens
  misc_RNA (1)...(19): siRNA sense strand
gauccuguccaucaucuac

SEQ ID NO: 1688296 - RNA, 19 nt, Homo sapiens
  misc_RNA (1)...(19): siRNA sense strand
guuauacuccguguacuuc

SEQ ID NO: 1688297 - RNA, 19 nt, Homo sapiens
  misc_RNA (1)...(19): siRNA sense strand
guccaucaucuacuucuug

SEQ ID NO: 1688298 - RNA, 19 nt, Homo sapiens
  misc_RNA (1)...(19): siRNA sense strand
caagcgcagccucuucuuc

SEQ ID NO: 1688299 - RNA, 19 nt, Homo sapiens
  misc_RNA (1)...(19): siRNA sense strand
uugcaucuucucugucuaa

SEQ ID NO: 1688300 - RNA, 19 nt, Homo sapiens
  misc_RNA (1)...(19): siRNA sense strand
cgacgguguucagaaugug

SEQ ID NO: 1688301 - RNA, 19 nt, Homo sapiens
  misc_RNA (1)...(19): siRNA sense strand
gccuauuccuccuacaucu

SEQ ID NO: 1688302 - RNA, 19 nt, Homo sapiens
  misc_RNA (1)...(19): siRNA sense strand
gcaagcaguuccaguuaua

SEQ ID NO: 1688303 - RNA, 19 nt, Homo sapiens
  misc_RNA (1)...(19): siRNA sense strand
ucaagaccaucaucacuuu

SEQ ID NO: 1688304 - RNA, 19 nt, Homo sapiens
  misc_RNA (1)...(19): siRNA sense strand
gcuacuaccugguggucua

SEQ ID NO: 1688305 - RNA, 19 nt, Homo sapiens
  misc_RNA (1)...(19): siRNA sense strand
caucaucacuuucauuguc

SEQ ID NO: 1688306 - RNA, 19 nt, Homo sapiens
  misc_RNA (1)...(19): siRNA sense strand
ucacgccggugcugucgua

SEQ ID NO: 1688307 - RNA, 19 nt, Homo sapiens
  misc_RNA (1)...(19): siRNA sense strand
gauugcaucuucucugucu

SEQ ID NO: 1688308 - RNA, 19 nt, Homo sapiens
  misc_RNA (1)...(19): siRNA sense strand
ucauggagcucuucuacag

SEQ ID NO: 1688309 - RNA, 19 nt, Homo sapiens
  misc_RNA (1)...(19): siRNA sense strand
gcgacgguguucagaaugu

SEQ ID NO: 1688310 - RNA, 19 nt, Homo sapiens
  misc_RNA (1)...(19): siRNA sense strand
gcccugaggcugcagauga

SEQ ID NO: 1688311 - RNA, 19 nt, Homo sapiens
  misc_RNA (1)...(19): siRNA sense strand
ccgcaagcaguuccaguua

SEQ ID NO: 1688312 - RNA, 19 nt, Homo sapiens
  misc_RNA (1)...(19): siRNA sense strand
aagcgacgguguucagaau

SEQ ID NO: 1688313 - RNA, 19 nt, Homo sapiens
  misc_RNA (1)...(19): siRNA sense strand
caagcuggguuugcagugu

SEQ ID NO: 1688314 - RNA, 19 nt, Homo sapiens
  misc_RNA (1)...(19): siRNA sense strand
caucgccaccuuucagauu

SEQ ID NO: 1688315 - RNA, 19 nt, Homo sapiens
  misc_RNA (1)...(19): siRNA sense strand
gaccaucaucacuuucauu

SEQ ID NO: 1688316 - RNA, 19 nt, Homo sapiens
  misc_RNA (1)...(19): siRNA sense strand
agagacagagcgacccaua

SEQ ID NO: 1688317 - RNA, 19 nt, Homo sapiens
  misc_RNA (1)...(19): siRNA sense strand
cgcaagcaguuccaguuau

SEQ ID NO: 1688318 - RNA, 19 nt, Homo sapiens
  misc_RNA (1)...(19): siRNA sense strand
ucuccacgcucaacuacau

SEQ ID NO: 1688319 - RNA, 19 nt, Homo sapiens
  misc_RNA (1)...(19): siRNA sense strand
gagcuggagcgcaugaauc

SEQ ID NO: 1688320 - RNA, 19 nt, Homo sapiens
  misc_RNA (1)...(19): siRNA sense strand
gguuugcagugucuuccaa

SEQ ID NO: 1688321 - RNA, 19 nt, Homo sapiens
  misc_RNA (1)...(19): siRNA sense strand
ccaguuauacuccguguac

SEQ ID NO: 1688322 - RNA, 19 nt, Homo sapiens
  misc_RNA (1)...(19): siRNA sense strand
gucaagaccaucaucacuu

SEQ ID NO: 1688323 - RNA, 19 nt, Homo sapiens
  misc_RNA (1)...(19): siRNA sense strand
gaauuccugagcccaguga

SEQ ID NO: 1688324 - RNA, 19 nt, Homo sapiens
  misc_RNA (1)...(19): siRNA sense strand
caagcgacgguguucagaa

SEQ ID NO: 1688325 - RNA, 19 nt, Homo sapiens
  misc_RNA (1)...(19): siRNA sense strand
ccuccuacaucuucucucu

SEQ ID NO: 1688326 - RNA, 19 nt, Homo sapiens
  misc_RNA (1)...(19): siRNA sense strand
gaagcaggugcccguggaa

SEQ ID NO: 1688327 - RNA, 19 nt, Homo sapiens
  misc_RNA (1)...(19): siRNA sense strand
ugugcuaccuuugcuucua

SEQ ID NO: 1688328 - RNA, 19 nt, Homo sapiens
  misc_RNA (1)...(19): siRNA sense strand
ggagcuggagcgcaugaau

SEQ ID NO: 1688329 - RNA, 19 nt, Homo sapiens
  misc_RNA (1)...(19): siRNA sense strand
gugcuaccuuugcuucuac

SEQ ID NO: 1688330 - RNA, 19 nt, Homo sapiens
  misc_RNA (1)...(19): siRNA sense strand
gauccuguccaucaucuac

SEQ ID NO: 1688331 - RNA, 19 nt, Homo sapiens
  misc_RNA (1)...(19): siRNA sense strand
guuauacuccguguacuuc

SEQ ID NO: 1688332 - RNA, 19 nt, Homo sapiens
  misc_RNA (1)...(19): siRNA sense strand
aagcgcagccucuucuuca

SEQ ID NO: 1688333 - RNA, 19 nt, Homo sapiens
  misc_RNA (1)...(19): siRNA sense strand
guccaucaucuacuucuug

SEQ ID NO: 1688334 - RNA, 19 nt, Homo sapiens
  misc_RNA (1)...(19): siRNA sense strand
caagcgcagccucuucuuc

SEQ ID NO: 1688335 - RNA, 19 nt, Homo sapiens
  misc_RNA (1)...(19): siRNA sense strand
gccuauuccuccuacaucu

SEQ ID NO: 1688336 - RNA, 19 nt, Homo sapiens
  misc_RNA (1)...(19): siRNA sense strand
cgacgguguucagaaugug

SEQ ID NO: 1688337 - RNA, 19 nt, Homo sapiens
  misc_RNA (1)...(19): siRNA sense strand
uugcaucuucucugucuaa

SEQ ID NO: 1688338 - RNA, 19 nt, Homo sapiens
  misc_RNA (1)...(19): siRNA sense strand
caacauagacuacagauua

SEQ ID NO: 1688339 - RNA, 19 nt, Homo sapiens
  misc_RNA (1)...(19): siRNA sense strand
gcuaaagucuggccaaaua

SEQ ID NO: 1688340 - RNA, 19 nt, Homo sapiens
  misc_RNA (1)...(19): siRNA sense strand
ggucuuuacuucauacuua

SEQ ID NO: 1688341 - RNA, 19 nt, Homo sapiens
  misc_RNA (1)...(19): siRNA sense strand
ccaaggaugucguugauuu

SEQ ID NO: 1688342 - RNA, 19 nt, Homo sapiens
  misc_RNA (1)...(19): siRNA sense strand
ugacagaucuccuuacaga

SEQ ID NO: 1688343 - RNA, 19 nt, Homo sapiens
  misc_RNA (1)...(19): siRNA sense strand
gaaugccgcugaugauaaa

SEQ ID NO: 1688344 - RNA, 19 nt, Homo sapiens
  misc_RNA (1)...(19): siRNA sense strand
ugaauagccuccacagaua

SEQ ID NO: 1688345 - RNA, 19 nt, Homo sapiens
  misc_RNA (1)...(19): siRNA sense strand
caagaaaguugcuguggaa

SEQ ID NO: 1688346 - RNA, 19 nt, Homo sapiens
  misc_RNA (1)...(19): siRNA sense strand
ucaagagccuucugaaauu

SEQ ID NO: 1688347 - RNA, 19 nt, Homo sapiens
  misc_RNA (1)...(19): siRNA sense strand
gaaggaaccacccaucuuu

SEQ ID NO: 1688348 - RNA, 19 nt, Homo sapiens
  misc_RNA (1)...(19): siRNA sense strand
caagagccuucugaaauua

SEQ ID NO: 1688349 - RNA, 19 nt, Homo sapiens
  misc_RNA (1)...(19): siRNA sense strand
gaucagauuugaagaguuc

SEQ ID NO: 1688350 - RNA, 19 nt, Homo sapiens
  misc_RNA (1)...(19): siRNA sense strand
caagagacauuacgaaagu

SEQ ID NO: 1688351 - RNA, 19 nt, Homo sapiens
  misc_RNA (1)...(19): siRNA sense strand
gcaaaucacucucuuuacu

SEQ ID NO: 1688352 - RNA, 19 nt, Homo sapiens
  misc_RNA (1)...(19): siRNA sense strand
cuaacgagcugaucagauu

SEQ ID NO: 1688353 - RNA, 19 nt, Homo sapiens
  misc_RNA (1)...(19): siRNA sense strand
gaaaagauccuuacucuga

SEQ ID NO: 1688354 - RNA, 19 nt, Homo sapiens
  misc_RNA (1)...(19): siRNA sense strand
gcaugugucuagagaguaa

SEQ ID NO: 1688355 - RNA, 19 nt, Homo sapiens
  misc_RNA (1)...(19): siRNA sense strand
ggacugggaugucacugaa

SEQ ID NO: 1688356 - RNA, 19 nt, Homo sapiens
  misc_RNA (1)...(19): siRNA sense strand
cagcaaaucacucucuuua

SEQ ID NO: 1688357 - RNA, 19 nt, Homo sapiens
  misc_RNA (1)...(19): siRNA sense strand
gaagguugccgauauagaa

SEQ ID NO: 1688358 - RNA, 19 nt, Homo sapiens
  misc_RNA (1)...(19): siRNA sense strand
ccaacaagauaaugaaaug

SEQ ID NO: 1688359 - RNA, 19 nt, Homo sapiens
  misc_RNA (1)...(19): siRNA sense strand
gcaaagcagugccgagugu

SEQ ID NO: 1688360 - RNA, 19 nt, Homo sapiens
  misc_RNA (1)...(19): siRNA sense strand
gcaaaacucugaccucuga

SEQ ID NO: 1688361 - RNA, 19 nt, Homo sapiens
  misc_RNA (1)...(19): siRNA sense strand
ggaaggagaccacguuguu

SEQ ID NO: 1688362 - RNA, 19 nt, Homo sapiens
  misc_RNA (1)...(19): siRNA sense strand
agccauaccugauacuuua

SEQ ID NO: 1688363 - RNA, 19 nt, Homo sapiens
  misc_RNA (1)...(19): siRNA sense strand
ccagccaucuugugucaua

SEQ ID NO: 1688364 - RNA, 19 nt, Homo sapiens
  misc_RNA (1)...(19): siRNA sense strand
gaaggaaacggaacugaga

SEQ ID NO: 1688365 - RNA, 19 nt, Homo sapiens
  misc_RNA (1)...(19): siRNA sense strand
uuauugagcuuuccagauu

SEQ ID NO: 1688366 - RNA, 19 nt, Homo sapiens
  misc_RNA (1)...(19): siRNA sense strand
gagaacuccugcaguagaa

SEQ ID NO: 1688367 - RNA, 19 nt, Homo sapiens
  misc_RNA (1)...(19): siRNA sense strand
gcaucaaagugguuaaaug

SEQ ID NO: 1688368 - RNA, 19 nt, Homo sapiens
  misc_RNA (1)...(19): siRNA sense strand
gcgcuuuacucaggauuua

SEQ ID NO: 1688369 - RNA, 19 nt, Homo sapiens
  misc_RNA (1)...(19): siRNA sense strand
gaaagucucugcgaucucu

SEQ ID NO: 1688370 - RNA, 19 nt, Homo sapiens
  misc_RNA (1)...(19): siRNA sense strand
gaugacagaucuccuuaca

SEQ ID NO: 1688371 - RNA, 19 nt, Homo sapiens
  misc_RNA (1)...(19): siRNA sense strand
gaaggagaccacguuguua

SEQ ID NO: 1688372 - RNA, 19 nt, Homo sapiens
  misc_RNA (1)...(19): siRNA sense strand
ccaaucugcugaucucauu

SEQ ID NO: 1688373 - RNA, 19 nt, Homo sapiens
  misc_RNA (1)...(19): siRNA sense strand
gcagacagauucagcugau

SEQ ID NO: 1688374 - RNA, 19 nt, Homo sapiens
  misc_RNA (1)...(19): siRNA sense strand
caaagugguuaaauggauu

SEQ ID NO: 1688375 - RNA, 19 nt, Homo sapiens
  misc_RNA (1)...(19): siRNA sense strand
guggauggcuucaacaaga

SEQ ID NO: 1688376 - RNA, 19 nt, Homo sapiens
  misc_RNA (1)...(19): siRNA sense strand
caaagaaugccgcugauga

SEQ ID NO: 1688377 - RNA, 19 nt, Homo sapiens
  misc_RNA (1)...(19): siRNA sense strand
acaaggaaguuauucaaga

SEQ ID NO: 1688378 - RNA, 19 nt, Homo sapiens
  misc_RNA (1)...(19): siRNA sense strand
uaaccugucuuccugcaaa

SEQ ID NO: 1688379 - RNA, 19 nt, Homo sapiens
  misc_RNA (1)...(19): siRNA sense strand
caagcugauugaguuauua

SEQ ID NO: 1688380 - RNA, 19 nt, Homo sapiens
  misc_RNA (1)...(19): siRNA sense strand
gaaugugucagaucuauau

SEQ ID NO: 1688381 - RNA, 19 nt, Homo sapiens
  misc_RNA (1)...(19): siRNA sense strand
gagacuguauuccaaguga

SEQ ID NO: 1688382 - RNA, 19 nt, Homo sapiens
  misc_RNA (1)...(19): siRNA sense strand
uaaacaagccagcaagaaa

SEQ ID NO: 1688383 - RNA, 19 nt, Homo sapiens
  misc_RNA (1)...(19): siRNA sense strand
ccacagagaagcagaauuc

SEQ ID NO: 1688384 - RNA, 19 nt, Homo sapiens
  misc_RNA (1)...(19): siRNA sense strand
aggcaugguuuccacauua

SEQ ID NO: 1688385 - RNA, 19 nt, Homo sapiens
  misc_RNA (1)...(19): siRNA sense strand
ugaagagccugccauacuu

SEQ ID NO: 1688386 - RNA, 19 nt, Homo sapiens
  misc_RNA (1)...(19): siRNA sense strand
cagaucuccuuacagaaua

SEQ ID NO: 1688387 - RNA, 19 nt, Homo sapiens
  misc_RNA (1)...(19): siRNA sense strand
ccacccaucuuucuguuga

SEQ ID NO: 1688388 - RNA, 19 nt, Homo sapiens
  misc_RNA (1)...(19): siRNA sense strand
gaauucaucuguguaugug

SEQ ID NO: 1688389 - RNA, 19 nt, Homo sapiens
  misc_RNA (1)...(19): siRNA sense strand
gcacaagcugcaucaguuu

SEQ ID NO: 1688390 - RNA, 19 nt, Homo sapiens
  misc_RNA (1)...(19): siRNA sense strand
gcucacaagucuguauuug

SEQ ID NO: 1688391 - RNA, 19 nt, Homo sapiens
  misc_RNA (1)...(19): siRNA sense strand
cgaagaguccuguagguaa

SEQ ID NO: 1688392 - RNA, 19 nt, Homo sapiens
  misc_RNA (1)...(19): siRNA sense strand
gcagcccaauuauauuuga

SEQ ID NO: 1688393 - RNA, 19 nt, Homo sapiens
  misc_RNA (1)...(19): siRNA sense strand
caugcuggcucuaagcuuu

SEQ ID NO: 1688394 - RNA, 19 nt, Homo sapiens
  misc_RNA (1)...(19): siRNA sense strand
gcacucaggaugaaauaga

SEQ ID NO: 1688395 - RNA, 19 nt, Homo sapiens
  misc_RNA (1)...(19): siRNA sense strand
gcugaauaauugccaggua

SEQ ID NO: 1688396 - RNA, 19 nt, Homo sapiens
  misc_RNA (1)...(19): siRNA sense strand
uaaagucuggccaaauaua

SEQ ID NO: 1688397 - RNA, 19 nt, Homo sapiens
  misc_RNA (1)...(19): siRNA sense strand
gaagagcacauuucacagu

SEQ ID NO: 1688398 - RNA, 19 nt, Homo sapiens
  misc_RNA (1)...(19): siRNA sense strand
ggagguaccaguagcuuga

SEQ ID NO: 1688399 - RNA, 19 nt, Homo sapiens
  misc_RNA (1)...(19): siRNA sense strand
ggacauggucauaagagaa

SEQ ID NO: 1688400 - RNA, 19 nt, Homo sapiens
  misc_RNA (1)...(19): siRNA sense strand
cgugaagguugccgauaua

SEQ ID NO: 1688401 - RNA, 19 nt, Homo sapiens
  misc_RNA (1)...(19): siRNA sense strand
ccaagcugauugaguuauu

SEQ ID NO: 1688402 - RNA, 19 nt, Homo sapiens
  misc_RNA (1)...(19): siRNA sense strand
gaagaguccuguagguaac

SEQ ID NO: 1688403 - RNA, 19 nt, Homo sapiens
  misc_RNA (1)...(19): siRNA sense strand
gaaccucagugcccgaagu

SEQ ID NO: 1688404 - RNA, 19 nt, Homo sapiens
  misc_RNA (1)...(19): siRNA sense strand
gcaccuauaaccaagcuuu

SEQ ID NO: 1688405 - RNA, 19 nt, Homo sapiens
  misc_RNA (1)...(19): siRNA sense strand
ucaaaggacugggauguca

SEQ ID NO: 1688406 - RNA, 19 nt, Homo sapiens
  misc_RNA (1)...(19): siRNA sense strand
guacauggagaacaagaaa

SEQ ID NO: 1688407 - RNA, 19 nt, Homo sapiens
  misc_RNA (1)...(19): siRNA sense strand
ucaaagugguuaaauggau

SEQ ID NO: 1688408 - RNA, 19 nt, Homo sapiens
  misc_RNA (1)...(19): siRNA sense strand
guuuggcgaucuagaagua

SEQ ID NO: 1688409 - RNA, 19 nt, Homo sapiens
  misc_RNA (1)...(19): siRNA sense strand
caaagcaccaggacaauca

SEQ ID NO: 1688410 - RNA, 19 nt, Homo sapiens
  misc_RNA (1)...(19): siRNA sense strand
ggaaggaaccacccaucuu

SEQ ID NO: 1688411 - RNA, 19 nt, Homo sapiens
  misc_RNA (1)...(19): siRNA sense strand
ggcagaacccguuuacaaa

SEQ ID NO: 1688412 - RNA, 19 nt, Homo sapiens
  misc_RNA (1)...(19): siRNA sense strand
caaggaaguuauucaagag

SEQ ID NO: 1688413 - RNA, 19 nt, Homo sapiens
  misc_RNA (1)...(19): siRNA sense strand
ccaaauauaccaccuccaa

SEQ ID NO: 1688414 - RNA, 19 nt, Homo sapiens
  misc_RNA (1)...(19): siRNA sense strand
cauaaucgaugcggcuaaa

SEQ ID NO: 1688415 - RNA, 19 nt, Homo sapiens
  misc_RNA (1)...(19): siRNA sense strand
ccacuucgccaaugcguuu

SEQ ID NO: 1688416 - RNA, 19 nt, Homo sapiens
  misc_RNA (1)...(19): siRNA sense strand
ucaguuccauuucggcuuu

SEQ ID NO: 1688417 - RNA, 19 nt, Homo sapiens
  misc_RNA (1)...(19): siRNA sense strand
cagcgaacaugaauuugau

SEQ ID NO: 1688418 - RNA, 19 nt, Homo sapiens
  misc_RNA (1)...(19): siRNA sense strand
aaaucacucucuuuacuga

SEQ ID NO: 1688419 - RNA, 19 nt, Homo sapiens
  misc_RNA (1)...(19): siRNA sense strand
gugaauagccuccacagau

SEQ ID NO: 1688420 - RNA, 19 nt, Homo sapiens
  misc_RNA (1)...(19): siRNA sense strand
gcaaagaauccgugagaag

SEQ ID NO: 1688421 - RNA, 19 nt, Homo sapiens
  misc_RNA (1)...(19): siRNA sense strand
cgaaagaguacauggagaa

SEQ ID NO: 1688422 - RNA, 19 nt, Homo sapiens
  misc_RNA (1)...(19): siRNA sense strand
ggaugucacugaauauggu

SEQ ID NO: 1688423 - RNA, 19 nt, Homo sapiens
  misc_RNA (1)...(19): siRNA sense strand
aaacgucugcugacccuua

SEQ ID NO: 1688424 - RNA, 19 nt, Homo sapiens
  misc_RNA (1)...(19): siRNA sense strand
ugaguuacccgucugcuuu

SEQ ID NO: 1688425 - RNA, 19 nt, Homo sapiens
  misc_RNA (1)...(19): siRNA sense strand
ggaacuuagugaccugaga

SEQ ID NO: 1688426 - RNA, 19 nt, Homo sapiens
  misc_RNA (1)...(19): siRNA sense strand
cugaauaauugccagguaa

SEQ ID NO: 1688427 - RNA, 19 nt, Homo sapiens
  misc_RNA (1)...(19): siRNA sense strand
guaagcugcugugcucauu

SEQ ID NO: 1688428 - RNA, 19 nt, Homo sapiens
  misc_RNA (1)...(19): siRNA sense strand
cagaaugccucagcuagga

SEQ ID NO: 1688429 - RNA, 19 nt, Homo sapiens
  misc_RNA (1)...(19): siRNA sense strand
gaaccacccaucuuucugu

SEQ ID NO: 1688430 - RNA, 19 nt, Homo sapiens
  misc_RNA (1)...(19): siRNA sense strand
ccaagacuaugaugucagu

SEQ ID NO: 1688431 - RNA, 19 nt, Homo sapiens
  misc_RNA (1)...(19): siRNA sense strand
ugaguugauugacaucgua

SEQ ID NO: 1688432 - RNA, 19 nt, Homo sapiens
  misc_RNA (1)...(19): siRNA sense strand
ccucauguauugcagauuc

SEQ ID NO: 1688433 - RNA, 19 nt, Homo sapiens
  misc_RNA (1)...(19): siRNA sense strand
aagaguacauggagaacaa

SEQ ID NO: 1688434 - RNA, 19 nt, Homo sapiens
  misc_RNA (1)...(19): siRNA sense strand
cugccucuguuuaaauuua

SEQ ID NO: 1688435 - RNA, 19 nt, Homo sapiens
  misc_RNA (1)...(19): siRNA sense strand
caagauuccuuuugugauu

SEQ ID NO: 1688436 - RNA, 19 nt, Homo sapiens
  misc_RNA (1)...(19): siRNA sense strand
cauccuaucaccaucauuu

SEQ ID NO: 1688437 - RNA, 19 nt, Homo sapiens
  misc_RNA (1)...(19): siRNA sense strand
gcagucccacuuccugaua

SEQ ID NO: 1688438 - RNA, 19 nt, Homo sapiens
  misc_RNA (1)...(19): siRNA sense strand
ggucuuuacuucauacuua

SEQ ID NO: 1688439 - RNA, 19 nt, Homo sapiens
  misc_RNA (1)...(19): siRNA sense strand
ccaaggaugucguugauuu

SEQ ID NO: 1688440 - RNA, 19 nt, Homo sapiens
  misc_RNA (1)...(19): siRNA sense strand
ugacagaucuccuuacaga

SEQ ID NO: 1688441 - RNA, 19 nt, Homo sapiens
  misc_RNA (1)...(19): siRNA sense strand
ucaagagccuucugaaauu

SEQ ID NO: 1688442 - RNA, 19 nt, Homo sapiens
  misc_RNA (1)...(19): siRNA sense strand
gaaggaaccacccaucuuu

SEQ ID NO: 1688443 - RNA, 19 nt, Homo sapiens
  misc_RNA (1)...(19): siRNA sense strand
caagagccuucugaaauua

SEQ ID NO: 1688444 - RNA, 19 nt, Homo sapiens
  misc_RNA (1)...(19): siRNA sense strand
caagagacauuacgaaagu

SEQ ID NO: 1688445 - RNA, 19 nt, Homo sapiens
  misc_RNA (1)...(19): siRNA sense strand
gaaaagauccuuacucuga

SEQ ID NO: 1688446 - RNA, 19 nt, Homo sapiens
  misc_RNA (1)...(19): siRNA sense strand
ggacugggaugucacugaa

SEQ ID NO: 1688447 - RNA, 19 nt, Homo sapiens
  misc_RNA (1)...(19): siRNA sense strand
ccaacaagauaaugaaaug

SEQ ID NO: 1688448 - RNA, 19 nt, Homo sapiens
  misc_RNA (1)...(19): siRNA sense strand
gaagguugccgauauagaa

SEQ ID NO: 1688449 - RNA, 19 nt, Homo sapiens
  misc_RNA (1)...(19): siRNA sense strand
gcaaaacucugaccucuga

SEQ ID NO: 1688450 - RNA, 19 nt, Homo sapiens
  misc_RNA (1)...(19): siRNA sense strand
agccauaccugauacuuua

SEQ ID NO: 1688451 - RNA, 19 nt, Homo sapiens
  misc_RNA (1)...(19): siRNA sense strand
gcgcuuuacucaggauuua

SEQ ID NO: 1688452 - RNA, 19 nt, Homo sapiens
  misc_RNA (1)...(19): siRNA sense strand
gaaagucucugcgaucucu

SEQ ID NO: 1688453 - RNA, 19 nt, Homo sapiens
  misc_RNA (1)...(19): siRNA sense strand
gaugacagaucuccuuaca

SEQ ID NO: 1688454 - RNA, 19 nt, Homo sapiens
  misc_RNA (1)...(19): siRNA sense strand
gcagacagauucagcugau

SEQ ID NO: 1688455 - RNA, 19 nt, Homo sapiens
  misc_RNA (1)...(19): siRNA sense strand
ccaaucugcugaucucauu

SEQ ID NO: 1688456 - RNA, 19 nt, Homo sapiens
  misc_RNA (1)...(19): siRNA sense strand
ugaagagccugccauacuu

SEQ ID NO: 1688457 - RNA, 19 nt, Homo sapiens
  misc_RNA (1)...(19): siRNA sense strand
cagaucuccuuacagaaua

SEQ ID NO: 1688458 - RNA, 19 nt, Homo sapiens
  misc_RNA (1)...(19): siRNA sense strand
ccacccaucuuucuguuga

SEQ ID NO: 1688459 - RNA, 19 nt, Homo sapiens
  misc_RNA (1)...(19): siRNA sense strand
gcucacaagucuguauuug

SEQ ID NO: 1688460 - RNA, 19 nt, Homo sapiens
  misc_RNA (1)...(19): siRNA sense strand
gcacucaggaugaaauaga

SEQ ID NO: 1688461 - RNA, 19 nt, Homo sapiens
  misc_RNA (1)...(19): siRNA sense strand
cgugaagguugccgauaua

SEQ ID NO: 1688462 - RNA, 19 nt, Homo sapiens
  misc_RNA (1)...(19): siRNA sense strand
ggacauggucauaagagaa

SEQ ID NO: 1688463 - RNA, 19 nt, Homo sapiens
  misc_RNA (1)...(19): siRNA sense strand
ucaaaggacugggauguca

SEQ ID NO: 1688464 - RNA, 19 nt, Homo sapiens
  misc_RNA (1)...(19): siRNA sense strand
gcaccuauaaccaagcuuu

SEQ ID NO: 1688465 - RNA, 19 nt, Homo sapiens
  misc_RNA (1)...(19): siRNA sense strand
ggaaggaaccacccaucuu

SEQ ID NO: 1688466 - RNA, 19 nt, Homo sapiens
  misc_RNA (1)...(19): siRNA sense strand
ucaguuccauuucggcuuu

SEQ ID NO: 1688467 - RNA, 19 nt, Homo sapiens
  misc_RNA (1)...(19): siRNA sense strand
ggaugucacugaauauggu

SEQ ID NO: 1688468 - RNA, 19 nt, Homo sapiens
  misc_RNA (1)...(19): siRNA sense strand
aaacgucugcugacccuua

SEQ ID NO: 1688469 - RNA, 19 nt, Homo sapiens
  misc_RNA (1)...(19): siRNA sense strand
ugaguugauugacaucgua

SEQ ID NO: 1688470 - RNA, 19 nt, Homo sapiens
  misc_RNA (1)...(19): siRNA sense strand
gaaccacccaucuuucugu

SEQ ID NO: 1688471 - RNA, 19 nt, Homo sapiens
  misc_RNA (1)...(19): siRNA sense strand
ccaagacuaugaugucagu

SEQ ID NO: 1688472 - RNA, 19 nt, Homo sapiens
  misc_RNA (1)...(19): siRNA sense strand
acugggaugucacugaaua

SEQ ID NO: 1688473 - RNA, 19 nt, Homo sapiens
  misc_RNA (1)...(19): siRNA sense strand
gaagagccugccauacuug

SEQ ID NO: 1688474 - RNA, 19 nt, Homo sapiens
  misc_RNA (1)...(19): siRNA sense strand
ugaccgaacugcugaagag

SEQ ID NO: 1688475 - RNA, 19 nt, Homo sapiens
  misc_RNA (1)...(19): siRNA sense strand
caaaacaguucuccaagga

SEQ ID NO: 1688476 - RNA, 19 nt, Homo sapiens
  misc_RNA (1)...(19): siRNA sense strand
ggucauaagagaauuguag

SEQ ID NO: 1688477 - RNA, 19 nt, Homo sapiens
  misc_RNA (1)...(19): siRNA sense strand
gagaacgcacucaggauga

SEQ ID NO: 1688478 - RNA, 19 nt, Homo sapiens
  misc_RNA (1)...(19): siRNA sense strand
gcuuaucacugguguuucu

SEQ ID NO: 1688479 - RNA, 19 nt, Homo sapiens
  misc_RNA (1)...(19): siRNA sense strand
uaugaugucaguuccauuu

SEQ ID NO: 1688480 - RNA, 19 nt, Homo sapiens
  misc_RNA (1)...(19): siRNA sense strand
gcacacagccucggaacuc

SEQ ID NO: 1688481 - RNA, 19 nt, Homo sapiens
  misc_RNA (1)...(19): siRNA sense strand
ucacugguguuucucaaag

SEQ ID NO: 1688482 - RNA, 19 nt, Homo sapiens
  misc_RNA (1)...(19): siRNA sense strand
augauaagauggaagaaug

SEQ ID NO: 1688483 - RNA, 19 nt, Homo sapiens
  misc_RNA (1)...(19): siRNA sense strand
ugacaucguaucagagauu

SEQ ID NO: 1688484 - RNA, 19 nt, Homo sapiens
  misc_RNA (1)...(19): siRNA sense strand
uaccaaguaugucggagaa

SEQ ID NO: 1688485 - RNA, 19 nt, Homo sapiens
  misc_RNA (1)...(19): siRNA sense strand
gugcggucuuuacuucaua

SEQ ID NO: 1688486 - RNA, 19 nt, Homo sapiens
  misc_RNA (1)...(19): siRNA sense strand
guugaugucuugggaagga

SEQ ID NO: 1688487 - RNA, 19 nt, Homo sapiens
  misc_RNA (1)...(19): siRNA sense strand
gaagcucacaagucuguau

SEQ ID NO: 1688488 - RNA, 19 nt, Homo sapiens
  misc_RNA (1)...(19): siRNA sense strand
gaggagcucaagagacauu

SEQ ID NO: 1688489 - RNA, 19 nt, Homo sapiens
  misc_RNA (1)...(19): siRNA sense strand
ggacaaaacaguucuccaa

SEQ ID NO: 1688490 - RNA, 19 nt, Homo sapiens
  misc_RNA (1)...(19): siRNA sense strand
gaauaugguguuugugagu

SEQ ID NO: 1688491 - RNA, 19 nt, Homo sapiens
  misc_RNA (1)...(19): siRNA sense strand
gaaacucugcagcccaaga

SEQ ID NO: 1688492 - RNA, 19 nt, Homo sapiens
  misc_RNA (1)...(19): siRNA sense strand
ccaaacuacuugaacuuuu

SEQ ID NO: 1688493 - RNA, 19 nt, Homo sapiens
  misc_RNA (1)...(19): siRNA sense strand
gaugaaauagaaaggacaa

SEQ ID NO: 1688494 - RNA, 19 nt, Homo sapiens
  misc_RNA (1)...(19): siRNA sense strand
cauaagagaauuguagugu

SEQ ID NO: 1688495 - RNA, 19 nt, Homo sapiens
  misc_RNA (1)...(19): siRNA sense strand
aaugugcggucuuuacuuc

SEQ ID NO: 1688496 - RNA, 19 nt, Homo sapiens
  misc_RNA (1)...(19): siRNA sense strand
gauggaagaaugugugaag

SEQ ID NO: 1688497 - RNA, 19 nt, Homo sapiens
  misc_RNA (1)...(19): siRNA sense strand
cuaaugauaagauggaaga

SEQ ID NO: 1688498 - RNA, 19 nt, Homo sapiens
  misc_RNA (1)...(19): siRNA sense strand
gcucaagagacauuacgaa

SEQ ID NO: 1688499 - RNA, 19 nt, Homo sapiens
  misc_RNA (1)...(19): siRNA sense strand
acagaucuccuuacagaau

SEQ ID NO: 1688500 - RNA, 19 nt, Homo sapiens
  misc_RNA (1)...(19): siRNA sense strand
guacuauggguuuaccaaa

SEQ ID NO: 1688501 - RNA, 19 nt, Homo sapiens
  misc_RNA (1)...(19): siRNA sense strand
gaaugugcggucuuuacuu

SEQ ID NO: 1688502 - RNA, 19 nt, Homo sapiens
  misc_RNA (1)...(19): siRNA sense strand
gacauggucauaagagaau

SEQ ID NO: 1688503 - RNA, 19 nt, Homo sapiens
  misc_RNA (1)...(19): siRNA sense strand
ucgugaagguugccgauau

SEQ ID NO: 1688504 - RNA, 19 nt, Homo sapiens
  misc_RNA (1)...(19): siRNA sense strand
cucaagagccuucugaaau

SEQ ID NO: 1688505 - RNA, 19 nt, Homo sapiens
  misc_RNA (1)...(19): siRNA sense strand
ccaaguaugucggagaaac

SEQ ID NO: 1688506 - RNA, 19 nt, Homo sapiens
  misc_RNA (1)...(19): siRNA sense strand
gaacgcacucaggaugaaa

SEQ ID NO: 1688507 - RNA, 19 nt, Homo sapiens
  misc_RNA (1)...(19): siRNA sense strand
ccucaagagccuucugaaa

SEQ ID NO: 1688508 - RNA, 19 nt, Homo sapiens
  misc_RNA (1)...(19): siRNA sense strand
ucacuaaugauaagaugga

SEQ ID NO: 1688509 - RNA, 19 nt, Homo sapiens
  misc_RNA (1)...(19): siRNA sense strand
uuacaaguauuggaaugug

SEQ ID NO: 1688510 - RNA, 19 nt, Homo sapiens
  misc_RNA (1)...(19): siRNA sense strand
caaggaugucguugauuug

SEQ ID NO: 1688511 - RNA, 19 nt, Homo sapiens
  misc_RNA (1)...(19): siRNA sense strand
cuagcugcccaguuuguua

SEQ ID NO: 1688512 - RNA, 19 nt, Homo sapiens
  misc_RNA (1)...(19): siRNA sense strand
uagcugcccaguuuguuaa

SEQ ID NO: 1688513 - RNA, 19 nt, Homo sapiens
  misc_RNA (1)...(19): siRNA sense strand
cugaauaugguguuuguga

SEQ ID NO: 1688514 - RNA, 19 nt, Homo sapiens
  misc_RNA (1)...(19): siRNA sense strand
gaagcgcuuuacucaggau

SEQ ID NO: 1688515 - RNA, 19 nt, Homo sapiens
  misc_RNA (1)...(19): siRNA sense strand
ucaaaucccaggccagcaa

SEQ ID NO: 1688516 - RNA, 19 nt, Homo sapiens
  misc_RNA (1)...(19): siRNA sense strand
acacagagcaggagcuucu

SEQ ID NO: 1688517 - RNA, 19 nt, Homo sapiens
  misc_RNA (1)...(19): siRNA sense strand
gagccugccauacuugguu

SEQ ID NO: 1688518 - RNA, 19 nt, Homo sapiens
  misc_RNA (1)...(19): siRNA sense strand
gacaucguaucagagauuc

SEQ ID NO: 1688519 - RNA, 19 nt, Homo sapiens
  misc_RNA (1)...(19): siRNA sense strand
cacugaauaugguguuugu

SEQ ID NO: 1688520 - RNA, 19 nt, Homo sapiens
  misc_RNA (1)...(19): siRNA sense strand
ccauuucggcuuuaacuca

SEQ ID NO: 1688521 - RNA, 19 nt, Homo sapiens
  misc_RNA (1)...(19): siRNA sense strand
aaagauccuuacucugaca

SEQ ID NO: 1688522 - RNA, 19 nt, Homo sapiens
  misc_RNA (1)...(19): siRNA sense strand
gaagccauaccugauacuu

SEQ ID NO: 1688523 - RNA, 19 nt, Homo sapiens
  misc_RNA (1)...(19): siRNA sense strand
cagcaaacaggucauugug

SEQ ID NO: 1688524 - RNA, 19 nt, Homo sapiens
  misc_RNA (1)...(19): siRNA sense strand
cacucaggaugaaauagaa

SEQ ID NO: 1688525 - RNA, 19 nt, Homo sapiens
  misc_RNA (1)...(19): siRNA sense strand
agaacgcacucaggaugaa

SEQ ID NO: 1688526 - RNA, 19 nt, Homo sapiens
  misc_RNA (1)...(19): siRNA sense strand
uuaccaaacuacuugaacu

SEQ ID NO: 1688527 - RNA, 19 nt, Homo sapiens
  misc_RNA (1)...(19): siRNA sense strand
gaaaagucguuugaguuca

SEQ ID NO: 1688528 - RNA, 19 nt, Homo sapiens
  misc_RNA (1)...(19): siRNA sense strand
caaacaggucauugugaga

SEQ ID NO: 1688529 - RNA, 19 nt, Homo sapiens
  misc_RNA (1)...(19): siRNA sense strand
auuggaauguggagaagaa

SEQ ID NO: 1688530 - RNA, 19 nt, Homo sapiens
  misc_RNA (1)...(19): siRNA sense strand
aauaugguguuugugaguu

SEQ ID NO: 1688531 - RNA, 19 nt, Homo sapiens
  misc_RNA (1)...(19): siRNA sense strand
caccuauaaccaagcuuua

SEQ ID NO: 1688532 - RNA, 19 nt, Homo sapiens
  misc_RNA (1)...(19): siRNA sense strand
cagcagauuuuccuucaug

SEQ ID NO: 1688533 - RNA, 19 nt, Homo sapiens
  misc_RNA (1)...(19): siRNA sense strand
ucaagagacauuacgaaag

SEQ ID NO: 1688534 - RNA, 19 nt, Homo sapiens
  misc_RNA (1)...(19): siRNA sense strand
ccgaaagucucugcgaucu

SEQ ID NO: 1688535 - RNA, 19 nt, Homo sapiens
  misc_RNA (1)...(19): siRNA sense strand
uaucacugguguuucucaa

SEQ ID NO: 1688536 - RNA, 19 nt, Homo sapiens
  misc_RNA (1)...(19): siRNA sense strand
ccagcaaacaggucauugu

SEQ ID NO: 1688537 - RNA, 19 nt, Homo sapiens
  misc_RNA (1)...(19): siRNA sense strand
uaaaaggacauggucauaa

SEQ ID NO: 1688538 - RNA, 19 nt, Homo sapiens
  misc_RNA (1)...(19): siRNA sense strand
gaacuuccagaacauauuc

SEQ ID NO: 1688539 - RNA, 19 nt, Homo sapiens
  misc_RNA (1)...(19): siRNA sense strand
gcaucacgcucucgaagca

SEQ ID NO: 1688540 - RNA, 19 nt, Homo sapiens
  misc_RNA (1)...(19): siRNA sense strand
ucaaaggauucaaguucuu

SEQ ID NO: 1688541 - RNA, 19 nt, Homo sapiens
  misc_RNA (1)...(19): siRNA sense strand
ccaagaacuuccagaacau

SEQ ID NO: 1688542 - RNA, 19 nt, Homo sapiens
  misc_RNA (1)...(19): siRNA sense strand
gaaggagaacgcccuagug

SEQ ID NO: 1688543 - RNA, 19 nt, Homo sapiens
  misc_RNA (1)...(19): siRNA sense strand
uccaagaacuuccagaaca

SEQ ID NO: 1688544 - RNA, 19 nt, Homo sapiens
  misc_RNA (1)...(19): siRNA sense strand
caagaacuuccagaacaua

SEQ ID NO: 1688545 - RNA, 19 nt, Homo sapiens
  misc_RNA (1)...(19): siRNA sense strand
cgucaaaggauucaaguuc

SEQ ID NO: 1688546 - RNA, 19 nt, Homo sapiens
  misc_RNA (1)...(19): siRNA sense strand
ccagaaggaccgcaagaug

SEQ ID NO: 1688547 - RNA, 19 nt, Homo sapiens
  misc_RNA (1)...(19): siRNA sense strand
aagauccuguucaauaaga

SEQ ID NO: 1688548 - RNA, 19 nt, Homo sapiens
  misc_RNA (1)...(19): siRNA sense strand
gaagauccuguucaauaag

SEQ ID NO: 1688549 - RNA, 19 nt, Homo sapiens
  misc_RNA (1)...(19): siRNA sense strand
ucauugaccugcacaacca

SEQ ID NO: 1688550 - RNA, 19 nt, Homo sapiens
  misc_RNA (1)...(19): siRNA sense strand
gucaaaggauucaaguucu

SEQ ID NO: 1688551 - RNA, 19 nt, Homo sapiens
  misc_RNA (1)...(19): siRNA sense strand
ccagauauagccguuggua

SEQ ID NO: 1688552 - RNA, 19 nt, Homo sapiens
  misc_RNA (1)...(19): siRNA sense strand
gcuccaagaacuuccagaa

SEQ ID NO: 1688553 - RNA, 19 nt, Homo sapiens
  misc_RNA (1)...(19): siRNA sense strand
gauauagccguugguacaa

SEQ ID NO: 1688554 - RNA, 19 nt, Homo sapiens
  misc_RNA (1)...(19): siRNA sense strand
caaggacuacggcaacuca

SEQ ID NO: 1688555 - RNA, 19 nt, Homo sapiens
  misc_RNA (1)...(19): siRNA sense strand
agauauagccguugguaca

SEQ ID NO: 1688556 - RNA, 19 nt, Homo sapiens
  misc_RNA (1)...(19): siRNA sense strand
ggaucucaagguccuguuu

SEQ ID NO: 1688557 - RNA, 19 nt, Homo sapiens
  misc_RNA (1)...(19): siRNA sense strand
caaaggauucaaguucuuc

SEQ ID NO: 1688558 - RNA, 19 nt, Homo sapiens
  misc_RNA (1)...(19): siRNA sense strand
agauggcacugauccagau

SEQ ID NO: 1688559 - RNA, 19 nt, Homo sapiens
  misc_RNA (1)...(19): siRNA sense strand
uauagccguugguacaaag

SEQ ID NO: 1688560 - RNA, 19 nt, Homo sapiens
  misc_RNA (1)...(19): siRNA sense strand
auauagccguugguacaaa

SEQ ID NO: 1688561 - RNA, 19 nt, Homo sapiens
  misc_RNA (1)...(19): siRNA sense strand
agaacgcccuagugcagau

SEQ ID NO: 1688562 - RNA, 19 nt, Homo sapiens
  misc_RNA (1)...(19): siRNA sense strand
gaacuuccagaacauauuc

SEQ ID NO: 1688563 - RNA, 19 nt, Homo sapiens
  misc_RNA (1)...(19): siRNA sense strand
gcaucacgcucucgaagca

SEQ ID NO: 1688564 - RNA, 19 nt, Homo sapiens
  misc_RNA (1)...(19): siRNA sense strand
ucaaaggauucaaguucuu

SEQ ID NO: 1688565 - RNA, 19 nt, Homo sapiens
  misc_RNA (1)...(19): siRNA sense strand
ccaagaacuuccagaacau

SEQ ID NO: 1688566 - RNA, 19 nt, Homo sapiens
  misc_RNA (1)...(19): siRNA sense strand
gaaggagaacgcccuagug

SEQ ID NO: 1688567 - RNA, 19 nt, Homo sapiens
  misc_RNA (1)...(19): siRNA sense strand
uccaagaacuuccagaaca

SEQ ID NO: 1688568 - RNA, 19 nt, Homo sapiens
  misc_RNA (1)...(19): siRNA sense strand
caagaacuuccagaacaua

SEQ ID NO: 1688569 - RNA, 19 nt, Homo sapiens
  misc_RNA (1)...(19): siRNA sense strand
cgucaaaggauucaaguuc

SEQ ID NO: 1688570 - RNA, 19 nt, Homo sapiens
  misc_RNA (1)...(19): siRNA sense strand
ccagaaggaccgcaagaug

SEQ ID NO: 1688571 - RNA, 19 nt, Homo sapiens
  misc_RNA (1)...(19): siRNA sense strand
aagauccuguucaauaaga

SEQ ID NO: 1688572 - RNA, 19 nt, Homo sapiens
  misc_RNA (1)...(19): siRNA sense strand
gaagauccuguucaauaag

SEQ ID NO: 1688573 - RNA, 19 nt, Homo sapiens
  misc_RNA (1)...(19): siRNA sense strand
ucauugaccugcacaacca

SEQ ID NO: 1688574 - RNA, 19 nt, Homo sapiens
  misc_RNA (1)...(19): siRNA sense strand
gucaaaggauucaaguucu

SEQ ID NO: 1688575 - RNA, 19 nt, Homo sapiens
  misc_RNA (1)...(19): siRNA sense strand
ccagauauagccguuggua

SEQ ID NO: 1688576 - RNA, 19 nt, Homo sapiens
  misc_RNA (1)...(19): siRNA sense strand
gcuccaagaacuuccagaa

SEQ ID NO: 1688577 - RNA, 19 nt, Homo sapiens
  misc_RNA (1)...(19): siRNA sense strand
gauauagccguugguacaa

SEQ ID NO: 1688578 - RNA, 19 nt, Homo sapiens
  misc_RNA (1)...(19): siRNA sense strand
caaggacuacggcaacuca

SEQ ID NO: 1688579 - RNA, 19 nt, Homo sapiens
  misc_RNA (1)...(19): siRNA sense strand
agauauagccguugguaca

SEQ ID NO: 1688580 - RNA, 19 nt, Homo sapiens
  misc_RNA (1)...(19): siRNA sense strand
ggaucucaagguccuguuu

SEQ ID NO: 1688581 - RNA, 19 nt, Homo sapiens
  misc_RNA (1)...(19): siRNA sense strand
caaaggauucaaguucuuc

SEQ ID NO: 1688582 - RNA, 19 nt, Homo sapiens
  misc_RNA (1)...(19): siRNA sense strand
agauggcacugauccagau

SEQ ID NO: 1688583 - RNA, 19 nt, Homo sapiens
  misc_RNA (1)...(19): siRNA sense strand
uauagccguugguacaaag

SEQ ID NO: 1688584 - RNA, 19 nt, Homo sapiens
  misc_RNA (1)...(19): siRNA sense strand
auauagccguugguacaaa

SEQ ID NO: 1688585 - RNA, 19 nt, Homo sapiens
  misc_RNA (1)...(19): siRNA sense strand
agaacgcccuagugcagau

SEQ ID NO: 1688586 - RNA, 19 nt, Homo sapiens
  misc_RNA (1)...(19): siRNA sense strand
gaacuuccagaacauauuc

SEQ ID NO: 1688587 - RNA, 19 nt, Homo sapiens
  misc_RNA (1)...(19): siRNA sense strand
gcaucacgcucucgaagca

SEQ ID NO: 1688588 - RNA, 19 nt, Homo sapiens
  misc_RNA (1)...(19): siRNA sense strand
ucaaaggauucaaguucuu

SEQ ID NO: 1688589 - RNA, 19 nt, Homo sapiens
  misc_RNA (1)...(19): siRNA sense strand
ccaagaacuuccagaacau

SEQ ID NO: 1688590 - RNA, 19 nt, Homo sapiens
  misc_RNA (1)...(19): siRNA sense strand
gaaggagaacgcccuagug

SEQ ID NO: 1688591 - RNA, 19 nt, Homo sapiens
  misc_RNA (1)...(19): siRNA sense strand
uccaagaacuuccagaaca

SEQ ID NO: 1688592 - RNA, 19 nt, Homo sapiens
  misc_RNA (1)...(19): siRNA sense strand
caagaacuuccagaacaua

SEQ ID NO: 1688593 - RNA, 19 nt, Homo sapiens
  misc_RNA (1)...(19): siRNA sense strand
cgucaaaggauucaaguuc

SEQ ID NO: 1688594 - RNA, 19 nt, Homo sapiens
  misc_RNA (1)...(19): siRNA sense strand
ccagaaggaccgcaagaug

SEQ ID NO: 1688595 - RNA, 19 nt, Homo sapiens
  misc_RNA (1)...(19): siRNA sense strand
aagauccuguucaauaaga

SEQ ID NO: 1688596 - RNA, 19 nt, Homo sapiens
  misc_RNA (1)...(19): siRNA sense strand
gaagauccuguucaauaag

SEQ ID NO: 1688597 - RNA, 19 nt, Homo sapiens
  misc_RNA (1)...(19): siRNA sense strand
ucauugaccugcacaacca

SEQ ID NO: 1688598 - RNA, 19 nt, Homo sapiens
  misc_RNA (1)...(19): siRNA sense strand
gucaaaggauucaaguucu

SEQ ID NO: 1688599 - RNA, 19 nt, Homo sapiens
  misc_RNA (1)...(19): siRNA sense strand
ccagauauagccguuggua

SEQ ID NO: 1688600 - RNA, 19 nt, Homo sapiens
  misc_RNA (1)...(19): siRNA sense strand
gcuccaagaacuuccagaa

SEQ ID NO: 1688601 - RNA, 19 nt, Homo sapiens
  misc_RNA (1)...(19): siRNA sense strand
gauauagccguugguacaa

SEQ ID NO: 1688602 - RNA, 19 nt, Homo sapiens
  misc_RNA (1)...(19): siRNA sense strand
caaggacuacggcaacuca

SEQ ID NO: 1688603 - RNA, 19 nt, Homo sapiens
  misc_RNA (1)...(19): siRNA sense strand
agauauagccguugguaca

SEQ ID NO: 1688604 - RNA, 19 nt, Homo sapiens
  misc_RNA (1)...(19): siRNA sense strand
ggaucucaagguccuguuu

SEQ ID NO: 1688605 - RNA, 19 nt, Homo sapiens
  misc_RNA (1)...(19): siRNA sense strand
caaaggauucaaguucuuc

SEQ ID NO: 1688606 - RNA, 19 nt, Homo sapiens
  misc_RNA (1)...(19): siRNA sense strand
agauggcacugauccagau

SEQ ID NO: 1688607 - RNA, 19 nt, Homo sapiens
  misc_RNA (1)...(19): siRNA sense strand
uauagccguugguacaaag

SEQ ID NO: 1688608 - RNA, 19 nt, Homo sapiens
  misc_RNA (1)...(19): siRNA sense strand
auauagccguugguacaaa

SEQ ID NO: 1688609 - RNA, 19 nt, Homo sapiens
  misc_RNA (1)...(19): siRNA sense strand
agaacgcccuagugcagau

SEQ ID NO: 1688610 - RNA, 19 nt, Homo sapiens
  misc_RNA (1)...(19): siRNA sense strand
gaacuuccagaacauauuc

SEQ ID NO: 1688611 - RNA, 19 nt, Homo sapiens
  misc_RNA (1)...(19): siRNA sense strand
gcaucacgcucucgaagca

SEQ ID NO: 1688612 - RNA, 19 nt, Homo sapiens
  misc_RNA (1)...(19): siRNA sense strand
ucaaaggauucaaguucuu

SEQ ID NO: 1688613 - RNA, 19 nt, Homo sapiens
  misc_RNA (1)...(19): siRNA sense strand
ccaagaacuuccagaacau

SEQ ID NO: 1688614 - RNA, 19 nt, Homo sapiens
  misc_RNA (1)...(19): siRNA sense strand
gaaggagaacgcccuagug

SEQ ID NO: 1688615 - RNA, 19 nt, Homo sapiens
  misc_RNA (1)...(19): siRNA sense strand
uccaagaacuuccagaaca

SEQ ID NO: 1688616 - RNA, 19 nt, Homo sapiens
  misc_RNA (1)...(19): siRNA sense strand
caagaacuuccagaacaua

SEQ ID NO: 1688617 - RNA, 19 nt, Homo sapiens
  misc_RNA (1)...(19): siRNA sense strand
cgucaaaggauucaaguuc

SEQ ID NO: 1688618 - RNA, 19 nt, Homo sapiens
  misc_RNA (1)...(19): siRNA sense strand
ccagaaggaccgcaagaug

SEQ ID NO: 1688619 - RNA, 19 nt, Homo sapiens
  misc_RNA (1)...(19): siRNA sense strand
aagauccuguucaauaaga

SEQ ID NO: 1688620 - RNA, 19 nt, Homo sapiens
  misc_RNA (1)...(19): siRNA sense strand
gaagauccuguucaauaag

SEQ ID NO: 1688621 - RNA, 19 nt, Homo sapiens
  misc_RNA (1)...(19): siRNA sense strand
ucauugaccugcacaacca

SEQ ID NO: 1688622 - RNA, 19 nt, Homo sapiens
  misc_RNA (1)...(19): siRNA sense strand
ccagauauagccguuggua

SEQ ID NO: 1688623 - RNA, 19 nt, Homo sapiens
  misc_RNA (1)...(19): siRNA sense strand
gucaaaggauucaaguucu

SEQ ID NO: 1688624 - RNA, 19 nt, Homo sapiens
  misc_RNA (1)...(19): siRNA sense strand
gcuccaagaacuuccagaa

SEQ ID NO: 1688625 - RNA, 19 nt, Homo sapiens
  misc_RNA (1)...(19): siRNA sense strand
gauauagccguugguacaa

SEQ ID NO: 1688626 - RNA, 19 nt, Homo sapiens
  misc_RNA (1)...(19): siRNA sense strand
caaggacuacggcaacuca

SEQ ID NO: 1688627 - RNA, 19 nt, Homo sapiens
  misc_RNA (1)...(19): siRNA sense strand
agauauagccguugguaca

SEQ ID NO: 1688628 - RNA, 19 nt, Homo sapiens
  misc_RNA (1)...(19): siRNA sense strand
cggcauugucccagauaua

SEQ ID NO: 1688629 - RNA, 19 nt, Homo sapiens
  misc_RNA (1)...(19): siRNA sense strand
ggaucucaagguccuguuu

SEQ ID NO: 1688630 - RNA, 19 nt, Homo sapiens
  misc_RNA (1)...(19): siRNA sense strand
caaaggauucaaguucuuc

SEQ ID NO: 1688631 - RNA, 19 nt, Homo sapiens
  misc_RNA (1)...(19): siRNA sense strand
agauggcacugauccagau

SEQ ID NO: 1688632 - RNA, 19 nt, Homo sapiens
  misc_RNA (1)...(19): siRNA sense strand
ggcauugucccagauauag

SEQ ID NO: 1688633 - RNA, 19 nt, Homo sapiens
  misc_RNA (1)...(19): siRNA sense strand
uauagccguugguacaaag

SEQ ID NO: 1688634 - RNA, 19 nt, Homo sapiens
  misc_RNA (1)...(19): siRNA sense strand
auauagccguugguacaaa

SEQ ID NO: 1688635 - RNA, 19 nt, Homo sapiens
  misc_RNA (1)...(19): siRNA sense strand
gacggcauugucccagaua

SEQ ID NO: 1688636 - RNA, 19 nt, Homo sapiens
  misc_RNA (1)...(19): siRNA sense strand
agaacgcccuagugcagau

SEQ ID NO: 1688637 - RNA, 19 nt, Homo sapiens
  misc_RNA (1)...(19): siRNA sense strand
gaaaguacgucgcuucuga

SEQ ID NO: 1688638 - RNA, 19 nt, Homo sapiens
  misc_RNA (1)...(19): siRNA sense strand
gcaacgaucucucaaaugu

SEQ ID NO: 1688639 - RNA, 19 nt, Homo sapiens
  misc_RNA (1)...(19): siRNA sense strand
ucaauaagcucgucuccua

SEQ ID NO: 1688640 - RNA, 19 nt, Homo sapiens
  misc_RNA (1)...(19): siRNA sense strand
gcauaaagguaggaaagua

SEQ ID NO: 1688641 - RNA, 19 nt, Homo sapiens
  misc_RNA (1)...(19): siRNA sense strand
acaaauggcuucagauguu

SEQ ID NO: 1688642 - RNA, 19 nt, Homo sapiens
  misc_RNA (1)...(19): siRNA sense strand
gaucagagccgagaacaaa

SEQ ID NO: 1688643 - RNA, 19 nt, Homo sapiens
  misc_RNA (1)...(19): siRNA sense strand
gaacaaauggcuucagaug

SEQ ID NO: 1688644 - RNA, 19 nt, Homo sapiens
  misc_RNA (1)...(19): siRNA sense strand
gagaacaaauggcuucaga

SEQ ID NO: 1688645 - RNA, 19 nt, Homo sapiens
  misc_RNA (1)...(19): siRNA sense strand
ucaaagaguugggcauaaa

SEQ ID NO: 1688646 - RNA, 19 nt, Homo sapiens
  misc_RNA (1)...(19): siRNA sense strand
gccgagagcugcugcuuug

SEQ ID NO: 1688647 - RNA, 19 nt, Homo sapiens
  misc_RNA (1)...(19): siRNA sense strand
ugaggaacaucacaaagaa

SEQ ID NO: 1688648 - RNA, 19 nt, Homo sapiens
  misc_RNA (1)...(19): siRNA sense strand
ccucccagcucuuaccuua

SEQ ID NO: 1688649 - RNA, 19 nt, Homo sapiens
  misc_RNA (1)...(19): siRNA sense strand
gcucuuaccuuaccaucga

SEQ ID NO: 1688650 - RNA, 19 nt, Homo sapiens
  misc_RNA (1)...(19): siRNA sense strand
ccaagcgccucaagacaaa

SEQ ID NO: 1688651 - RNA, 19 nt, Homo sapiens
  misc_RNA (1)...(19): siRNA sense strand
ggacuacuuugcaugugaa

SEQ ID NO: 1688652 - RNA, 19 nt, Homo sapiens
  misc_RNA (1)...(19): siRNA sense strand
uuuaccaccugcugaauua

SEQ ID NO: 1688653 - RNA, 19 nt, Homo sapiens
  misc_RNA (1)...(19): siRNA sense strand
cagcagcccuggagacuca

SEQ ID NO: 1688654 - RNA, 19 nt, Homo sapiens
  misc_RNA (1)...(19): siRNA sense strand
caagacaaauugcuauaac

SEQ ID NO: 1688655 - RNA, 19 nt, Homo sapiens
  misc_RNA (1)...(19): siRNA sense strand
gaaggacuacuuugcaugu

SEQ ID NO: 1688656 - RNA, 19 nt, Homo sapiens
  misc_RNA (1)...(19): siRNA sense strand
guaccaugcucuggagaaa

SEQ ID NO: 1688657 - RNA, 19 nt, Homo sapiens
  misc_RNA (1)...(19): siRNA sense strand
ggaguguaauccagugaug

SEQ ID NO: 1688658 - RNA, 19 nt, Homo sapiens
  misc_RNA (1)...(19): siRNA sense strand
caaauggcuucagauguug

SEQ ID NO: 1688659 - RNA, 19 nt, Homo sapiens
  misc_RNA (1)...(19): siRNA sense strand
gggaaggaguuuggaauag

SEQ ID NO: 1688660 - RNA, 19 nt, Homo sapiens
  misc_RNA (1)...(19): siRNA sense strand
ggaaggaguuuggaauagg

SEQ ID NO: 1688661 - RNA, 19 nt, Homo sapiens
  misc_RNA (1)...(19): siRNA sense strand
ucagccagcacuuuaauuu

SEQ ID NO: 1688662 - RNA, 19 nt, Homo sapiens
  misc_RNA (1)...(19): siRNA sense strand
aacgaucucucaaauguga

SEQ ID NO: 1688663 - RNA, 19 nt, Homo sapiens
  misc_RNA (1)...(19): siRNA sense strand
gacgauggcuaucagucuu

SEQ ID NO: 1688664 - RNA, 19 nt, Homo sapiens
  misc_RNA (1)...(19): siRNA sense strand
acacggggcuugaauauga

SEQ ID NO: 1688665 - RNA, 19 nt, Homo sapiens
  misc_RNA (1)...(19): siRNA sense strand
acgcacagcugacgacuca

SEQ ID NO: 1688666 - RNA, 19 nt, Homo sapiens
  misc_RNA (1)...(19): siRNA sense strand
ccuggaagauggcuguuug

SEQ ID NO: 1688667 - RNA, 19 nt, Homo sapiens
  misc_RNA (1)...(19): siRNA sense strand
uuacauguaugaugacgau

SEQ ID NO: 1688668 - RNA, 19 nt, Homo sapiens
  misc_RNA (1)...(19): siRNA sense strand
ccauuugacuuggugauug

SEQ ID NO: 1688669 - RNA, 19 nt, Homo sapiens
  misc_RNA (1)...(19): siRNA sense strand
aaccaggacucguucagaa

SEQ ID NO: 1688670 - RNA, 19 nt, Homo sapiens
  misc_RNA (1)...(19): siRNA sense strand
ggagguguccagucugcua

SEQ ID NO: 1688671 - RNA, 19 nt, Homo sapiens
  misc_RNA (1)...(19): siRNA sense strand
ggagacaguucagaguauc

SEQ ID NO: 1688672 - RNA, 19 nt, Homo sapiens
  misc_RNA (1)...(19): siRNA sense strand
gcaacagcaucggcaggaa

SEQ ID NO: 1688673 - RNA, 19 nt, Homo sapiens
  misc_RNA (1)...(19): siRNA sense strand
cgaaauaacaacagugucu

SEQ ID NO: 1688674 - RNA, 19 nt, Homo sapiens
  misc_RNA (1)...(19): siRNA sense strand
caacaagagcagccuggaa

SEQ ID NO: 1688675 - RNA, 19 nt, Homo sapiens
  misc_RNA (1)...(19): siRNA sense strand
gcuguccgaacucgaaaua

SEQ ID NO: 1688676 - RNA, 19 nt, Homo sapiens
  misc_RNA (1)...(19): siRNA sense strand
ggagaucagaggccgaaga

SEQ ID NO: 1688677 - RNA, 19 nt, Homo sapiens
  misc_RNA (1)...(19): siRNA sense strand
cacgguuccuggaguguaa

SEQ ID NO: 1688678 - RNA, 19 nt, Homo sapiens
  misc_RNA (1)...(19): siRNA sense strand
cgaguccugucauuguuug

SEQ ID NO: 1688679 - RNA, 19 nt, Homo sapiens
  misc_RNA (1)...(19): siRNA sense strand
uggagacaguucagaguau

SEQ ID NO: 1688680 - RNA, 19 nt, Homo sapiens
  misc_RNA (1)...(19): siRNA sense strand
ggaagauggcuguuugucu

SEQ ID NO: 1688681 - RNA, 19 nt, Homo sapiens
  misc_RNA (1)...(19): siRNA sense strand
gagaucagaggccgaagau

SEQ ID NO: 1688682 - RNA, 19 nt, Homo sapiens
  misc_RNA (1)...(19): siRNA sense strand
gaggaacaucacaaagaaa

SEQ ID NO: 1688683 - RNA, 19 nt, Homo sapiens
  misc_RNA (1)...(19): siRNA sense strand
uguccagucugcuaagcua

SEQ ID NO: 1688684 - RNA, 19 nt, Homo sapiens
  misc_RNA (1)...(19): siRNA sense strand
agagggagguguccagucu

SEQ ID NO: 1688685 - RNA, 19 nt, Homo sapiens
  misc_RNA (1)...(19): siRNA sense strand
aagcucgucuccuaucgaa

SEQ ID NO: 1688686 - RNA, 19 nt, Homo sapiens
  misc_RNA (1)...(19): siRNA sense strand
ccucaaagaguugggcaua

SEQ ID NO: 1688687 - RNA, 19 nt, Homo sapiens
  misc_RNA (1)...(19): siRNA sense strand
caccaggcaucucaaugga

SEQ ID NO: 1688688 - RNA, 19 nt, Homo sapiens
  misc_RNA (1)...(19): siRNA sense strand
caguggagauggagacagu

SEQ ID NO: 1688689 - RNA, 19 nt, Homo sapiens
  misc_RNA (1)...(19): siRNA sense strand
cuacuuugcaugugaauag

SEQ ID NO: 1688690 - RNA, 19 nt, Homo sapiens
  misc_RNA (1)...(19): siRNA sense strand
ccaugaagguuggcgacaa

SEQ ID NO: 1688691 - RNA, 19 nt, Homo sapiens
  misc_RNA (1)...(19): siRNA sense strand
gggcauaaagguaggaaag

SEQ ID NO: 1688692 - RNA, 19 nt, Homo sapiens
  misc_RNA (1)...(19): siRNA sense strand
ccauucgaguccugucauu

SEQ ID NO: 1688693 - RNA, 19 nt, Homo sapiens
  misc_RNA (1)...(19): siRNA sense strand
cccuggagcuguuacaugu

SEQ ID NO: 1688694 - RNA, 19 nt, Homo sapiens
  misc_RNA (1)...(19): siRNA sense strand
gcacccaagcgccucaaga

SEQ ID NO: 1688695 - RNA, 19 nt, Homo sapiens
  misc_RNA (1)...(19): siRNA sense strand
ugggaaggaguuuggaaua

SEQ ID NO: 1688696 - RNA, 19 nt, Homo sapiens
  misc_RNA (1)...(19): siRNA sense strand
cgacaagagggacaucuca

SEQ ID NO: 1688697 - RNA, 19 nt, Homo sapiens
  misc_RNA (1)...(19): siRNA sense strand
caugaagguuggcgacaag

SEQ ID NO: 1688698 - RNA, 19 nt, Homo sapiens
  misc_RNA (1)...(19): siRNA sense strand
augcaacgaucucucaaau

SEQ ID NO: 1688699 - RNA, 19 nt, Homo sapiens
  misc_RNA (1)...(19): siRNA sense strand
gaauaucaaauacgugaac

SEQ ID NO: 1688700 - RNA, 19 nt, Homo sapiens
  misc_RNA (1)...(19): siRNA sense strand
ccaugguggugucuuggaa

SEQ ID NO: 1688701 - RNA, 19 nt, Homo sapiens
  misc_RNA (1)...(19): siRNA sense strand
uaauuuggccaccuucaau

SEQ ID NO: 1688702 - RNA, 19 nt, Homo sapiens
  misc_RNA (1)...(19): siRNA sense strand
gauguuugagaauguugua

SEQ ID NO: 1688703 - RNA, 19 nt, Homo sapiens
  misc_RNA (1)...(19): siRNA sense strand
ggcagacaguggagaugga

SEQ ID NO: 1688704 - RNA, 19 nt, Homo sapiens
  misc_RNA (1)...(19): siRNA sense strand
gaagaucagagccgagaac

SEQ ID NO: 1688705 - RNA, 19 nt, Homo sapiens
  misc_RNA (1)...(19): siRNA sense strand
gcuauaacaacggcaaaga

SEQ ID NO: 1688706 - RNA, 19 nt, Homo sapiens
  misc_RNA (1)...(19): siRNA sense strand
guuuggcgauggcaaguuc

SEQ ID NO: 1688707 - RNA, 19 nt, Homo sapiens
  misc_RNA (1)...(19): siRNA sense strand
gagaauguuguagccauga

SEQ ID NO: 1688708 - RNA, 19 nt, Homo sapiens
  misc_RNA (1)...(19): siRNA sense strand
gaacucgaaauaacaacag

SEQ ID NO: 1688709 - RNA, 19 nt, Homo sapiens
  misc_RNA (1)...(19): siRNA sense strand
agaucaagcucgcgacucu

SEQ ID NO: 1688710 - RNA, 19 nt, Homo sapiens
  misc_RNA (1)...(19): siRNA sense strand
gagguguccagucugcuaa

SEQ ID NO: 1688711 - RNA, 19 nt, Homo sapiens
  misc_RNA (1)...(19): siRNA sense strand
agaguugggcauaaaggua

SEQ ID NO: 1688712 - RNA, 19 nt, Homo sapiens
  misc_RNA (1)...(19): siRNA sense strand
ggaaagaucaagggcuucu

SEQ ID NO: 1688713 - RNA, 19 nt, Homo sapiens
  misc_RNA (1)...(19): siRNA sense strand
gcuaccuaguccucaaaga

SEQ ID NO: 1688714 - RNA, 19 nt, Homo sapiens
  misc_RNA (1)...(19): siRNA sense strand
cucaaagaguugggcauaa

SEQ ID NO: 1688715 - RNA, 19 nt, Homo sapiens
  misc_RNA (1)...(19): siRNA sense strand
ggaggcagacaguggagau

SEQ ID NO: 1688716 - RNA, 19 nt, Homo sapiens
  misc_RNA (1)...(19): siRNA sense strand
aggacuacuuugcauguga

SEQ ID NO: 1688717 - RNA, 19 nt, Homo sapiens
  misc_RNA (1)...(19): siRNA sense strand
agaauguuguagccaugaa

SEQ ID NO: 1688718 - RNA, 19 nt, Homo sapiens
  misc_RNA (1)...(19): siRNA sense strand
uguccgaacucgaaauaac

SEQ ID NO: 1688719 - RNA, 19 nt, Homo sapiens
  misc_RNA (1)...(19): siRNA sense strand
caaagaguugggcauaaag

SEQ ID NO: 1688720 - RNA, 19 nt, Homo sapiens
  misc_RNA (1)...(19): siRNA sense strand
ucagagccgagaacaaaug

SEQ ID NO: 1688721 - RNA, 19 nt, Homo sapiens
  misc_RNA (1)...(19): siRNA sense strand
agccagcacuuuaauuugg

SEQ ID NO: 1688722 - RNA, 19 nt, Homo sapiens
  misc_RNA (1)...(19): siRNA sense strand
gaugggaaggaguuuggaa

SEQ ID NO: 1688723 - RNA, 19 nt, Homo sapiens
  misc_RNA (1)...(19): siRNA sense strand
cgacacagaggacacacau

SEQ ID NO: 1688724 - RNA, 19 nt, Homo sapiens
  misc_RNA (1)...(19): siRNA sense strand
caauaagcucgucuccuau

SEQ ID NO: 1688725 - RNA, 19 nt, Homo sapiens
  misc_RNA (1)...(19): siRNA sense strand
cagccagcacuuuaauuug

SEQ ID NO: 1688726 - RNA, 19 nt, Homo sapiens
  misc_RNA (1)...(19): siRNA sense strand
gauggagacaguucagagu

SEQ ID NO: 1688727 - RNA, 19 nt, Homo sapiens
  misc_RNA (1)...(19): siRNA sense strand
gcagguggaggcagacagu

SEQ ID NO: 1688728 - RNA, 19 nt, Homo sapiens
  misc_RNA (1)...(19): siRNA sense strand
ccagcuguccgaacucgaa

SEQ ID NO: 1688729 - RNA, 19 nt, Homo sapiens
  misc_RNA (1)...(19): siRNA sense strand
cgggaaaccaggacucguu

SEQ ID NO: 1688730 - RNA, 19 nt, Homo sapiens
  misc_RNA (1)...(19): siRNA sense strand
cccaagcgccucaagacaa

SEQ ID NO: 1688731 - RNA, 19 nt, Homo sapiens
  misc_RNA (1)...(19): siRNA sense strand
caagagcagccuggaagau

SEQ ID NO: 1688732 - RNA, 19 nt, Homo sapiens
  misc_RNA (1)...(19): siRNA sense strand
ugaacgacgugaggaacau

SEQ ID NO: 1688733 - RNA, 19 nt, Homo sapiens
  misc_RNA (1)...(19): siRNA sense strand
ggaauaucaaauacgugaa

SEQ ID NO: 1688734 - RNA, 19 nt, Homo sapiens
  misc_RNA (1)...(19): siRNA sense strand
caagcuguacccugccauu

SEQ ID NO: 1688735 - RNA, 19 nt, Homo sapiens
  misc_RNA (1)...(19): siRNA sense strand
cuggagcuguuacaugugu

SEQ ID NO: 1688736 - RNA, 19 nt, Homo sapiens
  misc_RNA (1)...(19): siRNA sense strand
gauggcuguuugucuugug

SEQ ID NO: 1688737 - RNA, 19 nt, Homo sapiens
  misc_RNA (1)...(19): siRNA sense strand
gaaaguacgucgcuucuga

SEQ ID NO: 1688738 - RNA, 19 nt, Homo sapiens
  misc_RNA (1)...(19): siRNA sense strand
gcaacgaucucucaaaugu

SEQ ID NO: 1688739 - RNA, 19 nt, Homo sapiens
  misc_RNA (1)...(19): siRNA sense strand
ucaauaagcucgucuccua

SEQ ID NO: 1688740 - RNA, 19 nt, Homo sapiens
  misc_RNA (1)...(19): siRNA sense strand
gcauaaagguaggaaagua

SEQ ID NO: 1688741 - RNA, 19 nt, Homo sapiens
  misc_RNA (1)...(19): siRNA sense strand
acaaauggcuucagauguu

SEQ ID NO: 1688742 - RNA, 19 nt, Homo sapiens
  misc_RNA (1)...(19): siRNA sense strand
gaucagagccgagaacaaa

SEQ ID NO: 1688743 - RNA, 19 nt, Homo sapiens
  misc_RNA (1)...(19): siRNA sense strand
gaacaaauggcuucagaug

SEQ ID NO: 1688744 - RNA, 19 nt, Homo sapiens
  misc_RNA (1)...(19): siRNA sense strand
gagaacaaauggcuucaga

SEQ ID NO: 1688745 - RNA, 19 nt, Homo sapiens
  misc_RNA (1)...(19): siRNA sense strand
ucaaagaguugggcauaaa

SEQ ID NO: 1688746 - RNA, 19 nt, Homo sapiens
  misc_RNA (1)...(19): siRNA sense strand
gccgagagcugcugcuuug

SEQ ID NO: 1688747 - RNA, 19 nt, Homo sapiens
  misc_RNA (1)...(19): siRNA sense strand
ugaggaacaucacaaagaa

SEQ ID NO: 1688748 - RNA, 19 nt, Homo sapiens
  misc_RNA (1)...(19): siRNA sense strand
ccucccagcucuuaccuua

SEQ ID NO: 1688749 - RNA, 19 nt, Homo sapiens
  misc_RNA (1)...(19): siRNA sense strand
gcucuuaccuuaccaucga

SEQ ID NO: 1688750 - RNA, 19 nt, Homo sapiens
  misc_RNA (1)...(19): siRNA sense strand
ccaagcgccucaagacaaa

SEQ ID NO: 1688751 - RNA, 19 nt, Homo sapiens
  misc_RNA (1)...(19): siRNA sense strand
ggacuacuuugcaugugaa

SEQ ID NO: 1688752 - RNA, 19 nt, Homo sapiens
  misc_RNA (1)...(19): siRNA sense strand
uuuaccaccugcugaauua

SEQ ID NO: 1688753 - RNA, 19 nt, Homo sapiens
  misc_RNA (1)...(19): siRNA sense strand
cagcagcccuggagacuca

SEQ ID NO: 1688754 - RNA, 19 nt, Homo sapiens
  misc_RNA (1)...(19): siRNA sense strand
caagacaaauugcuauaac

SEQ ID NO: 1688755 - RNA, 19 nt, Homo sapiens
  misc_RNA (1)...(19): siRNA sense strand
gaaggacuacuuugcaugu

SEQ ID NO: 1688756 - RNA, 19 nt, Homo sapiens
  misc_RNA (1)...(19): siRNA sense strand
guaccaugcucuggagaaa

SEQ ID NO: 1688757 - RNA, 19 nt, Homo sapiens
  misc_RNA (1)...(19): siRNA sense strand
ggaguguaauccagugaug

SEQ ID NO: 1688758 - RNA, 19 nt, Homo sapiens
  misc_RNA (1)...(19): siRNA sense strand
caaauggcuucagauguug

SEQ ID NO: 1688759 - RNA, 19 nt, Homo sapiens
  misc_RNA (1)...(19): siRNA sense strand
gggaaggaguuuggaauag

SEQ ID NO: 1688760 - RNA, 19 nt, Homo sapiens
  misc_RNA (1)...(19): siRNA sense strand
ggaaggaguuuggaauagg

SEQ ID NO: 1688761 - RNA, 19 nt, Homo sapiens
  misc_RNA (1)...(19): siRNA sense strand
ucagccagcacuuuaauuu

SEQ ID NO: 1688762 - RNA, 19 nt, Homo sapiens
  misc_RNA (1)...(19): siRNA sense strand
aacgaucucucaaauguga

SEQ ID NO: 1688763 - RNA, 19 nt, Homo sapiens
  misc_RNA (1)...(19): siRNA sense strand
gacgauggcuaucagucuu

SEQ ID NO: 1688764 - RNA, 19 nt, Homo sapiens
  misc_RNA (1)...(19): siRNA sense strand
acacggggcuugaauauga

SEQ ID NO: 1688765 - RNA, 19 nt, Homo sapiens
  misc_RNA (1)...(19): siRNA sense strand
acgcacagcugacgacuca

SEQ ID NO: 1688766 - RNA, 19 nt, Homo sapiens
  misc_RNA (1)...(19): siRNA sense strand
ccuggaagauggcuguuug

SEQ ID NO: 1688767 - RNA, 19 nt, Homo sapiens
  misc_RNA (1)...(19): siRNA sense strand
uuacauguaugaugacgau

SEQ ID NO: 1688768 - RNA, 19 nt, Homo sapiens
  misc_RNA (1)...(19): siRNA sense strand
ccauuugacuuggugauug

SEQ ID NO: 1688769 - RNA, 19 nt, Homo sapiens
  misc_RNA (1)...(19): siRNA sense strand
aaccaggacucguucagaa

SEQ ID NO: 1688770 - RNA, 19 nt, Homo sapiens
  misc_RNA (1)...(19): siRNA sense strand
ggagguguccagucugcua

SEQ ID NO: 1688771 - RNA, 19 nt, Homo sapiens
  misc_RNA (1)...(19): siRNA sense strand
ggagacaguucagaguauc

SEQ ID NO: 1688772 - RNA, 19 nt, Homo sapiens
  misc_RNA (1)...(19): siRNA sense strand
gcaacagcaucggcaggaa

SEQ ID NO: 1688773 - RNA, 19 nt, Homo sapiens
  misc_RNA (1)...(19): siRNA sense strand
cgaaauaacaacagugucu

SEQ ID NO: 1688774 - RNA, 19 nt, Homo sapiens
  misc_RNA (1)...(19): siRNA sense strand
caacaagagcagccuggaa

SEQ ID NO: 1688775 - RNA, 19 nt, Homo sapiens
  misc_RNA (1)...(19): siRNA sense strand
gcuguccgaacucgaaaua

SEQ ID NO: 1688776 - RNA, 19 nt, Homo sapiens
  misc_RNA (1)...(19): siRNA sense strand
ggagaucagaggccgaaga

SEQ ID NO: 1688777 - RNA, 19 nt, Homo sapiens
  misc_RNA (1)...(19): siRNA sense strand
cacgguuccuggaguguaa

SEQ ID NO: 1688778 - RNA, 19 nt, Homo sapiens
  misc_RNA (1)...(19): siRNA sense strand
cgaguccugucauuguuug

SEQ ID NO: 1688779 - RNA, 19 nt, Homo sapiens
  misc_RNA (1)...(19): siRNA sense strand
uggagacaguucagaguau

SEQ ID NO: 1688780 - RNA, 19 nt, Homo sapiens
  misc_RNA (1)...(19): siRNA sense strand
ggaagauggcuguuugucu

SEQ ID NO: 1688781 - RNA, 19 nt, Homo sapiens
  misc_RNA (1)...(19): siRNA sense strand
gagaucagaggccgaagau

SEQ ID NO: 1688782 - RNA, 19 nt, Homo sapiens
  misc_RNA (1)...(19): siRNA sense strand
gaggaacaucacaaagaaa

SEQ ID NO: 1688783 - RNA, 19 nt, Homo sapiens
  misc_RNA (1)...(19): siRNA sense strand
uguccagucugcuaagcua

SEQ ID NO: 1688784 - RNA, 19 nt, Homo sapiens
  misc_RNA (1)...(19): siRNA sense strand
agagggagguguccagucu

SEQ ID NO: 1688785 - RNA, 19 nt, Homo sapiens
  misc_RNA (1)...(19): siRNA sense strand
aagcucgucuccuaucgaa

SEQ ID NO: 1688786 - RNA, 19 nt, Homo sapiens
  misc_RNA (1)...(19): siRNA sense strand
ccucaaagaguugggcaua

SEQ ID NO: 1688787 - RNA, 19 nt, Homo sapiens
  misc_RNA (1)...(19): siRNA sense strand
caccaggcaucucaaugga

SEQ ID NO: 1688788 - RNA, 19 nt, Homo sapiens
  misc_RNA (1)...(19): siRNA sense strand
caguggagauggagacagu

SEQ ID NO: 1688789 - RNA, 19 nt, Homo sapiens
  misc_RNA (1)...(19): siRNA sense strand
cuacuuugcaugugaauag

SEQ ID NO: 1688790 - RNA, 19 nt, Homo sapiens
  misc_RNA (1)...(19): siRNA sense strand
ccaugaagguuggcgacaa

SEQ ID NO: 1688791 - RNA, 19 nt, Homo sapiens
  misc_RNA (1)...(19): siRNA sense strand
gggcauaaagguaggaaag

SEQ ID NO: 1688792 - RNA, 19 nt, Homo sapiens
  misc_RNA (1)...(19): siRNA sense strand
ccauucgaguccugucauu

SEQ ID NO: 1688793 - RNA, 19 nt, Homo sapiens
  misc_RNA (1)...(19): siRNA sense strand
cccuggagcuguuacaugu

SEQ ID NO: 1688794 - RNA, 19 nt, Homo sapiens
  misc_RNA (1)...(19): siRNA sense strand
gcacccaagcgccucaaga

SEQ ID NO: 1688795 - RNA, 19 nt, Homo sapiens
  misc_RNA (1)...(19): siRNA sense strand
ugggaaggaguuuggaaua

SEQ ID NO: 1688796 - RNA, 19 nt, Homo sapiens
  misc_RNA (1)...(19): siRNA sense strand
cgacaagagggacaucuca

SEQ ID NO: 1688797 - RNA, 19 nt, Homo sapiens
  misc_RNA (1)...(19): siRNA sense strand
caugaagguuggcgacaag

SEQ ID NO: 1688798 - RNA, 19 nt, Homo sapiens
  misc_RNA (1)...(19): siRNA sense strand
augcaacgaucucucaaau

SEQ ID NO: 1688799 - RNA, 19 nt, Homo sapiens
  misc_RNA (1)...(19): siRNA sense strand
gaauaucaaauacgugaac

SEQ ID NO: 1688800 - RNA, 19 nt, Homo sapiens
  misc_RNA (1)...(19): siRNA sense strand
ccaugguggugucuuggaa

SEQ ID NO: 1688801 - RNA, 19 nt, Homo sapiens
  misc_RNA (1)...(19): siRNA sense strand
uaauuuggccaccuucaau

SEQ ID NO: 1688802 - RNA, 19 nt, Homo sapiens
  misc_RNA (1)...(19): siRNA sense strand
gauguuugagaauguugua

SEQ ID NO: 1688803 - RNA, 19 nt, Homo sapiens
  misc_RNA (1)...(19): siRNA sense strand
ggcagacaguggagaugga

SEQ ID NO: 1688804 - RNA, 19 nt, Homo sapiens
  misc_RNA (1)...(19): siRNA sense strand
gaagaucagagccgagaac

SEQ ID NO: 1688805 - RNA, 19 nt, Homo sapiens
  misc_RNA (1)...(19): siRNA sense strand
gcuauaacaacggcaaaga

SEQ ID NO: 1688806 - RNA, 19 nt, Homo sapiens
  misc_RNA (1)...(19): siRNA sense strand
guuuggcgauggcaaguuc

SEQ ID NO: 1688807 - RNA, 19 nt, Homo sapiens
  misc_RNA (1)...(19): siRNA sense strand
gagaauguuguagccauga

SEQ ID NO: 1688808 - RNA, 19 nt, Homo sapiens
  misc_RNA (1)...(19): siRNA sense strand
gaacucgaaauaacaacag

SEQ ID NO: 1688809 - RNA, 19 nt, Homo sapiens
  misc_RNA (1)...(19): siRNA sense strand
agaucaagcucgcgacucu

SEQ ID NO: 1688810 - RNA, 19 nt, Homo sapiens
  misc_RNA (1)...(19): siRNA sense strand
gagguguccagucugcuaa

SEQ ID NO: 1688811 - RNA, 19 nt, Homo sapiens
  misc_RNA (1)...(19): siRNA sense strand
agaguugggcauaaaggua

SEQ ID NO: 1688812 - RNA, 19 nt, Homo sapiens
  misc_RNA (1)...(19): siRNA sense strand
ggaaagaucaagggcuucu

SEQ ID NO: 1688813 - RNA, 19 nt, Homo sapiens
  misc_RNA (1)...(19): siRNA sense strand
gcuaccuaguccucaaaga

SEQ ID NO: 1688814 - RNA, 19 nt, Homo sapiens
  misc_RNA (1)...(19): siRNA sense strand
cucaaagaguugggcauaa

SEQ ID NO: 1688815 - RNA, 19 nt, Homo sapiens
  misc_RNA (1)...(19): siRNA sense strand
ggaggcagacaguggagau

SEQ ID NO: 1688816 - RNA, 19 nt, Homo sapiens
  misc_RNA (1)...(19): siRNA sense strand
aggacuacuuugcauguga

SEQ ID NO: 1688817 - RNA, 19 nt, Homo sapiens
  misc_RNA (1)...(19): siRNA sense strand
agaauguuguagccaugaa

SEQ ID NO: 1688818 - RNA, 19 nt, Homo sapiens
  misc_RNA (1)...(19): siRNA sense strand
uguccgaacucgaaauaac

SEQ ID NO: 1688819 - RNA, 19 nt, Homo sapiens
  misc_RNA (1)...(19): siRNA sense strand
caaagaguugggcauaaag

SEQ ID NO: 1688820 - RNA, 19 nt, Homo sapiens
  misc_RNA (1)...(19): siRNA sense strand
ucagagccgagaacaaaug

SEQ ID NO: 1688821 - RNA, 19 nt, Homo sapiens
  misc_RNA (1)...(19): siRNA sense strand
agccagcacuuuaauuugg

SEQ ID NO: 1688822 - RNA, 19 nt, Homo sapiens
  misc_RNA (1)...(19): siRNA sense strand
gaugggaaggaguuuggaa

SEQ ID NO: 1688823 - RNA, 19 nt, Homo sapiens
  misc_RNA (1)...(19): siRNA sense strand
cgacacagaggacacacau

SEQ ID NO: 1688824 - RNA, 19 nt, Homo sapiens
  misc_RNA (1)...(19): siRNA sense strand
caauaagcucgucuccuau

SEQ ID NO: 1688825 - RNA, 19 nt, Homo sapiens
  misc_RNA (1)...(19): siRNA sense strand
cagccagcacuuuaauuug

SEQ ID NO: 1688826 - RNA, 19 nt, Homo sapiens
  misc_RNA (1)...(19): siRNA sense strand
gauggagacaguucagagu

SEQ ID NO: 1688827 - RNA, 19 nt, Homo sapiens
  misc_RNA (1)...(19): siRNA sense strand
gcagguggaggcagacagu

SEQ ID NO: 1688828 - RNA, 19 nt, Homo sapiens
  misc_RNA (1)...(19): siRNA sense strand
ccagcuguccgaacucgaa

SEQ ID NO: 1688829 - RNA, 19 nt, Homo sapiens
  misc_RNA (1)...(19): siRNA sense strand
cgggaaaccaggacucguu

SEQ ID NO: 1688830 - RNA, 19 nt, Homo sapiens
  misc_RNA (1)...(19): siRNA sense strand
cccaagcgccucaagacaa

SEQ ID NO: 1688831 - RNA, 19 nt, Homo sapiens
  misc_RNA (1)...(19): siRNA sense strand
caagagcagccuggaagau

SEQ ID NO: 1688832 - RNA, 19 nt, Homo sapiens
  misc_RNA (1)...(19): siRNA sense strand
ugaacgacgugaggaacau

SEQ ID NO: 1688833 - RNA, 19 nt, Homo sapiens
  misc_RNA (1)...(19): siRNA sense strand
ggaauaucaaauacgugaa

SEQ ID NO: 1688834 - RNA, 19 nt, Homo sapiens
  misc_RNA (1)...(19): siRNA sense strand
caagcuguacccugccauu

SEQ ID NO: 1688835 - RNA, 19 nt, Homo sapiens
  misc_RNA (1)...(19): siRNA sense strand
cuggagcuguuacaugugu

SEQ ID NO: 1688836 - RNA, 19 nt, Homo sapiens
  misc_RNA (1)...(19): siRNA sense strand
gauggcuguuugucuugug

SEQ ID NO: 1688837 - RNA, 19 nt, Homo sapiens
  misc_RNA (1)...(19): siRNA sense strand
gaaaguacgucgcuucuga

SEQ ID NO: 1688838 - RNA, 19 nt, Homo sapiens
  misc_RNA (1)...(19): siRNA sense strand
gcaacgaucucucaaaugu

SEQ ID NO: 1688839 - RNA, 19 nt, Homo sapiens
  misc_RNA (1)...(19): siRNA sense strand
ucaauaagcucgucuccua

SEQ ID NO: 1688840 - RNA, 19 nt, Homo sapiens
  misc_RNA (1)...(19): siRNA sense strand
gcauaaagguaggaaagua

SEQ ID NO: 1688841 - RNA, 19 nt, Homo sapiens
  misc_RNA (1)...(19): siRNA sense strand
acaaauggcuucagauguu

SEQ ID NO: 1688842 - RNA, 19 nt, Homo sapiens
  misc_RNA (1)...(19): siRNA sense strand
gaucagagccgagaacaaa

SEQ ID NO: 1688843 - RNA, 19 nt, Homo sapiens
  misc_RNA (1)...(19): siRNA sense strand
gaacaaauggcuucagaug

SEQ ID NO: 1688844 - RNA, 19 nt, Homo sapiens
  misc_RNA (1)...(19): siRNA sense strand
gagaacaaauggcuucaga

SEQ ID NO: 1688845 - RNA, 19 nt, Homo sapiens
  misc_RNA (1)...(19): siRNA sense strand
ucaaagaguugggcauaaa

SEQ ID NO: 1688846 - RNA, 19 nt, Homo sapiens
  misc_RNA (1)...(19): siRNA sense strand
gccgagagcugcugcuuug

SEQ ID NO: 1688847 - RNA, 19 nt, Homo sapiens
  misc_RNA (1)...(19): siRNA sense strand
ugaggaacaucacaaagaa

SEQ ID NO: 1688848 - RNA, 19 nt, Homo sapiens
  misc_RNA (1)...(19): siRNA sense strand
ccucccagcucuuaccuua

SEQ ID NO: 1688849 - RNA, 19 nt, Homo sapiens
  misc_RNA (1)...(19): siRNA sense strand
gcucuuaccuuaccaucga

SEQ ID NO: 1688850 - RNA, 19 nt, Homo sapiens
  misc_RNA (1)...(19): siRNA sense strand
ccaagcgccucaagacaaa

SEQ ID NO: 1688851 - RNA, 19 nt, Homo sapiens
  misc_RNA (1)...(19): siRNA sense strand
ggacuacuuugcaugugaa

SEQ ID NO: 1688852 - RNA, 19 nt, Homo sapiens
  misc_RNA (1)...(19): siRNA sense strand
uuuaccaccugcugaauua

SEQ ID NO: 1688853 - RNA, 19 nt, Homo sapiens
  misc_RNA (1)...(19): siRNA sense strand
cagcagcccuggagacuca

SEQ ID NO: 1688854 - RNA, 19 nt, Homo sapiens
  misc_RNA (1)...(19): siRNA sense strand
caagacaaauugcuauaac

SEQ ID NO: 1688855 - RNA, 19 nt, Homo sapiens
  misc_RNA (1)...(19): siRNA sense strand
gaaggacuacuuugcaugu

SEQ ID NO: 1688856 - RNA, 19 nt, Homo sapiens
  misc_RNA (1)...(19): siRNA sense strand
guaccaugcucuggagaaa

SEQ ID NO: 1688857 - RNA, 19 nt, Homo sapiens
  misc_RNA (1)...(19): siRNA sense strand
ggaguguaauccagugaug

SEQ ID NO: 1688858 - RNA, 19 nt, Homo sapiens
  misc_RNA (1)...(19): siRNA sense strand
caaauggcuucagauguug

SEQ ID NO: 1688859 - RNA, 19 nt, Homo sapiens
  misc_RNA (1)...(19): siRNA sense strand
gggaaggaguuuggaauag

SEQ ID NO: 1688860 - RNA, 19 nt, Homo sapiens
  misc_RNA (1)...(19): siRNA sense strand
ggaaggaguuuggaauagg

SEQ ID NO: 1688861 - RNA, 19 nt, Homo sapiens
  misc_RNA (1)...(19): siRNA sense strand
ucagccagcacuuuaauuu

SEQ ID NO: 1688862 - RNA, 19 nt, Homo sapiens
  misc_RNA (1)...(19): siRNA sense strand
aacgaucucucaaauguga

SEQ ID NO: 1688863 - RNA, 19 nt, Homo sapiens
  misc_RNA (1)...(19): siRNA sense strand
gacgauggcuaucagucuu

SEQ ID NO: 1688864 - RNA, 19 nt, Homo sapiens
  misc_RNA (1)...(19): siRNA sense strand
acacggggcuugaauauga

SEQ ID NO: 1688865 - RNA, 19 nt, Homo sapiens
  misc_RNA (1)...(19): siRNA sense strand
acgcacagcugacgacuca

SEQ ID NO: 1688866 - RNA, 19 nt, Homo sapiens
  misc_RNA (1)...(19): siRNA sense strand
ccuggaagauggcuguuug

SEQ ID NO: 1688867 - RNA, 19 nt, Homo sapiens
  misc_RNA (1)...(19): siRNA sense strand
uuacauguaugaugacgau

SEQ ID NO: 1688868 - RNA, 19 nt, Homo sapiens
  misc_RNA (1)...(19): siRNA sense strand
ccauuugacuuggugauug

SEQ ID NO: 1688869 - RNA, 19 nt, Homo sapiens
  misc_RNA (1)...(19): siRNA sense strand
aaccaggacucguucagaa

SEQ ID NO: 1688870 - RNA, 19 nt, Homo sapiens
  misc_RNA (1)...(19): siRNA sense strand
ggagguguccagucugcua

SEQ ID NO: 1688871 - RNA, 19 nt, Homo sapiens
  misc_RNA (1)...(19): siRNA sense strand
ggagacaguucagaguauc

SEQ ID NO: 1688872 - RNA, 19 nt, Homo sapiens
  misc_RNA (1)...(19): siRNA sense strand
gcaacagcaucggcaggaa

SEQ ID NO: 1688873 - RNA, 19 nt, Homo sapiens
  misc_RNA (1)...(19): siRNA sense strand
cgaaauaacaacagugucu

SEQ ID NO: 1688874 - RNA, 19 nt, Homo sapiens
  misc_RNA (1)...(19): siRNA sense strand
caacaagagcagccuggaa

SEQ ID NO: 1688875 - RNA, 19 nt, Homo sapiens
  misc_RNA (1)...(19): siRNA sense strand
gcuguccgaacucgaaaua

SEQ ID NO: 1688876 - RNA, 19 nt, Homo sapiens
  misc_RNA (1)...(19): siRNA sense strand
ggagaucagaggccgaaga

SEQ ID NO: 1688877 - RNA, 19 nt, Homo sapiens
  misc_RNA (1)...(19): siRNA sense strand
cacgguuccuggaguguaa

SEQ ID NO: 1688878 - RNA, 19 nt, Homo sapiens
  misc_RNA (1)...(19): siRNA sense strand
cgaguccugucauuguuug

SEQ ID NO: 1688879 - RNA, 19 nt, Homo sapiens
  misc_RNA (1)...(19): siRNA sense strand
uggagacaguucagaguau

SEQ ID NO: 1688880 - RNA, 19 nt, Homo sapiens
  misc_RNA (1)...(19): siRNA sense strand
ggaagauggcuguuugucu

SEQ ID NO: 1688881 - RNA, 19 nt, Homo sapiens
  misc_RNA (1)...(19): siRNA sense strand
gagaucagaggccgaagau

SEQ ID NO: 1688882 - RNA, 19 nt, Homo sapiens
  misc_RNA (1)...(19): siRNA sense strand
gaggaacaucacaaagaaa

SEQ ID NO: 1688883 - RNA, 19 nt, Homo sapiens
  misc_RNA (1)...(19): siRNA sense strand
uguccagucugcuaagcua

SEQ ID NO: 1688884 - RNA, 19 nt, Homo sapiens
  misc_RNA (1)...(19): siRNA sense strand
agagggagguguccagucu

SEQ ID NO: 1688885 - RNA, 19 nt, Homo sapiens
  misc_RNA (1)...(19): siRNA sense strand
aagcucgucuccuaucgaa

SEQ ID NO: 1688886 - RNA, 19 nt, Homo sapiens
  misc_RNA (1)...(19): siRNA sense strand
ccucaaagaguugggcaua

SEQ ID NO: 1688887 - RNA, 19 nt, Homo sapiens
  misc_RNA (1)...(19): siRNA sense strand
caccaggcaucucaaugga

SEQ ID NO: 1688888 - RNA, 19 nt, Homo sapiens
  misc_RNA (1)...(19): siRNA sense strand
caguggagauggagacagu

SEQ ID NO: 1688889 - RNA, 19 nt, Homo sapiens
  misc_RNA (1)...(19): siRNA sense strand
cuacuuugcaugugaauag

SEQ ID NO: 1688890 - RNA, 19 nt, Homo sapiens
  misc_RNA (1)...(19): siRNA sense strand
ccaugaagguuggcgacaa

SEQ ID NO: 1688891 - RNA, 19 nt, Homo sapiens
  misc_RNA (1)...(19): siRNA sense strand
gggcauaaagguaggaaag

SEQ ID NO: 1688892 - RNA, 19 nt, Homo sapiens
  misc_RNA (1)...(19): siRNA sense strand
ccauucgaguccugucauu

SEQ ID NO: 1688893 - RNA, 19 nt, Homo sapiens
  misc_RNA (1)...(19): siRNA sense strand
cccuggagcuguuacaugu

SEQ ID NO: 1688894 - RNA, 19 nt, Homo sapiens
  misc_RNA (1)...(19): siRNA sense strand
gcacccaagcgccucaaga

SEQ ID NO: 1688895 - RNA, 19 nt, Homo sapiens
  misc_RNA (1)...(19): siRNA sense strand
ugggaaggaguuuggaaua

SEQ ID NO: 1688896 - RNA, 19 nt, Homo sapiens
  misc_RNA (1)...(19): siRNA sense strand
cgacaagagggacaucuca

SEQ ID NO: 1688897 - RNA, 19 nt, Homo sapiens
  misc_RNA (1)...(19): siRNA sense strand
caugaagguuggcgacaag

SEQ ID NO: 1688898 - RNA, 19 nt, Homo sapiens
  misc_RNA (1)...(19): siRNA sense strand
augcaacgaucucucaaau

SEQ ID NO: 1688899 - RNA, 19 nt, Homo sapiens
  misc_RNA (1)...(19): siRNA sense strand
gaauaucaaauacgugaac

SEQ ID NO: 1688900 - RNA, 19 nt, Homo sapiens
  misc_RNA (1)...(19): siRNA sense strand
ccaugguggugucuuggaa

SEQ ID NO: 1688901 - RNA, 19 nt, Homo sapiens
  misc_RNA (1)...(19): siRNA sense strand
uaauuuggccaccuucaau

SEQ ID NO: 1688902 - RNA, 19 nt, Homo sapiens
  misc_RNA (1)...(19): siRNA sense strand
gauguuugagaauguugua

SEQ ID NO: 1688903 - RNA, 19 nt, Homo sapiens
  misc_RNA (1)...(19): siRNA sense strand
ggcagacaguggagaugga

SEQ ID NO: 1688904 - RNA, 19 nt, Homo sapiens
  misc_RNA (1)...(19): siRNA sense strand
gaagaucagagccgagaac

SEQ ID NO: 1688905 - RNA, 19 nt, Homo sapiens
  misc_RNA (1)...(19): siRNA sense strand
gcuauaacaacggcaaaga

SEQ ID NO: 1688906 - RNA, 19 nt, Homo sapiens
  misc_RNA (1)...(19): siRNA sense strand
guuuggcgauggcaaguuc

SEQ ID NO: 1688907 - RNA, 19 nt, Homo sapiens
  misc_RNA (1)...(19): siRNA sense strand
gagaauguuguagccauga

SEQ ID NO: 1688908 - RNA, 19 nt, Homo sapiens
  misc_RNA (1)...(19): siRNA sense strand
gaacucgaaauaacaacag

SEQ ID NO: 1688909 - RNA, 19 nt, Homo sapiens
  misc_RNA (1)...(19): siRNA sense strand
agaucaagcucgcgacucu

SEQ ID NO: 1688910 - RNA, 19 nt, Homo sapiens
  misc_RNA (1)...(19): siRNA sense strand
gagguguccagucugcuaa

SEQ ID NO: 1688911 - RNA, 19 nt, Homo sapiens
  misc_RNA (1)...(19): siRNA sense strand
agaguugggcauaaaggua

SEQ ID NO: 1688912 - RNA, 19 nt, Homo sapiens
  misc_RNA (1)...(19): siRNA sense strand
ggaaagaucaagggcuucu

SEQ ID NO: 1688913 - RNA, 19 nt, Homo sapiens
  misc_RNA (1)...(19): siRNA sense strand
gcuaccuaguccucaaaga

SEQ ID NO: 1688914 - RNA, 19 nt, Homo sapiens
  misc_RNA (1)...(19): siRNA sense strand
cucaaagaguugggcauaa

SEQ ID NO: 1688915 - RNA, 19 nt, Homo sapiens
  misc_RNA (1)...(19): siRNA sense strand
ggaggcagacaguggagau

SEQ ID NO: 1688916 - RNA, 19 nt, Homo sapiens
  misc_RNA (1)...(19): siRNA sense strand
aggacuacuuugcauguga

SEQ ID NO: 1688917 - RNA, 19 nt, Homo sapiens
  misc_RNA (1)...(19): siRNA sense strand
agaauguuguagccaugaa

SEQ ID NO: 1688918 - RNA, 19 nt, Homo sapiens
  misc_RNA (1)...(19): siRNA sense strand
uguccgaacucgaaauaac

SEQ ID NO: 1688919 - RNA, 19 nt, Homo sapiens
  misc_RNA (1)...(19): siRNA sense strand
caaagaguugggcauaaag

SEQ ID NO: 1688920 - RNA, 19 nt, Homo sapiens
  misc_RNA (1)...(19): siRNA sense strand
ucagagccgagaacaaaug

SEQ ID NO: 1688921 - RNA, 19 nt, Homo sapiens
  misc_RNA (1)...(19): siRNA sense strand
agccagcacuuuaauuugg

SEQ ID NO: 1688922 - RNA, 19 nt, Homo sapiens
  misc_RNA (1)...(19): siRNA sense strand
gaugggaaggaguuuggaa

SEQ ID NO: 1688923 - RNA, 19 nt, Homo sapiens
  misc_RNA (1)...(19): siRNA sense strand
cgacacagaggacacacau

SEQ ID NO: 1688924 - RNA, 19 nt, Homo sapiens
  misc_RNA (1)...(19): siRNA sense strand
caauaagcucgucuccuau

SEQ ID NO: 1688925 - RNA, 19 nt, Homo sapiens
  misc_RNA (1)...(19): siRNA sense strand
cagccagcacuuuaauuug

SEQ ID NO: 1688926 - RNA, 19 nt, Homo sapiens
  misc_RNA (1)...(19): siRNA sense strand
gauggagacaguucagagu

SEQ ID NO: 1688927 - RNA, 19 nt, Homo sapiens
  misc_RNA (1)...(19): siRNA sense strand
gcagguggaggcagacagu

SEQ ID NO: 1688928 - RNA, 19 nt, Homo sapiens
  misc_RNA (1)...(19): siRNA sense strand
ccagcuguccgaacucgaa

SEQ ID NO: 1688929 - RNA, 19 nt, Homo sapiens
  misc_RNA (1)...(19): siRNA sense strand
cgggaaaccaggacucguu

SEQ ID NO: 1688930 - RNA, 19 nt, Homo sapiens
  misc_RNA (1)...(19): siRNA sense strand
cccaagcgccucaagacaa

SEQ ID NO: 1688931 - RNA, 19 nt, Homo sapiens
  misc_RNA (1)...(19): siRNA sense strand
caagagcagccuggaagau

SEQ ID NO: 1688932 - RNA, 19 nt, Homo sapiens
  misc_RNA (1)...(19): siRNA sense strand
ugaacgacgugaggaacau

SEQ ID NO: 1688933 - RNA, 19 nt, Homo sapiens
  misc_RNA (1)...(19): siRNA sense strand
ggaauaucaaauacgugaa

SEQ ID NO: 1688934 - RNA, 19 nt, Homo sapiens
  misc_RNA (1)...(19): siRNA sense strand
caagcuguacccugccauu

SEQ ID NO: 1688935 - RNA, 19 nt, Homo sapiens
  misc_RNA (1)...(19): siRNA sense strand
cuggagcuguuacaugugu

SEQ ID NO: 1688936 - RNA, 19 nt, Homo sapiens
  misc_RNA (1)...(19): siRNA sense strand
gauggcuguuugucuugug

SEQ ID NO: 1688937 - RNA, 19 nt, Homo sapiens
  misc_RNA (1)...(19): siRNA sense strand
gaaaguacgucgcuucuga

SEQ ID NO: 1688938 - RNA, 19 nt, Homo sapiens
  misc_RNA (1)...(19): siRNA sense strand
gcaacgaucucucaaaugu

SEQ ID NO: 1688939 - RNA, 19 nt, Homo sapiens
  misc_RNA (1)...(19): siRNA sense strand
ucaauaagcucgucuccua

SEQ ID NO: 1688940 - RNA, 19 nt, Homo sapiens
  misc_RNA (1)...(19): siRNA sense strand
gcauaaagguaggaaagua

SEQ ID NO: 1688941 - RNA, 19 nt, Homo sapiens
  misc_RNA (1)...(19): siRNA sense strand
acaaauggcuucagauguu

SEQ ID NO: 1688942 - RNA, 19 nt, Homo sapiens
  misc_RNA (1)...(19): siRNA sense strand
gaucagagccgagaacaaa

SEQ ID NO: 1688943 - RNA, 19 nt, Homo sapiens
  misc_RNA (1)...(19): siRNA sense strand
gaacaaauggcuucagaug

SEQ ID NO: 1688944 - RNA, 19 nt, Homo sapiens
  misc_RNA (1)...(19): siRNA sense strand
gagaacaaauggcuucaga

SEQ ID NO: 1688945 - RNA, 19 nt, Homo sapiens
  misc_RNA (1)...(19): siRNA sense strand
ucaaagaguugggcauaaa

SEQ ID NO: 1688946 - RNA, 19 nt, Homo sapiens
  misc_RNA (1)...(19): siRNA sense strand
gccgagagcugcugcuuug

SEQ ID NO: 1688947 - RNA, 19 nt, Homo sapiens
  misc_RNA (1)...(19): siRNA sense strand
ugaggaacaucacaaagaa

SEQ ID NO: 1688948 - RNA, 19 nt, Homo sapiens
  misc_RNA (1)...(19): siRNA sense strand
ccucccagcucuuaccuua

SEQ ID NO: 1688949 - RNA, 19 nt, Homo sapiens
  misc_RNA (1)...(19): siRNA sense strand
gcucuuaccuuaccaucga

SEQ ID NO: 1688950 - RNA, 19 nt, Homo sapiens
  misc_RNA (1)...(19): siRNA sense strand
ccaagcgccucaagacaaa

SEQ ID NO: 1688951 - RNA, 19 nt, Homo sapiens
  misc_RNA (1)...(19): siRNA sense strand
ggacuacuuugcaugugaa

SEQ ID NO: 1688952 - RNA, 19 nt, Homo sapiens
  misc_RNA (1)...(19): siRNA sense strand
uuuaccaccugcugaauua

SEQ ID NO: 1688953 - RNA, 19 nt, Homo sapiens
  misc_RNA (1)...(19): siRNA sense strand
cagcagcccuggagacuca

SEQ ID NO: 1688954 - RNA, 19 nt, Homo sapiens
  misc_RNA (1)...(19): siRNA sense strand
caagacaaauugcuauaac

SEQ ID NO: 1688955 - RNA, 19 nt, Homo sapiens
  misc_RNA (1)...(19): siRNA sense strand
gaaggacuacuuugcaugu

SEQ ID NO: 1688956 - RNA, 19 nt, Homo sapiens
  misc_RNA (1)...(19): siRNA sense strand
guaccaugcucuggagaaa

SEQ ID NO: 1688957 - RNA, 19 nt, Homo sapiens
  misc_RNA (1)...(19): siRNA sense strand
ggaguguaauccagugaug

SEQ ID NO: 1688958 - RNA, 19 nt, Homo sapiens
  misc_RNA (1)...(19): siRNA sense strand
caaauggcuucagauguug

SEQ ID NO: 1688959 - RNA, 19 nt, Homo sapiens
  misc_RNA (1)...(19): siRNA sense strand
gggaaggaguuuggaauag

SEQ ID NO: 1688960 - RNA, 19 nt, Homo sapiens
  misc_RNA (1)...(19): siRNA sense strand
ggaaggaguuuggaauagg

SEQ ID NO: 1688961 - RNA, 19 nt, Homo sapiens
  misc_RNA (1)...(19): siRNA sense strand
ucagccagcacuuuaauuu

SEQ ID NO: 1688962 - RNA, 19 nt, Homo sapiens
  misc_RNA (1)...(19): siRNA sense strand
aacgaucucucaaauguga

SEQ ID NO: 1688963 - RNA, 19 nt, Homo sapiens
  misc_RNA (1)...(19): siRNA sense strand
gacgauggcuaucagucuu

SEQ ID NO: 1688964 - RNA, 19 nt, Homo sapiens
  misc_RNA (1)...(19): siRNA sense strand
acacggggcuugaauauga

SEQ ID NO: 1688965 - RNA, 19 nt, Homo sapiens
  misc_RNA (1)...(19): siRNA sense strand
acgcacagcugacgacuca

SEQ ID NO: 1688966 - RNA, 19 nt, Homo sapiens
  misc_RNA (1)...(19): siRNA sense strand
ccuggaagauggcuguuug

SEQ ID NO: 1688967 - RNA, 19 nt, Homo sapiens
  misc_RNA (1)...(19): siRNA sense strand
uuacauguaugaugacgau

SEQ ID NO: 1688968 - RNA, 19 nt, Homo sapiens
  misc_RNA (1)...(19): siRNA sense strand
ccauuugacuuggugauug

SEQ ID NO: 1688969 - RNA, 19 nt, Homo sapiens
  misc_RNA (1)...(19): siRNA sense strand
aaccaggacucguucagaa

SEQ ID NO: 1688970 - RNA, 19 nt, Homo sapiens
  misc_RNA (1)...(19): siRNA sense strand
ggagguguccagucugcua

SEQ ID NO: 1688971 - RNA, 19 nt, Homo sapiens
  misc_RNA (1)...(19): siRNA sense strand
ggagacaguucagaguauc

SEQ ID NO: 1688972 - RNA, 19 nt, Homo sapiens
  misc_RNA (1)...(19): siRNA sense strand
gcaacagcaucggcaggaa

SEQ ID NO: 1688973 - RNA, 19 nt, Homo sapiens
  misc_RNA (1)...(19): siRNA sense strand
cgaaauaacaacagugucu

SEQ ID NO: 1688974 - RNA, 19 nt, Homo sapiens
  misc_RNA (1)...(19): siRNA sense strand
caacaagagcagccuggaa

SEQ ID NO: 1688975 - RNA, 19 nt, Homo sapiens
  misc_RNA (1)...(19): siRNA sense strand
gcuguccgaacucgaaaua

SEQ ID NO: 1688976 - RNA, 19 nt, Homo sapiens
  misc_RNA (1)...(19): siRNA sense strand
ggagaucagaggccgaaga

SEQ ID NO: 1688977 - RNA, 19 nt, Homo sapiens
  misc_RNA (1)...(19): siRNA sense strand
cacgguuccuggaguguaa

SEQ ID NO: 1688978 - RNA, 19 nt, Homo sapiens
  misc_RNA (1)...(19): siRNA sense strand
cgaguccugucauuguuug

SEQ ID NO: 1688979 - RNA, 19 nt, Homo sapiens
  misc_RNA (1)...(19): siRNA sense strand
uggagacaguucagaguau

SEQ ID NO: 1688980 - RNA, 19 nt, Homo sapiens
  misc_RNA (1)...(19): siRNA sense strand
ggaagauggcuguuugucu

SEQ ID NO: 1688981 - RNA, 19 nt, Homo sapiens
  misc_RNA (1)...(19): siRNA sense strand
agagggagguguccagucu

SEQ ID NO: 1688982 - RNA, 19 nt, Homo sapiens
  misc_RNA (1)...(19): siRNA sense strand
gagaucagaggccgaagau

SEQ ID NO: 1688983 - RNA, 19 nt, Homo sapiens
  misc_RNA (1)...(19): siRNA sense strand
gaggaacaucacaaagaaa

SEQ ID NO: 1688984 - RNA, 19 nt, Homo sapiens
  misc_RNA (1)...(19): siRNA sense strand
uguccagucugcuaagcua

SEQ ID NO: 1688985 - RNA, 19 nt, Homo sapiens
  misc_RNA (1)...(19): siRNA sense strand
aagcucgucuccuaucgaa

SEQ ID NO: 1688986 - RNA, 19 nt, Homo sapiens
  misc_RNA (1)...(19): siRNA sense strand
ccucaaagaguugggcaua

SEQ ID NO: 1688987 - RNA, 19 nt, Homo sapiens
  misc_RNA (1)...(19): siRNA sense strand
caccaggcaucucaaugga

SEQ ID NO: 1688988 - RNA, 19 nt, Homo sapiens
  misc_RNA (1)...(19): siRNA sense strand
caguggagauggagacagu

SEQ ID NO: 1688989 - RNA, 19 nt, Homo sapiens
  misc_RNA (1)...(19): siRNA sense strand
cuacuuugcaugugaauag

SEQ ID NO: 1688990 - RNA, 19 nt, Homo sapiens
  misc_RNA (1)...(19): siRNA sense strand
ccaugaagguuggcgacaa

SEQ ID NO: 1688991 - RNA, 19 nt, Homo sapiens
  misc_RNA (1)...(19): siRNA sense strand
gggcauaaagguaggaaag

SEQ ID NO: 1688992 - RNA, 19 nt, Homo sapiens
  misc_RNA (1)...(19): siRNA sense strand
ccauucgaguccugucauu

SEQ ID NO: 1688993 - RNA, 19 nt, Homo sapiens
  misc_RNA (1)...(19): siRNA sense strand
cccuggagcuguuacaugu

SEQ ID NO: 1688994 - RNA, 19 nt, Homo sapiens
  misc_RNA (1)...(19): siRNA sense strand
gcacccaagcgccucaaga

SEQ ID NO: 1688995 - RNA, 19 nt, Homo sapiens
  misc_RNA (1)...(19): siRNA sense strand
ugggaaggaguuuggaaua

SEQ ID NO: 1688996 - RNA, 19 nt, Homo sapiens
  misc_RNA (1)...(19): siRNA sense strand
cgacaagagggacaucuca

SEQ ID NO: 1688997 - RNA, 19 nt, Homo sapiens
  misc_RNA (1)...(19): siRNA sense strand
caugaagguuggcgacaag

SEQ ID NO: 1688998 - RNA, 19 nt, Homo sapiens
  misc_RNA (1)...(19): siRNA sense strand
augcaacgaucucucaaau

SEQ ID NO: 1688999 - RNA, 19 nt, Homo sapiens
  misc_RNA (1)...(19): siRNA sense strand
gaauaucaaauacgugaac

SEQ ID NO: 1689000 - RNA, 19 nt, Homo sapiens
  misc_RNA (1)...(19): siRNA sense strand
ccaugguggugucuuggaa

SEQ ID NO: 1689001 - RNA, 19 nt, Homo sapiens
  misc_RNA (1)...(19): siRNA sense strand
uaauuuggccaccuucaau

SEQ ID NO: 1689002 - RNA, 19 nt, Homo sapiens
  misc_RNA (1)...(19): siRNA sense strand
gauguuugagaauguugua

SEQ ID NO: 1689003 - RNA, 19 nt, Homo sapiens
  misc_RNA (1)...(19): siRNA sense strand
ggcagacaguggagaugga

SEQ ID NO: 1689004 - RNA, 19 nt, Homo sapiens
  misc_RNA (1)...(19): siRNA sense strand
gaagaucagagccgagaac

SEQ ID NO: 1689005 - RNA, 19 nt, Homo sapiens
  misc_RNA (1)...(19): siRNA sense strand
gcuauaacaacggcaaaga

SEQ ID NO: 1689006 - RNA, 19 nt, Homo sapiens
  misc_RNA (1)...(19): siRNA sense strand
guuuggcgauggcaaguuc

SEQ ID NO: 1689007 - RNA, 19 nt, Homo sapiens
  misc_RNA (1)...(19): siRNA sense strand
agaucaagcucgcgacucu

SEQ ID NO: 1689008 - RNA, 19 nt, Homo sapiens
  misc_RNA (1)...(19): siRNA sense strand
gagaauguuguagccauga

SEQ ID NO: 1689009 - RNA, 19 nt, Homo sapiens
  misc_RNA (1)...(19): siRNA sense strand
gaacucgaaauaacaacag

SEQ ID NO: 1689010 - RNA, 19 nt, Homo sapiens
  misc_RNA (1)...(19): siRNA sense strand
gagguguccagucugcuaa

SEQ ID NO: 1689011 - RNA, 19 nt, Homo sapiens
  misc_RNA (1)...(19): siRNA sense strand
agaguugggcauaaaggua

SEQ ID NO: 1689012 - RNA, 19 nt, Homo sapiens
  misc_RNA (1)...(19): siRNA sense strand
ggaaagaucaagggcuucu

SEQ ID NO: 1689013 - RNA, 19 nt, Homo sapiens
  misc_RNA (1)...(19): siRNA sense strand
gcuaccuaguccucaaaga

SEQ ID NO: 1689014 - RNA, 19 nt, Homo sapiens
  misc_RNA (1)...(19): siRNA sense strand
cucaaagaguugggcauaa

SEQ ID NO: 1689015 - RNA, 19 nt, Homo sapiens
  misc_RNA (1)...(19): siRNA sense strand
ggaggcagacaguggagau

SEQ ID NO: 1689016 - RNA, 19 nt, Homo sapiens
  misc_RNA (1)...(19): siRNA sense strand
aggacuacuuugcauguga

SEQ ID NO: 1689017 - RNA, 19 nt, Homo sapiens
  misc_RNA (1)...(19): siRNA sense strand
agaauguuguagccaugaa

SEQ ID NO: 1689018 - RNA, 19 nt, Homo sapiens
  misc_RNA (1)...(19): siRNA sense strand
caaagaguugggcauaaag

SEQ ID NO: 1689019 - RNA, 19 nt, Homo sapiens
  misc_RNA (1)...(19): siRNA sense strand
ucagagccgagaacaaaug

SEQ ID NO: 1689020 - RNA, 19 nt, Homo sapiens
  misc_RNA (1)...(19): siRNA sense strand
agccagcacuuuaauuugg

SEQ ID NO: 1689021 - RNA, 19 nt, Homo sapiens
  misc_RNA (1)...(19): siRNA sense strand
uguccgaacucgaaauaac

SEQ ID NO: 1689022 - RNA, 19 nt, Homo sapiens
  misc_RNA (1)...(19): siRNA sense strand
gaugggaaggaguuuggaa

SEQ ID NO: 1689023 - RNA, 19 nt, Homo sapiens
  misc_RNA (1)...(19): siRNA sense strand
cgacacagaggacacacau

SEQ ID NO: 1689024 - RNA, 19 nt, Homo sapiens
  misc_RNA (1)...(19): siRNA sense strand
caauaagcucgucuccuau

SEQ ID NO: 1689025 - RNA, 19 nt, Homo sapiens
  misc_RNA (1)...(19): siRNA sense strand
cagccagcacuuuaauuug

SEQ ID NO: 1689026 - RNA, 19 nt, Homo sapiens
  misc_RNA (1)...(19): siRNA sense strand
gauggagacaguucagagu

SEQ ID NO: 1689027 - RNA, 19 nt, Homo sapiens
  misc_RNA (1)...(19): siRNA sense strand
gcagguggaggcagacagu

SEQ ID NO: 1689028 - RNA, 19 nt, Homo sapiens
  misc_RNA (1)...(19): siRNA sense strand
ccagcuguccgaacucgaa

SEQ ID NO: 1689029 - RNA, 19 nt, Homo sapiens
  misc_RNA (1)...(19): siRNA sense strand
cccaagcgccucaagacaa

SEQ ID NO: 1689030 - RNA, 19 nt, Homo sapiens
  misc_RNA (1)...(19): siRNA sense strand
cgggaaaccaggacucguu

SEQ ID NO: 1689031 - RNA, 19 nt, Homo sapiens
  misc_RNA (1)...(19): siRNA sense strand
caagagcagccuggaagau

SEQ ID NO: 1689032 - RNA, 19 nt, Homo sapiens
  misc_RNA (1)...(19): siRNA sense strand
ugaacgacgugaggaacau

SEQ ID NO: 1689033 - RNA, 19 nt, Homo sapiens
  misc_RNA (1)...(19): siRNA sense strand
ggaauaucaaauacgugaa

SEQ ID NO: 1689034 - RNA, 19 nt, Homo sapiens
  misc_RNA (1)...(19): siRNA sense strand
caagcuguacccugccauu

SEQ ID NO: 1689035 - RNA, 19 nt, Homo sapiens
  misc_RNA (1)...(19): siRNA sense strand
cuggagcuguuacaugugu

SEQ ID NO: 1689036 - RNA, 19 nt, Homo sapiens
  misc_RNA (1)...(19): siRNA sense strand
gauggcuguuugucuugug

SEQ ID NO: 1689037 - RNA, 19 nt, Homo sapiens
  misc_RNA (1)...(19): siRNA sense strand
ccacguagaucacuuggau

SEQ ID NO: 1689038 - RNA, 19 nt, Homo sapiens
  misc_RNA (1)...(19): siRNA sense strand
ccauuugaauuaccacgua

SEQ ID NO: 1689039 - RNA, 19 nt, Homo sapiens
  misc_RNA (1)...(19): siRNA sense strand
gcuuugccgugcaguuaua

SEQ ID NO: 1689040 - RNA, 19 nt, Homo sapiens
  misc_RNA (1)...(19): siRNA sense strand
ugaauuaccacguagauca

SEQ ID NO: 1689041 - RNA, 19 nt, Homo sapiens
  misc_RNA (1)...(19): siRNA sense strand
cagcauagguggacuuuuc

SEQ ID NO: 1689042 - RNA, 19 nt, Homo sapiens
  misc_RNA (1)...(19): siRNA sense strand
ccgcuuugccgugcaguua

SEQ ID NO: 1689043 - RNA, 19 nt, Homo sapiens
  misc_RNA (1)...(19): siRNA sense strand
gccgugcaguuauacaaca

SEQ ID NO: 1689044 - RNA, 19 nt, Homo sapiens
  misc_RNA (1)...(19): siRNA sense strand
guagaucacuuggauuccu

SEQ ID NO: 1689045 - RNA, 19 nt, Homo sapiens
  misc_RNA (1)...(19): siRNA sense strand
uauacaacaccaaccagaa

SEQ ID NO: 1689046 - RNA, 19 nt, Homo sapiens
  misc_RNA (1)...(19): siRNA sense strand
ccagaacaccaccgagaag

SEQ ID NO: 1689047 - RNA, 19 nt, Homo sapiens
  misc_RNA (1)...(19): siRNA sense strand
gcccuuccauuugaauuac

SEQ ID NO: 1689048 - RNA, 19 nt, Homo sapiens
  misc_RNA (1)...(19): siRNA sense strand
ccacguagaucacuuggau

SEQ ID NO: 1689049 - RNA, 19 nt, Homo sapiens
  misc_RNA (1)...(19): siRNA sense strand
ccauuugaauuaccacgua

SEQ ID NO: 1689050 - RNA, 19 nt, Homo sapiens
  misc_RNA (1)...(19): siRNA sense strand
gcuuugccgugcaguuaua

SEQ ID NO: 1689051 - RNA, 19 nt, Homo sapiens
  misc_RNA (1)...(19): siRNA sense strand
ugaauuaccacguagauca

SEQ ID NO: 1689052 - RNA, 19 nt, Homo sapiens
  misc_RNA (1)...(19): siRNA sense strand
cagcauagguggacuuuuc

SEQ ID NO: 1689053 - RNA, 19 nt, Homo sapiens
  misc_RNA (1)...(19): siRNA sense strand
ccgcuuugccgugcaguua

SEQ ID NO: 1689054 - RNA, 19 nt, Homo sapiens
  misc_RNA (1)...(19): siRNA sense strand
gccgugcaguuauacaaca

SEQ ID NO: 1689055 - RNA, 19 nt, Homo sapiens
  misc_RNA (1)...(19): siRNA sense strand
guagaucacuuggauuccu

SEQ ID NO: 1689056 - RNA, 19 nt, Homo sapiens
  misc_RNA (1)...(19): siRNA sense strand
uauacaacaccaaccagaa

SEQ ID NO: 1689057 - RNA, 19 nt, Homo sapiens
  misc_RNA (1)...(19): siRNA sense strand
ccagaacaccaccgagaag

SEQ ID NO: 1689058 - RNA, 19 nt, Homo sapiens
  misc_RNA (1)...(19): siRNA sense strand
gcccuuccauuugaauuac

SEQ ID NO: 1689059 - RNA, 19 nt, Homo sapiens
  misc_RNA (1)...(19): siRNA sense strand
ccacguagaucacuuggau

SEQ ID NO: 1689060 - RNA, 19 nt, Homo sapiens
  misc_RNA (1)...(19): siRNA sense strand
ccauuugaauuaccacgua

SEQ ID NO: 1689061 - RNA, 19 nt, Homo sapiens
  misc_RNA (1)...(19): siRNA sense strand
gcuuugccgugcaguuaua

SEQ ID NO: 1689062 - RNA, 19 nt, Homo sapiens
  misc_RNA (1)...(19): siRNA sense strand
ugaauuaccacguagauca

SEQ ID NO: 1689063 - RNA, 19 nt, Homo sapiens
  misc_RNA (1)...(19): siRNA sense strand
cagcauagguggacuuuuc

SEQ ID NO: 1689064 - RNA, 19 nt, Homo sapiens
  misc_RNA (1)...(19): siRNA sense strand
ccgcuuugccgugcaguua

SEQ ID NO: 1689065 - RNA, 19 nt, Homo sapiens
  misc_RNA (1)...(19): siRNA sense strand
gccgugcaguuauacaaca

SEQ ID NO: 1689066 - RNA, 19 nt, Homo sapiens
  misc_RNA (1)...(19): siRNA sense strand
guagaucacuuggauuccu

SEQ ID NO: 1689067 - RNA, 19 nt, Homo sapiens
  misc_RNA (1)...(19): siRNA sense strand
uauacaacaccaaccagaa

SEQ ID NO: 1689068 - RNA, 19 nt, Homo sapiens
  misc_RNA (1)...(19): siRNA sense strand
ccagaacaccaccgagaag

SEQ ID NO: 1689069 - RNA, 19 nt, Homo sapiens
  misc_RNA (1)...(19): siRNA sense strand
gcccuuccauuugaauuac

SEQ ID NO: 1689070 - RNA, 19 nt, Homo sapiens
  misc_RNA (1)...(19): siRNA sense strand
ggagaaaguugcugaauaa

SEQ ID NO: 1689071 - RNA, 19 nt, Homo sapiens
  misc_RNA (1)...(19): siRNA sense strand
gaaagaugcuccagaauuc

SEQ ID NO: 1689072 - RNA, 19 nt, Homo sapiens
  misc_RNA (1)...(19): siRNA sense strand
gauauucucuggugcagua

SEQ ID NO: 1689073 - RNA, 19 nt, Homo sapiens
  misc_RNA (1)...(19): siRNA sense strand
ggaagaagaggaagauaua

SEQ ID NO: 1689074 - RNA, 19 nt, Homo sapiens
  misc_RNA (1)...(19): siRNA sense strand
ccagauaccuguaguaauc

SEQ ID NO: 1689075 - RNA, 19 nt, Homo sapiens
  misc_RNA (1)...(19): siRNA sense strand
gaaaguugcugaauaacca

SEQ ID NO: 1689076 - RNA, 19 nt, Homo sapiens
  misc_RNA (1)...(19): siRNA sense strand
gaacaaacucuaagcagaa

SEQ ID NO: 1689077 - RNA, 19 nt, Homo sapiens
  misc_RNA (1)...(19): siRNA sense strand
gaugaugccucuaaauuca

SEQ ID NO: 1689078 - RNA, 19 nt, Homo sapiens
  misc_RNA (1)...(19): siRNA sense strand
gaacagaaagcagacauuu

SEQ ID NO: 1689079 - RNA, 19 nt, Homo sapiens
  misc_RNA (1)...(19): siRNA sense strand
cagaauggcucacaucuuc

SEQ ID NO: 1689080 - RNA, 19 nt, Homo sapiens
  misc_RNA (1)...(19): siRNA sense strand
gaauugagcccuugccauu

SEQ ID NO: 1689081 - RNA, 19 nt, Homo sapiens
  misc_RNA (1)...(19): siRNA sense strand
ggaaggcuuugaagauuau

SEQ ID NO: 1689082 - RNA, 19 nt, Homo sapiens
  misc_RNA (1)...(19): siRNA sense strand
gaacagagagaucccuuug

SEQ ID NO: 1689083 - RNA, 19 nt, Homo sapiens
  misc_RNA (1)...(19): siRNA sense strand
gaaagcagacauuuaugaa

SEQ ID NO: 1689084 - RNA, 19 nt, Homo sapiens
  misc_RNA (1)...(19): siRNA sense strand
cagauuacuucuccuauga

SEQ ID NO: 1689085 - RNA, 19 nt, Homo sapiens
  misc_RNA (1)...(19): siRNA sense strand
gcucacaucuucuaugaca

SEQ ID NO: 1689086 - RNA, 19 nt, Homo sapiens
  misc_RNA (1)...(19): siRNA sense strand
guggaaagcuucaaucagu

SEQ ID NO: 1689087 - RNA, 19 nt, Homo sapiens
  misc_RNA (1)...(19): siRNA sense strand
uggagaaaguugcugaaua

SEQ ID NO: 1689088 - RNA, 19 nt, Homo sapiens
  misc_RNA (1)...(19): siRNA sense strand
gagaagacaggauuuguga

SEQ ID NO: 1689089 - RNA, 19 nt, Homo sapiens
  misc_RNA (1)...(19): siRNA sense strand
uguaugagcuggaguacuu

SEQ ID NO: 1689090 - RNA, 19 nt, Homo sapiens
  misc_RNA (1)...(19): siRNA sense strand
agaaugagcuaugcagauu

SEQ ID NO: 1689091 - RNA, 19 nt, Homo sapiens
  misc_RNA (1)...(19): siRNA sense strand
caggaaggcuuugaagauu

SEQ ID NO: 1689092 - RNA, 19 nt, Homo sapiens
  misc_RNA (1)...(19): siRNA sense strand
ccagccaccucuccaagua

SEQ ID NO: 1689093 - RNA, 19 nt, Homo sapiens
  misc_RNA (1)...(19): siRNA sense strand
ugaaagaugcuccagaauu

SEQ ID NO: 1689094 - RNA, 19 nt, Homo sapiens
  misc_RNA (1)...(19): siRNA sense strand
agaaauacuuagaccauga

SEQ ID NO: 1689095 - RNA, 19 nt, Homo sapiens
  misc_RNA (1)...(19): siRNA sense strand
gugcaagccuuccagagaa

SEQ ID NO: 1689096 - RNA, 19 nt, Homo sapiens
  misc_RNA (1)...(19): siRNA sense strand
ugaauaauguugugaaugc

SEQ ID NO: 1689097 - RNA, 19 nt, Homo sapiens
  misc_RNA (1)...(19): siRNA sense strand
ccugaaagaugcuccagaa

SEQ ID NO: 1689098 - RNA, 19 nt, Homo sapiens
  misc_RNA (1)...(19): siRNA sense strand
gaagaagaggaagauauaa

SEQ ID NO: 1689099 - RNA, 19 nt, Homo sapiens
  misc_RNA (1)...(19): siRNA sense strand
acagaaagcagacauuuau

SEQ ID NO: 1689100 - RNA, 19 nt, Homo sapiens
  misc_RNA (1)...(19): siRNA sense strand
gaagacaggauuugugaca

SEQ ID NO: 1689101 - RNA, 19 nt, Homo sapiens
  misc_RNA (1)...(19): siRNA sense strand
aaacugcuuucauggauau

SEQ ID NO: 1689102 - RNA, 19 nt, Homo sapiens
  misc_RNA (1)...(19): siRNA sense strand
aggaaggcuuugaagauua

SEQ ID NO: 1689103 - RNA, 19 nt, Homo sapiens
  misc_RNA (1)...(19): siRNA sense strand
caacugcagcucucuagaa

SEQ ID NO: 1689104 - RNA, 19 nt, Homo sapiens
  misc_RNA (1)...(19): siRNA sense strand
agagaaauguggaaagcuu

SEQ ID NO: 1689105 - RNA, 19 nt, Homo sapiens
  misc_RNA (1)...(19): siRNA sense strand
caagcaggauuauugaaag

SEQ ID NO: 1689106 - RNA, 19 nt, Homo sapiens
  misc_RNA (1)...(19): siRNA sense strand
gaaauacuuagaccaugaa

SEQ ID NO: 1689107 - RNA, 19 nt, Homo sapiens
  misc_RNA (1)...(19): siRNA sense strand
ggagaaauacuuagaccau

SEQ ID NO: 1689108 - RNA, 19 nt, Homo sapiens
  misc_RNA (1)...(19): siRNA sense strand
cuaccagcauugaguauug

SEQ ID NO: 1689109 - RNA, 19 nt, Homo sapiens
  misc_RNA (1)...(19): siRNA sense strand
aaauucaucugucuucuag

SEQ ID NO: 1689110 - RNA, 19 nt, Homo sapiens
  misc_RNA (1)...(19): siRNA sense strand
agaaggauguugagaacga

SEQ ID NO: 1689111 - RNA, 19 nt, Homo sapiens
  misc_RNA (1)...(19): siRNA sense strand
gaauggcucacaucuucua

SEQ ID NO: 1689112 - RNA, 19 nt, Homo sapiens
  misc_RNA (1)...(19): siRNA sense strand
gaucacgaccucuacauca

SEQ ID NO: 1689113 - RNA, 19 nt, Homo sapiens
  misc_RNA (1)...(19): siRNA sense strand
gguguacucuccauguaug

SEQ ID NO: 1689114 - RNA, 19 nt, Homo sapiens
  misc_RNA (1)...(19): siRNA sense strand
cugaagaggugcagaaugg

SEQ ID NO: 1689115 - RNA, 19 nt, Homo sapiens
  misc_RNA (1)...(19): siRNA sense strand
ccagaaggauguugagaac

SEQ ID NO: 1689116 - RNA, 19 nt, Homo sapiens
  misc_RNA (1)...(19): siRNA sense strand
uggcucacaucuucuauga

SEQ ID NO: 1689117 - RNA, 19 nt, Homo sapiens
  misc_RNA (1)...(19): siRNA sense strand
gcuguccucucuauuggaa

SEQ ID NO: 1689118 - RNA, 19 nt, Homo sapiens
  misc_RNA (1)...(19): siRNA sense strand
gcaggauuauugaaaggau

SEQ ID NO: 1689119 - RNA, 19 nt, Homo sapiens
  misc_RNA (1)...(19): siRNA sense strand
agaggaagauauaaaccaa

SEQ ID NO: 1689120 - RNA, 19 nt, Homo sapiens
  misc_RNA (1)...(19): siRNA sense strand
ggauauugaagaacagaaa

SEQ ID NO: 1689121 - RNA, 19 nt, Homo sapiens
  misc_RNA (1)...(19): siRNA sense strand
agaaagcagacauuuauga

SEQ ID NO: 1689122 - RNA, 19 nt, Homo sapiens
  misc_RNA (1)...(19): siRNA sense strand
caaacucuaagcagaauug

SEQ ID NO: 1689123 - RNA, 19 nt, Homo sapiens
  misc_RNA (1)...(19): siRNA sense strand
agaggaaucugcccaagca

SEQ ID NO: 1689124 - RNA, 19 nt, Homo sapiens
  misc_RNA (1)...(19): siRNA sense strand
caucuucuaugacacuuuc

SEQ ID NO: 1689125 - RNA, 19 nt, Homo sapiens
  misc_RNA (1)...(19): siRNA sense strand
caggauuauugaaaggaua

SEQ ID NO: 1689126 - RNA, 19 nt, Homo sapiens
  misc_RNA (1)...(19): siRNA sense strand
ucugggaacuagauacuga

SEQ ID NO: 1689127 - RNA, 19 nt, Homo sapiens
  misc_RNA (1)...(19): siRNA sense strand
ggagagaagacaggauuug

SEQ ID NO: 1689128 - RNA, 19 nt, Homo sapiens
  misc_RNA (1)...(19): siRNA sense strand
gaauuccacucccgcuaca

SEQ ID NO: 1689129 - RNA, 19 nt, Homo sapiens
  misc_RNA (1)...(19): siRNA sense strand
ccaggaaggcuuugaagau

SEQ ID NO: 1689130 - RNA, 19 nt, Homo sapiens
  misc_RNA (1)...(19): siRNA sense strand
ccagaugcuugaccuagug

SEQ ID NO: 1689131 - RNA, 19 nt, Homo sapiens
  misc_RNA (1)...(19): siRNA sense strand
gagcuggaguacuucuaug

SEQ ID NO: 1689132 - RNA, 19 nt, Homo sapiens
  misc_RNA (1)...(19): siRNA sense strand
cagaaagagggaagaauga

SEQ ID NO: 1689133 - RNA, 19 nt, Homo sapiens
  misc_RNA (1)...(19): siRNA sense strand
aggccgaucugucucgaua

SEQ ID NO: 1689134 - RNA, 19 nt, Homo sapiens
  misc_RNA (1)...(19): siRNA sense strand
ccaaauuacagauuacuuc

SEQ ID NO: 1689135 - RNA, 19 nt, Homo sapiens
  misc_RNA (1)...(19): siRNA sense strand
acucuaagcagaauugaaa

SEQ ID NO: 1689136 - RNA, 19 nt, Homo sapiens
  misc_RNA (1)...(19): siRNA sense strand
gaaugagcuaugcagauuu

SEQ ID NO: 1689137 - RNA, 19 nt, Homo sapiens
  misc_RNA (1)...(19): siRNA sense strand
ucauggauauugaagaaca

SEQ ID NO: 1689138 - RNA, 19 nt, Homo sapiens
  misc_RNA (1)...(19): siRNA sense strand
ccugaaggacucccagaua

SEQ ID NO: 1689139 - RNA, 19 nt, Homo sapiens
  misc_RNA (1)...(19): siRNA sense strand
ucaucaagcaggauuauug

SEQ ID NO: 1689140 - RNA, 19 nt, Homo sapiens
  misc_RNA (1)...(19): siRNA sense strand
ggaacuagauacugaucac

SEQ ID NO: 1689141 - RNA, 19 nt, Homo sapiens
  misc_RNA (1)...(19): siRNA sense strand
acagauuacuucuccuaug

SEQ ID NO: 1689142 - RNA, 19 nt, Homo sapiens
  misc_RNA (1)...(19): siRNA sense strand
ggaaucugcccaagcacaa

SEQ ID NO: 1689143 - RNA, 19 nt, Homo sapiens
  misc_RNA (1)...(19): siRNA sense strand
gcagaauggcucacaucuu

SEQ ID NO: 1689144 - RNA, 19 nt, Homo sapiens
  misc_RNA (1)...(19): siRNA sense strand
ggucucacguuccugaaag

SEQ ID NO: 1689145 - RNA, 19 nt, Homo sapiens
  misc_RNA (1)...(19): siRNA sense strand
ucaucugucuucuagcaaa

SEQ ID NO: 1689146 - RNA, 19 nt, Homo sapiens
  misc_RNA (1)...(19): siRNA sense strand
gccauuccaugauuuacug

SEQ ID NO: 1689147 - RNA, 19 nt, Homo sapiens
  misc_RNA (1)...(19): siRNA sense strand
gauuucaucccucuacuuc

SEQ ID NO: 1689148 - RNA, 19 nt, Homo sapiens
  misc_RNA (1)...(19): siRNA sense strand
gaaggauguugagaacgau

SEQ ID NO: 1689149 - RNA, 19 nt, Homo sapiens
  misc_RNA (1)...(19): siRNA sense strand
acagaaagagggaagaaug

SEQ ID NO: 1689150 - RNA, 19 nt, Homo sapiens
  misc_RNA (1)...(19): siRNA sense strand
cgaucugucucgauacaau

SEQ ID NO: 1689151 - RNA, 19 nt, Homo sapiens
  misc_RNA (1)...(19): siRNA sense strand
gagggaagaaugagcuaug

SEQ ID NO: 1689152 - RNA, 19 nt, Homo sapiens
  misc_RNA (1)...(19): siRNA sense strand
gccauuguccauaaacauu

SEQ ID NO: 1689153 - RNA, 19 nt, Homo sapiens
  misc_RNA (1)...(19): siRNA sense strand
guaguaaucaugaacaaac

SEQ ID NO: 1689154 - RNA, 19 nt, Homo sapiens
  misc_RNA (1)...(19): siRNA sense strand
aacagaaagcagacauuua

SEQ ID NO: 1689155 - RNA, 19 nt, Homo sapiens
  misc_RNA (1)...(19): siRNA sense strand
aaucaguggaugaagaaua

SEQ ID NO: 1689156 - RNA, 19 nt, Homo sapiens
  misc_RNA (1)...(19): siRNA sense strand
gagagaagacaggauuugu

SEQ ID NO: 1689157 - RNA, 19 nt, Homo sapiens
  misc_RNA (1)...(19): siRNA sense strand
acagcacagucauucauug

SEQ ID NO: 1689158 - RNA, 19 nt, Homo sapiens
  misc_RNA (1)...(19): siRNA sense strand
ucaaucaguggaugaagaa

SEQ ID NO: 1689159 - RNA, 19 nt, Homo sapiens
  misc_RNA (1)...(19): siRNA sense strand
ccagagaaauguggaaagc

SEQ ID NO: 1689160 - RNA, 19 nt, Homo sapiens
  misc_RNA (1)...(19): siRNA sense strand
ggaauccuaccagcauuga

SEQ ID NO: 1689161 - RNA, 19 nt, Homo sapiens
  misc_RNA (1)...(19): siRNA sense strand
uaaauucugggaacuagau

SEQ ID NO: 1689162 - RNA, 19 nt, Homo sapiens
  misc_RNA (1)...(19): siRNA sense strand
gaggaagauauaaaccaaa

SEQ ID NO: 1689163 - RNA, 19 nt, Homo sapiens
  misc_RNA (1)...(19): siRNA sense strand
gacagcacagucauucauu

SEQ ID NO: 1689164 - RNA, 19 nt, Homo sapiens
  misc_RNA (1)...(19): siRNA sense strand
ggauggagacgguguacuc

SEQ ID NO: 1689165 - RNA, 19 nt, Homo sapiens
  misc_RNA (1)...(19): siRNA sense strand
gaucucugaagaagacaaa

SEQ ID NO: 1689166 - RNA, 19 nt, Homo sapiens
  misc_RNA (1)...(19): siRNA sense strand
cugaaggacucccagauac

SEQ ID NO: 1689167 - RNA, 19 nt, Homo sapiens
  misc_RNA (1)...(19): siRNA sense strand
ccucuaaauucaucugucu

SEQ ID NO: 1689168 - RNA, 19 nt, Homo sapiens
  misc_RNA (1)...(19): siRNA sense strand
uuacagauuacuucuccua

SEQ ID NO: 1689169 - RNA, 19 nt, Homo sapiens
  misc_RNA (1)...(19): siRNA sense strand
uggaagccaugggaauuga

SEQ ID NO: 1689170 - RNA, 19 nt, Homo sapiens
  misc_RNA (1)...(19): siRNA sense strand
ggagaaaguugcugaauaa

SEQ ID NO: 1689171 - RNA, 19 nt, Homo sapiens
  misc_RNA (1)...(19): siRNA sense strand
gaaagaugcuccagaauuc

SEQ ID NO: 1689172 - RNA, 19 nt, Homo sapiens
  misc_RNA (1)...(19): siRNA sense strand
gauauucucuggugcagua

SEQ ID NO: 1689173 - RNA, 19 nt, Homo sapiens
  misc_RNA (1)...(19): siRNA sense strand
ggaagaagaggaagauaua

SEQ ID NO: 1689174 - RNA, 19 nt, Homo sapiens
  misc_RNA (1)...(19): siRNA sense strand
ccagauaccuguaguaauc

SEQ ID NO: 1689175 - RNA, 19 nt, Homo sapiens
  misc_RNA (1)...(19): siRNA sense strand
gaaaguugcugaauaacca

SEQ ID NO: 1689176 - RNA, 19 nt, Homo sapiens
  misc_RNA (1)...(19): siRNA sense strand
gaacaaacucuaagcagaa

SEQ ID NO: 1689177 - RNA, 19 nt, Homo sapiens
  misc_RNA (1)...(19): siRNA sense strand
gaugaugccucuaaauuca

SEQ ID NO: 1689178 - RNA, 19 nt, Homo sapiens
  misc_RNA (1)...(19): siRNA sense strand
gaacagaaagcagacauuu

SEQ ID NO: 1689179 - RNA, 19 nt, Homo sapiens
  misc_RNA (1)...(19): siRNA sense strand
cagaauggcucacaucuuc

SEQ ID NO: 1689180 - RNA, 19 nt, Homo sapiens
  misc_RNA (1)...(19): siRNA sense strand
gaauugagcccuugccauu

SEQ ID NO: 1689181 - RNA, 19 nt, Homo sapiens
  misc_RNA (1)...(19): siRNA sense strand
ggaaggcuuugaagauuau

SEQ ID NO: 1689182 - RNA, 19 nt, Homo sapiens
  misc_RNA (1)...(19): siRNA sense strand
gaacagagagaucccuuug

SEQ ID NO: 1689183 - RNA, 19 nt, Homo sapiens
  misc_RNA (1)...(19): siRNA sense strand
gaaagcagacauuuaugaa

SEQ ID NO: 1689184 - RNA, 19 nt, Homo sapiens
  misc_RNA (1)...(19): siRNA sense strand
cagauuacuucuccuauga

SEQ ID NO: 1689185 - RNA, 19 nt, Homo sapiens
  misc_RNA (1)...(19): siRNA sense strand
gcucacaucuucuaugaca

SEQ ID NO: 1689186 - RNA, 19 nt, Homo sapiens
  misc_RNA (1)...(19): siRNA sense strand
guggaaagcuucaaucagu

SEQ ID NO: 1689187 - RNA, 19 nt, Homo sapiens
  misc_RNA (1)...(19): siRNA sense strand
uggagaaaguugcugaaua

SEQ ID NO: 1689188 - RNA, 19 nt, Homo sapiens
  misc_RNA (1)...(19): siRNA sense strand
gagaagacaggauuuguga

SEQ ID NO: 1689189 - RNA, 19 nt, Homo sapiens
  misc_RNA (1)...(19): siRNA sense strand
uguaugagcuggaguacuu

SEQ ID NO: 1689190 - RNA, 19 nt, Homo sapiens
  misc_RNA (1)...(19): siRNA sense strand
agaaugagcuaugcagauu

SEQ ID NO: 1689191 - RNA, 19 nt, Homo sapiens
  misc_RNA (1)...(19): siRNA sense strand
caggaaggcuuugaagauu

SEQ ID NO: 1689192 - RNA, 19 nt, Homo sapiens
  misc_RNA (1)...(19): siRNA sense strand
ccagccaccucuccaagua

SEQ ID NO: 1689193 - RNA, 19 nt, Homo sapiens
  misc_RNA (1)...(19): siRNA sense strand
ugaaagaugcuccagaauu

SEQ ID NO: 1689194 - RNA, 19 nt, Homo sapiens
  misc_RNA (1)...(19): siRNA sense strand
agaaauacuuagaccauga

SEQ ID NO: 1689195 - RNA, 19 nt, Homo sapiens
  misc_RNA (1)...(19): siRNA sense strand
gugcaagccuuccagagaa

SEQ ID NO: 1689196 - RNA, 19 nt, Homo sapiens
  misc_RNA (1)...(19): siRNA sense strand
ugaauaauguugugaaugc

SEQ ID NO: 1689197 - RNA, 19 nt, Homo sapiens
  misc_RNA (1)...(19): siRNA sense strand
ccugaaagaugcuccagaa

SEQ ID NO: 1689198 - RNA, 19 nt, Homo sapiens
  misc_RNA (1)...(19): siRNA sense strand
gaagaagaggaagauauaa

SEQ ID NO: 1689199 - RNA, 19 nt, Homo sapiens
  misc_RNA (1)...(19): siRNA sense strand
acagaaagcagacauuuau

SEQ ID NO: 1689200 - RNA, 19 nt, Homo sapiens
  misc_RNA (1)...(19): siRNA sense strand
gaagacaggauuugugaca

SEQ ID NO: 1689201 - RNA, 19 nt, Homo sapiens
  misc_RNA (1)...(19): siRNA sense strand
aaacugcuuucauggauau

SEQ ID NO: 1689202 - RNA, 19 nt, Homo sapiens
  misc_RNA (1)...(19): siRNA sense strand
aggaaggcuuugaagauua

SEQ ID NO: 1689203 - RNA, 19 nt, Homo sapiens
  misc_RNA (1)...(19): siRNA sense strand
caacugcagcucucuagaa

SEQ ID NO: 1689204 - RNA, 19 nt, Homo sapiens
  misc_RNA (1)...(19): siRNA sense strand
agagaaauguggaaagcuu

SEQ ID NO: 1689205 - RNA, 19 nt, Homo sapiens
  misc_RNA (1)...(19): siRNA sense strand
caagcaggauuauugaaag

SEQ ID NO: 1689206 - RNA, 19 nt, Homo sapiens
  misc_RNA (1)...(19): siRNA sense strand
gaaauacuuagaccaugaa

SEQ ID NO: 1689207 - RNA, 19 nt, Homo sapiens
  misc_RNA (1)...(19): siRNA sense strand
ggagaaauacuuagaccau

SEQ ID NO: 1689208 - RNA, 19 nt, Homo sapiens
  misc_RNA (1)...(19): siRNA sense strand
cuaccagcauugaguauug

SEQ ID NO: 1689209 - RNA, 19 nt, Homo sapiens
  misc_RNA (1)...(19): siRNA sense strand
aaauucaucugucuucuag

SEQ ID NO: 1689210 - RNA, 19 nt, Homo sapiens
  misc_RNA (1)...(19): siRNA sense strand
agaaggauguugagaacga

SEQ ID NO: 1689211 - RNA, 19 nt, Homo sapiens
  misc_RNA (1)...(19): siRNA sense strand
gaauggcucacaucuucua

SEQ ID NO: 1689212 - RNA, 19 nt, Homo sapiens
  misc_RNA (1)...(19): siRNA sense strand
gaucacgaccucuacauca

SEQ ID NO: 1689213 - RNA, 19 nt, Homo sapiens
  misc_RNA (1)...(19): siRNA sense strand
gguguacucuccauguaug

SEQ ID NO: 1689214 - RNA, 19 nt, Homo sapiens
  misc_RNA (1)...(19): siRNA sense strand
cugaagaggugcagaaugg

SEQ ID NO: 1689215 - RNA, 19 nt, Homo sapiens
  misc_RNA (1)...(19): siRNA sense strand
ccagaaggauguugagaac

SEQ ID NO: 1689216 - RNA, 19 nt, Homo sapiens
  misc_RNA (1)...(19): siRNA sense strand
uggcucacaucuucuauga

SEQ ID NO: 1689217 - RNA, 19 nt, Homo sapiens
  misc_RNA (1)...(19): siRNA sense strand
gcuguccucucuauuggaa

SEQ ID NO: 1689218 - RNA, 19 nt, Homo sapiens
  misc_RNA (1)...(19): siRNA sense strand
gcaggauuauugaaaggau

SEQ ID NO: 1689219 - RNA, 19 nt, Homo sapiens
  misc_RNA (1)...(19): siRNA sense strand
agaggaagauauaaaccaa

SEQ ID NO: 1689220 - RNA, 19 nt, Homo sapiens
  misc_RNA (1)...(19): siRNA sense strand
ggauauugaagaacagaaa

SEQ ID NO: 1689221 - RNA, 19 nt, Homo sapiens
  misc_RNA (1)...(19): siRNA sense strand
agaaagcagacauuuauga

SEQ ID NO: 1689222 - RNA, 19 nt, Homo sapiens
  misc_RNA (1)...(19): siRNA sense strand
caaacucuaagcagaauug

SEQ ID NO: 1689223 - RNA, 19 nt, Homo sapiens
  misc_RNA (1)...(19): siRNA sense strand
agaggaaucugcccaagca

SEQ ID NO: 1689224 - RNA, 19 nt, Homo sapiens
  misc_RNA (1)...(19): siRNA sense strand
caucuucuaugacacuuuc

SEQ ID NO: 1689225 - RNA, 19 nt, Homo sapiens
  misc_RNA (1)...(19): siRNA sense strand
caggauuauugaaaggaua

SEQ ID NO: 1689226 - RNA, 19 nt, Homo sapiens
  misc_RNA (1)...(19): siRNA sense strand
ucugggaacuagauacuga

SEQ ID NO: 1689227 - RNA, 19 nt, Homo sapiens
  misc_RNA (1)...(19): siRNA sense strand
ggagagaagacaggauuug

SEQ ID NO: 1689228 - RNA, 19 nt, Homo sapiens
  misc_RNA (1)...(19): siRNA sense strand
gaauuccacucccgcuaca

SEQ ID NO: 1689229 - RNA, 19 nt, Homo sapiens
  misc_RNA (1)...(19): siRNA sense strand
ccaggaaggcuuugaagau

SEQ ID NO: 1689230 - RNA, 19 nt, Homo sapiens
  misc_RNA (1)...(19): siRNA sense strand
ccagaugcuugaccuagug

SEQ ID NO: 1689231 - RNA, 19 nt, Homo sapiens
  misc_RNA (1)...(19): siRNA sense strand
gagcuggaguacuucuaug

SEQ ID NO: 1689232 - RNA, 19 nt, Homo sapiens
  misc_RNA (1)...(19): siRNA sense strand
cagaaagagggaagaauga

SEQ ID NO: 1689233 - RNA, 19 nt, Homo sapiens
  misc_RNA (1)...(19): siRNA sense strand
aggccgaucugucucgaua

SEQ ID NO: 1689234 - RNA, 19 nt, Homo sapiens
  misc_RNA (1)...(19): siRNA sense strand
ccaaauuacagauuacuuc

SEQ ID NO: 1689235 - RNA, 19 nt, Homo sapiens
  misc_RNA (1)...(19): siRNA sense strand
acucuaagcagaauugaaa

SEQ ID NO: 1689236 - RNA, 19 nt, Homo sapiens
  misc_RNA (1)...(19): siRNA sense strand
gaaugagcuaugcagauuu

SEQ ID NO: 1689237 - RNA, 19 nt, Homo sapiens
  misc_RNA (1)...(19): siRNA sense strand
ucauggauauugaagaaca

SEQ ID NO: 1689238 - RNA, 19 nt, Homo sapiens
  misc_RNA (1)...(19): siRNA sense strand
ccugaaggacucccagaua

SEQ ID NO: 1689239 - RNA, 19 nt, Homo sapiens
  misc_RNA (1)...(19): siRNA sense strand
ucaucaagcaggauuauug

SEQ ID NO: 1689240 - RNA, 19 nt, Homo sapiens
  misc_RNA (1)...(19): siRNA sense strand
ggaacuagauacugaucac

SEQ ID NO: 1689241 - RNA, 19 nt, Homo sapiens
  misc_RNA (1)...(19): siRNA sense strand
acagauuacuucuccuaug

SEQ ID NO: 1689242 - RNA, 19 nt, Homo sapiens
  misc_RNA (1)...(19): siRNA sense strand
ggaaucugcccaagcacaa

SEQ ID NO: 1689243 - RNA, 19 nt, Homo sapiens
  misc_RNA (1)...(19): siRNA sense strand
gcagaauggcucacaucuu

SEQ ID NO: 1689244 - RNA, 19 nt, Homo sapiens
  misc_RNA (1)...(19): siRNA sense strand
ggucucacguuccugaaag

SEQ ID NO: 1689245 - RNA, 19 nt, Homo sapiens
  misc_RNA (1)...(19): siRNA sense strand
ucaucugucuucuagcaaa

SEQ ID NO: 1689246 - RNA, 19 nt, Homo sapiens
  misc_RNA (1)...(19): siRNA sense strand
gccauuccaugauuuacug

SEQ ID NO: 1689247 - RNA, 19 nt, Homo sapiens
  misc_RNA (1)...(19): siRNA sense strand
gauuucaucccucuacuuc

SEQ ID NO: 1689248 - RNA, 19 nt, Homo sapiens
  misc_RNA (1)...(19): siRNA sense strand
gaaggauguugagaacgau

SEQ ID NO: 1689249 - RNA, 19 nt, Homo sapiens
  misc_RNA (1)...(19): siRNA sense strand
acagaaagagggaagaaug

SEQ ID NO: 1689250 - RNA, 19 nt, Homo sapiens
  misc_RNA (1)...(19): siRNA sense strand
cgaucugucucgauacaau

SEQ ID NO: 1689251 - RNA, 19 nt, Homo sapiens
  misc_RNA (1)...(19): siRNA sense strand
gagggaagaaugagcuaug

SEQ ID NO: 1689252 - RNA, 19 nt, Homo sapiens
  misc_RNA (1)...(19): siRNA sense strand
gccauuguccauaaacauu

SEQ ID NO: 1689253 - RNA, 19 nt, Homo sapiens
  misc_RNA (1)...(19): siRNA sense strand
guaguaaucaugaacaaac

SEQ ID NO: 1689254 - RNA, 19 nt, Homo sapiens
  misc_RNA (1)...(19): siRNA sense strand
aacagaaagcagacauuua

SEQ ID NO: 1689255 - RNA, 19 nt, Homo sapiens
  misc_RNA (1)...(19): siRNA sense strand
aaucaguggaugaagaaua

SEQ ID NO: 1689256 - RNA, 19 nt, Homo sapiens
  misc_RNA (1)...(19): siRNA sense strand
gagagaagacaggauuugu

SEQ ID NO: 1689257 - RNA, 19 nt, Homo sapiens
  misc_RNA (1)...(19): siRNA sense strand
acagcacagucauucauug

SEQ ID NO: 1689258 - RNA, 19 nt, Homo sapiens
  misc_RNA (1)...(19): siRNA sense strand
ucaaucaguggaugaagaa

SEQ ID NO: 1689259 - RNA, 19 nt, Homo sapiens
  misc_RNA (1)...(19): siRNA sense strand
ccagagaaauguggaaagc

SEQ ID NO: 1689260 - RNA, 19 nt, Homo sapiens
  misc_RNA (1)...(19): siRNA sense strand
ggaauccuaccagcauuga

SEQ ID NO: 1689261 - RNA, 19 nt, Homo sapiens
  misc_RNA (1)...(19): siRNA sense strand
uaaauucugggaacuagau

SEQ ID NO: 1689262 - RNA, 19 nt, Homo sapiens
  misc_RNA (1)...(19): siRNA sense strand
gaggaagauauaaaccaaa

SEQ ID NO: 1689263 - RNA, 19 nt, Homo sapiens
  misc_RNA (1)...(19): siRNA sense strand
gacagcacagucauucauu

SEQ ID NO: 1689264 - RNA, 19 nt, Homo sapiens
  misc_RNA (1)...(19): siRNA sense strand
ggauggagacgguguacuc

SEQ ID NO: 1689265 - RNA, 19 nt, Homo sapiens
  misc_RNA (1)...(19): siRNA sense strand
gaucucugaagaagacaaa

SEQ ID NO: 1689266 - RNA, 19 nt, Homo sapiens
  misc_RNA (1)...(19): siRNA sense strand
cugaaggacucccagauac

SEQ ID NO: 1689267 - RNA, 19 nt, Homo sapiens
  misc_RNA (1)...(19): siRNA sense strand
ccucuaaauucaucugucu

SEQ ID NO: 1689268 - RNA, 19 nt, Homo sapiens
  misc_RNA (1)...(19): siRNA sense strand
uuacagauuacuucuccua

SEQ ID NO: 1689269 - RNA, 19 nt, Homo sapiens
  misc_RNA (1)...(19): siRNA sense strand
uggaagccaugggaauuga

SEQ ID NO: 1689270 - RNA, 19 nt, Homo sapiens
  misc_RNA (1)...(19): siRNA sense strand
gaaaagagauguugcagua

SEQ ID NO: 1689271 - RNA, 19 nt, Homo sapiens
  misc_RNA (1)...(19): siRNA sense strand
cuagaugccuccuguauua

SEQ ID NO: 1689272 - RNA, 19 nt, Homo sapiens
  misc_RNA (1)...(19): siRNA sense strand
gaaagaaagaugaagcuua

SEQ ID NO: 1689273 - RNA, 19 nt, Homo sapiens
  misc_RNA (1)...(19): siRNA sense strand
agaagaagguuaucguuua

SEQ ID NO: 1689274 - RNA, 19 nt, Homo sapiens
  misc_RNA (1)...(19): siRNA sense strand
uagcaaagcugaccaagaa

SEQ ID NO: 1689275 - RNA, 19 nt, Homo sapiens
  misc_RNA (1)...(19): siRNA sense strand
gaacuuagcuaucuuucca

SEQ ID NO: 1689276 - RNA, 19 nt, Homo sapiens
  misc_RNA (1)...(19): siRNA sense strand
gaaaguugguuacacagaa

SEQ ID NO: 1689277 - RNA, 19 nt, Homo sapiens
  misc_RNA (1)...(19): siRNA sense strand
gaugugaccuacagaauau

SEQ ID NO: 1689278 - RNA, 19 nt, Homo sapiens
  misc_RNA (1)...(19): siRNA sense strand
gagaauggcuacaagcuau

SEQ ID NO: 1689279 - RNA, 19 nt, Homo sapiens
  misc_RNA (1)...(19): siRNA sense strand
gaagcugucuauacaacua

SEQ ID NO: 1689280 - RNA, 19 nt, Homo sapiens
  misc_RNA (1)...(19): siRNA sense strand
gaaacaugaugggcaauuu

SEQ ID NO: 1689281 - RNA, 19 nt, Homo sapiens
  misc_RNA (1)...(19): siRNA sense strand
aagaagugcugguccauua

SEQ ID NO: 1689282 - RNA, 19 nt, Homo sapiens
  misc_RNA (1)...(19): siRNA sense strand
aaauggaguuucugacuua

SEQ ID NO: 1689283 - RNA, 19 nt, Homo sapiens
  misc_RNA (1)...(19): siRNA sense strand
gaagagcuuuacuuucauu

SEQ ID NO: 1689284 - RNA, 19 nt, Homo sapiens
  misc_RNA (1)...(19): siRNA sense strand
gcacugugguuauagcaaa

SEQ ID NO: 1689285 - RNA, 19 nt, Homo sapiens
  misc_RNA (1)...(19): siRNA sense strand
caacagcaaucucguuugu

SEQ ID NO: 1689286 - RNA, 19 nt, Homo sapiens
  misc_RNA (1)...(19): siRNA sense strand
gggaagaaauuagugguuu

SEQ ID NO: 1689287 - RNA, 19 nt, Homo sapiens
  misc_RNA (1)...(19): siRNA sense strand
guaauagaguucauggaaa

SEQ ID NO: 1689288 - RNA, 19 nt, Homo sapiens
  misc_RNA (1)...(19): siRNA sense strand
aaauagagcuguccaucaa

SEQ ID NO: 1689289 - RNA, 19 nt, Homo sapiens
  misc_RNA (1)...(19): siRNA sense strand
gaacggaccuacucaacag

SEQ ID NO: 1689290 - RNA, 19 nt, Homo sapiens
  misc_RNA (1)...(19): siRNA sense strand
gagaaaaccucuauguaaa

SEQ ID NO: 1689291 - RNA, 19 nt, Homo sapiens
  misc_RNA (1)...(19): siRNA sense strand
gcuacaagcuauuaagaug

SEQ ID NO: 1689292 - RNA, 19 nt, Homo sapiens
  misc_RNA (1)...(19): siRNA sense strand
agaugaagcuuaacacuga

SEQ ID NO: 1689293 - RNA, 19 nt, Homo sapiens
  misc_RNA (1)...(19): siRNA sense strand
ggaagaaauuagugguuug

SEQ ID NO: 1689294 - RNA, 19 nt, Homo sapiens
  misc_RNA (1)...(19): siRNA sense strand
gaacagauaguuggaauuc

SEQ ID NO: 1689295 - RNA, 19 nt, Homo sapiens
  misc_RNA (1)...(19): siRNA sense strand
gaagaaacgaugugaccua

SEQ ID NO: 1689296 - RNA, 19 nt, Homo sapiens
  misc_RNA (1)...(19): siRNA sense strand
acagcaaucucguuuguaa

SEQ ID NO: 1689297 - RNA, 19 nt, Homo sapiens
  misc_RNA (1)...(19): siRNA sense strand
acagauaguuggaauucua

SEQ ID NO: 1689298 - RNA, 19 nt, Homo sapiens
  misc_RNA (1)...(19): siRNA sense strand
ugagagagauuggaccuuu

SEQ ID NO: 1689299 - RNA, 19 nt, Homo sapiens
  misc_RNA (1)...(19): siRNA sense strand
gaagaagguuaucguuuac

SEQ ID NO: 1689300 - RNA, 19 nt, Homo sapiens
  misc_RNA (1)...(19): siRNA sense strand
ggagaaggcacugugguua

SEQ ID NO: 1689301 - RNA, 19 nt, Homo sapiens
  misc_RNA (1)...(19): siRNA sense strand
gaacuugcaaggaaacauu

SEQ ID NO: 1689302 - RNA, 19 nt, Homo sapiens
  misc_RNA (1)...(19): siRNA sense strand
ugugggaaguuaugucuua

SEQ ID NO: 1689303 - RNA, 19 nt, Homo sapiens
  misc_RNA (1)...(19): siRNA sense strand
gcagcucccucgcaaguga

SEQ ID NO: 1689304 - RNA, 19 nt, Homo sapiens
  misc_RNA (1)...(19): siRNA sense strand
gggauucuaucuugccuuu

SEQ ID NO: 1689305 - RNA, 19 nt, Homo sapiens
  misc_RNA (1)...(19): siRNA sense strand
aaacagaguuggaguggau

SEQ ID NO: 1689306 - RNA, 19 nt, Homo sapiens
  misc_RNA (1)...(19): siRNA sense strand
gaaacgaugugaccuacag

SEQ ID NO: 1689307 - RNA, 19 nt, Homo sapiens
  misc_RNA (1)...(19): siRNA sense strand
gaucuucagugcucucguu

SEQ ID NO: 1689308 - RNA, 19 nt, Homo sapiens
  misc_RNA (1)...(19): siRNA sense strand
ggaaaccagucaugauagu

SEQ ID NO: 1689309 - RNA, 19 nt, Homo sapiens
  misc_RNA (1)...(19): siRNA sense strand
aaagaaggcuccuccagau

SEQ ID NO: 1689310 - RNA, 19 nt, Homo sapiens
  misc_RNA (1)...(19): siRNA sense strand
uaaauggaguuucugacuu

SEQ ID NO: 1689311 - RNA, 19 nt, Homo sapiens
  misc_RNA (1)...(19): siRNA sense strand
gcaauauucuugucaacag

SEQ ID NO: 1689312 - RNA, 19 nt, Homo sapiens
  misc_RNA (1)...(19): siRNA sense strand
agaaggcacugugguuaua

SEQ ID NO: 1689313 - RNA, 19 nt, Homo sapiens
  misc_RNA (1)...(19): siRNA sense strand
uaacagucuuccuggagua

SEQ ID NO: 1689314 - RNA, 19 nt, Homo sapiens
  misc_RNA (1)...(19): siRNA sense strand
cuacagcugucuccaguga

SEQ ID NO: 1689315 - RNA, 19 nt, Homo sapiens
  misc_RNA (1)...(19): siRNA sense strand
agaggaagcuacagguaaa

SEQ ID NO: 1689316 - RNA, 19 nt, Homo sapiens
  misc_RNA (1)...(19): siRNA sense strand
gauucuaucuugccuuuca

SEQ ID NO: 1689317 - RNA, 19 nt, Homo sapiens
  misc_RNA (1)...(19): siRNA sense strand
ccaauggagucaucacaga

SEQ ID NO: 1689318 - RNA, 19 nt, Homo sapiens
  misc_RNA (1)...(19): siRNA sense strand
gacacuggcaggaauauaa

SEQ ID NO: 1689319 - RNA, 19 nt, Homo sapiens
  misc_RNA (1)...(19): siRNA sense strand
aaacaugaugggcaauuua

SEQ ID NO: 1689320 - RNA, 19 nt, Homo sapiens
  misc_RNA (1)...(19): siRNA sense strand
gaugggcaauuuacaguca

SEQ ID NO: 1689321 - RNA, 19 nt, Homo sapiens
  misc_RNA (1)...(19): siRNA sense strand
caaaggcaaugcacaaagg

SEQ ID NO: 1689322 - RNA, 19 nt, Homo sapiens
  misc_RNA (1)...(19): siRNA sense strand
gaauggcuacaagcuauua

SEQ ID NO: 1689323 - RNA, 19 nt, Homo sapiens
  misc_RNA (1)...(19): siRNA sense strand
ggacaugucaaaucaagau

SEQ ID NO: 1689324 - RNA, 19 nt, Homo sapiens
  misc_RNA (1)...(19): siRNA sense strand
gauuagaggauaacuaugu

SEQ ID NO: 1689325 - RNA, 19 nt, Homo sapiens
  misc_RNA (1)...(19): siRNA sense strand
ggaguaacauuggauacau

SEQ ID NO: 1689326 - RNA, 19 nt, Homo sapiens
  misc_RNA (1)...(19): siRNA sense strand
cuacaagucuuccucucaa

SEQ ID NO: 1689327 - RNA, 19 nt, Homo sapiens
  misc_RNA (1)...(19): siRNA sense strand
ggagaauggcuacaagcua

SEQ ID NO: 1689328 - RNA, 19 nt, Homo sapiens
  misc_RNA (1)...(19): siRNA sense strand
ggaugacuauugaggaugu

SEQ ID NO: 1689329 - RNA, 19 nt, Homo sapiens
  misc_RNA (1)...(19): siRNA sense strand
caccauugcugcagaugaa

SEQ ID NO: 1689330 - RNA, 19 nt, Homo sapiens
  misc_RNA (1)...(19): siRNA sense strand
gaagugcugguccauuauu

SEQ ID NO: 1689331 - RNA, 19 nt, Homo sapiens
  misc_RNA (1)...(19): siRNA sense strand
gcauagcuuugguuucugu

SEQ ID NO: 1689332 - RNA, 19 nt, Homo sapiens
  misc_RNA (1)...(19): siRNA sense strand
gagagagauuggaccuuug

SEQ ID NO: 1689333 - RNA, 19 nt, Homo sapiens
  misc_RNA (1)...(19): siRNA sense strand
acaacuggcugcggacuaa

SEQ ID NO: 1689334 - RNA, 19 nt, Homo sapiens
  misc_RNA (1)...(19): siRNA sense strand
ggaacuggcauucaagugu

SEQ ID NO: 1689335 - RNA, 19 nt, Homo sapiens
  misc_RNA (1)...(19): siRNA sense strand
cgaugugaccuacagaaua

SEQ ID NO: 1689336 - RNA, 19 nt, Homo sapiens
  misc_RNA (1)...(19): siRNA sense strand
gcugguccauuauugagaa

SEQ ID NO: 1689337 - RNA, 19 nt, Homo sapiens
  misc_RNA (1)...(19): siRNA sense strand
uugaggaugugaugaguuu

SEQ ID NO: 1689338 - RNA, 19 nt, Homo sapiens
  misc_RNA (1)...(19): siRNA sense strand
gggaaguuaugucuuaugg

SEQ ID NO: 1689339 - RNA, 19 nt, Homo sapiens
  misc_RNA (1)...(19): siRNA sense strand
gaaaccagucaugauagua

SEQ ID NO: 1689340 - RNA, 19 nt, Homo sapiens
  misc_RNA (1)...(19): siRNA sense strand
aaaguugguuacacagaaa

SEQ ID NO: 1689341 - RNA, 19 nt, Homo sapiens
  misc_RNA (1)...(19): siRNA sense strand
cgaugaagagcuuuacuuu

SEQ ID NO: 1689342 - RNA, 19 nt, Homo sapiens
  misc_RNA (1)...(19): siRNA sense strand
gaguaacauuggauacaug

SEQ ID NO: 1689343 - RNA, 19 nt, Homo sapiens
  misc_RNA (1)...(19): siRNA sense strand
uagccaggaugacuauuga

SEQ ID NO: 1689344 - RNA, 19 nt, Homo sapiens
  misc_RNA (1)...(19): siRNA sense strand
gcucuuugcugcugucagu

SEQ ID NO: 1689345 - RNA, 19 nt, Homo sapiens
  misc_RNA (1)...(19): siRNA sense strand
gaaggcuccuccagaugug

SEQ ID NO: 1689346 - RNA, 19 nt, Homo sapiens
  misc_RNA (1)...(19): siRNA sense strand
aaacccaaauagucugaaa

SEQ ID NO: 1689347 - RNA, 19 nt, Homo sapiens
  misc_RNA (1)...(19): siRNA sense strand
cagcuaauguuggauuguu

SEQ ID NO: 1689348 - RNA, 19 nt, Homo sapiens
  misc_RNA (1)...(19): siRNA sense strand
aaaccagucaugauaguaa

SEQ ID NO: 1689349 - RNA, 19 nt, Homo sapiens
  misc_RNA (1)...(19): siRNA sense strand
caaauagagcuguccauca

SEQ ID NO: 1689350 - RNA, 19 nt, Homo sapiens
  misc_RNA (1)...(19): siRNA sense strand
gagcagggcgaauguguuc

SEQ ID NO: 1689351 - RNA, 19 nt, Homo sapiens
  misc_RNA (1)...(19): siRNA sense strand
uagaagaagguuaucguuu

SEQ ID NO: 1689352 - RNA, 19 nt, Homo sapiens
  misc_RNA (1)...(19): siRNA sense strand
caugucaaaucaagauguu

SEQ ID NO: 1689353 - RNA, 19 nt, Homo sapiens
  misc_RNA (1)...(19): siRNA sense strand
ggaaacaugaugggcaauu

SEQ ID NO: 1689354 - RNA, 19 nt, Homo sapiens
  misc_RNA (1)...(19): siRNA sense strand
gagaaggcacugugguuau

SEQ ID NO: 1689355 - RNA, 19 nt, Homo sapiens
  misc_RNA (1)...(19): siRNA sense strand
gaaaccaggaacaguguau

SEQ ID NO: 1689356 - RNA, 19 nt, Homo sapiens
  misc_RNA (1)...(19): siRNA sense strand
caaagcaggcuaccagcaa

SEQ ID NO: 1689357 - RNA, 19 nt, Homo sapiens
  misc_RNA (1)...(19): siRNA sense strand
aauaagcccucuucuggau

SEQ ID NO: 1689358 - RNA, 19 nt, Homo sapiens
  misc_RNA (1)...(19): siRNA sense strand
uccagaagcugucuauaca

SEQ ID NO: 1689359 - RNA, 19 nt, Homo sapiens
  misc_RNA (1)...(19): siRNA sense strand
agaaggcgaugaagagcuu

SEQ ID NO: 1689360 - RNA, 19 nt, Homo sapiens
  misc_RNA (1)...(19): siRNA sense strand
cacagaauaugaaaucaag

SEQ ID NO: 1689361 - RNA, 19 nt, Homo sapiens
  misc_RNA (1)...(19): siRNA sense strand
cagacuggauuagaggaua

SEQ ID NO: 1689362 - RNA, 19 nt, Homo sapiens
  misc_RNA (1)...(19): siRNA sense strand
caaccaaaccacaguaagu

SEQ ID NO: 1689363 - RNA, 19 nt, Homo sapiens
  misc_RNA (1)...(19): siRNA sense strand
aaagcaggcuaccagcaaa

SEQ ID NO: 1689364 - RNA, 19 nt, Homo sapiens
  misc_RNA (1)...(19): siRNA sense strand
guaggaaugcugagaggaa

SEQ ID NO: 1689365 - RNA, 19 nt, Homo sapiens
  misc_RNA (1)...(19): siRNA sense strand
auagagcuguccaucaauu

SEQ ID NO: 1689366 - RNA, 19 nt, Homo sapiens
  misc_RNA (1)...(19): siRNA sense strand
gucuuuggcuucaucauug

SEQ ID NO: 1689367 - RNA, 19 nt, Homo sapiens
  misc_RNA (1)...(19): siRNA sense strand
agacuggauuagaggauaa

SEQ ID NO: 1689368 - RNA, 19 nt, Homo sapiens
  misc_RNA (1)...(19): siRNA sense strand
ccugaaaguugguuacaca

SEQ ID NO: 1689369 - RNA, 19 nt, Homo sapiens
  misc_RNA (1)...(19): siRNA sense strand
ucaaaacacuccugauuuc

SEQ ID NO: 1689370 - RNA, 19 nt, Homo sapiens
  misc_RNA (1)...(19): siRNA sense strand
ggaauaccgucugguuaaa

SEQ ID NO: 1689371 - RNA, 19 nt, Homo sapiens
  misc_RNA (1)...(19): siRNA sense strand
gaacgugacccuccagugu

SEQ ID NO: 1689372 - RNA, 19 nt, Homo sapiens
  misc_RNA (1)...(19): siRNA sense strand
ggagauaccgcuguuacua

SEQ ID NO: 1689373 - RNA, 19 nt, Homo sapiens
  misc_RNA (1)...(19): siRNA sense strand
caacaaacccacccucuca

SEQ ID NO: 1689374 - RNA, 19 nt, Homo sapiens
  misc_RNA (1)...(19): siRNA sense strand
caggaauaccgucugguua

SEQ ID NO: 1689375 - RNA, 19 nt, Homo sapiens
  misc_RNA (1)...(19): siRNA sense strand
ccaagaacaaggccagauu

SEQ ID NO: 1689376 - RNA, 19 nt, Homo sapiens
  misc_RNA (1)...(19): siRNA sense strand
acagguggaugcucagaug

SEQ ID NO: 1689377 - RNA, 19 nt, Homo sapiens
  misc_RNA (1)...(19): siRNA sense strand
gguggaugcucagaugcua

SEQ ID NO: 1689378 - RNA, 19 nt, Homo sapiens
  misc_RNA (1)...(19): siRNA sense strand
aggaauaccgucugguuaa

SEQ ID NO: 1689379 - RNA, 19 nt, Homo sapiens
  misc_RNA (1)...(19): siRNA sense strand
caagaacaaggccagauuc

SEQ ID NO: 1689380 - RNA, 19 nt, Homo sapiens
  misc_RNA (1)...(19): siRNA sense strand
aauaccgucugguuaaaga

SEQ ID NO: 1689381 - RNA, 19 nt, Homo sapiens
  misc_RNA (1)...(19): siRNA sense strand
guggugaccucaggagaga

SEQ ID NO: 1689382 - RNA, 19 nt, Homo sapiens
  misc_RNA (1)...(19): siRNA sense strand
gagauucgacagguucauu

SEQ ID NO: 1689383 - RNA, 19 nt, Homo sapiens
  misc_RNA (1)...(19): siRNA sense strand
acagguucauucugacuga

SEQ ID NO: 1689384 - RNA, 19 nt, Homo sapiens
  misc_RNA (1)...(19): siRNA sense strand
gagauaccgcuguuacuac

SEQ ID NO: 1689385 - RNA, 19 nt, Homo sapiens
  misc_RNA (1)...(19): siRNA sense strand
aggcauauccugcagguau

SEQ ID NO: 1689386 - RNA, 19 nt, Homo sapiens
  misc_RNA (1)...(19): siRNA sense strand
uucgacagguucauucuga

SEQ ID NO: 1689387 - RNA, 19 nt, Homo sapiens
  misc_RNA (1)...(19): siRNA sense strand
uaaagagggaagcccagaa

SEQ ID NO: 1689388 - RNA, 19 nt, Homo sapiens
  misc_RNA (1)...(19): siRNA sense strand
cacuggagcccaagaacaa

SEQ ID NO: 1689389 - RNA, 19 nt, Homo sapiens
  misc_RNA (1)...(19): siRNA sense strand
gcccugcccucaugguucu

SEQ ID NO: 1689390 - RNA, 19 nt, Homo sapiens
  misc_RNA (1)...(19): siRNA sense strand
gaauaccgucugguuaaag

SEQ ID NO: 1689391 - RNA, 19 nt, Homo sapiens
  misc_RNA (1)...(19): siRNA sense strand
ccacuggagcccaagaaca

SEQ ID NO: 1689392 - RNA, 19 nt, Homo sapiens
  misc_RNA (1)...(19): siRNA sense strand
gagcccugcccucaugguu

SEQ ID NO: 1689393 - RNA, 19 nt, Homo sapiens
  misc_RNA (1)...(19): siRNA sense strand
agauaccgcuguuacuacu

SEQ ID NO: 1689394 - RNA, 19 nt, Homo sapiens
  misc_RNA (1)...(19): siRNA sense strand
ggaauaccgucugguuaaa

SEQ ID NO: 1689395 - RNA, 19 nt, Homo sapiens
  misc_RNA (1)...(19): siRNA sense strand
gaacgugacccuccagugu

SEQ ID NO: 1689396 - RNA, 19 nt, Homo sapiens
  misc_RNA (1)...(19): siRNA sense strand
ggagauaccgcuguuacua

SEQ ID NO: 1689397 - RNA, 19 nt, Homo sapiens
  misc_RNA (1)...(19): siRNA sense strand
caacaaacccacccucuca

SEQ ID NO: 1689398 - RNA, 19 nt, Homo sapiens
  misc_RNA (1)...(19): siRNA sense strand
caggaauaccgucugguua

SEQ ID NO: 1689399 - RNA, 19 nt, Homo sapiens
  misc_RNA (1)...(19): siRNA sense strand
ccaagaacaaggccagauu

SEQ ID NO: 1689400 - RNA, 19 nt, Homo sapiens
  misc_RNA (1)...(19): siRNA sense strand
acagguggaugcucagaug

SEQ ID NO: 1689401 - RNA, 19 nt, Homo sapiens
  misc_RNA (1)...(19): siRNA sense strand
gguggaugcucagaugcua

SEQ ID NO: 1689402 - RNA, 19 nt, Homo sapiens
  misc_RNA (1)...(19): siRNA sense strand
aggaauaccgucugguuaa

SEQ ID NO: 1689403 - RNA, 19 nt, Homo sapiens
  misc_RNA (1)...(19): siRNA sense strand
caagaacaaggccagauuc

SEQ ID NO: 1689404 - RNA, 19 nt, Homo sapiens
  misc_RNA (1)...(19): siRNA sense strand
aauaccgucugguuaaaga

SEQ ID NO: 1689405 - RNA, 19 nt, Homo sapiens
  misc_RNA (1)...(19): siRNA sense strand
guggugaccucaggagaga

SEQ ID NO: 1689406 - RNA, 19 nt, Homo sapiens
  misc_RNA (1)...(19): siRNA sense strand
gagauucgacagguucauu

SEQ ID NO: 1689407 - RNA, 19 nt, Homo sapiens
  misc_RNA (1)...(19): siRNA sense strand
acagguucauucugacuga

SEQ ID NO: 1689408 - RNA, 19 nt, Homo sapiens
  misc_RNA (1)...(19): siRNA sense strand
gagauaccgcuguuacuac

SEQ ID NO: 1689409 - RNA, 19 nt, Homo sapiens
  misc_RNA (1)...(19): siRNA sense strand
aggcauauccugcagguau

SEQ ID NO: 1689410 - RNA, 19 nt, Homo sapiens
  misc_RNA (1)...(19): siRNA sense strand
uucgacagguucauucuga

SEQ ID NO: 1689411 - RNA, 19 nt, Homo sapiens
  misc_RNA (1)...(19): siRNA sense strand
uaaagagggaagcccagaa

SEQ ID NO: 1689412 - RNA, 19 nt, Homo sapiens
  misc_RNA (1)...(19): siRNA sense strand
cacuggagcccaagaacaa

SEQ ID NO: 1689413 - RNA, 19 nt, Homo sapiens
  misc_RNA (1)...(19): siRNA sense strand
gcccugcccucaugguucu

SEQ ID NO: 1689414 - RNA, 19 nt, Homo sapiens
  misc_RNA (1)...(19): siRNA sense strand
gaauaccgucugguuaaag

SEQ ID NO: 1689415 - RNA, 19 nt, Homo sapiens
  misc_RNA (1)...(19): siRNA sense strand
ccacuggagcccaagaaca

SEQ ID NO: 1689416 - RNA, 19 nt, Homo sapiens
  misc_RNA (1)...(19): siRNA sense strand
gagcccugcccucaugguu

SEQ ID NO: 1689417 - RNA, 19 nt, Homo sapiens
  misc_RNA (1)...(19): siRNA sense strand
agauaccgcuguuacuacu

SEQ ID NO: 1689418 - RNA, 19 nt, Homo sapiens
  misc_RNA (1)...(19): siRNA sense strand
ggaauaccgucugguuaaa

SEQ ID NO: 1689419 - RNA, 19 nt, Homo sapiens
  misc_RNA (1)...(19): siRNA sense strand
gaacgugacccuccagugu

SEQ ID NO: 1689420 - RNA, 19 nt, Homo sapiens
  misc_RNA (1)...(19): siRNA sense strand
ggagauaccgcuguuacua

SEQ ID NO: 1689421 - RNA, 19 nt, Homo sapiens
  misc_RNA (1)...(19): siRNA sense strand
caacaaacccacccucuca

SEQ ID NO: 1689422 - RNA, 19 nt, Homo sapiens
  misc_RNA (1)...(19): siRNA sense strand
caggaauaccgucugguua

SEQ ID NO: 1689423 - RNA, 19 nt, Homo sapiens
  misc_RNA (1)...(19): siRNA sense strand
ccaagaacaaggccagauu

SEQ ID NO: 1689424 - RNA, 19 nt, Homo sapiens
  misc_RNA (1)...(19): siRNA sense strand
acagguggaugcucagaug

SEQ ID NO: 1689425 - RNA, 19 nt, Homo sapiens
  misc_RNA (1)...(19): siRNA sense strand
gguggaugcucagaugcua

SEQ ID NO: 1689426 - RNA, 19 nt, Homo sapiens
  misc_RNA (1)...(19): siRNA sense strand
aggaauaccgucugguuaa

SEQ ID NO: 1689427 - RNA, 19 nt, Homo sapiens
  misc_RNA (1)...(19): siRNA sense strand
caagaacaaggccagauuc

SEQ ID NO: 1689428 - RNA, 19 nt, Homo sapiens
  misc_RNA (1)...(19): siRNA sense strand
aauaccgucugguuaaaga

SEQ ID NO: 1689429 - RNA, 19 nt, Homo sapiens
  misc_RNA (1)...(19): siRNA sense strand
guggugaccucaggagaga

SEQ ID NO: 1689430 - RNA, 19 nt, Homo sapiens
  misc_RNA (1)...(19): siRNA sense strand
gagauucgacagguucauu

SEQ ID NO: 1689431 - RNA, 19 nt, Homo sapiens
  misc_RNA (1)...(19): siRNA sense strand
acagguucauucugacuga

SEQ ID NO: 1689432 - RNA, 19 nt, Homo sapiens
  misc_RNA (1)...(19): siRNA sense strand
gagauaccgcuguuacuac

SEQ ID NO: 1689433 - RNA, 19 nt, Homo sapiens
  misc_RNA (1)...(19): siRNA sense strand
aggcauauccugcagguau

SEQ ID NO: 1689434 - RNA, 19 nt, Homo sapiens
  misc_RNA (1)...(19): siRNA sense strand
uucgacagguucauucuga

SEQ ID NO: 1689435 - RNA, 19 nt, Homo sapiens
  misc_RNA (1)...(19): siRNA sense strand
uaaagagggaagcccagaa

SEQ ID NO: 1689436 - RNA, 19 nt, Homo sapiens
  misc_RNA (1)...(19): siRNA sense strand
cacuggagcccaagaacaa

SEQ ID NO: 1689437 - RNA, 19 nt, Homo sapiens
  misc_RNA (1)...(19): siRNA sense strand
gcccugcccucaugguucu

SEQ ID NO: 1689438 - RNA, 19 nt, Homo sapiens
  misc_RNA (1)...(19): siRNA sense strand
gaauaccgucugguuaaag

SEQ ID NO: 1689439 - RNA, 19 nt, Homo sapiens
  misc_RNA (1)...(19): siRNA sense strand
ccacuggagcccaagaaca

SEQ ID NO: 1689440 - RNA, 19 nt, Homo sapiens
  misc_RNA (1)...(19): siRNA sense strand
gagcccugcccucaugguu

SEQ ID NO: 1689441 - RNA, 19 nt, Homo sapiens
  misc_RNA (1)...(19): siRNA sense strand
agauaccgcuguuacuacu

SEQ ID NO: 1689442 - RNA, 19 nt, Homo sapiens
  misc_RNA (1)...(19): siRNA sense strand
ggaauaccgucugguuaaa

SEQ ID NO: 1689443 - RNA, 19 nt, Homo sapiens
  misc_RNA (1)...(19): siRNA sense strand
gaacgugacccuccagugu

SEQ ID NO: 1689444 - RNA, 19 nt, Homo sapiens
  misc_RNA (1)...(19): siRNA sense strand
ggagauaccgcuguuacua

SEQ ID NO: 1689445 - RNA, 19 nt, Homo sapiens
  misc_RNA (1)...(19): siRNA sense strand
caacaaacccacccucuca

SEQ ID NO: 1689446 - RNA, 19 nt, Homo sapiens
  misc_RNA (1)...(19): siRNA sense strand
caggaauaccgucugguua

SEQ ID NO: 1689447 - RNA, 19 nt, Homo sapiens
  misc_RNA (1)...(19): siRNA sense strand
ccaagaacaaggccagauu

SEQ ID NO: 1689448 - RNA, 19 nt, Homo sapiens
  misc_RNA (1)...(19): siRNA sense strand
acagguggaugcucagaug

SEQ ID NO: 1689449 - RNA, 19 nt, Homo sapiens
  misc_RNA (1)...(19): siRNA sense strand
gguggaugcucagaugcua

SEQ ID NO: 1689450 - RNA, 19 nt, Homo sapiens
  misc_RNA (1)...(19): siRNA sense strand
aggaauaccgucugguuaa

SEQ ID NO: 1689451 - RNA, 19 nt, Homo sapiens
  misc_RNA (1)...(19): siRNA sense strand
caagaacaaggccagauuc

SEQ ID NO: 1689452 - RNA, 19 nt, Homo sapiens
  misc_RNA (1)...(19): siRNA sense strand
aauaccgucugguuaaaga

SEQ ID NO: 1689453 - RNA, 19 nt, Homo sapiens
  misc_RNA (1)...(19): siRNA sense strand
guggugaccucaggagaga

SEQ ID NO: 1689454 - RNA, 19 nt, Homo sapiens
  misc_RNA (1)...(19): siRNA sense strand
gagauucgacagguucauu

SEQ ID NO: 1689455 - RNA, 19 nt, Homo sapiens
  misc_RNA (1)...(19): siRNA sense strand
acagguucauucugacuga

SEQ ID NO: 1689456 - RNA, 19 nt, Homo sapiens
  misc_RNA (1)...(19): siRNA sense strand
gagauaccgcuguuacuac

SEQ ID NO: 1689457 - RNA, 19 nt, Homo sapiens
  misc_RNA (1)...(19): siRNA sense strand
aggcauauccugcagguau

SEQ ID NO: 1689458 - RNA, 19 nt, Homo sapiens
  misc_RNA (1)...(19): siRNA sense strand
uucgacagguucauucuga

SEQ ID NO: 1689459 - RNA, 19 nt, Homo sapiens
  misc_RNA (1)...(19): siRNA sense strand
uaaagagggaagcccagaa

SEQ ID NO: 1689460 - RNA, 19 nt, Homo sapiens
  misc_RNA (1)...(19): siRNA sense strand
cacuggagcccaagaacaa

SEQ ID NO: 1689461 - RNA, 19 nt, Homo sapiens
  misc_RNA (1)...(19): siRNA sense strand
gcccugcccucaugguucu

SEQ ID NO: 1689462 - RNA, 19 nt, Homo sapiens
  misc_RNA (1)...(19): siRNA sense strand
gaauaccgucugguuaaag

SEQ ID NO: 1689463 - RNA, 19 nt, Homo sapiens
  misc_RNA (1)...(19): siRNA sense strand
ccacuggagcccaagaaca

SEQ ID NO: 1689464 - RNA, 19 nt, Homo sapiens
  misc_RNA (1)...(19): siRNA sense strand
gagcccugcccucaugguu

SEQ ID NO: 1689465 - RNA, 19 nt, Homo sapiens
  misc_RNA (1)...(19): siRNA sense strand
agauaccgcuguuacuacu

SEQ ID NO: 1689466 - RNA, 19 nt, Homo sapiens
  misc_RNA (1)...(19): siRNA sense strand
gggcaaagcugacuucaug

SEQ ID NO: 1689467 - RNA, 19 nt, Homo sapiens
  misc_RNA (1)...(19): siRNA sense strand
gcaaacagcgcaaggaguu

SEQ ID NO: 1689468 - RNA, 19 nt, Homo sapiens
  misc_RNA (1)...(19): siRNA sense strand
uugaugagcuuaagguaua

SEQ ID NO: 1689469 - RNA, 19 nt, Homo sapiens
  misc_RNA (1)...(19): siRNA sense strand
caacaagcgugucgccuau

SEQ ID NO: 1689470 - RNA, 19 nt, Homo sapiens
  misc_RNA (1)...(19): siRNA sense strand
gaauugacuuggaggagaa

SEQ ID NO: 1689471 - RNA, 19 nt, Homo sapiens
  misc_RNA (1)...(19): siRNA sense strand
ccaaagaggagaagaagaa

SEQ ID NO: 1689472 - RNA, 19 nt, Homo sapiens
  misc_RNA (1)...(19): siRNA sense strand
gcaaugagaacgaugaguu

SEQ ID NO: 1689473 - RNA, 19 nt, Homo sapiens
  misc_RNA (1)...(19): siRNA sense strand
caccucagcucgaguacua

SEQ ID NO: 1689474 - RNA, 19 nt, Homo sapiens
  misc_RNA (1)...(19): siRNA sense strand
gaagaagaaacccaagauu

SEQ ID NO: 1689475 - RNA, 19 nt, Homo sapiens
  misc_RNA (1)...(19): siRNA sense strand
acacauggcuacaauaucu

SEQ ID NO: 1689476 - RNA, 19 nt, Homo sapiens
  misc_RNA (1)...(19): siRNA sense strand
gaaguggaccucccagaga

SEQ ID NO: 1689477 - RNA, 19 nt, Homo sapiens
  misc_RNA (1)...(19): siRNA sense strand
agaagaaacccaagauuga

SEQ ID NO: 1689478 - RNA, 19 nt, Homo sapiens
  misc_RNA (1)...(19): siRNA sense strand
gcacagcauucccgacauc

SEQ ID NO: 1689479 - RNA, 19 nt, Homo sapiens
  misc_RNA (1)...(19): siRNA sense strand
ucaagaaacuggagaccau

SEQ ID NO: 1689480 - RNA, 19 nt, Homo sapiens
  misc_RNA (1)...(19): siRNA sense strand
cagaugagguggucuugga

SEQ ID NO: 1689481 - RNA, 19 nt, Homo sapiens
  misc_RNA (1)...(19): siRNA sense strand
ggagcaacuucgacaacaa

SEQ ID NO: 1689482 - RNA, 19 nt, Homo sapiens
  misc_RNA (1)...(19): siRNA sense strand
ugaaaucuaugaccaggau

SEQ ID NO: 1689483 - RNA, 19 nt, Homo sapiens
  misc_RNA (1)...(19): siRNA sense strand
gcugcacacuuucaacuug

SEQ ID NO: 1689484 - RNA, 19 nt, Homo sapiens
  misc_RNA (1)...(19): siRNA sense strand
gaagaaacccaagauugau

SEQ ID NO: 1689485 - RNA, 19 nt, Homo sapiens
  misc_RNA (1)...(19): siRNA sense strand
ccaaggaccugcucuucuc

SEQ ID NO: 1689486 - RNA, 19 nt, Homo sapiens
  misc_RNA (1)...(19): siRNA sense strand
ggacgacgacuucuucaca

SEQ ID NO: 1689487 - RNA, 19 nt, Homo sapiens
  misc_RNA (1)...(19): siRNA sense strand
caaguacuuugccuccauu

SEQ ID NO: 1689488 - RNA, 19 nt, Homo sapiens
  misc_RNA (1)...(19): siRNA sense strand
agaagaagaagaagaagaa

SEQ ID NO: 1689489 - RNA, 19 nt, Homo sapiens
  misc_RNA (1)...(19): siRNA sense strand
gauccacaauuauaagaag

SEQ ID NO: 1689490 - RNA, 19 nt, Homo sapiens
  misc_RNA (1)...(19): siRNA sense strand
ggaaguccuuugacaucga

SEQ ID NO: 1689491 - RNA, 19 nt, Homo sapiens
  misc_RNA (1)...(19): siRNA sense strand
ccacacauggcuacaauau

SEQ ID NO: 1689492 - RNA, 19 nt, Homo sapiens
  misc_RNA (1)...(19): siRNA sense strand
gagaagaagaagaagaaga

SEQ ID NO: 1689493 - RNA, 19 nt, Homo sapiens
  misc_RNA (1)...(19): siRNA sense strand
ucaacacccucgucaagug

SEQ ID NO: 1689494 - RNA, 19 nt, Homo sapiens
  misc_RNA (1)...(19): siRNA sense strand
ggaggacgacgacuucuuc

SEQ ID NO: 1689495 - RNA, 19 nt, Homo sapiens
  misc_RNA (1)...(19): siRNA sense strand
agaaggagaagaagaagaa

SEQ ID NO: 1689496 - RNA, 19 nt, Homo sapiens
  misc_RNA (1)...(19): siRNA sense strand
gcaaugaccccaucaaugu

SEQ ID NO: 1689497 - RNA, 19 nt, Homo sapiens
  misc_RNA (1)...(19): siRNA sense strand
caaugagaacgaugaguuu

SEQ ID NO: 1689498 - RNA, 19 nt, Homo sapiens
  misc_RNA (1)...(19): siRNA sense strand
ccaucgagcuggaccugaa

SEQ ID NO: 1689499 - RNA, 19 nt, Homo sapiens
  misc_RNA (1)...(19): siRNA sense strand
caagaaggaguccauguuc

SEQ ID NO: 1689500 - RNA, 19 nt, Homo sapiens
  misc_RNA (1)...(19): siRNA sense strand
ccaagaaggaguccauguu

SEQ ID NO: 1689501 - RNA, 19 nt, Homo sapiens
  misc_RNA (1)...(19): siRNA sense strand
gcccaucauugucauugaa

SEQ ID NO: 1689502 - RNA, 19 nt, Homo sapiens
  misc_RNA (1)...(19): siRNA sense strand
aggacuggcugcacacuuu

SEQ ID NO: 1689503 - RNA, 19 nt, Homo sapiens
  misc_RNA (1)...(19): siRNA sense strand
aagaagaaacccaagauug

SEQ ID NO: 1689504 - RNA, 19 nt, Homo sapiens
  misc_RNA (1)...(19): siRNA sense strand
gagaagaagaaacccaaga

SEQ ID NO: 1689505 - RNA, 19 nt, Homo sapiens
  misc_RNA (1)...(19): siRNA sense strand
cgucccugauccacaauua

SEQ ID NO: 1689506 - RNA, 19 nt, Homo sapiens
  misc_RNA (1)...(19): siRNA sense strand
gcagcucaacccugucuuu

SEQ ID NO: 1689507 - RNA, 19 nt, Homo sapiens
  misc_RNA (1)...(19): siRNA sense strand
ggacgauccgcccaucauu

SEQ ID NO: 1689508 - RNA, 19 nt, Homo sapiens
  misc_RNA (1)...(19): siRNA sense strand
acacagacguccacuacca

SEQ ID NO: 1689509 - RNA, 19 nt, Homo sapiens
  misc_RNA (1)...(19): siRNA sense strand
ggagaaguccagugacauc

SEQ ID NO: 1689510 - RNA, 19 nt, Homo sapiens
  misc_RNA (1)...(19): siRNA sense strand
gaguggaggugcuguucug

SEQ ID NO: 1689511 - RNA, 19 nt, Homo sapiens
  misc_RNA (1)...(19): siRNA sense strand
ggacgccucuggacaucuc

SEQ ID NO: 1689512 - RNA, 19 nt, Homo sapiens
  misc_RNA (1)...(19): siRNA sense strand
caagauugaugagcuuaag

SEQ ID NO: 1689513 - RNA, 19 nt, Homo sapiens
  misc_RNA (1)...(19): siRNA sense strand
gccagaacuuccugcagaa

SEQ ID NO: 1689514 - RNA, 19 nt, Homo sapiens
  misc_RNA (1)...(19): siRNA sense strand
gggagguuguggugacuau

SEQ ID NO: 1689515 - RNA, 19 nt, Homo sapiens
  misc_RNA (1)...(19): siRNA sense strand
gagcuggaguccgaguuug

SEQ ID NO: 1689516 - RNA, 19 nt, Homo sapiens
  misc_RNA (1)...(19): siRNA sense strand
ggacagugcaggccaaggu

SEQ ID NO: 1689517 - RNA, 19 nt, Homo sapiens
  misc_RNA (1)...(19): siRNA sense strand
cagaggaggcagagaagaa

SEQ ID NO: 1689518 - RNA, 19 nt, Homo sapiens
  misc_RNA (1)...(19): siRNA sense strand
cagcagaggaggcagagaa

SEQ ID NO: 1689519 - RNA, 19 nt, Homo sapiens
  misc_RNA (1)...(19): siRNA sense strand
ccaaguacuuugccuccau

SEQ ID NO: 1689520 - RNA, 19 nt, Homo sapiens
  misc_RNA (1)...(19): siRNA sense strand
caaugaagggcaaggagaa

SEQ ID NO: 1689521 - RNA, 19 nt, Homo sapiens
  misc_RNA (1)...(19): siRNA sense strand
caacuggcgcuaccuguuc

SEQ ID NO: 1689522 - RNA, 19 nt, Homo sapiens
  misc_RNA (1)...(19): siRNA sense strand
agaacuacaucuccaagca

SEQ ID NO: 1689523 - RNA, 19 nt, Homo sapiens
  misc_RNA (1)...(19): siRNA sense strand
ugacgguggcuguguauga

SEQ ID NO: 1689524 - RNA, 19 nt, Homo sapiens
  misc_RNA (1)...(19): siRNA sense strand
agagguacccaucaagaaa

SEQ ID NO: 1689525 - RNA, 19 nt, Homo sapiens
  misc_RNA (1)...(19): siRNA sense strand
gcgcaaagacagccaagca

SEQ ID NO: 1689526 - RNA, 19 nt, Homo sapiens
  misc_RNA (1)...(19): siRNA sense strand
gggacgagaccgaguacaa

SEQ ID NO: 1689527 - RNA, 19 nt, Homo sapiens
  misc_RNA (1)...(19): siRNA sense strand
aagaggagaagaagaagaa

SEQ ID NO: 1689528 - RNA, 19 nt, Homo sapiens
  misc_RNA (1)...(19): siRNA sense strand
ucgacaaccuggagcucua

SEQ ID NO: 1689529 - RNA, 19 nt, Homo sapiens
  misc_RNA (1)...(19): siRNA sense strand
gcacccugcugacaucaac

SEQ ID NO: 1689530 - RNA, 19 nt, Homo sapiens
  misc_RNA (1)...(19): siRNA sense strand
cgacagcagcggacucuca

SEQ ID NO: 1689531 - RNA, 19 nt, Homo sapiens
  misc_RNA (1)...(19): siRNA sense strand
aggcugagcugcauuuacu

SEQ ID NO: 1689532 - RNA, 19 nt, Homo sapiens
  misc_RNA (1)...(19): siRNA sense strand
gagaaggagaagaagaaga

SEQ ID NO: 1689533 - RNA, 19 nt, Homo sapiens
  misc_RNA (1)...(19): siRNA sense strand
gaggagaaggagaagaaga

SEQ ID NO: 1689534 - RNA, 19 nt, Homo sapiens
  misc_RNA (1)...(19): siRNA sense strand
ccagagguacccaucaaga

SEQ ID NO: 1689535 - RNA, 19 nt, Homo sapiens
  misc_RNA (1)...(19): siRNA sense strand
ggccuucggucgcuacaca

SEQ ID NO: 1689536 - RNA, 19 nt, Homo sapiens
  misc_RNA (1)...(19): siRNA sense strand
ucccugauccacaauuaua

SEQ ID NO: 1689537 - RNA, 19 nt, Homo sapiens
  misc_RNA (1)...(19): siRNA sense strand
aaguggaccucccagagaa

SEQ ID NO: 1689538 - RNA, 19 nt, Homo sapiens
  misc_RNA (1)...(19): siRNA sense strand
cucggaagcccaagaagua

SEQ ID NO: 1689539 - RNA, 19 nt, Homo sapiens
  misc_RNA (1)...(19): siRNA sense strand
ucacugggcccucugagau

SEQ ID NO: 1689540 - RNA, 19 nt, Homo sapiens
  misc_RNA (1)...(19): siRNA sense strand
gaaggaggaaguggacaau

SEQ ID NO: 1689541 - RNA, 19 nt, Homo sapiens
  misc_RNA (1)...(19): siRNA sense strand
gacgauccgcccaucauug

SEQ ID NO: 1689542 - RNA, 19 nt, Homo sapiens
  misc_RNA (1)...(19): siRNA sense strand
gacgagaccgaguacaaga

SEQ ID NO: 1689543 - RNA, 19 nt, Homo sapiens
  misc_RNA (1)...(19): siRNA sense strand
ggacgagaccgaguacaag

SEQ ID NO: 1689544 - RNA, 19 nt, Homo sapiens
  misc_RNA (1)...(19): siRNA sense strand
cagagguacccaucaagaa

SEQ ID NO: 1689545 - RNA, 19 nt, Homo sapiens
  misc_RNA (1)...(19): siRNA sense strand
aggccaagguggagcugua

SEQ ID NO: 1689546 - RNA, 19 nt, Homo sapiens
  misc_RNA (1)...(19): siRNA sense strand
gcugagcugcauuuacuga

SEQ ID NO: 1689547 - RNA, 19 nt, Homo sapiens
  misc_RNA (1)...(19): siRNA sense strand
cugcaaagacggcaaagug

SEQ ID NO: 1689548 - RNA, 19 nt, Homo sapiens
  misc_RNA (1)...(19): siRNA sense strand
ccucuggaauugacuugga

SEQ ID NO: 1689549 - RNA, 19 nt, Homo sapiens
  misc_RNA (1)...(19): siRNA sense strand
gacuauggagccagaggua

SEQ ID NO: 1689550 - RNA, 19 nt, Homo sapiens
  misc_RNA (1)...(19): siRNA sense strand
cuucuccgcugacgacuuc

SEQ ID NO: 1689551 - RNA, 19 nt, Homo sapiens
  misc_RNA (1)...(19): siRNA sense strand
cagcauucccgacaucuuc

SEQ ID NO: 1689552 - RNA, 19 nt, Homo sapiens
  misc_RNA (1)...(19): siRNA sense strand
aggaggaaguggacaauac

SEQ ID NO: 1689553 - RNA, 19 nt, Homo sapiens
  misc_RNA (1)...(19): siRNA sense strand
gagcaacuucgacaacaag

SEQ ID NO: 1689554 - RNA, 19 nt, Homo sapiens
  misc_RNA (1)...(19): siRNA sense strand
ccaagaagcaggcguucca

SEQ ID NO: 1689555 - RNA, 19 nt, Homo sapiens
  misc_RNA (1)...(19): siRNA sense strand
ugagaacgaugaguuugag

SEQ ID NO: 1689556 - RNA, 19 nt, Homo sapiens
  misc_RNA (1)...(19): siRNA sense strand
agacugacauccgcgacaa

SEQ ID NO: 1689557 - RNA, 19 nt, Homo sapiens
  misc_RNA (1)...(19): siRNA sense strand
gauugaugagcuuaaggua

SEQ ID NO: 1689558 - RNA, 19 nt, Homo sapiens
  misc_RNA (1)...(19): siRNA sense strand
ccauugacaccaugaagga

SEQ ID NO: 1689559 - RNA, 19 nt, Homo sapiens
  misc_RNA (1)...(19): siRNA sense strand
cgccucaaguccugcauga

SEQ ID NO: 1689560 - RNA, 19 nt, Homo sapiens
  misc_RNA (1)...(19): siRNA sense strand
ugagggagcuggaaaacau

SEQ ID NO: 1689561 - RNA, 19 nt, Homo sapiens
  misc_RNA (1)...(19): siRNA sense strand
gauccgcccaucauuguca

SEQ ID NO: 1689562 - RNA, 19 nt, Homo sapiens
  misc_RNA (1)...(19): siRNA sense strand
ggacugcgccaaggucaag

SEQ ID NO: 1689563 - RNA, 19 nt, Homo sapiens
  misc_RNA (1)...(19): siRNA sense strand
ggaggcugagcugcauuua

SEQ ID NO: 1689564 - RNA, 19 nt, Homo sapiens
  misc_RNA (1)...(19): siRNA sense strand
guguccaucuucaagcaaa

SEQ ID NO: 1689565 - RNA, 19 nt, Homo sapiens
  misc_RNA (1)...(19): siRNA sense strand
cgacaaggagaacuacauc

SEQ ID NO: 1689566 - RNA, 19 nt, Homo sapiens
  misc_RNA (1)...(19): siRNA sense strand
gggcaaagcugacuucaug

SEQ ID NO: 1689567 - RNA, 19 nt, Homo sapiens
  misc_RNA (1)...(19): siRNA sense strand
gcaaacagcgcaaggaguu

SEQ ID NO: 1689568 - RNA, 19 nt, Homo sapiens
  misc_RNA (1)...(19): siRNA sense strand
uugaugagcuuaagguaua

SEQ ID NO: 1689569 - RNA, 19 nt, Homo sapiens
  misc_RNA (1)...(19): siRNA sense strand
caacaagcgugucgccuau

SEQ ID NO: 1689570 - RNA, 19 nt, Homo sapiens
  misc_RNA (1)...(19): siRNA sense strand
gaauugacuuggaggagaa

SEQ ID NO: 1689571 - RNA, 19 nt, Homo sapiens
  misc_RNA (1)...(19): siRNA sense strand
ccaaagaggagaagaagaa

SEQ ID NO: 1689572 - RNA, 19 nt, Homo sapiens
  misc_RNA (1)...(19): siRNA sense strand
gcaaugagaacgaugaguu

SEQ ID NO: 1689573 - RNA, 19 nt, Homo sapiens
  misc_RNA (1)...(19): siRNA sense strand
caccucagcucgaguacua

SEQ ID NO: 1689574 - RNA, 19 nt, Homo sapiens
  misc_RNA (1)...(19): siRNA sense strand
gaagaagaaacccaagauu

SEQ ID NO: 1689575 - RNA, 19 nt, Homo sapiens
  misc_RNA (1)...(19): siRNA sense strand
acacauggcuacaauaucu

SEQ ID NO: 1689576 - RNA, 19 nt, Homo sapiens
  misc_RNA (1)...(19): siRNA sense strand
gaaguggaccucccagaga

SEQ ID NO: 1689577 - RNA, 19 nt, Homo sapiens
  misc_RNA (1)...(19): siRNA sense strand
agaagaaacccaagauuga

SEQ ID NO: 1689578 - RNA, 19 nt, Homo sapiens
  misc_RNA (1)...(19): siRNA sense strand
gcacagcauucccgacauc

SEQ ID NO: 1689579 - RNA, 19 nt, Homo sapiens
  misc_RNA (1)...(19): siRNA sense strand
ucaagaaacuggagaccau

SEQ ID NO: 1689580 - RNA, 19 nt, Homo sapiens
  misc_RNA (1)...(19): siRNA sense strand
cagaugagguggucuugga

SEQ ID NO: 1689581 - RNA, 19 nt, Homo sapiens
  misc_RNA (1)...(19): siRNA sense strand
ggagcaacuucgacaacaa

SEQ ID NO: 1689582 - RNA, 19 nt, Homo sapiens
  misc_RNA (1)...(19): siRNA sense strand
ugaaaucuaugaccaggau

SEQ ID NO: 1689583 - RNA, 19 nt, Homo sapiens
  misc_RNA (1)...(19): siRNA sense strand
gcugcacacuuucaacuug

SEQ ID NO: 1689584 - RNA, 19 nt, Homo sapiens
  misc_RNA (1)...(19): siRNA sense strand
gaagaaacccaagauugau

SEQ ID NO: 1689585 - RNA, 19 nt, Homo sapiens
  misc_RNA (1)...(19): siRNA sense strand
ccaaggaccugcucuucuc

SEQ ID NO: 1689586 - RNA, 19 nt, Homo sapiens
  misc_RNA (1)...(19): siRNA sense strand
ggacgacgacuucuucaca

SEQ ID NO: 1689587 - RNA, 19 nt, Homo sapiens
  misc_RNA (1)...(19): siRNA sense strand
caaguacuuugccuccauu

SEQ ID NO: 1689588 - RNA, 19 nt, Homo sapiens
  misc_RNA (1)...(19): siRNA sense strand
agaagaagaagaagaagaa

SEQ ID NO: 1689589 - RNA, 19 nt, Homo sapiens
  misc_RNA (1)...(19): siRNA sense strand
gauccacaauuauaagaag

SEQ ID NO: 1689590 - RNA, 19 nt, Homo sapiens
  misc_RNA (1)...(19): siRNA sense strand
ggaaguccuuugacaucga

SEQ ID NO: 1689591 - RNA, 19 nt, Homo sapiens
  misc_RNA (1)...(19): siRNA sense strand
ccacacauggcuacaauau

SEQ ID NO: 1689592 - RNA, 19 nt, Homo sapiens
  misc_RNA (1)...(19): siRNA sense strand
gagaagaagaagaagaaga

SEQ ID NO: 1689593 - RNA, 19 nt, Homo sapiens
  misc_RNA (1)...(19): siRNA sense strand
ucaacacccucgucaagug

SEQ ID NO: 1689594 - RNA, 19 nt, Homo sapiens
  misc_RNA (1)...(19): siRNA sense strand
ggaggacgacgacuucuuc

SEQ ID NO: 1689595 - RNA, 19 nt, Homo sapiens
  misc_RNA (1)...(19): siRNA sense strand
agaaggagaagaagaagaa

SEQ ID NO: 1689596 - RNA, 19 nt, Homo sapiens
  misc_RNA (1)...(19): siRNA sense strand
gcaaugaccccaucaaugu

SEQ ID NO: 1689597 - RNA, 19 nt, Homo sapiens
  misc_RNA (1)...(19): siRNA sense strand
caaugagaacgaugaguuu

SEQ ID NO: 1689598 - RNA, 19 nt, Homo sapiens
  misc_RNA (1)...(19): siRNA sense strand
ccaucgagcuggaccugaa

SEQ ID NO: 1689599 - RNA, 19 nt, Homo sapiens
  misc_RNA (1)...(19): siRNA sense strand
caagaaggaguccauguuc

SEQ ID NO: 1689600 - RNA, 19 nt, Homo sapiens
  misc_RNA (1)...(19): siRNA sense strand
ccaagaaggaguccauguu

SEQ ID NO: 1689601 - RNA, 19 nt, Homo sapiens
  misc_RNA (1)...(19): siRNA sense strand
gcccaucauugucauugaa

SEQ ID NO: 1689602 - RNA, 19 nt, Homo sapiens
  misc_RNA (1)...(19): siRNA sense strand
aggacuggcugcacacuuu

SEQ ID NO: 1689603 - RNA, 19 nt, Homo sapiens
  misc_RNA (1)...(19): siRNA sense strand
aagaagaaacccaagauug

SEQ ID NO: 1689604 - RNA, 19 nt, Homo sapiens
  misc_RNA (1)...(19): siRNA sense strand
gagaagaagaaacccaaga

SEQ ID NO: 1689605 - RNA, 19 nt, Homo sapiens
  misc_RNA (1)...(19): siRNA sense strand
cgucccugauccacaauua

SEQ ID NO: 1689606 - RNA, 19 nt, Homo sapiens
  misc_RNA (1)...(19): siRNA sense strand
gcagcucaacccugucuuu

SEQ ID NO: 1689607 - RNA, 19 nt, Homo sapiens
  misc_RNA (1)...(19): siRNA sense strand
ggacgauccgcccaucauu

SEQ ID NO: 1689608 - RNA, 19 nt, Homo sapiens
  misc_RNA (1)...(19): siRNA sense strand
acacagacguccacuacca

SEQ ID NO: 1689609 - RNA, 19 nt, Homo sapiens
  misc_RNA (1)...(19): siRNA sense strand
ggagaaguccagugacauc

SEQ ID NO: 1689610 - RNA, 19 nt, Homo sapiens
  misc_RNA (1)...(19): siRNA sense strand
gccagaacuuccugcagaa

SEQ ID NO: 1689611 - RNA, 19 nt, Homo sapiens
  misc_RNA (1)...(19): siRNA sense strand
ggacgccucuggacaucuc

SEQ ID NO: 1689612 - RNA, 19 nt, Homo sapiens
  misc_RNA (1)...(19): siRNA sense strand
caagauugaugagcuuaag

SEQ ID NO: 1689613 - RNA, 19 nt, Homo sapiens
  misc_RNA (1)...(19): siRNA sense strand
gaguggaggugcuguucug

SEQ ID NO: 1689614 - RNA, 19 nt, Homo sapiens
  misc_RNA (1)...(19): siRNA sense strand
gggagguuguggugacuau

SEQ ID NO: 1689615 - RNA, 19 nt, Homo sapiens
  misc_RNA (1)...(19): siRNA sense strand
gagcuggaguccgaguuug

SEQ ID NO: 1689616 - RNA, 19 nt, Homo sapiens
  misc_RNA (1)...(19): siRNA sense strand
ggacagugcaggccaaggu

SEQ ID NO: 1689617 - RNA, 19 nt, Homo sapiens
  misc_RNA (1)...(19): siRNA sense strand
cagaggaggcagagaagaa

SEQ ID NO: 1689618 - RNA, 19 nt, Homo sapiens
  misc_RNA (1)...(19): siRNA sense strand
cagcagaggaggcagagaa

SEQ ID NO: 1689619 - RNA, 19 nt, Homo sapiens
  misc_RNA (1)...(19): siRNA sense strand
ccaaguacuuugccuccau

SEQ ID NO: 1689620 - RNA, 19 nt, Homo sapiens
  misc_RNA (1)...(19): siRNA sense strand
caaugaagggcaaggagaa

SEQ ID NO: 1689621 - RNA, 19 nt, Homo sapiens
  misc_RNA (1)...(19): siRNA sense strand
caacuggcgcuaccuguuc

SEQ ID NO: 1689622 - RNA, 19 nt, Homo sapiens
  misc_RNA (1)...(19): siRNA sense strand
agaacuacaucuccaagca

SEQ ID NO: 1689623 - RNA, 19 nt, Homo sapiens
  misc_RNA (1)...(19): siRNA sense strand
ugacgguggcuguguauga

SEQ ID NO: 1689624 - RNA, 19 nt, Homo sapiens
  misc_RNA (1)...(19): siRNA sense strand
agagguacccaucaagaaa

SEQ ID NO: 1689625 - RNA, 19 nt, Homo sapiens
  misc_RNA (1)...(19): siRNA sense strand
gcgcaaagacagccaagca

SEQ ID NO: 1689626 - RNA, 19 nt, Homo sapiens
  misc_RNA (1)...(19): siRNA sense strand
gggacgagaccgaguacaa

SEQ ID NO: 1689627 - RNA, 19 nt, Homo sapiens
  misc_RNA (1)...(19): siRNA sense strand
aagaggagaagaagaagaa

SEQ ID NO: 1689628 - RNA, 19 nt, Homo sapiens
  misc_RNA (1)...(19): siRNA sense strand
ucgacaaccuggagcucua

SEQ ID NO: 1689629 - RNA, 19 nt, Homo sapiens
  misc_RNA (1)...(19): siRNA sense strand
gcacccugcugacaucaac

SEQ ID NO: 1689630 - RNA, 19 nt, Homo sapiens
  misc_RNA (1)...(19): siRNA sense strand
cgacagcagcggacucuca

SEQ ID NO: 1689631 - RNA, 19 nt, Homo sapiens
  misc_RNA (1)...(19): siRNA sense strand
aggcugagcugcauuuacu

SEQ ID NO: 1689632 - RNA, 19 nt, Homo sapiens
  misc_RNA (1)...(19): siRNA sense strand
gagaaggagaagaagaaga

SEQ ID NO: 1689633 - RNA, 19 nt, Homo sapiens
  misc_RNA (1)...(19): siRNA sense strand
gaggagaaggagaagaaga

SEQ ID NO: 1689634 - RNA, 19 nt, Homo sapiens
  misc_RNA (1)...(19): siRNA sense strand
ccagagguacccaucaaga

SEQ ID NO: 1689635 - RNA, 19 nt, Homo sapiens
  misc_RNA (1)...(19): siRNA sense strand
ggccuucggucgcuacaca

SEQ ID NO: 1689636 - RNA, 19 nt, Homo sapiens
  misc_RNA (1)...(19): siRNA sense strand
ucccugauccacaauuaua

SEQ ID NO: 1689637 - RNA, 19 nt, Homo sapiens
  misc_RNA (1)...(19): siRNA sense strand
aagaaggccugaacgacau

SEQ ID NO: 1689638 - RNA, 19 nt, Homo sapiens
  misc_RNA (1)...(19): siRNA sense strand
aaguggaccucccagagaa

SEQ ID NO: 1689639 - RNA, 19 nt, Homo sapiens
  misc_RNA (1)...(19): siRNA sense strand
cucggaagcccaagaagua

SEQ ID NO: 1689640 - RNA, 19 nt, Homo sapiens
  misc_RNA (1)...(19): siRNA sense strand
ucacugggcccucugagau

SEQ ID NO: 1689641 - RNA, 19 nt, Homo sapiens
  misc_RNA (1)...(19): siRNA sense strand
gaaggaggaaguggacaau

SEQ ID NO: 1689642 - RNA, 19 nt, Homo sapiens
  misc_RNA (1)...(19): siRNA sense strand
gacgauccgcccaucauug

SEQ ID NO: 1689643 - RNA, 19 nt, Homo sapiens
  misc_RNA (1)...(19): siRNA sense strand
gacgagaccgaguacaaga

SEQ ID NO: 1689644 - RNA, 19 nt, Homo sapiens
  misc_RNA (1)...(19): siRNA sense strand
ggacgagaccgaguacaag

SEQ ID NO: 1689645 - RNA, 19 nt, Homo sapiens
  misc_RNA (1)...(19): siRNA sense strand
cagagguacccaucaagaa

SEQ ID NO: 1689646 - RNA, 19 nt, Homo sapiens
  misc_RNA (1)...(19): siRNA sense strand
aggccaagguggagcugua

SEQ ID NO: 1689647 - RNA, 19 nt, Homo sapiens
  misc_RNA (1)...(19): siRNA sense strand
gcugagcugcauuuacuga

SEQ ID NO: 1689648 - RNA, 19 nt, Homo sapiens
  misc_RNA (1)...(19): siRNA sense strand
ugaacgacauacaggagau

SEQ ID NO: 1689649 - RNA, 19 nt, Homo sapiens
  misc_RNA (1)...(19): siRNA sense strand
cugcaaagacggcaaagug

SEQ ID NO: 1689650 - RNA, 19 nt, Homo sapiens
  misc_RNA (1)...(19): siRNA sense strand
ccucuggaauugacuugga

SEQ ID NO: 1689651 - RNA, 19 nt, Homo sapiens
  misc_RNA (1)...(19): siRNA sense strand
gacuauggagccagaggua

SEQ ID NO: 1689652 - RNA, 19 nt, Homo sapiens
  misc_RNA (1)...(19): siRNA sense strand
cuucuccgcugacgacuuc

SEQ ID NO: 1689653 - RNA, 19 nt, Homo sapiens
  misc_RNA (1)...(19): siRNA sense strand
cagcauucccgacaucuuc

SEQ ID NO: 1689654 - RNA, 19 nt, Homo sapiens
  misc_RNA (1)...(19): siRNA sense strand
aggaggaaguggacaauac

SEQ ID NO: 1689655 - RNA, 19 nt, Homo sapiens
  misc_RNA (1)...(19): siRNA sense strand
gagcaacuucgacaacaag

SEQ ID NO: 1689656 - RNA, 19 nt, Homo sapiens
  misc_RNA (1)...(19): siRNA sense strand
ccaagaagcaggcguucca

SEQ ID NO: 1689657 - RNA, 19 nt, Homo sapiens
  misc_RNA (1)...(19): siRNA sense strand
ugagaacgaugaguuugag

SEQ ID NO: 1689658 - RNA, 19 nt, Homo sapiens
  misc_RNA (1)...(19): siRNA sense strand
cgccucaaguccugcauga

SEQ ID NO: 1689659 - RNA, 19 nt, Homo sapiens
  misc_RNA (1)...(19): siRNA sense strand
agacugacauccgcgacaa

SEQ ID NO: 1689660 - RNA, 19 nt, Homo sapiens
  misc_RNA (1)...(19): siRNA sense strand
gauugaugagcuuaaggua

SEQ ID NO: 1689661 - RNA, 19 nt, Homo sapiens
  misc_RNA (1)...(19): siRNA sense strand
ugagggagcuggaaaacau

SEQ ID NO: 1689662 - RNA, 19 nt, Homo sapiens
  misc_RNA (1)...(19): siRNA sense strand
ccauugacaccaugaagga

SEQ ID NO: 1689663 - RNA, 19 nt, Homo sapiens
  misc_RNA (1)...(19): siRNA sense strand
gauccgcccaucauuguca

SEQ ID NO: 1689664 - RNA, 19 nt, Homo sapiens
  misc_RNA (1)...(19): siRNA sense strand
guguccaucuucaagcaaa

SEQ ID NO: 1689665 - RNA, 19 nt, Homo sapiens
  misc_RNA (1)...(19): siRNA sense strand
ggaggcugagcugcauuua

SEQ ID NO: 1689666 - RNA, 19 nt, Homo sapiens
  misc_RNA (1)...(19): siRNA sense strand
gggcaaagcugacuucaug

SEQ ID NO: 1689667 - RNA, 19 nt, Homo sapiens
  misc_RNA (1)...(19): siRNA sense strand
gcaaacagcgcaaggaguu

SEQ ID NO: 1689668 - RNA, 19 nt, Homo sapiens
  misc_RNA (1)...(19): siRNA sense strand
uugaugagcuuaagguaua

SEQ ID NO: 1689669 - RNA, 19 nt, Homo sapiens
  misc_RNA (1)...(19): siRNA sense strand
caacaagcgugucgccuau

SEQ ID NO: 1689670 - RNA, 19 nt, Homo sapiens
  misc_RNA (1)...(19): siRNA sense strand
gaauugacuuggaggagaa

SEQ ID NO: 1689671 - RNA, 19 nt, Homo sapiens
  misc_RNA (1)...(19): siRNA sense strand
ccaaagaggagaagaagaa

SEQ ID NO: 1689672 - RNA, 19 nt, Homo sapiens
  misc_RNA (1)...(19): siRNA sense strand
gcaaugagaacgaugaguu

SEQ ID NO: 1689673 - RNA, 19 nt, Homo sapiens
  misc_RNA (1)...(19): siRNA sense strand
caccucagcucgaguacua

SEQ ID NO: 1689674 - RNA, 19 nt, Homo sapiens
  misc_RNA (1)...(19): siRNA sense strand
gaagaagaaacccaagauu

SEQ ID NO: 1689675 - RNA, 19 nt, Homo sapiens
  misc_RNA (1)...(19): siRNA sense strand
acacauggcuacaauaucu

SEQ ID NO: 1689676 - RNA, 19 nt, Homo sapiens
  misc_RNA (1)...(19): siRNA sense strand
gaaguggaccucccagaga

SEQ ID NO: 1689677 - RNA, 19 nt, Homo sapiens
  misc_RNA (1)...(19): siRNA sense strand
agaagaaacccaagauuga

SEQ ID NO: 1689678 - RNA, 19 nt, Homo sapiens
  misc_RNA (1)...(19): siRNA sense strand
gcacagcauucccgacauc

SEQ ID NO: 1689679 - RNA, 19 nt, Homo sapiens
  misc_RNA (1)...(19): siRNA sense strand
ucaagaaacuggagaccau

SEQ ID NO: 1689680 - RNA, 19 nt, Homo sapiens
  misc_RNA (1)...(19): siRNA sense strand
cagaugagguggucuugga

SEQ ID NO: 1689681 - RNA, 19 nt, Homo sapiens
  misc_RNA (1)...(19): siRNA sense strand
ggagcaacuucgacaacaa

SEQ ID NO: 1689682 - RNA, 19 nt, Homo sapiens
  misc_RNA (1)...(19): siRNA sense strand
ugaaaucuaugaccaggau

SEQ ID NO: 1689683 - RNA, 19 nt, Homo sapiens
  misc_RNA (1)...(19): siRNA sense strand
gcugcacacuuucaacuug

SEQ ID NO: 1689684 - RNA, 19 nt, Homo sapiens
  misc_RNA (1)...(19): siRNA sense strand
gaagaaacccaagauugau

SEQ ID NO: 1689685 - RNA, 19 nt, Homo sapiens
  misc_RNA (1)...(19): siRNA sense strand
ccaaggaccugcucuucuc

SEQ ID NO: 1689686 - RNA, 19 nt, Homo sapiens
  misc_RNA (1)...(19): siRNA sense strand
ggacgacgacuucuucaca

SEQ ID NO: 1689687 - RNA, 19 nt, Homo sapiens
  misc_RNA (1)...(19): siRNA sense strand
caaguacuuugccuccauu

SEQ ID NO: 1689688 - RNA, 19 nt, Homo sapiens
  misc_RNA (1)...(19): siRNA sense strand
agaagaagaagaagaagaa

SEQ ID NO: 1689689 - RNA, 19 nt, Homo sapiens
  misc_RNA (1)...(19): siRNA sense strand
gauccacaauuauaagaag

SEQ ID NO: 1689690 - RNA, 19 nt, Homo sapiens
  misc_RNA (1)...(19): siRNA sense strand
ggaaguccuuugacaucga

SEQ ID NO: 1689691 - RNA, 19 nt, Homo sapiens
  misc_RNA (1)...(19): siRNA sense strand
ccacacauggcuacaauau

SEQ ID NO: 1689692 - RNA, 19 nt, Homo sapiens
  misc_RNA (1)...(19): siRNA sense strand
gagaagaagaagaagaaga

SEQ ID NO: 1689693 - RNA, 19 nt, Homo sapiens
  misc_RNA (1)...(19): siRNA sense strand
ucaacacccucgucaagug

SEQ ID NO: 1689694 - RNA, 19 nt, Homo sapiens
  misc_RNA (1)...(19): siRNA sense strand
ggaggacgacgacuucuuc

SEQ ID NO: 1689695 - RNA, 19 nt, Homo sapiens
  misc_RNA (1)...(19): siRNA sense strand
agaaggagaagaagaagaa

SEQ ID NO: 1689696 - RNA, 19 nt, Homo sapiens
  misc_RNA (1)...(19): siRNA sense strand
gcaaugaccccaucaaugu

SEQ ID NO: 1689697 - RNA, 19 nt, Homo sapiens
  misc_RNA (1)...(19): siRNA sense strand
caaugagaacgaugaguuu

SEQ ID NO: 1689698 - RNA, 19 nt, Homo sapiens
  misc_RNA (1)...(19): siRNA sense strand
ccaucgagcuggaccugaa

SEQ ID NO: 1689699 - RNA, 19 nt, Homo sapiens
  misc_RNA (1)...(19): siRNA sense strand
caagaaggaguccauguuc

SEQ ID NO: 1689700 - RNA, 19 nt, Homo sapiens
  misc_RNA (1)...(19): siRNA sense strand
ccaagaaggaguccauguu

SEQ ID NO: 1689701 - RNA, 19 nt, Homo sapiens
  misc_RNA (1)...(19): siRNA sense strand
gcccaucauugucauugaa

SEQ ID NO: 1689702 - RNA, 19 nt, Homo sapiens
  misc_RNA (1)...(19): siRNA sense strand
aggacuggcugcacacuuu

SEQ ID NO: 1689703 - RNA, 19 nt, Homo sapiens
  misc_RNA (1)...(19): siRNA sense strand
aagaagaaacccaagauug

SEQ ID NO: 1689704 - RNA, 19 nt, Homo sapiens
  misc_RNA (1)...(19): siRNA sense strand
gagaagaagaaacccaaga

SEQ ID NO: 1689705 - RNA, 19 nt, Homo sapiens
  misc_RNA (1)...(19): siRNA sense strand
cgucccugauccacaauua

SEQ ID NO: 1689706 - RNA, 19 nt, Homo sapiens
  misc_RNA (1)...(19): siRNA sense strand
gcagcucaacccugucuuu

SEQ ID NO: 1689707 - RNA, 19 nt, Homo sapiens
  misc_RNA (1)...(19): siRNA sense strand
ggacgauccgcccaucauu

SEQ ID NO: 1689708 - RNA, 19 nt, Homo sapiens
  misc_RNA (1)...(19): siRNA sense strand
acacagacguccacuacca

SEQ ID NO: 1689709 - RNA, 19 nt, Homo sapiens
  misc_RNA (1)...(19): siRNA sense strand
ggagaaguccagugacauc

SEQ ID NO: 1689710 - RNA, 19 nt, Homo sapiens
  misc_RNA (1)...(19): siRNA sense strand
gccagaacuuccugcagaa

SEQ ID NO: 1689711 - RNA, 19 nt, Homo sapiens
  misc_RNA (1)...(19): siRNA sense strand
ggacgccucuggacaucuc

SEQ ID NO: 1689712 - RNA, 19 nt, Homo sapiens
  misc_RNA (1)...(19): siRNA sense strand
caagauugaugagcuuaag

SEQ ID NO: 1689713 - RNA, 19 nt, Homo sapiens
  misc_RNA (1)...(19): siRNA sense strand
gaguggaggugcuguucug

SEQ ID NO: 1689714 - RNA, 19 nt, Homo sapiens
  misc_RNA (1)...(19): siRNA sense strand
gggagguuguggugacuau

SEQ ID NO: 1689715 - RNA, 19 nt, Homo sapiens
  misc_RNA (1)...(19): siRNA sense strand
gagcuggaguccgaguuug

SEQ ID NO: 1689716 - RNA, 19 nt, Homo sapiens
  misc_RNA (1)...(19): siRNA sense strand
ggacagugcaggccaaggu

SEQ ID NO: 1689717 - RNA, 19 nt, Homo sapiens
  misc_RNA (1)...(19): siRNA sense strand
cagaggaggcagagaagaa

SEQ ID NO: 1689718 - RNA, 19 nt, Homo sapiens
  misc_RNA (1)...(19): siRNA sense strand
cagcagaggaggcagagaa

SEQ ID NO: 1689719 - RNA, 19 nt, Homo sapiens
  misc_RNA (1)...(19): siRNA sense strand
ccaaguacuuugccuccau

SEQ ID NO: 1689720 - RNA, 19 nt, Homo sapiens
  misc_RNA (1)...(19): siRNA sense strand
caaugaagggcaaggagaa

SEQ ID NO: 1689721 - RNA, 19 nt, Homo sapiens
  misc_RNA (1)...(19): siRNA sense strand
caacuggcgcuaccuguuc

SEQ ID NO: 1689722 - RNA, 19 nt, Homo sapiens
  misc_RNA (1)...(19): siRNA sense strand
agaacuacaucuccaagca

SEQ ID NO: 1689723 - RNA, 19 nt, Homo sapiens
  misc_RNA (1)...(19): siRNA sense strand
ugacgguggcuguguauga

SEQ ID NO: 1689724 - RNA, 19 nt, Homo sapiens
  misc_RNA (1)...(19): siRNA sense strand
agagguacccaucaagaaa

SEQ ID NO: 1689725 - RNA, 19 nt, Homo sapiens
  misc_RNA (1)...(19): siRNA sense strand
gcgcaaagacagccaagca

SEQ ID NO: 1689726 - RNA, 19 nt, Homo sapiens
  misc_RNA (1)...(19): siRNA sense strand
gggacgagaccgaguacaa

SEQ ID NO: 1689727 - RNA, 19 nt, Homo sapiens
  misc_RNA (1)...(19): siRNA sense strand
aagaggagaagaagaagaa

SEQ ID NO: 1689728 - RNA, 19 nt, Homo sapiens
  misc_RNA (1)...(19): siRNA sense strand
ucgacaaccuggagcucua

SEQ ID NO: 1689729 - RNA, 19 nt, Homo sapiens
  misc_RNA (1)...(19): siRNA sense strand
gcacccugcugacaucaac

SEQ ID NO: 1689730 - RNA, 19 nt, Homo sapiens
  misc_RNA (1)...(19): siRNA sense strand
cgacagcagcggacucuca

SEQ ID NO: 1689731 - RNA, 19 nt, Homo sapiens
  misc_RNA (1)...(19): siRNA sense strand
aggcugagcugcauuuacu

SEQ ID NO: 1689732 - RNA, 19 nt, Homo sapiens
  misc_RNA (1)...(19): siRNA sense strand
gagaaggagaagaagaaga

SEQ ID NO: 1689733 - RNA, 19 nt, Homo sapiens
  misc_RNA (1)...(19): siRNA sense strand
gaggagaaggagaagaaga

SEQ ID NO: 1689734 - RNA, 19 nt, Homo sapiens
  misc_RNA (1)...(19): siRNA sense strand
ccagagguacccaucaaga

SEQ ID NO: 1689735 - RNA, 19 nt, Homo sapiens
  misc_RNA (1)...(19): siRNA sense strand
ggccuucggucgcuacaca

SEQ ID NO: 1689736 - RNA, 19 nt, Homo sapiens
  misc_RNA (1)...(19): siRNA sense strand
ucccugauccacaauuaua

SEQ ID NO: 1689737 - RNA, 19 nt, Homo sapiens
  misc_RNA (1)...(19): siRNA sense strand
aagaaggccugaacgacau

SEQ ID NO: 1689738 - RNA, 19 nt, Homo sapiens
  misc_RNA (1)...(19): siRNA sense strand
aaguggaccucccagagaa

SEQ ID NO: 1689739 - RNA, 19 nt, Homo sapiens
  misc_RNA (1)...(19): siRNA sense strand
cucggaagcccaagaagua

SEQ ID NO: 1689740 - RNA, 19 nt, Homo sapiens
  misc_RNA (1)...(19): siRNA sense strand
ucacugggcccucugagau

SEQ ID NO: 1689741 - RNA, 19 nt, Homo sapiens
  misc_RNA (1)...(19): siRNA sense strand
gaaggaggaaguggacaau

SEQ ID NO: 1689742 - RNA, 19 nt, Homo sapiens
  misc_RNA (1)...(19): siRNA sense strand
gacgauccgcccaucauug

SEQ ID NO: 1689743 - RNA, 19 nt, Homo sapiens
  misc_RNA (1)...(19): siRNA sense strand
gacgagaccgaguacaaga

SEQ ID NO: 1689744 - RNA, 19 nt, Homo sapiens
  misc_RNA (1)...(19): siRNA sense strand
ggacgagaccgaguacaag

SEQ ID NO: 1689745 - RNA, 19 nt, Homo sapiens
  misc_RNA (1)...(19): siRNA sense strand
cagagguacccaucaagaa

SEQ ID NO: 1689746 - RNA, 19 nt, Homo sapiens
  misc_RNA (1)...(19): siRNA sense strand
aggccaagguggagcugua

SEQ ID NO: 1689747 - RNA, 19 nt, Homo sapiens
  misc_RNA (1)...(19): siRNA sense strand
gcugagcugcauuuacuga

SEQ ID NO: 1689748 - RNA, 19 nt, Homo sapiens
  misc_RNA (1)...(19): siRNA sense strand
ugaacgacauacaggagau

SEQ ID NO: 1689749 - RNA, 19 nt, Homo sapiens
  misc_RNA (1)...(19): siRNA sense strand
cugcaaagacggcaaagug

SEQ ID NO: 1689750 - RNA, 19 nt, Homo sapiens
  misc_RNA (1)...(19): siRNA sense strand
ccucuggaauugacuugga

SEQ ID NO: 1689751 - RNA, 19 nt, Homo sapiens
  misc_RNA (1)...(19): siRNA sense strand
gacuauggagccagaggua

SEQ ID NO: 1689752 - RNA, 19 nt, Homo sapiens
  misc_RNA (1)...(19): siRNA sense strand
cuucuccgcugacgacuuc

SEQ ID NO: 1689753 - RNA, 19 nt, Homo sapiens
  misc_RNA (1)...(19): siRNA sense strand
cagcauucccgacaucuuc

SEQ ID NO: 1689754 - RNA, 19 nt, Homo sapiens
  misc_RNA (1)...(19): siRNA sense strand
aggaggaaguggacaauac

SEQ ID NO: 1689755 - RNA, 19 nt, Homo sapiens
  misc_RNA (1)...(19): siRNA sense strand
gagcaacuucgacaacaag

SEQ ID NO: 1689756 - RNA, 19 nt, Homo sapiens
  misc_RNA (1)...(19): siRNA sense strand
ccaagaagcaggcguucca

SEQ ID NO: 1689757 - RNA, 19 nt, Homo sapiens
  misc_RNA (1)...(19): siRNA sense strand
ugagaacgaugaguuugag

SEQ ID NO: 1689758 - RNA, 19 nt, Homo sapiens
  misc_RNA (1)...(19): siRNA sense strand
cgccucaaguccugcauga

SEQ ID NO: 1689759 - RNA, 19 nt, Homo sapiens
  misc_RNA (1)...(19): siRNA sense strand
agacugacauccgcgacaa

SEQ ID NO: 1689760 - RNA, 19 nt, Homo sapiens
  misc_RNA (1)...(19): siRNA sense strand
gauugaugagcuuaaggua

SEQ ID NO: 1689761 - RNA, 19 nt, Homo sapiens
  misc_RNA (1)...(19): siRNA sense strand
ugagggagcuggaaaacau

SEQ ID NO: 1689762 - RNA, 19 nt, Homo sapiens
  misc_RNA (1)...(19): siRNA sense strand
ccauugacaccaugaagga

SEQ ID NO: 1689763 - RNA, 19 nt, Homo sapiens
  misc_RNA (1)...(19): siRNA sense strand
gauccgcccaucauuguca

SEQ ID NO: 1689764 - RNA, 19 nt, Homo sapiens
  misc_RNA (1)...(19): siRNA sense strand
guguccaucuucaagcaaa

SEQ ID NO: 1689765 - RNA, 19 nt, Homo sapiens
  misc_RNA (1)...(19): siRNA sense strand
ggaggcugagcugcauuua

SEQ ID NO: 1689766 - RNA, 19 nt, Homo sapiens
  misc_RNA (1)...(19): siRNA sense strand
gggcaaagcugacuucaug

SEQ ID NO: 1689767 - RNA, 19 nt, Homo sapiens
  misc_RNA (1)...(19): siRNA sense strand
gcaaacagcgcaaggaguu

SEQ ID NO: 1689768 - RNA, 19 nt, Homo sapiens
  misc_RNA (1)...(19): siRNA sense strand
uugaugagcuuaagguaua

SEQ ID NO: 1689769 - RNA, 19 nt, Homo sapiens
  misc_RNA (1)...(19): siRNA sense strand
caacaagcgugucgccuau

SEQ ID NO: 1689770 - RNA, 19 nt, Homo sapiens
  misc_RNA (1)...(19): siRNA sense strand
gaauugacuuggaggagaa

SEQ ID NO: 1689771 - RNA, 19 nt, Homo sapiens
  misc_RNA (1)...(19): siRNA sense strand
ccaaagaggagaagaagaa

SEQ ID NO: 1689772 - RNA, 19 nt, Homo sapiens
  misc_RNA (1)...(19): siRNA sense strand
gcaaugagaacgaugaguu

SEQ ID NO: 1689773 - RNA, 19 nt, Homo sapiens
  misc_RNA (1)...(19): siRNA sense strand
caccucagcucgaguacua

SEQ ID NO: 1689774 - RNA, 19 nt, Homo sapiens
  misc_RNA (1)...(19): siRNA sense strand
gaagaagaaacccaagauu

SEQ ID NO: 1689775 - RNA, 19 nt, Homo sapiens
  misc_RNA (1)...(19): siRNA sense strand
acacauggcuacaauaucu

SEQ ID NO: 1689776 - RNA, 19 nt, Homo sapiens
  misc_RNA (1)...(19): siRNA sense strand
acaaguggcucaucaucaa

SEQ ID NO: 1689777 - RNA, 19 nt, Homo sapiens
  misc_RNA (1)...(19): siRNA sense strand
gaaguggaccucccagaga

SEQ ID NO: 1689778 - RNA, 19 nt, Homo sapiens
  misc_RNA (1)...(19): siRNA sense strand
agaagaaacccaagauuga

SEQ ID NO: 1689779 - RNA, 19 nt, Homo sapiens
  misc_RNA (1)...(19): siRNA sense strand
gcacagcauucccgacauc

SEQ ID NO: 1689780 - RNA, 19 nt, Homo sapiens
  misc_RNA (1)...(19): siRNA sense strand
ucaagaaacuggagaccau

SEQ ID NO: 1689781 - RNA, 19 nt, Homo sapiens
  misc_RNA (1)...(19): siRNA sense strand
cagaugagguggucuugga

SEQ ID NO: 1689782 - RNA, 19 nt, Homo sapiens
  misc_RNA (1)...(19): siRNA sense strand
ggagcaacuucgacaacaa

SEQ ID NO: 1689783 - RNA, 19 nt, Homo sapiens
  misc_RNA (1)...(19): siRNA sense strand
ugaaaucuaugaccaggau

SEQ ID NO: 1689784 - RNA, 19 nt, Homo sapiens
  misc_RNA (1)...(19): siRNA sense strand
gcugcacacuuucaacuug

SEQ ID NO: 1689785 - RNA, 19 nt, Homo sapiens
  misc_RNA (1)...(19): siRNA sense strand
gaagaaacccaagauugau

SEQ ID NO: 1689786 - RNA, 19 nt, Homo sapiens
  misc_RNA (1)...(19): siRNA sense strand
ccaaggaccugcucuucuc

SEQ ID NO: 1689787 - RNA, 19 nt, Homo sapiens
  misc_RNA (1)...(19): siRNA sense strand
ggacgacgacuucuucaca

SEQ ID NO: 1689788 - RNA, 19 nt, Homo sapiens
  misc_RNA (1)...(19): siRNA sense strand
caaguacuuugccuccauu

SEQ ID NO: 1689789 - RNA, 19 nt, Homo sapiens
  misc_RNA (1)...(19): siRNA sense strand
agaagaagaagaagaagaa

SEQ ID NO: 1689790 - RNA, 19 nt, Homo sapiens
  misc_RNA (1)...(19): siRNA sense strand
gauccacaauuauaagaag

SEQ ID NO: 1689791 - RNA, 19 nt, Homo sapiens
  misc_RNA (1)...(19): siRNA sense strand
ggaaguccuuugacaucga

SEQ ID NO: 1689792 - RNA, 19 nt, Homo sapiens
  misc_RNA (1)...(19): siRNA sense strand
ccacacauggcuacaauau

SEQ ID NO: 1689793 - RNA, 19 nt, Homo sapiens
  misc_RNA (1)...(19): siRNA sense strand
gagaagaagaagaagaaga

SEQ ID NO: 1689794 - RNA, 19 nt, Homo sapiens
  misc_RNA (1)...(19): siRNA sense strand
ucaacacccucgucaagug

SEQ ID NO: 1689795 - RNA, 19 nt, Homo sapiens
  misc_RNA (1)...(19): siRNA sense strand
ggaggacgacgacuucuuc

SEQ ID NO: 1689796 - RNA, 19 nt, Homo sapiens
  misc_RNA (1)...(19): siRNA sense strand
agaaggagaagaagaagaa

SEQ ID NO: 1689797 - RNA, 19 nt, Homo sapiens
  misc_RNA (1)...(19): siRNA sense strand
gcaaugaccccaucaaugu

SEQ ID NO: 1689798 - RNA, 19 nt, Homo sapiens
  misc_RNA (1)...(19): siRNA sense strand
caaugagaacgaugaguuu

SEQ ID NO: 1689799 - RNA, 19 nt, Homo sapiens
  misc_RNA (1)...(19): siRNA sense strand
ccaucgagcuggaccugaa

SEQ ID NO: 1689800 - RNA, 19 nt, Homo sapiens
  misc_RNA (1)...(19): siRNA sense strand
caagaaggaguccauguuc

SEQ ID NO: 1689801 - RNA, 19 nt, Homo sapiens
  misc_RNA (1)...(19): siRNA sense strand
ccaagaaggaguccauguu

SEQ ID NO: 1689802 - RNA, 19 nt, Homo sapiens
  misc_RNA (1)...(19): siRNA sense strand
gcccaucauugucauugaa

SEQ ID NO: 1689803 - RNA, 19 nt, Homo sapiens
  misc_RNA (1)...(19): siRNA sense strand
aggacuggcugcacacuuu

SEQ ID NO: 1689804 - RNA, 19 nt, Homo sapiens
  misc_RNA (1)...(19): siRNA sense strand
aagaagaaacccaagauug

SEQ ID NO: 1689805 - RNA, 19 nt, Homo sapiens
  misc_RNA (1)...(19): siRNA sense strand
gagaagaagaaacccaaga

SEQ ID NO: 1689806 - RNA, 19 nt, Homo sapiens
  misc_RNA (1)...(19): siRNA sense strand
cgucccugauccacaauua

SEQ ID NO: 1689807 - RNA, 19 nt, Homo sapiens
  misc_RNA (1)...(19): siRNA sense strand
gcagcucaacccugucuuu

SEQ ID NO: 1689808 - RNA, 19 nt, Homo sapiens
  misc_RNA (1)...(19): siRNA sense strand
ggacgauccgcccaucauu

SEQ ID NO: 1689809 - RNA, 19 nt, Homo sapiens
  misc_RNA (1)...(19): siRNA sense strand
acacagacguccacuacca

SEQ ID NO: 1689810 - RNA, 19 nt, Homo sapiens
  misc_RNA (1)...(19): siRNA sense strand
ggagaaguccagugacauc

SEQ ID NO: 1689811 - RNA, 19 nt, Homo sapiens
  misc_RNA (1)...(19): siRNA sense strand
gaguggaggugcuguucug

SEQ ID NO: 1689812 - RNA, 19 nt, Homo sapiens
  misc_RNA (1)...(19): siRNA sense strand
ggacgccucuggacaucuc

SEQ ID NO: 1689813 - RNA, 19 nt, Homo sapiens
  misc_RNA (1)...(19): siRNA sense strand
gccagaacuuccugcagaa

SEQ ID NO: 1689814 - RNA, 19 nt, Homo sapiens
  misc_RNA (1)...(19): siRNA sense strand
caagauugaugagcuuaag

SEQ ID NO: 1689815 - RNA, 19 nt, Homo sapiens
  misc_RNA (1)...(19): siRNA sense strand
gggagguuguggugacuau

SEQ ID NO: 1689816 - RNA, 19 nt, Homo sapiens
  misc_RNA (1)...(19): siRNA sense strand
gagcuggaguccgaguuug

SEQ ID NO: 1689817 - RNA, 19 nt, Homo sapiens
  misc_RNA (1)...(19): siRNA sense strand
ggacagugcaggccaaggu

SEQ ID NO: 1689818 - RNA, 19 nt, Homo sapiens
  misc_RNA (1)...(19): siRNA sense strand
cagaggaggcagagaagaa

SEQ ID NO: 1689819 - RNA, 19 nt, Homo sapiens
  misc_RNA (1)...(19): siRNA sense strand
cagcagaggaggcagagaa

SEQ ID NO: 1689820 - RNA, 19 nt, Homo sapiens
  misc_RNA (1)...(19): siRNA sense strand
ccaaguacuuugccuccau

SEQ ID NO: 1689821 - RNA, 19 nt, Homo sapiens
  misc_RNA (1)...(19): siRNA sense strand
caaugaagggcaaggagaa

SEQ ID NO: 1689822 - RNA, 19 nt, Homo sapiens
  misc_RNA (1)...(19): siRNA sense strand
caacuggcgcuaccuguuc

SEQ ID NO: 1689823 - RNA, 19 nt, Homo sapiens
  misc_RNA (1)...(19): siRNA sense strand
agaacuacaucuccaagca

SEQ ID NO: 1689824 - RNA, 19 nt, Homo sapiens
  misc_RNA (1)...(19): siRNA sense strand
ugacgguggcuguguauga

SEQ ID NO: 1689825 - RNA, 19 nt, Homo sapiens
  misc_RNA (1)...(19): siRNA sense strand
agagguacccaucaagaaa

SEQ ID NO: 1689826 - RNA, 19 nt, Homo sapiens
  misc_RNA (1)...(19): siRNA sense strand
gcgcaaagacagccaagca

SEQ ID NO: 1689827 - RNA, 19 nt, Homo sapiens
  misc_RNA (1)...(19): siRNA sense strand
gggacgagaccgaguacaa

SEQ ID NO: 1689828 - RNA, 19 nt, Homo sapiens
  misc_RNA (1)...(19): siRNA sense strand
aagaggagaagaagaagaa

SEQ ID NO: 1689829 - RNA, 19 nt, Homo sapiens
  misc_RNA (1)...(19): siRNA sense strand
ucgacaaccuggagcucua

SEQ ID NO: 1689830 - RNA, 19 nt, Homo sapiens
  misc_RNA (1)...(19): siRNA sense strand
gcacccugcugacaucaac

SEQ ID NO: 1689831 - RNA, 19 nt, Homo sapiens
  misc_RNA (1)...(19): siRNA sense strand
cgacagcagcggacucuca

SEQ ID NO: 1689832 - RNA, 19 nt, Homo sapiens
  misc_RNA (1)...(19): siRNA sense strand
aggcugagcugcauuuacu

SEQ ID NO: 1689833 - RNA, 19 nt, Homo sapiens
  misc_RNA (1)...(19): siRNA sense strand
gagaaggagaagaagaaga

SEQ ID NO: 1689834 - RNA, 19 nt, Homo sapiens
  misc_RNA (1)...(19): siRNA sense strand
gaggagaaggagaagaaga

SEQ ID NO: 1689835 - RNA, 19 nt, Homo sapiens
  misc_RNA (1)...(19): siRNA sense strand
ccagagguacccaucaaga

SEQ ID NO: 1689836 - RNA, 19 nt, Homo sapiens
  misc_RNA (1)...(19): siRNA sense strand
ggccuucggucgcuacaca

SEQ ID NO: 1689837 - RNA, 19 nt, Homo sapiens
  misc_RNA (1)...(19): siRNA sense strand
ucccugauccacaauuaua

SEQ ID NO: 1689838 - RNA, 19 nt, Homo sapiens
  misc_RNA (1)...(19): siRNA sense strand
aaguggaccucccagagaa

SEQ ID NO: 1689839 - RNA, 19 nt, Homo sapiens
  misc_RNA (1)...(19): siRNA sense strand
guacaaguggcucaucauc

SEQ ID NO: 1689840 - RNA, 19 nt, Homo sapiens
  misc_RNA (1)...(19): siRNA sense strand
cucggaagcccaagaagua

SEQ ID NO: 1689841 - RNA, 19 nt, Homo sapiens
  misc_RNA (1)...(19): siRNA sense strand
ucacugggcccucugagau

SEQ ID NO: 1689842 - RNA, 19 nt, Homo sapiens
  misc_RNA (1)...(19): siRNA sense strand
gaaggaggaaguggacaau

SEQ ID NO: 1689843 - RNA, 19 nt, Homo sapiens
  misc_RNA (1)...(19): siRNA sense strand
gacgauccgcccaucauug

SEQ ID NO: 1689844 - RNA, 19 nt, Homo sapiens
  misc_RNA (1)...(19): siRNA sense strand
gacgagaccgaguacaaga

SEQ ID NO: 1689845 - RNA, 19 nt, Homo sapiens
  misc_RNA (1)...(19): siRNA sense strand
ggacgagaccgaguacaag

SEQ ID NO: 1689846 - RNA, 19 nt, Homo sapiens
  misc_RNA (1)...(19): siRNA sense strand
cagagguacccaucaagaa

SEQ ID NO: 1689847 - RNA, 19 nt, Homo sapiens
  misc_RNA (1)...(19): siRNA sense strand
aggccaagguggagcugua

SEQ ID NO: 1689848 - RNA, 19 nt, Homo sapiens
  misc_RNA (1)...(19): siRNA sense strand
gcugagcugcauuuacuga

SEQ ID NO: 1689849 - RNA, 19 nt, Homo sapiens
  misc_RNA (1)...(19): siRNA sense strand
cugcaaagacggcaaagug

SEQ ID NO: 1689850 - RNA, 19 nt, Homo sapiens
  misc_RNA (1)...(19): siRNA sense strand
ccucuggaauugacuugga

SEQ ID NO: 1689851 - RNA, 19 nt, Homo sapiens
  misc_RNA (1)...(19): siRNA sense strand
gacuauggagccagaggua

SEQ ID NO: 1689852 - RNA, 19 nt, Homo sapiens
  misc_RNA (1)...(19): siRNA sense strand
cuucuccgcugacgacuuc

SEQ ID NO: 1689853 - RNA, 19 nt, Homo sapiens
  misc_RNA (1)...(19): siRNA sense strand
cagcauucccgacaucuuc

SEQ ID NO: 1689854 - RNA, 19 nt, Homo sapiens
  misc_RNA (1)...(19): siRNA sense strand
aggaggaaguggacaauac

SEQ ID NO: 1689855 - RNA, 19 nt, Homo sapiens
  misc_RNA (1)...(19): siRNA sense strand
gagcaacuucgacaacaag

SEQ ID NO: 1689856 - RNA, 19 nt, Homo sapiens
  misc_RNA (1)...(19): siRNA sense strand
gauccgcccaucauuguca

SEQ ID NO: 1689857 - RNA, 19 nt, Homo sapiens
  misc_RNA (1)...(19): siRNA sense strand
ugagaacgaugaguuugag

SEQ ID NO: 1689858 - RNA, 19 nt, Homo sapiens
  misc_RNA (1)...(19): siRNA sense strand
ccaagaagcaggcguucca

SEQ ID NO: 1689859 - RNA, 19 nt, Homo sapiens
  misc_RNA (1)...(19): siRNA sense strand
agacugacauccgcgacaa

SEQ ID NO: 1689860 - RNA, 19 nt, Homo sapiens
  misc_RNA (1)...(19): siRNA sense strand
ugagggagcuggaaaacau

SEQ ID NO: 1689861 - RNA, 19 nt, Homo sapiens
  misc_RNA (1)...(19): siRNA sense strand
gauugaugagcuuaaggua

SEQ ID NO: 1689862 - RNA, 19 nt, Homo sapiens
  misc_RNA (1)...(19): siRNA sense strand
cgccucaaguccugcauga

SEQ ID NO: 1689863 - RNA, 19 nt, Homo sapiens
  misc_RNA (1)...(19): siRNA sense strand
ccauugacaccaugaagga

SEQ ID NO: 1689864 - RNA, 19 nt, Homo sapiens
  misc_RNA (1)...(19): siRNA sense strand
guguccaucuucaagcaaa

SEQ ID NO: 1689865 - RNA, 19 nt, Homo sapiens
  misc_RNA (1)...(19): siRNA sense strand
ggaggcugagcugcauuua

SEQ ID NO: 1689866 - RNA, 19 nt, Homo sapiens
  misc_RNA (1)...(19): siRNA sense strand
caagauugcugaauacaaa

SEQ ID NO: 1689867 - RNA, 19 nt, Homo sapiens
  misc_RNA (1)...(19): siRNA sense strand
gaagucaagucgagucuau

SEQ ID NO: 1689868 - RNA, 19 nt, Homo sapiens
  misc_RNA (1)...(19): siRNA sense strand
ggacaagauugcugaauac

SEQ ID NO: 1689869 - RNA, 19 nt, Homo sapiens
  misc_RNA (1)...(19): siRNA sense strand
caacgaggcuuggagauuc

SEQ ID NO: 1689870 - RNA, 19 nt, Homo sapiens
  misc_RNA (1)...(19): siRNA sense strand
cgacagaacccgacuaugu

SEQ ID NO: 1689871 - RNA, 19 nt, Homo sapiens
  misc_RNA (1)...(19): siRNA sense strand
uggacaagauugcugaaua

SEQ ID NO: 1689872 - RNA, 19 nt, Homo sapiens
  misc_RNA (1)...(19): siRNA sense strand
caucagagcacaucaaauc

SEQ ID NO: 1689873 - RNA, 19 nt, Homo sapiens
  misc_RNA (1)...(19): siRNA sense strand
acacagacauacccaguug

SEQ ID NO: 1689874 - RNA, 19 nt, Homo sapiens
  misc_RNA (1)...(19): siRNA sense strand
ccaaagugguggacaagau

SEQ ID NO: 1689875 - RNA, 19 nt, Homo sapiens
  misc_RNA (1)...(19): siRNA sense strand
caauggagauucccagagu

SEQ ID NO: 1689876 - RNA, 19 nt, Homo sapiens
  misc_RNA (1)...(19): siRNA sense strand
gaagaggaaacgugaugaa

SEQ ID NO: 1689877 - RNA, 19 nt, Homo sapiens
  misc_RNA (1)...(19): siRNA sense strand
gacagaacccgacuauguu

SEQ ID NO: 1689878 - RNA, 19 nt, Homo sapiens
  misc_RNA (1)...(19): siRNA sense strand
gagaagaggaaacgugaug

SEQ ID NO: 1689879 - RNA, 19 nt, Homo sapiens
  misc_RNA (1)...(19): siRNA sense strand
cagagcacaucaaaucaga

SEQ ID NO: 1689880 - RNA, 19 nt, Homo sapiens
  misc_RNA (1)...(19): siRNA sense strand
agagugguguggacaguuu

SEQ ID NO: 1689881 - RNA, 19 nt, Homo sapiens
  misc_RNA (1)...(19): siRNA sense strand
gagggcaucugugacaaug

SEQ ID NO: 1689882 - RNA, 19 nt, Homo sapiens
  misc_RNA (1)...(19): siRNA sense strand
caaagugguggacaagauu

SEQ ID NO: 1689883 - RNA, 19 nt, Homo sapiens
  misc_RNA (1)...(19): siRNA sense strand
cagcgucucuuccaucaac

SEQ ID NO: 1689884 - RNA, 19 nt, Homo sapiens
  misc_RNA (1)...(19): siRNA sense strand
gcacaucaaaucagaacag

SEQ ID NO: 1689885 - RNA, 19 nt, Homo sapiens
  misc_RNA (1)...(19): siRNA sense strand
gggcaucugugacaaugac

SEQ ID NO: 1689886 - RNA, 19 nt, Homo sapiens
  misc_RNA (1)...(19): siRNA sense strand
ucucuuccaucaacagaau

SEQ ID NO: 1689887 - RNA, 19 nt, Homo sapiens
  misc_RNA (1)...(19): siRNA sense strand
ggauccuacuccaucaaug

SEQ ID NO: 1689888 - RNA, 19 nt, Homo sapiens
  misc_RNA (1)...(19): siRNA sense strand
ggcaucagagcacaucaaa

SEQ ID NO: 1689889 - RNA, 19 nt, Homo sapiens
  misc_RNA (1)...(19): siRNA sense strand
ccaauggugagaagaggaa

SEQ ID NO: 1689890 - RNA, 19 nt, Homo sapiens
  misc_RNA (1)...(19): siRNA sense strand
gagcacaucaaaucagaac

SEQ ID NO: 1689891 - RNA, 19 nt, Homo sapiens
  misc_RNA (1)...(19): siRNA sense strand
agaaucauccggaccaaag

SEQ ID NO: 1689892 - RNA, 19 nt, Homo sapiens
  misc_RNA (1)...(19): siRNA sense strand
acaacgaggcuuggagauu

SEQ ID NO: 1689893 - RNA, 19 nt, Homo sapiens
  misc_RNA (1)...(19): siRNA sense strand
uauguucgccugggagauu

SEQ ID NO: 1689894 - RNA, 19 nt, Homo sapiens
  misc_RNA (1)...(19): siRNA sense strand
ccagagugguguggacagu

SEQ ID NO: 1689895 - RNA, 19 nt, Homo sapiens
  misc_RNA (1)...(19): siRNA sense strand
cccagcgucucuuccauca

SEQ ID NO: 1689896 - RNA, 19 nt, Homo sapiens
  misc_RNA (1)...(19): siRNA sense strand
acaagauugcugaauacaa

SEQ ID NO: 1689897 - RNA, 19 nt, Homo sapiens
  misc_RNA (1)...(19): siRNA sense strand
gggauccuacuccaucaau

SEQ ID NO: 1689898 - RNA, 19 nt, Homo sapiens
  misc_RNA (1)...(19): siRNA sense strand
ccacuggccagggaagcua

SEQ ID NO: 1689899 - RNA, 19 nt, Homo sapiens
  misc_RNA (1)...(19): siRNA sense strand
ucuuugagcguccuuccua

SEQ ID NO: 1689900 - RNA, 19 nt, Homo sapiens
  misc_RNA (1)...(19): siRNA sense strand
caagauugcugaauacaaa

SEQ ID NO: 1689901 - RNA, 19 nt, Homo sapiens
  misc_RNA (1)...(19): siRNA sense strand
gaagucaagucgagucuau

SEQ ID NO: 1689902 - RNA, 19 nt, Homo sapiens
  misc_RNA (1)...(19): siRNA sense strand
ggacaagauugcugaauac

SEQ ID NO: 1689903 - RNA, 19 nt, Homo sapiens
  misc_RNA (1)...(19): siRNA sense strand
caacgaggcuuggagauuc

SEQ ID NO: 1689904 - RNA, 19 nt, Homo sapiens
  misc_RNA (1)...(19): siRNA sense strand
cgacagaacccgacuaugu

SEQ ID NO: 1689905 - RNA, 19 nt, Homo sapiens
  misc_RNA (1)...(19): siRNA sense strand
uggacaagauugcugaaua

SEQ ID NO: 1689906 - RNA, 19 nt, Homo sapiens
  misc_RNA (1)...(19): siRNA sense strand
caucagagcacaucaaauc

SEQ ID NO: 1689907 - RNA, 19 nt, Homo sapiens
  misc_RNA (1)...(19): siRNA sense strand
acacagacauacccaguug

SEQ ID NO: 1689908 - RNA, 19 nt, Homo sapiens
  misc_RNA (1)...(19): siRNA sense strand
ccaaagugguggacaagau

SEQ ID NO: 1689909 - RNA, 19 nt, Homo sapiens
  misc_RNA (1)...(19): siRNA sense strand
caauggagauucccagagu

SEQ ID NO: 1689910 - RNA, 19 nt, Homo sapiens
  misc_RNA (1)...(19): siRNA sense strand
gaagaggaaacgugaugaa

SEQ ID NO: 1689911 - RNA, 19 nt, Homo sapiens
  misc_RNA (1)...(19): siRNA sense strand
gacagaacccgacuauguu

SEQ ID NO: 1689912 - RNA, 19 nt, Homo sapiens
  misc_RNA (1)...(19): siRNA sense strand
gagaagaggaaacgugaug

SEQ ID NO: 1689913 - RNA, 19 nt, Homo sapiens
  misc_RNA (1)...(19): siRNA sense strand
cagagcacaucaaaucaga

SEQ ID NO: 1689914 - RNA, 19 nt, Homo sapiens
  misc_RNA (1)...(19): siRNA sense strand
agagugguguggacaguuu

SEQ ID NO: 1689915 - RNA, 19 nt, Homo sapiens
  misc_RNA (1)...(19): siRNA sense strand
gagggcaucugugacaaug

SEQ ID NO: 1689916 - RNA, 19 nt, Homo sapiens
  misc_RNA (1)...(19): siRNA sense strand
caaagugguggacaagauu

SEQ ID NO: 1689917 - RNA, 19 nt, Homo sapiens
  misc_RNA (1)...(19): siRNA sense strand
cagcgucucuuccaucaac

SEQ ID NO: 1689918 - RNA, 19 nt, Homo sapiens
  misc_RNA (1)...(19): siRNA sense strand
gcacaucaaaucagaacag

SEQ ID NO: 1689919 - RNA, 19 nt, Homo sapiens
  misc_RNA (1)...(19): siRNA sense strand
gggcaucugugacaaugac

SEQ ID NO: 1689920 - RNA, 19 nt, Homo sapiens
  misc_RNA (1)...(19): siRNA sense strand
ucucuuccaucaacagaau

SEQ ID NO: 1689921 - RNA, 19 nt, Homo sapiens
  misc_RNA (1)...(19): siRNA sense strand
ggauccuacuccaucaaug

SEQ ID NO: 1689922 - RNA, 19 nt, Homo sapiens
  misc_RNA (1)...(19): siRNA sense strand
ggcaucagagcacaucaaa

SEQ ID NO: 1689923 - RNA, 19 nt, Homo sapiens
  misc_RNA (1)...(19): siRNA sense strand
ccaauggugagaagaggaa

SEQ ID NO: 1689924 - RNA, 19 nt, Homo sapiens
  misc_RNA (1)...(19): siRNA sense strand
gagcacaucaaaucagaac

SEQ ID NO: 1689925 - RNA, 19 nt, Homo sapiens
  misc_RNA (1)...(19): siRNA sense strand
agaaucauccggaccaaag

SEQ ID NO: 1689926 - RNA, 19 nt, Homo sapiens
  misc_RNA (1)...(19): siRNA sense strand
acaacgaggcuuggagauu

SEQ ID NO: 1689927 - RNA, 19 nt, Homo sapiens
  misc_RNA (1)...(19): siRNA sense strand
uauguucgccugggagauu

SEQ ID NO: 1689928 - RNA, 19 nt, Homo sapiens
  misc_RNA (1)...(19): siRNA sense strand
ccagagugguguggacagu

SEQ ID NO: 1689929 - RNA, 19 nt, Homo sapiens
  misc_RNA (1)...(19): siRNA sense strand
cccagcgucucuuccauca

SEQ ID NO: 1689930 - RNA, 19 nt, Homo sapiens
  misc_RNA (1)...(19): siRNA sense strand
acaagauugcugaauacaa

SEQ ID NO: 1689931 - RNA, 19 nt, Homo sapiens
  misc_RNA (1)...(19): siRNA sense strand
gggauccuacuccaucaau

SEQ ID NO: 1689932 - RNA, 19 nt, Homo sapiens
  misc_RNA (1)...(19): siRNA sense strand
ccacuggccagggaagcua

SEQ ID NO: 1689933 - RNA, 19 nt, Homo sapiens
  misc_RNA (1)...(19): siRNA sense strand
ucuuugagcguccuuccua

SEQ ID NO: 1689934 - RNA, 19 nt, Homo sapiens
  misc_RNA (1)...(19): siRNA sense strand
caagauugcugaauacaaa

SEQ ID NO: 1689935 - RNA, 19 nt, Homo sapiens
  misc_RNA (1)...(19): siRNA sense strand
gaagucaagucgagucuau

SEQ ID NO: 1689936 - RNA, 19 nt, Homo sapiens
  misc_RNA (1)...(19): siRNA sense strand
ggacaagauugcugaauac

SEQ ID NO: 1689937 - RNA, 19 nt, Homo sapiens
  misc_RNA (1)...(19): siRNA sense strand
caacgaggcuuggagauuc

SEQ ID NO: 1689938 - RNA, 19 nt, Homo sapiens
  misc_RNA (1)...(19): siRNA sense strand
cgacagaacccgacuaugu

SEQ ID NO: 1689939 - RNA, 19 nt, Homo sapiens
  misc_RNA (1)...(19): siRNA sense strand
uggacaagauugcugaaua

SEQ ID NO: 1689940 - RNA, 19 nt, Homo sapiens
  misc_RNA (1)...(19): siRNA sense strand
caucagagcacaucaaauc

SEQ ID NO: 1689941 - RNA, 19 nt, Homo sapiens
  misc_RNA (1)...(19): siRNA sense strand
acacagacauacccaguug

SEQ ID NO: 1689942 - RNA, 19 nt, Homo sapiens
  misc_RNA (1)...(19): siRNA sense strand
ccaaagugguggacaagau

SEQ ID NO: 1689943 - RNA, 19 nt, Homo sapiens
  misc_RNA (1)...(19): siRNA sense strand
caauggagauucccagagu

SEQ ID NO: 1689944 - RNA, 19 nt, Homo sapiens
  misc_RNA (1)...(19): siRNA sense strand
gaagaggaaacgugaugaa

SEQ ID NO: 1689945 - RNA, 19 nt, Homo sapiens
  misc_RNA (1)...(19): siRNA sense strand
gacagaacccgacuauguu

SEQ ID NO: 1689946 - RNA, 19 nt, Homo sapiens
  misc_RNA (1)...(19): siRNA sense strand
gagaagaggaaacgugaug

SEQ ID NO: 1689947 - RNA, 19 nt, Homo sapiens
  misc_RNA (1)...(19): siRNA sense strand
cagagcacaucaaaucaga

SEQ ID NO: 1689948 - RNA, 19 nt, Homo sapiens
  misc_RNA (1)...(19): siRNA sense strand
agagugguguggacaguuu

SEQ ID NO: 1689949 - RNA, 19 nt, Homo sapiens
  misc_RNA (1)...(19): siRNA sense strand
gagggcaucugugacaaug

SEQ ID NO: 1689950 - RNA, 19 nt, Homo sapiens
  misc_RNA (1)...(19): siRNA sense strand
caaagugguggacaagauu

SEQ ID NO: 1689951 - RNA, 19 nt, Homo sapiens
  misc_RNA (1)...(19): siRNA sense strand
cagcgucucuuccaucaac

SEQ ID NO: 1689952 - RNA, 19 nt, Homo sapiens
  misc_RNA (1)...(19): siRNA sense strand
gcacaucaaaucagaacag

SEQ ID NO: 1689953 - RNA, 19 nt, Homo sapiens
  misc_RNA (1)...(19): siRNA sense strand
gggcaucugugacaaugac

SEQ ID NO: 1689954 - RNA, 19 nt, Homo sapiens
  misc_RNA (1)...(19): siRNA sense strand
ucucuuccaucaacagaau

SEQ ID NO: 1689955 - RNA, 19 nt, Homo sapiens
  misc_RNA (1)...(19): siRNA sense strand
ggauccuacuccaucaaug

SEQ ID NO: 1689956 - RNA, 19 nt, Homo sapiens
  misc_RNA (1)...(19): siRNA sense strand
ggcaucagagcacaucaaa

SEQ ID NO: 1689957 - RNA, 19 nt, Homo sapiens
  misc_RNA (1)...(19): siRNA sense strand
ccaauggugagaagaggaa

SEQ ID NO: 1689958 - RNA, 19 nt, Homo sapiens
  misc_RNA (1)...(19): siRNA sense strand
gagcacaucaaaucagaac

SEQ ID NO: 1689959 - RNA, 19 nt, Homo sapiens
  misc_RNA (1)...(19): siRNA sense strand
agaaucauccggaccaaag

SEQ ID NO: 1689960 - RNA, 19 nt, Homo sapiens
  misc_RNA (1)...(19): siRNA sense strand
acaacgaggcuuggagauu

SEQ ID NO: 1689961 - RNA, 19 nt, Homo sapiens
  misc_RNA (1)...(19): siRNA sense strand
uauguucgccugggagauu

SEQ ID NO: 1689962 - RNA, 19 nt, Homo sapiens
  misc_RNA (1)...(19): siRNA sense strand
ccagagugguguggacagu

SEQ ID NO: 1689963 - RNA, 19 nt, Homo sapiens
  misc_RNA (1)...(19): siRNA sense strand
cccagcgucucuuccauca

SEQ ID NO: 1689964 - RNA, 19 nt, Homo sapiens
  misc_RNA (1)...(19): siRNA sense strand
acaagauugcugaauacaa

SEQ ID NO: 1689965 - RNA, 19 nt, Homo sapiens
  misc_RNA (1)...(19): siRNA sense strand
gggauccuacuccaucaau

SEQ ID NO: 1689966 - RNA, 19 nt, Homo sapiens
  misc_RNA (1)...(19): siRNA sense strand
ccacuggccagggaagcua

SEQ ID NO: 1689967 - RNA, 19 nt, Homo sapiens
  misc_RNA (1)...(19): siRNA sense strand
ucuuugagcguccuuccua

SEQ ID NO: 1689968 - RNA, 19 nt, Homo sapiens
  misc_RNA (1)...(19): siRNA sense strand
caagauugcugaauacaaa

SEQ ID NO: 1689969 - RNA, 19 nt, Homo sapiens
  misc_RNA (1)...(19): siRNA sense strand
gaagucaagucgagucuau

SEQ ID NO: 1689970 - RNA, 19 nt, Homo sapiens
  misc_RNA (1)...(19): siRNA sense strand
ggacaagauugcugaauac

SEQ ID NO: 1689971 - RNA, 19 nt, Homo sapiens
  misc_RNA (1)...(19): siRNA sense strand
caacgaggcuuggagauuc

SEQ ID NO: 1689972 - RNA, 19 nt, Homo sapiens
  misc_RNA (1)...(19): siRNA sense strand
cgacagaacccgacuaugu

SEQ ID NO: 1689973 - RNA, 19 nt, Homo sapiens
  misc_RNA (1)...(19): siRNA sense strand
uggacaagauugcugaaua

SEQ ID NO: 1689974 - RNA, 19 nt, Homo sapiens
  misc_RNA (1)...(19): siRNA sense strand
caucagagcacaucaaauc

SEQ ID NO: 1689975 - RNA, 19 nt, Homo sapiens
  misc_RNA (1)...(19): siRNA sense strand
acacagacauacccaguug

SEQ ID NO: 1689976 - RNA, 19 nt, Homo sapiens
  misc_RNA (1)...(19): siRNA sense strand
ccaaagugguggacaagau

SEQ ID NO: 1689977 - RNA, 19 nt, Homo sapiens
  misc_RNA (1)...(19): siRNA sense strand
caauggagauucccagagu

SEQ ID NO: 1689978 - RNA, 19 nt, Homo sapiens
  misc_RNA (1)...(19): siRNA sense strand
gaagaggaaacgugaugaa

SEQ ID NO: 1689979 - RNA, 19 nt, Homo sapiens
  misc_RNA (1)...(19): siRNA sense strand
gacagaacccgacuauguu

SEQ ID NO: 1689980 - RNA, 19 nt, Homo sapiens
  misc_RNA (1)...(19): siRNA sense strand
gagaagaggaaacgugaug

SEQ ID NO: 1689981 - RNA, 19 nt, Homo sapiens
  misc_RNA (1)...(19): siRNA sense strand
cagagcacaucaaaucaga

SEQ ID NO: 1689982 - RNA, 19 nt, Homo sapiens
  misc_RNA (1)...(19): siRNA sense strand
agagugguguggacaguuu

SEQ ID NO: 1689983 - RNA, 19 nt, Homo sapiens
  misc_RNA (1)...(19): siRNA sense strand
gagggcaucugugacaaug

SEQ ID NO: 1689984 - RNA, 19 nt, Homo sapiens
  misc_RNA (1)...(19): siRNA sense strand
caaagugguggacaagauu

SEQ ID NO: 1689985 - RNA, 19 nt, Homo sapiens
  misc_RNA (1)...(19): siRNA sense strand
cagcgucucuuccaucaac

SEQ ID NO: 1689986 - RNA, 19 nt, Homo sapiens
  misc_RNA (1)...(19): siRNA sense strand
gcacaucaaaucagaacag

SEQ ID NO: 1689987 - RNA, 19 nt, Homo sapiens
  misc_RNA (1)...(19): siRNA sense strand
ccuaugaccgccacuaguu

SEQ ID NO: 1689988 - RNA, 19 nt, Homo sapiens
  misc_RNA (1)...(19): siRNA sense strand
gggcaucugugacaaugac

SEQ ID NO: 1689989 - RNA, 19 nt, Homo sapiens
  misc_RNA (1)...(19): siRNA sense strand
ucucuuccaucaacagaau

SEQ ID NO: 1689990 - RNA, 19 nt, Homo sapiens
  misc_RNA (1)...(19): siRNA sense strand
ggauccuacuccaucaaug

SEQ ID NO: 1689991 - RNA, 19 nt, Homo sapiens
  misc_RNA (1)...(19): siRNA sense strand
gggaccacaucaagcuuca

SEQ ID NO: 1689992 - RNA, 19 nt, Homo sapiens
  misc_RNA (1)...(19): siRNA sense strand
cuaugaccgccacuaguua

SEQ ID NO: 1689993 - RNA, 19 nt, Homo sapiens
  misc_RNA (1)...(19): siRNA sense strand
ggcaucagagcacaucaaa

SEQ ID NO: 1689994 - RNA, 19 nt, Homo sapiens
  misc_RNA (1)...(19): siRNA sense strand
ccaauggugagaagaggaa

SEQ ID NO: 1689995 - RNA, 19 nt, Homo sapiens
  misc_RNA (1)...(19): siRNA sense strand
gagcacaucaaaucagaac

SEQ ID NO: 1689996 - RNA, 19 nt, Homo sapiens
  misc_RNA (1)...(19): siRNA sense strand
agaaucauccggaccaaag

SEQ ID NO: 1689997 - RNA, 19 nt, Homo sapiens
  misc_RNA (1)...(19): siRNA sense strand
acaacgaggcuuggagauu

SEQ ID NO: 1689998 - RNA, 19 nt, Homo sapiens
  misc_RNA (1)...(19): siRNA sense strand
uauguucgccugggagauu

SEQ ID NO: 1689999 - RNA, 19 nt, Homo sapiens
  misc_RNA (1)...(19): siRNA sense strand
ccagagugguguggacagu

SEQ ID NO: 1690000 - RNA, 19 nt, Homo sapiens
  misc_RNA (1)...(19): siRNA sense strand
cccagcgucucuuccauca

SEQ ID NO: 1690001 - RNA, 19 nt, Homo sapiens
  misc_RNA (1)...(19): siRNA sense strand
acaagauugcugaauacaa

SEQ ID NO: 1690002 - RNA, 19 nt, Homo sapiens
  misc_RNA (1)...(19): siRNA sense strand
gggauccuacuccaucaau

SEQ ID NO: 1690003 - RNA, 19 nt, Homo sapiens
  misc_RNA (1)...(19): siRNA sense strand
cagcuucggccuccacauc

SEQ ID NO: 1690004 - RNA, 19 nt, Homo sapiens
  misc_RNA (1)...(19): siRNA sense strand
ccacuggccagggaagcua

SEQ ID NO: 1690005 - RNA, 19 nt, Homo sapiens
  misc_RNA (1)...(19): siRNA sense strand
ucuuugagcguccuuccua

SEQ ID NO: 1690006 - RNA, 19 nt, Homo sapiens
  misc_RNA (1)...(19): siRNA sense strand
caagauugcugaauacaaa

SEQ ID NO: 1690007 - RNA, 19 nt, Homo sapiens
  misc_RNA (1)...(19): siRNA sense strand
gaagucaagucgagucuau

SEQ ID NO: 1690008 - RNA, 19 nt, Homo sapiens
  misc_RNA (1)...(19): siRNA sense strand
ggacaagauugcugaauac

SEQ ID NO: 1690009 - RNA, 19 nt, Homo sapiens
  misc_RNA (1)...(19): siRNA sense strand
caacgaggcuuggagauuc

SEQ ID NO: 1690010 - RNA, 19 nt, Homo sapiens
  misc_RNA (1)...(19): siRNA sense strand
cgacagaacccgacuaugu

SEQ ID NO: 1690011 - RNA, 19 nt, Homo sapiens
  misc_RNA (1)...(19): siRNA sense strand
uggacaagauugcugaaua

SEQ ID NO: 1690012 - RNA, 19 nt, Homo sapiens
  misc_RNA (1)...(19): siRNA sense strand
caucagagcacaucaaauc

SEQ ID NO: 1690013 - RNA, 19 nt, Homo sapiens
  misc_RNA (1)...(19): siRNA sense strand
acacagacauacccaguug

SEQ ID NO: 1690014 - RNA, 19 nt, Homo sapiens
  misc_RNA (1)...(19): siRNA sense strand
ccaaagugguggacaagau

SEQ ID NO: 1690015 - RNA, 19 nt, Homo sapiens
  misc_RNA (1)...(19): siRNA sense strand
caauggagauucccagagu

SEQ ID NO: 1690016 - RNA, 19 nt, Homo sapiens
  misc_RNA (1)...(19): siRNA sense strand
gaagaggaaacgugaugaa

SEQ ID NO: 1690017 - RNA, 19 nt, Homo sapiens
  misc_RNA (1)...(19): siRNA sense strand
gacagaacccgacuauguu

SEQ ID NO: 1690018 - RNA, 19 nt, Homo sapiens
  misc_RNA (1)...(19): siRNA sense strand
gagaagaggaaacgugaug

SEQ ID NO: 1690019 - RNA, 19 nt, Homo sapiens
  misc_RNA (1)...(19): siRNA sense strand
cagagcacaucaaaucaga

SEQ ID NO: 1690020 - RNA, 19 nt, Homo sapiens
  misc_RNA (1)...(19): siRNA sense strand
agagugguguggacaguuu

SEQ ID NO: 1690021 - RNA, 19 nt, Homo sapiens
  misc_RNA (1)...(19): siRNA sense strand
gagggcaucugugacaaug

SEQ ID NO: 1690022 - RNA, 19 nt, Homo sapiens
  misc_RNA (1)...(19): siRNA sense strand
caaagugguggacaagauu

SEQ ID NO: 1690023 - RNA, 19 nt, Homo sapiens
  misc_RNA (1)...(19): siRNA sense strand
cagcgucucuuccaucaac

SEQ ID NO: 1690024 - RNA, 19 nt, Homo sapiens
  misc_RNA (1)...(19): siRNA sense strand
gcacaucaaaucagaacag

SEQ ID NO: 1690025 - RNA, 19 nt, Homo sapiens
  misc_RNA (1)...(19): siRNA sense strand
ccuaugaccgccacuaguu

SEQ ID NO: 1690026 - RNA, 19 nt, Homo sapiens
  misc_RNA (1)...(19): siRNA sense strand
gggcaucugugacaaugac

SEQ ID NO: 1690027 - RNA, 19 nt, Homo sapiens
  misc_RNA (1)...(19): siRNA sense strand
ucucuuccaucaacagaau

SEQ ID NO: 1690028 - RNA, 19 nt, Homo sapiens
  misc_RNA (1)...(19): siRNA sense strand
ggauccuacuccaucaaug

SEQ ID NO: 1690029 - RNA, 19 nt, Homo sapiens
  misc_RNA (1)...(19): siRNA sense strand
gggaccacaucaagcuuca

SEQ ID NO: 1690030 - RNA, 19 nt, Homo sapiens
  misc_RNA (1)...(19): siRNA sense strand
cuaugaccgccacuaguua

SEQ ID NO: 1690031 - RNA, 19 nt, Homo sapiens
  misc_RNA (1)...(19): siRNA sense strand
ggcaucagagcacaucaaa

SEQ ID NO: 1690032 - RNA, 19 nt, Homo sapiens
  misc_RNA (1)...(19): siRNA sense strand
ccaauggugagaagaggaa

SEQ ID NO: 1690033 - RNA, 19 nt, Homo sapiens
  misc_RNA (1)...(19): siRNA sense strand
gagcacaucaaaucagaac

SEQ ID NO: 1690034 - RNA, 19 nt, Homo sapiens
  misc_RNA (1)...(19): siRNA sense strand
agaaucauccggaccaaag

SEQ ID NO: 1690035 - RNA, 19 nt, Homo sapiens
  misc_RNA (1)...(19): siRNA sense strand
acaacgaggcuuggagauu

SEQ ID NO: 1690036 - RNA, 19 nt, Homo sapiens
  misc_RNA (1)...(19): siRNA sense strand
uauguucgccugggagauu

SEQ ID NO: 1690037 - RNA, 19 nt, Homo sapiens
  misc_RNA (1)...(19): siRNA sense strand
ccagagugguguggacagu

SEQ ID NO: 1690038 - RNA, 19 nt, Homo sapiens
  misc_RNA (1)...(19): siRNA sense strand
cccagcgucucuuccauca

SEQ ID NO: 1690039 - RNA, 19 nt, Homo sapiens
  misc_RNA (1)...(19): siRNA sense strand
acaagauugcugaauacaa

SEQ ID NO: 1690040 - RNA, 19 nt, Homo sapiens
  misc_RNA (1)...(19): siRNA sense strand
gggauccuacuccaucaau

SEQ ID NO: 1690041 - RNA, 19 nt, Homo sapiens
  misc_RNA (1)...(19): siRNA sense strand
cagcuucggccuccacauc

SEQ ID NO: 1690042 - RNA, 19 nt, Homo sapiens
  misc_RNA (1)...(19): siRNA sense strand
ccacuggccagggaagcua

SEQ ID NO: 1690043 - RNA, 19 nt, Homo sapiens
  misc_RNA (1)...(19): siRNA sense strand
ucuuugagcguccuuccua

SEQ ID NO: 1690044 - RNA, 19 nt, Homo sapiens
  misc_RNA (1)...(19): siRNA sense strand
caacauagacuacagauua

SEQ ID NO: 1690045 - RNA, 19 nt, Homo sapiens
  misc_RNA (1)...(19): siRNA sense strand
gcuaaagucuggccaaaua

SEQ ID NO: 1690046 - RNA, 19 nt, Homo sapiens
  misc_RNA (1)...(19): siRNA sense strand
ggucuuuacuucauacuua

SEQ ID NO: 1690047 - RNA, 19 nt, Homo sapiens
  misc_RNA (1)...(19): siRNA sense strand
ccaaggaugucguugauuu

SEQ ID NO: 1690048 - RNA, 19 nt, Homo sapiens
  misc_RNA (1)...(19): siRNA sense strand
ugacagaucuccuuacaga

SEQ ID NO: 1690049 - RNA, 19 nt, Homo sapiens
  misc_RNA (1)...(19): siRNA sense strand
gaaugccgcugaugauaaa

SEQ ID NO: 1690050 - RNA, 19 nt, Homo sapiens
  misc_RNA (1)...(19): siRNA sense strand
ugaauagccuccacagaua

SEQ ID NO: 1690051 - RNA, 19 nt, Homo sapiens
  misc_RNA (1)...(19): siRNA sense strand
caagaaaguugcuguggaa

SEQ ID NO: 1690052 - RNA, 19 nt, Homo sapiens
  misc_RNA (1)...(19): siRNA sense strand
ucaagagccuucugaaauu

SEQ ID NO: 1690053 - RNA, 19 nt, Homo sapiens
  misc_RNA (1)...(19): siRNA sense strand
gaaggaaccacccaucuuu

SEQ ID NO: 1690054 - RNA, 19 nt, Homo sapiens
  misc_RNA (1)...(19): siRNA sense strand
caagagccuucugaaauua

SEQ ID NO: 1690055 - RNA, 19 nt, Homo sapiens
  misc_RNA (1)...(19): siRNA sense strand
gaucagauuugaagaguuc

SEQ ID NO: 1690056 - RNA, 19 nt, Homo sapiens
  misc_RNA (1)...(19): siRNA sense strand
caagagacauuacgaaagu

SEQ ID NO: 1690057 - RNA, 19 nt, Homo sapiens
  misc_RNA (1)...(19): siRNA sense strand
gcaaaucacucucuuuacu

SEQ ID NO: 1690058 - RNA, 19 nt, Homo sapiens
  misc_RNA (1)...(19): siRNA sense strand
cuaacgagcugaucagauu

SEQ ID NO: 1690059 - RNA, 19 nt, Homo sapiens
  misc_RNA (1)...(19): siRNA sense strand
gaaaagauccuuacucuga

SEQ ID NO: 1690060 - RNA, 19 nt, Homo sapiens
  misc_RNA (1)...(19): siRNA sense strand
gcaugugucuagagaguaa

SEQ ID NO: 1690061 - RNA, 19 nt, Homo sapiens
  misc_RNA (1)...(19): siRNA sense strand
ggacugggaugucacugaa

SEQ ID NO: 1690062 - RNA, 19 nt, Homo sapiens
  misc_RNA (1)...(19): siRNA sense strand
cagcaaaucacucucuuua

SEQ ID NO: 1690063 - RNA, 19 nt, Homo sapiens
  misc_RNA (1)...(19): siRNA sense strand
gaagguugccgauauagaa

SEQ ID NO: 1690064 - RNA, 19 nt, Homo sapiens
  misc_RNA (1)...(19): siRNA sense strand
ccaacaagauaaugaaaug

SEQ ID NO: 1690065 - RNA, 19 nt, Homo sapiens
  misc_RNA (1)...(19): siRNA sense strand
gcaaagcagugccgagugu

SEQ ID NO: 1690066 - RNA, 19 nt, Homo sapiens
  misc_RNA (1)...(19): siRNA sense strand
gcaaaacucugaccucuga

SEQ ID NO: 1690067 - RNA, 19 nt, Homo sapiens
  misc_RNA (1)...(19): siRNA sense strand
ggaaggagaccacguuguu

SEQ ID NO: 1690068 - RNA, 19 nt, Homo sapiens
  misc_RNA (1)...(19): siRNA sense strand
agccauaccugauacuuua

SEQ ID NO: 1690069 - RNA, 19 nt, Homo sapiens
  misc_RNA (1)...(19): siRNA sense strand
ccagccaucuugugucaua

SEQ ID NO: 1690070 - RNA, 19 nt, Homo sapiens
  misc_RNA (1)...(19): siRNA sense strand
gaaggaaacggaacugaga

SEQ ID NO: 1690071 - RNA, 19 nt, Homo sapiens
  misc_RNA (1)...(19): siRNA sense strand
uuauugagcuuuccagauu

SEQ ID NO: 1690072 - RNA, 19 nt, Homo sapiens
  misc_RNA (1)...(19): siRNA sense strand
gagaacuccugcaguagaa

SEQ ID NO: 1690073 - RNA, 19 nt, Homo sapiens
  misc_RNA (1)...(19): siRNA sense strand
gcaucaaagugguuaaaug

SEQ ID NO: 1690074 - RNA, 19 nt, Homo sapiens
  misc_RNA (1)...(19): siRNA sense strand
gcgcuuuacucaggauuua

SEQ ID NO: 1690075 - RNA, 19 nt, Homo sapiens
  misc_RNA (1)...(19): siRNA sense strand
gaaagucucugcgaucucu

SEQ ID NO: 1690076 - RNA, 19 nt, Homo sapiens
  misc_RNA (1)...(19): siRNA sense strand
gaugacagaucuccuuaca

SEQ ID NO: 1690077 - RNA, 19 nt, Homo sapiens
  misc_RNA (1)...(19): siRNA sense strand
gaaggagaccacguuguua

SEQ ID NO: 1690078 - RNA, 19 nt, Homo sapiens
  misc_RNA (1)...(19): siRNA sense strand
ccaaucugcugaucucauu

SEQ ID NO: 1690079 - RNA, 19 nt, Homo sapiens
  misc_RNA (1)...(19): siRNA sense strand
gcagacagauucagcugau

SEQ ID NO: 1690080 - RNA, 19 nt, Homo sapiens
  misc_RNA (1)...(19): siRNA sense strand
caaagugguuaaauggauu

SEQ ID NO: 1690081 - RNA, 19 nt, Homo sapiens
  misc_RNA (1)...(19): siRNA sense strand
guggauggcuucaacaaga

SEQ ID NO: 1690082 - RNA, 19 nt, Homo sapiens
  misc_RNA (1)...(19): siRNA sense strand
caaagaaugccgcugauga

SEQ ID NO: 1690083 - RNA, 19 nt, Homo sapiens
  misc_RNA (1)...(19): siRNA sense strand
acaaggaaguuauucaaga

SEQ ID NO: 1690084 - RNA, 19 nt, Homo sapiens
  misc_RNA (1)...(19): siRNA sense strand
uaaccugucuuccugcaaa

SEQ ID NO: 1690085 - RNA, 19 nt, Homo sapiens
  misc_RNA (1)...(19): siRNA sense strand
caagcugauugaguuauua

SEQ ID NO: 1690086 - RNA, 19 nt, Homo sapiens
  misc_RNA (1)...(19): siRNA sense strand
gaaugugucagaucuauau

SEQ ID NO: 1690087 - RNA, 19 nt, Homo sapiens
  misc_RNA (1)...(19): siRNA sense strand
gagacuguauuccaaguga

SEQ ID NO: 1690088 - RNA, 19 nt, Homo sapiens
  misc_RNA (1)...(19): siRNA sense strand
uaaacaagccagcaagaaa

SEQ ID NO: 1690089 - RNA, 19 nt, Homo sapiens
  misc_RNA (1)...(19): siRNA sense strand
ccacagagaagcagaauuc

SEQ ID NO: 1690090 - RNA, 19 nt, Homo sapiens
  misc_RNA (1)...(19): siRNA sense strand
aggcaugguuuccacauua

SEQ ID NO: 1690091 - RNA, 19 nt, Homo sapiens
  misc_RNA (1)...(19): siRNA sense strand
ugaagagccugccauacuu

SEQ ID NO: 1690092 - RNA, 19 nt, Homo sapiens
  misc_RNA (1)...(19): siRNA sense strand
cagaucuccuuacagaaua

SEQ ID NO: 1690093 - RNA, 19 nt, Homo sapiens
  misc_RNA (1)...(19): siRNA sense strand
ccacccaucuuucuguuga

SEQ ID NO: 1690094 - RNA, 19 nt, Homo sapiens
  misc_RNA (1)...(19): siRNA sense strand
gaauucaucuguguaugug

SEQ ID NO: 1690095 - RNA, 19 nt, Homo sapiens
  misc_RNA (1)...(19): siRNA sense strand
gcacaagcugcaucaguuu

SEQ ID NO: 1690096 - RNA, 19 nt, Homo sapiens
  misc_RNA (1)...(19): siRNA sense strand
gcucacaagucuguauuug

SEQ ID NO: 1690097 - RNA, 19 nt, Homo sapiens
  misc_RNA (1)...(19): siRNA sense strand
cgaagaguccuguagguaa

SEQ ID NO: 1690098 - RNA, 19 nt, Homo sapiens
  misc_RNA (1)...(19): siRNA sense strand
gcagcccaauuauauuuga

SEQ ID NO: 1690099 - RNA, 19 nt, Homo sapiens
  misc_RNA (1)...(19): siRNA sense strand
caugcuggcucuaagcuuu

SEQ ID NO: 1690100 - RNA, 19 nt, Homo sapiens
  misc_RNA (1)...(19): siRNA sense strand
gcacucaggaugaaauaga

SEQ ID NO: 1690101 - RNA, 19 nt, Homo sapiens
  misc_RNA (1)...(19): siRNA sense strand
gcugaauaauugccaggua

SEQ ID NO: 1690102 - RNA, 19 nt, Homo sapiens
  misc_RNA (1)...(19): siRNA sense strand
uaaagucuggccaaauaua

SEQ ID NO: 1690103 - RNA, 19 nt, Homo sapiens
  misc_RNA (1)...(19): siRNA sense strand
gaagagcacauuucacagu

SEQ ID NO: 1690104 - RNA, 19 nt, Homo sapiens
  misc_RNA (1)...(19): siRNA sense strand
ggagguaccaguagcuuga

SEQ ID NO: 1690105 - RNA, 19 nt, Homo sapiens
  misc_RNA (1)...(19): siRNA sense strand
ggacauggucauaagagaa

SEQ ID NO: 1690106 - RNA, 19 nt, Homo sapiens
  misc_RNA (1)...(19): siRNA sense strand
cgugaagguugccgauaua

SEQ ID NO: 1690107 - RNA, 19 nt, Homo sapiens
  misc_RNA (1)...(19): siRNA sense strand
ccaagcugauugaguuauu

SEQ ID NO: 1690108 - RNA, 19 nt, Homo sapiens
  misc_RNA (1)...(19): siRNA sense strand
gaagaguccuguagguaac

SEQ ID NO: 1690109 - RNA, 19 nt, Homo sapiens
  misc_RNA (1)...(19): siRNA sense strand
gaaccucagugcccgaagu

SEQ ID NO: 1690110 - RNA, 19 nt, Homo sapiens
  misc_RNA (1)...(19): siRNA sense strand
gcaccuauaaccaagcuuu

SEQ ID NO: 1690111 - RNA, 19 nt, Homo sapiens
  misc_RNA (1)...(19): siRNA sense strand
ucaaaggacugggauguca

SEQ ID NO: 1690112 - RNA, 19 nt, Homo sapiens
  misc_RNA (1)...(19): siRNA sense strand
guacauggagaacaagaaa

SEQ ID NO: 1690113 - RNA, 19 nt, Homo sapiens
  misc_RNA (1)...(19): siRNA sense strand
ucaaagugguuaaauggau

SEQ ID NO: 1690114 - RNA, 19 nt, Homo sapiens
  misc_RNA (1)...(19): siRNA sense strand
guuuggcgaucuagaagua

SEQ ID NO: 1690115 - RNA, 19 nt, Homo sapiens
  misc_RNA (1)...(19): siRNA sense strand
caaagcaccaggacaauca

SEQ ID NO: 1690116 - RNA, 19 nt, Homo sapiens
  misc_RNA (1)...(19): siRNA sense strand
ggaaggaaccacccaucuu

SEQ ID NO: 1690117 - RNA, 19 nt, Homo sapiens
  misc_RNA (1)...(19): siRNA sense strand
ggcagaacccguuuacaaa

SEQ ID NO: 1690118 - RNA, 19 nt, Homo sapiens
  misc_RNA (1)...(19): siRNA sense strand
caaggaaguuauucaagag

SEQ ID NO: 1690119 - RNA, 19 nt, Homo sapiens
  misc_RNA (1)...(19): siRNA sense strand
ccaaauauaccaccuccaa

SEQ ID NO: 1690120 - RNA, 19 nt, Homo sapiens
  misc_RNA (1)...(19): siRNA sense strand
cauaaucgaugcggcuaaa

SEQ ID NO: 1690121 - RNA, 19 nt, Homo sapiens
  misc_RNA (1)...(19): siRNA sense strand
ccacuucgccaaugcguuu

SEQ ID NO: 1690122 - RNA, 19 nt, Homo sapiens
  misc_RNA (1)...(19): siRNA sense strand
ucaguuccauuucggcuuu

SEQ ID NO: 1690123 - RNA, 19 nt, Homo sapiens
  misc_RNA (1)...(19): siRNA sense strand
cagcgaacaugaauuugau

SEQ ID NO: 1690124 - RNA, 19 nt, Homo sapiens
  misc_RNA (1)...(19): siRNA sense strand
aaaucacucucuuuacuga

SEQ ID NO: 1690125 - RNA, 19 nt, Homo sapiens
  misc_RNA (1)...(19): siRNA sense strand
gugaauagccuccacagau

SEQ ID NO: 1690126 - RNA, 19 nt, Homo sapiens
  misc_RNA (1)...(19): siRNA sense strand
gcaaagaauccgugagaag

SEQ ID NO: 1690127 - RNA, 19 nt, Homo sapiens
  misc_RNA (1)...(19): siRNA sense strand
cgaaagaguacauggagaa

SEQ ID NO: 1690128 - RNA, 19 nt, Homo sapiens
  misc_RNA (1)...(19): siRNA sense strand
ggaugucacugaauauggu

SEQ ID NO: 1690129 - RNA, 19 nt, Homo sapiens
  misc_RNA (1)...(19): siRNA sense strand
aaacgucugcugacccuua

SEQ ID NO: 1690130 - RNA, 19 nt, Homo sapiens
  misc_RNA (1)...(19): siRNA sense strand
ugaguuacccgucugcuuu

SEQ ID NO: 1690131 - RNA, 19 nt, Homo sapiens
  misc_RNA (1)...(19): siRNA sense strand
ggaacuuagugaccugaga

SEQ ID NO: 1690132 - RNA, 19 nt, Homo sapiens
  misc_RNA (1)...(19): siRNA sense strand
cugaauaauugccagguaa

SEQ ID NO: 1690133 - RNA, 19 nt, Homo sapiens
  misc_RNA (1)...(19): siRNA sense strand
guaagcugcugugcucauu

SEQ ID NO: 1690134 - RNA, 19 nt, Homo sapiens
  misc_RNA (1)...(19): siRNA sense strand
cagaaugccucagcuagga

SEQ ID NO: 1690135 - RNA, 19 nt, Homo sapiens
  misc_RNA (1)...(19): siRNA sense strand
gaaccacccaucuuucugu

SEQ ID NO: 1690136 - RNA, 19 nt, Homo sapiens
  misc_RNA (1)...(19): siRNA sense strand
ccaagacuaugaugucagu

SEQ ID NO: 1690137 - RNA, 19 nt, Homo sapiens
  misc_RNA (1)...(19): siRNA sense strand
ugaguugauugacaucgua

SEQ ID NO: 1690138 - RNA, 19 nt, Homo sapiens
  misc_RNA (1)...(19): siRNA sense strand
ccucauguauugcagauuc

SEQ ID NO: 1690139 - RNA, 19 nt, Homo sapiens
  misc_RNA (1)...(19): siRNA sense strand
aagaguacauggagaacaa

SEQ ID NO: 1690140 - RNA, 19 nt, Homo sapiens
  misc_RNA (1)...(19): siRNA sense strand
cugccucuguuuaaauuua

SEQ ID NO: 1690141 - RNA, 19 nt, Homo sapiens
  misc_RNA (1)...(19): siRNA sense strand
caagauuccuuuugugauu

SEQ ID NO: 1690142 - RNA, 19 nt, Homo sapiens
  misc_RNA (1)...(19): siRNA sense strand
cauccuaucaccaucauuu

SEQ ID NO: 1690143 - RNA, 19 nt, Homo sapiens
  misc_RNA (1)...(19): siRNA sense strand
gcagucccacuuccugaua

SEQ ID NO: 1690144 - RNA, 19 nt, Homo sapiens
  misc_RNA (1)...(19): siRNA sense strand
ggucuuuacuucauacuua

SEQ ID NO: 1690145 - RNA, 19 nt, Homo sapiens
  misc_RNA (1)...(19): siRNA sense strand
ccaaggaugucguugauuu

SEQ ID NO: 1690146 - RNA, 19 nt, Homo sapiens
  misc_RNA (1)...(19): siRNA sense strand
ugacagaucuccuuacaga

SEQ ID NO: 1690147 - RNA, 19 nt, Homo sapiens
  misc_RNA (1)...(19): siRNA sense strand
ucaagagccuucugaaauu

SEQ ID NO: 1690148 - RNA, 19 nt, Homo sapiens
  misc_RNA (1)...(19): siRNA sense strand
gaaggaaccacccaucuuu

SEQ ID NO: 1690149 - RNA, 19 nt, Homo sapiens
  misc_RNA (1)...(19): siRNA sense strand
caagagccuucugaaauua

SEQ ID NO: 1690150 - RNA, 19 nt, Homo sapiens
  misc_RNA (1)...(19): siRNA sense strand
caagagacauuacgaaagu

SEQ ID NO: 1690151 - RNA, 19 nt, Homo sapiens
  misc_RNA (1)...(19): siRNA sense strand
gaaaagauccuuacucuga

SEQ ID NO: 1690152 - RNA, 19 nt, Homo sapiens
  misc_RNA (1)...(19): siRNA sense strand
ggacugggaugucacugaa

SEQ ID NO: 1690153 - RNA, 19 nt, Homo sapiens
  misc_RNA (1)...(19): siRNA sense strand
ccaacaagauaaugaaaug

SEQ ID NO: 1690154 - RNA, 19 nt, Homo sapiens
  misc_RNA (1)...(19): siRNA sense strand
gaagguugccgauauagaa

SEQ ID NO: 1690155 - RNA, 19 nt, Homo sapiens
  misc_RNA (1)...(19): siRNA sense strand
gcaaaacucugaccucuga

SEQ ID NO: 1690156 - RNA, 19 nt, Homo sapiens
  misc_RNA (1)...(19): siRNA sense strand
agccauaccugauacuuua

SEQ ID NO: 1690157 - RNA, 19 nt, Homo sapiens
  misc_RNA (1)...(19): siRNA sense strand
gcgcuuuacucaggauuua

SEQ ID NO: 1690158 - RNA, 19 nt, Homo sapiens
  misc_RNA (1)...(19): siRNA sense strand
gaaagucucugcgaucucu

SEQ ID NO: 1690159 - RNA, 19 nt, Homo sapiens
  misc_RNA (1)...(19): siRNA sense strand
gaugacagaucuccuuaca

SEQ ID NO: 1690160 - RNA, 19 nt, Homo sapiens
  misc_RNA (1)...(19): siRNA sense strand
gcagacagauucagcugau

SEQ ID NO: 1690161 - RNA, 19 nt, Homo sapiens
  misc_RNA (1)...(19): siRNA sense strand
ccaaucugcugaucucauu

SEQ ID NO: 1690162 - RNA, 19 nt, Homo sapiens
  misc_RNA (1)...(19): siRNA sense strand
ugaagagccugccauacuu

SEQ ID NO: 1690163 - RNA, 19 nt, Homo sapiens
  misc_RNA (1)...(19): siRNA sense strand
cagaucuccuuacagaaua

SEQ ID NO: 1690164 - RNA, 19 nt, Homo sapiens
  misc_RNA (1)...(19): siRNA sense strand
ccacccaucuuucuguuga

SEQ ID NO: 1690165 - RNA, 19 nt, Homo sapiens
  misc_RNA (1)...(19): siRNA sense strand
gcucacaagucuguauuug

SEQ ID NO: 1690166 - RNA, 19 nt, Homo sapiens
  misc_RNA (1)...(19): siRNA sense strand
gcacucaggaugaaauaga

SEQ ID NO: 1690167 - RNA, 19 nt, Homo sapiens
  misc_RNA (1)...(19): siRNA sense strand
cgugaagguugccgauaua

SEQ ID NO: 1690168 - RNA, 19 nt, Homo sapiens
  misc_RNA (1)...(19): siRNA sense strand
ggacauggucauaagagaa

SEQ ID NO: 1690169 - RNA, 19 nt, Homo sapiens
  misc_RNA (1)...(19): siRNA sense strand
ucaaaggacugggauguca

SEQ ID NO: 1690170 - RNA, 19 nt, Homo sapiens
  misc_RNA (1)...(19): siRNA sense strand
gcaccuauaaccaagcuuu

SEQ ID NO: 1690171 - RNA, 19 nt, Homo sapiens
  misc_RNA (1)...(19): siRNA sense strand
ggaaggaaccacccaucuu

SEQ ID NO: 1690172 - RNA, 19 nt, Homo sapiens
  misc_RNA (1)...(19): siRNA sense strand
ucaguuccauuucggcuuu

SEQ ID NO: 1690173 - RNA, 19 nt, Homo sapiens
  misc_RNA (1)...(19): siRNA sense strand
ggaugucacugaauauggu

SEQ ID NO: 1690174 - RNA, 19 nt, Homo sapiens
  misc_RNA (1)...(19): siRNA sense strand
aaacgucugcugacccuua

SEQ ID NO: 1690175 - RNA, 19 nt, Homo sapiens
  misc_RNA (1)...(19): siRNA sense strand
ugaguugauugacaucgua

SEQ ID NO: 1690176 - RNA, 19 nt, Homo sapiens
  misc_RNA (1)...(19): siRNA sense strand
gaaccacccaucuuucugu

SEQ ID NO: 1690177 - RNA, 19 nt, Homo sapiens
  misc_RNA (1)...(19): siRNA sense strand
ccaagacuaugaugucagu

SEQ ID NO: 1690178 - RNA, 19 nt, Homo sapiens
  misc_RNA (1)...(19): siRNA sense strand
acugggaugucacugaaua

SEQ ID NO: 1690179 - RNA, 19 nt, Homo sapiens
  misc_RNA (1)...(19): siRNA sense strand
gaagagccugccauacuug

SEQ ID NO: 1690180 - RNA, 19 nt, Homo sapiens
  misc_RNA (1)...(19): siRNA sense strand
ugaccgaacugcugaagag

SEQ ID NO: 1690181 - RNA, 19 nt, Homo sapiens
  misc_RNA (1)...(19): siRNA sense strand
caaaacaguucuccaagga

SEQ ID NO: 1690182 - RNA, 19 nt, Homo sapiens
  misc_RNA (1)...(19): siRNA sense strand
ggucauaagagaauuguag

SEQ ID NO: 1690183 - RNA, 19 nt, Homo sapiens
  misc_RNA (1)...(19): siRNA sense strand
gagaacgcacucaggauga

SEQ ID NO: 1690184 - RNA, 19 nt, Homo sapiens
  misc_RNA (1)...(19): siRNA sense strand
gcuuaucacugguguuucu

SEQ ID NO: 1690185 - RNA, 19 nt, Homo sapiens
  misc_RNA (1)...(19): siRNA sense strand
uaugaugucaguuccauuu

SEQ ID NO: 1690186 - RNA, 19 nt, Homo sapiens
  misc_RNA (1)...(19): siRNA sense strand
gcacacagccucggaacuc

SEQ ID NO: 1690187 - RNA, 19 nt, Homo sapiens
  misc_RNA (1)...(19): siRNA sense strand
ucacugguguuucucaaag

SEQ ID NO: 1690188 - RNA, 19 nt, Homo sapiens
  misc_RNA (1)...(19): siRNA sense strand
augauaagauggaagaaug

SEQ ID NO: 1690189 - RNA, 19 nt, Homo sapiens
  misc_RNA (1)...(19): siRNA sense strand
ugacaucguaucagagauu

SEQ ID NO: 1690190 - RNA, 19 nt, Homo sapiens
  misc_RNA (1)...(19): siRNA sense strand
uaccaaguaugucggagaa

SEQ ID NO: 1690191 - RNA, 19 nt, Homo sapiens
  misc_RNA (1)...(19): siRNA sense strand
gugcggucuuuacuucaua

SEQ ID NO: 1690192 - RNA, 19 nt, Homo sapiens
  misc_RNA (1)...(19): siRNA sense strand
guugaugucuugggaagga

SEQ ID NO: 1690193 - RNA, 19 nt, Homo sapiens
  misc_RNA (1)...(19): siRNA sense strand
gaagcucacaagucuguau

SEQ ID NO: 1690194 - RNA, 19 nt, Homo sapiens
  misc_RNA (1)...(19): siRNA sense strand
gaggagcucaagagacauu

SEQ ID NO: 1690195 - RNA, 19 nt, Homo sapiens
  misc_RNA (1)...(19): siRNA sense strand
ggacaaaacaguucuccaa

SEQ ID NO: 1690196 - RNA, 19 nt, Homo sapiens
  misc_RNA (1)...(19): siRNA sense strand
gaauaugguguuugugagu

SEQ ID NO: 1690197 - RNA, 19 nt, Homo sapiens
  misc_RNA (1)...(19): siRNA sense strand
gaaacucugcagcccaaga

SEQ ID NO: 1690198 - RNA, 19 nt, Homo sapiens
  misc_RNA (1)...(19): siRNA sense strand
ccaaacuacuugaacuuuu

SEQ ID NO: 1690199 - RNA, 19 nt, Homo sapiens
  misc_RNA (1)...(19): siRNA sense strand
gaugaaauagaaaggacaa

SEQ ID NO: 1690200 - RNA, 19 nt, Homo sapiens
  misc_RNA (1)...(19): siRNA sense strand
cauaagagaauuguagugu

SEQ ID NO: 1690201 - RNA, 19 nt, Homo sapiens
  misc_RNA (1)...(19): siRNA sense strand
aaugugcggucuuuacuuc

SEQ ID NO: 1690202 - RNA, 19 nt, Homo sapiens
  misc_RNA (1)...(19): siRNA sense strand
gauggaagaaugugugaag

SEQ ID NO: 1690203 - RNA, 19 nt, Homo sapiens
  misc_RNA (1)...(19): siRNA sense strand
cuaaugauaagauggaaga

SEQ ID NO: 1690204 - RNA, 19 nt, Homo sapiens
  misc_RNA (1)...(19): siRNA sense strand
gcucaagagacauuacgaa

SEQ ID NO: 1690205 - RNA, 19 nt, Homo sapiens
  misc_RNA (1)...(19): siRNA sense strand
acagaucuccuuacagaau

SEQ ID NO: 1690206 - RNA, 19 nt, Homo sapiens
  misc_RNA (1)...(19): siRNA sense strand
guacuauggguuuaccaaa

SEQ ID NO: 1690207 - RNA, 19 nt, Homo sapiens
  misc_RNA (1)...(19): siRNA sense strand
gaaugugcggucuuuacuu

SEQ ID NO: 1690208 - RNA, 19 nt, Homo sapiens
  misc_RNA (1)...(19): siRNA sense strand
gacauggucauaagagaau

SEQ ID NO: 1690209 - RNA, 19 nt, Homo sapiens
  misc_RNA (1)...(19): siRNA sense strand
ucgugaagguugccgauau

SEQ ID NO: 1690210 - RNA, 19 nt, Homo sapiens
  misc_RNA (1)...(19): siRNA sense strand
cucaagagccuucugaaau

SEQ ID NO: 1690211 - RNA, 19 nt, Homo sapiens
  misc_RNA (1)...(19): siRNA sense strand
ccaaguaugucggagaaac

SEQ ID NO: 1690212 - RNA, 19 nt, Homo sapiens
  misc_RNA (1)...(19): siRNA sense strand
gaacgcacucaggaugaaa

SEQ ID NO: 1690213 - RNA, 19 nt, Homo sapiens
  misc_RNA (1)...(19): siRNA sense strand
ccucaagagccuucugaaa

SEQ ID NO: 1690214 - RNA, 19 nt, Homo sapiens
  misc_RNA (1)...(19): siRNA sense strand
ucacuaaugauaagaugga

SEQ ID NO: 1690215 - RNA, 19 nt, Homo sapiens
  misc_RNA (1)...(19): siRNA sense strand
uuacaaguauuggaaugug

SEQ ID NO: 1690216 - RNA, 19 nt, Homo sapiens
  misc_RNA (1)...(19): siRNA sense strand
caaggaugucguugauuug

SEQ ID NO: 1690217 - RNA, 19 nt, Homo sapiens
  misc_RNA (1)...(19): siRNA sense strand
cuagcugcccaguuuguua

SEQ ID NO: 1690218 - RNA, 19 nt, Homo sapiens
  misc_RNA (1)...(19): siRNA sense strand
uagcugcccaguuuguuaa

SEQ ID NO: 1690219 - RNA, 19 nt, Homo sapiens
  misc_RNA (1)...(19): siRNA sense strand
cugaauaugguguuuguga

SEQ ID NO: 1690220 - RNA, 19 nt, Homo sapiens
  misc_RNA (1)...(19): siRNA sense strand
gaagcgcuuuacucaggau

SEQ ID NO: 1690221 - RNA, 19 nt, Homo sapiens
  misc_RNA (1)...(19): siRNA sense strand
ucaaaucccaggccagcaa

SEQ ID NO: 1690222 - RNA, 19 nt, Homo sapiens
  misc_RNA (1)...(19): siRNA sense strand
acacagagcaggagcuucu

SEQ ID NO: 1690223 - RNA, 19 nt, Homo sapiens
  misc_RNA (1)...(19): siRNA sense strand
gagccugccauacuugguu

SEQ ID NO: 1690224 - RNA, 19 nt, Homo sapiens
  misc_RNA (1)...(19): siRNA sense strand
gacaucguaucagagauuc

SEQ ID NO: 1690225 - RNA, 19 nt, Homo sapiens
  misc_RNA (1)...(19): siRNA sense strand
cacugaauaugguguuugu

SEQ ID NO: 1690226 - RNA, 19 nt, Homo sapiens
  misc_RNA (1)...(19): siRNA sense strand
ccauuucggcuuuaacuca

SEQ ID NO: 1690227 - RNA, 19 nt, Homo sapiens
  misc_RNA (1)...(19): siRNA sense strand
aaagauccuuacucugaca

SEQ ID NO: 1690228 - RNA, 19 nt, Homo sapiens
  misc_RNA (1)...(19): siRNA sense strand
gaagccauaccugauacuu

SEQ ID NO: 1690229 - RNA, 19 nt, Homo sapiens
  misc_RNA (1)...(19): siRNA sense strand
cagcaaacaggucauugug

SEQ ID NO: 1690230 - RNA, 19 nt, Homo sapiens
  misc_RNA (1)...(19): siRNA sense strand
cacucaggaugaaauagaa

SEQ ID NO: 1690231 - RNA, 19 nt, Homo sapiens
  misc_RNA (1)...(19): siRNA sense strand
agaacgcacucaggaugaa

SEQ ID NO: 1690232 - RNA, 19 nt, Homo sapiens
  misc_RNA (1)...(19): siRNA sense strand
uuaccaaacuacuugaacu

SEQ ID NO: 1690233 - RNA, 19 nt, Homo sapiens
  misc_RNA (1)...(19): siRNA sense strand
gaaaagucguuugaguuca

SEQ ID NO: 1690234 - RNA, 19 nt, Homo sapiens
  misc_RNA (1)...(19): siRNA sense strand
caaacaggucauugugaga

SEQ ID NO: 1690235 - RNA, 19 nt, Homo sapiens
  misc_RNA (1)...(19): siRNA sense strand
auuggaauguggagaagaa

SEQ ID NO: 1690236 - RNA, 19 nt, Homo sapiens
  misc_RNA (1)...(19): siRNA sense strand
aauaugguguuugugaguu

SEQ ID NO: 1690237 - RNA, 19 nt, Homo sapiens
  misc_RNA (1)...(19): siRNA sense strand
caccuauaaccaagcuuua

SEQ ID NO: 1690238 - RNA, 19 nt, Homo sapiens
  misc_RNA (1)...(19): siRNA sense strand
cagcagauuuuccuucaug

SEQ ID NO: 1690239 - RNA, 19 nt, Homo sapiens
  misc_RNA (1)...(19): siRNA sense strand
ucaagagacauuacgaaag

SEQ ID NO: 1690240 - RNA, 19 nt, Homo sapiens
  misc_RNA (1)...(19): siRNA sense strand
ccgaaagucucugcgaucu

SEQ ID NO: 1690241 - RNA, 19 nt, Homo sapiens
  misc_RNA (1)...(19): siRNA sense strand
uaucacugguguuucucaa

SEQ ID NO: 1690242 - RNA, 19 nt, Homo sapiens
  misc_RNA (1)...(19): siRNA sense strand
ccagcaaacaggucauugu

SEQ ID NO: 1690243 - RNA, 19 nt, Homo sapiens
  misc_RNA (1)...(19): siRNA sense strand
uaaaaggacauggucauaa

SEQ ID NO: 1690244 - RNA, 19 nt, Homo sapiens
  misc_RNA (1)...(19): siRNA sense strand
ggacgugguugaggaauuc

SEQ ID NO: 1690245 - RNA, 19 nt, Homo sapiens
  misc_RNA (1)...(19): siRNA sense strand
ggcguggccugcuaccuua

SEQ ID NO: 1690246 - RNA, 19 nt, Homo sapiens
  misc_RNA (1)...(19): siRNA sense strand
ggaauucagcgauuuauac

SEQ ID NO: 1690247 - RNA, 19 nt, Homo sapiens
  misc_RNA (1)...(19): siRNA sense strand
ccaacggccuccuggaaga

SEQ ID NO: 1690248 - RNA, 19 nt, Homo sapiens
  misc_RNA (1)...(19): siRNA sense strand
gcaucagccucuauuccaa

SEQ ID NO: 1690249 - RNA, 19 nt, Homo sapiens
  misc_RNA (1)...(19): siRNA sense strand
guugaggaauucagcgauu

SEQ ID NO: 1690250 - RNA, 19 nt, Homo sapiens
  misc_RNA (1)...(19): siRNA sense strand
gaauucagcgauuuauaca

SEQ ID NO: 1690251 - RNA, 19 nt, Homo sapiens
  misc_RNA (1)...(19): siRNA sense strand
ggaacccuaucuaucaucu

SEQ ID NO: 1690252 - RNA, 19 nt, Homo sapiens
  misc_RNA (1)...(19): siRNA sense strand
ugaggaauucagcgauuua

SEQ ID NO: 1690253 - RNA, 19 nt, Homo sapiens
  misc_RNA (1)...(19): siRNA sense strand
agaauggcguggccugcua

SEQ ID NO: 1690254 - RNA, 19 nt, Homo sapiens
  misc_RNA (1)...(19): siRNA sense strand
gugcagagugugaaacuug

SEQ ID NO: 1690255 - RNA, 19 nt, Homo sapiens
  misc_RNA (1)...(19): siRNA sense strand
uaucuaucaucuagcagaa

SEQ ID NO: 1690256 - RNA, 19 nt, Homo sapiens
  misc_RNA (1)...(19): siRNA sense strand
ccacccaccgcaaguacua

SEQ ID NO: 1690257 - RNA, 19 nt, Homo sapiens
  misc_RNA (1)...(19): siRNA sense strand
ggaugucacugugcuugag

SEQ ID NO: 1690258 - RNA, 19 nt, Homo sapiens
  misc_RNA (1)...(19): siRNA sense strand
gcagccaaagcacuucuug

SEQ ID NO: 1690259 - RNA, 19 nt, Homo sapiens
  misc_RNA (1)...(19): siRNA sense strand
ugaauccaguggugacagu

SEQ ID NO: 1690260 - RNA, 19 nt, Homo sapiens
  misc_RNA (1)...(19): siRNA sense strand
gaacccuaucuaucaucua

SEQ ID NO: 1690261 - RNA, 19 nt, Homo sapiens
  misc_RNA (1)...(19): siRNA sense strand
aacccuaucuaucaucuag

SEQ ID NO: 1690262 - RNA, 19 nt, Homo sapiens
  misc_RNA (1)...(19): siRNA sense strand
caaggacgugguugaggaa

SEQ ID NO: 1690263 - RNA, 19 nt, Homo sapiens
  misc_RNA (1)...(19): siRNA sense strand
caugggaacccuaucuauc

SEQ ID NO: 1690264 - RNA, 19 nt, Homo sapiens
  misc_RNA (1)...(19): siRNA sense strand
gaggaauucagcgauuuau

SEQ ID NO: 1690265 - RNA, 19 nt, Homo sapiens
  misc_RNA (1)...(19): siRNA sense strand
uugaggaauucagcgauuu

SEQ ID NO: 1690266 - RNA, 19 nt, Homo sapiens
  misc_RNA (1)...(19): siRNA sense strand
ccugcuaccuuaccaacca

SEQ ID NO: 1690267 - RNA, 19 nt, Homo sapiens
  misc_RNA (1)...(19): siRNA sense strand
auucagcgauuuauacaac

SEQ ID NO: 1690268 - RNA, 19 nt, Homo sapiens
  misc_RNA (1)...(19): siRNA sense strand
ccaugggaacccuaucuau

SEQ ID NO: 1690269 - RNA, 19 nt, Homo sapiens
  misc_RNA (1)...(19): siRNA sense strand
gauguaccgagaccucuuc

SEQ ID NO: 1690270 - RNA, 19 nt, Homo sapiens
  misc_RNA (1)...(19): siRNA sense strand
ucagcgauuuauacaacga

SEQ ID NO: 1690271 - RNA, 19 nt, Homo sapiens
  misc_RNA (1)...(19): siRNA sense strand
gaggccgugugcagagugu

SEQ ID NO: 1690272 - RNA, 19 nt, Homo sapiens
  misc_RNA (1)...(19): siRNA sense strand
ggacgugguugaggaauuc

SEQ ID NO: 1690273 - RNA, 19 nt, Homo sapiens
  misc_RNA (1)...(19): siRNA sense strand
ggcguggccugcuaccuua

SEQ ID NO: 1690274 - RNA, 19 nt, Homo sapiens
  misc_RNA (1)...(19): siRNA sense strand
ggaauucagcgauuuauac

SEQ ID NO: 1690275 - RNA, 19 nt, Homo sapiens
  misc_RNA (1)...(19): siRNA sense strand
ccaacggccuccuggaaga

SEQ ID NO: 1690276 - RNA, 19 nt, Homo sapiens
  misc_RNA (1)...(19): siRNA sense strand
gcaucagccucuauuccaa

SEQ ID NO: 1690277 - RNA, 19 nt, Homo sapiens
  misc_RNA (1)...(19): siRNA sense strand
guugaggaauucagcgauu

SEQ ID NO: 1690278 - RNA, 19 nt, Homo sapiens
  misc_RNA (1)...(19): siRNA sense strand
gaauucagcgauuuauaca

SEQ ID NO: 1690279 - RNA, 19 nt, Homo sapiens
  misc_RNA (1)...(19): siRNA sense strand
ggaacccuaucuaucaucu

SEQ ID NO: 1690280 - RNA, 19 nt, Homo sapiens
  misc_RNA (1)...(19): siRNA sense strand
ugaggaauucagcgauuua

SEQ ID NO: 1690281 - RNA, 19 nt, Homo sapiens
  misc_RNA (1)...(19): siRNA sense strand
agaauggcguggccugcua

SEQ ID NO: 1690282 - RNA, 19 nt, Homo sapiens
  misc_RNA (1)...(19): siRNA sense strand
gugcagagugugaaacuug

SEQ ID NO: 1690283 - RNA, 19 nt, Homo sapiens
  misc_RNA (1)...(19): siRNA sense strand
uaucuaucaucuagcagaa

SEQ ID NO: 1690284 - RNA, 19 nt, Homo sapiens
  misc_RNA (1)...(19): siRNA sense strand
ccacccaccgcaaguacua

SEQ ID NO: 1690285 - RNA, 19 nt, Homo sapiens
  misc_RNA (1)...(19): siRNA sense strand
ggaugucacugugcuugag

SEQ ID NO: 1690286 - RNA, 19 nt, Homo sapiens
  misc_RNA (1)...(19): siRNA sense strand
gcagccaaagcacuucuug

SEQ ID NO: 1690287 - RNA, 19 nt, Homo sapiens
  misc_RNA (1)...(19): siRNA sense strand
ugaauccaguggugacagu

SEQ ID NO: 1690288 - RNA, 19 nt, Homo sapiens
  misc_RNA (1)...(19): siRNA sense strand
gaacccuaucuaucaucua

SEQ ID NO: 1690289 - RNA, 19 nt, Homo sapiens
  misc_RNA (1)...(19): siRNA sense strand
aacccuaucuaucaucuag

SEQ ID NO: 1690290 - RNA, 19 nt, Homo sapiens
  misc_RNA (1)...(19): siRNA sense strand
caaggacgugguugaggaa

SEQ ID NO: 1690291 - RNA, 19 nt, Homo sapiens
  misc_RNA (1)...(19): siRNA sense strand
caugggaacccuaucuauc

SEQ ID NO: 1690292 - RNA, 19 nt, Homo sapiens
  misc_RNA (1)...(19): siRNA sense strand
gaggaauucagcgauuuau

SEQ ID NO: 1690293 - RNA, 19 nt, Homo sapiens
  misc_RNA (1)...(19): siRNA sense strand
uugaggaauucagcgauuu

SEQ ID NO: 1690294 - RNA, 19 nt, Homo sapiens
  misc_RNA (1)...(19): siRNA sense strand
ccugcuaccuuaccaacca

SEQ ID NO: 1690295 - RNA, 19 nt, Homo sapiens
  misc_RNA (1)...(19): siRNA sense strand
auucagcgauuuauacaac

SEQ ID NO: 1690296 - RNA, 19 nt, Homo sapiens
  misc_RNA (1)...(19): siRNA sense strand
ccaugggaacccuaucuau

SEQ ID NO: 1690297 - RNA, 19 nt, Homo sapiens
  misc_RNA (1)...(19): siRNA sense strand
gauguaccgagaccucuuc

SEQ ID NO: 1690298 - RNA, 19 nt, Homo sapiens
  misc_RNA (1)...(19): siRNA sense strand
ucagcgauuuauacaacga

SEQ ID NO: 1690299 - RNA, 19 nt, Homo sapiens
  misc_RNA (1)...(19): siRNA sense strand
gaggccgugugcagagugu

SEQ ID NO: 1690300 - RNA, 19 nt, Homo sapiens
  misc_RNA (1)...(19): siRNA sense strand
ggacgugguugaggaauuc

SEQ ID NO: 1690301 - RNA, 19 nt, Homo sapiens
  misc_RNA (1)...(19): siRNA sense strand
ggcguggccugcuaccuua

SEQ ID NO: 1690302 - RNA, 19 nt, Homo sapiens
  misc_RNA (1)...(19): siRNA sense strand
ggaauucagcgauuuauac

SEQ ID NO: 1690303 - RNA, 19 nt, Homo sapiens
  misc_RNA (1)...(19): siRNA sense strand
ccaacggccuccuggaaga

SEQ ID NO: 1690304 - RNA, 19 nt, Homo sapiens
  misc_RNA (1)...(19): siRNA sense strand
gcaucagccucuauuccaa

SEQ ID NO: 1690305 - RNA, 19 nt, Homo sapiens
  misc_RNA (1)...(19): siRNA sense strand
guugaggaauucagcgauu

SEQ ID NO: 1690306 - RNA, 19 nt, Homo sapiens
  misc_RNA (1)...(19): siRNA sense strand
gaauucagcgauuuauaca

SEQ ID NO: 1690307 - RNA, 19 nt, Homo sapiens
  misc_RNA (1)...(19): siRNA sense strand
ggaacccuaucuaucaucu

SEQ ID NO: 1690308 - RNA, 19 nt, Homo sapiens
  misc_RNA (1)...(19): siRNA sense strand
ugaggaauucagcgauuua

SEQ ID NO: 1690309 - RNA, 19 nt, Homo sapiens
  misc_RNA (1)...(19): siRNA sense strand
agaauggcguggccugcua

SEQ ID NO: 1690310 - RNA, 19 nt, Homo sapiens
  misc_RNA (1)...(19): siRNA sense strand
gugcagagugugaaacuug

SEQ ID NO: 1690311 - RNA, 19 nt, Homo sapiens
  misc_RNA (1)...(19): siRNA sense strand
uaucuaucaucuagcagaa

SEQ ID NO: 1690312 - RNA, 19 nt, Homo sapiens
  misc_RNA (1)...(19): siRNA sense strand
ccacccaccgcaaguacua

SEQ ID NO: 1690313 - RNA, 19 nt, Homo sapiens
  misc_RNA (1)...(19): siRNA sense strand
ggaugucacugugcuugag

SEQ ID NO: 1690314 - RNA, 19 nt, Homo sapiens
  misc_RNA (1)...(19): siRNA sense strand
gcagccaaagcacuucuug

SEQ ID NO: 1690315 - RNA, 19 nt, Homo sapiens
  misc_RNA (1)...(19): siRNA sense strand
ugaauccaguggugacagu

SEQ ID NO: 1690316 - RNA, 19 nt, Homo sapiens
  misc_RNA (1)...(19): siRNA sense strand
gaacccuaucuaucaucua

SEQ ID NO: 1690317 - RNA, 19 nt, Homo sapiens
  misc_RNA (1)...(19): siRNA sense strand
aacccuaucuaucaucuag

SEQ ID NO: 1690318 - RNA, 19 nt, Homo sapiens
  misc_RNA (1)...(19): siRNA sense strand
caaggacgugguugaggaa

SEQ ID NO: 1690319 - RNA, 19 nt, Homo sapiens
  misc_RNA (1)...(19): siRNA sense strand
caugggaacccuaucuauc

SEQ ID NO: 1690320 - RNA, 19 nt, Homo sapiens
  misc_RNA (1)...(19): siRNA sense strand
gaggaauucagcgauuuau

SEQ ID NO: 1690321 - RNA, 19 nt, Homo sapiens
  misc_RNA (1)...(19): siRNA sense strand
uugaggaauucagcgauuu

SEQ ID NO: 1690322 - RNA, 19 nt, Homo sapiens
  misc_RNA (1)...(19): siRNA sense strand
ccugcuaccuuaccaacca

SEQ ID NO: 1690323 - RNA, 19 nt, Homo sapiens
  misc_RNA (1)...(19): siRNA sense strand
auucagcgauuuauacaac

SEQ ID NO: 1690324 - RNA, 19 nt, Homo sapiens
  misc_RNA (1)...(19): siRNA sense strand
ccaugggaacccuaucuau

SEQ ID NO: 1690325 - RNA, 19 nt, Homo sapiens
  misc_RNA (1)...(19): siRNA sense strand
gauguaccgagaccucuuc

SEQ ID NO: 1690326 - RNA, 19 nt, Homo sapiens
  misc_RNA (1)...(19): siRNA sense strand
ucagcgauuuauacaacga

SEQ ID NO: 1690327 - RNA, 19 nt, Homo sapiens
  misc_RNA (1)...(19): siRNA sense strand
gaggccgugugcagagugu

SEQ ID NO: 1690328 - RNA, 19 nt, Homo sapiens
  misc_RNA (1)...(19): siRNA sense strand
ggacgugguugaggaauuc

SEQ ID NO: 1690329 - RNA, 19 nt, Homo sapiens
  misc_RNA (1)...(19): siRNA sense strand
ggcguggccugcuaccuua

SEQ ID NO: 1690330 - RNA, 19 nt, Homo sapiens
  misc_RNA (1)...(19): siRNA sense strand
ggaauucagcgauuuauac

SEQ ID NO: 1690331 - RNA, 19 nt, Homo sapiens
  misc_RNA (1)...(19): siRNA sense strand
ccaacggccuccuggaaga

SEQ ID NO: 1690332 - RNA, 19 nt, Homo sapiens
  misc_RNA (1)...(19): siRNA sense strand
gcaucagccucuauuccaa

SEQ ID NO: 1690333 - RNA, 19 nt, Homo sapiens
  misc_RNA (1)...(19): siRNA sense strand
guugaggaauucagcgauu

SEQ ID NO: 1690334 - RNA, 19 nt, Homo sapiens
  misc_RNA (1)...(19): siRNA sense strand
gaauucagcgauuuauaca

SEQ ID NO: 1690335 - RNA, 19 nt, Homo sapiens
  misc_RNA (1)...(19): siRNA sense strand
ggaacccuaucuaucaucu

SEQ ID NO: 1690336 - RNA, 19 nt, Homo sapiens
  misc_RNA (1)...(19): siRNA sense strand
ugaggaauucagcgauuua

SEQ ID NO: 1690337 - RNA, 19 nt, Homo sapiens
  misc_RNA (1)...(19): siRNA sense strand
agaauggcguggccugcua

SEQ ID NO: 1690338 - RNA, 19 nt, Homo sapiens
  misc_RNA (1)...(19): siRNA sense strand
gugcagagugugaaacuug

SEQ ID NO: 1690339 - RNA, 19 nt, Homo sapiens
  misc_RNA (1)...(19): siRNA sense strand
uaucuaucaucuagcagaa

SEQ ID NO: 1690340 - RNA, 19 nt, Homo sapiens
  misc_RNA (1)...(19): siRNA sense strand
ccacccaccgcaaguacua

SEQ ID NO: 1690341 - RNA, 19 nt, Homo sapiens
  misc_RNA (1)...(19): siRNA sense strand
ggaugucacugugcuugag

SEQ ID NO: 1690342 - RNA, 19 nt, Homo sapiens
  misc_RNA (1)...(19): siRNA sense strand
gcagccaaagcacuucuug

SEQ ID NO: 1690343 - RNA, 19 nt, Homo sapiens
  misc_RNA (1)...(19): siRNA sense strand
ugaauccaguggugacagu

SEQ ID NO: 1690344 - RNA, 19 nt, Homo sapiens
  misc_RNA (1)...(19): siRNA sense strand
gaacccuaucuaucaucua

SEQ ID NO: 1690345 - RNA, 19 nt, Homo sapiens
  misc_RNA (1)...(19): siRNA sense strand
aacccuaucuaucaucuag

SEQ ID NO: 1690346 - RNA, 19 nt, Homo sapiens
  misc_RNA (1)...(19): siRNA sense strand
caaggacgugguugaggaa

SEQ ID NO: 1690347 - RNA, 19 nt, Homo sapiens
  misc_RNA (1)...(19): siRNA sense strand
caugggaacccuaucuauc

SEQ ID NO: 1690348 - RNA, 19 nt, Homo sapiens
  misc_RNA (1)...(19): siRNA sense strand
gaggaauucagcgauuuau

SEQ ID NO: 1690349 - RNA, 19 nt, Homo sapiens
  misc_RNA (1)...(19): siRNA sense strand
uugaggaauucagcgauuu

SEQ ID NO: 1690350 - RNA, 19 nt, Homo sapiens
  misc_RNA (1)...(19): siRNA sense strand
ccugcuaccuuaccaacca

SEQ ID NO: 1690351 - RNA, 19 nt, Homo sapiens
  misc_RNA (1)...(19): siRNA sense strand
auucagcgauuuauacaac

SEQ ID NO: 1690352 - RNA, 19 nt, Homo sapiens
  misc_RNA (1)...(19): siRNA sense strand
ccaugggaacccuaucuau

SEQ ID NO: 1690353 - RNA, 19 nt, Homo sapiens
  misc_RNA (1)...(19): siRNA sense strand
gauguaccgagaccucuuc

SEQ ID NO: 1690354 - RNA, 19 nt, Homo sapiens
  misc_RNA (1)...(19): siRNA sense strand
ucagcgauuuauacaacga

SEQ ID NO: 1690355 - RNA, 19 nt, Homo sapiens
  misc_RNA (1)...(19): siRNA sense strand
gaggccgugugcagagugu

SEQ ID NO: 1690356 - RNA, 19 nt, Homo sapiens
  misc_RNA (1)...(19): siRNA sense strand
ggacgugguugaggaauuc

SEQ ID NO: 1690357 - RNA, 19 nt, Homo sapiens
  misc_RNA (1)...(19): siRNA sense strand
ggcguggccugcuaccuua

SEQ ID NO: 1690358 - RNA, 19 nt, Homo sapiens
  misc_RNA (1)...(19): siRNA sense strand
ggaauucagcgauuuauac

SEQ ID NO: 1690359 - RNA, 19 nt, Homo sapiens
  misc_RNA (1)...(19): siRNA sense strand
ccaacggccuccuggaaga

SEQ ID NO: 1690360 - RNA, 19 nt, Homo sapiens
  misc_RNA (1)...(19): siRNA sense strand
gcaucagccucuauuccaa

SEQ ID NO: 1690361 - RNA, 19 nt, Homo sapiens
  misc_RNA (1)...(19): siRNA sense strand
guugaggaauucagcgauu

SEQ ID NO: 1690362 - RNA, 19 nt, Homo sapiens
  misc_RNA (1)...(19): siRNA sense strand
gaauucagcgauuuauaca

SEQ ID NO: 1690363 - RNA, 19 nt, Homo sapiens
  misc_RNA (1)...(19): siRNA sense strand
ggaacccuaucuaucaucu

SEQ ID NO: 1690364 - RNA, 19 nt, Homo sapiens
  misc_RNA (1)...(19): siRNA sense strand
ugaggaauucagcgauuua

SEQ ID NO: 1690365 - RNA, 19 nt, Homo sapiens
  misc_RNA (1)...(19): siRNA sense strand
agaauggcguggccugcua

SEQ ID NO: 1690366 - RNA, 19 nt, Homo sapiens
  misc_RNA (1)...(19): siRNA sense strand
gugcagagugugaaacuug

SEQ ID NO: 1690367 - RNA, 19 nt, Homo sapiens
  misc_RNA (1)...(19): siRNA sense strand
uaucuaucaucuagcagaa

SEQ ID NO: 1690368 - RNA, 19 nt, Homo sapiens
  misc_RNA (1)...(19): siRNA sense strand
ccacccaccgcaaguacua

SEQ ID NO: 1690369 - RNA, 19 nt, Homo sapiens
  misc_RNA (1)...(19): siRNA sense strand
ggaugucacugugcuugag

SEQ ID NO: 1690370 - RNA, 19 nt, Homo sapiens
  misc_RNA (1)...(19): siRNA sense strand
gcagccaaagcacuucuug

SEQ ID NO: 1690371 - RNA, 19 nt, Homo sapiens
  misc_RNA (1)...(19): siRNA sense strand
ugaauccaguggugacagu

SEQ ID NO: 1690372 - RNA, 19 nt, Homo sapiens
  misc_RNA (1)...(19): siRNA sense strand
gaacccuaucuaucaucua

SEQ ID NO: 1690373 - RNA, 19 nt, Homo sapiens
  misc_RNA (1)...(19): siRNA sense strand
aacccuaucuaucaucuag

SEQ ID NO: 1690374 - RNA, 19 nt, Homo sapiens
  misc_RNA (1)...(19): siRNA sense strand
caaggacgugguugaggaa

SEQ ID NO: 1690375 - RNA, 19 nt, Homo sapiens
  misc_RNA (1)...(19): siRNA sense strand
caugggaacccuaucuauc

SEQ ID NO: 1690376 - RNA, 19 nt, Homo sapiens
  misc_RNA (1)...(19): siRNA sense strand
gaggaauucagcgauuuau

SEQ ID NO: 1690377 - RNA, 19 nt, Homo sapiens
  misc_RNA (1)...(19): siRNA sense strand
uugaggaauucagcgauuu

SEQ ID NO: 1690378 - RNA, 19 nt, Homo sapiens
  misc_RNA (1)...(19): siRNA sense strand
ccugcuaccuuaccaacca

SEQ ID NO: 1690379 - RNA, 19 nt, Homo sapiens
  misc_RNA (1)...(19): siRNA sense strand
auucagcgauuuauacaac

SEQ ID NO: 1690380 - RNA, 19 nt, Homo sapiens
  misc_RNA (1)...(19): siRNA sense strand
ccaugggaacccuaucuau

SEQ ID NO: 1690381 - RNA, 19 nt, Homo sapiens
  misc_RNA (1)...(19): siRNA sense strand
gauguaccgagaccucuuc

SEQ ID NO: 1690382 - RNA, 19 nt, Homo sapiens
  misc_RNA (1)...(19): siRNA sense strand
ucagcgauuuauacaacga

SEQ ID NO: 1690383 - RNA, 19 nt, Homo sapiens
  misc_RNA (1)...(19): siRNA sense strand
gaggccgugugcagagugu

SEQ ID NO: 1690384 - RNA, 19 nt, Homo sapiens
  misc_RNA (1)...(19): siRNA sense strand
ggacgugguugaggaauuc

SEQ ID NO: 1690385 - RNA, 19 nt, Homo sapiens
  misc_RNA (1)...(19): siRNA sense strand
ggcguggccugcuaccuua

SEQ ID NO: 1690386 - RNA, 19 nt, Homo sapiens
  misc_RNA (1)...(19): siRNA sense strand
ggaauucagcgauuuauac

SEQ ID NO: 1690387 - RNA, 19 nt, Homo sapiens
  misc_RNA (1)...(19): siRNA sense strand
ccaacggccuccuggaaga

SEQ ID NO: 1690388 - RNA, 19 nt, Homo sapiens
  misc_RNA (1)...(19): siRNA sense strand
gcaucagccucuauuccaa

SEQ ID NO: 1690389 - RNA, 19 nt, Homo sapiens
  misc_RNA (1)...(19): siRNA sense strand
guugaggaauucagcgauu

SEQ ID NO: 1690390 - RNA, 19 nt, Homo sapiens
  misc_RNA (1)...(19): siRNA sense strand
gaauucagcgauuuauaca

SEQ ID NO: 1690391 - RNA, 19 nt, Homo sapiens
  misc_RNA (1)...(19): siRNA sense strand
ggaacccuaucuaucaucu

SEQ ID NO: 1690392 - RNA, 19 nt, Homo sapiens
  misc_RNA (1)...(19): siRNA sense strand
ugaggaauucagcgauuua

SEQ ID NO: 1690393 - RNA, 19 nt, Homo sapiens
  misc_RNA (1)...(19): siRNA sense strand
agaauggcguggccugcua

SEQ ID NO: 1690394 - RNA, 19 nt, Homo sapiens
  misc_RNA (1)...(19): siRNA sense strand
gugcagagugugaaacuug

SEQ ID NO: 1690395 - RNA, 19 nt, Homo sapiens
  misc_RNA (1)...(19): siRNA sense strand
uaucuaucaucuagcagaa

SEQ ID NO: 1690396 - RNA, 19 nt, Homo sapiens
  misc_RNA (1)...(19): siRNA sense strand
ccacccaccgcaaguacua

SEQ ID NO: 1690397 - RNA, 19 nt, Homo sapiens
  misc_RNA (1)...(19): siRNA sense strand
ggaugucacugugcuugag

SEQ ID NO: 1690398 - RNA, 19 nt, Homo sapiens
  misc_RNA (1)...(19): siRNA sense strand
gcagccaaagcacuucuug

SEQ ID NO: 1690399 - RNA, 19 nt, Homo sapiens
  misc_RNA (1)...(19): siRNA sense strand
ugaauccaguggugacagu

SEQ ID NO: 1690400 - RNA, 19 nt, Homo sapiens
  misc_RNA (1)...(19): siRNA sense strand
gaacccuaucuaucaucua

SEQ ID NO: 1690401 - RNA, 19 nt, Homo sapiens
  misc_RNA (1)...(19): siRNA sense strand
aacccuaucuaucaucuag

SEQ ID NO: 1690402 - RNA, 19 nt, Homo sapiens
  misc_RNA (1)...(19): siRNA sense strand
caaggacgugguugaggaa

SEQ ID NO: 1690403 - RNA, 19 nt, Homo sapiens
  misc_RNA (1)...(19): siRNA sense strand
caugggaacccuaucuauc

SEQ ID NO: 1690404 - RNA, 19 nt, Homo sapiens
  misc_RNA (1)...(19): siRNA sense strand
gaggaauucagcgauuuau

SEQ ID NO: 1690405 - RNA, 19 nt, Homo sapiens
  misc_RNA (1)...(19): siRNA sense strand
uugaggaauucagcgauuu

SEQ ID NO: 1690406 - RNA, 19 nt, Homo sapiens
  misc_RNA (1)...(19): siRNA sense strand
ccugcuaccuuaccaacca

SEQ ID NO: 1690407 - RNA, 19 nt, Homo sapiens
  misc_RNA (1)...(19): siRNA sense strand
auucagcgauuuauacaac

SEQ ID NO: 1690408 - RNA, 19 nt, Homo sapiens
  misc_RNA (1)...(19): siRNA sense strand
ccaugggaacccuaucuau

SEQ ID NO: 1690409 - RNA, 19 nt, Homo sapiens
  misc_RNA (1)...(19): siRNA sense strand
gauguaccgagaccucuuc

SEQ ID NO: 1690410 - RNA, 19 nt, Homo sapiens
  misc_RNA (1)...(19): siRNA sense strand
ucagcgauuuauacaacga

SEQ ID NO: 1690411 - RNA, 19 nt, Homo sapiens
  misc_RNA (1)...(19): siRNA sense strand
gaggccgugugcagagugu

SEQ ID NO: 1690412 - RNA, 19 nt, Homo sapiens
  misc_RNA (1)...(19): siRNA sense strand
ggacgugguugaggaauuc

SEQ ID NO: 1690413 - RNA, 19 nt, Homo sapiens
  misc_RNA (1)...(19): siRNA sense strand
ggcguggccugcuaccuua

SEQ ID NO: 1690414 - RNA, 19 nt, Homo sapiens
  misc_RNA (1)...(19): siRNA sense strand
ggaauucagcgauuuauac

SEQ ID NO: 1690415 - RNA, 19 nt, Homo sapiens
  misc_RNA (1)...(19): siRNA sense strand
ccaacggccuccuggaaga

SEQ ID NO: 1690416 - RNA, 19 nt, Homo sapiens
  misc_RNA (1)...(19): siRNA sense strand
gcaucagccucuauuccaa

SEQ ID NO: 1690417 - RNA, 19 nt, Homo sapiens
  misc_RNA (1)...(19): siRNA sense strand
guugaggaauucagcgauu

SEQ ID NO: 1690418 - RNA, 19 nt, Homo sapiens
  misc_RNA (1)...(19): siRNA sense strand
gaauucagcgauuuauaca

SEQ ID NO: 1690419 - RNA, 19 nt, Homo sapiens
  misc_RNA (1)...(19): siRNA sense strand
ggaacccuaucuaucaucu

SEQ ID NO: 1690420 - RNA, 19 nt, Homo sapiens
  misc_RNA (1)...(19): siRNA sense strand
ugaggaauucagcgauuua

SEQ ID NO: 1690421 - RNA, 19 nt, Homo sapiens
  misc_RNA (1)...(19): siRNA sense strand
agaauggcguggccugcua

SEQ ID NO: 1690422 - RNA, 19 nt, Homo sapiens
  misc_RNA (1)...(19): siRNA sense strand
gugcagagugugaaacuug

SEQ ID NO: 1690423 - RNA, 19 nt, Homo sapiens
  misc_RNA (1)...(19): siRNA sense strand
uaucuaucaucuagcagaa

SEQ ID NO: 1690424 - RNA, 19 nt, Homo sapiens
  misc_RNA (1)...(19): siRNA sense strand
ccacccaccgcaaguacua

SEQ ID NO: 1690425 - RNA, 19 nt, Homo sapiens
  misc_RNA (1)...(19): siRNA sense strand
ggaugucacugugcuugag

SEQ ID NO: 1690426 - RNA, 19 nt, Homo sapiens
  misc_RNA (1)...(19): siRNA sense strand
gcagccaaagcacuucuug

SEQ ID NO: 1690427 - RNA, 19 nt, Homo sapiens
  misc_RNA (1)...(19): siRNA sense strand
ugaauccaguggugacagu

SEQ ID NO: 1690428 - RNA, 19 nt, Homo sapiens
  misc_RNA (1)...(19): siRNA sense strand
gaacccuaucuaucaucua

SEQ ID NO: 1690429 - RNA, 19 nt, Homo sapiens
  misc_RNA (1)...(19): siRNA sense strand
aacccuaucuaucaucuag

SEQ ID NO: 1690430 - RNA, 19 nt, Homo sapiens
  misc_RNA (1)...(19): siRNA sense strand
caaggacgugguugaggaa

SEQ ID NO: 1690431 - RNA, 19 nt, Homo sapiens
  misc_RNA (1)...(19): siRNA sense strand
caugggaacccuaucuauc

SEQ ID NO: 1690432 - RNA, 19 nt, Homo sapiens
  misc_RNA (1)...(19): siRNA sense strand
gaggaauucagcgauuuau

SEQ ID NO: 1690433 - RNA, 19 nt, Homo sapiens
  misc_RNA (1)...(19): siRNA sense strand
uugaggaauucagcgauuu

SEQ ID NO: 1690434 - RNA, 19 nt, Homo sapiens
  misc_RNA (1)...(19): siRNA sense strand
ccugcuaccuuaccaacca

SEQ ID NO: 1690435 - RNA, 19 nt, Homo sapiens
  misc_RNA (1)...(19): siRNA sense strand
auucagcgauuuauacaac

SEQ ID NO: 1690436 - RNA, 19 nt, Homo sapiens
  misc_RNA (1)...(19): siRNA sense strand
ccaugggaacccuaucuau

SEQ ID NO: 1690437 - RNA, 19 nt, Homo sapiens
  misc_RNA (1)...(19): siRNA sense strand
gauguaccgagaccucuuc

SEQ ID NO: 1690438 - RNA, 19 nt, Homo sapiens
  misc_RNA (1)...(19): siRNA sense strand
ucagcgauuuauacaacga

SEQ ID NO: 1690439 - RNA, 19 nt, Homo sapiens
  misc_RNA (1)...(19): siRNA sense strand
gaggccgugugcagagugu

SEQ ID NO: 1690440 - RNA, 19 nt, Homo sapiens
  misc_RNA (1)...(19): siRNA sense strand
ggacgugguugaggaauuc

SEQ ID NO: 1690441 - RNA, 19 nt, Homo sapiens
  misc_RNA (1)...(19): siRNA sense strand
ggcguggccugcuaccuua

SEQ ID NO: 1690442 - RNA, 19 nt, Homo sapiens
  misc_RNA (1)...(19): siRNA sense strand
ggaauucagcgauuuauac

SEQ ID NO: 1690443 - RNA, 19 nt, Homo sapiens
  misc_RNA (1)...(19): siRNA sense strand
ccaacggccuccuggaaga

SEQ ID NO: 1690444 - RNA, 19 nt, Homo sapiens
  misc_RNA (1)...(19): siRNA sense strand
gcaucagccucuauuccaa

SEQ ID NO: 1690445 - RNA, 19 nt, Homo sapiens
  misc_RNA (1)...(19): siRNA sense strand
guugaggaauucagcgauu

SEQ ID NO: 1690446 - RNA, 19 nt, Homo sapiens
  misc_RNA (1)...(19): siRNA sense strand
gaauucagcgauuuauaca

SEQ ID NO: 1690447 - RNA, 19 nt, Homo sapiens
  misc_RNA (1)...(19): siRNA sense strand
ggaacccuaucuaucaucu

SEQ ID NO: 1690448 - RNA, 19 nt, Homo sapiens
  misc_RNA (1)...(19): siRNA sense strand
ugaggaauucagcgauuua

SEQ ID NO: 1690449 - RNA, 19 nt, Homo sapiens
  misc_RNA (1)...(19): siRNA sense strand
agaauggcguggccugcua

SEQ ID NO: 1690450 - RNA, 19 nt, Homo sapiens
  misc_RNA (1)...(19): siRNA sense strand
gugcagagugugaaacuug

SEQ ID NO: 1690451 - RNA, 19 nt, Homo sapiens
  misc_RNA (1)...(19): siRNA sense strand
uaucuaucaucuagcagaa

SEQ ID NO: 1690452 - RNA, 19 nt, Homo sapiens
  misc_RNA (1)...(19): siRNA sense strand
ccacccaccgcaaguacua

SEQ ID NO: 1690453 - RNA, 19 nt, Homo sapiens
  misc_RNA (1)...(19): siRNA sense strand
ggaugucacugugcuugag

SEQ ID NO: 1690454 - RNA, 19 nt, Homo sapiens
  misc_RNA (1)...(19): siRNA sense strand
gcagccaaagcacuucuug

SEQ ID NO: 1690455 - RNA, 19 nt, Homo sapiens
  misc_RNA (1)...(19): siRNA sense strand
ugaauccaguggugacagu

SEQ ID NO: 1690456 - RNA, 19 nt, Homo sapiens
  misc_RNA (1)...(19): siRNA sense strand
gaacccuaucuaucaucua

SEQ ID NO: 1690457 - RNA, 19 nt, Homo sapiens
  misc_RNA (1)...(19): siRNA sense strand
aacccuaucuaucaucuag

SEQ ID NO: 1690458 - RNA, 19 nt, Homo sapiens
  misc_RNA (1)...(19): siRNA sense strand
caaggacgugguugaggaa

SEQ ID NO: 1690459 - RNA, 19 nt, Homo sapiens
  misc_RNA (1)...(19): siRNA sense strand
caugggaacccuaucuauc

SEQ ID NO: 1690460 - RNA, 19 nt, Homo sapiens
  misc_RNA (1)...(19): siRNA sense strand
gaggaauucagcgauuuau

SEQ ID NO: 1690461 - RNA, 19 nt, Homo sapiens
  misc_RNA (1)...(19): siRNA sense strand
uugaggaauucagcgauuu

SEQ ID NO: 1690462 - RNA, 19 nt, Homo sapiens
  misc_RNA (1)...(19): siRNA sense strand
ccugcuaccuuaccaacca

SEQ ID NO: 1690463 - RNA, 19 nt, Homo sapiens
  misc_RNA (1)...(19): siRNA sense strand
auucagcgauuuauacaac

SEQ ID NO: 1690464 - RNA, 19 nt, Homo sapiens
  misc_RNA (1)...(19): siRNA sense strand
ccaugggaacccuaucuau

SEQ ID NO: 1690465 - RNA, 19 nt, Homo sapiens
  misc_RNA (1)...(19): siRNA sense strand
gauguaccgagaccucuuc

SEQ ID NO: 1690466 - RNA, 19 nt, Homo sapiens
  misc_RNA (1)...(19): siRNA sense strand
ucagcgauuuauacaacga

SEQ ID NO: 1690467 - RNA, 19 nt, Homo sapiens
  misc_RNA (1)...(19): siRNA sense strand
gaggccgugugcagagugu

SEQ ID NO: 1690468 - RNA, 19 nt, Homo sapiens
  misc_RNA (1)...(19): siRNA sense strand
ggacgugguugaggaauuc

SEQ ID NO: 1690469 - RNA, 19 nt, Homo sapiens
  misc_RNA (1)...(19): siRNA sense strand
ggcguggccugcuaccuua

SEQ ID NO: 1690470 - RNA, 19 nt, Homo sapiens
  misc_RNA (1)...(19): siRNA sense strand
ggaauucagcgauuuauac

SEQ ID NO: 1690471 - RNA, 19 nt, Homo sapiens
  misc_RNA (1)...(19): siRNA sense strand
ccaacggccuccuggaaga

SEQ ID NO: 1690472 - RNA, 19 nt, Homo sapiens
  misc_RNA (1)...(19): siRNA sense strand
gcaucagccucuauuccaa

SEQ ID NO: 1690473 - RNA, 19 nt, Homo sapiens
  misc_RNA (1)...(19): siRNA sense strand
guugaggaauucagcgauu

SEQ ID NO: 1690474 - RNA, 19 nt, Homo sapiens
  misc_RNA (1)...(19): siRNA sense strand
gaauucagcgauuuauaca

SEQ ID NO: 1690475 - RNA, 19 nt, Homo sapiens
  misc_RNA (1)...(19): siRNA sense strand
ggaacccuaucuaucaucu

SEQ ID NO: 1690476 - RNA, 19 nt, Homo sapiens
  misc_RNA (1)...(19): siRNA sense strand
ugaggaauucagcgauuua

SEQ ID NO: 1690477 - RNA, 19 nt, Homo sapiens
  misc_RNA (1)...(19): siRNA sense strand
agaauggcguggccugcua

SEQ ID NO: 1690478 - RNA, 19 nt, Homo sapiens
  misc_RNA (1)...(19): siRNA sense strand
gugcagagugugaaacuug

SEQ ID NO: 1690479 - RNA, 19 nt, Homo sapiens
  misc_RNA (1)...(19): siRNA sense strand
uaucuaucaucuagcagaa

SEQ ID NO: 1690480 - RNA, 19 nt, Homo sapiens
  misc_RNA (1)...(19): siRNA sense strand
ccacccaccgcaaguacua

SEQ ID NO: 1690481 - RNA, 19 nt, Homo sapiens
  misc_RNA (1)...(19): siRNA sense strand
ggaugucacugugcuugag

SEQ ID NO: 1690482 - RNA, 19 nt, Homo sapiens
  misc_RNA (1)...(19): siRNA sense strand
gcagccaaagcacuucuug

SEQ ID NO: 1690483 - RNA, 19 nt, Homo sapiens
  misc_RNA (1)...(19): siRNA sense strand
ugaauccaguggugacagu

SEQ ID NO: 1690484 - RNA, 19 nt, Homo sapiens
  misc_RNA (1)...(19): siRNA sense strand
gaacccuaucuaucaucua

SEQ ID NO: 1690485 - RNA, 19 nt, Homo sapiens
  misc_RNA (1)...(19): siRNA sense strand
aacccuaucuaucaucuag

SEQ ID NO: 1690486 - RNA, 19 nt, Homo sapiens
  misc_RNA (1)...(19): siRNA sense strand
caaggacgugguugaggaa

SEQ ID NO: 1690487 - RNA, 19 nt, Homo sapiens
  misc_RNA (1)...(19): siRNA sense strand
caugggaacccuaucuauc

SEQ ID NO: 1690488 - RNA, 19 nt, Homo sapiens
  misc_RNA (1)...(19): siRNA sense strand
gaggaauucagcgauuuau

SEQ ID NO: 1690489 - RNA, 19 nt, Homo sapiens
  misc_RNA (1)...(19): siRNA sense strand
uugaggaauucagcgauuu

SEQ ID NO: 1690490 - RNA, 19 nt, Homo sapiens
  misc_RNA (1)...(19): siRNA sense strand
ccugcuaccuuaccaacca

SEQ ID NO: 1690491 - RNA, 19 nt, Homo sapiens
  misc_RNA (1)...(19): siRNA sense strand
auucagcgauuuauacaac

SEQ ID NO: 1690492 - RNA, 19 nt, Homo sapiens
  misc_RNA (1)...(19): siRNA sense strand
ccaugggaacccuaucuau

SEQ ID NO: 1690493 - RNA, 19 nt, Homo sapiens
  misc_RNA (1)...(19): siRNA sense strand
gauguaccgagaccucuuc

SEQ ID NO: 1690494 - RNA, 19 nt, Homo sapiens
  misc_RNA (1)...(19): siRNA sense strand
ucagcgauuuauacaacga

SEQ ID NO: 1690495 - RNA, 19 nt, Homo sapiens
  misc_RNA (1)...(19): siRNA sense strand
gaggccgugugcagagugu

SEQ ID NO: 1690496 - RNA, 19 nt, Homo sapiens
  misc_RNA (1)...(19): siRNA sense strand
ggacgugguugaggaauuc

SEQ ID NO: 1690497 - RNA, 19 nt, Homo sapiens
  misc_RNA (1)...(19): siRNA sense strand
ggcguggccugcuaccuua

SEQ ID NO: 1690498 - RNA, 19 nt, Homo sapiens
  misc_RNA (1)...(19): siRNA sense strand
ggaauucagcgauuuauac

SEQ ID NO: 1690499 - RNA, 19 nt, Homo sapiens
  misc_RNA (1)...(19): siRNA sense strand
ccaacggccuccuggaaga

SEQ ID NO: 1690500 - RNA, 19 nt, Homo sapiens
  misc_RNA (1)...(19): siRNA sense strand
gcaucagccucuauuccaa

SEQ ID NO: 1690501 - RNA, 19 nt, Homo sapiens
  misc_RNA (1)...(19): siRNA sense strand
guugaggaauucagcgauu

SEQ ID NO: 1690502 - RNA, 19 nt, Homo sapiens
  misc_RNA (1)...(19): siRNA sense strand
gaauucagcgauuuauaca

SEQ ID NO: 1690503 - RNA, 19 nt, Homo sapiens
  misc_RNA (1)...(19): siRNA sense strand
ggaacccuaucuaucaucu

SEQ ID NO: 1690504 - RNA, 19 nt, Homo sapiens
  misc_RNA (1)...(19): siRNA sense strand
ugaggaauucagcgauuua

SEQ ID NO: 1690505 - RNA, 19 nt, Homo sapiens
  misc_RNA (1)...(19): siRNA sense strand
agaauggcguggccugcua

SEQ ID NO: 1690506 - RNA, 19 nt, Homo sapiens
  misc_RNA (1)...(19): siRNA sense strand
gugcagagugugaaacuug

SEQ ID NO: 1690507 - RNA, 19 nt, Homo sapiens
  misc_RNA (1)...(19): siRNA sense strand
uaucuaucaucuagcagaa

SEQ ID NO: 1690508 - RNA, 19 nt, Homo sapiens
  misc_RNA (1)...(19): siRNA sense strand
ccacccaccgcaaguacua

SEQ ID NO: 1690509 - RNA, 19 nt, Homo sapiens
  misc_RNA (1)...(19): siRNA sense strand
ggaugucacugugcuugag

SEQ ID NO: 1690510 - RNA, 19 nt, Homo sapiens
  misc_RNA (1)...(19): siRNA sense strand
gcagccaaagcacuucuug

SEQ ID NO: 1690511 - RNA, 19 nt, Homo sapiens
  misc_RNA (1)...(19): siRNA sense strand
ugaauccaguggugacagu

SEQ ID NO: 1690512 - RNA, 19 nt, Homo sapiens
  misc_RNA (1)...(19): siRNA sense strand
gaacccuaucuaucaucua

SEQ ID NO: 1690513 - RNA, 19 nt, Homo sapiens
  misc_RNA (1)...(19): siRNA sense strand
aacccuaucuaucaucuag

SEQ ID NO: 1690514 - RNA, 19 nt, Homo sapiens
  misc_RNA (1)...(19): siRNA sense strand
caaggacgugguugaggaa

SEQ ID NO: 1690515 - RNA, 19 nt, Homo sapiens
  misc_RNA (1)...(19): siRNA sense strand
caugggaacccuaucuauc

SEQ ID NO: 1690516 - RNA, 19 nt, Homo sapiens
  misc_RNA (1)...(19): siRNA sense strand
gaggaauucagcgauuuau

SEQ ID NO: 1690517 - RNA, 19 nt, Homo sapiens
  misc_RNA (1)...(19): siRNA sense strand
uugaggaauucagcgauuu

SEQ ID NO: 1690518 - RNA, 19 nt, Homo sapiens
  misc_RNA (1)...(19): siRNA sense strand
ccugcuaccuuaccaacca

SEQ ID NO: 1690519 - RNA, 19 nt, Homo sapiens
  misc_RNA (1)...(19): siRNA sense strand
auucagcgauuuauacaac

SEQ ID NO: 1690520 - RNA, 19 nt, Homo sapiens
  misc_RNA (1)...(19): siRNA sense strand
ccaugggaacccuaucuau

SEQ ID NO: 1690521 - RNA, 19 nt, Homo sapiens
  misc_RNA (1)...(19): siRNA sense strand
gauguaccgagaccucuuc

SEQ ID NO: 1690522 - RNA, 19 nt, Homo sapiens
  misc_RNA (1)...(19): siRNA sense strand
ucagcgauuuauacaacga

SEQ ID NO: 1690523 - RNA, 19 nt, Homo sapiens
  misc_RNA (1)...(19): siRNA sense strand
gaggccgugugcagagugu

SEQ ID NO: 1690524 - RNA, 19 nt, Homo sapiens
  misc_RNA (1)...(19): siRNA sense strand
ggacgugguugaggaauuc

SEQ ID NO: 1690525 - RNA, 19 nt, Homo sapiens
  misc_RNA (1)...(19): siRNA sense strand
ggcguggccugcuaccuua

SEQ ID NO: 1690526 - RNA, 19 nt, Homo sapiens
  misc_RNA (1)...(19): siRNA sense strand
ggaauucagcgauuuauac

SEQ ID NO: 1690527 - RNA, 19 nt, Homo sapiens
  misc_RNA (1)...(19): siRNA sense strand
ccaacggccuccuggaaga

SEQ ID NO: 1690528 - RNA, 19 nt, Homo sapiens
  misc_RNA (1)...(19): siRNA sense strand
gcaucagccucuauuccaa

SEQ ID NO: 1690529 - RNA, 19 nt, Homo sapiens
  misc_RNA (1)...(19): siRNA sense strand
guugaggaauucagcgauu

SEQ ID NO: 1690530 - RNA, 19 nt, Homo sapiens
  misc_RNA (1)...(19): siRNA sense strand
gaauucagcgauuuauaca

SEQ ID NO: 1690531 - RNA, 19 nt, Homo sapiens
  misc_RNA (1)...(19): siRNA sense strand
ggaacccuaucuaucaucu

SEQ ID NO: 1690532 - RNA, 19 nt, Homo sapiens
  misc_RNA (1)...(19): siRNA sense strand
ugaggaauucagcgauuua

SEQ ID NO: 1690533 - RNA, 19 nt, Homo sapiens
  misc_RNA (1)...(19): siRNA sense strand
agaauggcguggccugcua

SEQ ID NO: 1690534 - RNA, 19 nt, Homo sapiens
  misc_RNA (1)...(19): siRNA sense strand
gugcagagugugaaacuug

SEQ ID NO: 1690535 - RNA, 19 nt, Homo sapiens
  misc_RNA (1)...(19): siRNA sense strand
uaucuaucaucuagcagaa

SEQ ID NO: 1690536 - RNA, 19 nt, Homo sapiens
  misc_RNA (1)...(19): siRNA sense strand
ccacccaccgcaaguacua

SEQ ID NO: 1690537 - RNA, 19 nt, Homo sapiens
  misc_RNA (1)...(19): siRNA sense strand
ggaugucacugugcuugag

SEQ ID NO: 1690538 - RNA, 19 nt, Homo sapiens
  misc_RNA (1)...(19): siRNA sense strand
gcagccaaagcacuucuug

SEQ ID NO: 1690539 - RNA, 19 nt, Homo sapiens
  misc_RNA (1)...(19): siRNA sense strand
ugaauccaguggugacagu

SEQ ID NO: 1690540 - RNA, 19 nt, Homo sapiens
  misc_RNA (1)...(19): siRNA sense strand
gaacccuaucuaucaucua

SEQ ID NO: 1690541 - RNA, 19 nt, Homo sapiens
  misc_RNA (1)...(19): siRNA sense strand
aacccuaucuaucaucuag

SEQ ID NO: 1690542 - RNA, 19 nt, Homo sapiens
  misc_RNA (1)...(19): siRNA sense strand
caaggacgugguugaggaa

SEQ ID NO: 1690543 - RNA, 19 nt, Homo sapiens
  misc_RNA (1)...(19): siRNA sense strand
caugggaacccuaucuauc

SEQ ID NO: 1690544 - RNA, 19 nt, Homo sapiens
  misc_RNA (1)...(19): siRNA sense strand
gaggaauucagcgauuuau

SEQ ID NO: 1690545 - RNA, 19 nt, Homo sapiens
  misc_RNA (1)...(19): siRNA sense strand
uugaggaauucagcgauuu

SEQ ID NO: 1690546 - RNA, 19 nt, Homo sapiens
  misc_RNA (1)...(19): siRNA sense strand
ccugcuaccuuaccaacca

SEQ ID NO: 1690547 - RNA, 19 nt, Homo sapiens
  misc_RNA (1)...(19): siRNA sense strand
auucagcgauuuauacaac

SEQ ID NO: 1690548 - RNA, 19 nt, Homo sapiens
  misc_RNA (1)...(19): siRNA sense strand
ccaugggaacccuaucuau

SEQ ID NO: 1690549 - RNA, 19 nt, Homo sapiens
  misc_RNA (1)...(19): siRNA sense strand
gauguaccgagaccucuuc

SEQ ID NO: 1690550 - RNA, 19 nt, Homo sapiens
  misc_RNA (1)...(19): siRNA sense strand
ucagcgauuuauacaacga

SEQ ID NO: 1690551 - RNA, 19 nt, Homo sapiens
  misc_RNA (1)...(19): siRNA sense strand
gaggccgugugcagagugu

SEQ ID NO: 1690552 - RNA, 19 nt, Homo sapiens
  misc_RNA (1)...(19): siRNA sense strand
ggacgugguugaggaauuc

SEQ ID NO: 1690553 - RNA, 19 nt, Homo sapiens
  misc_RNA (1)...(19): siRNA sense strand
ggcguggccugcuaccuua

SEQ ID NO: 1690554 - RNA, 19 nt, Homo sapiens
  misc_RNA (1)...(19): siRNA sense strand
ggaauucagcgauuuauac

SEQ ID NO: 1690555 - RNA, 19 nt, Homo sapiens
  misc_RNA (1)...(19): siRNA sense strand
ccaacggccuccuggaaga

SEQ ID NO: 1690556 - RNA, 19 nt, Homo sapiens
  misc_RNA (1)...(19): siRNA sense strand
gcaucagccucuauuccaa

SEQ ID NO: 1690557 - RNA, 19 nt, Homo sapiens
  misc_RNA (1)...(19): siRNA sense strand
guugaggaauucagcgauu

SEQ ID NO: 1690558 - RNA, 19 nt, Homo sapiens
  misc_RNA (1)...(19): siRNA sense strand
gaauucagcgauuuauaca

SEQ ID NO: 1690559 - RNA, 19 nt, Homo sapiens
  misc_RNA (1)...(19): siRNA sense strand
ggaacccuaucuaucaucu

SEQ ID NO: 1690560 - RNA, 19 nt, Homo sapiens
  misc_RNA (1)...(19): siRNA sense strand
ugaggaauucagcgauuua

SEQ ID NO: 1690561 - RNA, 19 nt, Homo sapiens
  misc_RNA (1)...(19): siRNA sense strand
agaauggcguggccugcua

SEQ ID NO: 1690562 - RNA, 19 nt, Homo sapiens
  misc_RNA (1)...(19): siRNA sense strand
gugcagagugugaaacuug

SEQ ID NO: 1690563 - RNA, 19 nt, Homo sapiens
  misc_RNA (1)...(19): siRNA sense strand
uaucuaucaucuagcagaa

SEQ ID NO: 1690564 - RNA, 19 nt, Homo sapiens
  misc_RNA (1)...(19): siRNA sense strand
ccacccaccgcaaguacua

SEQ ID NO: 1690565 - RNA, 19 nt, Homo sapiens
  misc_RNA (1)...(19): siRNA sense strand
ggaugucacugugcuugag

SEQ ID NO: 1690566 - RNA, 19 nt, Homo sapiens
  misc_RNA (1)...(19): siRNA sense strand
gcagccaaagcacuucuug

SEQ ID NO: 1690567 - RNA, 19 nt, Homo sapiens
  misc_RNA (1)...(19): siRNA sense strand
ugaauccaguggugacagu

SEQ ID NO: 1690568 - RNA, 19 nt, Homo sapiens
  misc_RNA (1)...(19): siRNA sense strand
gaacccuaucuaucaucua

SEQ ID NO: 1690569 - RNA, 19 nt, Homo sapiens
  misc_RNA (1)...(19): siRNA sense strand
aacccuaucuaucaucuag

SEQ ID NO: 1690570 - RNA, 19 nt, Homo sapiens
  misc_RNA (1)...(19): siRNA sense strand
caaggacgugguugaggaa

SEQ ID NO: 1690571 - RNA, 19 nt, Homo sapiens
  misc_RNA (1)...(19): siRNA sense strand
caugggaacccuaucuauc

SEQ ID NO: 1690572 - RNA, 19 nt, Homo sapiens
  misc_RNA (1)...(19): siRNA sense strand
gaggaauucagcgauuuau

SEQ ID NO: 1690573 - RNA, 19 nt, Homo sapiens
  misc_RNA (1)...(19): siRNA sense strand
uugaggaauucagcgauuu

SEQ ID NO: 1690574 - RNA, 19 nt, Homo sapiens
  misc_RNA (1)...(19): siRNA sense strand
ccugcuaccuuaccaacca

SEQ ID NO: 1690575 - RNA, 19 nt, Homo sapiens
  misc_RNA (1)...(19): siRNA sense strand
auucagcgauuuauacaac

SEQ ID NO: 1690576 - RNA, 19 nt, Homo sapiens
  misc_RNA (1)...(19): siRNA sense strand
ccaugggaacccuaucuau

SEQ ID NO: 1690577 - RNA, 19 nt, Homo sapiens
  misc_RNA (1)...(19): siRNA sense strand
gauguaccgagaccucuuc

SEQ ID NO: 1690578 - RNA, 19 nt, Homo sapiens
  misc_RNA (1)...(19): siRNA sense strand
ucagcgauuuauacaacga

SEQ ID NO: 1690579 - RNA, 19 nt, Homo sapiens
  misc_RNA (1)...(19): siRNA sense strand
gaggccgugugcagagugu

SEQ ID NO: 1690580 - RNA, 19 nt, Homo sapiens
  misc_RNA (1)...(19): siRNA sense strand
ggacgugguugaggaauuc

SEQ ID NO: 1690581 - RNA, 19 nt, Homo sapiens
  misc_RNA (1)...(19): siRNA sense strand
ggcguggccugcuaccuua

SEQ ID NO: 1690582 - RNA, 19 nt, Homo sapiens
  misc_RNA (1)...(19): siRNA sense strand
ggaauucagcgauuuauac

SEQ ID NO: 1690583 - RNA, 19 nt, Homo sapiens
  misc_RNA (1)...(19): siRNA sense strand
ccaacggccuccuggaaga

SEQ ID NO: 1690584 - RNA, 19 nt, Homo sapiens
  misc_RNA (1)...(19): siRNA sense strand
gcaucagccucuauuccaa

SEQ ID NO: 1690585 - RNA, 19 nt, Homo sapiens
  misc_RNA (1)...(19): siRNA sense strand
guugaggaauucagcgauu

SEQ ID NO: 1690586 - RNA, 19 nt, Homo sapiens
  misc_RNA (1)...(19): siRNA sense strand
gaauucagcgauuuauaca

SEQ ID NO: 1690587 - RNA, 19 nt, Homo sapiens
  misc_RNA (1)...(19): siRNA sense strand
ggaacccuaucuaucaucu

SEQ ID NO: 1690588 - RNA, 19 nt, Homo sapiens
  misc_RNA (1)...(19): siRNA sense strand
ugaggaauucagcgauuua

SEQ ID NO: 1690589 - RNA, 19 nt, Homo sapiens
  misc_RNA (1)...(19): siRNA sense strand
agaauggcguggccugcua

SEQ ID NO: 1690590 - RNA, 19 nt, Homo sapiens
  misc_RNA (1)...(19): siRNA sense strand
gugcagagugugaaacuug

SEQ ID NO: 1690591 - RNA, 19 nt, Homo sapiens
  misc_RNA (1)...(19): siRNA sense strand
uaucuaucaucuagcagaa

SEQ ID NO: 1690592 - RNA, 19 nt, Homo sapiens
  misc_RNA (1)...(19): siRNA sense strand
ccacccaccgcaaguacua

SEQ ID NO: 1690593 - RNA, 19 nt, Homo sapiens
  misc_RNA (1)...(19): siRNA sense strand
ggaugucacugugcuugag

SEQ ID NO: 1690594 - RNA, 19 nt, Homo sapiens
  misc_RNA (1)...(19): siRNA sense strand
gcagccaaagcacuucuug

SEQ ID NO: 1690595 - RNA, 19 nt, Homo sapiens
  misc_RNA (1)...(19): siRNA sense strand
ugaauccaguggugacagu

SEQ ID NO: 1690596 - RNA, 19 nt, Homo sapiens
  misc_RNA (1)...(19): siRNA sense strand
gaacccuaucuaucaucua

SEQ ID NO: 1690597 - RNA, 19 nt, Homo sapiens
  misc_RNA (1)...(19): siRNA sense strand
aacccuaucuaucaucuag

SEQ ID NO: 1690598 - RNA, 19 nt, Homo sapiens
  misc_RNA (1)...(19): siRNA sense strand
caaggacgugguugaggaa

SEQ ID NO: 1690599 - RNA, 19 nt, Homo sapiens
  misc_RNA (1)...(19): siRNA sense strand
caugggaacccuaucuauc

SEQ ID NO: 1690600 - RNA, 19 nt, Homo sapiens
  misc_RNA (1)...(19): siRNA sense strand
gaggaauucagcgauuuau

SEQ ID NO: 1690601 - RNA, 19 nt, Homo sapiens
  misc_RNA (1)...(19): siRNA sense strand
uugaggaauucagcgauuu

SEQ ID NO: 1690602 - RNA, 19 nt, Homo sapiens
  misc_RNA (1)...(19): siRNA sense strand
ccugcuaccuuaccaacca

SEQ ID NO: 1690603 - RNA, 19 nt, Homo sapiens
  misc_RNA (1)...(19): siRNA sense strand
auucagcgauuuauacaac

SEQ ID NO: 1690604 - RNA, 19 nt, Homo sapiens
  misc_RNA (1)...(19): siRNA sense strand
ccaugggaacccuaucuau

SEQ ID NO: 1690605 - RNA, 19 nt, Homo sapiens
  misc_RNA (1)...(19): siRNA sense strand
gauguaccgagaccucuuc

SEQ ID NO: 1690606 - RNA, 19 nt, Homo sapiens
  misc_RNA (1)...(19): siRNA sense strand
ucagcgauuuauacaacga

SEQ ID NO: 1690607 - RNA, 19 nt, Homo sapiens
  misc_RNA (1)...(19): siRNA sense strand
gaggccgugugcagagugu

SEQ ID NO: 1690608 - RNA, 19 nt, Homo sapiens
  misc_RNA (1)...(19): siRNA sense strand
ggacgugguugaggaauuc

SEQ ID NO: 1690609 - RNA, 19 nt, Homo sapiens
  misc_RNA (1)...(19): siRNA sense strand
ggcguggccugcuaccuua

SEQ ID NO: 1690610 - RNA, 19 nt, Homo sapiens
  misc_RNA (1)...(19): siRNA sense strand
ggaauucagcgauuuauac

SEQ ID NO: 1690611 - RNA, 19 nt, Homo sapiens
  misc_RNA (1)...(19): siRNA sense strand
ccaacggccuccuggaaga

SEQ ID NO: 1690612 - RNA, 19 nt, Homo sapiens
  misc_RNA (1)...(19): siRNA sense strand
gcaucagccucuauuccaa

SEQ ID NO: 1690613 - RNA, 19 nt, Homo sapiens
  misc_RNA (1)...(19): siRNA sense strand
guugaggaauucagcgauu

SEQ ID NO: 1690614 - RNA, 19 nt, Homo sapiens
  misc_RNA (1)...(19): siRNA sense strand
gaauucagcgauuuauaca

SEQ ID NO: 1690615 - RNA, 19 nt, Homo sapiens
  misc_RNA (1)...(19): siRNA sense strand
ggaacccuaucuaucaucu

SEQ ID NO: 1690616 - RNA, 19 nt, Homo sapiens
  misc_RNA (1)...(19): siRNA sense strand
ugaggaauucagcgauuua

SEQ ID NO: 1690617 - RNA, 19 nt, Homo sapiens
  misc_RNA (1)...(19): siRNA sense strand
agaauggcguggccugcua

SEQ ID NO: 1690618 - RNA, 19 nt, Homo sapiens
  misc_RNA (1)...(19): siRNA sense strand
gugcagagugugaaacuug

SEQ ID NO: 1690619 - RNA, 19 nt, Homo sapiens
  misc_RNA (1)...(19): siRNA sense strand
uaucuaucaucuagcagaa

SEQ ID NO: 1690620 - RNA, 19 nt, Homo sapiens
  misc_RNA (1)...(19): siRNA sense strand
ccacccaccgcaaguacua

SEQ ID NO: 1690621 - RNA, 19 nt, Homo sapiens
  misc_RNA (1)...(19): siRNA sense strand
ggaugucacugugcuugag

SEQ ID NO: 1690622 - RNA, 19 nt, Homo sapiens
  misc_RNA (1)...(19): siRNA sense strand
gcagccaaagcacuucuug

SEQ ID NO: 1690623 - RNA, 19 nt, Homo sapiens
  misc_RNA (1)...(19): siRNA sense strand
ugaauccaguggugacagu

SEQ ID NO: 1690624 - RNA, 19 nt, Homo sapiens
  misc_RNA (1)...(19): siRNA sense strand
gaacccuaucuaucaucua

SEQ ID NO: 1690625 - RNA, 19 nt, Homo sapiens
  misc_RNA (1)...(19): siRNA sense strand
aacccuaucuaucaucuag

SEQ ID NO: 1690626 - RNA, 19 nt, Homo sapiens
  misc_RNA (1)...(19): siRNA sense strand
caaggacgugguugaggaa

SEQ ID NO: 1690627 - RNA, 19 nt, Homo sapiens
  misc_RNA (1)...(19): siRNA sense strand
caugggaacccuaucuauc

SEQ ID NO: 1690628 - RNA, 19 nt, Homo sapiens
  misc_RNA (1)...(19): siRNA sense strand
gaggaauucagcgauuuau

SEQ ID NO: 1690629 - RNA, 19 nt, Homo sapiens
  misc_RNA (1)...(19): siRNA sense strand
uugaggaauucagcgauuu

SEQ ID NO: 1690630 - RNA, 19 nt, Homo sapiens
  misc_RNA (1)...(19): siRNA sense strand
ccugcuaccuuaccaacca

SEQ ID NO: 1690631 - RNA, 19 nt, Homo sapiens
  misc_RNA (1)...(19): siRNA sense strand
auucagcgauuuauacaac

SEQ ID NO: 1690632 - RNA, 19 nt, Homo sapiens
  misc_RNA (1)...(19): siRNA sense strand
ccaugggaacccuaucuau

SEQ ID NO: 1690633 - RNA, 19 nt, Homo sapiens
  misc_RNA (1)...(19): siRNA sense strand
gauguaccgagaccucuuc

SEQ ID NO: 1690634 - RNA, 19 nt, Homo sapiens
  misc_RNA (1)...(19): siRNA sense strand
ucagcgauuuauacaacga

SEQ ID NO: 1690635 - RNA, 19 nt, Homo sapiens
  misc_RNA (1)...(19): siRNA sense strand
gaggccgugugcagagugu

SEQ ID NO: 1690636 - RNA, 19 nt, Homo sapiens
  misc_RNA (1)...(19): siRNA sense strand
ggacgugguugaggaauuc

SEQ ID NO: 1690637 - RNA, 19 nt, Homo sapiens
  misc_RNA (1)...(19): siRNA sense strand
ggcguggccugcuaccuua

SEQ ID NO: 1690638 - RNA, 19 nt, Homo sapiens
  misc_RNA (1)...(19): siRNA sense strand
ggaauucagcgauuuauac

SEQ ID NO: 1690639 - RNA, 19 nt, Homo sapiens
  misc_RNA (1)...(19): siRNA sense strand
ccaacggccuccuggaaga

SEQ ID NO: 1690640 - RNA, 19 nt, Homo sapiens
  misc_RNA (1)...(19): siRNA sense strand
gcaucagccucuauuccaa

SEQ ID NO: 1690641 - RNA, 19 nt, Homo sapiens
  misc_RNA (1)...(19): siRNA sense strand
guugaggaauucagcgauu

SEQ ID NO: 1690642 - RNA, 19 nt, Homo sapiens
  misc_RNA (1)...(19): siRNA sense strand
gaauucagcgauuuauaca

SEQ ID NO: 1690643 - RNA, 19 nt, Homo sapiens
  misc_RNA (1)...(19): siRNA sense strand
ggaacccuaucuaucaucu

SEQ ID NO: 1690644 - RNA, 19 nt, Homo sapiens
  misc_RNA (1)...(19): siRNA sense strand
ugaggaauucagcgauuua

SEQ ID NO: 1690645 - RNA, 19 nt, Homo sapiens
  misc_RNA (1)...(19): siRNA sense strand
agaauggcguggccugcua

SEQ ID NO: 1690646 - RNA, 19 nt, Homo sapiens
  misc_RNA (1)...(19): siRNA sense strand
gugcagagugugaaacuug

SEQ ID NO: 1690647 - RNA, 19 nt, Homo sapiens
  misc_RNA (1)...(19): siRNA sense strand
uaucuaucaucuagcagaa

SEQ ID NO: 1690648 - RNA, 19 nt, Homo sapiens
  misc_RNA (1)...(19): siRNA sense strand
ccacccaccgcaaguacua

SEQ ID NO: 1690649 - RNA, 19 nt, Homo sapiens
  misc_RNA (1)...(19): siRNA sense strand
ggaugucacugugcuugag

SEQ ID NO: 1690650 - RNA, 19 nt, Homo sapiens
  misc_RNA (1)...(19): siRNA sense strand
gcagccaaagcacuucuug

SEQ ID NO: 1690651 - RNA, 19 nt, Homo sapiens
  misc_RNA (1)...(19): siRNA sense strand
ugaauccaguggugacagu

SEQ ID NO: 1690652 - RNA, 19 nt, Homo sapiens
  misc_RNA (1)...(19): siRNA sense strand
gaacccuaucuaucaucua

SEQ ID NO: 1690653 - RNA, 19 nt, Homo sapiens
  misc_RNA (1)...(19): siRNA sense strand
aacccuaucuaucaucuag

SEQ ID NO: 1690654 - RNA, 19 nt, Homo sapiens
  misc_RNA (1)...(19): siRNA sense strand
caaggacgugguugaggaa

SEQ ID NO: 1690655 - RNA, 19 nt, Homo sapiens
  misc_RNA (1)...(19): siRNA sense strand
caugggaacccuaucuauc

SEQ ID NO: 1690656 - RNA, 19 nt, Homo sapiens
  misc_RNA (1)...(19): siRNA sense strand
gaggaauucagcgauuuau

SEQ ID NO: 1690657 - RNA, 19 nt, Homo sapiens
  misc_RNA (1)...(19): siRNA sense strand
uugaggaauucagcgauuu

SEQ ID NO: 1690658 - RNA, 19 nt, Homo sapiens
  misc_RNA (1)...(19): siRNA sense strand
ccugcuaccuuaccaacca

SEQ ID NO: 1690659 - RNA, 19 nt, Homo sapiens
  misc_RNA (1)...(19): siRNA sense strand
auucagcgauuuauacaac

SEQ ID NO: 1690660 - RNA, 19 nt, Homo sapiens
  misc_RNA (1)...(19): siRNA sense strand
ccaugggaacccuaucuau

SEQ ID NO: 1690661 - RNA, 19 nt, Homo sapiens
  misc_RNA (1)...(19): siRNA sense strand
gauguaccgagaccucuuc

SEQ ID NO: 1690662 - RNA, 19 nt, Homo sapiens
  misc_RNA (1)...(19): siRNA sense strand
ucagcgauuuauacaacga

SEQ ID NO: 1690663 - RNA, 19 nt, Homo sapiens
  misc_RNA (1)...(19): siRNA sense strand
gaggccgugugcagagugu

SEQ ID NO: 1690664 - RNA, 19 nt, Homo sapiens
  misc_RNA (1)...(19): siRNA sense strand
ggacgugguugaggaauuc

SEQ ID NO: 1690665 - RNA, 19 nt, Homo sapiens
  misc_RNA (1)...(19): siRNA sense strand
ggcguggccugcuaccuua

SEQ ID NO: 1690666 - RNA, 19 nt, Homo sapiens
  misc_RNA (1)...(19): siRNA sense strand
ggaauucagcgauuuauac

SEQ ID NO: 1690667 - RNA, 19 nt, Homo sapiens
  misc_RNA (1)...(19): siRNA sense strand
ccaacggccuccuggaaga

SEQ ID NO: 1690668 - RNA, 19 nt, Homo sapiens
  misc_RNA (1)...(19): siRNA sense strand
gcaucagccucuauuccaa

SEQ ID NO: 1690669 - RNA, 19 nt, Homo sapiens
  misc_RNA (1)...(19): siRNA sense strand
guugaggaauucagcgauu

SEQ ID NO: 1690670 - RNA, 19 nt, Homo sapiens
  misc_RNA (1)...(19): siRNA sense strand
gaauucagcgauuuauaca

SEQ ID NO: 1690671 - RNA, 19 nt, Homo sapiens
  misc_RNA (1)...(19): siRNA sense strand
ggaacccuaucuaucaucu

SEQ ID NO: 1690672 - RNA, 19 nt, Homo sapiens
  misc_RNA (1)...(19): siRNA sense strand
ugaggaauucagcgauuua

SEQ ID NO: 1690673 - RNA, 19 nt, Homo sapiens
  misc_RNA (1)...(19): siRNA sense strand
agaauggcguggccugcua

SEQ ID NO: 1690674 - RNA, 19 nt, Homo sapiens
  misc_RNA (1)...(19): siRNA sense strand
gugcagagugugaaacuug

SEQ ID NO: 1690675 - RNA, 19 nt, Homo sapiens
  misc_RNA (1)...(19): siRNA sense strand
uaucuaucaucuagcagaa

SEQ ID NO: 1690676 - RNA, 19 nt, Homo sapiens
  misc_RNA (1)...(19): siRNA sense strand
ccacccaccgcaaguacua

SEQ ID NO: 1690677 - RNA, 19 nt, Homo sapiens
  misc_RNA (1)...(19): siRNA sense strand
ggaugucacugugcuugag

SEQ ID NO: 1690678 - RNA, 19 nt, Homo sapiens
  misc_RNA (1)...(19): siRNA sense strand
gcagccaaagcacuucuug

SEQ ID NO: 1690679 - RNA, 19 nt, Homo sapiens
  misc_RNA (1)...(19): siRNA sense strand
ugaauccaguggugacagu

SEQ ID NO: 1690680 - RNA, 19 nt, Homo sapiens
  misc_RNA (1)...(19): siRNA sense strand
gaacccuaucuaucaucua

SEQ ID NO: 1690681 - RNA, 19 nt, Homo sapiens
  misc_RNA (1)...(19): siRNA sense strand
aacccuaucuaucaucuag

SEQ ID NO: 1690682 - RNA, 19 nt, Homo sapiens
  misc_RNA (1)...(19): siRNA sense strand
caaggacgugguugaggaa

SEQ ID NO: 1690683 - RNA, 19 nt, Homo sapiens
  misc_RNA (1)...(19): siRNA sense strand
caugggaacccuaucuauc

SEQ ID NO: 1690684 - RNA, 19 nt, Homo sapiens
  misc_RNA (1)...(19): siRNA sense strand
gaggaauucagcgauuuau

SEQ ID NO: 1690685 - RNA, 19 nt, Homo sapiens
  misc_RNA (1)...(19): siRNA sense strand
uugaggaauucagcgauuu

SEQ ID NO: 1690686 - RNA, 19 nt, Homo sapiens
  misc_RNA (1)...(19): siRNA sense strand
ccugcuaccuuaccaacca

SEQ ID NO: 1690687 - RNA, 19 nt, Homo sapiens
  misc_RNA (1)...(19): siRNA sense strand
auucagcgauuuauacaac

SEQ ID NO: 1690688 - RNA, 19 nt, Homo sapiens
  misc_RNA (1)...(19): siRNA sense strand
ccaugggaacccuaucuau

SEQ ID NO: 1690689 - RNA, 19 nt, Homo sapiens
  misc_RNA (1)...(19): siRNA sense strand
gauguaccgagaccucuuc

SEQ ID NO: 1690690 - RNA, 19 nt, Homo sapiens
  misc_RNA (1)...(19): siRNA sense strand
ucagcgauuuauacaacga

SEQ ID NO: 1690691 - RNA, 19 nt, Homo sapiens
  misc_RNA (1)...(19): siRNA sense strand
gaggccgugugcagagugu

SEQ ID NO: 1690692 - RNA, 19 nt, Homo sapiens
  misc_RNA (1)...(19): siRNA sense strand
ggacgugguugaggaauuc

SEQ ID NO: 1690693 - RNA, 19 nt, Homo sapiens
  misc_RNA (1)...(19): siRNA sense strand
ggcguggccugcuaccuua

SEQ ID NO: 1690694 - RNA, 19 nt, Homo sapiens
  misc_RNA (1)...(19): siRNA sense strand
ggaauucagcgauuuauac

SEQ ID NO: 1690695 - RNA, 19 nt, Homo sapiens
  misc_RNA (1)...(19): siRNA sense strand
ccaacggccuccuggaaga

SEQ ID NO: 1690696 - RNA, 19 nt, Homo sapiens
  misc_RNA (1)...(19): siRNA sense strand
gcaucagccucuauuccaa

SEQ ID NO: 1690697 - RNA, 19 nt, Homo sapiens
  misc_RNA (1)...(19): siRNA sense strand
guugaggaauucagcgauu

SEQ ID NO: 1690698 - RNA, 19 nt, Homo sapiens
  misc_RNA (1)...(19): siRNA sense strand
gaauucagcgauuuauaca

SEQ ID NO: 1690699 - RNA, 19 nt, Homo sapiens
  misc_RNA (1)...(19): siRNA sense strand
ggaacccuaucuaucaucu

SEQ ID NO: 1690700 - RNA, 19 nt, Homo sapiens
  misc_RNA (1)...(19): siRNA sense strand
ugaggaauucagcgauuua

SEQ ID NO: 1690701 - RNA, 19 nt, Homo sapiens
  misc_RNA (1)...(19): siRNA sense strand
agaauggcguggccugcua

SEQ ID NO: 1690702 - RNA, 19 nt, Homo sapiens
  misc_RNA (1)...(19): siRNA sense strand
gugcagagugugaaacuug

SEQ ID NO: 1690703 - RNA, 19 nt, Homo sapiens
  misc_RNA (1)...(19): siRNA sense strand
uaucuaucaucuagcagaa

SEQ ID NO: 1690704 - RNA, 19 nt, Homo sapiens
  misc_RNA (1)...(19): siRNA sense strand
ccacccaccgcaaguacua

SEQ ID NO: 1690705 - RNA, 19 nt, Homo sapiens
  misc_RNA (1)...(19): siRNA sense strand
ggaugucacugugcuugag

SEQ ID NO: 1690706 - RNA, 19 nt, Homo sapiens
  misc_RNA (1)...(19): siRNA sense strand
gcagccaaagcacuucuug

SEQ ID NO: 1690707 - RNA, 19 nt, Homo sapiens
  misc_RNA (1)...(19): siRNA sense strand
ugaauccaguggugacagu

SEQ ID NO: 1690708 - RNA, 19 nt, Homo sapiens
  misc_RNA (1)...(19): siRNA sense strand
gaacccuaucuaucaucua

SEQ ID NO: 1690709 - RNA, 19 nt, Homo sapiens
  misc_RNA (1)...(19): siRNA sense strand
aacccuaucuaucaucuag

SEQ ID NO: 1690710 - RNA, 19 nt, Homo sapiens
  misc_RNA (1)...(19): siRNA sense strand
caaggacgugguugaggaa

SEQ ID NO: 1690711 - RNA, 19 nt, Homo sapiens
  misc_RNA (1)...(19): siRNA sense strand
caugggaacccuaucuauc

SEQ ID NO: 1690712 - RNA, 19 nt, Homo sapiens
  misc_RNA (1)...(19): siRNA sense strand
gaggaauucagcgauuuau

SEQ ID NO: 1690713 - RNA, 19 nt, Homo sapiens
  misc_RNA (1)...(19): siRNA sense strand
uugaggaauucagcgauuu

SEQ ID NO: 1690714 - RNA, 19 nt, Homo sapiens
  misc_RNA (1)...(19): siRNA sense strand
ccugcuaccuuaccaacca

SEQ ID NO: 1690715 - RNA, 19 nt, Homo sapiens
  misc_RNA (1)...(19): siRNA sense strand
auucagcgauuuauacaac

SEQ ID NO: 1690716 - RNA, 19 nt, Homo sapiens
  misc_RNA (1)...(19): siRNA sense strand
ccaugggaacccuaucuau

SEQ ID NO: 1690717 - RNA, 19 nt, Homo sapiens
  misc_RNA (1)...(19): siRNA sense strand
gauguaccgagaccucuuc

SEQ ID NO: 1690718 - RNA, 19 nt, Homo sapiens
  misc_RNA (1)...(19): siRNA sense strand
ucagcgauuuauacaacga

SEQ ID NO: 1690719 - RNA, 19 nt, Homo sapiens
  misc_RNA (1)...(19): siRNA sense strand
gaggccgugugcagagugu

SEQ ID NO: 1690720 - RNA, 19 nt, Homo sapiens
  misc_RNA (1)...(19): siRNA sense strand
ggacgugguugaggaauuc

SEQ ID NO: 1690721 - RNA, 19 nt, Homo sapiens
  misc_RNA (1)...(19): siRNA sense strand
ggcguggccugcuaccuua

SEQ ID NO: 1690722 - RNA, 19 nt, Homo sapiens
  misc_RNA (1)...(19): siRNA sense strand
ggaauucagcgauuuauac

SEQ ID NO: 1690723 - RNA, 19 nt, Homo sapiens
  misc_RNA (1)...(19): siRNA sense strand
ccaacggccuccuggaaga

SEQ ID NO: 1690724 - RNA, 19 nt, Homo sapiens
  misc_RNA (1)...(19): siRNA sense strand
gcaucagccucuauuccaa

SEQ ID NO: 1690725 - RNA, 19 nt, Homo sapiens
  misc_RNA (1)...(19): siRNA sense strand
guugaggaauucagcgauu

SEQ ID NO: 1690726 - RNA, 19 nt, Homo sapiens
  misc_RNA (1)...(19): siRNA sense strand
gaauucagcgauuuauaca

SEQ ID NO: 1690727 - RNA, 19 nt, Homo sapiens
  misc_RNA (1)...(19): siRNA sense strand
ggaacccuaucuaucaucu

SEQ ID NO: 1690728 - RNA, 19 nt, Homo sapiens
  misc_RNA (1)...(19): siRNA sense strand
ugaggaauucagcgauuua

SEQ ID NO: 1690729 - RNA, 19 nt, Homo sapiens
  misc_RNA (1)...(19): siRNA sense strand
agaauggcguggccugcua

SEQ ID NO: 1690730 - RNA, 19 nt, Homo sapiens
  misc_RNA (1)...(19): siRNA sense strand
gugcagagugugaaacuug

SEQ ID NO: 1690731 - RNA, 19 nt, Homo sapiens
  misc_RNA (1)...(19): siRNA sense strand
uaucuaucaucuagcagaa

SEQ ID NO: 1690732 - RNA, 19 nt, Homo sapiens
  misc_RNA (1)...(19): siRNA sense strand
ccacccaccgcaaguacua

SEQ ID NO: 1690733 - RNA, 19 nt, Homo sapiens
  misc_RNA (1)...(19): siRNA sense strand
ggaugucacugugcuugag

SEQ ID NO: 1690734 - RNA, 19 nt, Homo sapiens
  misc_RNA (1)...(19): siRNA sense strand
gcagccaaagcacuucuug

SEQ ID NO: 1690735 - RNA, 19 nt, Homo sapiens
  misc_RNA (1)...(19): siRNA sense strand
ugaauccaguggugacagu

SEQ ID NO: 1690736 - RNA, 19 nt, Homo sapiens
  misc_RNA (1)...(19): siRNA sense strand
gaacccuaucuaucaucua

SEQ ID NO: 1690737 - RNA, 19 nt, Homo sapiens
  misc_RNA (1)...(19): siRNA sense strand
aacccuaucuaucaucuag

SEQ ID NO: 1690738 - RNA, 19 nt, Homo sapiens
  misc_RNA (1)...(19): siRNA sense strand
caaggacgugguugaggaa

SEQ ID NO: 1690739 - RNA, 19 nt, Homo sapiens
  misc_RNA (1)...(19): siRNA sense strand
caugggaacccuaucuauc

SEQ ID NO: 1690740 - RNA, 19 nt, Homo sapiens
  misc_RNA (1)...(19): siRNA sense strand
gaggaauucagcgauuuau

SEQ ID NO: 1690741 - RNA, 19 nt, Homo sapiens
  misc_RNA (1)...(19): siRNA sense strand
uugaggaauucagcgauuu

SEQ ID NO: 1690742 - RNA, 19 nt, Homo sapiens
  misc_RNA (1)...(19): siRNA sense strand
ccugcuaccuuaccaacca

SEQ ID NO: 1690743 - RNA, 19 nt, Homo sapiens
  misc_RNA (1)...(19): siRNA sense strand
auucagcgauuuauacaac

SEQ ID NO: 1690744 - RNA, 19 nt, Homo sapiens
  misc_RNA (1)...(19): siRNA sense strand
ccaugggaacccuaucuau

SEQ ID NO: 1690745 - RNA, 19 nt, Homo sapiens
  misc_RNA (1)...(19): siRNA sense strand
gauguaccgagaccucuuc

SEQ ID NO: 1690746 - RNA, 19 nt, Homo sapiens
  misc_RNA (1)...(19): siRNA sense strand
ucagcgauuuauacaacga

SEQ ID NO: 1690747 - RNA, 19 nt, Homo sapiens
  misc_RNA (1)...(19): siRNA sense strand
gaggccgugugcagagugu

SEQ ID NO: 1690748 - RNA, 19 nt, Homo sapiens
  misc_RNA (1)...(19): siRNA sense strand
ggacgugguugaggaauuc

SEQ ID NO: 1690749 - RNA, 19 nt, Homo sapiens
  misc_RNA (1)...(19): siRNA sense strand
ggcguggccugcuaccuua

SEQ ID NO: 1690750 - RNA, 19 nt, Homo sapiens
  misc_RNA (1)...(19): siRNA sense strand
ggaauucagcgauuuauac

SEQ ID NO: 1690751 - RNA, 19 nt, Homo sapiens
  misc_RNA (1)...(19): siRNA sense strand
ccaacggccuccuggaaga

SEQ ID NO: 1690752 - RNA, 19 nt, Homo sapiens
  misc_RNA (1)...(19): siRNA sense strand
gcaucagccucuauuccaa

SEQ ID NO: 1690753 - RNA, 19 nt, Homo sapiens
  misc_RNA (1)...(19): siRNA sense strand
guugaggaauucagcgauu

SEQ ID NO: 1690754 - RNA, 19 nt, Homo sapiens
  misc_RNA (1)...(19): siRNA sense strand
gaauucagcgauuuauaca

SEQ ID NO: 1690755 - RNA, 19 nt, Homo sapiens
  misc_RNA (1)...(19): siRNA sense strand
ggaacccuaucuaucaucu

SEQ ID NO: 1690756 - RNA, 19 nt, Homo sapiens
  misc_RNA (1)...(19): siRNA sense strand
ugaggaauucagcgauuua

SEQ ID NO: 1690757 - RNA, 19 nt, Homo sapiens
  misc_RNA (1)...(19): siRNA sense strand
agaauggcguggccugcua

SEQ ID NO: 1690758 - RNA, 19 nt, Homo sapiens
  misc_RNA (1)...(19): siRNA sense strand
gugcagagugugaaacuug

SEQ ID NO: 1690759 - RNA, 19 nt, Homo sapiens
  misc_RNA (1)...(19): siRNA sense strand
uaucuaucaucuagcagaa

SEQ ID NO: 1690760 - RNA, 19 nt, Homo sapiens
  misc_RNA (1)...(19): siRNA sense strand
ccacccaccgcaaguacua

SEQ ID NO: 1690761 - RNA, 19 nt, Homo sapiens
  misc_RNA (1)...(19): siRNA sense strand
ggaugucacugugcuugag

SEQ ID NO: 1690762 - RNA, 19 nt, Homo sapiens
  misc_RNA (1)...(19): siRNA sense strand
gcagccaaagcacuucuug

SEQ ID NO: 1690763 - RNA, 19 nt, Homo sapiens
  misc_RNA (1)...(19): siRNA sense strand
ugaauccaguggugacagu

SEQ ID NO: 1690764 - RNA, 19 nt, Homo sapiens
  misc_RNA (1)...(19): siRNA sense strand
gaacccuaucuaucaucua

SEQ ID NO: 1690765 - RNA, 19 nt, Homo sapiens
  misc_RNA (1)...(19): siRNA sense strand
aacccuaucuaucaucuag

SEQ ID NO: 1690766 - RNA, 19 nt, Homo sapiens
  misc_RNA (1)...(19): siRNA sense strand
caaggacgugguugaggaa

SEQ ID NO: 1690767 - RNA, 19 nt, Homo sapiens
  misc_RNA (1)...(19): siRNA sense strand
caugggaacccuaucuauc

SEQ ID NO: 1690768 - RNA, 19 nt, Homo sapiens
  misc_RNA (1)...(19): siRNA sense strand
gaggaauucagcgauuuau

SEQ ID NO: 1690769 - RNA, 19 nt, Homo sapiens
  misc_RNA (1)...(19): siRNA sense strand
uugaggaauucagcgauuu

SEQ ID NO: 1690770 - RNA, 19 nt, Homo sapiens
  misc_RNA (1)...(19): siRNA sense strand
ccugcuaccuuaccaacca

SEQ ID NO: 1690771 - RNA, 19 nt, Homo sapiens
  misc_RNA (1)...(19): siRNA sense strand
auucagcgauuuauacaac

SEQ ID NO: 1690772 - RNA, 19 nt, Homo sapiens
  misc_RNA (1)...(19): siRNA sense strand
ccaugggaacccuaucuau

SEQ ID NO: 1690773 - RNA, 19 nt, Homo sapiens
  misc_RNA (1)...(19): siRNA sense strand
gauguaccgagaccucuuc

SEQ ID NO: 1690774 - RNA, 19 nt, Homo sapiens
  misc_RNA (1)...(19): siRNA sense strand
ucagcgauuuauacaacga

SEQ ID NO: 1690775 - RNA, 19 nt, Homo sapiens
  misc_RNA (1)...(19): siRNA sense strand
gaggccgugugcagagugu

SEQ ID NO: 1690776 - RNA, 19 nt, Homo sapiens
  misc_RNA (1)...(19): siRNA sense strand
ggacgugguugaggaauuc

SEQ ID NO: 1690777 - RNA, 19 nt, Homo sapiens
  misc_RNA (1)...(19): siRNA sense strand
ggcguggccugcuaccuua

SEQ ID NO: 1690778 - RNA, 19 nt, Homo sapiens
  misc_RNA (1)...(19): siRNA sense strand
ggaauucagcgauuuauac

SEQ ID NO: 1690779 - RNA, 19 nt, Homo sapiens
  misc_RNA (1)...(19): siRNA sense strand
ccaacggccuccuggaaga

SEQ ID NO: 1690780 - RNA, 19 nt, Homo sapiens
  misc_RNA (1)...(19): siRNA sense strand
gcaucagccucuauuccaa

SEQ ID NO: 1690781 - RNA, 19 nt, Homo sapiens
  misc_RNA (1)...(19): siRNA sense strand
guugaggaauucagcgauu

SEQ ID NO: 1690782 - RNA, 19 nt, Homo sapiens
  misc_RNA (1)...(19): siRNA sense strand
gaauucagcgauuuauaca

SEQ ID NO: 1690783 - RNA, 19 nt, Homo sapiens
  misc_RNA (1)...(19): siRNA sense strand
ggaacccuaucuaucaucu

SEQ ID NO: 1690784 - RNA, 19 nt, Homo sapiens
  misc_RNA (1)...(19): siRNA sense strand
ugaggaauucagcgauuua

SEQ ID NO: 1690785 - RNA, 19 nt, Homo sapiens
  misc_RNA (1)...(19): siRNA sense strand
agaauggcguggccugcua

SEQ ID NO: 1690786 - RNA, 19 nt, Homo sapiens
  misc_RNA (1)...(19): siRNA sense strand
gugcagagugugaaacuug

SEQ ID NO: 1690787 - RNA, 19 nt, Homo sapiens
  misc_RNA (1)...(19): siRNA sense strand
uaucuaucaucuagcagaa

SEQ ID NO: 1690788 - RNA, 19 nt, Homo sapiens
  misc_RNA (1)...(19): siRNA sense strand
ccacccaccgcaaguacua

SEQ ID NO: 1690789 - RNA, 19 nt, Homo sapiens
  misc_RNA (1)...(19): siRNA sense strand
ggaugucacugugcuugag

SEQ ID NO: 1690790 - RNA, 19 nt, Homo sapiens
  misc_RNA (1)...(19): siRNA sense strand
gcagccaaagcacuucuug

SEQ ID NO: 1690791 - RNA, 19 nt, Homo sapiens
  misc_RNA (1)...(19): siRNA sense strand
ugaauccaguggugacagu

SEQ ID NO: 1690792 - RNA, 19 nt, Homo sapiens
  misc_RNA (1)...(19): siRNA sense strand
gaacccuaucuaucaucua

SEQ ID NO: 1690793 - RNA, 19 nt, Homo sapiens
  misc_RNA (1)...(19): siRNA sense strand
aacccuaucuaucaucuag

SEQ ID NO: 1690794 - RNA, 19 nt, Homo sapiens
  misc_RNA (1)...(19): siRNA sense strand
caaggacgugguugaggaa

SEQ ID NO: 1690795 - RNA, 19 nt, Homo sapiens
  misc_RNA (1)...(19): siRNA sense strand
caugggaacccuaucuauc

SEQ ID NO: 1690796 - RNA, 19 nt, Homo sapiens
  misc_RNA (1)...(19): siRNA sense strand
gaggaauucagcgauuuau

SEQ ID NO: 1690797 - RNA, 19 nt, Homo sapiens
  misc_RNA (1)...(19): siRNA sense strand
uugaggaauucagcgauuu

SEQ ID NO: 1690798 - RNA, 19 nt, Homo sapiens
  misc_RNA (1)...(19): siRNA sense strand
ccugcuaccuuaccaacca

SEQ ID NO: 1690799 - RNA, 19 nt, Homo sapiens
  misc_RNA (1)...(19): siRNA sense strand
auucagcgauuuauacaac

SEQ ID NO: 1690800 - RNA, 19 nt, Homo sapiens
  misc_RNA (1)...(19): siRNA sense strand
ccaugggaacccuaucuau

SEQ ID NO: 1690801 - RNA, 19 nt, Homo sapiens
  misc_RNA (1)...(19): siRNA sense strand
gauguaccgagaccucuuc

SEQ ID NO: 1690802 - RNA, 19 nt, Homo sapiens
  misc_RNA (1)...(19): siRNA sense strand
ucagcgauuuauacaacga

SEQ ID NO: 1690803 - RNA, 19 nt, Homo sapiens
  misc_RNA (1)...(19): siRNA sense strand
gaggccgugugcagagugu

SEQ ID NO: 1690804 - RNA, 19 nt, Homo sapiens
  misc_RNA (1)...(19): siRNA sense strand
gcaaggauaucaaugcuua

SEQ ID NO: 1690805 - RNA, 19 nt, Homo sapiens
  misc_RNA (1)...(19): siRNA sense strand
ggacguggcucccaacuuu

SEQ ID NO: 1690806 - RNA, 19 nt, Homo sapiens
  misc_RNA (1)...(19): siRNA sense strand
caagaggaauguuaaguug

SEQ ID NO: 1690807 - RNA, 19 nt, Homo sapiens
  misc_RNA (1)...(19): siRNA sense strand
gaaaggagucuucaccaaa

SEQ ID NO: 1690808 - RNA, 19 nt, Homo sapiens
  misc_RNA (1)...(19): siRNA sense strand
ggauaucaaugcuuacaau

SEQ ID NO: 1690809 - RNA, 19 nt, Homo sapiens
  misc_RNA (1)...(19): siRNA sense strand
cgaaaggagucuucaccaa

SEQ ID NO: 1690810 - RNA, 19 nt, Homo sapiens
  misc_RNA (1)...(19): siRNA sense strand
gcucccaucuggcaagaaa

SEQ ID NO: 1690811 - RNA, 19 nt, Homo sapiens
  misc_RNA (1)...(19): siRNA sense strand
gcaggaacuuugaugagau

SEQ ID NO: 1690812 - RNA, 19 nt, Homo sapiens
  misc_RNA (1)...(19): siRNA sense strand
gaaaagggcaugccuguga

SEQ ID NO: 1690813 - RNA, 19 nt, Homo sapiens
  misc_RNA (1)...(19): siRNA sense strand
gaagcugucuauccucuac

SEQ ID NO: 1690814 - RNA, 19 nt, Homo sapiens
  misc_RNA (1)...(19): siRNA sense strand
aaccaucccugaagaagaa

SEQ ID NO: 1690815 - RNA, 19 nt, Homo sapiens
  misc_RNA (1)...(19): siRNA sense strand
ggcaggaacuuugaugaga

SEQ ID NO: 1690816 - RNA, 19 nt, Homo sapiens
  misc_RNA (1)...(19): siRNA sense strand
ccaagaggaauguuaaguu

SEQ ID NO: 1690817 - RNA, 19 nt, Homo sapiens
  misc_RNA (1)...(19): siRNA sense strand
caggaacuuugaugagauu

SEQ ID NO: 1690818 - RNA, 19 nt, Homo sapiens
  misc_RNA (1)...(19): siRNA sense strand
gcaccagaauuugccaaga

SEQ ID NO: 1690819 - RNA, 19 nt, Homo sapiens
  misc_RNA (1)...(19): siRNA sense strand
aaaggagucuucaccaaag

SEQ ID NO: 1690820 - RNA, 19 nt, Homo sapiens
  misc_RNA (1)...(19): siRNA sense strand
uaaguugauugcccuuuca

SEQ ID NO: 1690821 - RNA, 19 nt, Homo sapiens
  misc_RNA (1)...(19): siRNA sense strand
agaggaauguuaaguugau

SEQ ID NO: 1690822 - RNA, 19 nt, Homo sapiens
  misc_RNA (1)...(19): siRNA sense strand
gaaauaccuccgcuacaca

SEQ ID NO: 1690823 - RNA, 19 nt, Homo sapiens
  misc_RNA (1)...(19): siRNA sense strand
gaggaauguuaaguugauu

SEQ ID NO: 1690824 - RNA, 19 nt, Homo sapiens
  misc_RNA (1)...(19): siRNA sense strand
gcucgugugguguuuguuu

SEQ ID NO: 1690825 - RNA, 19 nt, Homo sapiens
  misc_RNA (1)...(19): siRNA sense strand
gugaagagcccacagaaaa

SEQ ID NO: 1690826 - RNA, 19 nt, Homo sapiens
  misc_RNA (1)...(19): siRNA sense strand
gaauuugccaagaggaaug

SEQ ID NO: 1690827 - RNA, 19 nt, Homo sapiens
  misc_RNA (1)...(19): siRNA sense strand
caccagaauuugccaagag

SEQ ID NO: 1690828 - RNA, 19 nt, Homo sapiens
  misc_RNA (1)...(19): siRNA sense strand
caaccaucccugaagaaga

SEQ ID NO: 1690829 - RNA, 19 nt, Homo sapiens
  misc_RNA (1)...(19): siRNA sense strand
uuaaguugauugcccuuuc

SEQ ID NO: 1690830 - RNA, 19 nt, Homo sapiens
  misc_RNA (1)...(19): siRNA sense strand
agaaauaccuccgcuacac

SEQ ID NO: 1690831 - RNA, 19 nt, Homo sapiens
  misc_RNA (1)...(19): siRNA sense strand
ggagcaaggauaucaaugc

SEQ ID NO: 1690832 - RNA, 19 nt, Homo sapiens
  misc_RNA (1)...(19): siRNA sense strand
ggagcuugccauccuguug

SEQ ID NO: 1690833 - RNA, 19 nt, Homo sapiens
  misc_RNA (1)...(19): siRNA sense strand
ccacuggcaggaacuuuga

SEQ ID NO: 1690834 - RNA, 19 nt, Homo sapiens
  misc_RNA (1)...(19): siRNA sense strand
gagcucccaucuggcaaga

SEQ ID NO: 1690835 - RNA, 19 nt, Homo sapiens
  misc_RNA (1)...(19): siRNA sense strand
ugacagcucgugugguguu

SEQ ID NO: 1690836 - RNA, 19 nt, Homo sapiens
  misc_RNA (1)...(19): siRNA sense strand
cagcucgugugguguuugu

SEQ ID NO: 1690837 - RNA, 19 nt, Homo sapiens
  misc_RNA (1)...(19): siRNA sense strand
ucccaucuggcaagaaaua

SEQ ID NO: 1690838 - RNA, 19 nt, Homo sapiens
  misc_RNA (1)...(19): siRNA sense strand
cagaauuugccaagaggaa

SEQ ID NO: 1690839 - RNA, 19 nt, Homo sapiens
  misc_RNA (1)...(19): siRNA sense strand
ucuauccucuacccagcua

SEQ ID NO: 1690840 - RNA, 19 nt, Homo sapiens
  misc_RNA (1)...(19): siRNA sense strand
cagcagagaaggaugaaaa

SEQ ID NO: 1690841 - RNA, 19 nt, Homo sapiens
  misc_RNA (1)...(19): siRNA sense strand
gacagcucgugugguguuu

SEQ ID NO: 1690842 - RNA, 19 nt, Homo sapiens
  misc_RNA (1)...(19): siRNA sense strand
caccaaagagcucccaucu

SEQ ID NO: 1690843 - RNA, 19 nt, Homo sapiens
  misc_RNA (1)...(19): siRNA sense strand
ggaauguuaaguugauugc

SEQ ID NO: 1690844 - RNA, 19 nt, Homo sapiens
  misc_RNA (1)...(19): siRNA sense strand
caacaaagauuccuucuau

SEQ ID NO: 1690845 - RNA, 19 nt, Homo sapiens
  misc_RNA (1)...(19): siRNA sense strand
gaacaucacagauuccuua

SEQ ID NO: 1690846 - RNA, 19 nt, Homo sapiens
  misc_RNA (1)...(19): siRNA sense strand
gaacuugcauucagauuug

SEQ ID NO: 1690847 - RNA, 19 nt, Homo sapiens
  misc_RNA (1)...(19): siRNA sense strand
gcacuggucucauucguuu

SEQ ID NO: 1690848 - RNA, 19 nt, Homo sapiens
  misc_RNA (1)...(19): siRNA sense strand
gauagaauauggagcagua

SEQ ID NO: 1690849 - RNA, 19 nt, Homo sapiens
  misc_RNA (1)...(19): siRNA sense strand
gacagaagguugccaggua

SEQ ID NO: 1690850 - RNA, 19 nt, Homo sapiens
  misc_RNA (1)...(19): siRNA sense strand
gcaaggaguuucauguaau

SEQ ID NO: 1690851 - RNA, 19 nt, Homo sapiens
  misc_RNA (1)...(19): siRNA sense strand
guaaagaaaccauggcaua

SEQ ID NO: 1690852 - RNA, 19 nt, Homo sapiens
  misc_RNA (1)...(19): siRNA sense strand
ugacucugcugaugauuua

SEQ ID NO: 1690853 - RNA, 19 nt, Homo sapiens
  misc_RNA (1)...(19): siRNA sense strand
ggaagagccuuauguccuu

SEQ ID NO: 1690854 - RNA, 19 nt, Homo sapiens
  misc_RNA (1)...(19): siRNA sense strand
ccugauaucuggauguaua

SEQ ID NO: 1690855 - RNA, 19 nt, Homo sapiens
  misc_RNA (1)...(19): siRNA sense strand
ugacagcacuggucucauu

SEQ ID NO: 1690856 - RNA, 19 nt, Homo sapiens
  misc_RNA (1)...(19): siRNA sense strand
ggaguuucauguaaucuuu

SEQ ID NO: 1690857 - RNA, 19 nt, Homo sapiens
  misc_RNA (1)...(19): siRNA sense strand
gagagaaggucaucgacuu

SEQ ID NO: 1690858 - RNA, 19 nt, Homo sapiens
  misc_RNA (1)...(19): siRNA sense strand
gaaggaagaaggucuagaa

SEQ ID NO: 1690859 - RNA, 19 nt, Homo sapiens
  misc_RNA (1)...(19): siRNA sense strand
cuaaauaguuucugguuug

SEQ ID NO: 1690860 - RNA, 19 nt, Homo sapiens
  misc_RNA (1)...(19): siRNA sense strand
ucacacagcucaucagcaa

SEQ ID NO: 1690861 - RNA, 19 nt, Homo sapiens
  misc_RNA (1)...(19): siRNA sense strand
ccacacauguauuaagauu

SEQ ID NO: 1690862 - RNA, 19 nt, Homo sapiens
  misc_RNA (1)...(19): siRNA sense strand
gaauauugguggcaucuuc

SEQ ID NO: 1690863 - RNA, 19 nt, Homo sapiens
  misc_RNA (1)...(19): siRNA sense strand
gaaggcaaacugcauauga

SEQ ID NO: 1690864 - RNA, 19 nt, Homo sapiens
  misc_RNA (1)...(19): siRNA sense strand
ggcaaggaguuucauguaa

SEQ ID NO: 1690865 - RNA, 19 nt, Homo sapiens
  misc_RNA (1)...(19): siRNA sense strand
guauuaagauuugguggua

SEQ ID NO: 1690866 - RNA, 19 nt, Homo sapiens
  misc_RNA (1)...(19): siRNA sense strand
acaaaccucucuaugguaa

SEQ ID NO: 1690867 - RNA, 19 nt, Homo sapiens
  misc_RNA (1)...(19): siRNA sense strand
gcuaaauaguuucugguuu

SEQ ID NO: 1690868 - RNA, 19 nt, Homo sapiens
  misc_RNA (1)...(19): siRNA sense strand
ugacaaaccucucuauggu

SEQ ID NO: 1690869 - RNA, 19 nt, Homo sapiens
  misc_RNA (1)...(19): siRNA sense strand
gcacacauuuaacgacaga

SEQ ID NO: 1690870 - RNA, 19 nt, Homo sapiens
  misc_RNA (1)...(19): siRNA sense strand
auacuacccuuaccuauga

SEQ ID NO: 1690871 - RNA, 19 nt, Homo sapiens
  misc_RNA (1)...(19): siRNA sense strand
gagaacagauuuugauuug

SEQ ID NO: 1690872 - RNA, 19 nt, Homo sapiens
  misc_RNA (1)...(19): siRNA sense strand
gcaguguaaucgacauaaa

SEQ ID NO: 1690873 - RNA, 19 nt, Homo sapiens
  misc_RNA (1)...(19): siRNA sense strand
uaacagaaacagaacauug

SEQ ID NO: 1690874 - RNA, 19 nt, Homo sapiens
  misc_RNA (1)...(19): siRNA sense strand
cagaagaaguuaucaacau

SEQ ID NO: 1690875 - RNA, 19 nt, Homo sapiens
  misc_RNA (1)...(19): siRNA sense strand
gcaaaacccuuacuaaaag

SEQ ID NO: 1690876 - RNA, 19 nt, Homo sapiens
  misc_RNA (1)...(19): siRNA sense strand
gaacagauuuugauuugga

SEQ ID NO: 1690877 - RNA, 19 nt, Homo sapiens
  misc_RNA (1)...(19): siRNA sense strand
gauuggauauucucaagga

SEQ ID NO: 1690878 - RNA, 19 nt, Homo sapiens
  misc_RNA (1)...(19): siRNA sense strand
gaacacaauuaacagaaac

SEQ ID NO: 1690879 - RNA, 19 nt, Homo sapiens
  misc_RNA (1)...(19): siRNA sense strand
ggaacuugcauucagauuu

SEQ ID NO: 1690880 - RNA, 19 nt, Homo sapiens
  misc_RNA (1)...(19): siRNA sense strand
gcauucagauuugcuguga

SEQ ID NO: 1690881 - RNA, 19 nt, Homo sapiens
  misc_RNA (1)...(19): siRNA sense strand
ggaagaaggucuagaaaag

SEQ ID NO: 1690882 - RNA, 19 nt, Homo sapiens
  misc_RNA (1)...(19): siRNA sense strand
aaagauuccuucuauguca

SEQ ID NO: 1690883 - RNA, 19 nt, Homo sapiens
  misc_RNA (1)...(19): siRNA sense strand
uaaagaaaccauggcauaa

SEQ ID NO: 1690884 - RNA, 19 nt, Homo sapiens
  misc_RNA (1)...(19): siRNA sense strand
ucauaaagcugaccuugca

SEQ ID NO: 1690885 - RNA, 19 nt, Homo sapiens
  misc_RNA (1)...(19): siRNA sense strand
cagcgaacaucacagauuc

SEQ ID NO: 1690886 - RNA, 19 nt, Homo sapiens
  misc_RNA (1)...(19): siRNA sense strand
gaagugccagcgucgguua

SEQ ID NO: 1690887 - RNA, 19 nt, Homo sapiens
  misc_RNA (1)...(19): siRNA sense strand
gguggcaucuucauuguuc

SEQ ID NO: 1690888 - RNA, 19 nt, Homo sapiens
  misc_RNA (1)...(19): siRNA sense strand
aaaccaagauagaauaugg

SEQ ID NO: 1690889 - RNA, 19 nt, Homo sapiens
  misc_RNA (1)...(19): siRNA sense strand
gaagagccuuauguccuuu

SEQ ID NO: 1690890 - RNA, 19 nt, Homo sapiens
  misc_RNA (1)...(19): siRNA sense strand
caaggaaccacacauguau

SEQ ID NO: 1690891 - RNA, 19 nt, Homo sapiens
  misc_RNA (1)...(19): siRNA sense strand
gcaaacugcauaugaugaa

SEQ ID NO: 1690892 - RNA, 19 nt, Homo sapiens
  misc_RNA (1)...(19): siRNA sense strand
uaugauacccagaagauaa

SEQ ID NO: 1690893 - RNA, 19 nt, Homo sapiens
  misc_RNA (1)...(19): siRNA sense strand
gaggaaggcaaacugcaua

SEQ ID NO: 1690894 - RNA, 19 nt, Homo sapiens
  misc_RNA (1)...(19): siRNA sense strand
ucaaggaaccacacaugua

SEQ ID NO: 1690895 - RNA, 19 nt, Homo sapiens
  misc_RNA (1)...(19): siRNA sense strand
uaacuuagccgccuuucug

SEQ ID NO: 1690896 - RNA, 19 nt, Homo sapiens
  misc_RNA (1)...(19): siRNA sense strand
uguauauucugcuggcuua

SEQ ID NO: 1690897 - RNA, 19 nt, Homo sapiens
  misc_RNA (1)...(19): siRNA sense strand
aaauuagacuuguggaaga

SEQ ID NO: 1690898 - RNA, 19 nt, Homo sapiens
  misc_RNA (1)...(19): siRNA sense strand
ucagagaguuaucuacaau

SEQ ID NO: 1690899 - RNA, 19 nt, Homo sapiens
  misc_RNA (1)...(19): siRNA sense strand
ccaagucuccuccaucauu

SEQ ID NO: 1690900 - RNA, 19 nt, Homo sapiens
  misc_RNA (1)...(19): siRNA sense strand
ugacaggguucagaauauu

SEQ ID NO: 1690901 - RNA, 19 nt, Homo sapiens
  misc_RNA (1)...(19): siRNA sense strand
ucaaagcuccaucaaggua

SEQ ID NO: 1690902 - RNA, 19 nt, Homo sapiens
  misc_RNA (1)...(19): siRNA sense strand
guagugccaugguagaaga

SEQ ID NO: 1690903 - RNA, 19 nt, Homo sapiens
  misc_RNA (1)...(19): siRNA sense strand
gcaagguucugagcucaug

SEQ ID NO: 1690904 - RNA, 19 nt, Homo sapiens
  misc_RNA (1)...(19): siRNA sense strand
gguauaaucuucgacucaa

SEQ ID NO: 1690905 - RNA, 19 nt, Homo sapiens
  misc_RNA (1)...(19): siRNA sense strand
caaggaguuucauguaauc

SEQ ID NO: 1690906 - RNA, 19 nt, Homo sapiens
  misc_RNA (1)...(19): siRNA sense strand
agaagaaguuaucaacaug

SEQ ID NO: 1690907 - RNA, 19 nt, Homo sapiens
  misc_RNA (1)...(19): siRNA sense strand
caagucuccuccaucauug

SEQ ID NO: 1690908 - RNA, 19 nt, Homo sapiens
  misc_RNA (1)...(19): siRNA sense strand
caagaaagccugugaucag

SEQ ID NO: 1690909 - RNA, 19 nt, Homo sapiens
  misc_RNA (1)...(19): siRNA sense strand
acagaagguugccagguaa

SEQ ID NO: 1690910 - RNA, 19 nt, Homo sapiens
  misc_RNA (1)...(19): siRNA sense strand
ugggaaugaugacagaaua

SEQ ID NO: 1690911 - RNA, 19 nt, Homo sapiens
  misc_RNA (1)...(19): siRNA sense strand
aaagcuccaucaagguaua

SEQ ID NO: 1690912 - RNA, 19 nt, Homo sapiens
  misc_RNA (1)...(19): siRNA sense strand
acaauggaauggaaugguu

SEQ ID NO: 1690913 - RNA, 19 nt, Homo sapiens
  misc_RNA (1)...(19): siRNA sense strand
gcagaauaacuuucaacaa

SEQ ID NO: 1690914 - RNA, 19 nt, Homo sapiens
  misc_RNA (1)...(19): siRNA sense strand
ucaguuccuugcaguguaa

SEQ ID NO: 1690915 - RNA, 19 nt, Homo sapiens
  misc_RNA (1)...(19): siRNA sense strand
gacaggguucagaauauua

SEQ ID NO: 1690916 - RNA, 19 nt, Homo sapiens
  misc_RNA (1)...(19): siRNA sense strand
gaaaagaggcaaggaguuu

SEQ ID NO: 1690917 - RNA, 19 nt, Homo sapiens
  misc_RNA (1)...(19): siRNA sense strand
ucacgguuguguaugauga

SEQ ID NO: 1690918 - RNA, 19 nt, Homo sapiens
  misc_RNA (1)...(19): siRNA sense strand
agaguuaucuacaauccuu

SEQ ID NO: 1690919 - RNA, 19 nt, Homo sapiens
  misc_RNA (1)...(19): siRNA sense strand
uaagaagucugacaaaccu

SEQ ID NO: 1690920 - RNA, 19 nt, Homo sapiens
  misc_RNA (1)...(19): siRNA sense strand
ggaaagccagcgaacauca

SEQ ID NO: 1690921 - RNA, 19 nt, Homo sapiens
  misc_RNA (1)...(19): siRNA sense strand
caugacaggguucagaaua

SEQ ID NO: 1690922 - RNA, 19 nt, Homo sapiens
  misc_RNA (1)...(19): siRNA sense strand
ccucuuugcucuugauguu

SEQ ID NO: 1690923 - RNA, 19 nt, Homo sapiens
  misc_RNA (1)...(19): siRNA sense strand
gaaugaugacagaauacua

SEQ ID NO: 1690924 - RNA, 19 nt, Homo sapiens
  misc_RNA (1)...(19): siRNA sense strand
gacugaugcugcucuaaug

SEQ ID NO: 1690925 - RNA, 19 nt, Homo sapiens
  misc_RNA (1)...(19): siRNA sense strand
gcagccggcuuggugcuuu

SEQ ID NO: 1690926 - RNA, 19 nt, Homo sapiens
  misc_RNA (1)...(19): siRNA sense strand
ggucaaaaguaaugaagaa

SEQ ID NO: 1690927 - RNA, 19 nt, Homo sapiens
  misc_RNA (1)...(19): siRNA sense strand
gaaccacacauguauuaag

SEQ ID NO: 1690928 - RNA, 19 nt, Homo sapiens
  misc_RNA (1)...(19): siRNA sense strand
aaccacacauguauuaaga

SEQ ID NO: 1690929 - RNA, 19 nt, Homo sapiens
  misc_RNA (1)...(19): siRNA sense strand
caucacagauuccuuaucc

SEQ ID NO: 1690930 - RNA, 19 nt, Homo sapiens
  misc_RNA (1)...(19): siRNA sense strand
ucacucagccgugccauuu

SEQ ID NO: 1690931 - RNA, 19 nt, Homo sapiens
  misc_RNA (1)...(19): siRNA sense strand
cagguuugcuggauggauu

SEQ ID NO: 1690932 - RNA, 19 nt, Homo sapiens
  misc_RNA (1)...(19): siRNA sense strand
ugaggaacuugcauucaga

SEQ ID NO: 1690933 - RNA, 19 nt, Homo sapiens
  misc_RNA (1)...(19): siRNA sense strand
acaaagauuccuucuaugu

SEQ ID NO: 1690934 - RNA, 19 nt, Homo sapiens
  misc_RNA (1)...(19): siRNA sense strand
cagcgucgguuaaaacaua

SEQ ID NO: 1690935 - RNA, 19 nt, Homo sapiens
  misc_RNA (1)...(19): siRNA sense strand
gacaaaaugugggccuuua

SEQ ID NO: 1690936 - RNA, 19 nt, Homo sapiens
  misc_RNA (1)...(19): siRNA sense strand
gacaaaccucucuauggua

SEQ ID NO: 1690937 - RNA, 19 nt, Homo sapiens
  misc_RNA (1)...(19): siRNA sense strand
aaacaggcauuagcuaugg

SEQ ID NO: 1690938 - RNA, 19 nt, Homo sapiens
  misc_RNA (1)...(19): siRNA sense strand
guauaaucuucgacucaaa

SEQ ID NO: 1690939 - RNA, 19 nt, Homo sapiens
  misc_RNA (1)...(19): siRNA sense strand
ccagacuucucuucacuca

SEQ ID NO: 1690940 - RNA, 19 nt, Homo sapiens
  misc_RNA (1)...(19): siRNA sense strand
ugaaggcuauugcauugau

SEQ ID NO: 1690941 - RNA, 19 nt, Homo sapiens
  misc_RNA (1)...(19): siRNA sense strand
ccaauacuacccuuaccua

SEQ ID NO: 1690942 - RNA, 19 nt, Homo sapiens
  misc_RNA (1)...(19): siRNA sense strand
cuaaacaaaccaagauaga

SEQ ID NO: 1690943 - RNA, 19 nt, Homo sapiens
  misc_RNA (1)...(19): siRNA sense strand
gaagguugccagguaaaga

SEQ ID NO: 1690944 - RNA, 19 nt, Homo sapiens
  misc_RNA (1)...(19): siRNA sense strand
caacaaagauuccuucuau

SEQ ID NO: 1690945 - RNA, 19 nt, Homo sapiens
  misc_RNA (1)...(19): siRNA sense strand
gaacaucacagauuccuua

SEQ ID NO: 1690946 - RNA, 19 nt, Homo sapiens
  misc_RNA (1)...(19): siRNA sense strand
gaacuugcauucagauuug

SEQ ID NO: 1690947 - RNA, 19 nt, Homo sapiens
  misc_RNA (1)...(19): siRNA sense strand
gcacuggucucauucguuu

SEQ ID NO: 1690948 - RNA, 19 nt, Homo sapiens
  misc_RNA (1)...(19): siRNA sense strand
gauagaauauggagcagua

SEQ ID NO: 1690949 - RNA, 19 nt, Homo sapiens
  misc_RNA (1)...(19): siRNA sense strand
gcaaggaguuucauguaau

SEQ ID NO: 1690950 - RNA, 19 nt, Homo sapiens
  misc_RNA (1)...(19): siRNA sense strand
ugacucugcugaugauuua

SEQ ID NO: 1690951 - RNA, 19 nt, Homo sapiens
  misc_RNA (1)...(19): siRNA sense strand
ggaagagccuuauguccuu

SEQ ID NO: 1690952 - RNA, 19 nt, Homo sapiens
  misc_RNA (1)...(19): siRNA sense strand
ccugauaucuggauguaua

SEQ ID NO: 1690953 - RNA, 19 nt, Homo sapiens
  misc_RNA (1)...(19): siRNA sense strand
ugacagcacuggucucauu

SEQ ID NO: 1690954 - RNA, 19 nt, Homo sapiens
  misc_RNA (1)...(19): siRNA sense strand
ggaguuucauguaaucuuu

SEQ ID NO: 1690955 - RNA, 19 nt, Homo sapiens
  misc_RNA (1)...(19): siRNA sense strand
gagagaaggucaucgacuu

SEQ ID NO: 1690956 - RNA, 19 nt, Homo sapiens
  misc_RNA (1)...(19): siRNA sense strand
gaaggaagaaggucuagaa

SEQ ID NO: 1690957 - RNA, 19 nt, Homo sapiens
  misc_RNA (1)...(19): siRNA sense strand
cuaaauaguuucugguuug

SEQ ID NO: 1690958 - RNA, 19 nt, Homo sapiens
  misc_RNA (1)...(19): siRNA sense strand
ucacacagcucaucagcaa

SEQ ID NO: 1690959 - RNA, 19 nt, Homo sapiens
  misc_RNA (1)...(19): siRNA sense strand
ccacacauguauuaagauu

SEQ ID NO: 1690960 - RNA, 19 nt, Homo sapiens
  misc_RNA (1)...(19): siRNA sense strand
gaauauugguggcaucuuc

SEQ ID NO: 1690961 - RNA, 19 nt, Homo sapiens
  misc_RNA (1)...(19): siRNA sense strand
gaaggcaaacugcauauga

SEQ ID NO: 1690962 - RNA, 19 nt, Homo sapiens
  misc_RNA (1)...(19): siRNA sense strand
ggcaaggaguuucauguaa

SEQ ID NO: 1690963 - RNA, 19 nt, Homo sapiens
  misc_RNA (1)...(19): siRNA sense strand
guauuaagauuugguggua

SEQ ID NO: 1690964 - RNA, 19 nt, Homo sapiens
  misc_RNA (1)...(19): siRNA sense strand
acaaaccucucuaugguaa

SEQ ID NO: 1690965 - RNA, 19 nt, Homo sapiens
  misc_RNA (1)...(19): siRNA sense strand
gcuaaauaguuucugguuu

SEQ ID NO: 1690966 - RNA, 19 nt, Homo sapiens
  misc_RNA (1)...(19): siRNA sense strand
ugacaaaccucucuauggu

SEQ ID NO: 1690967 - RNA, 19 nt, Homo sapiens
  misc_RNA (1)...(19): siRNA sense strand
auacuacccuuaccuauga

SEQ ID NO: 1690968 - RNA, 19 nt, Homo sapiens
  misc_RNA (1)...(19): siRNA sense strand
gagaacagauuuugauuug

SEQ ID NO: 1690969 - RNA, 19 nt, Homo sapiens
  misc_RNA (1)...(19): siRNA sense strand
gcaguguaaucgacauaaa

SEQ ID NO: 1690970 - RNA, 19 nt, Homo sapiens
  misc_RNA (1)...(19): siRNA sense strand
uaacagaaacagaacauug

SEQ ID NO: 1690971 - RNA, 19 nt, Homo sapiens
  misc_RNA (1)...(19): siRNA sense strand
gcaaaacccuuacuaaaag

SEQ ID NO: 1690972 - RNA, 19 nt, Homo sapiens
  misc_RNA (1)...(19): siRNA sense strand
gaacagauuuugauuugga

SEQ ID NO: 1690973 - RNA, 19 nt, Homo sapiens
  misc_RNA (1)...(19): siRNA sense strand
gauuggauauucucaagga

SEQ ID NO: 1690974 - RNA, 19 nt, Homo sapiens
  misc_RNA (1)...(19): siRNA sense strand
gaacacaauuaacagaaac

SEQ ID NO: 1690975 - RNA, 19 nt, Homo sapiens
  misc_RNA (1)...(19): siRNA sense strand
ggaacuugcauucagauuu

SEQ ID NO: 1690976 - RNA, 19 nt, Homo sapiens
  misc_RNA (1)...(19): siRNA sense strand
gcauucagauuugcuguga

SEQ ID NO: 1690977 - RNA, 19 nt, Homo sapiens
  misc_RNA (1)...(19): siRNA sense strand
ggaagaaggucuagaaaag

SEQ ID NO: 1690978 - RNA, 19 nt, Homo sapiens
  misc_RNA (1)...(19): siRNA sense strand
aaagauuccuucuauguca

SEQ ID NO: 1690979 - RNA, 19 nt, Homo sapiens
  misc_RNA (1)...(19): siRNA sense strand
ucauaaagcugaccuugca

SEQ ID NO: 1690980 - RNA, 19 nt, Homo sapiens
  misc_RNA (1)...(19): siRNA sense strand
cagcgaacaucacagauuc

SEQ ID NO: 1690981 - RNA, 19 nt, Homo sapiens
  misc_RNA (1)...(19): siRNA sense strand
gguggcaucuucauuguuc

SEQ ID NO: 1690982 - RNA, 19 nt, Homo sapiens
  misc_RNA (1)...(19): siRNA sense strand
aaaccaagauagaauaugg

SEQ ID NO: 1690983 - RNA, 19 nt, Homo sapiens
  misc_RNA (1)...(19): siRNA sense strand
gaagagccuuauguccuuu

SEQ ID NO: 1690984 - RNA, 19 nt, Homo sapiens
  misc_RNA (1)...(19): siRNA sense strand
caaggaaccacacauguau

SEQ ID NO: 1690985 - RNA, 19 nt, Homo sapiens
  misc_RNA (1)...(19): siRNA sense strand
gcaaacugcauaugaugaa

SEQ ID NO: 1690986 - RNA, 19 nt, Homo sapiens
  misc_RNA (1)...(19): siRNA sense strand
uaugauacccagaagauaa

SEQ ID NO: 1690987 - RNA, 19 nt, Homo sapiens
  misc_RNA (1)...(19): siRNA sense strand
gaggaaggcaaacugcaua

SEQ ID NO: 1690988 - RNA, 19 nt, Homo sapiens
  misc_RNA (1)...(19): siRNA sense strand
uaacuuagccgccuuucug

SEQ ID NO: 1690989 - RNA, 19 nt, Homo sapiens
  misc_RNA (1)...(19): siRNA sense strand
uguauauucugcuggcuua

SEQ ID NO: 1690990 - RNA, 19 nt, Homo sapiens
  misc_RNA (1)...(19): siRNA sense strand
aaauuagacuuguggaaga

SEQ ID NO: 1690991 - RNA, 19 nt, Homo sapiens
  misc_RNA (1)...(19): siRNA sense strand
ucagagaguuaucuacaau

SEQ ID NO: 1690992 - RNA, 19 nt, Homo sapiens
  misc_RNA (1)...(19): siRNA sense strand
ccaagucuccuccaucauu

SEQ ID NO: 1690993 - RNA, 19 nt, Homo sapiens
  misc_RNA (1)...(19): siRNA sense strand
ucaaggaaccacacaugua

SEQ ID NO: 1690994 - RNA, 19 nt, Homo sapiens
  misc_RNA (1)...(19): siRNA sense strand
ugacaggguucagaauauu

SEQ ID NO: 1690995 - RNA, 19 nt, Homo sapiens
  misc_RNA (1)...(19): siRNA sense strand
ucaaagcuccaucaaggua

SEQ ID NO: 1690996 - RNA, 19 nt, Homo sapiens
  misc_RNA (1)...(19): siRNA sense strand
gcaagguucugagcucaug

SEQ ID NO: 1690997 - RNA, 19 nt, Homo sapiens
  misc_RNA (1)...(19): siRNA sense strand
gguauaaucuucgacucaa

SEQ ID NO: 1690998 - RNA, 19 nt, Homo sapiens
  misc_RNA (1)...(19): siRNA sense strand
caaggaguuucauguaauc

SEQ ID NO: 1690999 - RNA, 19 nt, Homo sapiens
  misc_RNA (1)...(19): siRNA sense strand
caagucuccuccaucauug

SEQ ID NO: 1691000 - RNA, 19 nt, Homo sapiens
  misc_RNA (1)...(19): siRNA sense strand
caagaaagccugugaucag

SEQ ID NO: 1691001 - RNA, 19 nt, Homo sapiens
  misc_RNA (1)...(19): siRNA sense strand
ugggaaugaugacagaaua

SEQ ID NO: 1691002 - RNA, 19 nt, Homo sapiens
  misc_RNA (1)...(19): siRNA sense strand
aaagcuccaucaagguaua

SEQ ID NO: 1691003 - RNA, 19 nt, Homo sapiens
  misc_RNA (1)...(19): siRNA sense strand
acaauggaauggaaugguu

SEQ ID NO: 1691004 - RNA, 19 nt, Homo sapiens
  misc_RNA (1)...(19): siRNA sense strand
gcagaauaacuuucaacaa

SEQ ID NO: 1691005 - RNA, 19 nt, Homo sapiens
  misc_RNA (1)...(19): siRNA sense strand
ucaguuccuugcaguguaa

SEQ ID NO: 1691006 - RNA, 19 nt, Homo sapiens
  misc_RNA (1)...(19): siRNA sense strand
gacaggguucagaauauua

SEQ ID NO: 1691007 - RNA, 19 nt, Homo sapiens
  misc_RNA (1)...(19): siRNA sense strand
gaaaagaggcaaggaguuu

SEQ ID NO: 1691008 - RNA, 19 nt, Homo sapiens
  misc_RNA (1)...(19): siRNA sense strand
ucacgguuguguaugauga

SEQ ID NO: 1691009 - RNA, 19 nt, Homo sapiens
  misc_RNA (1)...(19): siRNA sense strand
agaguuaucuacaauccuu

SEQ ID NO: 1691010 - RNA, 19 nt, Homo sapiens
  misc_RNA (1)...(19): siRNA sense strand
uaagaagucugacaaaccu

SEQ ID NO: 1691011 - RNA, 19 nt, Homo sapiens
  misc_RNA (1)...(19): siRNA sense strand
ggaaagccagcgaacauca

SEQ ID NO: 1691012 - RNA, 19 nt, Homo sapiens
  misc_RNA (1)...(19): siRNA sense strand
caugacaggguucagaaua

SEQ ID NO: 1691013 - RNA, 19 nt, Homo sapiens
  misc_RNA (1)...(19): siRNA sense strand
ccucuuugcucuugauguu

SEQ ID NO: 1691014 - RNA, 19 nt, Homo sapiens
  misc_RNA (1)...(19): siRNA sense strand
gaaugaugacagaauacua

SEQ ID NO: 1691015 - RNA, 19 nt, Homo sapiens
  misc_RNA (1)...(19): siRNA sense strand
aaccacacauguauuaaga

SEQ ID NO: 1691016 - RNA, 19 nt, Homo sapiens
  misc_RNA (1)...(19): siRNA sense strand
gcagccggcuuggugcuuu

SEQ ID NO: 1691017 - RNA, 19 nt, Homo sapiens
  misc_RNA (1)...(19): siRNA sense strand
ggucaaaaguaaugaagaa

SEQ ID NO: 1691018 - RNA, 19 nt, Homo sapiens
  misc_RNA (1)...(19): siRNA sense strand
caucacagauuccuuaucc

SEQ ID NO: 1691019 - RNA, 19 nt, Homo sapiens
  misc_RNA (1)...(19): siRNA sense strand
gacugaugcugcucuaaug

SEQ ID NO: 1691020 - RNA, 19 nt, Homo sapiens
  misc_RNA (1)...(19): siRNA sense strand
gaaccacacauguauuaag

SEQ ID NO: 1691021 - RNA, 19 nt, Homo sapiens
  misc_RNA (1)...(19): siRNA sense strand
ucacucagccgugccauuu

SEQ ID NO: 1691022 - RNA, 19 nt, Homo sapiens
  misc_RNA (1)...(19): siRNA sense strand
cagguuugcuggauggauu

SEQ ID NO: 1691023 - RNA, 19 nt, Homo sapiens
  misc_RNA (1)...(19): siRNA sense strand
ugaggaacuugcauucaga

SEQ ID NO: 1691024 - RNA, 19 nt, Homo sapiens
  misc_RNA (1)...(19): siRNA sense strand
acaaagauuccuucuaugu

SEQ ID NO: 1691025 - RNA, 19 nt, Homo sapiens
  misc_RNA (1)...(19): siRNA sense strand
gacaaaaugugggccuuua

SEQ ID NO: 1691026 - RNA, 19 nt, Homo sapiens
  misc_RNA (1)...(19): siRNA sense strand
gacaaaccucucuauggua

SEQ ID NO: 1691027 - RNA, 19 nt, Homo sapiens
  misc_RNA (1)...(19): siRNA sense strand
aaacaggcauuagcuaugg

SEQ ID NO: 1691028 - RNA, 19 nt, Homo sapiens
  misc_RNA (1)...(19): siRNA sense strand
guauaaucuucgacucaaa

SEQ ID NO: 1691029 - RNA, 19 nt, Homo sapiens
  misc_RNA (1)...(19): siRNA sense strand
ccaauacuacccuuaccua

SEQ ID NO: 1691030 - RNA, 19 nt, Homo sapiens
  misc_RNA (1)...(19): siRNA sense strand
ugaaggcuauugcauugau

SEQ ID NO: 1691031 - RNA, 19 nt, Homo sapiens
  misc_RNA (1)...(19): siRNA sense strand
ccagacuucucuucacuca

SEQ ID NO: 1691032 - RNA, 19 nt, Homo sapiens
  misc_RNA (1)...(19): siRNA sense strand
ccaucaagguauaaucuuc

SEQ ID NO: 1691033 - RNA, 19 nt, Homo sapiens
  misc_RNA (1)...(19): siRNA sense strand
cuaaacaaaccaagauaga

SEQ ID NO: 1691034 - RNA, 19 nt, Homo sapiens
  misc_RNA (1)...(19): siRNA sense strand
ucacacuuaucaucauuuc

SEQ ID NO: 1691035 - RNA, 19 nt, Homo sapiens
  misc_RNA (1)...(19): siRNA sense strand
uguggaagaugggaaauau

SEQ ID NO: 1691036 - RNA, 19 nt, Homo sapiens
  misc_RNA (1)...(19): siRNA sense strand
uuugaaggcuauugcauug

SEQ ID NO: 1691037 - RNA, 19 nt, Homo sapiens
  misc_RNA (1)...(19): siRNA sense strand
auacagugguguuaacaug

SEQ ID NO: 1691038 - RNA, 19 nt, Homo sapiens
  misc_RNA (1)...(19): siRNA sense strand
aggaaccacacauguauua

SEQ ID NO: 1691039 - RNA, 19 nt, Homo sapiens
  misc_RNA (1)...(19): siRNA sense strand
gcaagaggaaggcaaacug

SEQ ID NO: 1691040 - RNA, 19 nt, Homo sapiens
  misc_RNA (1)...(19): siRNA sense strand
gagcugaggaacuugcauu

SEQ ID NO: 1691041 - RNA, 19 nt, Homo sapiens
  misc_RNA (1)...(19): siRNA sense strand
ugcaagagcucaucaaagc

SEQ ID NO: 1691042 - RNA, 19 nt, Homo sapiens
  misc_RNA (1)...(19): siRNA sense strand
ggaccucuuugcucuugau

SEQ ID NO: 1691043 - RNA, 19 nt, Homo sapiens
  misc_RNA (1)...(19): siRNA sense strand
uguggaaucuggcccaaug

SEQ ID NO: 1691044 - RNA, 19 nt, Homo sapiens
  misc_RNA (1)...(19): siRNA sense strand
ggaauaccgucugguuaaa

SEQ ID NO: 1691045 - RNA, 19 nt, Homo sapiens
  misc_RNA (1)...(19): siRNA sense strand
gaacgugacccuccagugu

SEQ ID NO: 1691046 - RNA, 19 nt, Homo sapiens
  misc_RNA (1)...(19): siRNA sense strand
ggagauaccgcuguuacua

SEQ ID NO: 1691047 - RNA, 19 nt, Homo sapiens
  misc_RNA (1)...(19): siRNA sense strand
caacaaacccacccucuca

SEQ ID NO: 1691048 - RNA, 19 nt, Homo sapiens
  misc_RNA (1)...(19): siRNA sense strand
caggaauaccgucugguua

SEQ ID NO: 1691049 - RNA, 19 nt, Homo sapiens
  misc_RNA (1)...(19): siRNA sense strand
ccaagaacaaggccagauu

SEQ ID NO: 1691050 - RNA, 19 nt, Homo sapiens
  misc_RNA (1)...(19): siRNA sense strand
acagguggaugcucagaug

SEQ ID NO: 1691051 - RNA, 19 nt, Homo sapiens
  misc_RNA (1)...(19): siRNA sense strand
gguggaugcucagaugcua

SEQ ID NO: 1691052 - RNA, 19 nt, Homo sapiens
  misc_RNA (1)...(19): siRNA sense strand
aggaauaccgucugguuaa

SEQ ID NO: 1691053 - RNA, 19 nt, Homo sapiens
  misc_RNA (1)...(19): siRNA sense strand
caagaacaaggccagauuc

SEQ ID NO: 1691054 - RNA, 19 nt, Homo sapiens
  misc_RNA (1)...(19): siRNA sense strand
aauaccgucugguuaaaga

SEQ ID NO: 1691055 - RNA, 19 nt, Homo sapiens
  misc_RNA (1)...(19): siRNA sense strand
guggugaccucaggagaga

SEQ ID NO: 1691056 - RNA, 19 nt, Homo sapiens
  misc_RNA (1)...(19): siRNA sense strand
gagauucgacagguucauu

SEQ ID NO: 1691057 - RNA, 19 nt, Homo sapiens
  misc_RNA (1)...(19): siRNA sense strand
acagguucauucugacuga

SEQ ID NO: 1691058 - RNA, 19 nt, Homo sapiens
  misc_RNA (1)...(19): siRNA sense strand
gagauaccgcuguuacuac

SEQ ID NO: 1691059 - RNA, 19 nt, Homo sapiens
  misc_RNA (1)...(19): siRNA sense strand
aggcauauccugcagguau

SEQ ID NO: 1691060 - RNA, 19 nt, Homo sapiens
  misc_RNA (1)...(19): siRNA sense strand
uucgacagguucauucuga

SEQ ID NO: 1691061 - RNA, 19 nt, Homo sapiens
  misc_RNA (1)...(19): siRNA sense strand
uaaagagggaagcccagaa

SEQ ID NO: 1691062 - RNA, 19 nt, Homo sapiens
  misc_RNA (1)...(19): siRNA sense strand
cacuggagcccaagaacaa

SEQ ID NO: 1691063 - RNA, 19 nt, Homo sapiens
  misc_RNA (1)...(19): siRNA sense strand
gcccugcccucaugguucu

SEQ ID NO: 1691064 - RNA, 19 nt, Homo sapiens
  misc_RNA (1)...(19): siRNA sense strand
gaauaccgucugguuaaag

SEQ ID NO: 1691065 - RNA, 19 nt, Homo sapiens
  misc_RNA (1)...(19): siRNA sense strand
ccacuggagcccaagaaca

SEQ ID NO: 1691066 - RNA, 19 nt, Homo sapiens
  misc_RNA (1)...(19): siRNA sense strand
gagcccugcccucaugguu

SEQ ID NO: 1691067 - RNA, 19 nt, Homo sapiens
  misc_RNA (1)...(19): siRNA sense strand
agauaccgcuguuacuacu

SEQ ID NO: 1691068 - RNA, 19 nt, Homo sapiens
  misc_RNA (1)...(19): siRNA sense strand
ggaauaccgucugguuaaa

SEQ ID NO: 1691069 - RNA, 19 nt, Homo sapiens
  misc_RNA (1)...(19): siRNA sense strand
gaacgugacccuccagugu

SEQ ID NO: 1691070 - RNA, 19 nt, Homo sapiens
  misc_RNA (1)...(19): siRNA sense strand
ggagauaccgcuguuacua

SEQ ID NO: 1691071 - RNA, 19 nt, Homo sapiens
  misc_RNA (1)...(19): siRNA sense strand
caacaaacccacccucuca

SEQ ID NO: 1691072 - RNA, 19 nt, Homo sapiens
  misc_RNA (1)...(19): siRNA sense strand
caggaauaccgucugguua

SEQ ID NO: 1691073 - RNA, 19 nt, Homo sapiens
  misc_RNA (1)...(19): siRNA sense strand
ccaagaacaaggccagauu

SEQ ID NO: 1691074 - RNA, 19 nt, Homo sapiens
  misc_RNA (1)...(19): siRNA sense strand
acagguggaugcucagaug

SEQ ID NO: 1691075 - RNA, 19 nt, Homo sapiens
  misc_RNA (1)...(19): siRNA sense strand
gguggaugcucagaugcua

SEQ ID NO: 1691076 - RNA, 19 nt, Homo sapiens
  misc_RNA (1)...(19): siRNA sense strand
aggaauaccgucugguuaa

SEQ ID NO: 1691077 - RNA, 19 nt, Homo sapiens
  misc_RNA (1)...(19): siRNA sense strand
caagaacaaggccagauuc

SEQ ID NO: 1691078 - RNA, 19 nt, Homo sapiens
  misc_RNA (1)...(19): siRNA sense strand
aauaccgucugguuaaaga

SEQ ID NO: 1691079 - RNA, 19 nt, Homo sapiens
  misc_RNA (1)...(19): siRNA sense strand
guggugaccucaggagaga

SEQ ID NO: 1691080 - RNA, 19 nt, Homo sapiens
  misc_RNA (1)...(19): siRNA sense strand
gagauucgacagguucauu

SEQ ID NO: 1691081 - RNA, 19 nt, Homo sapiens
  misc_RNA (1)...(19): siRNA sense strand
acagguucauucugacuga

SEQ ID NO: 1691082 - RNA, 19 nt, Homo sapiens
  misc_RNA (1)...(19): siRNA sense strand
gagauaccgcuguuacuac

SEQ ID NO: 1691083 - RNA, 19 nt, Homo sapiens
  misc_RNA (1)...(19): siRNA sense strand
aggcauauccugcagguau

SEQ ID NO: 1691084 - RNA, 19 nt, Homo sapiens
  misc_RNA (1)...(19): siRNA sense strand
uucgacagguucauucuga

SEQ ID NO: 1691085 - RNA, 19 nt, Homo sapiens
  misc_RNA (1)...(19): siRNA sense strand
uaaagagggaagcccagaa

SEQ ID NO: 1691086 - RNA, 19 nt, Homo sapiens
  misc_RNA (1)...(19): siRNA sense strand
cacuggagcccaagaacaa

SEQ ID NO: 1691087 - RNA, 19 nt, Homo sapiens
  misc_RNA (1)...(19): siRNA sense strand
gcccugcccucaugguucu

SEQ ID NO: 1691088 - RNA, 19 nt, Homo sapiens
  misc_RNA (1)...(19): siRNA sense strand
gaauaccgucugguuaaag

SEQ ID NO: 1691089 - RNA, 19 nt, Homo sapiens
  misc_RNA (1)...(19): siRNA sense strand
ccacuggagcccaagaaca

SEQ ID NO: 1691090 - RNA, 19 nt, Homo sapiens
  misc_RNA (1)...(19): siRNA sense strand
gagcccugcccucaugguu

SEQ ID NO: 1691091 - RNA, 19 nt, Homo sapiens
  misc_RNA (1)...(19): siRNA sense strand
agauaccgcuguuacuacu

SEQ ID NO: 1691092 - RNA, 19 nt, Homo sapiens
  misc_RNA (1)...(19): siRNA sense strand
ggaauaccgucugguuaaa

SEQ ID NO: 1691093 - RNA, 19 nt, Homo sapiens
  misc_RNA (1)...(19): siRNA sense strand
gaacgugacccuccagugu

SEQ ID NO: 1691094 - RNA, 19 nt, Homo sapiens
  misc_RNA (1)...(19): siRNA sense strand
ggagauaccgcuguuacua

SEQ ID NO: 1691095 - RNA, 19 nt, Homo sapiens
  misc_RNA (1)...(19): siRNA sense strand
caacaaacccacccucuca

SEQ ID NO: 1691096 - RNA, 19 nt, Homo sapiens
  misc_RNA (1)...(19): siRNA sense strand
caggaauaccgucugguua

SEQ ID NO: 1691097 - RNA, 19 nt, Homo sapiens
  misc_RNA (1)...(19): siRNA sense strand
ccaagaacaaggccagauu

SEQ ID NO: 1691098 - RNA, 19 nt, Homo sapiens
  misc_RNA (1)...(19): siRNA sense strand
acagguggaugcucagaug

SEQ ID NO: 1691099 - RNA, 19 nt, Homo sapiens
  misc_RNA (1)...(19): siRNA sense strand
gguggaugcucagaugcua

SEQ ID NO: 1691100 - RNA, 19 nt, Homo sapiens
  misc_RNA (1)...(19): siRNA sense strand
aggaauaccgucugguuaa

SEQ ID NO: 1691101 - RNA, 19 nt, Homo sapiens
  misc_RNA (1)...(19): siRNA sense strand
caagaacaaggccagauuc

SEQ ID NO: 1691102 - RNA, 19 nt, Homo sapiens
  misc_RNA (1)...(19): siRNA sense strand
aauaccgucugguuaaaga

SEQ ID NO: 1691103 - RNA, 19 nt, Homo sapiens
  misc_RNA (1)...(19): siRNA sense strand
guggugaccucaggagaga

SEQ ID NO: 1691104 - RNA, 19 nt, Homo sapiens
  misc_RNA (1)...(19): siRNA sense strand
gagauucgacagguucauu

SEQ ID NO: 1691105 - RNA, 19 nt, Homo sapiens
  misc_RNA (1)...(19): siRNA sense strand
acagguucauucugacuga

SEQ ID NO: 1691106 - RNA, 19 nt, Homo sapiens
  misc_RNA (1)...(19): siRNA sense strand
gagauaccgcuguuacuac

SEQ ID NO: 1691107 - RNA, 19 nt, Homo sapiens
  misc_RNA (1)...(19): siRNA sense strand
aggcauauccugcagguau

SEQ ID NO: 1691108 - RNA, 19 nt, Homo sapiens
  misc_RNA (1)...(19): siRNA sense strand
uucgacagguucauucuga

SEQ ID NO: 1691109 - RNA, 19 nt, Homo sapiens
  misc_RNA (1)...(19): siRNA sense strand
uaaagagggaagcccagaa

SEQ ID NO: 1691110 - RNA, 19 nt, Homo sapiens
  misc_RNA (1)...(19): siRNA sense strand
cacuggagcccaagaacaa

SEQ ID NO: 1691111 - RNA, 19 nt, Homo sapiens
  misc_RNA (1)...(19): siRNA sense strand
gcccugcccucaugguucu

SEQ ID NO: 1691112 - RNA, 19 nt, Homo sapiens
  misc_RNA (1)...(19): siRNA sense strand
gaauaccgucugguuaaag

SEQ ID NO: 1691113 - RNA, 19 nt, Homo sapiens
  misc_RNA (1)...(19): siRNA sense strand
ccacuggagcccaagaaca

SEQ ID NO: 1691114 - RNA, 19 nt, Homo sapiens
  misc_RNA (1)...(19): siRNA sense strand
gagcccugcccucaugguu

SEQ ID NO: 1691115 - RNA, 19 nt, Homo sapiens
  misc_RNA (1)...(19): siRNA sense strand
agauaccgcuguuacuacu

SEQ ID NO: 1691116 - RNA, 19 nt, Homo sapiens
  misc_RNA (1)...(19): siRNA sense strand
ggaauaccgucugguuaaa

SEQ ID NO: 1691117 - RNA, 19 nt, Homo sapiens
  misc_RNA (1)...(19): siRNA sense strand
gaacgugacccuccagugu

SEQ ID NO: 1691118 - RNA, 19 nt, Homo sapiens
  misc_RNA (1)...(19): siRNA sense strand
ggagauaccgcuguuacua

SEQ ID NO: 1691119 - RNA, 19 nt, Homo sapiens
  misc_RNA (1)...(19): siRNA sense strand
caacaaacccacccucuca

SEQ ID NO: 1691120 - RNA, 19 nt, Homo sapiens
  misc_RNA (1)...(19): siRNA sense strand
caggaauaccgucugguua

SEQ ID NO: 1691121 - RNA, 19 nt, Homo sapiens
  misc_RNA (1)...(19): siRNA sense strand
ccaagaacaaggccagauu

SEQ ID NO: 1691122 - RNA, 19 nt, Homo sapiens
  misc_RNA (1)...(19): siRNA sense strand
acagguggaugcucagaug

SEQ ID NO: 1691123 - RNA, 19 nt, Homo sapiens
  misc_RNA (1)...(19): siRNA sense strand
gguggaugcucagaugcua

SEQ ID NO: 1691124 - RNA, 19 nt, Homo sapiens
  misc_RNA (1)...(19): siRNA sense strand
aggaauaccgucugguuaa

SEQ ID NO: 1691125 - RNA, 19 nt, Homo sapiens
  misc_RNA (1)...(19): siRNA sense strand
caagaacaaggccagauuc

SEQ ID NO: 1691126 - RNA, 19 nt, Homo sapiens
  misc_RNA (1)...(19): siRNA sense strand
aauaccgucugguuaaaga

SEQ ID NO: 1691127 - RNA, 19 nt, Homo sapiens
  misc_RNA (1)...(19): siRNA sense strand
guggugaccucaggagaga

SEQ ID NO: 1691128 - RNA, 19 nt, Homo sapiens
  misc_RNA (1)...(19): siRNA sense strand
gagauucgacagguucauu

SEQ ID NO: 1691129 - RNA, 19 nt, Homo sapiens
  misc_RNA (1)...(19): siRNA sense strand
acagguucauucugacuga

SEQ ID NO: 1691130 - RNA, 19 nt, Homo sapiens
  misc_RNA (1)...(19): siRNA sense strand
gagauaccgcuguuacuac

SEQ ID NO: 1691131 - RNA, 19 nt, Homo sapiens
  misc_RNA (1)...(19): siRNA sense strand
aggcauauccugcagguau

SEQ ID NO: 1691132 - RNA, 19 nt, Homo sapiens
  misc_RNA (1)...(19): siRNA sense strand
uucgacagguucauucuga

SEQ ID NO: 1691133 - RNA, 19 nt, Homo sapiens
  misc_RNA (1)...(19): siRNA sense strand
uaaagagggaagcccagaa

SEQ ID NO: 1691134 - RNA, 19 nt, Homo sapiens
  misc_RNA (1)...(19): siRNA sense strand
cacuggagcccaagaacaa

SEQ ID NO: 1691135 - RNA, 19 nt, Homo sapiens
  misc_RNA (1)...(19): siRNA sense strand
gcccugcccucaugguucu

SEQ ID NO: 1691136 - RNA, 19 nt, Homo sapiens
  misc_RNA (1)...(19): siRNA sense strand
gaauaccgucugguuaaag

SEQ ID NO: 1691137 - RNA, 19 nt, Homo sapiens
  misc_RNA (1)...(19): siRNA sense strand
ccacuggagcccaagaaca

SEQ ID NO: 1691138 - RNA, 19 nt, Homo sapiens
  misc_RNA (1)...(19): siRNA sense strand
gagcccugcccucaugguu

SEQ ID NO: 1691139 - RNA, 19 nt, Homo sapiens
  misc_RNA (1)...(19): siRNA sense strand
agauaccgcuguuacuacu

SEQ ID NO: 1691140 - RNA, 19 nt, Homo sapiens
  misc_RNA (1)...(19): siRNA sense strand
gaacaucucuucuuucaga

SEQ ID NO: 1691141 - RNA, 19 nt, Homo sapiens
  misc_RNA (1)...(19): siRNA sense strand
gaaggacucuccauucuau

SEQ ID NO: 1691142 - RNA, 19 nt, Homo sapiens
  misc_RNA (1)...(19): siRNA sense strand
ggaaauaacagcucugaaa

SEQ ID NO: 1691143 - RNA, 19 nt, Homo sapiens
  misc_RNA (1)...(19): siRNA sense strand
gcagaagaguucacagaaa

SEQ ID NO: 1691144 - RNA, 19 nt, Homo sapiens
  misc_RNA (1)...(19): siRNA sense strand
gaagccagcuacaucauga

SEQ ID NO: 1691145 - RNA, 19 nt, Homo sapiens
  misc_RNA (1)...(19): siRNA sense strand
gaugaaagaucccaagaag

SEQ ID NO: 1691146 - RNA, 19 nt, Homo sapiens
  misc_RNA (1)...(19): siRNA sense strand
cauagacccucuucaguuu

SEQ ID NO: 1691147 - RNA, 19 nt, Homo sapiens
  misc_RNA (1)...(19): siRNA sense strand
ugagauaucuaggagaaua

SEQ ID NO: 1691148 - RNA, 19 nt, Homo sapiens
  misc_RNA (1)...(19): siRNA sense strand
gaauggaggagaacuguuu

SEQ ID NO: 1691149 - RNA, 19 nt, Homo sapiens
  misc_RNA (1)...(19): siRNA sense strand
gcugagauaucuaggagaa

SEQ ID NO: 1691150 - RNA, 19 nt, Homo sapiens
  misc_RNA (1)...(19): siRNA sense strand
cagaagaguucacagaaau

SEQ ID NO: 1691151 - RNA, 19 nt, Homo sapiens
  misc_RNA (1)...(19): siRNA sense strand
gaacuggagcuuauggaaa

SEQ ID NO: 1691152 - RNA, 19 nt, Homo sapiens
  misc_RNA (1)...(19): siRNA sense strand
ggagugcaaugaugaagga

SEQ ID NO: 1691153 - RNA, 19 nt, Homo sapiens
  misc_RNA (1)...(19): siRNA sense strand
ggaaagcuguaugccauga

SEQ ID NO: 1691154 - RNA, 19 nt, Homo sapiens
  misc_RNA (1)...(19): siRNA sense strand
gaauacauggcaccagaua

SEQ ID NO: 1691155 - RNA, 19 nt, Homo sapiens
  misc_RNA (1)...(19): siRNA sense strand
gaaauggaucccacuuauu

SEQ ID NO: 1691156 - RNA, 19 nt, Homo sapiens
  misc_RNA (1)...(19): siRNA sense strand
agaaauggaucccacuuau

SEQ ID NO: 1691157 - RNA, 19 nt, Homo sapiens
  misc_RNA (1)...(19): siRNA sense strand
gaguuuggguguucuaaug

SEQ ID NO: 1691158 - RNA, 19 nt, Homo sapiens
  misc_RNA (1)...(19): siRNA sense strand
agcaugaggugcagauuua

SEQ ID NO: 1691159 - RNA, 19 nt, Homo sapiens
  misc_RNA (1)...(19): siRNA sense strand
ucgaacaucuccacaaguu

SEQ ID NO: 1691160 - RNA, 19 nt, Homo sapiens
  misc_RNA (1)...(19): siRNA sense strand
aaagagagcguuucacaga

SEQ ID NO: 1691161 - RNA, 19 nt, Homo sapiens
  misc_RNA (1)...(19): siRNA sense strand
gagcaucuccuuucacugu

SEQ ID NO: 1691162 - RNA, 19 nt, Homo sapiens
  misc_RNA (1)...(19): siRNA sense strand
cagaugaaaucaaagaaca

SEQ ID NO: 1691163 - RNA, 19 nt, Homo sapiens
  misc_RNA (1)...(19): siRNA sense strand
cgagaugaauuagauguga

SEQ ID NO: 1691164 - RNA, 19 nt, Homo sapiens
  misc_RNA (1)...(19): siRNA sense strand
ccuaggaacuggagcuuau

SEQ ID NO: 1691165 - RNA, 19 nt, Homo sapiens
  misc_RNA (1)...(19): siRNA sense strand
gagcaugaggugcagauuu

SEQ ID NO: 1691166 - RNA, 19 nt, Homo sapiens
  misc_RNA (1)...(19): siRNA sense strand
gaaaccaaacuucaucuca

SEQ ID NO: 1691167 - RNA, 19 nt, Homo sapiens
  misc_RNA (1)...(19): siRNA sense strand
uauaaaugguggugaacuu

SEQ ID NO: 1691168 - RNA, 19 nt, Homo sapiens
  misc_RNA (1)...(19): siRNA sense strand
ugauggaacuucugaaugg

SEQ ID NO: 1691169 - RNA, 19 nt, Homo sapiens
  misc_RNA (1)...(19): siRNA sense strand
ugaaagaucccaagaagag

SEQ ID NO: 1691170 - RNA, 19 nt, Homo sapiens
  misc_RNA (1)...(19): siRNA sense strand
gagaaggugggaauagaaa

SEQ ID NO: 1691171 - RNA, 19 nt, Homo sapiens
  misc_RNA (1)...(19): siRNA sense strand
gaugaaggacucuccauuc

SEQ ID NO: 1691172 - RNA, 19 nt, Homo sapiens
  misc_RNA (1)...(19): siRNA sense strand
gaaauaacagcucugaaac

SEQ ID NO: 1691173 - RNA, 19 nt, Homo sapiens
  misc_RNA (1)...(19): siRNA sense strand
cagaaauggaucccacuua

SEQ ID NO: 1691174 - RNA, 19 nt, Homo sapiens
  misc_RNA (1)...(19): siRNA sense strand
ugaguaacuuugcagaaga

SEQ ID NO: 1691175 - RNA, 19 nt, Homo sapiens
  misc_RNA (1)...(19): siRNA sense strand
ccagcuacaucaugaggaa

SEQ ID NO: 1691176 - RNA, 19 nt, Homo sapiens
  misc_RNA (1)...(19): siRNA sense strand
gcugcggacugcuaauuug

SEQ ID NO: 1691177 - RNA, 19 nt, Homo sapiens
  misc_RNA (1)...(19): siRNA sense strand
gacaggacaugcugagaag

SEQ ID NO: 1691178 - RNA, 19 nt, Homo sapiens
  misc_RNA (1)...(19): siRNA sense strand
gaacuguuugagcgcauua

SEQ ID NO: 1691179 - RNA, 19 nt, Homo sapiens
  misc_RNA (1)...(19): siRNA sense strand
aaugagugcuuuagcgaaa

SEQ ID NO: 1691180 - RNA, 19 nt, Homo sapiens
  misc_RNA (1)...(19): siRNA sense strand
aaaccaaacuucaucucau

SEQ ID NO: 1691181 - RNA, 19 nt, Homo sapiens
  misc_RNA (1)...(19): siRNA sense strand
aaauggaucccacuuauuc

SEQ ID NO: 1691182 - RNA, 19 nt, Homo sapiens
  misc_RNA (1)...(19): siRNA sense strand
aaccaaacuucaucucauu

SEQ ID NO: 1691183 - RNA, 19 nt, Homo sapiens
  misc_RNA (1)...(19): siRNA sense strand
aaagcuguaugccaugaaa

SEQ ID NO: 1691184 - RNA, 19 nt, Homo sapiens
  misc_RNA (1)...(19): siRNA sense strand
gaaggacaccccaauauug

SEQ ID NO: 1691185 - RNA, 19 nt, Homo sapiens
  misc_RNA (1)...(19): siRNA sense strand
gauuuauguuggagagauu

SEQ ID NO: 1691186 - RNA, 19 nt, Homo sapiens
  misc_RNA (1)...(19): siRNA sense strand
uaaugcagcugucauagac

SEQ ID NO: 1691187 - RNA, 19 nt, Homo sapiens
  misc_RNA (1)...(19): siRNA sense strand
gcacagggaucugaaaccu

SEQ ID NO: 1691188 - RNA, 19 nt, Homo sapiens
  misc_RNA (1)...(19): siRNA sense strand
acuaugaccuagauuugaa

SEQ ID NO: 1691189 - RNA, 19 nt, Homo sapiens
  misc_RNA (1)...(19): siRNA sense strand
ucaaagagagcguuucaca

SEQ ID NO: 1691190 - RNA, 19 nt, Homo sapiens
  misc_RNA (1)...(19): siRNA sense strand
gauggaagccaauacucaa

SEQ ID NO: 1691191 - RNA, 19 nt, Homo sapiens
  misc_RNA (1)...(19): siRNA sense strand
ucauagacccucuucaguu

SEQ ID NO: 1691192 - RNA, 19 nt, Homo sapiens
  misc_RNA (1)...(19): siRNA sense strand
guaaugcagcugucauaga

SEQ ID NO: 1691193 - RNA, 19 nt, Homo sapiens
  misc_RNA (1)...(19): siRNA sense strand
ggaacuggagcuuauggaa

SEQ ID NO: 1691194 - RNA, 19 nt, Homo sapiens
  misc_RNA (1)...(19): siRNA sense strand
auacauggcaccagauauu

SEQ ID NO: 1691195 - RNA, 19 nt, Homo sapiens
  misc_RNA (1)...(19): siRNA sense strand
ggauggaagccaauacuca

SEQ ID NO: 1691196 - RNA, 19 nt, Homo sapiens
  misc_RNA (1)...(19): siRNA sense strand
uaaaauaaguggccaugau

SEQ ID NO: 1691197 - RNA, 19 nt, Homo sapiens
  misc_RNA (1)...(19): siRNA sense strand
ucagggcuauuccuuuguu

SEQ ID NO: 1691198 - RNA, 19 nt, Homo sapiens
  misc_RNA (1)...(19): siRNA sense strand
ccaagaaaugagugcuuua

SEQ ID NO: 1691199 - RNA, 19 nt, Homo sapiens
  misc_RNA (1)...(19): siRNA sense strand
ggacaugacaaggcaguug

SEQ ID NO: 1691200 - RNA, 19 nt, Homo sapiens
  misc_RNA (1)...(19): siRNA sense strand
gugaguaacuuugcagaag

SEQ ID NO: 1691201 - RNA, 19 nt, Homo sapiens
  misc_RNA (1)...(19): siRNA sense strand
aagaagagauugggaugug

SEQ ID NO: 1691202 - RNA, 19 nt, Homo sapiens
  misc_RNA (1)...(19): siRNA sense strand
cccaagaaaugagugcuuu

SEQ ID NO: 1691203 - RNA, 19 nt, Homo sapiens
  misc_RNA (1)...(19): siRNA sense strand
gacaaguccuggaacacau

SEQ ID NO: 1691204 - RNA, 19 nt, Homo sapiens
  misc_RNA (1)...(19): siRNA sense strand
ugucgaaagugugugcaua

SEQ ID NO: 1691205 - RNA, 19 nt, Homo sapiens
  misc_RNA (1)...(19): siRNA sense strand
ucaacacuaugaccuagau

SEQ ID NO: 1691206 - RNA, 19 nt, Homo sapiens
  misc_RNA (1)...(19): siRNA sense strand
uuucagggcuauuccuuug

SEQ ID NO: 1691207 - RNA, 19 nt, Homo sapiens
  misc_RNA (1)...(19): siRNA sense strand
gcaucuccuuucacuguug

SEQ ID NO: 1691208 - RNA, 19 nt, Homo sapiens
  misc_RNA (1)...(19): siRNA sense strand
ugacaggacaugcugagaa

SEQ ID NO: 1691209 - RNA, 19 nt, Homo sapiens
  misc_RNA (1)...(19): siRNA sense strand
gaaacugaaagagcauauu

SEQ ID NO: 1691210 - RNA, 19 nt, Homo sapiens
  misc_RNA (1)...(19): siRNA sense strand
agacagaaaccaaacuuca

SEQ ID NO: 1691211 - RNA, 19 nt, Homo sapiens
  misc_RNA (1)...(19): siRNA sense strand
gcguaaugcagcugucaua

SEQ ID NO: 1691212 - RNA, 19 nt, Homo sapiens
  misc_RNA (1)...(19): siRNA sense strand
guuuggguguucuaaugua

SEQ ID NO: 1691213 - RNA, 19 nt, Homo sapiens
  misc_RNA (1)...(19): siRNA sense strand
aaacugaaagagcauauuc

SEQ ID NO: 1691214 - RNA, 19 nt, Homo sapiens
  misc_RNA (1)...(19): siRNA sense strand
ggaagccagcuacaucaug

SEQ ID NO: 1691215 - RNA, 19 nt, Homo sapiens
  misc_RNA (1)...(19): siRNA sense strand
aauaacagcucugaaacuc

SEQ ID NO: 1691216 - RNA, 19 nt, Homo sapiens
  misc_RNA (1)...(19): siRNA sense strand
ugaauuagaugugaguaac

SEQ ID NO: 1691217 - RNA, 19 nt, Homo sapiens
  misc_RNA (1)...(19): siRNA sense strand
gaaaucaaagaacaucucu

SEQ ID NO: 1691218 - RNA, 19 nt, Homo sapiens
  misc_RNA (1)...(19): siRNA sense strand
gaaagaucccaagaagaga

SEQ ID NO: 1691219 - RNA, 19 nt, Homo sapiens
  misc_RNA (1)...(19): siRNA sense strand
gaccuaauucagcgucuuu

SEQ ID NO: 1691220 - RNA, 19 nt, Homo sapiens
  misc_RNA (1)...(19): siRNA sense strand
gagcugcggacugcuaauu

SEQ ID NO: 1691221 - RNA, 19 nt, Homo sapiens
  misc_RNA (1)...(19): siRNA sense strand
gauggaacuucugaaugga

SEQ ID NO: 1691222 - RNA, 19 nt, Homo sapiens
  misc_RNA (1)...(19): siRNA sense strand
augaucagcuucacacguu

SEQ ID NO: 1691223 - RNA, 19 nt, Homo sapiens
  misc_RNA (1)...(19): siRNA sense strand
ucgaaagugugugcauaaa

SEQ ID NO: 1691224 - RNA, 19 nt, Homo sapiens
  misc_RNA (1)...(19): siRNA sense strand
ugaaggacucuccauucua

SEQ ID NO: 1691225 - RNA, 19 nt, Homo sapiens
  misc_RNA (1)...(19): siRNA sense strand
caaguccuggaacacauua

SEQ ID NO: 1691226 - RNA, 19 nt, Homo sapiens
  misc_RNA (1)...(19): siRNA sense strand
gaagaguucacagaaaugg

SEQ ID NO: 1691227 - RNA, 19 nt, Homo sapiens
  misc_RNA (1)...(19): siRNA sense strand
gaggugcagauuuauguug

SEQ ID NO: 1691228 - RNA, 19 nt, Homo sapiens
  misc_RNA (1)...(19): siRNA sense strand
ccaauauugugaaguugca

SEQ ID NO: 1691229 - RNA, 19 nt, Homo sapiens
  misc_RNA (1)...(19): siRNA sense strand
guccuggagugacaaaugu

SEQ ID NO: 1691230 - RNA, 19 nt, Homo sapiens
  misc_RNA (1)...(19): siRNA sense strand
gaagcuguuucagggcuau

SEQ ID NO: 1691231 - RNA, 19 nt, Homo sapiens
  misc_RNA (1)...(19): siRNA sense strand
gaguaacuuugcagaagag

SEQ ID NO: 1691232 - RNA, 19 nt, Homo sapiens
  misc_RNA (1)...(19): siRNA sense strand
aaagugagccuccauaucc

SEQ ID NO: 1691233 - RNA, 19 nt, Homo sapiens
  misc_RNA (1)...(19): siRNA sense strand
gccauguggugcugacaga

SEQ ID NO: 1691234 - RNA, 19 nt, Homo sapiens
  misc_RNA (1)...(19): siRNA sense strand
ccucgaacaucuccacaag

SEQ ID NO: 1691235 - RNA, 19 nt, Homo sapiens
  misc_RNA (1)...(19): siRNA sense strand
gagcauacaaggacagaac

SEQ ID NO: 1691236 - RNA, 19 nt, Homo sapiens
  misc_RNA (1)...(19): siRNA sense strand
gcucugaaacucugugaag

SEQ ID NO: 1691237 - RNA, 19 nt, Homo sapiens
  misc_RNA (1)...(19): siRNA sense strand
caagaaaugagugcuuuag

SEQ ID NO: 1691238 - RNA, 19 nt, Homo sapiens
  misc_RNA (1)...(19): siRNA sense strand
gacaugacaaggcaguuga

SEQ ID NO: 1691239 - RNA, 19 nt, Homo sapiens
  misc_RNA (1)...(19): siRNA sense strand
guaagccacaugcaugaug

SEQ ID NO: 1691240 - RNA, 19 nt, Homo sapiens
  misc_RNA (1)...(19): siRNA sense strand
gaacaucucuucuuucaga

SEQ ID NO: 1691241 - RNA, 19 nt, Homo sapiens
  misc_RNA (1)...(19): siRNA sense strand
gaaggacucuccauucuau

SEQ ID NO: 1691242 - RNA, 19 nt, Homo sapiens
  misc_RNA (1)...(19): siRNA sense strand
ggaaauaacagcucugaaa

SEQ ID NO: 1691243 - RNA, 19 nt, Homo sapiens
  misc_RNA (1)...(19): siRNA sense strand
gcagaagaguucacagaaa

SEQ ID NO: 1691244 - RNA, 19 nt, Homo sapiens
  misc_RNA (1)...(19): siRNA sense strand
gaagccagcuacaucauga

SEQ ID NO: 1691245 - RNA, 19 nt, Homo sapiens
  misc_RNA (1)...(19): siRNA sense strand
gaugaaagaucccaagaag

SEQ ID NO: 1691246 - RNA, 19 nt, Homo sapiens
  misc_RNA (1)...(19): siRNA sense strand
cauagacccucuucaguuu

SEQ ID NO: 1691247 - RNA, 19 nt, Homo sapiens
  misc_RNA (1)...(19): siRNA sense strand
ugagauaucuaggagaaua

SEQ ID NO: 1691248 - RNA, 19 nt, Homo sapiens
  misc_RNA (1)...(19): siRNA sense strand
gaauggaggagaacuguuu

SEQ ID NO: 1691249 - RNA, 19 nt, Homo sapiens
  misc_RNA (1)...(19): siRNA sense strand
gcugagauaucuaggagaa

SEQ ID NO: 1691250 - RNA, 19 nt, Homo sapiens
  misc_RNA (1)...(19): siRNA sense strand
cagaagaguucacagaaau

SEQ ID NO: 1691251 - RNA, 19 nt, Homo sapiens
  misc_RNA (1)...(19): siRNA sense strand
gaacuggagcuuauggaaa

SEQ ID NO: 1691252 - RNA, 19 nt, Homo sapiens
  misc_RNA (1)...(19): siRNA sense strand
ggagugcaaugaugaagga

SEQ ID NO: 1691253 - RNA, 19 nt, Homo sapiens
  misc_RNA (1)...(19): siRNA sense strand
ggaaagcuguaugccauga

SEQ ID NO: 1691254 - RNA, 19 nt, Homo sapiens
  misc_RNA (1)...(19): siRNA sense strand
gaauacauggcaccagaua

SEQ ID NO: 1691255 - RNA, 19 nt, Homo sapiens
  misc_RNA (1)...(19): siRNA sense strand
gaaauggaucccacuuauu

SEQ ID NO: 1691256 - RNA, 19 nt, Homo sapiens
  misc_RNA (1)...(19): siRNA sense strand
agaaauggaucccacuuau

SEQ ID NO: 1691257 - RNA, 19 nt, Homo sapiens
  misc_RNA (1)...(19): siRNA sense strand
gaguuuggguguucuaaug

SEQ ID NO: 1691258 - RNA, 19 nt, Homo sapiens
  misc_RNA (1)...(19): siRNA sense strand
agcaugaggugcagauuua

SEQ ID NO: 1691259 - RNA, 19 nt, Homo sapiens
  misc_RNA (1)...(19): siRNA sense strand
ucgaacaucuccacaaguu

SEQ ID NO: 1691260 - RNA, 19 nt, Homo sapiens
  misc_RNA (1)...(19): siRNA sense strand
aaagagagcguuucacaga

SEQ ID NO: 1691261 - RNA, 19 nt, Homo sapiens
  misc_RNA (1)...(19): siRNA sense strand
gagcaucuccuuucacugu

SEQ ID NO: 1691262 - RNA, 19 nt, Homo sapiens
  misc_RNA (1)...(19): siRNA sense strand
cagaugaaaucaaagaaca

SEQ ID NO: 1691263 - RNA, 19 nt, Homo sapiens
  misc_RNA (1)...(19): siRNA sense strand
cgagaugaauuagauguga

SEQ ID NO: 1691264 - RNA, 19 nt, Homo sapiens
  misc_RNA (1)...(19): siRNA sense strand
ccuaggaacuggagcuuau

SEQ ID NO: 1691265 - RNA, 19 nt, Homo sapiens
  misc_RNA (1)...(19): siRNA sense strand
gagcaugaggugcagauuu

SEQ ID NO: 1691266 - RNA, 19 nt, Homo sapiens
  misc_RNA (1)...(19): siRNA sense strand
gaaaccaaacuucaucuca

SEQ ID NO: 1691267 - RNA, 19 nt, Homo sapiens
  misc_RNA (1)...(19): siRNA sense strand
uauaaaugguggugaacuu

SEQ ID NO: 1691268 - RNA, 19 nt, Homo sapiens
  misc_RNA (1)...(19): siRNA sense strand
ugauggaacuucugaaugg

SEQ ID NO: 1691269 - RNA, 19 nt, Homo sapiens
  misc_RNA (1)...(19): siRNA sense strand
ugaaagaucccaagaagag

SEQ ID NO: 1691270 - RNA, 19 nt, Homo sapiens
  misc_RNA (1)...(19): siRNA sense strand
gagaaggugggaauagaaa

SEQ ID NO: 1691271 - RNA, 19 nt, Homo sapiens
  misc_RNA (1)...(19): siRNA sense strand
gaugaaggacucuccauuc

SEQ ID NO: 1691272 - RNA, 19 nt, Homo sapiens
  misc_RNA (1)...(19): siRNA sense strand
gaaauaacagcucugaaac

SEQ ID NO: 1691273 - RNA, 19 nt, Homo sapiens
  misc_RNA (1)...(19): siRNA sense strand
cagaaauggaucccacuua

SEQ ID NO: 1691274 - RNA, 19 nt, Homo sapiens
  misc_RNA (1)...(19): siRNA sense strand
ugaguaacuuugcagaaga

SEQ ID NO: 1691275 - RNA, 19 nt, Homo sapiens
  misc_RNA (1)...(19): siRNA sense strand
ccagcuacaucaugaggaa

SEQ ID NO: 1691276 - RNA, 19 nt, Homo sapiens
  misc_RNA (1)...(19): siRNA sense strand
gcugcggacugcuaauuug

SEQ ID NO: 1691277 - RNA, 19 nt, Homo sapiens
  misc_RNA (1)...(19): siRNA sense strand
gacaggacaugcugagaag

SEQ ID NO: 1691278 - RNA, 19 nt, Homo sapiens
  misc_RNA (1)...(19): siRNA sense strand
gaacuguuugagcgcauua

SEQ ID NO: 1691279 - RNA, 19 nt, Homo sapiens
  misc_RNA (1)...(19): siRNA sense strand
aaugagugcuuuagcgaaa

SEQ ID NO: 1691280 - RNA, 19 nt, Homo sapiens
  misc_RNA (1)...(19): siRNA sense strand
aaaccaaacuucaucucau

SEQ ID NO: 1691281 - RNA, 19 nt, Homo sapiens
  misc_RNA (1)...(19): siRNA sense strand
aaauggaucccacuuauuc

SEQ ID NO: 1691282 - RNA, 19 nt, Homo sapiens
  misc_RNA (1)...(19): siRNA sense strand
aaccaaacuucaucucauu

SEQ ID NO: 1691283 - RNA, 19 nt, Homo sapiens
  misc_RNA (1)...(19): siRNA sense strand
aaagcuguaugccaugaaa

SEQ ID NO: 1691284 - RNA, 19 nt, Homo sapiens
  misc_RNA (1)...(19): siRNA sense strand
gaaggacaccccaauauug

SEQ ID NO: 1691285 - RNA, 19 nt, Homo sapiens
  misc_RNA (1)...(19): siRNA sense strand
gauuuauguuggagagauu

SEQ ID NO: 1691286 - RNA, 19 nt, Homo sapiens
  misc_RNA (1)...(19): siRNA sense strand
uaaugcagcugucauagac

SEQ ID NO: 1691287 - RNA, 19 nt, Homo sapiens
  misc_RNA (1)...(19): siRNA sense strand
gcacagggaucugaaaccu

SEQ ID NO: 1691288 - RNA, 19 nt, Homo sapiens
  misc_RNA (1)...(19): siRNA sense strand
acuaugaccuagauuugaa

SEQ ID NO: 1691289 - RNA, 19 nt, Homo sapiens
  misc_RNA (1)...(19): siRNA sense strand
ucaaagagagcguuucaca

SEQ ID NO: 1691290 - RNA, 19 nt, Homo sapiens
  misc_RNA (1)...(19): siRNA sense strand
gauggaagccaauacucaa

SEQ ID NO: 1691291 - RNA, 19 nt, Homo sapiens
  misc_RNA (1)...(19): siRNA sense strand
ucauagacccucuucaguu

SEQ ID NO: 1691292 - RNA, 19 nt, Homo sapiens
  misc_RNA (1)...(19): siRNA sense strand
guaaugcagcugucauaga

SEQ ID NO: 1691293 - RNA, 19 nt, Homo sapiens
  misc_RNA (1)...(19): siRNA sense strand
ggaacuggagcuuauggaa

SEQ ID NO: 1691294 - RNA, 19 nt, Homo sapiens
  misc_RNA (1)...(19): siRNA sense strand
auacauggcaccagauauu

SEQ ID NO: 1691295 - RNA, 19 nt, Homo sapiens
  misc_RNA (1)...(19): siRNA sense strand
ggauggaagccaauacuca

SEQ ID NO: 1691296 - RNA, 19 nt, Homo sapiens
  misc_RNA (1)...(19): siRNA sense strand
uaaaauaaguggccaugau

SEQ ID NO: 1691297 - RNA, 19 nt, Homo sapiens
  misc_RNA (1)...(19): siRNA sense strand
ucagggcuauuccuuuguu

SEQ ID NO: 1691298 - RNA, 19 nt, Homo sapiens
  misc_RNA (1)...(19): siRNA sense strand
ccaagaaaugagugcuuua

SEQ ID NO: 1691299 - RNA, 19 nt, Homo sapiens
  misc_RNA (1)...(19): siRNA sense strand
ggacaugacaaggcaguug

SEQ ID NO: 1691300 - RNA, 19 nt, Homo sapiens
  misc_RNA (1)...(19): siRNA sense strand
gugaguaacuuugcagaag

SEQ ID NO: 1691301 - RNA, 19 nt, Homo sapiens
  misc_RNA (1)...(19): siRNA sense strand
aagaagagauugggaugug

SEQ ID NO: 1691302 - RNA, 19 nt, Homo sapiens
  misc_RNA (1)...(19): siRNA sense strand
cccaagaaaugagugcuuu

SEQ ID NO: 1691303 - RNA, 19 nt, Homo sapiens
  misc_RNA (1)...(19): siRNA sense strand
gacaaguccuggaacacau

SEQ ID NO: 1691304 - RNA, 19 nt, Homo sapiens
  misc_RNA (1)...(19): siRNA sense strand
ugucgaaagugugugcaua

SEQ ID NO: 1691305 - RNA, 19 nt, Homo sapiens
  misc_RNA (1)...(19): siRNA sense strand
ucaacacuaugaccuagau

SEQ ID NO: 1691306 - RNA, 19 nt, Homo sapiens
  misc_RNA (1)...(19): siRNA sense strand
uuucagggcuauuccuuug

SEQ ID NO: 1691307 - RNA, 19 nt, Homo sapiens
  misc_RNA (1)...(19): siRNA sense strand
gcaucuccuuucacuguug

SEQ ID NO: 1691308 - RNA, 19 nt, Homo sapiens
  misc_RNA (1)...(19): siRNA sense strand
ugacaggacaugcugagaa

SEQ ID NO: 1691309 - RNA, 19 nt, Homo sapiens
  misc_RNA (1)...(19): siRNA sense strand
gaaacugaaagagcauauu

SEQ ID NO: 1691310 - RNA, 19 nt, Homo sapiens
  misc_RNA (1)...(19): siRNA sense strand
agacagaaaccaaacuuca

SEQ ID NO: 1691311 - RNA, 19 nt, Homo sapiens
  misc_RNA (1)...(19): siRNA sense strand
gcguaaugcagcugucaua

SEQ ID NO: 1691312 - RNA, 19 nt, Homo sapiens
  misc_RNA (1)...(19): siRNA sense strand
guuuggguguucuaaugua

SEQ ID NO: 1691313 - RNA, 19 nt, Homo sapiens
  misc_RNA (1)...(19): siRNA sense strand
aaacugaaagagcauauuc

SEQ ID NO: 1691314 - RNA, 19 nt, Homo sapiens
  misc_RNA (1)...(19): siRNA sense strand
ggaagccagcuacaucaug

SEQ ID NO: 1691315 - RNA, 19 nt, Homo sapiens
  misc_RNA (1)...(19): siRNA sense strand
aauaacagcucugaaacuc

SEQ ID NO: 1691316 - RNA, 19 nt, Homo sapiens
  misc_RNA (1)...(19): siRNA sense strand
ugaauuagaugugaguaac

SEQ ID NO: 1691317 - RNA, 19 nt, Homo sapiens
  misc_RNA (1)...(19): siRNA sense strand
gaaaucaaagaacaucucu

SEQ ID NO: 1691318 - RNA, 19 nt, Homo sapiens
  misc_RNA (1)...(19): siRNA sense strand
gaaagaucccaagaagaga

SEQ ID NO: 1691319 - RNA, 19 nt, Homo sapiens
  misc_RNA (1)...(19): siRNA sense strand
gaccuaauucagcgucuuu

SEQ ID NO: 1691320 - RNA, 19 nt, Homo sapiens
  misc_RNA (1)...(19): siRNA sense strand
gagcugcggacugcuaauu

SEQ ID NO: 1691321 - RNA, 19 nt, Homo sapiens
  misc_RNA (1)...(19): siRNA sense strand
gauggaacuucugaaugga

SEQ ID NO: 1691322 - RNA, 19 nt, Homo sapiens
  misc_RNA (1)...(19): siRNA sense strand
augaucagcuucacacguu

SEQ ID NO: 1691323 - RNA, 19 nt, Homo sapiens
  misc_RNA (1)...(19): siRNA sense strand
ucgaaagugugugcauaaa

SEQ ID NO: 1691324 - RNA, 19 nt, Homo sapiens
  misc_RNA (1)...(19): siRNA sense strand
ugaaggacucuccauucua

SEQ ID NO: 1691325 - RNA, 19 nt, Homo sapiens
  misc_RNA (1)...(19): siRNA sense strand
caaguccuggaacacauua

SEQ ID NO: 1691326 - RNA, 19 nt, Homo sapiens
  misc_RNA (1)...(19): siRNA sense strand
gaagaguucacagaaaugg

SEQ ID NO: 1691327 - RNA, 19 nt, Homo sapiens
  misc_RNA (1)...(19): siRNA sense strand
gaggugcagauuuauguug

SEQ ID NO: 1691328 - RNA, 19 nt, Homo sapiens
  misc_RNA (1)...(19): siRNA sense strand
ccaauauugugaaguugca

SEQ ID NO: 1691329 - RNA, 19 nt, Homo sapiens
  misc_RNA (1)...(19): siRNA sense strand
guccuggagugacaaaugu

SEQ ID NO: 1691330 - RNA, 19 nt, Homo sapiens
  misc_RNA (1)...(19): siRNA sense strand
gaagcuguuucagggcuau

SEQ ID NO: 1691331 - RNA, 19 nt, Homo sapiens
  misc_RNA (1)...(19): siRNA sense strand
gaguaacuuugcagaagag

SEQ ID NO: 1691332 - RNA, 19 nt, Homo sapiens
  misc_RNA (1)...(19): siRNA sense strand
aaagugagccuccauaucc

SEQ ID NO: 1691333 - RNA, 19 nt, Homo sapiens
  misc_RNA (1)...(19): siRNA sense strand
gccauguggugcugacaga

SEQ ID NO: 1691334 - RNA, 19 nt, Homo sapiens
  misc_RNA (1)...(19): siRNA sense strand
ccucgaacaucuccacaag

SEQ ID NO: 1691335 - RNA, 19 nt, Homo sapiens
  misc_RNA (1)...(19): siRNA sense strand
gagcauacaaggacagaac

SEQ ID NO: 1691336 - RNA, 19 nt, Homo sapiens
  misc_RNA (1)...(19): siRNA sense strand
gcucugaaacucugugaag

SEQ ID NO: 1691337 - RNA, 19 nt, Homo sapiens
  misc_RNA (1)...(19): siRNA sense strand
caagaaaugagugcuuuag

SEQ ID NO: 1691338 - RNA, 19 nt, Homo sapiens
  misc_RNA (1)...(19): siRNA sense strand
gacaugacaaggcaguuga

SEQ ID NO: 1691339 - RNA, 19 nt, Homo sapiens
  misc_RNA (1)...(19): siRNA sense strand
guaagccacaugcaugaug

SEQ ID NO: 1691340 - RNA, 19 nt, Homo sapiens
  misc_RNA (1)...(19): siRNA sense strand
gaaagaagcugaacuugaa

SEQ ID NO: 1691341 - RNA, 19 nt, Homo sapiens
  misc_RNA (1)...(19): siRNA sense strand
gaacagcaguccuaucaaa

SEQ ID NO: 1691342 - RNA, 19 nt, Homo sapiens
  misc_RNA (1)...(19): siRNA sense strand
ggaaaugucugaugaugaa

SEQ ID NO: 1691343 - RNA, 19 nt, Homo sapiens
  misc_RNA (1)...(19): siRNA sense strand
caaacaagcugaggaaauu

SEQ ID NO: 1691344 - RNA, 19 nt, Homo sapiens
  misc_RNA (1)...(19): siRNA sense strand
gaaauucgcaacauucaua

SEQ ID NO: 1691345 - RNA, 19 nt, Homo sapiens
  misc_RNA (1)...(19): siRNA sense strand
acucaaagaugacaaguua

SEQ ID NO: 1691346 - RNA, 19 nt, Homo sapiens
  misc_RNA (1)...(19): siRNA sense strand
ggaaaugacuggaguugga

SEQ ID NO: 1691347 - RNA, 19 nt, Homo sapiens
  misc_RNA (1)...(19): siRNA sense strand
ggaaucagccuuaguauca

SEQ ID NO: 1691348 - RNA, 19 nt, Homo sapiens
  misc_RNA (1)...(19): siRNA sense strand
gaaaagagauggaaauucu

SEQ ID NO: 1691349 - RNA, 19 nt, Homo sapiens
  misc_RNA (1)...(19): siRNA sense strand
gcaacagcaucuacucaaa

SEQ ID NO: 1691350 - RNA, 19 nt, Homo sapiens
  misc_RNA (1)...(19): siRNA sense strand
uaucaaaucugaacgugaa

SEQ ID NO: 1691351 - RNA, 19 nt, Homo sapiens
  misc_RNA (1)...(19): siRNA sense strand
ggacagagcaaaucauugu

SEQ ID NO: 1691352 - RNA, 19 nt, Homo sapiens
  misc_RNA (1)...(19): siRNA sense strand
gcaaaucauuguggaaguu

SEQ ID NO: 1691353 - RNA, 19 nt, Homo sapiens
  misc_RNA (1)...(19): siRNA sense strand
guagaagaauggaagaaga

SEQ ID NO: 1691354 - RNA, 19 nt, Homo sapiens
  misc_RNA (1)...(19): siRNA sense strand
aauaguaccuccaccaauu

SEQ ID NO: 1691355 - RNA, 19 nt, Homo sapiens
  misc_RNA (1)...(19): siRNA sense strand
gaaagcugcccaugagaaa

SEQ ID NO: 1691356 - RNA, 19 nt, Homo sapiens
  misc_RNA (1)...(19): siRNA sense strand
gaagaugacccuaacaaag

SEQ ID NO: 1691357 - RNA, 19 nt, Homo sapiens
  misc_RNA (1)...(19): siRNA sense strand
gagcaagcauugaauacau

SEQ ID NO: 1691358 - RNA, 19 nt, Homo sapiens
  misc_RNA (1)...(19): siRNA sense strand
ccacagcaaugaauaaucu

SEQ ID NO: 1691359 - RNA, 19 nt, Homo sapiens
  misc_RNA (1)...(19): siRNA sense strand
gcaguccuaucaaaucuga

SEQ ID NO: 1691360 - RNA, 19 nt, Homo sapiens
  misc_RNA (1)...(19): siRNA sense strand
gcgaauacccucuugagaa

SEQ ID NO: 1691361 - RNA, 19 nt, Homo sapiens
  misc_RNA (1)...(19): siRNA sense strand
guacagaccuugcuuaccu

SEQ ID NO: 1691362 - RNA, 19 nt, Homo sapiens
  misc_RNA (1)...(19): siRNA sense strand
cgagaaagcugcccaugag

SEQ ID NO: 1691363 - RNA, 19 nt, Homo sapiens
  misc_RNA (1)...(19): siRNA sense strand
caacaagcccugcaaggaa

SEQ ID NO: 1691364 - RNA, 19 nt, Homo sapiens
  misc_RNA (1)...(19): siRNA sense strand
ugagaaagauauggaagaa

SEQ ID NO: 1691365 - RNA, 19 nt, Homo sapiens
  misc_RNA (1)...(19): siRNA sense strand
gaauacaucuguuccuacu

SEQ ID NO: 1691366 - RNA, 19 nt, Homo sapiens
  misc_RNA (1)...(19): siRNA sense strand
aaauggaaaugucugauga

SEQ ID NO: 1691367 - RNA, 19 nt, Homo sapiens
  misc_RNA (1)...(19): siRNA sense strand
ggacaaagcccuguaucug

SEQ ID NO: 1691368 - RNA, 19 nt, Homo sapiens
  misc_RNA (1)...(19): siRNA sense strand
gcaaacaagcugaggaaau

SEQ ID NO: 1691369 - RNA, 19 nt, Homo sapiens
  misc_RNA (1)...(19): siRNA sense strand
gaaauggaaaugucugaug

SEQ ID NO: 1691370 - RNA, 19 nt, Homo sapiens
  misc_RNA (1)...(19): siRNA sense strand
cgaauacccucuugagaag

SEQ ID NO: 1691371 - RNA, 19 nt, Homo sapiens
  misc_RNA (1)...(19): siRNA sense strand
gaagaaaugacagaaacaa

SEQ ID NO: 1691372 - RNA, 19 nt, Homo sapiens
  misc_RNA (1)...(19): siRNA sense strand
ugaggaaauucgcaacauu

SEQ ID NO: 1691373 - RNA, 19 nt, Homo sapiens
  misc_RNA (1)...(19): siRNA sense strand
gagaagaugacccuaacaa

SEQ ID NO: 1691374 - RNA, 19 nt, Homo sapiens
  misc_RNA (1)...(19): siRNA sense strand
ugaggaaucagccuuagua

SEQ ID NO: 1691375 - RNA, 19 nt, Homo sapiens
  misc_RNA (1)...(19): siRNA sense strand
gaggagcgccaucguagaa

SEQ ID NO: 1691376 - RNA, 19 nt, Homo sapiens
  misc_RNA (1)...(19): siRNA sense strand
auacaucuguuccuacuug

SEQ ID NO: 1691377 - RNA, 19 nt, Homo sapiens
  misc_RNA (1)...(19): siRNA sense strand
gcaacaagcccugcaagga

SEQ ID NO: 1691378 - RNA, 19 nt, Homo sapiens
  misc_RNA (1)...(19): siRNA sense strand
accaauaacuccaaugaug

SEQ ID NO: 1691379 - RNA, 19 nt, Homo sapiens
  misc_RNA (1)...(19): siRNA sense strand
aaagaaagaagcugaacuu

SEQ ID NO: 1691380 - RNA, 19 nt, Homo sapiens
  misc_RNA (1)...(19): siRNA sense strand
gauaguggcuguguaccau

SEQ ID NO: 1691381 - RNA, 19 nt, Homo sapiens
  misc_RNA (1)...(19): siRNA sense strand
caaaggagaaguucaagca

SEQ ID NO: 1691382 - RNA, 19 nt, Homo sapiens
  misc_RNA (1)...(19): siRNA sense strand
ggagagaucauugccauuc

SEQ ID NO: 1691383 - RNA, 19 nt, Homo sapiens
  misc_RNA (1)...(19): siRNA sense strand
ccagauaugccaguaguaa

SEQ ID NO: 1691384 - RNA, 19 nt, Homo sapiens
  misc_RNA (1)...(19): siRNA sense strand
cccuguaucugucugguua

SEQ ID NO: 1691385 - RNA, 19 nt, Homo sapiens
  misc_RNA (1)...(19): siRNA sense strand
agaaagaagcugaacuuga

SEQ ID NO: 1691386 - RNA, 19 nt, Homo sapiens
  misc_RNA (1)...(19): siRNA sense strand
uagaagaaaugacagaaac

SEQ ID NO: 1691387 - RNA, 19 nt, Homo sapiens
  misc_RNA (1)...(19): siRNA sense strand
gaagaagaaauggaaaugu

SEQ ID NO: 1691388 - RNA, 19 nt, Homo sapiens
  misc_RNA (1)...(19): siRNA sense strand
ggagaggucaaccgucgua

SEQ ID NO: 1691389 - RNA, 19 nt, Homo sapiens
  misc_RNA (1)...(19): siRNA sense strand
gacaaagcccuguaucugu

SEQ ID NO: 1691390 - RNA, 19 nt, Homo sapiens
  misc_RNA (1)...(19): siRNA sense strand
gggauuaucuccacauucc

SEQ ID NO: 1691391 - RNA, 19 nt, Homo sapiens
  misc_RNA (1)...(19): siRNA sense strand
gauagcgaauacccucuug

SEQ ID NO: 1691392 - RNA, 19 nt, Homo sapiens
  misc_RNA (1)...(19): siRNA sense strand
aagaugacccuaacaaaga

SEQ ID NO: 1691393 - RNA, 19 nt, Homo sapiens
  misc_RNA (1)...(19): siRNA sense strand
gcgagaagaagaaauggaa

SEQ ID NO: 1691394 - RNA, 19 nt, Homo sapiens
  misc_RNA (1)...(19): siRNA sense strand
gaauggaagaagaaagauu

SEQ ID NO: 1691395 - RNA, 19 nt, Homo sapiens
  misc_RNA (1)...(19): siRNA sense strand
ggagcgccaucguagaaga

SEQ ID NO: 1691396 - RNA, 19 nt, Homo sapiens
  misc_RNA (1)...(19): siRNA sense strand
gcaggcccuuucuggaauu

SEQ ID NO: 1691397 - RNA, 19 nt, Homo sapiens
  misc_RNA (1)...(19): siRNA sense strand
ggaauaguaccuccaccaa

SEQ ID NO: 1691398 - RNA, 19 nt, Homo sapiens
  misc_RNA (1)...(19): siRNA sense strand
ggaauugccggacaaccaa

SEQ ID NO: 1691399 - RNA, 19 nt, Homo sapiens
  misc_RNA (1)...(19): siRNA sense strand
gcaagaacaaggcaaaguc

SEQ ID NO: 1691400 - RNA, 19 nt, Homo sapiens
  misc_RNA (1)...(19): siRNA sense strand
aagaagaaauggaaauguc

SEQ ID NO: 1691401 - RNA, 19 nt, Homo sapiens
  misc_RNA (1)...(19): siRNA sense strand
gagaagaagaaauggaaau

SEQ ID NO: 1691402 - RNA, 19 nt, Homo sapiens
  misc_RNA (1)...(19): siRNA sense strand
gaggaaauucgcaacauuc

SEQ ID NO: 1691403 - RNA, 19 nt, Homo sapiens
  misc_RNA (1)...(19): siRNA sense strand
ccaauaacuucuacuccau

SEQ ID NO: 1691404 - RNA, 19 nt, Homo sapiens
  misc_RNA (1)...(19): siRNA sense strand
ccaccaauuccuccagaua

SEQ ID NO: 1691405 - RNA, 19 nt, Homo sapiens
  misc_RNA (1)...(19): siRNA sense strand
ccaccaauaacuccaauga

SEQ ID NO: 1691406 - RNA, 19 nt, Homo sapiens
  misc_RNA (1)...(19): siRNA sense strand
gcagacuccacguugauuu

SEQ ID NO: 1691407 - RNA, 19 nt, Homo sapiens
  misc_RNA (1)...(19): siRNA sense strand
gcaagagcaagaagaacuu

SEQ ID NO: 1691408 - RNA, 19 nt, Homo sapiens
  misc_RNA (1)...(19): siRNA sense strand
gcucuaguacugacaagaa

SEQ ID NO: 1691409 - RNA, 19 nt, Homo sapiens
  misc_RNA (1)...(19): siRNA sense strand
gcaaugaauaaucuuggaa

SEQ ID NO: 1691410 - RNA, 19 nt, Homo sapiens
  misc_RNA (1)...(19): siRNA sense strand
cgagaaagaccaccaggau

SEQ ID NO: 1691411 - RNA, 19 nt, Homo sapiens
  misc_RNA (1)...(19): siRNA sense strand
gaccuugcuuaccuggaua

SEQ ID NO: 1691412 - RNA, 19 nt, Homo sapiens
  misc_RNA (1)...(19): siRNA sense strand
gaauaguaccuccaccaau

SEQ ID NO: 1691413 - RNA, 19 nt, Homo sapiens
  misc_RNA (1)...(19): siRNA sense strand
aaaagaaacugaggaauca

SEQ ID NO: 1691414 - RNA, 19 nt, Homo sapiens
  misc_RNA (1)...(19): siRNA sense strand
gcagauaguggcuguguac

SEQ ID NO: 1691415 - RNA, 19 nt, Homo sapiens
  misc_RNA (1)...(19): siRNA sense strand
ggaauuccaccaauaacuc

SEQ ID NO: 1691416 - RNA, 19 nt, Homo sapiens
  misc_RNA (1)...(19): siRNA sense strand
caaaccaggauagcgaaua

SEQ ID NO: 1691417 - RNA, 19 nt, Homo sapiens
  misc_RNA (1)...(19): siRNA sense strand
ucaaaguccaagaggaaua

SEQ ID NO: 1691418 - RNA, 19 nt, Homo sapiens
  misc_RNA (1)...(19): siRNA sense strand
cagagaagaugacccuaac

SEQ ID NO: 1691419 - RNA, 19 nt, Homo sapiens
  misc_RNA (1)...(19): siRNA sense strand
caagcaagaacaaggcaaa

SEQ ID NO: 1691420 - RNA, 19 nt, Homo sapiens
  misc_RNA (1)...(19): siRNA sense strand
cagcaguccuaucaaaucu

SEQ ID NO: 1691421 - RNA, 19 nt, Homo sapiens
  misc_RNA (1)...(19): siRNA sense strand
gcucuucccuccaaaucca

SEQ ID NO: 1691422 - RNA, 19 nt, Homo sapiens
  misc_RNA (1)...(19): siRNA sense strand
aaaccaggauagcgaauac

SEQ ID NO: 1691423 - RNA, 19 nt, Homo sapiens
  misc_RNA (1)...(19): siRNA sense strand
ucaaagaugacaaguuaca

SEQ ID NO: 1691424 - RNA, 19 nt, Homo sapiens
  misc_RNA (1)...(19): siRNA sense strand
agaugacccuaacaaagaa

SEQ ID NO: 1691425 - RNA, 19 nt, Homo sapiens
  misc_RNA (1)...(19): siRNA sense strand
ggaagaagcaaaggagaag

SEQ ID NO: 1691426 - RNA, 19 nt, Homo sapiens
  misc_RNA (1)...(19): siRNA sense strand
cgagaugaccuguaugagu

SEQ ID NO: 1691427 - RNA, 19 nt, Homo sapiens
  misc_RNA (1)...(19): siRNA sense strand
ugcaccgucuugauaauaa

SEQ ID NO: 1691428 - RNA, 19 nt, Homo sapiens
  misc_RNA (1)...(19): siRNA sense strand
gggaaucaggcgagaagaa

SEQ ID NO: 1691429 - RNA, 19 nt, Homo sapiens
  misc_RNA (1)...(19): siRNA sense strand
caugggaccacuucacaaa

SEQ ID NO: 1691430 - RNA, 19 nt, Homo sapiens
  misc_RNA (1)...(19): siRNA sense strand
aagaauggaagaagaaaga

SEQ ID NO: 1691431 - RNA, 19 nt, Homo sapiens
  misc_RNA (1)...(19): siRNA sense strand
uagaagaauggaagaagaa

SEQ ID NO: 1691432 - RNA, 19 nt, Homo sapiens
  misc_RNA (1)...(19): siRNA sense strand
uugaauacaucuguuccua

SEQ ID NO: 1691433 - RNA, 19 nt, Homo sapiens
  misc_RNA (1)...(19): siRNA sense strand
caacagcaucuacucaaag

SEQ ID NO: 1691434 - RNA, 19 nt, Homo sapiens
  misc_RNA (1)...(19): siRNA sense strand
gcaaaguccacagagaaga

SEQ ID NO: 1691435 - RNA, 19 nt, Homo sapiens
  misc_RNA (1)...(19): siRNA sense strand
uaacuucuacuccaugauc

SEQ ID NO: 1691436 - RNA, 19 nt, Homo sapiens
  misc_RNA (1)...(19): siRNA sense strand
aauaacuucuacuccauga

SEQ ID NO: 1691437 - RNA, 19 nt, Homo sapiens
  misc_RNA (1)...(19): siRNA sense strand
gaauggcaccgcugggaau

SEQ ID NO: 1691438 - RNA, 19 nt, Homo sapiens
  misc_RNA (1)...(19): siRNA sense strand
cagaagcuguacagaccuu

SEQ ID NO: 1691439 - RNA, 19 nt, Homo sapiens
  misc_RNA (1)...(19): siRNA sense strand
acagagaagaugacccuaa

SEQ ID NO: 1691440 - RNA, 19 nt, Homo sapiens
  misc_RNA (1)...(19): siRNA sense strand
gaaagaagcugaacuugaa

SEQ ID NO: 1691441 - RNA, 19 nt, Homo sapiens
  misc_RNA (1)...(19): siRNA sense strand
gaacagcaguccuaucaaa

SEQ ID NO: 1691442 - RNA, 19 nt, Homo sapiens
  misc_RNA (1)...(19): siRNA sense strand
ggaaaugucugaugaugaa

SEQ ID NO: 1691443 - RNA, 19 nt, Homo sapiens
  misc_RNA (1)...(19): siRNA sense strand
caaacaagcugaggaaauu

SEQ ID NO: 1691444 - RNA, 19 nt, Homo sapiens
  misc_RNA (1)...(19): siRNA sense strand
gaaauucgcaacauucaua

SEQ ID NO: 1691445 - RNA, 19 nt, Homo sapiens
  misc_RNA (1)...(19): siRNA sense strand
acucaaagaugacaaguua

SEQ ID NO: 1691446 - RNA, 19 nt, Homo sapiens
  misc_RNA (1)...(19): siRNA sense strand
ggaaaugacuggaguugga

SEQ ID NO: 1691447 - RNA, 19 nt, Homo sapiens
  misc_RNA (1)...(19): siRNA sense strand
ggaaucagccuuaguauca

SEQ ID NO: 1691448 - RNA, 19 nt, Homo sapiens
  misc_RNA (1)...(19): siRNA sense strand
gaaaagagauggaaauucu

SEQ ID NO: 1691449 - RNA, 19 nt, Homo sapiens
  misc_RNA (1)...(19): siRNA sense strand
gcaacagcaucuacucaaa

SEQ ID NO: 1691450 - RNA, 19 nt, Homo sapiens
  misc_RNA (1)...(19): siRNA sense strand
uaucaaaucugaacgugaa

SEQ ID NO: 1691451 - RNA, 19 nt, Homo sapiens
  misc_RNA (1)...(19): siRNA sense strand
ggacagagcaaaucauugu

SEQ ID NO: 1691452 - RNA, 19 nt, Homo sapiens
  misc_RNA (1)...(19): siRNA sense strand
gcaaugacacuaccuaugu

SEQ ID NO: 1691453 - RNA, 19 nt, Homo sapiens
  misc_RNA (1)...(19): siRNA sense strand
gcaaaucauuguggaaguu

SEQ ID NO: 1691454 - RNA, 19 nt, Homo sapiens
  misc_RNA (1)...(19): siRNA sense strand
guagaagaauggaagaaga

SEQ ID NO: 1691455 - RNA, 19 nt, Homo sapiens
  misc_RNA (1)...(19): siRNA sense strand
aauaguaccuccaccaauu

SEQ ID NO: 1691456 - RNA, 19 nt, Homo sapiens
  misc_RNA (1)...(19): siRNA sense strand
gaaagcugcccaugagaaa

SEQ ID NO: 1691457 - RNA, 19 nt, Homo sapiens
  misc_RNA (1)...(19): siRNA sense strand
ccacagcaaugaauaaucu

SEQ ID NO: 1691458 - RNA, 19 nt, Homo sapiens
  misc_RNA (1)...(19): siRNA sense strand
gagcaagcauugaauacau

SEQ ID NO: 1691459 - RNA, 19 nt, Homo sapiens
  misc_RNA (1)...(19): siRNA sense strand
gcaguccuaucaaaucuga

SEQ ID NO: 1691460 - RNA, 19 nt, Homo sapiens
  misc_RNA (1)...(19): siRNA sense strand
gcgaauacccucuugagaa

SEQ ID NO: 1691461 - RNA, 19 nt, Homo sapiens
  misc_RNA (1)...(19): siRNA sense strand
gaagaugacccuaacaaag

SEQ ID NO: 1691462 - RNA, 19 nt, Homo sapiens
  misc_RNA (1)...(19): siRNA sense strand
guacagaccuugcuuaccu

SEQ ID NO: 1691463 - RNA, 19 nt, Homo sapiens
  misc_RNA (1)...(19): siRNA sense strand
cgagaaagcugcccaugag

SEQ ID NO: 1691464 - RNA, 19 nt, Homo sapiens
  misc_RNA (1)...(19): siRNA sense strand
caacaagcccugcaaggaa

SEQ ID NO: 1691465 - RNA, 19 nt, Homo sapiens
  misc_RNA (1)...(19): siRNA sense strand
ugagaaagauauggaagaa

SEQ ID NO: 1691466 - RNA, 19 nt, Homo sapiens
  misc_RNA (1)...(19): siRNA sense strand
gaauacaucuguuccuacu

SEQ ID NO: 1691467 - RNA, 19 nt, Homo sapiens
  misc_RNA (1)...(19): siRNA sense strand
aaauggaaaugucugauga

SEQ ID NO: 1691468 - RNA, 19 nt, Homo sapiens
  misc_RNA (1)...(19): siRNA sense strand
ggacaaagcccuguaucug

SEQ ID NO: 1691469 - RNA, 19 nt, Homo sapiens
  misc_RNA (1)...(19): siRNA sense strand
gcaaacaagcugaggaaau

SEQ ID NO: 1691470 - RNA, 19 nt, Homo sapiens
  misc_RNA (1)...(19): siRNA sense strand
gaaauggaaaugucugaug

SEQ ID NO: 1691471 - RNA, 19 nt, Homo sapiens
  misc_RNA (1)...(19): siRNA sense strand
cgaauacccucuugagaag

SEQ ID NO: 1691472 - RNA, 19 nt, Homo sapiens
  misc_RNA (1)...(19): siRNA sense strand
gaagaaaugacagaaacaa

SEQ ID NO: 1691473 - RNA, 19 nt, Homo sapiens
  misc_RNA (1)...(19): siRNA sense strand
gauaacaguagaacucuga

SEQ ID NO: 1691474 - RNA, 19 nt, Homo sapiens
  misc_RNA (1)...(19): siRNA sense strand
ugaggaaauucgcaacauu

SEQ ID NO: 1691475 - RNA, 19 nt, Homo sapiens
  misc_RNA (1)...(19): siRNA sense strand
gagaagaugacccuaacaa

SEQ ID NO: 1691476 - RNA, 19 nt, Homo sapiens
  misc_RNA (1)...(19): siRNA sense strand
ugaggaaucagccuuagua

SEQ ID NO: 1691477 - RNA, 19 nt, Homo sapiens
  misc_RNA (1)...(19): siRNA sense strand
gaggagcgccaucguagaa

SEQ ID NO: 1691478 - RNA, 19 nt, Homo sapiens
  misc_RNA (1)...(19): siRNA sense strand
auacaucuguuccuacuug

SEQ ID NO: 1691479 - RNA, 19 nt, Homo sapiens
  misc_RNA (1)...(19): siRNA sense strand
gcaacaagcccugcaagga

SEQ ID NO: 1691480 - RNA, 19 nt, Homo sapiens
  misc_RNA (1)...(19): siRNA sense strand
accaauaacuccaaugaug

SEQ ID NO: 1691481 - RNA, 19 nt, Homo sapiens
  misc_RNA (1)...(19): siRNA sense strand
aaagaaagaagcugaacuu

SEQ ID NO: 1691482 - RNA, 19 nt, Homo sapiens
  misc_RNA (1)...(19): siRNA sense strand
gauaguggcuguguaccau

SEQ ID NO: 1691483 - RNA, 19 nt, Homo sapiens
  misc_RNA (1)...(19): siRNA sense strand
caaaggagaaguucaagca

SEQ ID NO: 1691484 - RNA, 19 nt, Homo sapiens
  misc_RNA (1)...(19): siRNA sense strand
ggagagaucauugccauuc

SEQ ID NO: 1691485 - RNA, 19 nt, Homo sapiens
  misc_RNA (1)...(19): siRNA sense strand
ccagauaugccaguaguaa

SEQ ID NO: 1691486 - RNA, 19 nt, Homo sapiens
  misc_RNA (1)...(19): siRNA sense strand
cccuguaucugucugguua

SEQ ID NO: 1691487 - RNA, 19 nt, Homo sapiens
  misc_RNA (1)...(19): siRNA sense strand
agaaagaagcugaacuuga

SEQ ID NO: 1691488 - RNA, 19 nt, Homo sapiens
  misc_RNA (1)...(19): siRNA sense strand
uagaagaaaugacagaaac

SEQ ID NO: 1691489 - RNA, 19 nt, Homo sapiens
  misc_RNA (1)...(19): siRNA sense strand
gaagaagaaauggaaaugu

SEQ ID NO: 1691490 - RNA, 19 nt, Homo sapiens
  misc_RNA (1)...(19): siRNA sense strand
ggagaggucaaccgucgua

SEQ ID NO: 1691491 - RNA, 19 nt, Homo sapiens
  misc_RNA (1)...(19): siRNA sense strand
gacaaagcccuguaucugu

SEQ ID NO: 1691492 - RNA, 19 nt, Homo sapiens
  misc_RNA (1)...(19): siRNA sense strand
gggauuaucuccacauucc

SEQ ID NO: 1691493 - RNA, 19 nt, Homo sapiens
  misc_RNA (1)...(19): siRNA sense strand
gauagcgaauacccucuug

SEQ ID NO: 1691494 - RNA, 19 nt, Homo sapiens
  misc_RNA (1)...(19): siRNA sense strand
aagaugacccuaacaaaga

SEQ ID NO: 1691495 - RNA, 19 nt, Homo sapiens
  misc_RNA (1)...(19): siRNA sense strand
gcgagaagaagaaauggaa

SEQ ID NO: 1691496 - RNA, 19 nt, Homo sapiens
  misc_RNA (1)...(19): siRNA sense strand
gaauggaagaagaaagauu

SEQ ID NO: 1691497 - RNA, 19 nt, Homo sapiens
  misc_RNA (1)...(19): siRNA sense strand
ggagcgccaucguagaaga

SEQ ID NO: 1691498 - RNA, 19 nt, Homo sapiens
  misc_RNA (1)...(19): siRNA sense strand
gcaggcccuuucuggaauu

SEQ ID NO: 1691499 - RNA, 19 nt, Homo sapiens
  misc_RNA (1)...(19): siRNA sense strand
ggaauaguaccuccaccaa

SEQ ID NO: 1691500 - RNA, 19 nt, Homo sapiens
  misc_RNA (1)...(19): siRNA sense strand
gcaagaacaaggcaaaguc

SEQ ID NO: 1691501 - RNA, 19 nt, Homo sapiens
  misc_RNA (1)...(19): siRNA sense strand
aagaagaaauggaaauguc

SEQ ID NO: 1691502 - RNA, 19 nt, Homo sapiens
  misc_RNA (1)...(19): siRNA sense strand
gagaagaagaaauggaaau

SEQ ID NO: 1691503 - RNA, 19 nt, Homo sapiens
  misc_RNA (1)...(19): siRNA sense strand
gaggaaauucgcaacauuc

SEQ ID NO: 1691504 - RNA, 19 nt, Homo sapiens
  misc_RNA (1)...(19): siRNA sense strand
ccaauaacuucuacuccau

SEQ ID NO: 1691505 - RNA, 19 nt, Homo sapiens
  misc_RNA (1)...(19): siRNA sense strand
ggaauugccggacaaccaa

SEQ ID NO: 1691506 - RNA, 19 nt, Homo sapiens
  misc_RNA (1)...(19): siRNA sense strand
ggauuccacugcaaugaca

SEQ ID NO: 1691507 - RNA, 19 nt, Homo sapiens
  misc_RNA (1)...(19): siRNA sense strand
ccaccaauaacuccaauga

SEQ ID NO: 1691508 - RNA, 19 nt, Homo sapiens
  misc_RNA (1)...(19): siRNA sense strand
gcagacuccacguugauuu

SEQ ID NO: 1691509 - RNA, 19 nt, Homo sapiens
  misc_RNA (1)...(19): siRNA sense strand
gcaagagcaagaagaacuu

SEQ ID NO: 1691510 - RNA, 19 nt, Homo sapiens
  misc_RNA (1)...(19): siRNA sense strand
ccaccaauuccuccagaua

SEQ ID NO: 1691511 - RNA, 19 nt, Homo sapiens
  misc_RNA (1)...(19): siRNA sense strand
gcucuaguacugacaagaa

SEQ ID NO: 1691512 - RNA, 19 nt, Homo sapiens
  misc_RNA (1)...(19): siRNA sense strand
gcaaugaauaaucuuggaa

SEQ ID NO: 1691513 - RNA, 19 nt, Homo sapiens
  misc_RNA (1)...(19): siRNA sense strand
cgagaaagaccaccaggau

SEQ ID NO: 1691514 - RNA, 19 nt, Homo sapiens
  misc_RNA (1)...(19): siRNA sense strand
gaccuugcuuaccuggaua

SEQ ID NO: 1691515 - RNA, 19 nt, Homo sapiens
  misc_RNA (1)...(19): siRNA sense strand
gaauaguaccuccaccaau

SEQ ID NO: 1691516 - RNA, 19 nt, Homo sapiens
  misc_RNA (1)...(19): siRNA sense strand
aaaagaaacugaggaauca

SEQ ID NO: 1691517 - RNA, 19 nt, Homo sapiens
  misc_RNA (1)...(19): siRNA sense strand
gcagauaguggcuguguac

SEQ ID NO: 1691518 - RNA, 19 nt, Homo sapiens
  misc_RNA (1)...(19): siRNA sense strand
caaaccaggauagcgaaua

SEQ ID NO: 1691519 - RNA, 19 nt, Homo sapiens
  misc_RNA (1)...(19): siRNA sense strand
ucaaaguccaagaggaaua

SEQ ID NO: 1691520 - RNA, 19 nt, Homo sapiens
  misc_RNA (1)...(19): siRNA sense strand
ggaauuccaccaauaacuc

SEQ ID NO: 1691521 - RNA, 19 nt, Homo sapiens
  misc_RNA (1)...(19): siRNA sense strand
cagagaagaugacccuaac

SEQ ID NO: 1691522 - RNA, 19 nt, Homo sapiens
  misc_RNA (1)...(19): siRNA sense strand
caagcaagaacaaggcaaa

SEQ ID NO: 1691523 - RNA, 19 nt, Homo sapiens
  misc_RNA (1)...(19): siRNA sense strand
cagcaguccuaucaaaucu

SEQ ID NO: 1691524 - RNA, 19 nt, Homo sapiens
  misc_RNA (1)...(19): siRNA sense strand
gcucuucccuccaaaucca

SEQ ID NO: 1691525 - RNA, 19 nt, Homo sapiens
  misc_RNA (1)...(19): siRNA sense strand
aaaccaggauagcgaauac

SEQ ID NO: 1691526 - RNA, 19 nt, Homo sapiens
  misc_RNA (1)...(19): siRNA sense strand
ucaaagaugacaaguuaca

SEQ ID NO: 1691527 - RNA, 19 nt, Homo sapiens
  misc_RNA (1)...(19): siRNA sense strand
agaugacccuaacaaagaa

SEQ ID NO: 1691528 - RNA, 19 nt, Homo sapiens
  misc_RNA (1)...(19): siRNA sense strand
ggaagaagcaaaggagaag

SEQ ID NO: 1691529 - RNA, 19 nt, Homo sapiens
  misc_RNA (1)...(19): siRNA sense strand
cgagaugaccuguaugagu

SEQ ID NO: 1691530 - RNA, 19 nt, Homo sapiens
  misc_RNA (1)...(19): siRNA sense strand
ugcaccgucuugauaauaa

SEQ ID NO: 1691531 - RNA, 19 nt, Homo sapiens
  misc_RNA (1)...(19): siRNA sense strand
gaacucugaacguggauuc

SEQ ID NO: 1691532 - RNA, 19 nt, Homo sapiens
  misc_RNA (1)...(19): siRNA sense strand
gggaaucaggcgagaagaa

SEQ ID NO: 1691533 - RNA, 19 nt, Homo sapiens
  misc_RNA (1)...(19): siRNA sense strand
caugggaccacuucacaaa

SEQ ID NO: 1691534 - RNA, 19 nt, Homo sapiens
  misc_RNA (1)...(19): siRNA sense strand
aagaauggaagaagaaaga

SEQ ID NO: 1691535 - RNA, 19 nt, Homo sapiens
  misc_RNA (1)...(19): siRNA sense strand
aauaacuucuacuccauga

SEQ ID NO: 1691536 - RNA, 19 nt, Homo sapiens
  misc_RNA (1)...(19): siRNA sense strand
uugaauacaucuguuccua

SEQ ID NO: 1691537 - RNA, 19 nt, Homo sapiens
  misc_RNA (1)...(19): siRNA sense strand
caacagcaucuacucaaag

SEQ ID NO: 1691538 - RNA, 19 nt, Homo sapiens
  misc_RNA (1)...(19): siRNA sense strand
gcaaaguccacagagaaga

SEQ ID NO: 1691539 - RNA, 19 nt, Homo sapiens
  misc_RNA (1)...(19): siRNA sense strand
uaacuucuacuccaugauc

SEQ ID NO: 1691540 - RNA, 19 nt, Homo sapiens
  misc_RNA (1)...(19): siRNA sense strand
gaacaucucuucuuucaga

SEQ ID NO: 1691541 - RNA, 19 nt, Homo sapiens
  misc_RNA (1)...(19): siRNA sense strand
gaaggacucuccauucuau

SEQ ID NO: 1691542 - RNA, 19 nt, Homo sapiens
  misc_RNA (1)...(19): siRNA sense strand
ggaaauaacagcucugaaa

SEQ ID NO: 1691543 - RNA, 19 nt, Homo sapiens
  misc_RNA (1)...(19): siRNA sense strand
gcagaagaguucacagaaa

SEQ ID NO: 1691544 - RNA, 19 nt, Homo sapiens
  misc_RNA (1)...(19): siRNA sense strand
gaagccagcuacaucauga

SEQ ID NO: 1691545 - RNA, 19 nt, Homo sapiens
  misc_RNA (1)...(19): siRNA sense strand
gaugaaagaucccaagaag

SEQ ID NO: 1691546 - RNA, 19 nt, Homo sapiens
  misc_RNA (1)...(19): siRNA sense strand
cauagacccucuucaguuu

SEQ ID NO: 1691547 - RNA, 19 nt, Homo sapiens
  misc_RNA (1)...(19): siRNA sense strand
ugagauaucuaggagaaua

SEQ ID NO: 1691548 - RNA, 19 nt, Homo sapiens
  misc_RNA (1)...(19): siRNA sense strand
gaauggaggagaacuguuu

SEQ ID NO: 1691549 - RNA, 19 nt, Homo sapiens
  misc_RNA (1)...(19): siRNA sense strand
gcugagauaucuaggagaa

SEQ ID NO: 1691550 - RNA, 19 nt, Homo sapiens
  misc_RNA (1)...(19): siRNA sense strand
cagaagaguucacagaaau

SEQ ID NO: 1691551 - RNA, 19 nt, Homo sapiens
  misc_RNA (1)...(19): siRNA sense strand
gaacuggagcuuauggaaa

SEQ ID NO: 1691552 - RNA, 19 nt, Homo sapiens
  misc_RNA (1)...(19): siRNA sense strand
ggagugcaaugaugaagga

SEQ ID NO: 1691553 - RNA, 19 nt, Homo sapiens
  misc_RNA (1)...(19): siRNA sense strand
ggaaagcuguaugccauga

SEQ ID NO: 1691554 - RNA, 19 nt, Homo sapiens
  misc_RNA (1)...(19): siRNA sense strand
gaauacauggcaccagaua

SEQ ID NO: 1691555 - RNA, 19 nt, Homo sapiens
  misc_RNA (1)...(19): siRNA sense strand
gaaauggaucccacuuauu

SEQ ID NO: 1691556 - RNA, 19 nt, Homo sapiens
  misc_RNA (1)...(19): siRNA sense strand
agaaauggaucccacuuau

SEQ ID NO: 1691557 - RNA, 19 nt, Homo sapiens
  misc_RNA (1)...(19): siRNA sense strand
gaguuuggguguucuaaug

SEQ ID NO: 1691558 - RNA, 19 nt, Homo sapiens
  misc_RNA (1)...(19): siRNA sense strand
agcaugaggugcagauuua

SEQ ID NO: 1691559 - RNA, 19 nt, Homo sapiens
  misc_RNA (1)...(19): siRNA sense strand
ucgaacaucuccacaaguu

SEQ ID NO: 1691560 - RNA, 19 nt, Homo sapiens
  misc_RNA (1)...(19): siRNA sense strand
aaagagagcguuucacaga

SEQ ID NO: 1691561 - RNA, 19 nt, Homo sapiens
  misc_RNA (1)...(19): siRNA sense strand
gagcaucuccuuucacugu

SEQ ID NO: 1691562 - RNA, 19 nt, Homo sapiens
  misc_RNA (1)...(19): siRNA sense strand
cagaugaaaucaaagaaca

SEQ ID NO: 1691563 - RNA, 19 nt, Homo sapiens
  misc_RNA (1)...(19): siRNA sense strand
cgagaugaauuagauguga

SEQ ID NO: 1691564 - RNA, 19 nt, Homo sapiens
  misc_RNA (1)...(19): siRNA sense strand
ccuaggaacuggagcuuau

SEQ ID NO: 1691565 - RNA, 19 nt, Homo sapiens
  misc_RNA (1)...(19): siRNA sense strand
gagcaugaggugcagauuu

SEQ ID NO: 1691566 - RNA, 19 nt, Homo sapiens
  misc_RNA (1)...(19): siRNA sense strand
gaaaccaaacuucaucuca

SEQ ID NO: 1691567 - RNA, 19 nt, Homo sapiens
  misc_RNA (1)...(19): siRNA sense strand
uauaaaugguggugaacuu

SEQ ID NO: 1691568 - RNA, 19 nt, Homo sapiens
  misc_RNA (1)...(19): siRNA sense strand
ugauggaacuucugaaugg

SEQ ID NO: 1691569 - RNA, 19 nt, Homo sapiens
  misc_RNA (1)...(19): siRNA sense strand
ugaaagaucccaagaagag

SEQ ID NO: 1691570 - RNA, 19 nt, Homo sapiens
  misc_RNA (1)...(19): siRNA sense strand
gagaaggugggaauagaaa

SEQ ID NO: 1691571 - RNA, 19 nt, Homo sapiens
  misc_RNA (1)...(19): siRNA sense strand
gaugaaggacucuccauuc

SEQ ID NO: 1691572 - RNA, 19 nt, Homo sapiens
  misc_RNA (1)...(19): siRNA sense strand
gaaauaacagcucugaaac

SEQ ID NO: 1691573 - RNA, 19 nt, Homo sapiens
  misc_RNA (1)...(19): siRNA sense strand
cagaaauggaucccacuua

SEQ ID NO: 1691574 - RNA, 19 nt, Homo sapiens
  misc_RNA (1)...(19): siRNA sense strand
ugaguaacuuugcagaaga

SEQ ID NO: 1691575 - RNA, 19 nt, Homo sapiens
  misc_RNA (1)...(19): siRNA sense strand
ccagcuacaucaugaggaa

SEQ ID NO: 1691576 - RNA, 19 nt, Homo sapiens
  misc_RNA (1)...(19): siRNA sense strand
gcugcggacugcuaauuug

SEQ ID NO: 1691577 - RNA, 19 nt, Homo sapiens
  misc_RNA (1)...(19): siRNA sense strand
gacaggacaugcugagaag

SEQ ID NO: 1691578 - RNA, 19 nt, Homo sapiens
  misc_RNA (1)...(19): siRNA sense strand
gaacuguuugagcgcauua

SEQ ID NO: 1691579 - RNA, 19 nt, Homo sapiens
  misc_RNA (1)...(19): siRNA sense strand
aaugagugcuuuagcgaaa

SEQ ID NO: 1691580 - RNA, 19 nt, Homo sapiens
  misc_RNA (1)...(19): siRNA sense strand
aaaccaaacuucaucucau

SEQ ID NO: 1691581 - RNA, 19 nt, Homo sapiens
  misc_RNA (1)...(19): siRNA sense strand
aaauggaucccacuuauuc

SEQ ID NO: 1691582 - RNA, 19 nt, Homo sapiens
  misc_RNA (1)...(19): siRNA sense strand
aaccaaacuucaucucauu

SEQ ID NO: 1691583 - RNA, 19 nt, Homo sapiens
  misc_RNA (1)...(19): siRNA sense strand
aaagcuguaugccaugaaa

SEQ ID NO: 1691584 - RNA, 19 nt, Homo sapiens
  misc_RNA (1)...(19): siRNA sense strand
gaaggacaccccaauauug

SEQ ID NO: 1691585 - RNA, 19 nt, Homo sapiens
  misc_RNA (1)...(19): siRNA sense strand
gauuuauguuggagagauu

SEQ ID NO: 1691586 - RNA, 19 nt, Homo sapiens
  misc_RNA (1)...(19): siRNA sense strand
uaaugcagcugucauagac

SEQ ID NO: 1691587 - RNA, 19 nt, Homo sapiens
  misc_RNA (1)...(19): siRNA sense strand
gcacagggaucugaaaccu

SEQ ID NO: 1691588 - RNA, 19 nt, Homo sapiens
  misc_RNA (1)...(19): siRNA sense strand
acuaugaccuagauuugaa

SEQ ID NO: 1691589 - RNA, 19 nt, Homo sapiens
  misc_RNA (1)...(19): siRNA sense strand
ucaaagagagcguuucaca

SEQ ID NO: 1691590 - RNA, 19 nt, Homo sapiens
  misc_RNA (1)...(19): siRNA sense strand
gauggaagccaauacucaa

SEQ ID NO: 1691591 - RNA, 19 nt, Homo sapiens
  misc_RNA (1)...(19): siRNA sense strand
ucauagacccucuucaguu

SEQ ID NO: 1691592 - RNA, 19 nt, Homo sapiens
  misc_RNA (1)...(19): siRNA sense strand
guaaugcagcugucauaga

SEQ ID NO: 1691593 - RNA, 19 nt, Homo sapiens
  misc_RNA (1)...(19): siRNA sense strand
ggaacuggagcuuauggaa

SEQ ID NO: 1691594 - RNA, 19 nt, Homo sapiens
  misc_RNA (1)...(19): siRNA sense strand
auacauggcaccagauauu

SEQ ID NO: 1691595 - RNA, 19 nt, Homo sapiens
  misc_RNA (1)...(19): siRNA sense strand
ggauggaagccaauacuca

SEQ ID NO: 1691596 - RNA, 19 nt, Homo sapiens
  misc_RNA (1)...(19): siRNA sense strand
uaaaauaaguggccaugau

SEQ ID NO: 1691597 - RNA, 19 nt, Homo sapiens
  misc_RNA (1)...(19): siRNA sense strand
ucagggcuauuccuuuguu

SEQ ID NO: 1691598 - RNA, 19 nt, Homo sapiens
  misc_RNA (1)...(19): siRNA sense strand
ccaagaaaugagugcuuua

SEQ ID NO: 1691599 - RNA, 19 nt, Homo sapiens
  misc_RNA (1)...(19): siRNA sense strand
ggacaugacaaggcaguug

SEQ ID NO: 1691600 - RNA, 19 nt, Homo sapiens
  misc_RNA (1)...(19): siRNA sense strand
gugaguaacuuugcagaag

SEQ ID NO: 1691601 - RNA, 19 nt, Homo sapiens
  misc_RNA (1)...(19): siRNA sense strand
aagaagagauugggaugug

SEQ ID NO: 1691602 - RNA, 19 nt, Homo sapiens
  misc_RNA (1)...(19): siRNA sense strand
cccaagaaaugagugcuuu

SEQ ID NO: 1691603 - RNA, 19 nt, Homo sapiens
  misc_RNA (1)...(19): siRNA sense strand
gacaaguccuggaacacau

SEQ ID NO: 1691604 - RNA, 19 nt, Homo sapiens
  misc_RNA (1)...(19): siRNA sense strand
ugucgaaagugugugcaua

SEQ ID NO: 1691605 - RNA, 19 nt, Homo sapiens
  misc_RNA (1)...(19): siRNA sense strand
ucaacacuaugaccuagau

SEQ ID NO: 1691606 - RNA, 19 nt, Homo sapiens
  misc_RNA (1)...(19): siRNA sense strand
uuucagggcuauuccuuug

SEQ ID NO: 1691607 - RNA, 19 nt, Homo sapiens
  misc_RNA (1)...(19): siRNA sense strand
gcaucuccuuucacuguug

SEQ ID NO: 1691608 - RNA, 19 nt, Homo sapiens
  misc_RNA (1)...(19): siRNA sense strand
ugacaggacaugcugagaa

SEQ ID NO: 1691609 - RNA, 19 nt, Homo sapiens
  misc_RNA (1)...(19): siRNA sense strand
gaaacugaaagagcauauu

SEQ ID NO: 1691610 - RNA, 19 nt, Homo sapiens
  misc_RNA (1)...(19): siRNA sense strand
agacagaaaccaaacuuca

SEQ ID NO: 1691611 - RNA, 19 nt, Homo sapiens
  misc_RNA (1)...(19): siRNA sense strand
gcguaaugcagcugucaua

SEQ ID NO: 1691612 - RNA, 19 nt, Homo sapiens
  misc_RNA (1)...(19): siRNA sense strand
guuuggguguucuaaugua

SEQ ID NO: 1691613 - RNA, 19 nt, Homo sapiens
  misc_RNA (1)...(19): siRNA sense strand
aaacugaaagagcauauuc

SEQ ID NO: 1691614 - RNA, 19 nt, Homo sapiens
  misc_RNA (1)...(19): siRNA sense strand
ggaagccagcuacaucaug

SEQ ID NO: 1691615 - RNA, 19 nt, Homo sapiens
  misc_RNA (1)...(19): siRNA sense strand
aauaacagcucugaaacuc

SEQ ID NO: 1691616 - RNA, 19 nt, Homo sapiens
  misc_RNA (1)...(19): siRNA sense strand
ugaauuagaugugaguaac

SEQ ID NO: 1691617 - RNA, 19 nt, Homo sapiens
  misc_RNA (1)...(19): siRNA sense strand
gaaaucaaagaacaucucu

SEQ ID NO: 1691618 - RNA, 19 nt, Homo sapiens
  misc_RNA (1)...(19): siRNA sense strand
gaaagaucccaagaagaga

SEQ ID NO: 1691619 - RNA, 19 nt, Homo sapiens
  misc_RNA (1)...(19): siRNA sense strand
gaccuaauucagcgucuuu

SEQ ID NO: 1691620 - RNA, 19 nt, Homo sapiens
  misc_RNA (1)...(19): siRNA sense strand
gagcugcggacugcuaauu

SEQ ID NO: 1691621 - RNA, 19 nt, Homo sapiens
  misc_RNA (1)...(19): siRNA sense strand
gauggaacuucugaaugga

SEQ ID NO: 1691622 - RNA, 19 nt, Homo sapiens
  misc_RNA (1)...(19): siRNA sense strand
augaucagcuucacacguu

SEQ ID NO: 1691623 - RNA, 19 nt, Homo sapiens
  misc_RNA (1)...(19): siRNA sense strand
ucgaaagugugugcauaaa

SEQ ID NO: 1691624 - RNA, 19 nt, Homo sapiens
  misc_RNA (1)...(19): siRNA sense strand
ugaaggacucuccauucua

SEQ ID NO: 1691625 - RNA, 19 nt, Homo sapiens
  misc_RNA (1)...(19): siRNA sense strand
caaguccuggaacacauua

SEQ ID NO: 1691626 - RNA, 19 nt, Homo sapiens
  misc_RNA (1)...(19): siRNA sense strand
gaagaguucacagaaaugg

SEQ ID NO: 1691627 - RNA, 19 nt, Homo sapiens
  misc_RNA (1)...(19): siRNA sense strand
gaggugcagauuuauguug

SEQ ID NO: 1691628 - RNA, 19 nt, Homo sapiens
  misc_RNA (1)...(19): siRNA sense strand
ccaauauugugaaguugca

SEQ ID NO: 1691629 - RNA, 19 nt, Homo sapiens
  misc_RNA (1)...(19): siRNA sense strand
guccuggagugacaaaugu

SEQ ID NO: 1691630 - RNA, 19 nt, Homo sapiens
  misc_RNA (1)...(19): siRNA sense strand
gaagcuguuucagggcuau

SEQ ID NO: 1691631 - RNA, 19 nt, Homo sapiens
  misc_RNA (1)...(19): siRNA sense strand
gaguaacuuugcagaagag

SEQ ID NO: 1691632 - RNA, 19 nt, Homo sapiens
  misc_RNA (1)...(19): siRNA sense strand
aaagugagccuccauaucc

SEQ ID NO: 1691633 - RNA, 19 nt, Homo sapiens
  misc_RNA (1)...(19): siRNA sense strand
gccauguggugcugacaga

SEQ ID NO: 1691634 - RNA, 19 nt, Homo sapiens
  misc_RNA (1)...(19): siRNA sense strand
ccucgaacaucuccacaag

SEQ ID NO: 1691635 - RNA, 19 nt, Homo sapiens
  misc_RNA (1)...(19): siRNA sense strand
gagcauacaaggacagaac

SEQ ID NO: 1691636 - RNA, 19 nt, Homo sapiens
  misc_RNA (1)...(19): siRNA sense strand
gcucugaaacucugugaag

SEQ ID NO: 1691637 - RNA, 19 nt, Homo sapiens
  misc_RNA (1)...(19): siRNA sense strand
caagaaaugagugcuuuag

SEQ ID NO: 1691638 - RNA, 19 nt, Homo sapiens
  misc_RNA (1)...(19): siRNA sense strand
gacaugacaaggcaguuga

SEQ ID NO: 1691639 - RNA, 19 nt, Homo sapiens
  misc_RNA (1)...(19): siRNA sense strand
guaagccacaugcaugaug

SEQ ID NO: 1691640 - RNA, 19 nt, Homo sapiens
  misc_RNA (1)...(19): siRNA sense strand
gaacaucucuucuuucaga

SEQ ID NO: 1691641 - RNA, 19 nt, Homo sapiens
  misc_RNA (1)...(19): siRNA sense strand
gaaggacucuccauucuau

SEQ ID NO: 1691642 - RNA, 19 nt, Homo sapiens
  misc_RNA (1)...(19): siRNA sense strand
ggaaauaacagcucugaaa

SEQ ID NO: 1691643 - RNA, 19 nt, Homo sapiens
  misc_RNA (1)...(19): siRNA sense strand
gcagaagaguucacagaaa

SEQ ID NO: 1691644 - RNA, 19 nt, Homo sapiens
  misc_RNA (1)...(19): siRNA sense strand
gaagccagcuacaucauga

SEQ ID NO: 1691645 - RNA, 19 nt, Homo sapiens
  misc_RNA (1)...(19): siRNA sense strand
gaugaaagaucccaagaag

SEQ ID NO: 1691646 - RNA, 19 nt, Homo sapiens
  misc_RNA (1)...(19): siRNA sense strand
cauagacccucuucaguuu

SEQ ID NO: 1691647 - RNA, 19 nt, Homo sapiens
  misc_RNA (1)...(19): siRNA sense strand
ugagauaucuaggagaaua

SEQ ID NO: 1691648 - RNA, 19 nt, Homo sapiens
  misc_RNA (1)...(19): siRNA sense strand
gaauggaggagaacuguuu

SEQ ID NO: 1691649 - RNA, 19 nt, Homo sapiens
  misc_RNA (1)...(19): siRNA sense strand
gcugagauaucuaggagaa

SEQ ID NO: 1691650 - RNA, 19 nt, Homo sapiens
  misc_RNA (1)...(19): siRNA sense strand
cagaagaguucacagaaau

SEQ ID NO: 1691651 - RNA, 19 nt, Homo sapiens
  misc_RNA (1)...(19): siRNA sense strand
gaacuggagcuuauggaaa

SEQ ID NO: 1691652 - RNA, 19 nt, Homo sapiens
  misc_RNA (1)...(19): siRNA sense strand
ggagugcaaugaugaagga

SEQ ID NO: 1691653 - RNA, 19 nt, Homo sapiens
  misc_RNA (1)...(19): siRNA sense strand
ggaaagcuguaugccauga

SEQ ID NO: 1691654 - RNA, 19 nt, Homo sapiens
  misc_RNA (1)...(19): siRNA sense strand
gaauacauggcaccagaua

SEQ ID NO: 1691655 - RNA, 19 nt, Homo sapiens
  misc_RNA (1)...(19): siRNA sense strand
gaaauggaucccacuuauu

SEQ ID NO: 1691656 - RNA, 19 nt, Homo sapiens
  misc_RNA (1)...(19): siRNA sense strand
agaaauggaucccacuuau

SEQ ID NO: 1691657 - RNA, 19 nt, Homo sapiens
  misc_RNA (1)...(19): siRNA sense strand
gaguuuggguguucuaaug

SEQ ID NO: 1691658 - RNA, 19 nt, Homo sapiens
  misc_RNA (1)...(19): siRNA sense strand
agcaugaggugcagauuua

SEQ ID NO: 1691659 - RNA, 19 nt, Homo sapiens
  misc_RNA (1)...(19): siRNA sense strand
ucgaacaucuccacaaguu

SEQ ID NO: 1691660 - RNA, 19 nt, Homo sapiens
  misc_RNA (1)...(19): siRNA sense strand
aaagagagcguuucacaga

SEQ ID NO: 1691661 - RNA, 19 nt, Homo sapiens
  misc_RNA (1)...(19): siRNA sense strand
gagcaucuccuuucacugu

SEQ ID NO: 1691662 - RNA, 19 nt, Homo sapiens
  misc_RNA (1)...(19): siRNA sense strand
cagaugaaaucaaagaaca

SEQ ID NO: 1691663 - RNA, 19 nt, Homo sapiens
  misc_RNA (1)...(19): siRNA sense strand
cgagaugaauuagauguga

SEQ ID NO: 1691664 - RNA, 19 nt, Homo sapiens
  misc_RNA (1)...(19): siRNA sense strand
ccuaggaacuggagcuuau

SEQ ID NO: 1691665 - RNA, 19 nt, Homo sapiens
  misc_RNA (1)...(19): siRNA sense strand
gagcaugaggugcagauuu

SEQ ID NO: 1691666 - RNA, 19 nt, Homo sapiens
  misc_RNA (1)...(19): siRNA sense strand
gaaaccaaacuucaucuca

SEQ ID NO: 1691667 - RNA, 19 nt, Homo sapiens
  misc_RNA (1)...(19): siRNA sense strand
uauaaaugguggugaacuu

SEQ ID NO: 1691668 - RNA, 19 nt, Homo sapiens
  misc_RNA (1)...(19): siRNA sense strand
ugauggaacuucugaaugg

SEQ ID NO: 1691669 - RNA, 19 nt, Homo sapiens
  misc_RNA (1)...(19): siRNA sense strand
ugaaagaucccaagaagag

SEQ ID NO: 1691670 - RNA, 19 nt, Homo sapiens
  misc_RNA (1)...(19): siRNA sense strand
gagaaggugggaauagaaa

SEQ ID NO: 1691671 - RNA, 19 nt, Homo sapiens
  misc_RNA (1)...(19): siRNA sense strand
gaugaaggacucuccauuc

SEQ ID NO: 1691672 - RNA, 19 nt, Homo sapiens
  misc_RNA (1)...(19): siRNA sense strand
gaaauaacagcucugaaac

SEQ ID NO: 1691673 - RNA, 19 nt, Homo sapiens
  misc_RNA (1)...(19): siRNA sense strand
cagaaauggaucccacuua

SEQ ID NO: 1691674 - RNA, 19 nt, Homo sapiens
  misc_RNA (1)...(19): siRNA sense strand
ugaguaacuuugcagaaga

SEQ ID NO: 1691675 - RNA, 19 nt, Homo sapiens
  misc_RNA (1)...(19): siRNA sense strand
ccagcuacaucaugaggaa

SEQ ID NO: 1691676 - RNA, 19 nt, Homo sapiens
  misc_RNA (1)...(19): siRNA sense strand
gcugcggacugcuaauuug

SEQ ID NO: 1691677 - RNA, 19 nt, Homo sapiens
  misc_RNA (1)...(19): siRNA sense strand
gacaggacaugcugagaag

SEQ ID NO: 1691678 - RNA, 19 nt, Homo sapiens
  misc_RNA (1)...(19): siRNA sense strand
gaacuguuugagcgcauua

SEQ ID NO: 1691679 - RNA, 19 nt, Homo sapiens
  misc_RNA (1)...(19): siRNA sense strand
aaugagugcuuuagcgaaa

SEQ ID NO: 1691680 - RNA, 19 nt, Homo sapiens
  misc_RNA (1)...(19): siRNA sense strand
aaaccaaacuucaucucau

SEQ ID NO: 1691681 - RNA, 19 nt, Homo sapiens
  misc_RNA (1)...(19): siRNA sense strand
aaauggaucccacuuauuc

SEQ ID NO: 1691682 - RNA, 19 nt, Homo sapiens
  misc_RNA (1)...(19): siRNA sense strand
aaccaaacuucaucucauu

SEQ ID NO: 1691683 - RNA, 19 nt, Homo sapiens
  misc_RNA (1)...(19): siRNA sense strand
aaagcuguaugccaugaaa

SEQ ID NO: 1691684 - RNA, 19 nt, Homo sapiens
  misc_RNA (1)...(19): siRNA sense strand
gaaggacaccccaauauug

SEQ ID NO: 1691685 - RNA, 19 nt, Homo sapiens
  misc_RNA (1)...(19): siRNA sense strand
gauuuauguuggagagauu

SEQ ID NO: 1691686 - RNA, 19 nt, Homo sapiens
  misc_RNA (1)...(19): siRNA sense strand
uaaugcagcugucauagac

SEQ ID NO: 1691687 - RNA, 19 nt, Homo sapiens
  misc_RNA (1)...(19): siRNA sense strand
gcacagggaucugaaaccu

SEQ ID NO: 1691688 - RNA, 19 nt, Homo sapiens
  misc_RNA (1)...(19): siRNA sense strand
acuaugaccuagauuugaa

SEQ ID NO: 1691689 - RNA, 19 nt, Homo sapiens
  misc_RNA (1)...(19): siRNA sense strand
ucaaagagagcguuucaca

SEQ ID NO: 1691690 - RNA, 19 nt, Homo sapiens
  misc_RNA (1)...(19): siRNA sense strand
gauggaagccaauacucaa

SEQ ID NO: 1691691 - RNA, 19 nt, Homo sapiens
  misc_RNA (1)...(19): siRNA sense strand
ucauagacccucuucaguu

SEQ ID NO: 1691692 - RNA, 19 nt, Homo sapiens
  misc_RNA (1)...(19): siRNA sense strand
guaaugcagcugucauaga

SEQ ID NO: 1691693 - RNA, 19 nt, Homo sapiens
  misc_RNA (1)...(19): siRNA sense strand
ggaacuggagcuuauggaa

SEQ ID NO: 1691694 - RNA, 19 nt, Homo sapiens
  misc_RNA (1)...(19): siRNA sense strand
auacauggcaccagauauu

SEQ ID NO: 1691695 - RNA, 19 nt, Homo sapiens
  misc_RNA (1)...(19): siRNA sense strand
ggauggaagccaauacuca

SEQ ID NO: 1691696 - RNA, 19 nt, Homo sapiens
  misc_RNA (1)...(19): siRNA sense strand
uaaaauaaguggccaugau

SEQ ID NO: 1691697 - RNA, 19 nt, Homo sapiens
  misc_RNA (1)...(19): siRNA sense strand
ucagggcuauuccuuuguu

SEQ ID NO: 1691698 - RNA, 19 nt, Homo sapiens
  misc_RNA (1)...(19): siRNA sense strand
ccaagaaaugagugcuuua

SEQ ID NO: 1691699 - RNA, 19 nt, Homo sapiens
  misc_RNA (1)...(19): siRNA sense strand
ggacaugacaaggcaguug

SEQ ID NO: 1691700 - RNA, 19 nt, Homo sapiens
  misc_RNA (1)...(19): siRNA sense strand
gugaguaacuuugcagaag

SEQ ID NO: 1691701 - RNA, 19 nt, Homo sapiens
  misc_RNA (1)...(19): siRNA sense strand
aagaagagauugggaugug

SEQ ID NO: 1691702 - RNA, 19 nt, Homo sapiens
  misc_RNA (1)...(19): siRNA sense strand
cccaagaaaugagugcuuu

SEQ ID NO: 1691703 - RNA, 19 nt, Homo sapiens
  misc_RNA (1)...(19): siRNA sense strand
gacaaguccuggaacacau

SEQ ID NO: 1691704 - RNA, 19 nt, Homo sapiens
  misc_RNA (1)...(19): siRNA sense strand
ugucgaaagugugugcaua

SEQ ID NO: 1691705 - RNA, 19 nt, Homo sapiens
  misc_RNA (1)...(19): siRNA sense strand
ucaacacuaugaccuagau

SEQ ID NO: 1691706 - RNA, 19 nt, Homo sapiens
  misc_RNA (1)...(19): siRNA sense strand
uuucagggcuauuccuuug

SEQ ID NO: 1691707 - RNA, 19 nt, Homo sapiens
  misc_RNA (1)...(19): siRNA sense strand
gcaucuccuuucacuguug

SEQ ID NO: 1691708 - RNA, 19 nt, Homo sapiens
  misc_RNA (1)...(19): siRNA sense strand
ugacaggacaugcugagaa

SEQ ID NO: 1691709 - RNA, 19 nt, Homo sapiens
  misc_RNA (1)...(19): siRNA sense strand
gaaacugaaagagcauauu

SEQ ID NO: 1691710 - RNA, 19 nt, Homo sapiens
  misc_RNA (1)...(19): siRNA sense strand
agacagaaaccaaacuuca

SEQ ID NO: 1691711 - RNA, 19 nt, Homo sapiens
  misc_RNA (1)...(19): siRNA sense strand
gcguaaugcagcugucaua

SEQ ID NO: 1691712 - RNA, 19 nt, Homo sapiens
  misc_RNA (1)...(19): siRNA sense strand
guuuggguguucuaaugua

SEQ ID NO: 1691713 - RNA, 19 nt, Homo sapiens
  misc_RNA (1)...(19): siRNA sense strand
aaacugaaagagcauauuc

SEQ ID NO: 1691714 - RNA, 19 nt, Homo sapiens
  misc_RNA (1)...(19): siRNA sense strand
ggaagccagcuacaucaug

SEQ ID NO: 1691715 - RNA, 19 nt, Homo sapiens
  misc_RNA (1)...(19): siRNA sense strand
aauaacagcucugaaacuc

SEQ ID NO: 1691716 - RNA, 19 nt, Homo sapiens
  misc_RNA (1)...(19): siRNA sense strand
ugaauuagaugugaguaac

SEQ ID NO: 1691717 - RNA, 19 nt, Homo sapiens
  misc_RNA (1)...(19): siRNA sense strand
gaaaucaaagaacaucucu

SEQ ID NO: 1691718 - RNA, 19 nt, Homo sapiens
  misc_RNA (1)...(19): siRNA sense strand
gaaagaucccaagaagaga

SEQ ID NO: 1691719 - RNA, 19 nt, Homo sapiens
  misc_RNA (1)...(19): siRNA sense strand
gaccuaauucagcgucuuu

SEQ ID NO: 1691720 - RNA, 19 nt, Homo sapiens
  misc_RNA (1)...(19): siRNA sense strand
gagcugcggacugcuaauu

SEQ ID NO: 1691721 - RNA, 19 nt, Homo sapiens
  misc_RNA (1)...(19): siRNA sense strand
gauggaacuucugaaugga

SEQ ID NO: 1691722 - RNA, 19 nt, Homo sapiens
  misc_RNA (1)...(19): siRNA sense strand
augaucagcuucacacguu

SEQ ID NO: 1691723 - RNA, 19 nt, Homo sapiens
  misc_RNA (1)...(19): siRNA sense strand
ucgaaagugugugcauaaa

SEQ ID NO: 1691724 - RNA, 19 nt, Homo sapiens
  misc_RNA (1)...(19): siRNA sense strand
ugaaggacucuccauucua

SEQ ID NO: 1691725 - RNA, 19 nt, Homo sapiens
  misc_RNA (1)...(19): siRNA sense strand
caaguccuggaacacauua

SEQ ID NO: 1691726 - RNA, 19 nt, Homo sapiens
  misc_RNA (1)...(19): siRNA sense strand
gaagaguucacagaaaugg

SEQ ID NO: 1691727 - RNA, 19 nt, Homo sapiens
  misc_RNA (1)...(19): siRNA sense strand
gaggugcagauuuauguug

SEQ ID NO: 1691728 - RNA, 19 nt, Homo sapiens
  misc_RNA (1)...(19): siRNA sense strand
ccaauauugugaaguugca

SEQ ID NO: 1691729 - RNA, 19 nt, Homo sapiens
  misc_RNA (1)...(19): siRNA sense strand
guccuggagugacaaaugu

SEQ ID NO: 1691730 - RNA, 19 nt, Homo sapiens
  misc_RNA (1)...(19): siRNA sense strand
gaagcuguuucagggcuau

SEQ ID NO: 1691731 - RNA, 19 nt, Homo sapiens
  misc_RNA (1)...(19): siRNA sense strand
gaguaacuuugcagaagag

SEQ ID NO: 1691732 - RNA, 19 nt, Homo sapiens
  misc_RNA (1)...(19): siRNA sense strand
aaagugagccuccauaucc

SEQ ID NO: 1691733 - RNA, 19 nt, Homo sapiens
  misc_RNA (1)...(19): siRNA sense strand
gccauguggugcugacaga

SEQ ID NO: 1691734 - RNA, 19 nt, Homo sapiens
  misc_RNA (1)...(19): siRNA sense strand
ccucgaacaucuccacaag

SEQ ID NO: 1691735 - RNA, 19 nt, Homo sapiens
  misc_RNA (1)...(19): siRNA sense strand
gagcauacaaggacagaac

SEQ ID NO: 1691736 - RNA, 19 nt, Homo sapiens
  misc_RNA (1)...(19): siRNA sense strand
gcucugaaacucugugaag

SEQ ID NO: 1691737 - RNA, 19 nt, Homo sapiens
  misc_RNA (1)...(19): siRNA sense strand
caagaaaugagugcuuuag

SEQ ID NO: 1691738 - RNA, 19 nt, Homo sapiens
  misc_RNA (1)...(19): siRNA sense strand
gacaugacaaggcaguuga

SEQ ID NO: 1691739 - RNA, 19 nt, Homo sapiens
  misc_RNA (1)...(19): siRNA sense strand
guaagccacaugcaugaug

SEQ ID NO: 1691740 - RNA, 19 nt, Homo sapiens
  misc_RNA (1)...(19): siRNA sense strand
auagauagcucccaaauua

SEQ ID NO: 1691741 - RNA, 19 nt, Homo sapiens
  misc_RNA (1)...(19): siRNA sense strand
caaugaagcugaauaaaga

SEQ ID NO: 1691742 - RNA, 19 nt, Homo sapiens
  misc_RNA (1)...(19): siRNA sense strand
ccaagcaacuuacauauga

SEQ ID NO: 1691743 - RNA, 19 nt, Homo sapiens
  misc_RNA (1)...(19): siRNA sense strand
gaacaacgguuucgcucuu

SEQ ID NO: 1691744 - RNA, 19 nt, Homo sapiens
  misc_RNA (1)...(19): siRNA sense strand
acucaacacuggcuaauua

SEQ ID NO: 1691745 - RNA, 19 nt, Homo sapiens
  misc_RNA (1)...(19): siRNA sense strand
ggaggcaaauauccaguua

SEQ ID NO: 1691746 - RNA, 19 nt, Homo sapiens
  misc_RNA (1)...(19): siRNA sense strand
cuggauagauugacauuua

SEQ ID NO: 1691747 - RNA, 19 nt, Homo sapiens
  misc_RNA (1)...(19): siRNA sense strand
gaucuuguuuggaaguuua

SEQ ID NO: 1691748 - RNA, 19 nt, Homo sapiens
  misc_RNA (1)...(19): siRNA sense strand
gaaaguagauuggcuggau

SEQ ID NO: 1691749 - RNA, 19 nt, Homo sapiens
  misc_RNA (1)...(19): siRNA sense strand
gagauguacuugaacguaa

SEQ ID NO: 1691750 - RNA, 19 nt, Homo sapiens
  misc_RNA (1)...(19): siRNA sense strand
ccacauagacuuuggauau

SEQ ID NO: 1691751 - RNA, 19 nt, Homo sapiens
  misc_RNA (1)...(19): siRNA sense strand
gguccaggcucucaaauau

SEQ ID NO: 1691752 - RNA, 19 nt, Homo sapiens
  misc_RNA (1)...(19): siRNA sense strand
uagauuggcuggauagauu

SEQ ID NO: 1691753 - RNA, 19 nt, Homo sapiens
  misc_RNA (1)...(19): siRNA sense strand
ggaacagauucacaaguuu

SEQ ID NO: 1691754 - RNA, 19 nt, Homo sapiens
  misc_RNA (1)...(19): siRNA sense strand
gacaugcucugaucuuuau

SEQ ID NO: 1691755 - RNA, 19 nt, Homo sapiens
  misc_RNA (1)...(19): siRNA sense strand
gaaguucucaggacuauau

SEQ ID NO: 1691756 - RNA, 19 nt, Homo sapiens
  misc_RNA (1)...(19): siRNA sense strand
gcuuagaccugucggauga

SEQ ID NO: 1691757 - RNA, 19 nt, Homo sapiens
  misc_RNA (1)...(19): siRNA sense strand
gcacacagagugagcagua

SEQ ID NO: 1691758 - RNA, 19 nt, Homo sapiens
  misc_RNA (1)...(19): siRNA sense strand
gcagagaaguuucacuaca

SEQ ID NO: 1691759 - RNA, 19 nt, Homo sapiens
  misc_RNA (1)...(19): siRNA sense strand
caaccaagcaacuuacaua

SEQ ID NO: 1691760 - RNA, 19 nt, Homo sapiens
  misc_RNA (1)...(19): siRNA sense strand
caccaaagcucaucgacaa

SEQ ID NO: 1691761 - RNA, 19 nt, Homo sapiens
  misc_RNA (1)...(19): siRNA sense strand
gauauugcgugaucaccua

SEQ ID NO: 1691762 - RNA, 19 nt, Homo sapiens
  misc_RNA (1)...(19): siRNA sense strand
aggcaaauauccaguuaua

SEQ ID NO: 1691763 - RNA, 19 nt, Homo sapiens
  misc_RNA (1)...(19): siRNA sense strand
caacacuggcuaauuauuu

SEQ ID NO: 1691764 - RNA, 19 nt, Homo sapiens
  misc_RNA (1)...(19): siRNA sense strand
gaauuuaguugagagcaaa

SEQ ID NO: 1691765 - RNA, 19 nt, Homo sapiens
  misc_RNA (1)...(19): siRNA sense strand
caacagacauuuguagauc

SEQ ID NO: 1691766 - RNA, 19 nt, Homo sapiens
  misc_RNA (1)...(19): siRNA sense strand
cgagagaucaguuaaauau

SEQ ID NO: 1691767 - RNA, 19 nt, Homo sapiens
  misc_RNA (1)...(19): siRNA sense strand
gaaccuaccaagaaggaua

SEQ ID NO: 1691768 - RNA, 19 nt, Homo sapiens
  misc_RNA (1)...(19): siRNA sense strand
gaagcugaauaaagaaaug

SEQ ID NO: 1691769 - RNA, 19 nt, Homo sapiens
  misc_RNA (1)...(19): siRNA sense strand
gauaucaacguccagcuua

SEQ ID NO: 1691770 - RNA, 19 nt, Homo sapiens
  misc_RNA (1)...(19): siRNA sense strand
gaaagucuggccuaaugua

SEQ ID NO: 1691771 - RNA, 19 nt, Homo sapiens
  misc_RNA (1)...(19): siRNA sense strand
gaacagauucacaaguuug

SEQ ID NO: 1691772 - RNA, 19 nt, Homo sapiens
  misc_RNA (1)...(19): siRNA sense strand
gcucugaucuuuauguuac

SEQ ID NO: 1691773 - RNA, 19 nt, Homo sapiens
  misc_RNA (1)...(19): siRNA sense strand
gaaaguggaaaucguaaga

SEQ ID NO: 1691774 - RNA, 19 nt, Homo sapiens
  misc_RNA (1)...(19): siRNA sense strand
ccaaguggcccucaccaua

SEQ ID NO: 1691775 - RNA, 19 nt, Homo sapiens
  misc_RNA (1)...(19): siRNA sense strand
gaugguugaugcaaacauu

SEQ ID NO: 1691776 - RNA, 19 nt, Homo sapiens
  misc_RNA (1)...(19): siRNA sense strand
gagacaugcucugaucuuu

SEQ ID NO: 1691777 - RNA, 19 nt, Homo sapiens
  misc_RNA (1)...(19): siRNA sense strand
cauggacacuuacguuaaa

SEQ ID NO: 1691778 - RNA, 19 nt, Homo sapiens
  misc_RNA (1)...(19): siRNA sense strand
ggaagccgauggauguaga

SEQ ID NO: 1691779 - RNA, 19 nt, Homo sapiens
  misc_RNA (1)...(19): siRNA sense strand
caagugugaugauaaggaa

SEQ ID NO: 1691780 - RNA, 19 nt, Homo sapiens
  misc_RNA (1)...(19): siRNA sense strand
uggaacagauucacaaguu

SEQ ID NO: 1691781 - RNA, 19 nt, Homo sapiens
  misc_RNA (1)...(19): siRNA sense strand
gaaauugacaccuuauaag

SEQ ID NO: 1691782 - RNA, 19 nt, Homo sapiens
  misc_RNA (1)...(19): siRNA sense strand
aaucuggacuugaaauuga

SEQ ID NO: 1691783 - RNA, 19 nt, Homo sapiens
  misc_RNA (1)...(19): siRNA sense strand
gacggaagauggaggcaaa

SEQ ID NO: 1691784 - RNA, 19 nt, Homo sapiens
  misc_RNA (1)...(19): siRNA sense strand
caaagacccaugagaugua

SEQ ID NO: 1691785 - RNA, 19 nt, Homo sapiens
  misc_RNA (1)...(19): siRNA sense strand
caagaucucuguaccuucu

SEQ ID NO: 1691786 - RNA, 19 nt, Homo sapiens
  misc_RNA (1)...(19): siRNA sense strand
gaugcaaacauuccagaua

SEQ ID NO: 1691787 - RNA, 19 nt, Homo sapiens
  misc_RNA (1)...(19): siRNA sense strand
ggcaaacucuuccacauag

SEQ ID NO: 1691788 - RNA, 19 nt, Homo sapiens
  misc_RNA (1)...(19): siRNA sense strand
gagcuguuauccucucauu

SEQ ID NO: 1691789 - RNA, 19 nt, Homo sapiens
  misc_RNA (1)...(19): siRNA sense strand
cacauagacuuuggauaua

SEQ ID NO: 1691790 - RNA, 19 nt, Homo sapiens
  misc_RNA (1)...(19): siRNA sense strand
gaaagaaaaucuggacuug

SEQ ID NO: 1691791 - RNA, 19 nt, Homo sapiens
  misc_RNA (1)...(19): siRNA sense strand
gcauggagaugauuuacgu

SEQ ID NO: 1691792 - RNA, 19 nt, Homo sapiens
  misc_RNA (1)...(19): siRNA sense strand
caacguccagcuuaagaua

SEQ ID NO: 1691793 - RNA, 19 nt, Homo sapiens
  misc_RNA (1)...(19): siRNA sense strand
gagaacauccuacaaagca

SEQ ID NO: 1691794 - RNA, 19 nt, Homo sapiens
  misc_RNA (1)...(19): siRNA sense strand
gcaaacauuccagauauug

SEQ ID NO: 1691795 - RNA, 19 nt, Homo sapiens
  misc_RNA (1)...(19): siRNA sense strand
gugaucaccuauauacuug

SEQ ID NO: 1691796 - RNA, 19 nt, Homo sapiens
  misc_RNA (1)...(19): siRNA sense strand
gaagauggaggcaaauauc

SEQ ID NO: 1691797 - RNA, 19 nt, Homo sapiens
  misc_RNA (1)...(19): siRNA sense strand
gcgaaaaucuggaacaaga

SEQ ID NO: 1691798 - RNA, 19 nt, Homo sapiens
  misc_RNA (1)...(19): siRNA sense strand
caagaaggauagucagagu

SEQ ID NO: 1691799 - RNA, 19 nt, Homo sapiens
  misc_RNA (1)...(19): siRNA sense strand
aaacaggccuuggaacuuc

SEQ ID NO: 1691800 - RNA, 19 nt, Homo sapiens
  misc_RNA (1)...(19): siRNA sense strand
ucauguaccugaugguuga

SEQ ID NO: 1691801 - RNA, 19 nt, Homo sapiens
  misc_RNA (1)...(19): siRNA sense strand
agaagcagauggaucagaa

SEQ ID NO: 1691802 - RNA, 19 nt, Homo sapiens
  misc_RNA (1)...(19): siRNA sense strand
gaacauccuacaaagcauu

SEQ ID NO: 1691803 - RNA, 19 nt, Homo sapiens
  misc_RNA (1)...(19): siRNA sense strand
caaagcauuuaguacaaga

SEQ ID NO: 1691804 - RNA, 19 nt, Homo sapiens
  misc_RNA (1)...(19): siRNA sense strand
ggagaugauuuacgucaag

SEQ ID NO: 1691805 - RNA, 19 nt, Homo sapiens
  misc_RNA (1)...(19): siRNA sense strand
gaugaggauuuguugaugu

SEQ ID NO: 1691806 - RNA, 19 nt, Homo sapiens
  misc_RNA (1)...(19): siRNA sense strand
gaucagaugagccgucuug

SEQ ID NO: 1691807 - RNA, 19 nt, Homo sapiens
  misc_RNA (1)...(19): siRNA sense strand
guagcacucucucagaaga

SEQ ID NO: 1691808 - RNA, 19 nt, Homo sapiens
  misc_RNA (1)...(19): siRNA sense strand
gggaagcauucagaacuuu

SEQ ID NO: 1691809 - RNA, 19 nt, Homo sapiens
  misc_RNA (1)...(19): siRNA sense strand
gaugauaaggaauauggua

SEQ ID NO: 1691810 - RNA, 19 nt, Homo sapiens
  misc_RNA (1)...(19): siRNA sense strand
agaugucuauggagaauuu

SEQ ID NO: 1691811 - RNA, 19 nt, Homo sapiens
  misc_RNA (1)...(19): siRNA sense strand
ccaccaaccaagcaacuua

SEQ ID NO: 1691812 - RNA, 19 nt, Homo sapiens
  misc_RNA (1)...(19): siRNA sense strand
gagcaaacaccacaagcuu

SEQ ID NO: 1691813 - RNA, 19 nt, Homo sapiens
  misc_RNA (1)...(19): siRNA sense strand
gaauuucgaugugucaagu

SEQ ID NO: 1691814 - RNA, 19 nt, Homo sapiens
  misc_RNA (1)...(19): siRNA sense strand
gaaaauaugcaccaaguga

SEQ ID NO: 1691815 - RNA, 19 nt, Homo sapiens
  misc_RNA (1)...(19): siRNA sense strand
ggaagauggaggcaaauau

SEQ ID NO: 1691816 - RNA, 19 nt, Homo sapiens
  misc_RNA (1)...(19): siRNA sense strand
guacaacgcgaaaguggaa

SEQ ID NO: 1691817 - RNA, 19 nt, Homo sapiens
  misc_RNA (1)...(19): siRNA sense strand
gaaaaugugucaaauucug

SEQ ID NO: 1691818 - RNA, 19 nt, Homo sapiens
  misc_RNA (1)...(19): siRNA sense strand
gaaguuucacuacaucuau

SEQ ID NO: 1691819 - RNA, 19 nt, Homo sapiens
  misc_RNA (1)...(19): siRNA sense strand
aaaguagauuggcuggaua

SEQ ID NO: 1691820 - RNA, 19 nt, Homo sapiens
  misc_RNA (1)...(19): siRNA sense strand
gcaaacucuuccacauaga

SEQ ID NO: 1691821 - RNA, 19 nt, Homo sapiens
  misc_RNA (1)...(19): siRNA sense strand
ugucagauguggaacuuau

SEQ ID NO: 1691822 - RNA, 19 nt, Homo sapiens
  misc_RNA (1)...(19): siRNA sense strand
gaauuugucagauguggaa

SEQ ID NO: 1691823 - RNA, 19 nt, Homo sapiens
  misc_RNA (1)...(19): siRNA sense strand
guugugaccuggauaucaa

SEQ ID NO: 1691824 - RNA, 19 nt, Homo sapiens
  misc_RNA (1)...(19): siRNA sense strand
cagagaaguuucacuacau

SEQ ID NO: 1691825 - RNA, 19 nt, Homo sapiens
  misc_RNA (1)...(19): siRNA sense strand
gccaagggaugcaugacuu

SEQ ID NO: 1691826 - RNA, 19 nt, Homo sapiens
  misc_RNA (1)...(19): siRNA sense strand
gcgaagguauucuaaucug

SEQ ID NO: 1691827 - RNA, 19 nt, Homo sapiens
  misc_RNA (1)...(19): siRNA sense strand
cccaugagauguacuugaa

SEQ ID NO: 1691828 - RNA, 19 nt, Homo sapiens
  misc_RNA (1)...(19): siRNA sense strand
gaaugugaagaucaagaua

SEQ ID NO: 1691829 - RNA, 19 nt, Homo sapiens
  misc_RNA (1)...(19): siRNA sense strand
gauagcucccaaauuauaa

SEQ ID NO: 1691830 - RNA, 19 nt, Homo sapiens
  misc_RNA (1)...(19): siRNA sense strand
agauagcucccaaauuaua

SEQ ID NO: 1691831 - RNA, 19 nt, Homo sapiens
  misc_RNA (1)...(19): siRNA sense strand
gcccggaguuuaagaagug

SEQ ID NO: 1691832 - RNA, 19 nt, Homo sapiens
  misc_RNA (1)...(19): siRNA sense strand
gaacguaaugagaagauuc

SEQ ID NO: 1691833 - RNA, 19 nt, Homo sapiens
  misc_RNA (1)...(19): siRNA sense strand
augaagaggcugugcauua

SEQ ID NO: 1691834 - RNA, 19 nt, Homo sapiens
  misc_RNA (1)...(19): siRNA sense strand
caggauaaauuccgcuuag

SEQ ID NO: 1691835 - RNA, 19 nt, Homo sapiens
  misc_RNA (1)...(19): siRNA sense strand
cgaagguauucuaaucuga

SEQ ID NO: 1691836 - RNA, 19 nt, Homo sapiens
  misc_RNA (1)...(19): siRNA sense strand
ccaaugaagcugaauaaag

SEQ ID NO: 1691837 - RNA, 19 nt, Homo sapiens
  misc_RNA (1)...(19): siRNA sense strand
gaucaccuauauacuugga

SEQ ID NO: 1691838 - RNA, 19 nt, Homo sapiens
  misc_RNA (1)...(19): siRNA sense strand
gacaagcuguuacggaaag

SEQ ID NO: 1691839 - RNA, 19 nt, Homo sapiens
  misc_RNA (1)...(19): siRNA sense strand
gaagggaagagagaacaaa

SEQ ID NO: 1691840 - RNA, 19 nt, Homo sapiens
  misc_RNA (1)...(19): siRNA sense strand
ccaaggcugucaccaagua

SEQ ID NO: 1691841 - RNA, 19 nt, Homo sapiens
  misc_RNA (1)...(19): siRNA sense strand
gcaaggagagcuauucuau

SEQ ID NO: 1691842 - RNA, 19 nt, Homo sapiens
  misc_RNA (1)...(19): siRNA sense strand
ggagagcuauucuaucuac

SEQ ID NO: 1691843 - RNA, 19 nt, Homo sapiens
  misc_RNA (1)...(19): siRNA sense strand
gcuauucuaucuacgugua

SEQ ID NO: 1691844 - RNA, 19 nt, Homo sapiens
  misc_RNA (1)...(19): siRNA sense strand
gaagaaggacggcaagaag

SEQ ID NO: 1691845 - RNA, 19 nt, Homo sapiens
  misc_RNA (1)...(19): siRNA sense strand
aaggagagcuauucuaucu

SEQ ID NO: 1691846 - RNA, 19 nt, Homo sapiens
  misc_RNA (1)...(19): siRNA sense strand
gcaccaaggcugucaccaa

SEQ ID NO: 1691847 - RNA, 19 nt, Homo sapiens
  misc_RNA (1)...(19): siRNA sense strand
ugaacuccuucgucaauga

SEQ ID NO: 1691848 - RNA, 19 nt, Homo sapiens
  misc_RNA (1)...(19): siRNA sense strand
aacaagcgcuccaccauca

SEQ ID NO: 1691849 - RNA, 19 nt, Homo sapiens
  misc_RNA (1)...(19): siRNA sense strand
guacaccagcuccaaguga

SEQ ID NO: 1691850 - RNA, 19 nt, Homo sapiens
  misc_RNA (1)...(19): siRNA sense strand
ccaaggcacagaagaagga

SEQ ID NO: 1691851 - RNA, 19 nt, Homo sapiens
  misc_RNA (1)...(19): siRNA sense strand
caugaacuccuucgucaau

SEQ ID NO: 1691852 - RNA, 19 nt, Homo sapiens
  misc_RNA (1)...(19): siRNA sense strand
ucaccaaggcacagaagaa

SEQ ID NO: 1691853 - RNA, 19 nt, Homo sapiens
  misc_RNA (1)...(19): siRNA sense strand
agaagaaggacggcaagaa

SEQ ID NO: 1691854 - RNA, 19 nt, Homo sapiens
  misc_RNA (1)...(19): siRNA sense strand
caucacgucccgcgaagug

SEQ ID NO: 1691855 - RNA, 19 nt, Homo sapiens
  misc_RNA (1)...(19): siRNA sense strand
caaggagagcuauucuauc

SEQ ID NO: 1691856 - RNA, 19 nt, Homo sapiens
  misc_RNA (1)...(19): siRNA sense strand
ccaaguacaccagcuccaa

SEQ ID NO: 1691857 - RNA, 19 nt, Homo sapiens
  misc_RNA (1)...(19): siRNA sense strand
acaccggcaucucguccaa

SEQ ID NO: 1691858 - RNA, 19 nt, Homo sapiens
  misc_RNA (1)...(19): siRNA sense strand
cuaucuacguguacaaggu

SEQ ID NO: 1691859 - RNA, 19 nt, Homo sapiens
  misc_RNA (1)...(19): siRNA sense strand
gccagaagaucuacaauua

SEQ ID NO: 1691860 - RNA, 19 nt, Homo sapiens
  misc_RNA (1)...(19): siRNA sense strand
gagacaaacuucacuuuaa

SEQ ID NO: 1691861 - RNA, 19 nt, Homo sapiens
  misc_RNA (1)...(19): siRNA sense strand
ggaacugucuaguaucuua

SEQ ID NO: 1691862 - RNA, 19 nt, Homo sapiens
  misc_RNA (1)...(19): siRNA sense strand
gggaaucuguaaagaaaua

SEQ ID NO: 1691863 - RNA, 19 nt, Homo sapiens
  misc_RNA (1)...(19): siRNA sense strand
caguaaaucucacaaauga

SEQ ID NO: 1691864 - RNA, 19 nt, Homo sapiens
  misc_RNA (1)...(19): siRNA sense strand
ggagugcuguucugcuuua

SEQ ID NO: 1691865 - RNA, 19 nt, Homo sapiens
  misc_RNA (1)...(19): siRNA sense strand
ggagcaauauacuaucaua

SEQ ID NO: 1691866 - RNA, 19 nt, Homo sapiens
  misc_RNA (1)...(19): siRNA sense strand
aaacacaucuggccuaaug

SEQ ID NO: 1691867 - RNA, 19 nt, Homo sapiens
  misc_RNA (1)...(19): siRNA sense strand
caagugggaucaccuauga

SEQ ID NO: 1691868 - RNA, 19 nt, Homo sapiens
  misc_RNA (1)...(19): siRNA sense strand
gaucaaauguauucagaug

SEQ ID NO: 1691869 - RNA, 19 nt, Homo sapiens
  misc_RNA (1)...(19): siRNA sense strand
ggagacaaacuucacuuua

SEQ ID NO: 1691870 - RNA, 19 nt, Homo sapiens
  misc_RNA (1)...(19): siRNA sense strand
aaacgaagcugucuuagag

SEQ ID NO: 1691871 - RNA, 19 nt, Homo sapiens
  misc_RNA (1)...(19): siRNA sense strand
gaaggaugguccagaauuc

SEQ ID NO: 1691872 - RNA, 19 nt, Homo sapiens
  misc_RNA (1)...(19): siRNA sense strand
gaauauacauuguccucuu

SEQ ID NO: 1691873 - RNA, 19 nt, Homo sapiens
  misc_RNA (1)...(19): siRNA sense strand
cagaggaacugucuaguau

SEQ ID NO: 1691874 - RNA, 19 nt, Homo sapiens
  misc_RNA (1)...(19): siRNA sense strand
cagaauggauuuaucagaa

SEQ ID NO: 1691875 - RNA, 19 nt, Homo sapiens
  misc_RNA (1)...(19): siRNA sense strand
guccagauauuucacauuu

SEQ ID NO: 1691876 - RNA, 19 nt, Homo sapiens
  misc_RNA (1)...(19): siRNA sense strand
gaacuuagcagagagcaaa

SEQ ID NO: 1691877 - RNA, 19 nt, Homo sapiens
  misc_RNA (1)...(19): siRNA sense strand
gaaaugaaacugcugugaa

SEQ ID NO: 1691878 - RNA, 19 nt, Homo sapiens
  misc_RNA (1)...(19): siRNA sense strand
gugcuguucugcuuuaaua

SEQ ID NO: 1691879 - RNA, 19 nt, Homo sapiens
  misc_RNA (1)...(19): siRNA sense strand
caaaucagaugcagcuguu

SEQ ID NO: 1691880 - RNA, 19 nt, Homo sapiens
  misc_RNA (1)...(19): siRNA sense strand
ggacacagcagugguauug

SEQ ID NO: 1691881 - RNA, 19 nt, Homo sapiens
  misc_RNA (1)...(19): siRNA sense strand
gacaguaaaucucacaaau

SEQ ID NO: 1691882 - RNA, 19 nt, Homo sapiens
  misc_RNA (1)...(19): siRNA sense strand
cuaauuacauugucuggaa

SEQ ID NO: 1691883 - RNA, 19 nt, Homo sapiens
  misc_RNA (1)...(19): siRNA sense strand
gaacugcagucagcaugaa

SEQ ID NO: 1691884 - RNA, 19 nt, Homo sapiens
  misc_RNA (1)...(19): siRNA sense strand
uccaagaccuuaaaccuuu

SEQ ID NO: 1691885 - RNA, 19 nt, Homo sapiens
  misc_RNA (1)...(19): siRNA sense strand
cagaagaucuacaauuagu

SEQ ID NO: 1691886 - RNA, 19 nt, Homo sapiens
  misc_RNA (1)...(19): siRNA sense strand
cagaauauguguuuaggau

SEQ ID NO: 1691887 - RNA, 19 nt, Homo sapiens
  misc_RNA (1)...(19): siRNA sense strand
ccaaagaugccucaacuug

SEQ ID NO: 1691888 - RNA, 19 nt, Homo sapiens
  misc_RNA (1)...(19): siRNA sense strand
gaaggacacagcaguggua

SEQ ID NO: 1691889 - RNA, 19 nt, Homo sapiens
  misc_RNA (1)...(19): siRNA sense strand
caauuucacugauguaagu

SEQ ID NO: 1691890 - RNA, 19 nt, Homo sapiens
  misc_RNA (1)...(19): siRNA sense strand
aagggaaucuguaaagaaa

SEQ ID NO: 1691891 - RNA, 19 nt, Homo sapiens
  misc_RNA (1)...(19): siRNA sense strand
gggaucaccuaugaagaua

SEQ ID NO: 1691892 - RNA, 19 nt, Homo sapiens
  misc_RNA (1)...(19): siRNA sense strand
caaagcaaguuucaucagu

SEQ ID NO: 1691893 - RNA, 19 nt, Homo sapiens
  misc_RNA (1)...(19): siRNA sense strand
ggaaggaugguccagaauu

SEQ ID NO: 1691894 - RNA, 19 nt, Homo sapiens
  misc_RNA (1)...(19): siRNA sense strand
ccaauccgccacauaauuu

SEQ ID NO: 1691895 - RNA, 19 nt, Homo sapiens
  misc_RNA (1)...(19): siRNA sense strand
aaaugaaacugcugugaau

SEQ ID NO: 1691896 - RNA, 19 nt, Homo sapiens
  misc_RNA (1)...(19): siRNA sense strand
aaagaugccucaacuugga

SEQ ID NO: 1691897 - RNA, 19 nt, Homo sapiens
  misc_RNA (1)...(19): siRNA sense strand
gaccaaagaugccucaacu

SEQ ID NO: 1691898 - RNA, 19 nt, Homo sapiens
  misc_RNA (1)...(19): siRNA sense strand
gauccuguauauaaaguga

SEQ ID NO: 1691899 - RNA, 19 nt, Homo sapiens
  misc_RNA (1)...(19): siRNA sense strand
aaaguuugcucaaggagaa

SEQ ID NO: 1691900 - RNA, 19 nt, Homo sapiens
  misc_RNA (1)...(19): siRNA sense strand
ccacacagaauauacauug

SEQ ID NO: 1691901 - RNA, 19 nt, Homo sapiens
  misc_RNA (1)...(19): siRNA sense strand
gaggaacugucuaguaucu

SEQ ID NO: 1691902 - RNA, 19 nt, Homo sapiens
  misc_RNA (1)...(19): siRNA sense strand
guagaaagauuugaaacag

SEQ ID NO: 1691903 - RNA, 19 nt, Homo sapiens
  misc_RNA (1)...(19): siRNA sense strand
guauucagauggcaauuuc

SEQ ID NO: 1691904 - RNA, 19 nt, Homo sapiens
  misc_RNA (1)...(19): siRNA sense strand
ggaccaacccaaguauuaa

SEQ ID NO: 1691905 - RNA, 19 nt, Homo sapiens
  misc_RNA (1)...(19): siRNA sense strand
uaauuucacugcaguuugu

SEQ ID NO: 1691906 - RNA, 19 nt, Homo sapiens
  misc_RNA (1)...(19): siRNA sense strand
aggaagcccugaauccaua

SEQ ID NO: 1691907 - RNA, 19 nt, Homo sapiens
  misc_RNA (1)...(19): siRNA sense strand
ccucaugcacuguugauua

SEQ ID NO: 1691908 - RNA, 19 nt, Homo sapiens
  misc_RNA (1)...(19): siRNA sense strand
ggacaaguagaaagauuug

SEQ ID NO: 1691909 - RNA, 19 nt, Homo sapiens
  misc_RNA (1)...(19): siRNA sense strand
uaagcgagaccuaauuaaa

SEQ ID NO: 1691910 - RNA, 19 nt, Homo sapiens
  misc_RNA (1)...(19): siRNA sense strand
agucgugccuguuugcuua

SEQ ID NO: 1691911 - RNA, 19 nt, Homo sapiens
  misc_RNA (1)...(19): siRNA sense strand
guaaaucucacaaaugauc

SEQ ID NO: 1691912 - RNA, 19 nt, Homo sapiens
  misc_RNA (1)...(19): siRNA sense strand
cuagauccaugugguuaua

SEQ ID NO: 1691913 - RNA, 19 nt, Homo sapiens
  misc_RNA (1)...(19): siRNA sense strand
gaaauagaagcaaaugaca

SEQ ID NO: 1691914 - RNA, 19 nt, Homo sapiens
  misc_RNA (1)...(19): siRNA sense strand
ucggacagcuugaacagaa

SEQ ID NO: 1691915 - RNA, 19 nt, Homo sapiens
  misc_RNA (1)...(19): siRNA sense strand
gcauggaggcugcgacuga

SEQ ID NO: 1691916 - RNA, 19 nt, Homo sapiens
  misc_RNA (1)...(19): siRNA sense strand
ggaaauagaagcaaaugac

SEQ ID NO: 1691917 - RNA, 19 nt, Homo sapiens
  misc_RNA (1)...(19): siRNA sense strand
aauaagcgagaccuaauua

SEQ ID NO: 1691918 - RNA, 19 nt, Homo sapiens
  misc_RNA (1)...(19): siRNA sense strand
ccaagggaaucuguaaaga

SEQ ID NO: 1691919 - RNA, 19 nt, Homo sapiens
  misc_RNA (1)...(19): siRNA sense strand
ccaaguauuaagaguguua

SEQ ID NO: 1691920 - RNA, 19 nt, Homo sapiens
  misc_RNA (1)...(19): siRNA sense strand
agugucaccuuuacagaua

SEQ ID NO: 1691921 - RNA, 19 nt, Homo sapiens
  misc_RNA (1)...(19): siRNA sense strand
caagggaaucuguaaagaa

SEQ ID NO: 1691922 - RNA, 19 nt, Homo sapiens
  misc_RNA (1)...(19): siRNA sense strand
caauauaggaccaaagaug

SEQ ID NO: 1691923 - RNA, 19 nt, Homo sapiens
  misc_RNA (1)...(19): siRNA sense strand
ucagcucacuugcaacauu

SEQ ID NO: 1691924 - RNA, 19 nt, Homo sapiens
  misc_RNA (1)...(19): siRNA sense strand
gaauguuuauggaaucaca

SEQ ID NO: 1691925 - RNA, 19 nt, Homo sapiens
  misc_RNA (1)...(19): siRNA sense strand
ugaauccaguccagauauu

SEQ ID NO: 1691926 - RNA, 19 nt, Homo sapiens
  misc_RNA (1)...(19): siRNA sense strand
ucagaggaacugucuagua

SEQ ID NO: 1691927 - RNA, 19 nt, Homo sapiens
  misc_RNA (1)...(19): siRNA sense strand
acacacaaguuugcugauu

SEQ ID NO: 1691928 - RNA, 19 nt, Homo sapiens
  misc_RNA (1)...(19): siRNA sense strand
ggucaaagcaaguuucauc

SEQ ID NO: 1691929 - RNA, 19 nt, Homo sapiens
  misc_RNA (1)...(19): siRNA sense strand
uguaauggaucuuaaagca

SEQ ID NO: 1691930 - RNA, 19 nt, Homo sapiens
  misc_RNA (1)...(19): siRNA sense strand
cuaaggagcaauauacuau

SEQ ID NO: 1691931 - RNA, 19 nt, Homo sapiens
  misc_RNA (1)...(19): siRNA sense strand
ggaagaaaaugagguguga

SEQ ID NO: 1691932 - RNA, 19 nt, Homo sapiens
  misc_RNA (1)...(19): siRNA sense strand
cagaucauauuucacaauc

SEQ ID NO: 1691933 - RNA, 19 nt, Homo sapiens
  misc_RNA (1)...(19): siRNA sense strand
gaaaggucaaagcaaguuu

SEQ ID NO: 1691934 - RNA, 19 nt, Homo sapiens
  misc_RNA (1)...(19): siRNA sense strand
ggaaaugaaacugcuguga

SEQ ID NO: 1691935 - RNA, 19 nt, Homo sapiens
  misc_RNA (1)...(19): siRNA sense strand
gaaaucuuguuggcaaauc

SEQ ID NO: 1691936 - RNA, 19 nt, Homo sapiens
  misc_RNA (1)...(19): siRNA sense strand
aagguuacaucagaucaua

SEQ ID NO: 1691937 - RNA, 19 nt, Homo sapiens
  misc_RNA (1)...(19): siRNA sense strand
guagauggcggugauggua

SEQ ID NO: 1691938 - RNA, 19 nt, Homo sapiens
  misc_RNA (1)...(19): siRNA sense strand
ugaaaucauuggaccuguu

SEQ ID NO: 1691939 - RNA, 19 nt, Homo sapiens
  misc_RNA (1)...(19): siRNA sense strand
gauggcaauuucacugaug

SEQ ID NO: 1691940 - RNA, 19 nt, Homo sapiens
  misc_RNA (1)...(19): siRNA sense strand
cacacaaguuugcugauug

SEQ ID NO: 1691941 - RNA, 19 nt, Homo sapiens
  misc_RNA (1)...(19): siRNA sense strand
gaucauauuucacaauccu

SEQ ID NO: 1691942 - RNA, 19 nt, Homo sapiens
  misc_RNA (1)...(19): siRNA sense strand
gaaaucauuggaccuguuc

SEQ ID NO: 1691943 - RNA, 19 nt, Homo sapiens
  misc_RNA (1)...(19): siRNA sense strand
uaacaugcuuuggguggaa

SEQ ID NO: 1691944 - RNA, 19 nt, Homo sapiens
  misc_RNA (1)...(19): siRNA sense strand
uggaccaacccaaguauua

SEQ ID NO: 1691945 - RNA, 19 nt, Homo sapiens
  misc_RNA (1)...(19): siRNA sense strand
gaacugucuaguaucuuaa

SEQ ID NO: 1691946 - RNA, 19 nt, Homo sapiens
  misc_RNA (1)...(19): siRNA sense strand
uaacuaucccugccuguga

SEQ ID NO: 1691947 - RNA, 19 nt, Homo sapiens
  misc_RNA (1)...(19): siRNA sense strand
gcaucgcaccuauuuaaga

SEQ ID NO: 1691948 - RNA, 19 nt, Homo sapiens
  misc_RNA (1)...(19): siRNA sense strand
uaaauauucagcucacuug

SEQ ID NO: 1691949 - RNA, 19 nt, Homo sapiens
  misc_RNA (1)...(19): siRNA sense strand
gggacaaguagaaagauuu

SEQ ID NO: 1691950 - RNA, 19 nt, Homo sapiens
  misc_RNA (1)...(19): siRNA sense strand
gcaaguuucaucagucaau

SEQ ID NO: 1691951 - RNA, 19 nt, Homo sapiens
  misc_RNA (1)...(19): siRNA sense strand
gaccuacuguucggacaaa

SEQ ID NO: 1691952 - RNA, 19 nt, Homo sapiens
  misc_RNA (1)...(19): siRNA sense strand
uaaagcacccuguaucaca

SEQ ID NO: 1691953 - RNA, 19 nt, Homo sapiens
  misc_RNA (1)...(19): siRNA sense strand
agagggaacuuagcagaga

SEQ ID NO: 1691954 - RNA, 19 nt, Homo sapiens
  misc_RNA (1)...(19): siRNA sense strand
gaauccaguccagauauuu

SEQ ID NO: 1691955 - RNA, 19 nt, Homo sapiens
  misc_RNA (1)...(19): siRNA sense strand
aggagaaauugaagccaua

SEQ ID NO: 1691956 - RNA, 19 nt, Homo sapiens
  misc_RNA (1)...(19): siRNA sense strand
gguccagaauucacuuuua

SEQ ID NO: 1691957 - RNA, 19 nt, Homo sapiens
  misc_RNA (1)...(19): siRNA sense strand
ccagauauuucacauuuug

SEQ ID NO: 1691958 - RNA, 19 nt, Homo sapiens
  misc_RNA (1)...(19): siRNA sense strand
ggccagaagaucuacaauu

SEQ ID NO: 1691959 - RNA, 19 nt, Homo sapiens
  misc_RNA (1)...(19): siRNA sense strand
gagacaaacuucacuuuaa

SEQ ID NO: 1691960 - RNA, 19 nt, Homo sapiens
  misc_RNA (1)...(19): siRNA sense strand
ggaacugucuaguaucuua

SEQ ID NO: 1691961 - RNA, 19 nt, Homo sapiens
  misc_RNA (1)...(19): siRNA sense strand
ggagcaauauacuaucaua

SEQ ID NO: 1691962 - RNA, 19 nt, Homo sapiens
  misc_RNA (1)...(19): siRNA sense strand
caagugggaucaccuauga

SEQ ID NO: 1691963 - RNA, 19 nt, Homo sapiens
  misc_RNA (1)...(19): siRNA sense strand
ggagacaaacuucacuuua

SEQ ID NO: 1691964 - RNA, 19 nt, Homo sapiens
  misc_RNA (1)...(19): siRNA sense strand
cagaggaacugucuaguau

SEQ ID NO: 1691965 - RNA, 19 nt, Homo sapiens
  misc_RNA (1)...(19): siRNA sense strand
cuaauuacauugucuggaa

SEQ ID NO: 1691966 - RNA, 19 nt, Homo sapiens
  misc_RNA (1)...(19): siRNA sense strand
uccaagaccuuaaaccuuu

SEQ ID NO: 1691967 - RNA, 19 nt, Homo sapiens
  misc_RNA (1)...(19): siRNA sense strand
cagaauauguguuuaggau

SEQ ID NO: 1691968 - RNA, 19 nt, Homo sapiens
  misc_RNA (1)...(19): siRNA sense strand
ccaaagaugccucaacuug

SEQ ID NO: 1691969 - RNA, 19 nt, Homo sapiens
  misc_RNA (1)...(19): siRNA sense strand
gggaucaccuaugaagaua

SEQ ID NO: 1691970 - RNA, 19 nt, Homo sapiens
  misc_RNA (1)...(19): siRNA sense strand
ccaauccgccacauaauuu

SEQ ID NO: 1691971 - RNA, 19 nt, Homo sapiens
  misc_RNA (1)...(19): siRNA sense strand
aaagaugccucaacuugga

SEQ ID NO: 1691972 - RNA, 19 nt, Homo sapiens
  misc_RNA (1)...(19): siRNA sense strand
gaccaaagaugccucaacu

SEQ ID NO: 1691973 - RNA, 19 nt, Homo sapiens
  misc_RNA (1)...(19): siRNA sense strand
gauccuguauauaaaguga

SEQ ID NO: 1691974 - RNA, 19 nt, Homo sapiens
  misc_RNA (1)...(19): siRNA sense strand
gaggaacugucuaguaucu

SEQ ID NO: 1691975 - RNA, 19 nt, Homo sapiens
  misc_RNA (1)...(19): siRNA sense strand
uaauuucacugcaguuugu

SEQ ID NO: 1691976 - RNA, 19 nt, Homo sapiens
  misc_RNA (1)...(19): siRNA sense strand
ggaccaacccaaguauuaa

SEQ ID NO: 1691977 - RNA, 19 nt, Homo sapiens
  misc_RNA (1)...(19): siRNA sense strand
ccucaugcacuguugauua

SEQ ID NO: 1691978 - RNA, 19 nt, Homo sapiens
  misc_RNA (1)...(19): siRNA sense strand
cuagauccaugugguuaua

SEQ ID NO: 1691979 - RNA, 19 nt, Homo sapiens
  misc_RNA (1)...(19): siRNA sense strand
ucggacagcuugaacagaa

SEQ ID NO: 1691980 - RNA, 19 nt, Homo sapiens
  misc_RNA (1)...(19): siRNA sense strand
ccaaguauuaagaguguua

SEQ ID NO: 1691981 - RNA, 19 nt, Homo sapiens
  misc_RNA (1)...(19): siRNA sense strand
agugucaccuuuacagaua

SEQ ID NO: 1691982 - RNA, 19 nt, Homo sapiens
  misc_RNA (1)...(19): siRNA sense strand
caauauaggaccaaagaug

SEQ ID NO: 1691983 - RNA, 19 nt, Homo sapiens
  misc_RNA (1)...(19): siRNA sense strand
ucagcucacuugcaacauu

SEQ ID NO: 1691984 - RNA, 19 nt, Homo sapiens
  misc_RNA (1)...(19): siRNA sense strand
gaauguuuauggaaucaca

SEQ ID NO: 1691985 - RNA, 19 nt, Homo sapiens
  misc_RNA (1)...(19): siRNA sense strand
ucagaggaacugucuagua

SEQ ID NO: 1691986 - RNA, 19 nt, Homo sapiens
  misc_RNA (1)...(19): siRNA sense strand
cuaaggagcaauauacuau

SEQ ID NO: 1691987 - RNA, 19 nt, Homo sapiens
  misc_RNA (1)...(19): siRNA sense strand
acacacaaguuugcugauu

SEQ ID NO: 1691988 - RNA, 19 nt, Homo sapiens
  misc_RNA (1)...(19): siRNA sense strand
ggaagaaaaugagguguga

SEQ ID NO: 1691989 - RNA, 19 nt, Homo sapiens
  misc_RNA (1)...(19): siRNA sense strand
aagguuacaucagaucaua

SEQ ID NO: 1691990 - RNA, 19 nt, Homo sapiens
  misc_RNA (1)...(19): siRNA sense strand
cacacaaguuugcugauug

SEQ ID NO: 1691991 - RNA, 19 nt, Homo sapiens
  misc_RNA (1)...(19): siRNA sense strand
uggaccaacccaaguauua

SEQ ID NO: 1691992 - RNA, 19 nt, Homo sapiens
  misc_RNA (1)...(19): siRNA sense strand
gaacugucuaguaucuuaa

SEQ ID NO: 1691993 - RNA, 19 nt, Homo sapiens
  misc_RNA (1)...(19): siRNA sense strand
uaaauauucagcucacuug

SEQ ID NO: 1691994 - RNA, 19 nt, Homo sapiens
  misc_RNA (1)...(19): siRNA sense strand
aauuugaguugcauuguga

SEQ ID NO: 1691995 - RNA, 19 nt, Homo sapiens
  misc_RNA (1)...(19): siRNA sense strand
gcaagugggaucaccuaug

SEQ ID NO: 1691996 - RNA, 19 nt, Homo sapiens
  misc_RNA (1)...(19): siRNA sense strand
ugacuggagugaagaagca

SEQ ID NO: 1691997 - RNA, 19 nt, Homo sapiens
  misc_RNA (1)...(19): siRNA sense strand
caugcacuguugauuauuc

SEQ ID NO: 1691998 - RNA, 19 nt, Homo sapiens
  misc_RNA (1)...(19): siRNA sense strand
caacccaaguauuaagagu

SEQ ID NO: 1691999 - RNA, 19 nt, Homo sapiens
  misc_RNA (1)...(19): siRNA sense strand
gaacuucuagauccaugug

SEQ ID NO: 1692000 - RNA, 19 nt, Homo sapiens
  misc_RNA (1)...(19): siRNA sense strand
caauccgccacauaauuua

SEQ ID NO: 1692001 - RNA, 19 nt, Homo sapiens
  misc_RNA (1)...(19): siRNA sense strand
ugaguugcauugugaacga

SEQ ID NO: 1692002 - RNA, 19 nt, Homo sapiens
  misc_RNA (1)...(19): siRNA sense strand
aaggagcaauauacuauca

SEQ ID NO: 1692003 - RNA, 19 nt, Homo sapiens
  misc_RNA (1)...(19): siRNA sense strand
uccugaaucuccaguugua

SEQ ID NO: 1692004 - RNA, 19 nt, Homo sapiens
  misc_RNA (1)...(19): siRNA sense strand
guaugaaggaagaugguaa

SEQ ID NO: 1692005 - RNA, 19 nt, Homo sapiens
  misc_RNA (1)...(19): siRNA sense strand
cagcucacuugcaacauuc

SEQ ID NO: 1692006 - RNA, 19 nt, Homo sapiens
  misc_RNA (1)...(19): siRNA sense strand
cucaugcacuguugauuau

SEQ ID NO: 1692007 - RNA, 19 nt, Homo sapiens
  misc_RNA (1)...(19): siRNA sense strand
gaagaagcaagugggauca

SEQ ID NO: 1692008 - RNA, 19 nt, Homo sapiens
  misc_RNA (1)...(19): siRNA sense strand
ugucaccuuuacagauaua

SEQ ID NO: 1692009 - RNA, 19 nt, Homo sapiens
  misc_RNA (1)...(19): siRNA sense strand
ccagauuccuccugaagac

SEQ ID NO: 1692010 - RNA, 19 nt, Homo sapiens
  misc_RNA (1)...(19): siRNA sense strand
uugggaagguuacaucaga

SEQ ID NO: 1692011 - RNA, 19 nt, Homo sapiens
  misc_RNA (1)...(19): siRNA sense strand
aaauuugaguugcauugug

SEQ ID NO: 1692012 - RNA, 19 nt, Homo sapiens
  misc_RNA (1)...(19): siRNA sense strand
cagaauguuuauggaauca

SEQ ID NO: 1692013 - RNA, 19 nt, Homo sapiens
  misc_RNA (1)...(19): siRNA sense strand
auauucagcucacuugcaa

SEQ ID NO: 1692014 - RNA, 19 nt, Homo sapiens
  misc_RNA (1)...(19): siRNA sense strand
ggaagaugguaagggauac

SEQ ID NO: 1692015 - RNA, 19 nt, Homo sapiens
  misc_RNA (1)...(19): siRNA sense strand
caacucagaggaacugucu

SEQ ID NO: 1692016 - RNA, 19 nt, Homo sapiens
  misc_RNA (1)...(19): siRNA sense strand
cuugcaacauucuuacauu

SEQ ID NO: 1692017 - RNA, 19 nt, Homo sapiens
  misc_RNA (1)...(19): siRNA sense strand
ccuaaggagcaauauacua

SEQ ID NO: 1692018 - RNA, 19 nt, Homo sapiens
  misc_RNA (1)...(19): siRNA sense strand
gagccagauuccuccugaa

SEQ ID NO: 1692019 - RNA, 19 nt, Homo sapiens
  misc_RNA (1)...(19): siRNA sense strand
acagaauguuuauggaauc

SEQ ID NO: 1692020 - RNA, 19 nt, Homo sapiens
  misc_RNA (1)...(19): siRNA sense strand
ggacagcuugaacagaaug

SEQ ID NO: 1692021 - RNA, 19 nt, Homo sapiens
  misc_RNA (1)...(19): siRNA sense strand
gcauccagugucaccuuua

SEQ ID NO: 1692022 - RNA, 19 nt, Homo sapiens
  misc_RNA (1)...(19): siRNA sense strand
agaacagcauccaguguca

SEQ ID NO: 1692023 - RNA, 19 nt, Homo sapiens
  misc_RNA (1)...(19): siRNA sense strand
ccucaccacugaaucuaca

SEQ ID NO: 1692024 - RNA, 19 nt, Homo sapiens
  misc_RNA (1)...(19): siRNA sense strand
ggaagguuacaucagauca

SEQ ID NO: 1692025 - RNA, 19 nt, Homo sapiens
  misc_RNA (1)...(19): siRNA sense strand
caguuugugugcuaaagga

SEQ ID NO: 1692026 - RNA, 19 nt, Homo sapiens
  misc_RNA (1)...(19): siRNA sense strand
gaucaacucagaggaacug

SEQ ID NO: 1692027 - RNA, 19 nt, Homo sapiens
  misc_RNA (1)...(19): siRNA sense strand
gaagguuacaucagaucau

SEQ ID NO: 1692028 - RNA, 19 nt, Homo sapiens
  misc_RNA (1)...(19): siRNA sense strand
aggaagaugguaagggaua

SEQ ID NO: 1692029 - RNA, 19 nt, Homo sapiens
  misc_RNA (1)...(19): siRNA sense strand
cccaauccgccacauaauu

SEQ ID NO: 1692030 - RNA, 19 nt, Homo sapiens
  misc_RNA (1)...(19): siRNA sense strand
uggagugacuggagugaag

SEQ ID NO: 1692031 - RNA, 19 nt, Homo sapiens
  misc_RNA (1)...(19): siRNA sense strand
uugcaacauucuuacauuc

SEQ ID NO: 1692032 - RNA, 19 nt, Homo sapiens
  misc_RNA (1)...(19): siRNA sense strand
guccaagaccuuaaaccuu

SEQ ID NO: 1692033 - RNA, 19 nt, Homo sapiens
  misc_RNA (1)...(19): siRNA sense strand
cacccgaucuucauucacu

SEQ ID NO: 1692034 - RNA, 19 nt, Homo sapiens
  misc_RNA (1)...(19): siRNA sense strand
acacaaguuugcugauugc

SEQ ID NO: 1692035 - RNA, 19 nt, Homo sapiens
  misc_RNA (1)...(19): siRNA sense strand
ggaaucacaauaauuucag

SEQ ID NO: 1692036 - RNA, 19 nt, Homo sapiens
  misc_RNA (1)...(19): siRNA sense strand
gcacuguugauuauucuac

SEQ ID NO: 1692037 - RNA, 19 nt, Homo sapiens
  misc_RNA (1)...(19): siRNA sense strand
guugauuauucuacugugu

SEQ ID NO: 1692038 - RNA, 19 nt, Homo sapiens
  misc_RNA (1)...(19): siRNA sense strand
acccaaguauuaagagugu

SEQ ID NO: 1692039 - RNA, 19 nt, Homo sapiens
  misc_RNA (1)...(19): siRNA sense strand
cacugaaucuacaggugaa

SEQ ID NO: 1692040 - RNA, 19 nt, Homo sapiens
  misc_RNA (1)...(19): siRNA sense strand
acauggaccaacccaagua

SEQ ID NO: 1692041 - RNA, 19 nt, Homo sapiens
  misc_RNA (1)...(19): siRNA sense strand
cauccagugucaccuuuac

SEQ ID NO: 1692042 - RNA, 19 nt, Homo sapiens
  misc_RNA (1)...(19): siRNA sense strand
gguuacaucagaucauauc

SEQ ID NO: 1692043 - RNA, 19 nt, Homo sapiens
  misc_RNA (1)...(19): siRNA sense strand
gaccaacccaaguauuaag

SEQ ID NO: 1692044 - RNA, 19 nt, Homo sapiens
  misc_RNA (1)...(19): siRNA sense strand
gaaugggcaacacacaagu

SEQ ID NO: 1692045 - RNA, 19 nt, Homo sapiens
  misc_RNA (1)...(19): siRNA sense strand
ggaccaaagaugccucaac

SEQ ID NO: 1692046 - RNA, 19 nt, Homo sapiens
  misc_RNA (1)...(19): siRNA sense strand
gauccaugugguuauauca

SEQ ID NO: 1692047 - RNA, 19 nt, Homo sapiens
  misc_RNA (1)...(19): siRNA sense strand
gaaucuacaggugaacuuc

SEQ ID NO: 1692048 - RNA, 19 nt, Homo sapiens
  misc_RNA (1)...(19): siRNA sense strand
uggagacaaacuucacuuu

SEQ ID NO: 1692049 - RNA, 19 nt, Homo sapiens
  misc_RNA (1)...(19): siRNA sense strand
ugggaucaccuaugaagau

SEQ ID NO: 1692050 - RNA, 19 nt, Homo sapiens
  misc_RNA (1)...(19): siRNA sense strand
aguccugaaucuccaguug

SEQ ID NO: 1692051 - RNA, 19 nt, Homo sapiens
  misc_RNA (1)...(19): siRNA sense strand
cacugcaguuugugugcua

SEQ ID NO: 1692052 - RNA, 19 nt, Homo sapiens
  misc_RNA (1)...(19): siRNA sense strand
uuuaggauucgcuguauga

SEQ ID NO: 1692053 - RNA, 19 nt, Homo sapiens
  misc_RNA (1)...(19): siRNA sense strand
guguuuaggauucgcugua

SEQ ID NO: 1692054 - RNA, 19 nt, Homo sapiens
  misc_RNA (1)...(19): siRNA sense strand
ugaaugggcaacacacaag

SEQ ID NO: 1692055 - RNA, 19 nt, Homo sapiens
  misc_RNA (1)...(19): siRNA sense strand
ggagugacuggagugaaga

SEQ ID NO: 1692056 - RNA, 19 nt, Homo sapiens
  misc_RNA (1)...(19): siRNA sense strand
gccagauuccuccugaaga

SEQ ID NO: 1692057 - RNA, 19 nt, Homo sapiens
  misc_RNA (1)...(19): siRNA sense strand
ucacuguccaagaccuuaa

SEQ ID NO: 1692058 - RNA, 19 nt, Homo sapiens
  misc_RNA (1)...(19): siRNA sense strand
cuaauuucacugcaguuug

SEQ ID NO: 1692059 - RNA, 19 nt, Homo sapiens
  misc_RNA (1)...(19): siRNA sense strand
guaggaagaugguugaguu

SEQ ID NO: 1692060 - RNA, 19 nt, Homo sapiens
  misc_RNA (1)...(19): siRNA sense strand
gaagaugguugaguugguu

SEQ ID NO: 1692061 - RNA, 19 nt, Homo sapiens
  misc_RNA (1)...(19): siRNA sense strand
gagaguguccucagaaauu

SEQ ID NO: 1692062 - RNA, 19 nt, Homo sapiens
  misc_RNA (1)...(19): siRNA sense strand
gggaggagcugaguauguu

SEQ ID NO: 1692063 - RNA, 19 nt, Homo sapiens
  misc_RNA (1)...(19): siRNA sense strand
cagaaaugcuggagagugu

SEQ ID NO: 1692064 - RNA, 19 nt, Homo sapiens
  misc_RNA (1)...(19): siRNA sense strand
gaaaccagcuaugugaaag

SEQ ID NO: 1692065 - RNA, 19 nt, Homo sapiens
  misc_RNA (1)...(19): siRNA sense strand
ccagggagccggucacaaa

SEQ ID NO: 1692066 - RNA, 19 nt, Homo sapiens
  misc_RNA (1)...(19): siRNA sense strand
gaaauugccaggacuucuu

SEQ ID NO: 1692067 - RNA, 19 nt, Homo sapiens
  misc_RNA (1)...(19): siRNA sense strand
gugaaaguccugcaccaua

SEQ ID NO: 1692068 - RNA, 19 nt, Homo sapiens
  misc_RNA (1)...(19): siRNA sense strand
ggacuucuuucccgugauc

SEQ ID NO: 1692069 - RNA, 19 nt, Homo sapiens
  misc_RNA (1)...(19): siRNA sense strand
ccaagggcccucauugaaa

SEQ ID NO: 1692070 - RNA, 19 nt, Homo sapiens
  misc_RNA (1)...(19): siRNA sense strand
ggaagaugguugaguuggu

SEQ ID NO: 1692071 - RNA, 19 nt, Homo sapiens
  misc_RNA (1)...(19): siRNA sense strand
cagcaaagccuccgaguac

SEQ ID NO: 1692072 - RNA, 19 nt, Homo sapiens
  misc_RNA (1)...(19): siRNA sense strand
gagaaccucacauuuccua

SEQ ID NO: 1692073 - RNA, 19 nt, Homo sapiens
  misc_RNA (1)...(19): siRNA sense strand
gcacugcaagccugaagaa

SEQ ID NO: 1692074 - RNA, 19 nt, Homo sapiens
  misc_RNA (1)...(19): siRNA sense strand
gcagcaaucaguaggaaga

SEQ ID NO: 1692075 - RNA, 19 nt, Homo sapiens
  misc_RNA (1)...(19): siRNA sense strand
gagagagggagaagaguga

SEQ ID NO: 1692076 - RNA, 19 nt, Homo sapiens
  misc_RNA (1)...(19): siRNA sense strand
caagggcccucauugaaac

SEQ ID NO: 1692077 - RNA, 19 nt, Homo sapiens
  misc_RNA (1)...(19): siRNA sense strand
gauaaucguccuggccaua

SEQ ID NO: 1692078 - RNA, 19 nt, Homo sapiens
  misc_RNA (1)...(19): siRNA sense strand
gcaaagccuccgaguacuu

SEQ ID NO: 1692079 - RNA, 19 nt, Homo sapiens
  misc_RNA (1)...(19): siRNA sense strand
ugaaaguccugcaccauac

SEQ ID NO: 1692080 - RNA, 19 nt, Homo sapiens
  misc_RNA (1)...(19): siRNA sense strand
guggagaaccucacauuuc

SEQ ID NO: 1692081 - RNA, 19 nt, Homo sapiens
  misc_RNA (1)...(19): siRNA sense strand
ugguugaguugguucauuu

SEQ ID NO: 1692082 - RNA, 19 nt, Homo sapiens
  misc_RNA (1)...(19): siRNA sense strand
ugaaaccagcuaugugaaa

SEQ ID NO: 1692083 - RNA, 19 nt, Homo sapiens
  misc_RNA (1)...(19): siRNA sense strand
ggucacaaaggcagaaaug

SEQ ID NO: 1692084 - RNA, 19 nt, Homo sapiens
  misc_RNA (1)...(19): siRNA sense strand
gcuggagaguguccucaga

SEQ ID NO: 1692085 - RNA, 19 nt, Homo sapiens
  misc_RNA (1)...(19): siRNA sense strand
gguggagaaccucacauuu

SEQ ID NO: 1692086 - RNA, 19 nt, Homo sapiens
  misc_RNA (1)...(19): siRNA sense strand
uggagaguguccucagaaa

SEQ ID NO: 1692087 - RNA, 19 nt, Homo sapiens
  misc_RNA (1)...(19): siRNA sense strand
ggagaguguccucagaaau

SEQ ID NO: 1692088 - RNA, 19 nt, Homo sapiens
  misc_RNA (1)...(19): siRNA sense strand
caaagccuccgaguacuug

SEQ ID NO: 1692089 - RNA, 19 nt, Homo sapiens
  misc_RNA (1)...(19): siRNA sense strand
agaguguccucagaaauug

SEQ ID NO: 1692090 - RNA, 19 nt, Homo sapiens
  misc_RNA (1)...(19): siRNA sense strand
accaucaacuacacucuuu

SEQ ID NO: 1692091 - RNA, 19 nt, Homo sapiens
  misc_RNA (1)...(19): siRNA sense strand
gaaaguccugcaccauaca

SEQ ID NO: 1692092 - RNA, 19 nt, Homo sapiens
  misc_RNA (1)...(19): siRNA sense strand
gcaugaacgggcuuugaga

SEQ ID NO: 1692093 - RNA, 19 nt, Homo sapiens
  misc_RNA (1)...(19): siRNA sense strand
aaagaucgguggagaaccu

SEQ ID NO: 1692094 - RNA, 19 nt, Homo sapiens
  misc_RNA (1)...(19): siRNA sense strand
gccuccagcuucucgacua

SEQ ID NO: 1692095 - RNA, 19 nt, Homo sapiens
  misc_RNA (1)...(19): siRNA sense strand
gguccaagggcccucauug

SEQ ID NO: 1692096 - RNA, 19 nt, Homo sapiens
  misc_RNA (1)...(19): siRNA sense strand
gggcgacaaucaggucaug

SEQ ID NO: 1692097 - RNA, 19 nt, Homo sapiens
  misc_RNA (1)...(19): siRNA sense strand
cgacuaccaucaacuacac

SEQ ID NO: 1692098 - RNA, 19 nt, Homo sapiens
  misc_RNA (1)...(19): siRNA sense strand
guacuugcagcuggucuuu

SEQ ID NO: 1692099 - RNA, 19 nt, Homo sapiens
  misc_RNA (1)...(19): siRNA sense strand
aagcagcaaucaguaggaa

SEQ ID NO: 1692100 - RNA, 19 nt, Homo sapiens
  misc_RNA (1)...(19): siRNA sense strand
guccaagggcccucauuga

SEQ ID NO: 1692101 - RNA, 19 nt, Homo sapiens
  misc_RNA (1)...(19): siRNA sense strand
ucagcaaagccuccgagua

SEQ ID NO: 1692102 - RNA, 19 nt, Homo sapiens
  misc_RNA (1)...(19): siRNA sense strand
cccgugaucuucagcaaag

SEQ ID NO: 1692103 - RNA, 19 nt, Homo sapiens
  misc_RNA (1)...(19): siRNA sense strand
gcaccauacacuaaagauc

SEQ ID NO: 1692104 - RNA, 19 nt, Homo sapiens
  misc_RNA (1)...(19): siRNA sense strand
guccugcaccauacacuaa

SEQ ID NO: 1692105 - RNA, 19 nt, Homo sapiens
  misc_RNA (1)...(19): siRNA sense strand
uccaagggcccucauugaa

SEQ ID NO: 1692106 - RNA, 19 nt, Homo sapiens
  misc_RNA (1)...(19): siRNA sense strand
ucaguaggaagaugguuga

SEQ ID NO: 1692107 - RNA, 19 nt, Homo sapiens
  misc_RNA (1)...(19): siRNA sense strand
uggagaaccucacauuucc

SEQ ID NO: 1692108 - RNA, 19 nt, Homo sapiens
  misc_RNA (1)...(19): siRNA sense strand
uaaucguccuggccauaau

SEQ ID NO: 1692109 - RNA, 19 nt, Homo sapiens
  misc_RNA (1)...(19): siRNA sense strand
aaauugccaggacuucuuu

SEQ ID NO: 1692110 - RNA, 19 nt, Homo sapiens
  misc_RNA (1)...(19): siRNA sense strand
ucucgacuaccaucaacua

SEQ ID NO: 1692111 - RNA, 19 nt, Homo sapiens
  misc_RNA (1)...(19): siRNA sense strand
ugaguauguuggagguguu

SEQ ID NO: 1692112 - RNA, 19 nt, Homo sapiens
  misc_RNA (1)...(19): siRNA sense strand
aaucaggucaugcccaaga

SEQ ID NO: 1692113 - RNA, 19 nt, Homo sapiens
  misc_RNA (1)...(19): siRNA sense strand
guuccaagcagcaaucagu

SEQ ID NO: 1692114 - RNA, 19 nt, Homo sapiens
  misc_RNA (1)...(19): siRNA sense strand
ucacaaaggcagaaaugcu

SEQ ID NO: 1692115 - RNA, 19 nt, Homo sapiens
  misc_RNA (1)...(19): siRNA sense strand
gaagaggaggggccaagaa

SEQ ID NO: 1692116 - RNA, 19 nt, Homo sapiens
  misc_RNA (1)...(19): siRNA sense strand
ggccauaaucgcaauagag

SEQ ID NO: 1692117 - RNA, 19 nt, Homo sapiens
  misc_RNA (1)...(19): siRNA sense strand
ggaguccgaguuccaagca

SEQ ID NO: 1692118 - RNA, 19 nt, Homo sapiens
  misc_RNA (1)...(19): siRNA sense strand
auugaaaccagcuauguga

SEQ ID NO: 1692119 - RNA, 19 nt, Homo sapiens
  misc_RNA (1)...(19): siRNA sense strand
guauguuggagguguuuga

SEQ ID NO: 1692120 - RNA, 19 nt, Homo sapiens
  misc_RNA (1)...(19): siRNA sense strand
ggaggagcugaguauguug

SEQ ID NO: 1692121 - RNA, 19 nt, Homo sapiens
  misc_RNA (1)...(19): siRNA sense strand
guaggaagaugguugaguu

SEQ ID NO: 1692122 - RNA, 19 nt, Homo sapiens
  misc_RNA (1)...(19): siRNA sense strand
gaagaugguugaguugguu

SEQ ID NO: 1692123 - RNA, 19 nt, Homo sapiens
  misc_RNA (1)...(19): siRNA sense strand
gagaguguccucagaaauu

SEQ ID NO: 1692124 - RNA, 19 nt, Homo sapiens
  misc_RNA (1)...(19): siRNA sense strand
gggaggagcugaguauguu

SEQ ID NO: 1692125 - RNA, 19 nt, Homo sapiens
  misc_RNA (1)...(19): siRNA sense strand
cagaaaugcuggagagugu

SEQ ID NO: 1692126 - RNA, 19 nt, Homo sapiens
  misc_RNA (1)...(19): siRNA sense strand
gaaaccagcuaugugaaag

SEQ ID NO: 1692127 - RNA, 19 nt, Homo sapiens
  misc_RNA (1)...(19): siRNA sense strand
ccagggagccggucacaaa

SEQ ID NO: 1692128 - RNA, 19 nt, Homo sapiens
  misc_RNA (1)...(19): siRNA sense strand
gaaauugccaggacuucuu

SEQ ID NO: 1692129 - RNA, 19 nt, Homo sapiens
  misc_RNA (1)...(19): siRNA sense strand
gugaaaguccugcaccaua

SEQ ID NO: 1692130 - RNA, 19 nt, Homo sapiens
  misc_RNA (1)...(19): siRNA sense strand
ggacuucuuucccgugauc

SEQ ID NO: 1692131 - RNA, 19 nt, Homo sapiens
  misc_RNA (1)...(19): siRNA sense strand
ccaagggcccucauugaaa

SEQ ID NO: 1692132 - RNA, 19 nt, Homo sapiens
  misc_RNA (1)...(19): siRNA sense strand
ggaagaugguugaguuggu

SEQ ID NO: 1692133 - RNA, 19 nt, Homo sapiens
  misc_RNA (1)...(19): siRNA sense strand
cagcaaagccuccgaguac

SEQ ID NO: 1692134 - RNA, 19 nt, Homo sapiens
  misc_RNA (1)...(19): siRNA sense strand
gagaaccucacauuuccua

SEQ ID NO: 1692135 - RNA, 19 nt, Homo sapiens
  misc_RNA (1)...(19): siRNA sense strand
gcacugcaagccugaagaa

SEQ ID NO: 1692136 - RNA, 19 nt, Homo sapiens
  misc_RNA (1)...(19): siRNA sense strand
gcagcaaucaguaggaaga

SEQ ID NO: 1692137 - RNA, 19 nt, Homo sapiens
  misc_RNA (1)...(19): siRNA sense strand
gagagagggagaagaguga

SEQ ID NO: 1692138 - RNA, 19 nt, Homo sapiens
  misc_RNA (1)...(19): siRNA sense strand
caagggcccucauugaaac

SEQ ID NO: 1692139 - RNA, 19 nt, Homo sapiens
  misc_RNA (1)...(19): siRNA sense strand
gauaaucguccuggccaua

SEQ ID NO: 1692140 - RNA, 19 nt, Homo sapiens
  misc_RNA (1)...(19): siRNA sense strand
gcaaagccuccgaguacuu

SEQ ID NO: 1692141 - RNA, 19 nt, Homo sapiens
  misc_RNA (1)...(19): siRNA sense strand
ugaaaguccugcaccauac

SEQ ID NO: 1692142 - RNA, 19 nt, Homo sapiens
  misc_RNA (1)...(19): siRNA sense strand
guggagaaccucacauuuc

SEQ ID NO: 1692143 - RNA, 19 nt, Homo sapiens
  misc_RNA (1)...(19): siRNA sense strand
ugguugaguugguucauuu

SEQ ID NO: 1692144 - RNA, 19 nt, Homo sapiens
  misc_RNA (1)...(19): siRNA sense strand
ugaaaccagcuaugugaaa

SEQ ID NO: 1692145 - RNA, 19 nt, Homo sapiens
  misc_RNA (1)...(19): siRNA sense strand
ggucacaaaggcagaaaug

SEQ ID NO: 1692146 - RNA, 19 nt, Homo sapiens
  misc_RNA (1)...(19): siRNA sense strand
gcuggagaguguccucaga

SEQ ID NO: 1692147 - RNA, 19 nt, Homo sapiens
  misc_RNA (1)...(19): siRNA sense strand
gguggagaaccucacauuu

SEQ ID NO: 1692148 - RNA, 19 nt, Homo sapiens
  misc_RNA (1)...(19): siRNA sense strand
uggagaguguccucagaaa

SEQ ID NO: 1692149 - RNA, 19 nt, Homo sapiens
  misc_RNA (1)...(19): siRNA sense strand
ggagaguguccucagaaau

SEQ ID NO: 1692150 - RNA, 19 nt, Homo sapiens
  misc_RNA (1)...(19): siRNA sense strand
caaagccuccgaguacuug

SEQ ID NO: 1692151 - RNA, 19 nt, Homo sapiens
  misc_RNA (1)...(19): siRNA sense strand
agaguguccucagaaauug

SEQ ID NO: 1692152 - RNA, 19 nt, Homo sapiens
  misc_RNA (1)...(19): siRNA sense strand
accaucaacuacacucuuu

SEQ ID NO: 1692153 - RNA, 19 nt, Homo sapiens
  misc_RNA (1)...(19): siRNA sense strand
gaaaguccugcaccauaca

SEQ ID NO: 1692154 - RNA, 19 nt, Homo sapiens
  misc_RNA (1)...(19): siRNA sense strand
gcaugaacgggcuuugaga

SEQ ID NO: 1692155 - RNA, 19 nt, Homo sapiens
  misc_RNA (1)...(19): siRNA sense strand
aaagaucgguggagaaccu

SEQ ID NO: 1692156 - RNA, 19 nt, Homo sapiens
  misc_RNA (1)...(19): siRNA sense strand
gccuccagcuucucgacua

SEQ ID NO: 1692157 - RNA, 19 nt, Homo sapiens
  misc_RNA (1)...(19): siRNA sense strand
gguccaagggcccucauug

SEQ ID NO: 1692158 - RNA, 19 nt, Homo sapiens
  misc_RNA (1)...(19): siRNA sense strand
gggcgacaaucaggucaug

SEQ ID NO: 1692159 - RNA, 19 nt, Homo sapiens
  misc_RNA (1)...(19): siRNA sense strand
cgacuaccaucaacuacac

SEQ ID NO: 1692160 - RNA, 19 nt, Homo sapiens
  misc_RNA (1)...(19): siRNA sense strand
guacuugcagcuggucuuu

SEQ ID NO: 1692161 - RNA, 19 nt, Homo sapiens
  misc_RNA (1)...(19): siRNA sense strand
aagcagcaaucaguaggaa

SEQ ID NO: 1692162 - RNA, 19 nt, Homo sapiens
  misc_RNA (1)...(19): siRNA sense strand
guccaagggcccucauuga

SEQ ID NO: 1692163 - RNA, 19 nt, Homo sapiens
  misc_RNA (1)...(19): siRNA sense strand
ucagcaaagccuccgagua

SEQ ID NO: 1692164 - RNA, 19 nt, Homo sapiens
  misc_RNA (1)...(19): siRNA sense strand
cccgugaucuucagcaaag

SEQ ID NO: 1692165 - RNA, 19 nt, Homo sapiens
  misc_RNA (1)...(19): siRNA sense strand
gcaccauacacuaaagauc

SEQ ID NO: 1692166 - RNA, 19 nt, Homo sapiens
  misc_RNA (1)...(19): siRNA sense strand
guccugcaccauacacuaa

SEQ ID NO: 1692167 - RNA, 19 nt, Homo sapiens
  misc_RNA (1)...(19): siRNA sense strand
uccaagggcccucauugaa

SEQ ID NO: 1692168 - RNA, 19 nt, Homo sapiens
  misc_RNA (1)...(19): siRNA sense strand
ucaguaggaagaugguuga

SEQ ID NO: 1692169 - RNA, 19 nt, Homo sapiens
  misc_RNA (1)...(19): siRNA sense strand
uggagaaccucacauuucc

SEQ ID NO: 1692170 - RNA, 19 nt, Homo sapiens
  misc_RNA (1)...(19): siRNA sense strand
uaaucguccuggccauaau

SEQ ID NO: 1692171 - RNA, 19 nt, Homo sapiens
  misc_RNA (1)...(19): siRNA sense strand
aaauugccaggacuucuuu

SEQ ID NO: 1692172 - RNA, 19 nt, Homo sapiens
  misc_RNA (1)...(19): siRNA sense strand
ucucgacuaccaucaacua

SEQ ID NO: 1692173 - RNA, 19 nt, Homo sapiens
  misc_RNA (1)...(19): siRNA sense strand
ugaguauguuggagguguu

SEQ ID NO: 1692174 - RNA, 19 nt, Homo sapiens
  misc_RNA (1)...(19): siRNA sense strand
aaucaggucaugcccaaga

SEQ ID NO: 1692175 - RNA, 19 nt, Homo sapiens
  misc_RNA (1)...(19): siRNA sense strand
guuccaagcagcaaucagu

SEQ ID NO: 1692176 - RNA, 19 nt, Homo sapiens
  misc_RNA (1)...(19): siRNA sense strand
ucacaaaggcagaaaugcu

SEQ ID NO: 1692177 - RNA, 19 nt, Homo sapiens
  misc_RNA (1)...(19): siRNA sense strand
gaagaggaggggccaagaa

SEQ ID NO: 1692178 - RNA, 19 nt, Homo sapiens
  misc_RNA (1)...(19): siRNA sense strand
ggccauaaucgcaauagag

SEQ ID NO: 1692179 - RNA, 19 nt, Homo sapiens
  misc_RNA (1)...(19): siRNA sense strand
ggaguccgaguuccaagca

SEQ ID NO: 1692180 - RNA, 19 nt, Homo sapiens
  misc_RNA (1)...(19): siRNA sense strand
auugaaaccagcuauguga

SEQ ID NO: 1692181 - RNA, 19 nt, Homo sapiens
  misc_RNA (1)...(19): siRNA sense strand
guauguuggagguguuuga

SEQ ID NO: 1692182 - RNA, 19 nt, Homo sapiens
  misc_RNA (1)...(19): siRNA sense strand
ggaggagcugaguauguug

SEQ ID NO: 1692183 - RNA, 19 nt, Homo sapiens
  misc_RNA (1)...(19): siRNA sense strand
guaggaagaugguugaguu

SEQ ID NO: 1692184 - RNA, 19 nt, Homo sapiens
  misc_RNA (1)...(19): siRNA sense strand
gaagaugguugaguugguu

SEQ ID NO: 1692185 - RNA, 19 nt, Homo sapiens
  misc_RNA (1)...(19): siRNA sense strand
gagaguguccucagaaauu

SEQ ID NO: 1692186 - RNA, 19 nt, Homo sapiens
  misc_RNA (1)...(19): siRNA sense strand
gggaggagcugaguauguu

SEQ ID NO: 1692187 - RNA, 19 nt, Homo sapiens
  misc_RNA (1)...(19): siRNA sense strand
cagaaaugcuggagagugu

SEQ ID NO: 1692188 - RNA, 19 nt, Homo sapiens
  misc_RNA (1)...(19): siRNA sense strand
gaaaccagcuaugugaaag

SEQ ID NO: 1692189 - RNA, 19 nt, Homo sapiens
  misc_RNA (1)...(19): siRNA sense strand
ccagggagccggucacaaa

SEQ ID NO: 1692190 - RNA, 19 nt, Homo sapiens
  misc_RNA (1)...(19): siRNA sense strand
gaaauugccaggacuucuu

SEQ ID NO: 1692191 - RNA, 19 nt, Homo sapiens
  misc_RNA (1)...(19): siRNA sense strand
gugaaaguccugcaccaua

SEQ ID NO: 1692192 - RNA, 19 nt, Homo sapiens
  misc_RNA (1)...(19): siRNA sense strand
ggacuucuuucccgugauc

SEQ ID NO: 1692193 - RNA, 19 nt, Homo sapiens
  misc_RNA (1)...(19): siRNA sense strand
ccaagggcccucauugaaa

SEQ ID NO: 1692194 - RNA, 19 nt, Homo sapiens
  misc_RNA (1)...(19): siRNA sense strand
ggaagaugguugaguuggu

SEQ ID NO: 1692195 - RNA, 19 nt, Homo sapiens
  misc_RNA (1)...(19): siRNA sense strand
cagcaaagccuccgaguac

SEQ ID NO: 1692196 - RNA, 19 nt, Homo sapiens
  misc_RNA (1)...(19): siRNA sense strand
gagaaccucacauuuccua

SEQ ID NO: 1692197 - RNA, 19 nt, Homo sapiens
  misc_RNA (1)...(19): siRNA sense strand
gcacugcaagccugaagaa

SEQ ID NO: 1692198 - RNA, 19 nt, Homo sapiens
  misc_RNA (1)...(19): siRNA sense strand
gcagcaaucaguaggaaga

SEQ ID NO: 1692199 - RNA, 19 nt, Homo sapiens
  misc_RNA (1)...(19): siRNA sense strand
gagagagggagaagaguga

SEQ ID NO: 1692200 - RNA, 19 nt, Homo sapiens
  misc_RNA (1)...(19): siRNA sense strand
caagggcccucauugaaac

SEQ ID NO: 1692201 - RNA, 19 nt, Homo sapiens
  misc_RNA (1)...(19): siRNA sense strand
gauaaucguccuggccaua

SEQ ID NO: 1692202 - RNA, 19 nt, Homo sapiens
  misc_RNA (1)...(19): siRNA sense strand
gcaaagccuccgaguacuu

SEQ ID NO: 1692203 - RNA, 19 nt, Homo sapiens
  misc_RNA (1)...(19): siRNA sense strand
ugaaaguccugcaccauac

SEQ ID NO: 1692204 - RNA, 19 nt, Homo sapiens
  misc_RNA (1)...(19): siRNA sense strand
guggagaaccucacauuuc

SEQ ID NO: 1692205 - RNA, 19 nt, Homo sapiens
  misc_RNA (1)...(19): siRNA sense strand
ugguugaguugguucauuu

SEQ ID NO: 1692206 - RNA, 19 nt, Homo sapiens
  misc_RNA (1)...(19): siRNA sense strand
ugaaaccagcuaugugaaa

SEQ ID NO: 1692207 - RNA, 19 nt, Homo sapiens
  misc_RNA (1)...(19): siRNA sense strand
ggucacaaaggcagaaaug

SEQ ID NO: 1692208 - RNA, 19 nt, Homo sapiens
  misc_RNA (1)...(19): siRNA sense strand
gcuggagaguguccucaga

SEQ ID NO: 1692209 - RNA, 19 nt, Homo sapiens
  misc_RNA (1)...(19): siRNA sense strand
gguggagaaccucacauuu

SEQ ID NO: 1692210 - RNA, 19 nt, Homo sapiens
  misc_RNA (1)...(19): siRNA sense strand
uggagaguguccucagaaa

SEQ ID NO: 1692211 - RNA, 19 nt, Homo sapiens
  misc_RNA (1)...(19): siRNA sense strand
ggagaguguccucagaaau

SEQ ID NO: 1692212 - RNA, 19 nt, Homo sapiens
  misc_RNA (1)...(19): siRNA sense strand
caaagccuccgaguacuug

SEQ ID NO: 1692213 - RNA, 19 nt, Homo sapiens
  misc_RNA (1)...(19): siRNA sense strand
agaguguccucagaaauug

SEQ ID NO: 1692214 - RNA, 19 nt, Homo sapiens
  misc_RNA (1)...(19): siRNA sense strand
accaucaacuacacucuuu

SEQ ID NO: 1692215 - RNA, 19 nt, Homo sapiens
  misc_RNA (1)...(19): siRNA sense strand
gaaaguccugcaccauaca

SEQ ID NO: 1692216 - RNA, 19 nt, Homo sapiens
  misc_RNA (1)...(19): siRNA sense strand
gcaugaacgggcuuugaga

SEQ ID NO: 1692217 - RNA, 19 nt, Homo sapiens
  misc_RNA (1)...(19): siRNA sense strand
aaagaucgguggagaaccu

SEQ ID NO: 1692218 - RNA, 19 nt, Homo sapiens
  misc_RNA (1)...(19): siRNA sense strand
gccuccagcuucucgacua

SEQ ID NO: 1692219 - RNA, 19 nt, Homo sapiens
  misc_RNA (1)...(19): siRNA sense strand
gguccaagggcccucauug

SEQ ID NO: 1692220 - RNA, 19 nt, Homo sapiens
  misc_RNA (1)...(19): siRNA sense strand
gggcgacaaucaggucaug

SEQ ID NO: 1692221 - RNA, 19 nt, Homo sapiens
  misc_RNA (1)...(19): siRNA sense strand
cgacuaccaucaacuacac

SEQ ID NO: 1692222 - RNA, 19 nt, Homo sapiens
  misc_RNA (1)...(19): siRNA sense strand
guacuugcagcuggucuuu

SEQ ID NO: 1692223 - RNA, 19 nt, Homo sapiens
  misc_RNA (1)...(19): siRNA sense strand
aagcagcaaucaguaggaa

SEQ ID NO: 1692224 - RNA, 19 nt, Homo sapiens
  misc_RNA (1)...(19): siRNA sense strand
guccaagggcccucauuga

SEQ ID NO: 1692225 - RNA, 19 nt, Homo sapiens
  misc_RNA (1)...(19): siRNA sense strand
ucagcaaagccuccgagua

SEQ ID NO: 1692226 - RNA, 19 nt, Homo sapiens
  misc_RNA (1)...(19): siRNA sense strand
cccgugaucuucagcaaag

SEQ ID NO: 1692227 - RNA, 19 nt, Homo sapiens
  misc_RNA (1)...(19): siRNA sense strand
gcaccauacacuaaagauc

SEQ ID NO: 1692228 - RNA, 19 nt, Homo sapiens
  misc_RNA (1)...(19): siRNA sense strand
guccugcaccauacacuaa

SEQ ID NO: 1692229 - RNA, 19 nt, Homo sapiens
  misc_RNA (1)...(19): siRNA sense strand
uccaagggcccucauugaa

SEQ ID NO: 1692230 - RNA, 19 nt, Homo sapiens
  misc_RNA (1)...(19): siRNA sense strand
ucaguaggaagaugguuga

SEQ ID NO: 1692231 - RNA, 19 nt, Homo sapiens
  misc_RNA (1)...(19): siRNA sense strand
uggagaaccucacauuucc

SEQ ID NO: 1692232 - RNA, 19 nt, Homo sapiens
  misc_RNA (1)...(19): siRNA sense strand
uaaucguccuggccauaau

SEQ ID NO: 1692233 - RNA, 19 nt, Homo sapiens
  misc_RNA (1)...(19): siRNA sense strand
aaauugccaggacuucuuu

SEQ ID NO: 1692234 - RNA, 19 nt, Homo sapiens
  misc_RNA (1)...(19): siRNA sense strand
ucucgacuaccaucaacua

SEQ ID NO: 1692235 - RNA, 19 nt, Homo sapiens
  misc_RNA (1)...(19): siRNA sense strand
ugaguauguuggagguguu

SEQ ID NO: 1692236 - RNA, 19 nt, Homo sapiens
  misc_RNA (1)...(19): siRNA sense strand
aaucaggucaugcccaaga

SEQ ID NO: 1692237 - RNA, 19 nt, Homo sapiens
  misc_RNA (1)...(19): siRNA sense strand
guuccaagcagcaaucagu

SEQ ID NO: 1692238 - RNA, 19 nt, Homo sapiens
  misc_RNA (1)...(19): siRNA sense strand
ucacaaaggcagaaaugcu

SEQ ID NO: 1692239 - RNA, 19 nt, Homo sapiens
  misc_RNA (1)...(19): siRNA sense strand
gaagaggaggggccaagaa

SEQ ID NO: 1692240 - RNA, 19 nt, Homo sapiens
  misc_RNA (1)...(19): siRNA sense strand
ggccauaaucgcaauagag

SEQ ID NO: 1692241 - RNA, 19 nt, Homo sapiens
  misc_RNA (1)...(19): siRNA sense strand
ggaguccgaguuccaagca

SEQ ID NO: 1692242 - RNA, 19 nt, Homo sapiens
  misc_RNA (1)...(19): siRNA sense strand
auugaaaccagcuauguga

SEQ ID NO: 1692243 - RNA, 19 nt, Homo sapiens
  misc_RNA (1)...(19): siRNA sense strand
guauguuggagguguuuga

SEQ ID NO: 1692244 - RNA, 19 nt, Homo sapiens
  misc_RNA (1)...(19): siRNA sense strand
ggaggagcugaguauguug

SEQ ID NO: 1692245 - RNA, 19 nt, Homo sapiens
  misc_RNA (1)...(19): siRNA sense strand
guaggaagaugguugaguu

SEQ ID NO: 1692246 - RNA, 19 nt, Homo sapiens
  misc_RNA (1)...(19): siRNA sense strand
gaagaugguugaguugguu

SEQ ID NO: 1692247 - RNA, 19 nt, Homo sapiens
  misc_RNA (1)...(19): siRNA sense strand
gagaguguccucagaaauu

SEQ ID NO: 1692248 - RNA, 19 nt, Homo sapiens
  misc_RNA (1)...(19): siRNA sense strand
gggaggagcugaguauguu

SEQ ID NO: 1692249 - RNA, 19 nt, Homo sapiens
  misc_RNA (1)...(19): siRNA sense strand
cagaaaugcuggagagugu

SEQ ID NO: 1692250 - RNA, 19 nt, Homo sapiens
  misc_RNA (1)...(19): siRNA sense strand
gaaaccagcuaugugaaag

SEQ ID NO: 1692251 - RNA, 19 nt, Homo sapiens
  misc_RNA (1)...(19): siRNA sense strand
ccagggagccggucacaaa

SEQ ID NO: 1692252 - RNA, 19 nt, Homo sapiens
  misc_RNA (1)...(19): siRNA sense strand
gaaauugccaggacuucuu

SEQ ID NO: 1692253 - RNA, 19 nt, Homo sapiens
  misc_RNA (1)...(19): siRNA sense strand
gugaaaguccugcaccaua

SEQ ID NO: 1692254 - RNA, 19 nt, Homo sapiens
  misc_RNA (1)...(19): siRNA sense strand
ggacuucuuucccgugauc

SEQ ID NO: 1692255 - RNA, 19 nt, Homo sapiens
  misc_RNA (1)...(19): siRNA sense strand
ccaagggcccucauugaaa

SEQ ID NO: 1692256 - RNA, 19 nt, Homo sapiens
  misc_RNA (1)...(19): siRNA sense strand
ggaagaugguugaguuggu

SEQ ID NO: 1692257 - RNA, 19 nt, Homo sapiens
  misc_RNA (1)...(19): siRNA sense strand
cagcaaagccuccgaguac

SEQ ID NO: 1692258 - RNA, 19 nt, Homo sapiens
  misc_RNA (1)...(19): siRNA sense strand
gagaaccucacauuuccua

SEQ ID NO: 1692259 - RNA, 19 nt, Homo sapiens
  misc_RNA (1)...(19): siRNA sense strand
gcacugcaagccugaagaa

SEQ ID NO: 1692260 - RNA, 19 nt, Homo sapiens
  misc_RNA (1)...(19): siRNA sense strand
gcagcaaucaguaggaaga

SEQ ID NO: 1692261 - RNA, 19 nt, Homo sapiens
  misc_RNA (1)...(19): siRNA sense strand
gagagagggagaagaguga

SEQ ID NO: 1692262 - RNA, 19 nt, Homo sapiens
  misc_RNA (1)...(19): siRNA sense strand
caagggcccucauugaaac

SEQ ID NO: 1692263 - RNA, 19 nt, Homo sapiens
  misc_RNA (1)...(19): siRNA sense strand
gauaaucguccuggccaua

SEQ ID NO: 1692264 - RNA, 19 nt, Homo sapiens
  misc_RNA (1)...(19): siRNA sense strand
gcaaagccuccgaguacuu

SEQ ID NO: 1692265 - RNA, 19 nt, Homo sapiens
  misc_RNA (1)...(19): siRNA sense strand
ugaaaguccugcaccauac

SEQ ID NO: 1692266 - RNA, 19 nt, Homo sapiens
  misc_RNA (1)...(19): siRNA sense strand
guggagaaccucacauuuc

SEQ ID NO: 1692267 - RNA, 19 nt, Homo sapiens
  misc_RNA (1)...(19): siRNA sense strand
ugguugaguugguucauuu

SEQ ID NO: 1692268 - RNA, 19 nt, Homo sapiens
  misc_RNA (1)...(19): siRNA sense strand
ugaaaccagcuaugugaaa

SEQ ID NO: 1692269 - RNA, 19 nt, Homo sapiens
  misc_RNA (1)...(19): siRNA sense strand
ggucacaaaggcagaaaug

SEQ ID NO: 1692270 - RNA, 19 nt, Homo sapiens
  misc_RNA (1)...(19): siRNA sense strand
gcuggagaguguccucaga

SEQ ID NO: 1692271 - RNA, 19 nt, Homo sapiens
  misc_RNA (1)...(19): siRNA sense strand
gguggagaaccucacauuu

SEQ ID NO: 1692272 - RNA, 19 nt, Homo sapiens
  misc_RNA (1)...(19): siRNA sense strand
uggagaguguccucagaaa

SEQ ID NO: 1692273 - RNA, 19 nt, Homo sapiens
  misc_RNA (1)...(19): siRNA sense strand
ggagaguguccucagaaau

SEQ ID NO: 1692274 - RNA, 19 nt, Homo sapiens
  misc_RNA (1)...(19): siRNA sense strand
caaagccuccgaguacuug

SEQ ID NO: 1692275 - RNA, 19 nt, Homo sapiens
  misc_RNA (1)...(19): siRNA sense strand
agaguguccucagaaauug

SEQ ID NO: 1692276 - RNA, 19 nt, Homo sapiens
  misc_RNA (1)...(19): siRNA sense strand
accaucaacuacacucuuu

SEQ ID NO: 1692277 - RNA, 19 nt, Homo sapiens
  misc_RNA (1)...(19): siRNA sense strand
gaaaguccugcaccauaca

SEQ ID NO: 1692278 - RNA, 19 nt, Homo sapiens
  misc_RNA (1)...(19): siRNA sense strand
gcaugaacgggcuuugaga

SEQ ID NO: 1692279 - RNA, 19 nt, Homo sapiens
  misc_RNA (1)...(19): siRNA sense strand
aaagaucgguggagaaccu

SEQ ID NO: 1692280 - RNA, 19 nt, Homo sapiens
  misc_RNA (1)...(19): siRNA sense strand
gccuccagcuucucgacua

SEQ ID NO: 1692281 - RNA, 19 nt, Homo sapiens
  misc_RNA (1)...(19): siRNA sense strand
gguccaagggcccucauug

SEQ ID NO: 1692282 - RNA, 19 nt, Homo sapiens
  misc_RNA (1)...(19): siRNA sense strand
gggcgacaaucaggucaug

SEQ ID NO: 1692283 - RNA, 19 nt, Homo sapiens
  misc_RNA (1)...(19): siRNA sense strand
cgacuaccaucaacuacac

SEQ ID NO: 1692284 - RNA, 19 nt, Homo sapiens
  misc_RNA (1)...(19): siRNA sense strand
guacuugcagcuggucuuu

SEQ ID NO: 1692285 - RNA, 19 nt, Homo sapiens
  misc_RNA (1)...(19): siRNA sense strand
aagcagcaaucaguaggaa

SEQ ID NO: 1692286 - RNA, 19 nt, Homo sapiens
  misc_RNA (1)...(19): siRNA sense strand
guccaagggcccucauuga

SEQ ID NO: 1692287 - RNA, 19 nt, Homo sapiens
  misc_RNA (1)...(19): siRNA sense strand
ucagcaaagccuccgagua

SEQ ID NO: 1692288 - RNA, 19 nt, Homo sapiens
  misc_RNA (1)...(19): siRNA sense strand
cccgugaucuucagcaaag

SEQ ID NO: 1692289 - RNA, 19 nt, Homo sapiens
  misc_RNA (1)...(19): siRNA sense strand
gcaccauacacuaaagauc

SEQ ID NO: 1692290 - RNA, 19 nt, Homo sapiens
  misc_RNA (1)...(19): siRNA sense strand
guccugcaccauacacuaa

SEQ ID NO: 1692291 - RNA, 19 nt, Homo sapiens
  misc_RNA (1)...(19): siRNA sense strand
uccaagggcccucauugaa

SEQ ID NO: 1692292 - RNA, 19 nt, Homo sapiens
  misc_RNA (1)...(19): siRNA sense strand
ucaguaggaagaugguuga

SEQ ID NO: 1692293 - RNA, 19 nt, Homo sapiens
  misc_RNA (1)...(19): siRNA sense strand
uggagaaccucacauuucc

SEQ ID NO: 1692294 - RNA, 19 nt, Homo sapiens
  misc_RNA (1)...(19): siRNA sense strand
uaaucguccuggccauaau

SEQ ID NO: 1692295 - RNA, 19 nt, Homo sapiens
  misc_RNA (1)...(19): siRNA sense strand
aaauugccaggacuucuuu

SEQ ID NO: 1692296 - RNA, 19 nt, Homo sapiens
  misc_RNA (1)...(19): siRNA sense strand
ucucgacuaccaucaacua

SEQ ID NO: 1692297 - RNA, 19 nt, Homo sapiens
  misc_RNA (1)...(19): siRNA sense strand
ugaguauguuggagguguu

SEQ ID NO: 1692298 - RNA, 19 nt, Homo sapiens
  misc_RNA (1)...(19): siRNA sense strand
aaucaggucaugcccaaga

SEQ ID NO: 1692299 - RNA, 19 nt, Homo sapiens
  misc_RNA (1)...(19): siRNA sense strand
guuccaagcagcaaucagu

SEQ ID NO: 1692300 - RNA, 19 nt, Homo sapiens
  misc_RNA (1)...(19): siRNA sense strand
ucacaaaggcagaaaugcu

SEQ ID NO: 1692301 - RNA, 19 nt, Homo sapiens
  misc_RNA (1)...(19): siRNA sense strand
gaagaggaggggccaagaa

SEQ ID NO: 1692302 - RNA, 19 nt, Homo sapiens
  misc_RNA (1)...(19): siRNA sense strand
ggccauaaucgcaauagag

SEQ ID NO: 1692303 - RNA, 19 nt, Homo sapiens
  misc_RNA (1)...(19): siRNA sense strand
ggaguccgaguuccaagca

SEQ ID NO: 1692304 - RNA, 19 nt, Homo sapiens
  misc_RNA (1)...(19): siRNA sense strand
auugaaaccagcuauguga

SEQ ID NO: 1692305 - RNA, 19 nt, Homo sapiens
  misc_RNA (1)...(19): siRNA sense strand
guauguuggagguguuuga

SEQ ID NO: 1692306 - RNA, 19 nt, Homo sapiens
  misc_RNA (1)...(19): siRNA sense strand
ggaggagcugaguauguug

SEQ ID NO: 1692307 - RNA, 19 nt, Homo sapiens
  misc_RNA (1)...(19): siRNA sense strand
guaggaagaugguugaguu

SEQ ID NO: 1692308 - RNA, 19 nt, Homo sapiens
  misc_RNA (1)...(19): siRNA sense strand
gaagaugguugaguugguu

SEQ ID NO: 1692309 - RNA, 19 nt, Homo sapiens
  misc_RNA (1)...(19): siRNA sense strand
gagaguguccucagaaauu

SEQ ID NO: 1692310 - RNA, 19 nt, Homo sapiens
  misc_RNA (1)...(19): siRNA sense strand
gggaggagcugaguauguu

SEQ ID NO: 1692311 - RNA, 19 nt, Homo sapiens
  misc_RNA (1)...(19): siRNA sense strand
cagaaaugcuggagagugu

SEQ ID NO: 1692312 - RNA, 19 nt, Homo sapiens
  misc_RNA (1)...(19): siRNA sense strand
gaaaccagcuaugugaaag

SEQ ID NO: 1692313 - RNA, 19 nt, Homo sapiens
  misc_RNA (1)...(19): siRNA sense strand
ccagggagccggucacaaa

SEQ ID NO: 1692314 - RNA, 19 nt, Homo sapiens
  misc_RNA (1)...(19): siRNA sense strand
gaaauugccaggacuucuu

SEQ ID NO: 1692315 - RNA, 19 nt, Homo sapiens
  misc_RNA (1)...(19): siRNA sense strand
gugaaaguccugcaccaua

SEQ ID NO: 1692316 - RNA, 19 nt, Homo sapiens
  misc_RNA (1)...(19): siRNA sense strand
ggacuucuuucccgugauc

SEQ ID NO: 1692317 - RNA, 19 nt, Homo sapiens
  misc_RNA (1)...(19): siRNA sense strand
ccaagggcccucauugaaa

SEQ ID NO: 1692318 - RNA, 19 nt, Homo sapiens
  misc_RNA (1)...(19): siRNA sense strand
ggaagaugguugaguuggu

SEQ ID NO: 1692319 - RNA, 19 nt, Homo sapiens
  misc_RNA (1)...(19): siRNA sense strand
cagcaaagccuccgaguac

SEQ ID NO: 1692320 - RNA, 19 nt, Homo sapiens
  misc_RNA (1)...(19): siRNA sense strand
gagaaccucacauuuccua

SEQ ID NO: 1692321 - RNA, 19 nt, Homo sapiens
  misc_RNA (1)...(19): siRNA sense strand
gcacugcaagccugaagaa

SEQ ID NO: 1692322 - RNA, 19 nt, Homo sapiens
  misc_RNA (1)...(19): siRNA sense strand
gcagcaaucaguaggaaga

SEQ ID NO: 1692323 - RNA, 19 nt, Homo sapiens
  misc_RNA (1)...(19): siRNA sense strand
gagagagggagaagaguga

SEQ ID NO: 1692324 - RNA, 19 nt, Homo sapiens
  misc_RNA (1)...(19): siRNA sense strand
caagggcccucauugaaac

SEQ ID NO: 1692325 - RNA, 19 nt, Homo sapiens
  misc_RNA (1)...(19): siRNA sense strand
gauaaucguccuggccaua

SEQ ID NO: 1692326 - RNA, 19 nt, Homo sapiens
  misc_RNA (1)...(19): siRNA sense strand
gcaaagccuccgaguacuu

SEQ ID NO: 1692327 - RNA, 19 nt, Homo sapiens
  misc_RNA (1)...(19): siRNA sense strand
ugaaaguccugcaccauac

SEQ ID NO: 1692328 - RNA, 19 nt, Homo sapiens
  misc_RNA (1)...(19): siRNA sense strand
guggagaaccucacauuuc

SEQ ID NO: 1692329 - RNA, 19 nt, Homo sapiens
  misc_RNA (1)...(19): siRNA sense strand
ugguugaguugguucauuu

SEQ ID NO: 1692330 - RNA, 19 nt, Homo sapiens
  misc_RNA (1)...(19): siRNA sense strand
ugaaaccagcuaugugaaa

SEQ ID NO: 1692331 - RNA, 19 nt, Homo sapiens
  misc_RNA (1)...(19): siRNA sense strand
ggucacaaaggcagaaaug

SEQ ID NO: 1692332 - RNA, 19 nt, Homo sapiens
  misc_RNA (1)...(19): siRNA sense strand
gcuggagaguguccucaga

SEQ ID NO: 1692333 - RNA, 19 nt, Homo sapiens
  misc_RNA (1)...(19): siRNA sense strand
gguggagaaccucacauuu

SEQ ID NO: 1692334 - RNA, 19 nt, Homo sapiens
  misc_RNA (1)...(19): siRNA sense strand
uggagaguguccucagaaa

SEQ ID NO: 1692335 - RNA, 19 nt, Homo sapiens
  misc_RNA (1)...(19): siRNA sense strand
ggagaguguccucagaaau

SEQ ID NO: 1692336 - RNA, 19 nt, Homo sapiens
  misc_RNA (1)...(19): siRNA sense strand
caaagccuccgaguacuug

SEQ ID NO: 1692337 - RNA, 19 nt, Homo sapiens
  misc_RNA (1)...(19): siRNA sense strand
agaguguccucagaaauug

SEQ ID NO: 1692338 - RNA, 19 nt, Homo sapiens
  misc_RNA (1)...(19): siRNA sense strand
accaucaacuacacucuuu

SEQ ID NO: 1692339 - RNA, 19 nt, Homo sapiens
  misc_RNA (1)...(19): siRNA sense strand
gaaaguccugcaccauaca

SEQ ID NO: 1692340 - RNA, 19 nt, Homo sapiens
  misc_RNA (1)...(19): siRNA sense strand
gcaugaacgggcuuugaga

SEQ ID NO: 1692341 - RNA, 19 nt, Homo sapiens
  misc_RNA (1)...(19): siRNA sense strand
aaagaucgguggagaaccu

SEQ ID NO: 1692342 - RNA, 19 nt, Homo sapiens
  misc_RNA (1)...(19): siRNA sense strand
gccuccagcuucucgacua

SEQ ID NO: 1692343 - RNA, 19 nt, Homo sapiens
  misc_RNA (1)...(19): siRNA sense strand
gguccaagggcccucauug

SEQ ID NO: 1692344 - RNA, 19 nt, Homo sapiens
  misc_RNA (1)...(19): siRNA sense strand
gggcgacaaucaggucaug

SEQ ID NO: 1692345 - RNA, 19 nt, Homo sapiens
  misc_RNA (1)...(19): siRNA sense strand
cgacuaccaucaacuacac

SEQ ID NO: 1692346 - RNA, 19 nt, Homo sapiens
  misc_RNA (1)...(19): siRNA sense strand
guacuugcagcuggucuuu

SEQ ID NO: 1692347 - RNA, 19 nt, Homo sapiens
  misc_RNA (1)...(19): siRNA sense strand
aagcagcaaucaguaggaa

SEQ ID NO: 1692348 - RNA, 19 nt, Homo sapiens
  misc_RNA (1)...(19): siRNA sense strand
guccaagggcccucauuga

SEQ ID NO: 1692349 - RNA, 19 nt, Homo sapiens
  misc_RNA (1)...(19): siRNA sense strand
ucagcaaagccuccgagua

SEQ ID NO: 1692350 - RNA, 19 nt, Homo sapiens
  misc_RNA (1)...(19): siRNA sense strand
cccgugaucuucagcaaag

SEQ ID NO: 1692351 - RNA, 19 nt, Homo sapiens
  misc_RNA (1)...(19): siRNA sense strand
gcaccauacacuaaagauc

SEQ ID NO: 1692352 - RNA, 19 nt, Homo sapiens
  misc_RNA (1)...(19): siRNA sense strand
guccugcaccauacacuaa

SEQ ID NO: 1692353 - RNA, 19 nt, Homo sapiens
  misc_RNA (1)...(19): siRNA sense strand
uccaagggcccucauugaa

SEQ ID NO: 1692354 - RNA, 19 nt, Homo sapiens
  misc_RNA (1)...(19): siRNA sense strand
ucaguaggaagaugguuga

SEQ ID NO: 1692355 - RNA, 19 nt, Homo sapiens
  misc_RNA (1)...(19): siRNA sense strand
uggagaaccucacauuucc

SEQ ID NO: 1692356 - RNA, 19 nt, Homo sapiens
  misc_RNA (1)...(19): siRNA sense strand
uaaucguccuggccauaau

SEQ ID NO: 1692357 - RNA, 19 nt, Homo sapiens
  misc_RNA (1)...(19): siRNA sense strand
aaauugccaggacuucuuu

SEQ ID NO: 1692358 - RNA, 19 nt, Homo sapiens
  misc_RNA (1)...(19): siRNA sense strand
ucucgacuaccaucaacua

SEQ ID NO: 1692359 - RNA, 19 nt, Homo sapiens
  misc_RNA (1)...(19): siRNA sense strand
ugaguauguuggagguguu

SEQ ID NO: 1692360 - RNA, 19 nt, Homo sapiens
  misc_RNA (1)...(19): siRNA sense strand
aaucaggucaugcccaaga

SEQ ID NO: 1692361 - RNA, 19 nt, Homo sapiens
  misc_RNA (1)...(19): siRNA sense strand
guuccaagcagcaaucagu

SEQ ID NO: 1692362 - RNA, 19 nt, Homo sapiens
  misc_RNA (1)...(19): siRNA sense strand
ucacaaaggcagaaaugcu

SEQ ID NO: 1692363 - RNA, 19 nt, Homo sapiens
  misc_RNA (1)...(19): siRNA sense strand
gaagaggaggggccaagaa

SEQ ID NO: 1692364 - RNA, 19 nt, Homo sapiens
  misc_RNA (1)...(19): siRNA sense strand
ggccauaaucgcaauagag

SEQ ID NO: 1692365 - RNA, 19 nt, Homo sapiens
  misc_RNA (1)...(19): siRNA sense strand
ggaguccgaguuccaagca

SEQ ID NO: 1692366 - RNA, 19 nt, Homo sapiens
  misc_RNA (1)...(19): siRNA sense strand
auugaaaccagcuauguga

SEQ ID NO: 1692367 - RNA, 19 nt, Homo sapiens
  misc_RNA (1)...(19): siRNA sense strand
guauguuggagguguuuga

SEQ ID NO: 1692368 - RNA, 19 nt, Homo sapiens
  misc_RNA (1)...(19): siRNA sense strand
ggaggagcugaguauguug

SEQ ID NO: 1692369 - RNA, 19 nt, Homo sapiens
  misc_RNA (1)...(19): siRNA sense strand
guaggaagaugguugaguu

SEQ ID NO: 1692370 - RNA, 19 nt, Homo sapiens
  misc_RNA (1)...(19): siRNA sense strand
gaagaugguugaguugguu

SEQ ID NO: 1692371 - RNA, 19 nt, Homo sapiens
  misc_RNA (1)...(19): siRNA sense strand
gagaguguccucagaaauu

SEQ ID NO: 1692372 - RNA, 19 nt, Homo sapiens
  misc_RNA (1)...(19): siRNA sense strand
gggaggagcugaguauguu

SEQ ID NO: 1692373 - RNA, 19 nt, Homo sapiens
  misc_RNA (1)...(19): siRNA sense strand
cagaaaugcuggagagugu

SEQ ID NO: 1692374 - RNA, 19 nt, Homo sapiens
  misc_RNA (1)...(19): siRNA sense strand
gaaaccagcuaugugaaag

SEQ ID NO: 1692375 - RNA, 19 nt, Homo sapiens
  misc_RNA (1)...(19): siRNA sense strand
ccagggagccggucacaaa

SEQ ID NO: 1692376 - RNA, 19 nt, Homo sapiens
  misc_RNA (1)...(19): siRNA sense strand
gaaauugccaggacuucuu

SEQ ID NO: 1692377 - RNA, 19 nt, Homo sapiens
  misc_RNA (1)...(19): siRNA sense strand
gugaaaguccugcaccaua

SEQ ID NO: 1692378 - RNA, 19 nt, Homo sapiens
  misc_RNA (1)...(19): siRNA sense strand
ggacuucuuucccgugauc

SEQ ID NO: 1692379 - RNA, 19 nt, Homo sapiens
  misc_RNA (1)...(19): siRNA sense strand
ccaagggcccucauugaaa

SEQ ID NO: 1692380 - RNA, 19 nt, Homo sapiens
  misc_RNA (1)...(19): siRNA sense strand
ggaagaugguugaguuggu

SEQ ID NO: 1692381 - RNA, 19 nt, Homo sapiens
  misc_RNA (1)...(19): siRNA sense strand
cagcaaagccuccgaguac

SEQ ID NO: 1692382 - RNA, 19 nt, Homo sapiens
  misc_RNA (1)...(19): siRNA sense strand
gagaaccucacauuuccua

SEQ ID NO: 1692383 - RNA, 19 nt, Homo sapiens
  misc_RNA (1)...(19): siRNA sense strand
gcacugcaagccugaagaa

SEQ ID NO: 1692384 - RNA, 19 nt, Homo sapiens
  misc_RNA (1)...(19): siRNA sense strand
gcagcaaucaguaggaaga

SEQ ID NO: 1692385 - RNA, 19 nt, Homo sapiens
  misc_RNA (1)...(19): siRNA sense strand
gagagagggagaagaguga

SEQ ID NO: 1692386 - RNA, 19 nt, Homo sapiens
  misc_RNA (1)...(19): siRNA sense strand
caagggcccucauugaaac

SEQ ID NO: 1692387 - RNA, 19 nt, Homo sapiens
  misc_RNA (1)...(19): siRNA sense strand
gauaaucguccuggccaua

SEQ ID NO: 1692388 - RNA, 19 nt, Homo sapiens
  misc_RNA (1)...(19): siRNA sense strand
gcaaagccuccgaguacuu

SEQ ID NO: 1692389 - RNA, 19 nt, Homo sapiens
  misc_RNA (1)...(19): siRNA sense strand
ugaaaguccugcaccauac

SEQ ID NO: 1692390 - RNA, 19 nt, Homo sapiens
  misc_RNA (1)...(19): siRNA sense strand
guggagaaccucacauuuc

SEQ ID NO: 1692391 - RNA, 19 nt, Homo sapiens
  misc_RNA (1)...(19): siRNA sense strand
ugguugaguugguucauuu

SEQ ID NO: 1692392 - RNA, 19 nt, Homo sapiens
  misc_RNA (1)...(19): siRNA sense strand
ugaaaccagcuaugugaaa

SEQ ID NO: 1692393 - RNA, 19 nt, Homo sapiens
  misc_RNA (1)...(19): siRNA sense strand
ggucacaaaggcagaaaug

SEQ ID NO: 1692394 - RNA, 19 nt, Homo sapiens
  misc_RNA (1)...(19): siRNA sense strand
gcuggagaguguccucaga

SEQ ID NO: 1692395 - RNA, 19 nt, Homo sapiens
  misc_RNA (1)...(19): siRNA sense strand
gguggagaaccucacauuu

SEQ ID NO: 1692396 - RNA, 19 nt, Homo sapiens
  misc_RNA (1)...(19): siRNA sense strand
uggagaguguccucagaaa

SEQ ID NO: 1692397 - RNA, 19 nt, Homo sapiens
  misc_RNA (1)...(19): siRNA sense strand
ggagaguguccucagaaau

SEQ ID NO: 1692398 - RNA, 19 nt, Homo sapiens
  misc_RNA (1)...(19): siRNA sense strand
caaagccuccgaguacuug

SEQ ID NO: 1692399 - RNA, 19 nt, Homo sapiens
  misc_RNA (1)...(19): siRNA sense strand
agaguguccucagaaauug

SEQ ID NO: 1692400 - RNA, 19 nt, Homo sapiens
  misc_RNA (1)...(19): siRNA sense strand
accaucaacuacacucuuu

SEQ ID NO: 1692401 - RNA, 19 nt, Homo sapiens
  misc_RNA (1)...(19): siRNA sense strand
gaaaguccugcaccauaca

SEQ ID NO: 1692402 - RNA, 19 nt, Homo sapiens
  misc_RNA (1)...(19): siRNA sense strand
gcaugaacgggcuuugaga

SEQ ID NO: 1692403 - RNA, 19 nt, Homo sapiens
  misc_RNA (1)...(19): siRNA sense strand
aaagaucgguggagaaccu

SEQ ID NO: 1692404 - RNA, 19 nt, Homo sapiens
  misc_RNA (1)...(19): siRNA sense strand
gccuccagcuucucgacua

SEQ ID NO: 1692405 - RNA, 19 nt, Homo sapiens
  misc_RNA (1)...(19): siRNA sense strand
gguccaagggcccucauug

SEQ ID NO: 1692406 - RNA, 19 nt, Homo sapiens
  misc_RNA (1)...(19): siRNA sense strand
gggcgacaaucaggucaug

SEQ ID NO: 1692407 - RNA, 19 nt, Homo sapiens
  misc_RNA (1)...(19): siRNA sense strand
cgacuaccaucaacuacac

SEQ ID NO: 1692408 - RNA, 19 nt, Homo sapiens
  misc_RNA (1)...(19): siRNA sense strand
guacuugcagcuggucuuu

SEQ ID NO: 1692409 - RNA, 19 nt, Homo sapiens
  misc_RNA (1)...(19): siRNA sense strand
aagcagcaaucaguaggaa

SEQ ID NO: 1692410 - RNA, 19 nt, Homo sapiens
  misc_RNA (1)...(19): siRNA sense strand
guccaagggcccucauuga

SEQ ID NO: 1692411 - RNA, 19 nt, Homo sapiens
  misc_RNA (1)...(19): siRNA sense strand
ucagcaaagccuccgagua

SEQ ID NO: 1692412 - RNA, 19 nt, Homo sapiens
  misc_RNA (1)...(19): siRNA sense strand
cccgugaucuucagcaaag

SEQ ID NO: 1692413 - RNA, 19 nt, Homo sapiens
  misc_RNA (1)...(19): siRNA sense strand
gcaccauacacuaaagauc

SEQ ID NO: 1692414 - RNA, 19 nt, Homo sapiens
  misc_RNA (1)...(19): siRNA sense strand
guccugcaccauacacuaa

SEQ ID NO: 1692415 - RNA, 19 nt, Homo sapiens
  misc_RNA (1)...(19): siRNA sense strand
uccaagggcccucauugaa

SEQ ID NO: 1692416 - RNA, 19 nt, Homo sapiens
  misc_RNA (1)...(19): siRNA sense strand
ucaguaggaagaugguuga

SEQ ID NO: 1692417 - RNA, 19 nt, Homo sapiens
  misc_RNA (1)...(19): siRNA sense strand
uggagaaccucacauuucc

SEQ ID NO: 1692418 - RNA, 19 nt, Homo sapiens
  misc_RNA (1)...(19): siRNA sense strand
uaaucguccuggccauaau

SEQ ID NO: 1692419 - RNA, 19 nt, Homo sapiens
  misc_RNA (1)...(19): siRNA sense strand
aaauugccaggacuucuuu

SEQ ID NO: 1692420 - RNA, 19 nt, Homo sapiens
  misc_RNA (1)...(19): siRNA sense strand
ucucgacuaccaucaacua

SEQ ID NO: 1692421 - RNA, 19 nt, Homo sapiens
  misc_RNA (1)...(19): siRNA sense strand
ugaguauguuggagguguu

SEQ ID NO: 1692422 - RNA, 19 nt, Homo sapiens
  misc_RNA (1)...(19): siRNA sense strand
aaucaggucaugcccaaga

SEQ ID NO: 1692423 - RNA, 19 nt, Homo sapiens
  misc_RNA (1)...(19): siRNA sense strand
guuccaagcagcaaucagu

SEQ ID NO: 1692424 - RNA, 19 nt, Homo sapiens
  misc_RNA (1)...(19): siRNA sense strand
ucacaaaggcagaaaugcu

SEQ ID NO: 1692425 - RNA, 19 nt, Homo sapiens
  misc_RNA (1)...(19): siRNA sense strand
gaagaggaggggccaagaa

SEQ ID NO: 1692426 - RNA, 19 nt, Homo sapiens
  misc_RNA (1)...(19): siRNA sense strand
ggccauaaucgcaauagag

SEQ ID NO: 1692427 - RNA, 19 nt, Homo sapiens
  misc_RNA (1)...(19): siRNA sense strand
ggaguccgaguuccaagca

SEQ ID NO: 1692428 - RNA, 19 nt, Homo sapiens
  misc_RNA (1)...(19): siRNA sense strand
auugaaaccagcuauguga

SEQ ID NO: 1692429 - RNA, 19 nt, Homo sapiens
  misc_RNA (1)...(19): siRNA sense strand
guauguuggagguguuuga

SEQ ID NO: 1692430 - RNA, 19 nt, Homo sapiens
  misc_RNA (1)...(19): siRNA sense strand
ggaggagcugaguauguug

SEQ ID NO: 1692431 - RNA, 19 nt, Homo sapiens
  misc_RNA (1)...(19): siRNA sense strand
gcacuucccuacagcagau

SEQ ID NO: 1692432 - RNA, 19 nt, Homo sapiens
  misc_RNA (1)...(19): siRNA sense strand
caaaggccaugaggaaguu

SEQ ID NO: 1692433 - RNA, 19 nt, Homo sapiens
  misc_RNA (1)...(19): siRNA sense strand
cagcagauaucagggagaa

SEQ ID NO: 1692434 - RNA, 19 nt, Homo sapiens
  misc_RNA (1)...(19): siRNA sense strand
gggagugcccagcaaauuu

SEQ ID NO: 1692435 - RNA, 19 nt, Homo sapiens
  misc_RNA (1)...(19): siRNA sense strand
gaaaggagaacagccgaau

SEQ ID NO: 1692436 - RNA, 19 nt, Homo sapiens
  misc_RNA (1)...(19): siRNA sense strand
gaguaccgcugcccugagu

SEQ ID NO: 1692437 - RNA, 19 nt, Homo sapiens
  misc_RNA (1)...(19): siRNA sense strand
ugccuucgcuugcccauug

SEQ ID NO: 1692438 - RNA, 19 nt, Homo sapiens
  misc_RNA (1)...(19): siRNA sense strand
ugacccggcacaucaauaa

SEQ ID NO: 1692439 - RNA, 19 nt, Homo sapiens
  misc_RNA (1)...(19): siRNA sense strand
ggagaacagccgaauagag

SEQ ID NO: 1692440 - RNA, 19 nt, Homo sapiens
  misc_RNA (1)...(19): siRNA sense strand
gugcccauauugccacaaa

SEQ ID NO: 1692441 - RNA, 19 nt, Homo sapiens
  misc_RNA (1)...(19): siRNA sense strand
ggagcgcacuucccuacag

SEQ ID NO: 1692442 - RNA, 19 nt, Homo sapiens
  misc_RNA (1)...(19): siRNA sense strand
ccaaaggccaugaggaagu

SEQ ID NO: 1692443 - RNA, 19 nt, Homo sapiens
  misc_RNA (1)...(19): siRNA sense strand
ugacgggagugcccagcaa

SEQ ID NO: 1692444 - RNA, 19 nt, Homo sapiens
  misc_RNA (1)...(19): siRNA sense strand
aaaggagaacagccgaaua

SEQ ID NO: 1692445 - RNA, 19 nt, Homo sapiens
  misc_RNA (1)...(19): siRNA sense strand
ucccaucgccgcuggcaua

SEQ ID NO: 1692446 - RNA, 19 nt, Homo sapiens
  misc_RNA (1)...(19): siRNA sense strand
caucgccgcuggcauaagc

SEQ ID NO: 1692447 - RNA, 19 nt, Homo sapiens
  misc_RNA (1)...(19): siRNA sense strand
gcaucgugcgcguagagua

SEQ ID NO: 1692448 - RNA, 19 nt, Homo sapiens
  misc_RNA (1)...(19): siRNA sense strand
aaggagaacagccgaauag

SEQ ID NO: 1692449 - RNA, 19 nt, Homo sapiens
  misc_RNA (1)...(19): siRNA sense strand
ggagugcccagcaaauuuu

SEQ ID NO: 1692450 - RNA, 19 nt, Homo sapiens
  misc_RNA (1)...(19): siRNA sense strand
augaggaaguugagcuuug

SEQ ID NO: 1692451 - RNA, 19 nt, Homo sapiens
  misc_RNA (1)...(19): siRNA sense strand
guccugggccugaagauca

SEQ ID NO: 1692452 - RNA, 19 nt, Homo sapiens
  misc_RNA (1)...(19): siRNA sense strand
gcacugcccguccacuuuu

SEQ ID NO: 1692453 - RNA, 19 nt, Homo sapiens
  misc_RNA (1)...(19): siRNA sense strand
ggaaucaagaagccaaagg

SEQ ID NO: 1692454 - RNA, 19 nt, Homo sapiens
  misc_RNA (1)...(19): siRNA sense strand
agccaaaggccaugaggaa

SEQ ID NO: 1692455 - RNA, 19 nt, Homo sapiens
  misc_RNA (1)...(19): siRNA sense strand
ugaggaaguugagcuuugc

SEQ ID NO: 1692456 - RNA, 19 nt, Homo sapiens
  misc_RNA (1)...(19): siRNA sense strand
ucacagagcucaaugauga

SEQ ID NO: 1692457 - RNA, 19 nt, Homo sapiens
  misc_RNA (1)...(19): siRNA sense strand
agaaggagccacucauuua

SEQ ID NO: 1692458 - RNA, 19 nt, Homo sapiens
  misc_RNA (1)...(19): siRNA sense strand
ggaaggcccugcggaauuc

SEQ ID NO: 1692459 - RNA, 19 nt, Homo sapiens
  misc_RNA (1)...(19): siRNA sense strand
gaggaccgcuucaugcuau

SEQ ID NO: 1692460 - RNA, 19 nt, Homo sapiens
  misc_RNA (1)...(19): siRNA sense strand
gagcagcaccgcuuugaaa

SEQ ID NO: 1692461 - RNA, 19 nt, Homo sapiens
  misc_RNA (1)...(19): siRNA sense strand
gagaugaagucgacugauc

SEQ ID NO: 1692462 - RNA, 19 nt, Homo sapiens
  misc_RNA (1)...(19): siRNA sense strand
gaaggagccacucauuuau

SEQ ID NO: 1692463 - RNA, 19 nt, Homo sapiens
  misc_RNA (1)...(19): siRNA sense strand
gcauggugcucaaggaguu

SEQ ID NO: 1692464 - RNA, 19 nt, Homo sapiens
  misc_RNA (1)...(19): siRNA sense strand
uggaggagcuggaggagaa

SEQ ID NO: 1692465 - RNA, 19 nt, Homo sapiens
  misc_RNA (1)...(19): siRNA sense strand
gcagaaggagccacucauu

SEQ ID NO: 1692466 - RNA, 19 nt, Homo sapiens
  misc_RNA (1)...(19): siRNA sense strand
caucaaguccucugacaaa

SEQ ID NO: 1692467 - RNA, 19 nt, Homo sapiens
  misc_RNA (1)...(19): siRNA sense strand
cugaagagcuauguggaua

SEQ ID NO: 1692468 - RNA, 19 nt, Homo sapiens
  misc_RNA (1)...(19): siRNA sense strand
gcaaggcgacacucauuga

SEQ ID NO: 1692469 - RNA, 19 nt, Homo sapiens
  misc_RNA (1)...(19): siRNA sense strand
gaaugccacucuugaacug

SEQ ID NO: 1692470 - RNA, 19 nt, Homo sapiens
  misc_RNA (1)...(19): siRNA sense strand
aggcguaccuggacaauau

SEQ ID NO: 1692471 - RNA, 19 nt, Homo sapiens
  misc_RNA (1)...(19): siRNA sense strand
uugaaaagcugauggaaua

SEQ ID NO: 1692472 - RNA, 19 nt, Homo sapiens
  misc_RNA (1)...(19): siRNA sense strand
ccagugcucugucacguau

SEQ ID NO: 1692473 - RNA, 19 nt, Homo sapiens
  misc_RNA (1)...(19): siRNA sense strand
gagcuagacaugagugauu

SEQ ID NO: 1692474 - RNA, 19 nt, Homo sapiens
  misc_RNA (1)...(19): siRNA sense strand
agugggagcucaucuguga

SEQ ID NO: 1692475 - RNA, 19 nt, Homo sapiens
  misc_RNA (1)...(19): siRNA sense strand
gaaggucauugcugagaag

SEQ ID NO: 1692476 - RNA, 19 nt, Homo sapiens
  misc_RNA (1)...(19): siRNA sense strand
caucauccuugcagccuuu

SEQ ID NO: 1692477 - RNA, 19 nt, Homo sapiens
  misc_RNA (1)...(19): siRNA sense strand
caggagcgguuucaaguca

SEQ ID NO: 1692478 - RNA, 19 nt, Homo sapiens
  misc_RNA (1)...(19): siRNA sense strand
gcagcgaggccuagaguug

SEQ ID NO: 1692479 - RNA, 19 nt, Homo sapiens
  misc_RNA (1)...(19): siRNA sense strand
gaauugggcccaggaguga

SEQ ID NO: 1692480 - RNA, 19 nt, Homo sapiens
  misc_RNA (1)...(19): siRNA sense strand
cauuaaggccuacaagaaa

SEQ ID NO: 1692481 - RNA, 19 nt, Homo sapiens
  misc_RNA (1)...(19): siRNA sense strand
gaagagcuauguggauacu

SEQ ID NO: 1692482 - RNA, 19 nt, Homo sapiens
  misc_RNA (1)...(19): siRNA sense strand
cagaaggagccacucauuu

SEQ ID NO: 1692483 - RNA, 19 nt, Homo sapiens
  misc_RNA (1)...(19): siRNA sense strand
caagauugcagaacuggaa

SEQ ID NO: 1692484 - RNA, 19 nt, Homo sapiens
  misc_RNA (1)...(19): siRNA sense strand
uggaugugcugcucgagua

SEQ ID NO: 1692485 - RNA, 19 nt, Homo sapiens
  misc_RNA (1)...(19): siRNA sense strand
agaagcccauccagacuaa

SEQ ID NO: 1692486 - RNA, 19 nt, Homo sapiens
  misc_RNA (1)...(19): siRNA sense strand
gaagacgcgacucagaauu

SEQ ID NO: 1692487 - RNA, 19 nt, Homo sapiens
  misc_RNA (1)...(19): siRNA sense strand
ggaagacgcgacucagaau

SEQ ID NO: 1692488 - RNA, 19 nt, Homo sapiens
  misc_RNA (1)...(19): siRNA sense strand
gaagugggagcucaucugu

SEQ ID NO: 1692489 - RNA, 19 nt, Homo sapiens
  misc_RNA (1)...(19): siRNA sense strand
ggacagcaacaucgacuuc

SEQ ID NO: 1692490 - RNA, 19 nt, Homo sapiens
  misc_RNA (1)...(19): siRNA sense strand
guccacgucuguauuaugu

SEQ ID NO: 1692491 - RNA, 19 nt, Homo sapiens
  misc_RNA (1)...(19): siRNA sense strand
caacggggcuuccaacuca

SEQ ID NO: 1692492 - RNA, 19 nt, Homo sapiens
  misc_RNA (1)...(19): siRNA sense strand
gaaagguagcagcugauug

SEQ ID NO: 1692493 - RNA, 19 nt, Homo sapiens
  misc_RNA (1)...(19): siRNA sense strand
caucccggcuccucuguga

SEQ ID NO: 1692494 - RNA, 19 nt, Homo sapiens
  misc_RNA (1)...(19): siRNA sense strand
gagaaguacccgcaacuca

SEQ ID NO: 1692495 - RNA, 19 nt, Homo sapiens
  misc_RNA (1)...(19): siRNA sense strand
ggucauugcugagaaguac

SEQ ID NO: 1692496 - RNA, 19 nt, Homo sapiens
  misc_RNA (1)...(19): siRNA sense strand
gcaugcaguucaucaacau

SEQ ID NO: 1692497 - RNA, 19 nt, Homo sapiens
  misc_RNA (1)...(19): siRNA sense strand
gagccuggaugcgcuguug

SEQ ID NO: 1692498 - RNA, 19 nt, Homo sapiens
  misc_RNA (1)...(19): siRNA sense strand
ucauuaaggccuacaagaa

SEQ ID NO: 1692499 - RNA, 19 nt, Homo sapiens
  misc_RNA (1)...(19): siRNA sense strand
gaaguacccgcaacucaca

SEQ ID NO: 1692500 - RNA, 19 nt, Homo sapiens
  misc_RNA (1)...(19): siRNA sense strand
caaguccucugacaaacuc

SEQ ID NO: 1692501 - RNA, 19 nt, Homo sapiens
  misc_RNA (1)...(19): siRNA sense strand
aauaugaguucacccacuu

SEQ ID NO: 1692502 - RNA, 19 nt, Homo sapiens
  misc_RNA (1)...(19): siRNA sense strand
gcccugaacugcaugaacu

SEQ ID NO: 1692503 - RNA, 19 nt, Homo sapiens
  misc_RNA (1)...(19): siRNA sense strand
ggaggaccgcuucaugcua

SEQ ID NO: 1692504 - RNA, 19 nt, Homo sapiens
  misc_RNA (1)...(19): siRNA sense strand
ugaaggucauugcugagaa

SEQ ID NO: 1692505 - RNA, 19 nt, Homo sapiens
  misc_RNA (1)...(19): siRNA sense strand
ggccuagaguugacacaga

SEQ ID NO: 1692506 - RNA, 19 nt, Homo sapiens
  misc_RNA (1)...(19): siRNA sense strand
cagcaaggcgacacucauu

SEQ ID NO: 1692507 - RNA, 19 nt, Homo sapiens
  misc_RNA (1)...(19): siRNA sense strand
gaccucagcgcucucaaga

SEQ ID NO: 1692508 - RNA, 19 nt, Homo sapiens
  misc_RNA (1)...(19): siRNA sense strand
guucaucaacauuguggua

SEQ ID NO: 1692509 - RNA, 19 nt, Homo sapiens
  misc_RNA (1)...(19): siRNA sense strand
uggaugcgcuguuggagau

SEQ ID NO: 1692510 - RNA, 19 nt, Homo sapiens
  misc_RNA (1)...(19): siRNA sense strand
gcucaugccgcaacugaau

SEQ ID NO: 1692511 - RNA, 19 nt, Homo sapiens
  misc_RNA (1)...(19): siRNA sense strand
ccacccagccugugucaau

SEQ ID NO: 1692512 - RNA, 19 nt, Homo sapiens
  misc_RNA (1)...(19): siRNA sense strand
gaucaggagcgguuucaag

SEQ ID NO: 1692513 - RNA, 19 nt, Homo sapiens
  misc_RNA (1)...(19): siRNA sense strand
cucuuuagccgcuucauua

SEQ ID NO: 1692514 - RNA, 19 nt, Homo sapiens
  misc_RNA (1)...(19): siRNA sense strand
ggaaugaggacagcaacau

SEQ ID NO: 1692515 - RNA, 19 nt, Homo sapiens
  misc_RNA (1)...(19): siRNA sense strand
cagacuaaguuccgaaugc

SEQ ID NO: 1692516 - RNA, 19 nt, Homo sapiens
  misc_RNA (1)...(19): siRNA sense strand
gagauuguccuggccuuug

SEQ ID NO: 1692517 - RNA, 19 nt, Homo sapiens
  misc_RNA (1)...(19): siRNA sense strand
gcgcaucugccaagccauu

SEQ ID NO: 1692518 - RNA, 19 nt, Homo sapiens
  misc_RNA (1)...(19): siRNA sense strand
aaagguagcagcugauugg

SEQ ID NO: 1692519 - RNA, 19 nt, Homo sapiens
  misc_RNA (1)...(19): siRNA sense strand
caauggaggagcugucaga

SEQ ID NO: 1692520 - RNA, 19 nt, Homo sapiens
  misc_RNA (1)...(19): siRNA sense strand
aacaugaacuuccgugucu

SEQ ID NO: 1692521 - RNA, 19 nt, Homo sapiens
  misc_RNA (1)...(19): siRNA sense strand
gaaugaggacagcaacauc

SEQ ID NO: 1692522 - RNA, 19 nt, Homo sapiens
  misc_RNA (1)...(19): siRNA sense strand
uugaagacaucaucacagu

SEQ ID NO: 1692523 - RNA, 19 nt, Homo sapiens
  misc_RNA (1)...(19): siRNA sense strand
gaugcgcuguuggagauga

SEQ ID NO: 1692524 - RNA, 19 nt, Homo sapiens
  misc_RNA (1)...(19): siRNA sense strand
gccuggaccuguacuugga

SEQ ID NO: 1692525 - RNA, 19 nt, Homo sapiens
  misc_RNA (1)...(19): siRNA sense strand
ucaacauugugguacauuc

SEQ ID NO: 1692526 - RNA, 19 nt, Homo sapiens
  misc_RNA (1)...(19): siRNA sense strand
caccggcacugucuucaca

SEQ ID NO: 1692527 - RNA, 19 nt, Homo sapiens
  misc_RNA (1)...(19): siRNA sense strand
gaucaccggcacugucuuc

SEQ ID NO: 1692528 - RNA, 19 nt, Homo sapiens
  misc_RNA (1)...(19): siRNA sense strand
gcaaguggcgcugcugaca

SEQ ID NO: 1692529 - RNA, 19 nt, Homo sapiens
  misc_RNA (1)...(19): siRNA sense strand
ggccaagauugcagaacug

SEQ ID NO: 1692530 - RNA, 19 nt, Homo sapiens
  misc_RNA (1)...(19): siRNA sense strand
ccaacucgcccaccaugga

SEQ ID NO: 1692531 - RNA, 19 nt, Homo sapiens
  misc_RNA (1)...(19): siRNA sense strand
ggacacagagaccaagaac

SEQ ID NO: 1692532 - RNA, 19 nt, Homo sapiens
  misc_RNA (1)...(19): siRNA sense strand
ggagcgguuucaagucaag

SEQ ID NO: 1692533 - RNA, 19 nt, Homo sapiens
  misc_RNA (1)...(19): siRNA sense strand
uugagucugugguggagua

SEQ ID NO: 1692534 - RNA, 19 nt, Homo sapiens
  misc_RNA (1)...(19): siRNA sense strand
ccacagcgaccugcacuuc

SEQ ID NO: 1692535 - RNA, 19 nt, Homo sapiens
  misc_RNA (1)...(19): siRNA sense strand
uacauucgguggagaacau

SEQ ID NO: 1692536 - RNA, 19 nt, Homo sapiens
  misc_RNA (1)...(19): siRNA sense strand
ggccacagauggaccucau

SEQ ID NO: 1692537 - RNA, 19 nt, Homo sapiens
  misc_RNA (1)...(19): siRNA sense strand
ggagauuguccuggccuuu

SEQ ID NO: 1692538 - RNA, 19 nt, Homo sapiens
  misc_RNA (1)...(19): siRNA sense strand
aaguggcgcugcugacaga

SEQ ID NO: 1692539 - RNA, 19 nt, Homo sapiens
  misc_RNA (1)...(19): siRNA sense strand
gugucuuccugcaauauga

SEQ ID NO: 1692540 - RNA, 19 nt, Homo sapiens
  misc_RNA (1)...(19): siRNA sense strand
ucgaguaccuggccuuugc

SEQ ID NO: 1692541 - RNA, 19 nt, Homo sapiens
  misc_RNA (1)...(19): siRNA sense strand
cgaaagguagcagcugauu

SEQ ID NO: 1692542 - RNA, 19 nt, Homo sapiens
  misc_RNA (1)...(19): siRNA sense strand
uaugagagcgaccgugaug

SEQ ID NO: 1692543 - RNA, 19 nt, Homo sapiens
  misc_RNA (1)...(19): siRNA sense strand
ugacaaacuccgccagauc

SEQ ID NO: 1692544 - RNA, 19 nt, Homo sapiens
  misc_RNA (1)...(19): siRNA sense strand
cagccucaauguccaucaa

SEQ ID NO: 1692545 - RNA, 19 nt, Homo sapiens
  misc_RNA (1)...(19): siRNA sense strand
acgaauccauggccaagau

SEQ ID NO: 1692546 - RNA, 19 nt, Homo sapiens
  misc_RNA (1)...(19): siRNA sense strand
gaaaagcugauggaauauu

SEQ ID NO: 1692547 - RNA, 19 nt, Homo sapiens
  misc_RNA (1)...(19): siRNA sense strand
gggagcagcaccgcuuuga

SEQ ID NO: 1692548 - RNA, 19 nt, Homo sapiens
  misc_RNA (1)...(19): siRNA sense strand
ggagcagcaccgcuuugaa

SEQ ID NO: 1692549 - RNA, 19 nt, Homo sapiens
  misc_RNA (1)...(19): siRNA sense strand
ggagguggaacaguggaaa

SEQ ID NO: 1692550 - RNA, 19 nt, Homo sapiens
  misc_RNA (1)...(19): siRNA sense strand
gaagaagugggagcucauc

SEQ ID NO: 1692551 - RNA, 19 nt, Homo sapiens
  misc_RNA (1)...(19): siRNA sense strand
ugacacagagagaguuugu

SEQ ID NO: 1692552 - RNA, 19 nt, Homo sapiens
  misc_RNA (1)...(19): siRNA sense strand
cagcgaggccuagaguuga

SEQ ID NO: 1692553 - RNA, 19 nt, Homo sapiens
  misc_RNA (1)...(19): siRNA sense strand
aagaagcccauccagacua

SEQ ID NO: 1692554 - RNA, 19 nt, Homo sapiens
  misc_RNA (1)...(19): siRNA sense strand
ugaaacggaggcagcagaa

SEQ ID NO: 1692555 - RNA, 19 nt, Homo sapiens
  misc_RNA (1)...(19): siRNA sense strand
agagaaccguggccuggau

SEQ ID NO: 1692556 - RNA, 19 nt, Homo sapiens
  misc_RNA (1)...(19): siRNA sense strand
ggaaagaacaucaagauua

SEQ ID NO: 1692557 - RNA, 19 nt, Homo sapiens
  misc_RNA (1)...(19): siRNA sense strand
gcagaaaggugccgacuuc

SEQ ID NO: 1692558 - RNA, 19 nt, Homo sapiens
  misc_RNA (1)...(19): siRNA sense strand
gaagggagauguggucauu

SEQ ID NO: 1692559 - RNA, 19 nt, Homo sapiens
  misc_RNA (1)...(19): siRNA sense strand
gaagggagccacucucaaa

SEQ ID NO: 1692560 - RNA, 19 nt, Homo sapiens
  misc_RNA (1)...(19): siRNA sense strand
gaacuucucucauggaacu

SEQ ID NO: 1692561 - RNA, 19 nt, Homo sapiens
  misc_RNA (1)...(19): siRNA sense strand
ugaaggagaugauuaaguc

SEQ ID NO: 1692562 - RNA, 19 nt, Homo sapiens
  misc_RNA (1)...(19): siRNA sense strand
gauuaagucuggaaugaau

SEQ ID NO: 1692563 - RNA, 19 nt, Homo sapiens
  misc_RNA (1)...(19): siRNA sense strand
ggcaucaucuguaccauug

SEQ ID NO: 1692564 - RNA, 19 nt, Homo sapiens
  misc_RNA (1)...(19): siRNA sense strand
gaauguggcucgucugaac

SEQ ID NO: 1692565 - RNA, 19 nt, Homo sapiens
  misc_RNA (1)...(19): siRNA sense strand
cgucugaacuucucucaug

SEQ ID NO: 1692566 - RNA, 19 nt, Homo sapiens
  misc_RNA (1)...(19): siRNA sense strand
guucggagguuugaugaaa

SEQ ID NO: 1692567 - RNA, 19 nt, Homo sapiens
  misc_RNA (1)...(19): siRNA sense strand
gcagugauguggccaaugc

SEQ ID NO: 1692568 - RNA, 19 nt, Homo sapiens
  misc_RNA (1)...(19): siRNA sense strand
gcucagaagaugaugauug

SEQ ID NO: 1692569 - RNA, 19 nt, Homo sapiens
  misc_RNA (1)...(19): siRNA sense strand
gggacugccuucauucaga

SEQ ID NO: 1692570 - RNA, 19 nt, Homo sapiens
  misc_RNA (1)...(19): siRNA sense strand
ggaagguccugggagagaa

SEQ ID NO: 1692571 - RNA, 19 nt, Homo sapiens
  misc_RNA (1)...(19): siRNA sense strand
gaacuuugccaugaauguu

SEQ ID NO: 1692572 - RNA, 19 nt, Homo sapiens
  misc_RNA (1)...(19): siRNA sense strand
gaagugggcagcaagaucu

SEQ ID NO: 1692573 - RNA, 19 nt, Homo sapiens
  misc_RNA (1)...(19): siRNA sense strand
gcacagccacggaaagcuu

SEQ ID NO: 1692574 - RNA, 19 nt, Homo sapiens
  misc_RNA (1)...(19): siRNA sense strand
cgagcaggauguugauaug

SEQ ID NO: 1692575 - RNA, 19 nt, Homo sapiens
  misc_RNA (1)...(19): siRNA sense strand
ggagagaagggaaagaaca

SEQ ID NO: 1692576 - RNA, 19 nt, Homo sapiens
  misc_RNA (1)...(19): siRNA sense strand
gauccgaacugggcucauc

SEQ ID NO: 1692577 - RNA, 19 nt, Homo sapiens
  misc_RNA (1)...(19): siRNA sense strand
caucaagauuaucagcaaa

SEQ ID NO: 1692578 - RNA, 19 nt, Homo sapiens
  misc_RNA (1)...(19): siRNA sense strand
ggauguugauaugguguuu

SEQ ID NO: 1692579 - RNA, 19 nt, Homo sapiens
  misc_RNA (1)...(19): siRNA sense strand
gggaaagaacaucaagauu

SEQ ID NO: 1692580 - RNA, 19 nt, Homo sapiens
  misc_RNA (1)...(19): siRNA sense strand
gcggagaccaucaagaaug

SEQ ID NO: 1692581 - RNA, 19 nt, Homo sapiens
  misc_RNA (1)...(19): siRNA sense strand
ggugaacuuugccaugaau

SEQ ID NO: 1692582 - RNA, 19 nt, Homo sapiens
  misc_RNA (1)...(19): siRNA sense strand
cugcagagguggagcugaa

SEQ ID NO: 1692583 - RNA, 19 nt, Homo sapiens
  misc_RNA (1)...(19): siRNA sense strand
cgggugaacuuugccauga

SEQ ID NO: 1692584 - RNA, 19 nt, Homo sapiens
  misc_RNA (1)...(19): siRNA sense strand
gagaagggaaagaacauca

SEQ ID NO: 1692585 - RNA, 19 nt, Homo sapiens
  misc_RNA (1)...(19): siRNA sense strand
gaacacuggcaucaucugu

SEQ ID NO: 1692586 - RNA, 19 nt, Homo sapiens
  misc_RNA (1)...(19): siRNA sense strand
cggagaccaucaagaaugu

SEQ ID NO: 1692587 - RNA, 19 nt, Homo sapiens
  misc_RNA (1)...(19): siRNA sense strand
uggagagcaugaucaagaa

SEQ ID NO: 1692588 - RNA, 19 nt, Homo sapiens
  misc_RNA (1)...(19): siRNA sense strand
gaucaguggagacguugaa

SEQ ID NO: 1692589 - RNA, 19 nt, Homo sapiens
  misc_RNA (1)...(19): siRNA sense strand
ugagauuccugcagagaag

SEQ ID NO: 1692590 - RNA, 19 nt, Homo sapiens
  misc_RNA (1)...(19): siRNA sense strand
guggugaucuaggcauuga

SEQ ID NO: 1692591 - RNA, 19 nt, Homo sapiens
  misc_RNA (1)...(19): siRNA sense strand
ggaagugggcagcaagauc

SEQ ID NO: 1692592 - RNA, 19 nt, Homo sapiens
  misc_RNA (1)...(19): siRNA sense strand
gaagggaaagaacaucaag

SEQ ID NO: 1692593 - RNA, 19 nt, Homo sapiens
  misc_RNA (1)...(19): siRNA sense strand
caugcugucuggagaaaca

SEQ ID NO: 1692594 - RNA, 19 nt, Homo sapiens
  misc_RNA (1)...(19): siRNA sense strand
acaucaagauuaucagcaa

SEQ ID NO: 1692595 - RNA, 19 nt, Homo sapiens
  misc_RNA (1)...(19): siRNA sense strand
ugggaagccugucaucugu

SEQ ID NO: 1692596 - RNA, 19 nt, Homo sapiens
  misc_RNA (1)...(19): siRNA sense strand
ccggaacacuggcaucauc

SEQ ID NO: 1692597 - RNA, 19 nt, Homo sapiens
  misc_RNA (1)...(19): siRNA sense strand
gggugaacuuugccaugaa

SEQ ID NO: 1692598 - RNA, 19 nt, Homo sapiens
  misc_RNA (1)...(19): siRNA sense strand
gagagaagggaaagaacau

SEQ ID NO: 1692599 - RNA, 19 nt, Homo sapiens
  misc_RNA (1)...(19): siRNA sense strand
caugguggcucguggugau

SEQ ID NO: 1692600 - RNA, 19 nt, Homo sapiens
  misc_RNA (1)...(19): siRNA sense strand
gcaagaagggugugaaccu

SEQ ID NO: 1692601 - RNA, 19 nt, Homo sapiens
  misc_RNA (1)...(19): siRNA sense strand
augauuaagucuggaauga

SEQ ID NO: 1692602 - RNA, 19 nt, Homo sapiens
  misc_RNA (1)...(19): siRNA sense strand
acacauuccuggagcacau

SEQ ID NO: 1692603 - RNA, 19 nt, Homo sapiens
  misc_RNA (1)...(19): siRNA sense strand
gaugaugggcuuauuucuc

SEQ ID NO: 1692604 - RNA, 19 nt, Homo sapiens
  misc_RNA (1)...(19): siRNA sense strand
acacuggcaucaucuguac

SEQ ID NO: 1692605 - RNA, 19 nt, Homo sapiens
  misc_RNA (1)...(19): siRNA sense strand
ggaaaagugugacgagaac

SEQ ID NO: 1692606 - RNA, 19 nt, Homo sapiens
  misc_RNA (1)...(19): siRNA sense strand
uccaggaucugaaguuugg

SEQ ID NO: 1692607 - RNA, 19 nt, Homo sapiens
  misc_RNA (1)...(19): siRNA sense strand
ugacggagguggaaaaugg

SEQ ID NO: 1692608 - RNA, 19 nt, Homo sapiens
  misc_RNA (1)...(19): siRNA sense strand
acaagaacaucugcaaggu

SEQ ID NO: 1692609 - RNA, 19 nt, Homo sapiens
  misc_RNA (1)...(19): siRNA sense strand
uuauuucucuccaggugaa

SEQ ID NO: 1692610 - RNA, 19 nt, Homo sapiens
  misc_RNA (1)...(19): siRNA sense strand
agggagauguggucauugu

SEQ ID NO: 1692611 - RNA, 19 nt, Homo sapiens
  misc_RNA (1)...(19): siRNA sense strand
uggcccagcuucccgauca

SEQ ID NO: 1692612 - RNA, 19 nt, Homo sapiens
  misc_RNA (1)...(19): siRNA sense strand
gagaugauuaagucuggaa

SEQ ID NO: 1692613 - RNA, 19 nt, Homo sapiens
  misc_RNA (1)...(19): siRNA sense strand
gcaagaucuacguggauga

SEQ ID NO: 1692614 - RNA, 19 nt, Homo sapiens
  misc_RNA (1)...(19): siRNA sense strand
cuggagagcaugaucaaga

SEQ ID NO: 1692615 - RNA, 19 nt, Homo sapiens
  misc_RNA (1)...(19): siRNA sense strand
cguugaaggagaugauuaa

SEQ ID NO: 1692616 - RNA, 19 nt, Homo sapiens
  misc_RNA (1)...(19): siRNA sense strand
gcagagguggagcugaaga

SEQ ID NO: 1692617 - RNA, 19 nt, Homo sapiens
  misc_RNA (1)...(19): siRNA sense strand
cucagaagaugaugauugg

SEQ ID NO: 1692618 - RNA, 19 nt, Homo sapiens
  misc_RNA (1)...(19): siRNA sense strand
ucugauguccaugaaguua

SEQ ID NO: 1692619 - RNA, 19 nt, Homo sapiens
  misc_RNA (1)...(19): siRNA sense strand
cugaacuucucucauggaa

SEQ ID NO: 1692620 - RNA, 19 nt, Homo sapiens
  misc_RNA (1)...(19): siRNA sense strand
gaugauuaagucuggaaug

SEQ ID NO: 1692621 - RNA, 19 nt, Homo sapiens
  misc_RNA (1)...(19): siRNA sense strand
augaugggcuuauuucucu

SEQ ID NO: 1692622 - RNA, 19 nt, Homo sapiens
  misc_RNA (1)...(19): siRNA sense strand
guggaugaugggcuuauuu

SEQ ID NO: 1692623 - RNA, 19 nt, Homo sapiens
  misc_RNA (1)...(19): siRNA sense strand
ggugaucuaggcauugaga

SEQ ID NO: 1692624 - RNA, 19 nt, Homo sapiens
  misc_RNA (1)...(19): siRNA sense strand
ggaccuccgggugaacuuu

SEQ ID NO: 1692625 - RNA, 19 nt, Homo sapiens
  misc_RNA (1)...(19): siRNA sense strand
agccgggacugccuucauu

SEQ ID NO: 1692626 - RNA, 19 nt, Homo sapiens
  misc_RNA (1)...(19): siRNA sense strand
caguggagacguugaagga

SEQ ID NO: 1692627 - RNA, 19 nt, Homo sapiens
  misc_RNA (1)...(19): siRNA sense strand
gauaugguguuugcgucau

SEQ ID NO: 1692628 - RNA, 19 nt, Homo sapiens
  misc_RNA (1)...(19): siRNA sense strand
gcccguugcuguggcucua

SEQ ID NO: 1692629 - RNA, 19 nt, Homo sapiens
  misc_RNA (1)...(19): siRNA sense strand
gacacuaaaggaccugaga

SEQ ID NO: 1692630 - RNA, 19 nt, Homo sapiens
  misc_RNA (1)...(19): siRNA sense strand
cuguggcucuagacacuaa

SEQ ID NO: 1692631 - RNA, 19 nt, Homo sapiens
  misc_RNA (1)...(19): siRNA sense strand
ccuguaccguggcaucuuc

SEQ ID NO: 1692632 - RNA, 19 nt, Homo sapiens
  misc_RNA (1)...(19): siRNA sense strand
ucggagguuugaugaaauc

SEQ ID NO: 1692633 - RNA, 19 nt, Homo sapiens
  misc_RNA (1)...(19): siRNA sense strand
uggcuggacuacaagaaca

SEQ ID NO: 1692634 - RNA, 19 nt, Homo sapiens
  misc_RNA (1)...(19): siRNA sense strand
caagaucuacguggaugau

SEQ ID NO: 1692635 - RNA, 19 nt, Homo sapiens
  misc_RNA (1)...(19): siRNA sense strand
gcaaaaucgagaaucauga

SEQ ID NO: 1692636 - RNA, 19 nt, Homo sapiens
  misc_RNA (1)...(19): siRNA sense strand
gggucgagcaggauguuga

SEQ ID NO: 1692637 - RNA, 19 nt, Homo sapiens
  misc_RNA (1)...(19): siRNA sense strand
ucagcaaaaucgagaauca

SEQ ID NO: 1692638 - RNA, 19 nt, Homo sapiens
  misc_RNA (1)...(19): siRNA sense strand
cccgaucaguggagacguu

SEQ ID NO: 1692639 - RNA, 19 nt, Homo sapiens
  misc_RNA (1)...(19): siRNA sense strand
augcggagaccaucaagaa

SEQ ID NO: 1692640 - RNA, 19 nt, Homo sapiens
  misc_RNA (1)...(19): siRNA sense strand
uggagacguugaaggagau

SEQ ID NO: 1692641 - RNA, 19 nt, Homo sapiens
  misc_RNA (1)...(19): siRNA sense strand
gcagcaagaagggugugaa

SEQ ID NO: 1692642 - RNA, 19 nt, Homo sapiens
  misc_RNA (1)...(19): siRNA sense strand
ggaccugagauccgaacug

SEQ ID NO: 1692643 - RNA, 19 nt, Homo sapiens
  misc_RNA (1)...(19): siRNA sense strand
gguggcucguggugaucua

SEQ ID NO: 1692644 - RNA, 19 nt, Homo sapiens
  misc_RNA (1)...(19): siRNA sense strand
uccuguggcuggacuacaa

SEQ ID NO: 1692645 - RNA, 19 nt, Homo sapiens
  misc_RNA (1)...(19): siRNA sense strand
gggagccacucucaaaauc

SEQ ID NO: 1692646 - RNA, 19 nt, Homo sapiens
  misc_RNA (1)...(19): siRNA sense strand
ggaaagaacaucaagauua

SEQ ID NO: 1692647 - RNA, 19 nt, Homo sapiens
  misc_RNA (1)...(19): siRNA sense strand
gcagaaaggugccgacuuc

SEQ ID NO: 1692648 - RNA, 19 nt, Homo sapiens
  misc_RNA (1)...(19): siRNA sense strand
gaagggagauguggucauu

SEQ ID NO: 1692649 - RNA, 19 nt, Homo sapiens
  misc_RNA (1)...(19): siRNA sense strand
gaagggagccacucucaaa

SEQ ID NO: 1692650 - RNA, 19 nt, Homo sapiens
  misc_RNA (1)...(19): siRNA sense strand
gaacuucucucauggaacu

SEQ ID NO: 1692651 - RNA, 19 nt, Homo sapiens
  misc_RNA (1)...(19): siRNA sense strand
ugaaggagaugauuaaguc

SEQ ID NO: 1692652 - RNA, 19 nt, Homo sapiens
  misc_RNA (1)...(19): siRNA sense strand
gauuaagucuggaaugaau

SEQ ID NO: 1692653 - RNA, 19 nt, Homo sapiens
  misc_RNA (1)...(19): siRNA sense strand
ggcaucaucuguaccauug

SEQ ID NO: 1692654 - RNA, 19 nt, Homo sapiens
  misc_RNA (1)...(19): siRNA sense strand
gaauguggcucgucugaac

SEQ ID NO: 1692655 - RNA, 19 nt, Homo sapiens
  misc_RNA (1)...(19): siRNA sense strand
cgucugaacuucucucaug

SEQ ID NO: 1692656 - RNA, 19 nt, Homo sapiens
  misc_RNA (1)...(19): siRNA sense strand
guucggagguuugaugaaa

SEQ ID NO: 1692657 - RNA, 19 nt, Homo sapiens
  misc_RNA (1)...(19): siRNA sense strand
gcagugauguggccaaugc

SEQ ID NO: 1692658 - RNA, 19 nt, Homo sapiens
  misc_RNA (1)...(19): siRNA sense strand
gcucagaagaugaugauug

SEQ ID NO: 1692659 - RNA, 19 nt, Homo sapiens
  misc_RNA (1)...(19): siRNA sense strand
gggacugccuucauucaga

SEQ ID NO: 1692660 - RNA, 19 nt, Homo sapiens
  misc_RNA (1)...(19): siRNA sense strand
ggaagguccugggagagaa

SEQ ID NO: 1692661 - RNA, 19 nt, Homo sapiens
  misc_RNA (1)...(19): siRNA sense strand
gaacuuugccaugaauguu

SEQ ID NO: 1692662 - RNA, 19 nt, Homo sapiens
  misc_RNA (1)...(19): siRNA sense strand
gaagugggcagcaagaucu

SEQ ID NO: 1692663 - RNA, 19 nt, Homo sapiens
  misc_RNA (1)...(19): siRNA sense strand
gcacagccacggaaagcuu

SEQ ID NO: 1692664 - RNA, 19 nt, Homo sapiens
  misc_RNA (1)...(19): siRNA sense strand
cgagcaggauguugauaug

SEQ ID NO: 1692665 - RNA, 19 nt, Homo sapiens
  misc_RNA (1)...(19): siRNA sense strand
ggagagaagggaaagaaca

SEQ ID NO: 1692666 - RNA, 19 nt, Homo sapiens
  misc_RNA (1)...(19): siRNA sense strand
gauccgaacugggcucauc

SEQ ID NO: 1692667 - RNA, 19 nt, Homo sapiens
  misc_RNA (1)...(19): siRNA sense strand
caucaagauuaucagcaaa

SEQ ID NO: 1692668 - RNA, 19 nt, Homo sapiens
  misc_RNA (1)...(19): siRNA sense strand
ggauguugauaugguguuu

SEQ ID NO: 1692669 - RNA, 19 nt, Homo sapiens
  misc_RNA (1)...(19): siRNA sense strand
gggaaagaacaucaagauu

SEQ ID NO: 1692670 - RNA, 19 nt, Homo sapiens
  misc_RNA (1)...(19): siRNA sense strand
gcggagaccaucaagaaug

SEQ ID NO: 1692671 - RNA, 19 nt, Homo sapiens
  misc_RNA (1)...(19): siRNA sense strand
ggugaacuuugccaugaau

SEQ ID NO: 1692672 - RNA, 19 nt, Homo sapiens
  misc_RNA (1)...(19): siRNA sense strand
cugcagagguggagcugaa

SEQ ID NO: 1692673 - RNA, 19 nt, Homo sapiens
  misc_RNA (1)...(19): siRNA sense strand
cgggugaacuuugccauga

SEQ ID NO: 1692674 - RNA, 19 nt, Homo sapiens
  misc_RNA (1)...(19): siRNA sense strand
gagaagggaaagaacauca

SEQ ID NO: 1692675 - RNA, 19 nt, Homo sapiens
  misc_RNA (1)...(19): siRNA sense strand
gaacacuggcaucaucugu

SEQ ID NO: 1692676 - RNA, 19 nt, Homo sapiens
  misc_RNA (1)...(19): siRNA sense strand
cggagaccaucaagaaugu

SEQ ID NO: 1692677 - RNA, 19 nt, Homo sapiens
  misc_RNA (1)...(19): siRNA sense strand
uggagagcaugaucaagaa

SEQ ID NO: 1692678 - RNA, 19 nt, Homo sapiens
  misc_RNA (1)...(19): siRNA sense strand
gaucaguggagacguugaa

SEQ ID NO: 1692679 - RNA, 19 nt, Homo sapiens
  misc_RNA (1)...(19): siRNA sense strand
ugagauuccugcagagaag

SEQ ID NO: 1692680 - RNA, 19 nt, Homo sapiens
  misc_RNA (1)...(19): siRNA sense strand
guggugaucuaggcauuga

SEQ ID NO: 1692681 - RNA, 19 nt, Homo sapiens
  misc_RNA (1)...(19): siRNA sense strand
ggaagugggcagcaagauc

SEQ ID NO: 1692682 - RNA, 19 nt, Homo sapiens
  misc_RNA (1)...(19): siRNA sense strand
gaagggaaagaacaucaag

SEQ ID NO: 1692683 - RNA, 19 nt, Homo sapiens
  misc_RNA (1)...(19): siRNA sense strand
caugcugucuggagaaaca

SEQ ID NO: 1692684 - RNA, 19 nt, Homo sapiens
  misc_RNA (1)...(19): siRNA sense strand
acaucaagauuaucagcaa

SEQ ID NO: 1692685 - RNA, 19 nt, Homo sapiens
  misc_RNA (1)...(19): siRNA sense strand
ugggaagccugucaucugu

SEQ ID NO: 1692686 - RNA, 19 nt, Homo sapiens
  misc_RNA (1)...(19): siRNA sense strand
ccggaacacuggcaucauc

SEQ ID NO: 1692687 - RNA, 19 nt, Homo sapiens
  misc_RNA (1)...(19): siRNA sense strand
gggugaacuuugccaugaa

SEQ ID NO: 1692688 - RNA, 19 nt, Homo sapiens
  misc_RNA (1)...(19): siRNA sense strand
gagagaagggaaagaacau

SEQ ID NO: 1692689 - RNA, 19 nt, Homo sapiens
  misc_RNA (1)...(19): siRNA sense strand
caugguggcucguggugau

SEQ ID NO: 1692690 - RNA, 19 nt, Homo sapiens
  misc_RNA (1)...(19): siRNA sense strand
gcaagaagggugugaaccu

SEQ ID NO: 1692691 - RNA, 19 nt, Homo sapiens
  misc_RNA (1)...(19): siRNA sense strand
augauuaagucuggaauga

SEQ ID NO: 1692692 - RNA, 19 nt, Homo sapiens
  misc_RNA (1)...(19): siRNA sense strand
acacauuccuggagcacau

SEQ ID NO: 1692693 - RNA, 19 nt, Homo sapiens
  misc_RNA (1)...(19): siRNA sense strand
gaugaugggcuuauuucuc

SEQ ID NO: 1692694 - RNA, 19 nt, Homo sapiens
  misc_RNA (1)...(19): siRNA sense strand
acacuggcaucaucuguac

SEQ ID NO: 1692695 - RNA, 19 nt, Homo sapiens
  misc_RNA (1)...(19): siRNA sense strand
ggaaaagugugacgagaac

SEQ ID NO: 1692696 - RNA, 19 nt, Homo sapiens
  misc_RNA (1)...(19): siRNA sense strand
uccaggaucugaaguuugg

SEQ ID NO: 1692697 - RNA, 19 nt, Homo sapiens
  misc_RNA (1)...(19): siRNA sense strand
ugacggagguggaaaaugg

SEQ ID NO: 1692698 - RNA, 19 nt, Homo sapiens
  misc_RNA (1)...(19): siRNA sense strand
acaagaacaucugcaaggu

SEQ ID NO: 1692699 - RNA, 19 nt, Homo sapiens
  misc_RNA (1)...(19): siRNA sense strand
uuauuucucuccaggugaa

SEQ ID NO: 1692700 - RNA, 19 nt, Homo sapiens
  misc_RNA (1)...(19): siRNA sense strand
agggagauguggucauugu

SEQ ID NO: 1692701 - RNA, 19 nt, Homo sapiens
  misc_RNA (1)...(19): siRNA sense strand
uggcccagcuucccgauca

SEQ ID NO: 1692702 - RNA, 19 nt, Homo sapiens
  misc_RNA (1)...(19): siRNA sense strand
gagaugauuaagucuggaa

SEQ ID NO: 1692703 - RNA, 19 nt, Homo sapiens
  misc_RNA (1)...(19): siRNA sense strand
gcaagaucuacguggauga

SEQ ID NO: 1692704 - RNA, 19 nt, Homo sapiens
  misc_RNA (1)...(19): siRNA sense strand
cuggagagcaugaucaaga

SEQ ID NO: 1692705 - RNA, 19 nt, Homo sapiens
  misc_RNA (1)...(19): siRNA sense strand
cguugaaggagaugauuaa

SEQ ID NO: 1692706 - RNA, 19 nt, Homo sapiens
  misc_RNA (1)...(19): siRNA sense strand
gcagagguggagcugaaga

SEQ ID NO: 1692707 - RNA, 19 nt, Homo sapiens
  misc_RNA (1)...(19): siRNA sense strand
cucagaagaugaugauugg

SEQ ID NO: 1692708 - RNA, 19 nt, Homo sapiens
  misc_RNA (1)...(19): siRNA sense strand
ucugauguccaugaaguua

SEQ ID NO: 1692709 - RNA, 19 nt, Homo sapiens
  misc_RNA (1)...(19): siRNA sense strand
cugaacuucucucauggaa

SEQ ID NO: 1692710 - RNA, 19 nt, Homo sapiens
  misc_RNA (1)...(19): siRNA sense strand
gaugauuaagucuggaaug

SEQ ID NO: 1692711 - RNA, 19 nt, Homo sapiens
  misc_RNA (1)...(19): siRNA sense strand
augaugggcuuauuucucu

SEQ ID NO: 1692712 - RNA, 19 nt, Homo sapiens
  misc_RNA (1)...(19): siRNA sense strand
guggaugaugggcuuauuu

SEQ ID NO: 1692713 - RNA, 19 nt, Homo sapiens
  misc_RNA (1)...(19): siRNA sense strand
ggugaucuaggcauugaga

SEQ ID NO: 1692714 - RNA, 19 nt, Homo sapiens
  misc_RNA (1)...(19): siRNA sense strand
ggaccuccgggugaacuuu

SEQ ID NO: 1692715 - RNA, 19 nt, Homo sapiens
  misc_RNA (1)...(19): siRNA sense strand
agccgggacugccuucauu

SEQ ID NO: 1692716 - RNA, 19 nt, Homo sapiens
  misc_RNA (1)...(19): siRNA sense strand
caguggagacguugaagga

SEQ ID NO: 1692717 - RNA, 19 nt, Homo sapiens
  misc_RNA (1)...(19): siRNA sense strand
gauaugguguuugcgucau

SEQ ID NO: 1692718 - RNA, 19 nt, Homo sapiens
  misc_RNA (1)...(19): siRNA sense strand
gcccguugcuguggcucua

SEQ ID NO: 1692719 - RNA, 19 nt, Homo sapiens
  misc_RNA (1)...(19): siRNA sense strand
gacacuaaaggaccugaga

SEQ ID NO: 1692720 - RNA, 19 nt, Homo sapiens
  misc_RNA (1)...(19): siRNA sense strand
cuguggcucuagacacuaa

SEQ ID NO: 1692721 - RNA, 19 nt, Homo sapiens
  misc_RNA (1)...(19): siRNA sense strand
ccuguaccguggcaucuuc

SEQ ID NO: 1692722 - RNA, 19 nt, Homo sapiens
  misc_RNA (1)...(19): siRNA sense strand
ucggagguuugaugaaauc

SEQ ID NO: 1692723 - RNA, 19 nt, Homo sapiens
  misc_RNA (1)...(19): siRNA sense strand
uggcuggacuacaagaaca

SEQ ID NO: 1692724 - RNA, 19 nt, Homo sapiens
  misc_RNA (1)...(19): siRNA sense strand
caagaucuacguggaugau

SEQ ID NO: 1692725 - RNA, 19 nt, Homo sapiens
  misc_RNA (1)...(19): siRNA sense strand
gcaaaaucgagaaucauga

SEQ ID NO: 1692726 - RNA, 19 nt, Homo sapiens
  misc_RNA (1)...(19): siRNA sense strand
gggucgagcaggauguuga

SEQ ID NO: 1692727 - RNA, 19 nt, Homo sapiens
  misc_RNA (1)...(19): siRNA sense strand
ucagcaaaaucgagaauca

SEQ ID NO: 1692728 - RNA, 19 nt, Homo sapiens
  misc_RNA (1)...(19): siRNA sense strand
cccgaucaguggagacguu

SEQ ID NO: 1692729 - RNA, 19 nt, Homo sapiens
  misc_RNA (1)...(19): siRNA sense strand
augcggagaccaucaagaa

SEQ ID NO: 1692730 - RNA, 19 nt, Homo sapiens
  misc_RNA (1)...(19): siRNA sense strand
uggagacguugaaggagau

SEQ ID NO: 1692731 - RNA, 19 nt, Homo sapiens
  misc_RNA (1)...(19): siRNA sense strand
gcagcaagaagggugugaa

SEQ ID NO: 1692732 - RNA, 19 nt, Homo sapiens
  misc_RNA (1)...(19): siRNA sense strand
ggaccugagauccgaacug

SEQ ID NO: 1692733 - RNA, 19 nt, Homo sapiens
  misc_RNA (1)...(19): siRNA sense strand
gguggcucguggugaucua

SEQ ID NO: 1692734 - RNA, 19 nt, Homo sapiens
  misc_RNA (1)...(19): siRNA sense strand
uccuguggcuggacuacaa

SEQ ID NO: 1692735 - RNA, 19 nt, Homo sapiens
  misc_RNA (1)...(19): siRNA sense strand
gggagccacucucaaaauc

SEQ ID NO: 1692736 - RNA, 19 nt, Homo sapiens
  misc_RNA (1)...(19): siRNA sense strand
ggaaagaacaucaagauua

SEQ ID NO: 1692737 - RNA, 19 nt, Homo sapiens
  misc_RNA (1)...(19): siRNA sense strand
gcagaaaggugccgacuuc

SEQ ID NO: 1692738 - RNA, 19 nt, Homo sapiens
  misc_RNA (1)...(19): siRNA sense strand
gaagggagauguggucauu

SEQ ID NO: 1692739 - RNA, 19 nt, Homo sapiens
  misc_RNA (1)...(19): siRNA sense strand
gaagggagccacucucaaa

SEQ ID NO: 1692740 - RNA, 19 nt, Homo sapiens
  misc_RNA (1)...(19): siRNA sense strand
gaacuucucucauggaacu

SEQ ID NO: 1692741 - RNA, 19 nt, Homo sapiens
  misc_RNA (1)...(19): siRNA sense strand
ugaaggagaugauuaaguc

SEQ ID NO: 1692742 - RNA, 19 nt, Homo sapiens
  misc_RNA (1)...(19): siRNA sense strand
gauuaagucuggaaugaau

SEQ ID NO: 1692743 - RNA, 19 nt, Homo sapiens
  misc_RNA (1)...(19): siRNA sense strand
ggcaucaucuguaccauug

SEQ ID NO: 1692744 - RNA, 19 nt, Homo sapiens
  misc_RNA (1)...(19): siRNA sense strand
gaauguggcucgucugaac

SEQ ID NO: 1692745 - RNA, 19 nt, Homo sapiens
  misc_RNA (1)...(19): siRNA sense strand
cgucugaacuucucucaug

SEQ ID NO: 1692746 - RNA, 19 nt, Homo sapiens
  misc_RNA (1)...(19): siRNA sense strand
guucggagguuugaugaaa

SEQ ID NO: 1692747 - RNA, 19 nt, Homo sapiens
  misc_RNA (1)...(19): siRNA sense strand
gcagugauguggccaaugc

SEQ ID NO: 1692748 - RNA, 19 nt, Homo sapiens
  misc_RNA (1)...(19): siRNA sense strand
gcucagaagaugaugauug

SEQ ID NO: 1692749 - RNA, 19 nt, Homo sapiens
  misc_RNA (1)...(19): siRNA sense strand
gggacugccuucauucaga

SEQ ID NO: 1692750 - RNA, 19 nt, Homo sapiens
  misc_RNA (1)...(19): siRNA sense strand
ggaagguccugggagagaa

SEQ ID NO: 1692751 - RNA, 19 nt, Homo sapiens
  misc_RNA (1)...(19): siRNA sense strand
gaacuuugccaugaauguu

SEQ ID NO: 1692752 - RNA, 19 nt, Homo sapiens
  misc_RNA (1)...(19): siRNA sense strand
gaagugggcagcaagaucu

SEQ ID NO: 1692753 - RNA, 19 nt, Homo sapiens
  misc_RNA (1)...(19): siRNA sense strand
gcacagccacggaaagcuu

SEQ ID NO: 1692754 - RNA, 19 nt, Homo sapiens
  misc_RNA (1)...(19): siRNA sense strand
cgagcaggauguugauaug

SEQ ID NO: 1692755 - RNA, 19 nt, Homo sapiens
  misc_RNA (1)...(19): siRNA sense strand
ggagagaagggaaagaaca

SEQ ID NO: 1692756 - RNA, 19 nt, Homo sapiens
  misc_RNA (1)...(19): siRNA sense strand
gauccgaacugggcucauc

SEQ ID NO: 1692757 - RNA, 19 nt, Homo sapiens
  misc_RNA (1)...(19): siRNA sense strand
caucaagauuaucagcaaa

SEQ ID NO: 1692758 - RNA, 19 nt, Homo sapiens
  misc_RNA (1)...(19): siRNA sense strand
ggauguugauaugguguuu

SEQ ID NO: 1692759 - RNA, 19 nt, Homo sapiens
  misc_RNA (1)...(19): siRNA sense strand
gggaaagaacaucaagauu

SEQ ID NO: 1692760 - RNA, 19 nt, Homo sapiens
  misc_RNA (1)...(19): siRNA sense strand
gcggagaccaucaagaaug

SEQ ID NO: 1692761 - RNA, 19 nt, Homo sapiens
  misc_RNA (1)...(19): siRNA sense strand
ggugaacuuugccaugaau

SEQ ID NO: 1692762 - RNA, 19 nt, Homo sapiens
  misc_RNA (1)...(19): siRNA sense strand
cugcagagguggagcugaa

SEQ ID NO: 1692763 - RNA, 19 nt, Homo sapiens
  misc_RNA (1)...(19): siRNA sense strand
cgggugaacuuugccauga

SEQ ID NO: 1692764 - RNA, 19 nt, Homo sapiens
  misc_RNA (1)...(19): siRNA sense strand
gagaagggaaagaacauca

SEQ ID NO: 1692765 - RNA, 19 nt, Homo sapiens
  misc_RNA (1)...(19): siRNA sense strand
gaacacuggcaucaucugu

SEQ ID NO: 1692766 - RNA, 19 nt, Homo sapiens
  misc_RNA (1)...(19): siRNA sense strand
cggagaccaucaagaaugu

SEQ ID NO: 1692767 - RNA, 19 nt, Homo sapiens
  misc_RNA (1)...(19): siRNA sense strand
uggagagcaugaucaagaa

SEQ ID NO: 1692768 - RNA, 19 nt, Homo sapiens
  misc_RNA (1)...(19): siRNA sense strand
gaucaguggagacguugaa

SEQ ID NO: 1692769 - RNA, 19 nt, Homo sapiens
  misc_RNA (1)...(19): siRNA sense strand
ugagauuccugcagagaag

SEQ ID NO: 1692770 - RNA, 19 nt, Homo sapiens
  misc_RNA (1)...(19): siRNA sense strand
guggugaucuaggcauuga

SEQ ID NO: 1692771 - RNA, 19 nt, Homo sapiens
  misc_RNA (1)...(19): siRNA sense strand
ggaagugggcagcaagauc

SEQ ID NO: 1692772 - RNA, 19 nt, Homo sapiens
  misc_RNA (1)...(19): siRNA sense strand
gaagggaaagaacaucaag

SEQ ID NO: 1692773 - RNA, 19 nt, Homo sapiens
  misc_RNA (1)...(19): siRNA sense strand
caugcugucuggagaaaca

SEQ ID NO: 1692774 - RNA, 19 nt, Homo sapiens
  misc_RNA (1)...(19): siRNA sense strand
acaucaagauuaucagcaa

SEQ ID NO: 1692775 - RNA, 19 nt, Homo sapiens
  misc_RNA (1)...(19): siRNA sense strand
ugggaagccugucaucugu

SEQ ID NO: 1692776 - RNA, 19 nt, Homo sapiens
  misc_RNA (1)...(19): siRNA sense strand
ccggaacacuggcaucauc

SEQ ID NO: 1692777 - RNA, 19 nt, Homo sapiens
  misc_RNA (1)...(19): siRNA sense strand
gggugaacuuugccaugaa

SEQ ID NO: 1692778 - RNA, 19 nt, Homo sapiens
  misc_RNA (1)...(19): siRNA sense strand
gagagaagggaaagaacau

SEQ ID NO: 1692779 - RNA, 19 nt, Homo sapiens
  misc_RNA (1)...(19): siRNA sense strand
caugguggcucguggugau

SEQ ID NO: 1692780 - RNA, 19 nt, Homo sapiens
  misc_RNA (1)...(19): siRNA sense strand
gcaagaagggugugaaccu

SEQ ID NO: 1692781 - RNA, 19 nt, Homo sapiens
  misc_RNA (1)...(19): siRNA sense strand
augauuaagucuggaauga

SEQ ID NO: 1692782 - RNA, 19 nt, Homo sapiens
  misc_RNA (1)...(19): siRNA sense strand
acacauuccuggagcacau

SEQ ID NO: 1692783 - RNA, 19 nt, Homo sapiens
  misc_RNA (1)...(19): siRNA sense strand
gaugaugggcuuauuucuc

SEQ ID NO: 1692784 - RNA, 19 nt, Homo sapiens
  misc_RNA (1)...(19): siRNA sense strand
acacuggcaucaucuguac

SEQ ID NO: 1692785 - RNA, 19 nt, Homo sapiens
  misc_RNA (1)...(19): siRNA sense strand
ggaaaagugugacgagaac

SEQ ID NO: 1692786 - RNA, 19 nt, Homo sapiens
  misc_RNA (1)...(19): siRNA sense strand
uccaggaucugaaguuugg

SEQ ID NO: 1692787 - RNA, 19 nt, Homo sapiens
  misc_RNA (1)...(19): siRNA sense strand
ugacggagguggaaaaugg

SEQ ID NO: 1692788 - RNA, 19 nt, Homo sapiens
  misc_RNA (1)...(19): siRNA sense strand
acaagaacaucugcaaggu

SEQ ID NO: 1692789 - RNA, 19 nt, Homo sapiens
  misc_RNA (1)...(19): siRNA sense strand
uuauuucucuccaggugaa

SEQ ID NO: 1692790 - RNA, 19 nt, Homo sapiens
  misc_RNA (1)...(19): siRNA sense strand
agggagauguggucauugu

SEQ ID NO: 1692791 - RNA, 19 nt, Homo sapiens
  misc_RNA (1)...(19): siRNA sense strand
uggcccagcuucccgauca

SEQ ID NO: 1692792 - RNA, 19 nt, Homo sapiens
  misc_RNA (1)...(19): siRNA sense strand
gagaugauuaagucuggaa

SEQ ID NO: 1692793 - RNA, 19 nt, Homo sapiens
  misc_RNA (1)...(19): siRNA sense strand
gcaagaucuacguggauga

SEQ ID NO: 1692794 - RNA, 19 nt, Homo sapiens
  misc_RNA (1)...(19): siRNA sense strand
cuggagagcaugaucaaga

SEQ ID NO: 1692795 - RNA, 19 nt, Homo sapiens
  misc_RNA (1)...(19): siRNA sense strand
cguugaaggagaugauuaa

SEQ ID NO: 1692796 - RNA, 19 nt, Homo sapiens
  misc_RNA (1)...(19): siRNA sense strand
gcagagguggagcugaaga

SEQ ID NO: 1692797 - RNA, 19 nt, Homo sapiens
  misc_RNA (1)...(19): siRNA sense strand
cucagaagaugaugauugg

SEQ ID NO: 1692798 - RNA, 19 nt, Homo sapiens
  misc_RNA (1)...(19): siRNA sense strand
ucugauguccaugaaguua

SEQ ID NO: 1692799 - RNA, 19 nt, Homo sapiens
  misc_RNA (1)...(19): siRNA sense strand
cugaacuucucucauggaa

SEQ ID NO: 1692800 - RNA, 19 nt, Homo sapiens
  misc_RNA (1)...(19): siRNA sense strand
gaugauuaagucuggaaug

SEQ ID NO: 1692801 - RNA, 19 nt, Homo sapiens
  misc_RNA (1)...(19): siRNA sense strand
augaugggcuuauuucucu

SEQ ID NO: 1692802 - RNA, 19 nt, Homo sapiens
  misc_RNA (1)...(19): siRNA sense strand
guggaugaugggcuuauuu

SEQ ID NO: 1692803 - RNA, 19 nt, Homo sapiens
  misc_RNA (1)...(19): siRNA sense strand
ggugaucuaggcauugaga

SEQ ID NO: 1692804 - RNA, 19 nt, Homo sapiens
  misc_RNA (1)...(19): siRNA sense strand
ggaccuccgggugaacuuu

SEQ ID NO: 1692805 - RNA, 19 nt, Homo sapiens
  misc_RNA (1)...(19): siRNA sense strand
agccgggacugccuucauu

SEQ ID NO: 1692806 - RNA, 19 nt, Homo sapiens
  misc_RNA (1)...(19): siRNA sense strand
caguggagacguugaagga

SEQ ID NO: 1692807 - RNA, 19 nt, Homo sapiens
  misc_RNA (1)...(19): siRNA sense strand
gauaugguguuugcgucau

SEQ ID NO: 1692808 - RNA, 19 nt, Homo sapiens
  misc_RNA (1)...(19): siRNA sense strand
gcccguugcuguggcucua

SEQ ID NO: 1692809 - RNA, 19 nt, Homo sapiens
  misc_RNA (1)...(19): siRNA sense strand
gacacuaaaggaccugaga

SEQ ID NO: 1692810 - RNA, 19 nt, Homo sapiens
  misc_RNA (1)...(19): siRNA sense strand
cuguggcucuagacacuaa

SEQ ID NO: 1692811 - RNA, 19 nt, Homo sapiens
  misc_RNA (1)...(19): siRNA sense strand
ccuguaccguggcaucuuc

SEQ ID NO: 1692812 - RNA, 19 nt, Homo sapiens
  misc_RNA (1)...(19): siRNA sense strand
ucggagguuugaugaaauc

SEQ ID NO: 1692813 - RNA, 19 nt, Homo sapiens
  misc_RNA (1)...(19): siRNA sense strand
uggcuggacuacaagaaca

SEQ ID NO: 1692814 - RNA, 19 nt, Homo sapiens
  misc_RNA (1)...(19): siRNA sense strand
caagaucuacguggaugau

SEQ ID NO: 1692815 - RNA, 19 nt, Homo sapiens
  misc_RNA (1)...(19): siRNA sense strand
gcaaaaucgagaaucauga

SEQ ID NO: 1692816 - RNA, 19 nt, Homo sapiens
  misc_RNA (1)...(19): siRNA sense strand
gggucgagcaggauguuga

SEQ ID NO: 1692817 - RNA, 19 nt, Homo sapiens
  misc_RNA (1)...(19): siRNA sense strand
ucagcaaaaucgagaauca

SEQ ID NO: 1692818 - RNA, 19 nt, Homo sapiens
  misc_RNA (1)...(19): siRNA sense strand
cccgaucaguggagacguu

SEQ ID NO: 1692819 - RNA, 19 nt, Homo sapiens
  misc_RNA (1)...(19): siRNA sense strand
augcggagaccaucaagaa

SEQ ID NO: 1692820 - RNA, 19 nt, Homo sapiens
  misc_RNA (1)...(19): siRNA sense strand
uggagacguugaaggagau

SEQ ID NO: 1692821 - RNA, 19 nt, Homo sapiens
  misc_RNA (1)...(19): siRNA sense strand
gcagcaagaagggugugaa

SEQ ID NO: 1692822 - RNA, 19 nt, Homo sapiens
  misc_RNA (1)...(19): siRNA sense strand
ggaccugagauccgaacug

SEQ ID NO: 1692823 - RNA, 19 nt, Homo sapiens
  misc_RNA (1)...(19): siRNA sense strand
gguggcucguggugaucua

SEQ ID NO: 1692824 - RNA, 19 nt, Homo sapiens
  misc_RNA (1)...(19): siRNA sense strand
uccuguggcuggacuacaa

SEQ ID NO: 1692825 - RNA, 19 nt, Homo sapiens
  misc_RNA (1)...(19): siRNA sense strand
gggagccacucucaaaauc

SEQ ID NO: 1692826 - RNA, 19 nt, Homo sapiens
  misc_RNA (1)...(19): siRNA sense strand
ggaaagaacaucaagauua

SEQ ID NO: 1692827 - RNA, 19 nt, Homo sapiens
  misc_RNA (1)...(19): siRNA sense strand
gcagaaaggugccgacuuc

SEQ ID NO: 1692828 - RNA, 19 nt, Homo sapiens
  misc_RNA (1)...(19): siRNA sense strand
gaagggagauguggucauu

SEQ ID NO: 1692829 - RNA, 19 nt, Homo sapiens
  misc_RNA (1)...(19): siRNA sense strand
gaagggagccacucucaaa

SEQ ID NO: 1692830 - RNA, 19 nt, Homo sapiens
  misc_RNA (1)...(19): siRNA sense strand
gaacuucucucauggaacu

SEQ ID NO: 1692831 - RNA, 19 nt, Homo sapiens
  misc_RNA (1)...(19): siRNA sense strand
ugaaggagaugauuaaguc

SEQ ID NO: 1692832 - RNA, 19 nt, Homo sapiens
  misc_RNA (1)...(19): siRNA sense strand
gauuaagucuggaaugaau

SEQ ID NO: 1692833 - RNA, 19 nt, Homo sapiens
  misc_RNA (1)...(19): siRNA sense strand
ggcaucaucuguaccauug

SEQ ID NO: 1692834 - RNA, 19 nt, Homo sapiens
  misc_RNA (1)...(19): siRNA sense strand
gaauguggcucgucugaac

SEQ ID NO: 1692835 - RNA, 19 nt, Homo sapiens
  misc_RNA (1)...(19): siRNA sense strand
cgucugaacuucucucaug

SEQ ID NO: 1692836 - RNA, 19 nt, Homo sapiens
  misc_RNA (1)...(19): siRNA sense strand
guucggagguuugaugaaa

SEQ ID NO: 1692837 - RNA, 19 nt, Homo sapiens
  misc_RNA (1)...(19): siRNA sense strand
gcagugauguggccaaugc

SEQ ID NO: 1692838 - RNA, 19 nt, Homo sapiens
  misc_RNA (1)...(19): siRNA sense strand
gcucagaagaugaugauug

SEQ ID NO: 1692839 - RNA, 19 nt, Homo sapiens
  misc_RNA (1)...(19): siRNA sense strand
gggacugccuucauucaga

SEQ ID NO: 1692840 - RNA, 19 nt, Homo sapiens
  misc_RNA (1)...(19): siRNA sense strand
ggaagguccugggagagaa

SEQ ID NO: 1692841 - RNA, 19 nt, Homo sapiens
  misc_RNA (1)...(19): siRNA sense strand
gaacuuugccaugaauguu

SEQ ID NO: 1692842 - RNA, 19 nt, Homo sapiens
  misc_RNA (1)...(19): siRNA sense strand
gaagugggcagcaagaucu

SEQ ID NO: 1692843 - RNA, 19 nt, Homo sapiens
  misc_RNA (1)...(19): siRNA sense strand
gcacagccacggaaagcuu

SEQ ID NO: 1692844 - RNA, 19 nt, Homo sapiens
  misc_RNA (1)...(19): siRNA sense strand
cgagcaggauguugauaug

SEQ ID NO: 1692845 - RNA, 19 nt, Homo sapiens
  misc_RNA (1)...(19): siRNA sense strand
ggagagaagggaaagaaca

SEQ ID NO: 1692846 - RNA, 19 nt, Homo sapiens
  misc_RNA (1)...(19): siRNA sense strand
gauccgaacugggcucauc

SEQ ID NO: 1692847 - RNA, 19 nt, Homo sapiens
  misc_RNA (1)...(19): siRNA sense strand
caucaagauuaucagcaaa

SEQ ID NO: 1692848 - RNA, 19 nt, Homo sapiens
  misc_RNA (1)...(19): siRNA sense strand
ggauguugauaugguguuu

SEQ ID NO: 1692849 - RNA, 19 nt, Homo sapiens
  misc_RNA (1)...(19): siRNA sense strand
gggaaagaacaucaagauu

SEQ ID NO: 1692850 - RNA, 19 nt, Homo sapiens
  misc_RNA (1)...(19): siRNA sense strand
gcggagaccaucaagaaug

SEQ ID NO: 1692851 - RNA, 19 nt, Homo sapiens
  misc_RNA (1)...(19): siRNA sense strand
ggugaacuuugccaugaau

SEQ ID NO: 1692852 - RNA, 19 nt, Homo sapiens
  misc_RNA (1)...(19): siRNA sense strand
cugcagagguggagcugaa

SEQ ID NO: 1692853 - RNA, 19 nt, Homo sapiens
  misc_RNA (1)...(19): siRNA sense strand
cgggugaacuuugccauga

SEQ ID NO: 1692854 - RNA, 19 nt, Homo sapiens
  misc_RNA (1)...(19): siRNA sense strand
gagaagggaaagaacauca

SEQ ID NO: 1692855 - RNA, 19 nt, Homo sapiens
  misc_RNA (1)...(19): siRNA sense strand
gaacacuggcaucaucugu

SEQ ID NO: 1692856 - RNA, 19 nt, Homo sapiens
  misc_RNA (1)...(19): siRNA sense strand
cggagaccaucaagaaugu

SEQ ID NO: 1692857 - RNA, 19 nt, Homo sapiens
  misc_RNA (1)...(19): siRNA sense strand
uggagagcaugaucaagaa

SEQ ID NO: 1692858 - RNA, 19 nt, Homo sapiens
  misc_RNA (1)...(19): siRNA sense strand
gaucaguggagacguugaa

SEQ ID NO: 1692859 - RNA, 19 nt, Homo sapiens
  misc_RNA (1)...(19): siRNA sense strand
ugagauuccugcagagaag

SEQ ID NO: 1692860 - RNA, 19 nt, Homo sapiens
  misc_RNA (1)...(19): siRNA sense strand
guggugaucuaggcauuga

SEQ ID NO: 1692861 - RNA, 19 nt, Homo sapiens
  misc_RNA (1)...(19): siRNA sense strand
ggaagugggcagcaagauc

SEQ ID NO: 1692862 - RNA, 19 nt, Homo sapiens
  misc_RNA (1)...(19): siRNA sense strand
gaagggaaagaacaucaag

SEQ ID NO: 1692863 - RNA, 19 nt, Homo sapiens
  misc_RNA (1)...(19): siRNA sense strand
caugcugucuggagaaaca

SEQ ID NO: 1692864 - RNA, 19 nt, Homo sapiens
  misc_RNA (1)...(19): siRNA sense strand
acaucaagauuaucagcaa

SEQ ID NO: 1692865 - RNA, 19 nt, Homo sapiens
  misc_RNA (1)...(19): siRNA sense strand
ugggaagccugucaucugu

SEQ ID NO: 1692866 - RNA, 19 nt, Homo sapiens
  misc_RNA (1)...(19): siRNA sense strand
ccggaacacuggcaucauc

SEQ ID NO: 1692867 - RNA, 19 nt, Homo sapiens
  misc_RNA (1)...(19): siRNA sense strand
gggugaacuuugccaugaa

SEQ ID NO: 1692868 - RNA, 19 nt, Homo sapiens
  misc_RNA (1)...(19): siRNA sense strand
gagagaagggaaagaacau

SEQ ID NO: 1692869 - RNA, 19 nt, Homo sapiens
  misc_RNA (1)...(19): siRNA sense strand
caugguggcucguggugau

SEQ ID NO: 1692870 - RNA, 19 nt, Homo sapiens
  misc_RNA (1)...(19): siRNA sense strand
gcaagaagggugugaaccu

SEQ ID NO: 1692871 - RNA, 19 nt, Homo sapiens
  misc_RNA (1)...(19): siRNA sense strand
augauuaagucuggaauga

SEQ ID NO: 1692872 - RNA, 19 nt, Homo sapiens
  misc_RNA (1)...(19): siRNA sense strand
acacauuccuggagcacau

SEQ ID NO: 1692873 - RNA, 19 nt, Homo sapiens
  misc_RNA (1)...(19): siRNA sense strand
gaugaugggcuuauuucuc

SEQ ID NO: 1692874 - RNA, 19 nt, Homo sapiens
  misc_RNA (1)...(19): siRNA sense strand
acacuggcaucaucuguac

SEQ ID NO: 1692875 - RNA, 19 nt, Homo sapiens
  misc_RNA (1)...(19): siRNA sense strand
ggaaaagugugacgagaac

SEQ ID NO: 1692876 - RNA, 19 nt, Homo sapiens
  misc_RNA (1)...(19): siRNA sense strand
uccaggaucugaaguuugg

SEQ ID NO: 1692877 - RNA, 19 nt, Homo sapiens
  misc_RNA (1)...(19): siRNA sense strand
ugacggagguggaaaaugg

SEQ ID NO: 1692878 - RNA, 19 nt, Homo sapiens
  misc_RNA (1)...(19): siRNA sense strand
acaagaacaucugcaaggu

SEQ ID NO: 1692879 - RNA, 19 nt, Homo sapiens
  misc_RNA (1)...(19): siRNA sense strand
uuauuucucuccaggugaa

SEQ ID NO: 1692880 - RNA, 19 nt, Homo sapiens
  misc_RNA (1)...(19): siRNA sense strand
agggagauguggucauugu

SEQ ID NO: 1692881 - RNA, 19 nt, Homo sapiens
  misc_RNA (1)...(19): siRNA sense strand
uggcccagcuucccgauca

SEQ ID NO: 1692882 - RNA, 19 nt, Homo sapiens
  misc_RNA (1)...(19): siRNA sense strand
gagaugauuaagucuggaa

SEQ ID NO: 1692883 - RNA, 19 nt, Homo sapiens
  misc_RNA (1)...(19): siRNA sense strand
gcaagaucuacguggauga

SEQ ID NO: 1692884 - RNA, 19 nt, Homo sapiens
  misc_RNA (1)...(19): siRNA sense strand
cuggagagcaugaucaaga

SEQ ID NO: 1692885 - RNA, 19 nt, Homo sapiens
  misc_RNA (1)...(19): siRNA sense strand
cguugaaggagaugauuaa

SEQ ID NO: 1692886 - RNA, 19 nt, Homo sapiens
  misc_RNA (1)...(19): siRNA sense strand
gcagagguggagcugaaga

SEQ ID NO: 1692887 - RNA, 19 nt, Homo sapiens
  misc_RNA (1)...(19): siRNA sense strand
cucagaagaugaugauugg

SEQ ID NO: 1692888 - RNA, 19 nt, Homo sapiens
  misc_RNA (1)...(19): siRNA sense strand
ucugauguccaugaaguua

SEQ ID NO: 1692889 - RNA, 19 nt, Homo sapiens
  misc_RNA (1)...(19): siRNA sense strand
cugaacuucucucauggaa

SEQ ID NO: 1692890 - RNA, 19 nt, Homo sapiens
  misc_RNA (1)...(19): siRNA sense strand
gaugauuaagucuggaaug

SEQ ID NO: 1692891 - RNA, 19 nt, Homo sapiens
  misc_RNA (1)...(19): siRNA sense strand
augaugggcuuauuucucu

SEQ ID NO: 1692892 - RNA, 19 nt, Homo sapiens
  misc_RNA (1)...(19): siRNA sense strand
guggaugaugggcuuauuu

SEQ ID NO: 1692893 - RNA, 19 nt, Homo sapiens
  misc_RNA (1)...(19): siRNA sense strand
ggugaucuaggcauugaga

SEQ ID NO: 1692894 - RNA, 19 nt, Homo sapiens
  misc_RNA (1)...(19): siRNA sense strand
ggaccuccgggugaacuuu

SEQ ID NO: 1692895 - RNA, 19 nt, Homo sapiens
  misc_RNA (1)...(19): siRNA sense strand
agccgggacugccuucauu

SEQ ID NO: 1692896 - RNA, 19 nt, Homo sapiens
  misc_RNA (1)...(19): siRNA sense strand
caguggagacguugaagga

SEQ ID NO: 1692897 - RNA, 19 nt, Homo sapiens
  misc_RNA (1)...(19): siRNA sense strand
gauaugguguuugcgucau

SEQ ID NO: 1692898 - RNA, 19 nt, Homo sapiens
  misc_RNA (1)...(19): siRNA sense strand
gcccguugcuguggcucua

SEQ ID NO: 1692899 - RNA, 19 nt, Homo sapiens
  misc_RNA (1)...(19): siRNA sense strand
gacacuaaaggaccugaga

SEQ ID NO: 1692900 - RNA, 19 nt, Homo sapiens
  misc_RNA (1)...(19): siRNA sense strand
cuguggcucuagacacuaa

SEQ ID NO: 1692901 - RNA, 19 nt, Homo sapiens
  misc_RNA (1)...(19): siRNA sense strand
ccuguaccguggcaucuuc

SEQ ID NO: 1692902 - RNA, 19 nt, Homo sapiens
  misc_RNA (1)...(19): siRNA sense strand
ucggagguuugaugaaauc

SEQ ID NO: 1692903 - RNA, 19 nt, Homo sapiens
  misc_RNA (1)...(19): siRNA sense strand
uggcuggacuacaagaaca

SEQ ID NO: 1692904 - RNA, 19 nt, Homo sapiens
  misc_RNA (1)...(19): siRNA sense strand
caagaucuacguggaugau

SEQ ID NO: 1692905 - RNA, 19 nt, Homo sapiens
  misc_RNA (1)...(19): siRNA sense strand
gcaaaaucgagaaucauga

SEQ ID NO: 1692906 - RNA, 19 nt, Homo sapiens
  misc_RNA (1)...(19): siRNA sense strand
gggucgagcaggauguuga

SEQ ID NO: 1692907 - RNA, 19 nt, Homo sapiens
  misc_RNA (1)...(19): siRNA sense strand
ucagcaaaaucgagaauca

SEQ ID NO: 1692908 - RNA, 19 nt, Homo sapiens
  misc_RNA (1)...(19): siRNA sense strand
cccgaucaguggagacguu

SEQ ID NO: 1692909 - RNA, 19 nt, Homo sapiens
  misc_RNA (1)...(19): siRNA sense strand
augcggagaccaucaagaa

SEQ ID NO: 1692910 - RNA, 19 nt, Homo sapiens
  misc_RNA (1)...(19): siRNA sense strand
uggagacguugaaggagau

SEQ ID NO: 1692911 - RNA, 19 nt, Homo sapiens
  misc_RNA (1)...(19): siRNA sense strand
gcagcaagaagggugugaa

SEQ ID NO: 1692912 - RNA, 19 nt, Homo sapiens
  misc_RNA (1)...(19): siRNA sense strand
ggaccugagauccgaacug

SEQ ID NO: 1692913 - RNA, 19 nt, Homo sapiens
  misc_RNA (1)...(19): siRNA sense strand
gguggcucguggugaucua

SEQ ID NO: 1692914 - RNA, 19 nt, Homo sapiens
  misc_RNA (1)...(19): siRNA sense strand
uccuguggcuggacuacaa

SEQ ID NO: 1692915 - RNA, 19 nt, Homo sapiens
  misc_RNA (1)...(19): siRNA sense strand
gggagccacucucaaaauc

SEQ ID NO: 1692916 - RNA, 19 nt, Homo sapiens
  misc_RNA (1)...(19): siRNA sense strand
ggaaagaacaucaagauua

SEQ ID NO: 1692917 - RNA, 19 nt, Homo sapiens
  misc_RNA (1)...(19): siRNA sense strand
gcagaaaggugccgacuuc

SEQ ID NO: 1692918 - RNA, 19 nt, Homo sapiens
  misc_RNA (1)...(19): siRNA sense strand
gaagggagauguggucauu

SEQ ID NO: 1692919 - RNA, 19 nt, Homo sapiens
  misc_RNA (1)...(19): siRNA sense strand
gaagggagccacucucaaa

SEQ ID NO: 1692920 - RNA, 19 nt, Homo sapiens
  misc_RNA (1)...(19): siRNA sense strand
gaacuucucucauggaacu

SEQ ID NO: 1692921 - RNA, 19 nt, Homo sapiens
  misc_RNA (1)...(19): siRNA sense strand
ugaaggagaugauuaaguc

SEQ ID NO: 1692922 - RNA, 19 nt, Homo sapiens
  misc_RNA (1)...(19): siRNA sense strand
gauuaagucuggaaugaau

SEQ ID NO: 1692923 - RNA, 19 nt, Homo sapiens
  misc_RNA (1)...(19): siRNA sense strand
ggcaucaucuguaccauug

SEQ ID NO: 1692924 - RNA, 19 nt, Homo sapiens
  misc_RNA (1)...(19): siRNA sense strand
gaauguggcucgucugaac

SEQ ID NO: 1692925 - RNA, 19 nt, Homo sapiens
  misc_RNA (1)...(19): siRNA sense strand
cgucugaacuucucucaug

SEQ ID NO: 1692926 - RNA, 19 nt, Homo sapiens
  misc_RNA (1)...(19): siRNA sense strand
guucggagguuugaugaaa

SEQ ID NO: 1692927 - RNA, 19 nt, Homo sapiens
  misc_RNA (1)...(19): siRNA sense strand
gcagugauguggccaaugc

SEQ ID NO: 1692928 - RNA, 19 nt, Homo sapiens
  misc_RNA (1)...(19): siRNA sense strand
gcucagaagaugaugauug

SEQ ID NO: 1692929 - RNA, 19 nt, Homo sapiens
  misc_RNA (1)...(19): siRNA sense strand
gggacugccuucauucaga

SEQ ID NO: 1692930 - RNA, 19 nt, Homo sapiens
  misc_RNA (1)...(19): siRNA sense strand
ggaagguccugggagagaa

SEQ ID NO: 1692931 - RNA, 19 nt, Homo sapiens
  misc_RNA (1)...(19): siRNA sense strand
gaacuuugccaugaauguu

SEQ ID NO: 1692932 - RNA, 19 nt, Homo sapiens
  misc_RNA (1)...(19): siRNA sense strand
gaagugggcagcaagaucu

SEQ ID NO: 1692933 - RNA, 19 nt, Homo sapiens
  misc_RNA (1)...(19): siRNA sense strand
gcacagccacggaaagcuu

SEQ ID NO: 1692934 - RNA, 19 nt, Homo sapiens
  misc_RNA (1)...(19): siRNA sense strand
cgagcaggauguugauaug

SEQ ID NO: 1692935 - RNA, 19 nt, Homo sapiens
  misc_RNA (1)...(19): siRNA sense strand
ggagagaagggaaagaaca

SEQ ID NO: 1692936 - RNA, 19 nt, Homo sapiens
  misc_RNA (1)...(19): siRNA sense strand
gauccgaacugggcucauc

SEQ ID NO: 1692937 - RNA, 19 nt, Homo sapiens
  misc_RNA (1)...(19): siRNA sense strand
caucaagauuaucagcaaa

SEQ ID NO: 1692938 - RNA, 19 nt, Homo sapiens
  misc_RNA (1)...(19): siRNA sense strand
ggauguugauaugguguuu

SEQ ID NO: 1692939 - RNA, 19 nt, Homo sapiens
  misc_RNA (1)...(19): siRNA sense strand
gggaaagaacaucaagauu

SEQ ID NO: 1692940 - RNA, 19 nt, Homo sapiens
  misc_RNA (1)...(19): siRNA sense strand
gcggagaccaucaagaaug

SEQ ID NO: 1692941 - RNA, 19 nt, Homo sapiens
  misc_RNA (1)...(19): siRNA sense strand
ggugaacuuugccaugaau

SEQ ID NO: 1692942 - RNA, 19 nt, Homo sapiens
  misc_RNA (1)...(19): siRNA sense strand
cugcagagguggagcugaa

SEQ ID NO: 1692943 - RNA, 19 nt, Homo sapiens
  misc_RNA (1)...(19): siRNA sense strand
cgggugaacuuugccauga

SEQ ID NO: 1692944 - RNA, 19 nt, Homo sapiens
  misc_RNA (1)...(19): siRNA sense strand
gagaagggaaagaacauca

SEQ ID NO: 1692945 - RNA, 19 nt, Homo sapiens
  misc_RNA (1)...(19): siRNA sense strand
gaacacuggcaucaucugu

SEQ ID NO: 1692946 - RNA, 19 nt, Homo sapiens
  misc_RNA (1)...(19): siRNA sense strand
cggagaccaucaagaaugu

SEQ ID NO: 1692947 - RNA, 19 nt, Homo sapiens
  misc_RNA (1)...(19): siRNA sense strand
uggagagcaugaucaagaa

SEQ ID NO: 1692948 - RNA, 19 nt, Homo sapiens
  misc_RNA (1)...(19): siRNA sense strand
gaucaguggagacguugaa

SEQ ID NO: 1692949 - RNA, 19 nt, Homo sapiens
  misc_RNA (1)...(19): siRNA sense strand
ugagauuccugcagagaag

SEQ ID NO: 1692950 - RNA, 19 nt, Homo sapiens
  misc_RNA (1)...(19): siRNA sense strand
guggugaucuaggcauuga

SEQ ID NO: 1692951 - RNA, 19 nt, Homo sapiens
  misc_RNA (1)...(19): siRNA sense strand
ggaagugggcagcaagauc

SEQ ID NO: 1692952 - RNA, 19 nt, Homo sapiens
  misc_RNA (1)...(19): siRNA sense strand
gaagggaaagaacaucaag

SEQ ID NO: 1692953 - RNA, 19 nt, Homo sapiens
  misc_RNA (1)...(19): siRNA sense strand
caugcugucuggagaaaca

SEQ ID NO: 1692954 - RNA, 19 nt, Homo sapiens
  misc_RNA (1)...(19): siRNA sense strand
acaucaagauuaucagcaa

SEQ ID NO: 1692955 - RNA, 19 nt, Homo sapiens
  misc_RNA (1)...(19): siRNA sense strand
ugggaagccugucaucugu

SEQ ID NO: 1692956 - RNA, 19 nt, Homo sapiens
  misc_RNA (1)...(19): siRNA sense strand
ccggaacacuggcaucauc

SEQ ID NO: 1692957 - RNA, 19 nt, Homo sapiens
  misc_RNA (1)...(19): siRNA sense strand
gggugaacuuugccaugaa

SEQ ID NO: 1692958 - RNA, 19 nt, Homo sapiens
  misc_RNA (1)...(19): siRNA sense strand
gagagaagggaaagaacau

SEQ ID NO: 1692959 - RNA, 19 nt, Homo sapiens
  misc_RNA (1)...(19): siRNA sense strand
caugguggcucguggugau

SEQ ID NO: 1692960 - RNA, 19 nt, Homo sapiens
  misc_RNA (1)...(19): siRNA sense strand
gcaagaagggugugaaccu

SEQ ID NO: 1692961 - RNA, 19 nt, Homo sapiens
  misc_RNA (1)...(19): siRNA sense strand
augauuaagucuggaauga

SEQ ID NO: 1692962 - RNA, 19 nt, Homo sapiens
  misc_RNA (1)...(19): siRNA sense strand
acacauuccuggagcacau

SEQ ID NO: 1692963 - RNA, 19 nt, Homo sapiens
  misc_RNA (1)...(19): siRNA sense strand
gaugaugggcuuauuucuc

SEQ ID NO: 1692964 - RNA, 19 nt, Homo sapiens
  misc_RNA (1)...(19): siRNA sense strand
acacuggcaucaucuguac

SEQ ID NO: 1692965 - RNA, 19 nt, Homo sapiens
  misc_RNA (1)...(19): siRNA sense strand
ggaaaagugugacgagaac

SEQ ID NO: 1692966 - RNA, 19 nt, Homo sapiens
  misc_RNA (1)...(19): siRNA sense strand
uccaggaucugaaguuugg

SEQ ID NO: 1692967 - RNA, 19 nt, Homo sapiens
  misc_RNA (1)...(19): siRNA sense strand
ugacggagguggaaaaugg

SEQ ID NO: 1692968 - RNA, 19 nt, Homo sapiens
  misc_RNA (1)...(19): siRNA sense strand
acaagaacaucugcaaggu

SEQ ID NO: 1692969 - RNA, 19 nt, Homo sapiens
  misc_RNA (1)...(19): siRNA sense strand
uuauuucucuccaggugaa

SEQ ID NO: 1692970 - RNA, 19 nt, Homo sapiens
  misc_RNA (1)...(19): siRNA sense strand
agggagauguggucauugu

SEQ ID NO: 1692971 - RNA, 19 nt, Homo sapiens
  misc_RNA (1)...(19): siRNA sense strand
uggcccagcuucccgauca

SEQ ID NO: 1692972 - RNA, 19 nt, Homo sapiens
  misc_RNA (1)...(19): siRNA sense strand
gagaugauuaagucuggaa

SEQ ID NO: 1692973 - RNA, 19 nt, Homo sapiens
  misc_RNA (1)...(19): siRNA sense strand
gcaagaucuacguggauga

SEQ ID NO: 1692974 - RNA, 19 nt, Homo sapiens
  misc_RNA (1)...(19): siRNA sense strand
cuggagagcaugaucaaga

SEQ ID NO: 1692975 - RNA, 19 nt, Homo sapiens
  misc_RNA (1)...(19): siRNA sense strand
cguugaaggagaugauuaa

SEQ ID NO: 1692976 - RNA, 19 nt, Homo sapiens
  misc_RNA (1)...(19): siRNA sense strand
gcagagguggagcugaaga

SEQ ID NO: 1692977 - RNA, 19 nt, Homo sapiens
  misc_RNA (1)...(19): siRNA sense strand
cucagaagaugaugauugg

SEQ ID NO: 1692978 - RNA, 19 nt, Homo sapiens
  misc_RNA (1)...(19): siRNA sense strand
ucugauguccaugaaguua

SEQ ID NO: 1692979 - RNA, 19 nt, Homo sapiens
  misc_RNA (1)...(19): siRNA sense strand
cugaacuucucucauggaa

SEQ ID NO: 1692980 - RNA, 19 nt, Homo sapiens
  misc_RNA (1)...(19): siRNA sense strand
gaugauuaagucuggaaug

SEQ ID NO: 1692981 - RNA, 19 nt, Homo sapiens
  misc_RNA (1)...(19): siRNA sense strand
augaugggcuuauuucucu

SEQ ID NO: 1692982 - RNA, 19 nt, Homo sapiens
  misc_RNA (1)...(19): siRNA sense strand
guggaugaugggcuuauuu

SEQ ID NO: 1692983 - RNA, 19 nt, Homo sapiens
  misc_RNA (1)...(19): siRNA sense strand
ggugaucuaggcauugaga

SEQ ID NO: 1692984 - RNA, 19 nt, Homo sapiens
  misc_RNA (1)...(19): siRNA sense strand
ggaccuccgggugaacuuu

SEQ ID NO: 1692985 - RNA, 19 nt, Homo sapiens
  misc_RNA (1)...(19): siRNA sense strand
agccgggacugccuucauu

SEQ ID NO: 1692986 - RNA, 19 nt, Homo sapiens
  misc_RNA (1)...(19): siRNA sense strand
caguggagacguugaagga

SEQ ID NO: 1692987 - RNA, 19 nt, Homo sapiens
  misc_RNA (1)...(19): siRNA sense strand
gauaugguguuugcgucau

SEQ ID NO: 1692988 - RNA, 19 nt, Homo sapiens
  misc_RNA (1)...(19): siRNA sense strand
gcccguugcuguggcucua

SEQ ID NO: 1692989 - RNA, 19 nt, Homo sapiens
  misc_RNA (1)...(19): siRNA sense strand
gacacuaaaggaccugaga

SEQ ID NO: 1692990 - RNA, 19 nt, Homo sapiens
  misc_RNA (1)...(19): siRNA sense strand
cuguggcucuagacacuaa

SEQ ID NO: 1692991 - RNA, 19 nt, Homo sapiens
  misc_RNA (1)...(19): siRNA sense strand
ccuguaccguggcaucuuc

SEQ ID NO: 1692992 - RNA, 19 nt, Homo sapiens
  misc_RNA (1)...(19): siRNA sense strand
ucggagguuugaugaaauc

SEQ ID NO: 1692993 - RNA, 19 nt, Homo sapiens
  misc_RNA (1)...(19): siRNA sense strand
uggcuggacuacaagaaca

SEQ ID NO: 1692994 - RNA, 19 nt, Homo sapiens
  misc_RNA (1)...(19): siRNA sense strand
caagaucuacguggaugau

SEQ ID NO: 1692995 - RNA, 19 nt, Homo sapiens
  misc_RNA (1)...(19): siRNA sense strand
gcaaaaucgagaaucauga

SEQ ID NO: 1692996 - RNA, 19 nt, Homo sapiens
  misc_RNA (1)...(19): siRNA sense strand
gggucgagcaggauguuga

SEQ ID NO: 1692997 - RNA, 19 nt, Homo sapiens
  misc_RNA (1)...(19): siRNA sense strand
ucagcaaaaucgagaauca

SEQ ID NO: 1692998 - RNA, 19 nt, Homo sapiens
  misc_RNA (1)...(19): siRNA sense strand
cccgaucaguggagacguu

SEQ ID NO: 1692999 - RNA, 19 nt, Homo sapiens
  misc_RNA (1)...(19): siRNA sense strand
augcggagaccaucaagaa

SEQ ID NO: 1693000 - RNA, 19 nt, Homo sapiens
  misc_RNA (1)...(19): siRNA sense strand
uggagacguugaaggagau

SEQ ID NO: 1693001 - RNA, 19 nt, Homo sapiens
  misc_RNA (1)...(19): siRNA sense strand
gcagcaagaagggugugaa

SEQ ID NO: 1693002 - RNA, 19 nt, Homo sapiens
  misc_RNA (1)...(19): siRNA sense strand
ggaccugagauccgaacug

SEQ ID NO: 1693003 - RNA, 19 nt, Homo sapiens
  misc_RNA (1)...(19): siRNA sense strand
gguggcucguggugaucua

SEQ ID NO: 1693004 - RNA, 19 nt, Homo sapiens
  misc_RNA (1)...(19): siRNA sense strand
uccuguggcuggacuacaa

SEQ ID NO: 1693005 - RNA, 19 nt, Homo sapiens
  misc_RNA (1)...(19): siRNA sense strand
gggagccacucucaaaauc

SEQ ID NO: 1693006 - RNA, 19 nt, Homo sapiens
  misc_RNA (1)...(19): siRNA sense strand
ggaaagaacaucaagauua

SEQ ID NO: 1693007 - RNA, 19 nt, Homo sapiens
  misc_RNA (1)...(19): siRNA sense strand
gcagaaaggugccgacuuc

SEQ ID NO: 1693008 - RNA, 19 nt, Homo sapiens
  misc_RNA (1)...(19): siRNA sense strand
gaagggagauguggucauu

SEQ ID NO: 1693009 - RNA, 19 nt, Homo sapiens
  misc_RNA (1)...(19): siRNA sense strand
gaagggagccacucucaaa

SEQ ID NO: 1693010 - RNA, 19 nt, Homo sapiens
  misc_RNA (1)...(19): siRNA sense strand
gaacuucucucauggaacu

SEQ ID NO: 1693011 - RNA, 19 nt, Homo sapiens
  misc_RNA (1)...(19): siRNA sense strand
ugaaggagaugauuaaguc

SEQ ID NO: 1693012 - RNA, 19 nt, Homo sapiens
  misc_RNA (1)...(19): siRNA sense strand
gauuaagucuggaaugaau

SEQ ID NO: 1693013 - RNA, 19 nt, Homo sapiens
  misc_RNA (1)...(19): siRNA sense strand
ggcaucaucuguaccauug

SEQ ID NO: 1693014 - RNA, 19 nt, Homo sapiens
  misc_RNA (1)...(19): siRNA sense strand
gaauguggcucgucugaac

SEQ ID NO: 1693015 - RNA, 19 nt, Homo sapiens
  misc_RNA (1)...(19): siRNA sense strand
cgucugaacuucucucaug

SEQ ID NO: 1693016 - RNA, 19 nt, Homo sapiens
  misc_RNA (1)...(19): siRNA sense strand
guucggagguuugaugaaa

SEQ ID NO: 1693017 - RNA, 19 nt, Homo sapiens
  misc_RNA (1)...(19): siRNA sense strand
gcagugauguggccaaugc

SEQ ID NO: 1693018 - RNA, 19 nt, Homo sapiens
  misc_RNA (1)...(19): siRNA sense strand
gcucagaagaugaugauug

SEQ ID NO: 1693019 - RNA, 19 nt, Homo sapiens
  misc_RNA (1)...(19): siRNA sense strand
gggacugccuucauucaga

SEQ ID NO: 1693020 - RNA, 19 nt, Homo sapiens
  misc_RNA (1)...(19): siRNA sense strand
ggaagguccugggagagaa

SEQ ID NO: 1693021 - RNA, 19 nt, Homo sapiens
  misc_RNA (1)...(19): siRNA sense strand
gaacuuugccaugaauguu

SEQ ID NO: 1693022 - RNA, 19 nt, Homo sapiens
  misc_RNA (1)...(19): siRNA sense strand
gaagugggcagcaagaucu

SEQ ID NO: 1693023 - RNA, 19 nt, Homo sapiens
  misc_RNA (1)...(19): siRNA sense strand
gcacagccacggaaagcuu

SEQ ID NO: 1693024 - RNA, 19 nt, Homo sapiens
  misc_RNA (1)...(19): siRNA sense strand
cgagcaggauguugauaug

SEQ ID NO: 1693025 - RNA, 19 nt, Homo sapiens
  misc_RNA (1)...(19): siRNA sense strand
ggagagaagggaaagaaca

SEQ ID NO: 1693026 - RNA, 19 nt, Homo sapiens
  misc_RNA (1)...(19): siRNA sense strand
gauccgaacugggcucauc

SEQ ID NO: 1693027 - RNA, 19 nt, Homo sapiens
  misc_RNA (1)...(19): siRNA sense strand
caucaagauuaucagcaaa

SEQ ID NO: 1693028 - RNA, 19 nt, Homo sapiens
  misc_RNA (1)...(19): siRNA sense strand
ggauguugauaugguguuu

SEQ ID NO: 1693029 - RNA, 19 nt, Homo sapiens
  misc_RNA (1)...(19): siRNA sense strand
gggaaagaacaucaagauu

SEQ ID NO: 1693030 - RNA, 19 nt, Homo sapiens
  misc_RNA (1)...(19): siRNA sense strand
gcggagaccaucaagaaug

SEQ ID NO: 1693031 - RNA, 19 nt, Homo sapiens
  misc_RNA (1)...(19): siRNA sense strand
ggugaacuuugccaugaau

SEQ ID NO: 1693032 - RNA, 19 nt, Homo sapiens
  misc_RNA (1)...(19): siRNA sense strand
cugcagagguggagcugaa

SEQ ID NO: 1693033 - RNA, 19 nt, Homo sapiens
  misc_RNA (1)...(19): siRNA sense strand
cgggugaacuuugccauga

SEQ ID NO: 1693034 - RNA, 19 nt, Homo sapiens
  misc_RNA (1)...(19): siRNA sense strand
gagaagggaaagaacauca

SEQ ID NO: 1693035 - RNA, 19 nt, Homo sapiens
  misc_RNA (1)...(19): siRNA sense strand
gaacacuggcaucaucugu

SEQ ID NO: 1693036 - RNA, 19 nt, Homo sapiens
  misc_RNA (1)...(19): siRNA sense strand
cggagaccaucaagaaugu

SEQ ID NO: 1693037 - RNA, 19 nt, Homo sapiens
  misc_RNA (1)...(19): siRNA sense strand
uggagagcaugaucaagaa

SEQ ID NO: 1693038 - RNA, 19 nt, Homo sapiens
  misc_RNA (1)...(19): siRNA sense strand
gaucaguggagacguugaa

SEQ ID NO: 1693039 - RNA, 19 nt, Homo sapiens
  misc_RNA (1)...(19): siRNA sense strand
ugagauuccugcagagaag

SEQ ID NO: 1693040 - RNA, 19 nt, Homo sapiens
  misc_RNA (1)...(19): siRNA sense strand
guggugaucuaggcauuga

SEQ ID NO: 1693041 - RNA, 19 nt, Homo sapiens
  misc_RNA (1)...(19): siRNA sense strand
ggaagugggcagcaagauc

SEQ ID NO: 1693042 - RNA, 19 nt, Homo sapiens
  misc_RNA (1)...(19): siRNA sense strand
gaagggaaagaacaucaag

SEQ ID NO: 1693043 - RNA, 19 nt, Homo sapiens
  misc_RNA (1)...(19): siRNA sense strand
caugcugucuggagaaaca

SEQ ID NO: 1693044 - RNA, 19 nt, Homo sapiens
  misc_RNA (1)...(19): siRNA sense strand
acaucaagauuaucagcaa

SEQ ID NO: 1693045 - RNA, 19 nt, Homo sapiens
  misc_RNA (1)...(19): siRNA sense strand
ugggaagccugucaucugu

SEQ ID NO: 1693046 - RNA, 19 nt, Homo sapiens
  misc_RNA (1)...(19): siRNA sense strand
ccggaacacuggcaucauc

SEQ ID NO: 1693047 - RNA, 19 nt, Homo sapiens
  misc_RNA (1)...(19): siRNA sense strand
gggugaacuuugccaugaa

SEQ ID NO: 1693048 - RNA, 19 nt, Homo sapiens
  misc_RNA (1)...(19): siRNA sense strand
gagagaagggaaagaacau

SEQ ID NO: 1693049 - RNA, 19 nt, Homo sapiens
  misc_RNA (1)...(19): siRNA sense strand
caugguggcucguggugau

SEQ ID NO: 1693050 - RNA, 19 nt, Homo sapiens
  misc_RNA (1)...(19): siRNA sense strand
gcaagaagggugugaaccu

SEQ ID NO: 1693051 - RNA, 19 nt, Homo sapiens
  misc_RNA (1)...(19): siRNA sense strand
augauuaagucuggaauga

SEQ ID NO: 1693052 - RNA, 19 nt, Homo sapiens
  misc_RNA (1)...(19): siRNA sense strand
acacauuccuggagcacau

SEQ ID NO: 1693053 - RNA, 19 nt, Homo sapiens
  misc_RNA (1)...(19): siRNA sense strand
gaugaugggcuuauuucuc

SEQ ID NO: 1693054 - RNA, 19 nt, Homo sapiens
  misc_RNA (1)...(19): siRNA sense strand
acacuggcaucaucuguac

SEQ ID NO: 1693055 - RNA, 19 nt, Homo sapiens
  misc_RNA (1)...(19): siRNA sense strand
ggaaaagugugacgagaac

SEQ ID NO: 1693056 - RNA, 19 nt, Homo sapiens
  misc_RNA (1)...(19): siRNA sense strand
uccaggaucugaaguuugg

SEQ ID NO: 1693057 - RNA, 19 nt, Homo sapiens
  misc_RNA (1)...(19): siRNA sense strand
ugacggagguggaaaaugg

SEQ ID NO: 1693058 - RNA, 19 nt, Homo sapiens
  misc_RNA (1)...(19): siRNA sense strand
acaagaacaucugcaaggu

SEQ ID NO: 1693059 - RNA, 19 nt, Homo sapiens
  misc_RNA (1)...(19): siRNA sense strand
uuauuucucuccaggugaa

SEQ ID NO: 1693060 - RNA, 19 nt, Homo sapiens
  misc_RNA (1)...(19): siRNA sense strand
agggagauguggucauugu

SEQ ID NO: 1693061 - RNA, 19 nt, Homo sapiens
  misc_RNA (1)...(19): siRNA sense strand
uggcccagcuucccgauca

SEQ ID NO: 1693062 - RNA, 19 nt, Homo sapiens
  misc_RNA (1)...(19): siRNA sense strand
gagaugauuaagucuggaa

SEQ ID NO: 1693063 - RNA, 19 nt, Homo sapiens
  misc_RNA (1)...(19): siRNA sense strand
gcaagaucuacguggauga

SEQ ID NO: 1693064 - RNA, 19 nt, Homo sapiens
  misc_RNA (1)...(19): siRNA sense strand
cuggagagcaugaucaaga

SEQ ID NO: 1693065 - RNA, 19 nt, Homo sapiens
  misc_RNA (1)...(19): siRNA sense strand
cguugaaggagaugauuaa

SEQ ID NO: 1693066 - RNA, 19 nt, Homo sapiens
  misc_RNA (1)...(19): siRNA sense strand
gcagagguggagcugaaga

SEQ ID NO: 1693067 - RNA, 19 nt, Homo sapiens
  misc_RNA (1)...(19): siRNA sense strand
cucagaagaugaugauugg

SEQ ID NO: 1693068 - RNA, 19 nt, Homo sapiens
  misc_RNA (1)...(19): siRNA sense strand
ucugauguccaugaaguua

SEQ ID NO: 1693069 - RNA, 19 nt, Homo sapiens
  misc_RNA (1)...(19): siRNA sense strand
cugaacuucucucauggaa

SEQ ID NO: 1693070 - RNA, 19 nt, Homo sapiens
  misc_RNA (1)...(19): siRNA sense strand
gaugauuaagucuggaaug

SEQ ID NO: 1693071 - RNA, 19 nt, Homo sapiens
  misc_RNA (1)...(19): siRNA sense strand
augaugggcuuauuucucu

SEQ ID NO: 1693072 - RNA, 19 nt, Homo sapiens
  misc_RNA (1)...(19): siRNA sense strand
guggaugaugggcuuauuu

SEQ ID NO: 1693073 - RNA, 19 nt, Homo sapiens
  misc_RNA (1)...(19): siRNA sense strand
ggugaucuaggcauugaga

SEQ ID NO: 1693074 - RNA, 19 nt, Homo sapiens
  misc_RNA (1)...(19): siRNA sense strand
ggaccuccgggugaacuuu

SEQ ID NO: 1693075 - RNA, 19 nt, Homo sapiens
  misc_RNA (1)...(19): siRNA sense strand
agccgggacugccuucauu

SEQ ID NO: 1693076 - RNA, 19 nt, Homo sapiens
  misc_RNA (1)...(19): siRNA sense strand
caguggagacguugaagga

SEQ ID NO: 1693077 - RNA, 19 nt, Homo sapiens
  misc_RNA (1)...(19): siRNA sense strand
gauaugguguuugcgucau

SEQ ID NO: 1693078 - RNA, 19 nt, Homo sapiens
  misc_RNA (1)...(19): siRNA sense strand
gcccguugcuguggcucua

SEQ ID NO: 1693079 - RNA, 19 nt, Homo sapiens
  misc_RNA (1)...(19): siRNA sense strand
gacacuaaaggaccugaga

SEQ ID NO: 1693080 - RNA, 19 nt, Homo sapiens
  misc_RNA (1)...(19): siRNA sense strand
cuguggcucuagacacuaa

SEQ ID NO: 1693081 - RNA, 19 nt, Homo sapiens
  misc_RNA (1)...(19): siRNA sense strand
ccuguaccguggcaucuuc

SEQ ID NO: 1693082 - RNA, 19 nt, Homo sapiens
  misc_RNA (1)...(19): siRNA sense strand
ucggagguuugaugaaauc

SEQ ID NO: 1693083 - RNA, 19 nt, Homo sapiens
  misc_RNA (1)...(19): siRNA sense strand
uggcuggacuacaagaaca

SEQ ID NO: 1693084 - RNA, 19 nt, Homo sapiens
  misc_RNA (1)...(19): siRNA sense strand
caagaucuacguggaugau

SEQ ID NO: 1693085 - RNA, 19 nt, Homo sapiens
  misc_RNA (1)...(19): siRNA sense strand
gcaaaaucgagaaucauga

SEQ ID NO: 1693086 - RNA, 19 nt, Homo sapiens
  misc_RNA (1)...(19): siRNA sense strand
gggucgagcaggauguuga

SEQ ID NO: 1693087 - RNA, 19 nt, Homo sapiens
  misc_RNA (1)...(19): siRNA sense strand
ucagcaaaaucgagaauca

SEQ ID NO: 1693088 - RNA, 19 nt, Homo sapiens
  misc_RNA (1)...(19): siRNA sense strand
cccgaucaguggagacguu

SEQ ID NO: 1693089 - RNA, 19 nt, Homo sapiens
  misc_RNA (1)...(19): siRNA sense strand
augcggagaccaucaagaa

SEQ ID NO: 1693090 - RNA, 19 nt, Homo sapiens
  misc_RNA (1)...(19): siRNA sense strand
uggagacguugaaggagau

SEQ ID NO: 1693091 - RNA, 19 nt, Homo sapiens
  misc_RNA (1)...(19): siRNA sense strand
gcagcaagaagggugugaa

SEQ ID NO: 1693092 - RNA, 19 nt, Homo sapiens
  misc_RNA (1)...(19): siRNA sense strand
ggaccugagauccgaacug

SEQ ID NO: 1693093 - RNA, 19 nt, Homo sapiens
  misc_RNA (1)...(19): siRNA sense strand
gguggcucguggugaucua

SEQ ID NO: 1693094 - RNA, 19 nt, Homo sapiens
  misc_RNA (1)...(19): siRNA sense strand
uccuguggcuggacuacaa

SEQ ID NO: 1693095 - RNA, 19 nt, Homo sapiens
  misc_RNA (1)...(19): siRNA sense strand
gggagccacucucaaaauc

SEQ ID NO: 1693096 - RNA, 19 nt, Homo sapiens
  misc_RNA (1)...(19): siRNA sense strand
ggaaagacgugucauauua

SEQ ID NO: 1693097 - RNA, 19 nt, Homo sapiens
  misc_RNA (1)...(19): siRNA sense strand
gagaauggcucuuuagaua

SEQ ID NO: 1693098 - RNA, 19 nt, Homo sapiens
  misc_RNA (1)...(19): siRNA sense strand
gaacauagcccacuaggau

SEQ ID NO: 1693099 - RNA, 19 nt, Homo sapiens
  misc_RNA (1)...(19): siRNA sense strand
gaacagccuucaagaaaug

SEQ ID NO: 1693100 - RNA, 19 nt, Homo sapiens
  misc_RNA (1)...(19): siRNA sense strand
gcaacgaagugaauuuauu

SEQ ID NO: 1693101 - RNA, 19 nt, Homo sapiens
  misc_RNA (1)...(19): siRNA sense strand
gagaccagcuacacgauua

SEQ ID NO: 1693102 - RNA, 19 nt, Homo sapiens
  misc_RNA (1)...(19): siRNA sense strand
gcaaagugauggaacagaa

SEQ ID NO: 1693103 - RNA, 19 nt, Homo sapiens
  misc_RNA (1)...(19): siRNA sense strand
gaugaaagcuuuacagaac

SEQ ID NO: 1693104 - RNA, 19 nt, Homo sapiens
  misc_RNA (1)...(19): siRNA sense strand
ggaaugccaucucaaaugu

SEQ ID NO: 1693105 - RNA, 19 nt, Homo sapiens
  misc_RNA (1)...(19): siRNA sense strand
gaaggaaagacgugucaua

SEQ ID NO: 1693106 - RNA, 19 nt, Homo sapiens
  misc_RNA (1)...(19): siRNA sense strand
guaugugucuguaaaugua

SEQ ID NO: 1693107 - RNA, 19 nt, Homo sapiens
  misc_RNA (1)...(19): siRNA sense strand
gcccaaguuugaugaaaua

SEQ ID NO: 1693108 - RNA, 19 nt, Homo sapiens
  misc_RNA (1)...(19): siRNA sense strand
gaauggcucuuuagauaca

SEQ ID NO: 1693109 - RNA, 19 nt, Homo sapiens
  misc_RNA (1)...(19): siRNA sense strand
ccagaaacaucuuaaucaa

SEQ ID NO: 1693110 - RNA, 19 nt, Homo sapiens
  misc_RNA (1)...(19): siRNA sense strand
caaucaagcuguccacgaa

SEQ ID NO: 1693111 - RNA, 19 nt, Homo sapiens
  misc_RNA (1)...(19): siRNA sense strand
caucauguaucaccauuga

SEQ ID NO: 1693112 - RNA, 19 nt, Homo sapiens
  misc_RNA (1)...(19): siRNA sense strand
gaaguaccuuucugacaug

SEQ ID NO: 1693113 - RNA, 19 nt, Homo sapiens
  misc_RNA (1)...(19): siRNA sense strand
ggagaaacaucaaggaaaa

SEQ ID NO: 1693114 - RNA, 19 nt, Homo sapiens
  misc_RNA (1)...(19): siRNA sense strand
ggcaggauaugaagagaaa

SEQ ID NO: 1693115 - RNA, 19 nt, Homo sapiens
  misc_RNA (1)...(19): siRNA sense strand
cgaauuugcuaaggagaua

SEQ ID NO: 1693116 - RNA, 19 nt, Homo sapiens
  misc_RNA (1)...(19): siRNA sense strand
aaacaccucugucaugaug

SEQ ID NO: 1693117 - RNA, 19 nt, Homo sapiens
  misc_RNA (1)...(19): siRNA sense strand
gaaagacgugucauauuau

SEQ ID NO: 1693118 - RNA, 19 nt, Homo sapiens
  misc_RNA (1)...(19): siRNA sense strand
ggaagagauuggugaagug

SEQ ID NO: 1693119 - RNA, 19 nt, Homo sapiens
  misc_RNA (1)...(19): siRNA sense strand
uggacaagcugauacguaa

SEQ ID NO: 1693120 - RNA, 19 nt, Homo sapiens
  misc_RNA (1)...(19): siRNA sense strand
ggagauagaagcaucaugu

SEQ ID NO: 1693121 - RNA, 19 nt, Homo sapiens
  misc_RNA (1)...(19): siRNA sense strand
gcauugcucugguuucugu

SEQ ID NO: 1693122 - RNA, 19 nt, Homo sapiens
  misc_RNA (1)...(19): siRNA sense strand
ggaaugaaguaccuuucug

SEQ ID NO: 1693123 - RNA, 19 nt, Homo sapiens
  misc_RNA (1)...(19): siRNA sense strand
ugugggaaguugugucuua

SEQ ID NO: 1693124 - RNA, 19 nt, Homo sapiens
  misc_RNA (1)...(19): siRNA sense strand
aaugccaucucaaauguua

SEQ ID NO: 1693125 - RNA, 19 nt, Homo sapiens
  misc_RNA (1)...(19): siRNA sense strand
ugaagacgcugguuaaugc

SEQ ID NO: 1693126 - RNA, 19 nt, Homo sapiens
  misc_RNA (1)...(19): siRNA sense strand
ugaaguaccuuucugacau

SEQ ID NO: 1693127 - RNA, 19 nt, Homo sapiens
  misc_RNA (1)...(19): siRNA sense strand
caacgaagugaauuuauug

SEQ ID NO: 1693128 - RNA, 19 nt, Homo sapiens
  misc_RNA (1)...(19): siRNA sense strand
cagaauaacuggcuuuuga

SEQ ID NO: 1693129 - RNA, 19 nt, Homo sapiens
  misc_RNA (1)...(19): siRNA sense strand
gaaaauggauacaguucaa

SEQ ID NO: 1693130 - RNA, 19 nt, Homo sapiens
  misc_RNA (1)...(19): siRNA sense strand
gaaauagcaggcccaaguu

SEQ ID NO: 1693131 - RNA, 19 nt, Homo sapiens
  misc_RNA (1)...(19): siRNA sense strand
gauuaaagcgguagaggaa

SEQ ID NO: 1693132 - RNA, 19 nt, Homo sapiens
  misc_RNA (1)...(19): siRNA sense strand
guuuaugucuuccaaauuc

SEQ ID NO: 1693133 - RNA, 19 nt, Homo sapiens
  misc_RNA (1)...(19): siRNA sense strand
gaaugaaguaccuuucuga

SEQ ID NO: 1693134 - RNA, 19 nt, Homo sapiens
  misc_RNA (1)...(19): siRNA sense strand
uguaggaccucuaagcaaa

SEQ ID NO: 1693135 - RNA, 19 nt, Homo sapiens
  misc_RNA (1)...(19): siRNA sense strand
cagaguauauggagaaugg

SEQ ID NO: 1693136 - RNA, 19 nt, Homo sapiens
  misc_RNA (1)...(19): siRNA sense strand
gggaagagauuggugaagu

SEQ ID NO: 1693137 - RNA, 19 nt, Homo sapiens
  misc_RNA (1)...(19): siRNA sense strand
ggcaguaugugucuguaaa

SEQ ID NO: 1693138 - RNA, 19 nt, Homo sapiens
  misc_RNA (1)...(19): siRNA sense strand
gaacagaaucagaauaacu

SEQ ID NO: 1693139 - RNA, 19 nt, Homo sapiens
  misc_RNA (1)...(19): siRNA sense strand
caaguuugaugaaauaguc

SEQ ID NO: 1693140 - RNA, 19 nt, Homo sapiens
  misc_RNA (1)...(19): siRNA sense strand
cgaagugaauuuauuggau

SEQ ID NO: 1693141 - RNA, 19 nt, Homo sapiens
  misc_RNA (1)...(19): siRNA sense strand
ucacacaaacuauaccuuu

SEQ ID NO: 1693142 - RNA, 19 nt, Homo sapiens
  misc_RNA (1)...(19): siRNA sense strand
ugucuggaguuauggaaua

SEQ ID NO: 1693143 - RNA, 19 nt, Homo sapiens
  misc_RNA (1)...(19): siRNA sense strand
uauggagaauggcucuuua

SEQ ID NO: 1693144 - RNA, 19 nt, Homo sapiens
  misc_RNA (1)...(19): siRNA sense strand
ccaauggaaucauccuaga

SEQ ID NO: 1693145 - RNA, 19 nt, Homo sapiens
  misc_RNA (1)...(19): siRNA sense strand
cgaaauagcaggcccaagu

SEQ ID NO: 1693146 - RNA, 19 nt, Homo sapiens
  misc_RNA (1)...(19): siRNA sense strand
acaguaaccuugugugcaa

SEQ ID NO: 1693147 - RNA, 19 nt, Homo sapiens
  misc_RNA (1)...(19): siRNA sense strand
ugagucagaugaucagaau

SEQ ID NO: 1693148 - RNA, 19 nt, Homo sapiens
  misc_RNA (1)...(19): siRNA sense strand
ggagaugaccaaucaagau

SEQ ID NO: 1693149 - RNA, 19 nt, Homo sapiens
  misc_RNA (1)...(19): siRNA sense strand
gagcugauucuucccaauu

SEQ ID NO: 1693150 - RNA, 19 nt, Homo sapiens
  misc_RNA (1)...(19): siRNA sense strand
uaccaaguaugcaaaguga

SEQ ID NO: 1693151 - RNA, 19 nt, Homo sapiens
  misc_RNA (1)...(19): siRNA sense strand
agaagaagaucaugaacag

SEQ ID NO: 1693152 - RNA, 19 nt, Homo sapiens
  misc_RNA (1)...(19): siRNA sense strand
ugaauuuggugaaguuugu

SEQ ID NO: 1693153 - RNA, 19 nt, Homo sapiens
  misc_RNA (1)...(19): siRNA sense strand
gugcagaccuggguucuuc

SEQ ID NO: 1693154 - RNA, 19 nt, Homo sapiens
  misc_RNA (1)...(19): siRNA sense strand
gggagaaacaucaaggaaa

SEQ ID NO: 1693155 - RNA, 19 nt, Homo sapiens
  misc_RNA (1)...(19): siRNA sense strand
gugaauggcuagaggcaau

SEQ ID NO: 1693156 - RNA, 19 nt, Homo sapiens
  misc_RNA (1)...(19): siRNA sense strand
gaugaaauagucaacaugu

SEQ ID NO: 1693157 - RNA, 19 nt, Homo sapiens
  misc_RNA (1)...(19): siRNA sense strand
caucauccauuuagaaggu

SEQ ID NO: 1693158 - RNA, 19 nt, Homo sapiens
  misc_RNA (1)...(19): siRNA sense strand
gagauagaagcaucaugua

SEQ ID NO: 1693159 - RNA, 19 nt, Homo sapiens
  misc_RNA (1)...(19): siRNA sense strand
gaccugggauggauugcuu

SEQ ID NO: 1693160 - RNA, 19 nt, Homo sapiens
  misc_RNA (1)...(19): siRNA sense strand
cagcaacgaagugaauuua

SEQ ID NO: 1693161 - RNA, 19 nt, Homo sapiens
  misc_RNA (1)...(19): siRNA sense strand
uggaacagaaucagaauaa

SEQ ID NO: 1693162 - RNA, 19 nt, Homo sapiens
  misc_RNA (1)...(19): siRNA sense strand
cugcagaguaucuaauuua

SEQ ID NO: 1693163 - RNA, 19 nt, Homo sapiens
  misc_RNA (1)...(19): siRNA sense strand
gagaauuaccuguggcuau

SEQ ID NO: 1693164 - RNA, 19 nt, Homo sapiens
  misc_RNA (1)...(19): siRNA sense strand
gaucuuggugaccguguua

SEQ ID NO: 1693165 - RNA, 19 nt, Homo sapiens
  misc_RNA (1)...(19): siRNA sense strand
ggagaauggcucuuuagau

SEQ ID NO: 1693166 - RNA, 19 nt, Homo sapiens
  misc_RNA (1)...(19): siRNA sense strand
uauuggagcaggugaauuu

SEQ ID NO: 1693167 - RNA, 19 nt, Homo sapiens
  misc_RNA (1)...(19): siRNA sense strand
guaaauguaaccacaaauc

SEQ ID NO: 1693168 - RNA, 19 nt, Homo sapiens
  misc_RNA (1)...(19): siRNA sense strand
gaauggaguguccgacuug

SEQ ID NO: 1693169 - RNA, 19 nt, Homo sapiens
  misc_RNA (1)...(19): siRNA sense strand
gaaaagcaacgcagagauu

SEQ ID NO: 1693170 - RNA, 19 nt, Homo sapiens
  misc_RNA (1)...(19): siRNA sense strand
gaugaccaaucaagaugug

SEQ ID NO: 1693171 - RNA, 19 nt, Homo sapiens
  misc_RNA (1)...(19): siRNA sense strand
gagaugaccaaucaagaug

SEQ ID NO: 1693172 - RNA, 19 nt, Homo sapiens
  misc_RNA (1)...(19): siRNA sense strand
gccagaaacaucuuaauca

SEQ ID NO: 1693173 - RNA, 19 nt, Homo sapiens
  misc_RNA (1)...(19): siRNA sense strand
ugaaagcuuuacagaacuu

SEQ ID NO: 1693174 - RNA, 19 nt, Homo sapiens
  misc_RNA (1)...(19): siRNA sense strand
gcugcucucuaucaguuaa

SEQ ID NO: 1693175 - RNA, 19 nt, Homo sapiens
  misc_RNA (1)...(19): siRNA sense strand
gggaaguugugucuuaugg

SEQ ID NO: 1693176 - RNA, 19 nt, Homo sapiens
  misc_RNA (1)...(19): siRNA sense strand
ugacagaguauauggagaa

SEQ ID NO: 1693177 - RNA, 19 nt, Homo sapiens
  misc_RNA (1)...(19): siRNA sense strand
auagaagcaucauguauca

SEQ ID NO: 1693178 - RNA, 19 nt, Homo sapiens
  misc_RNA (1)...(19): siRNA sense strand
uauggugucuucagucgaa

SEQ ID NO: 1693179 - RNA, 19 nt, Homo sapiens
  misc_RNA (1)...(19): siRNA sense strand
gcagcuccaucuccaguca

SEQ ID NO: 1693180 - RNA, 19 nt, Homo sapiens
  misc_RNA (1)...(19): siRNA sense strand
uaccauugcugccgaugaa

SEQ ID NO: 1693181 - RNA, 19 nt, Homo sapiens
  misc_RNA (1)...(19): siRNA sense strand
gcaggaaugaaguaccuuu

SEQ ID NO: 1693182 - RNA, 19 nt, Homo sapiens
  misc_RNA (1)...(19): siRNA sense strand
ggaaucauccuagaguaug

SEQ ID NO: 1693183 - RNA, 19 nt, Homo sapiens
  misc_RNA (1)...(19): siRNA sense strand
ugacacugguggaaggaaa

SEQ ID NO: 1693184 - RNA, 19 nt, Homo sapiens
  misc_RNA (1)...(19): siRNA sense strand
auacagaggucagagaugu

SEQ ID NO: 1693185 - RNA, 19 nt, Homo sapiens
  misc_RNA (1)...(19): siRNA sense strand
gaucagaaugggagaaaca

SEQ ID NO: 1693186 - RNA, 19 nt, Homo sapiens
  misc_RNA (1)...(19): siRNA sense strand
ggcagaacauagcccacua

SEQ ID NO: 1693187 - RNA, 19 nt, Homo sapiens
  misc_RNA (1)...(19): siRNA sense strand
gaauacagaggucagagau

SEQ ID NO: 1693188 - RNA, 19 nt, Homo sapiens
  misc_RNA (1)...(19): siRNA sense strand
caguuuaugucuuccaaau

SEQ ID NO: 1693189 - RNA, 19 nt, Homo sapiens
  misc_RNA (1)...(19): siRNA sense strand
gcugauacguaacccaagu

SEQ ID NO: 1693190 - RNA, 19 nt, Homo sapiens
  misc_RNA (1)...(19): siRNA sense strand
caaagccagauuccuguaa

SEQ ID NO: 1693191 - RNA, 19 nt, Homo sapiens
  misc_RNA (1)...(19): siRNA sense strand
uguauuacuuugagucaga

SEQ ID NO: 1693192 - RNA, 19 nt, Homo sapiens
  misc_RNA (1)...(19): siRNA sense strand
ggcccaaguuugaugaaau

SEQ ID NO: 1693193 - RNA, 19 nt, Homo sapiens
  misc_RNA (1)...(19): siRNA sense strand
acgcagagauuuccuaggu

SEQ ID NO: 1693194 - RNA, 19 nt, Homo sapiens
  misc_RNA (1)...(19): siRNA sense strand
ugaauggaguguccgacuu

SEQ ID NO: 1693195 - RNA, 19 nt, Homo sapiens
  misc_RNA (1)...(19): siRNA sense strand
gugcaaggcaggauaugaa

SEQ ID NO: 1693196 - RNA, 19 nt, Homo sapiens
  misc_RNA (1)...(19): siRNA sense strand
ggaaagacgugucauauua

SEQ ID NO: 1693197 - RNA, 19 nt, Homo sapiens
  misc_RNA (1)...(19): siRNA sense strand
gagaauggcucuuuagaua

SEQ ID NO: 1693198 - RNA, 19 nt, Homo sapiens
  misc_RNA (1)...(19): siRNA sense strand
gaacauagcccacuaggau

SEQ ID NO: 1693199 - RNA, 19 nt, Homo sapiens
  misc_RNA (1)...(19): siRNA sense strand
gaacagccuucaagaaaug

SEQ ID NO: 1693200 - RNA, 19 nt, Homo sapiens
  misc_RNA (1)...(19): siRNA sense strand
gcaacgaagugaauuuauu

SEQ ID NO: 1693201 - RNA, 19 nt, Homo sapiens
  misc_RNA (1)...(19): siRNA sense strand
gagaccagcuacacgauua

SEQ ID NO: 1693202 - RNA, 19 nt, Homo sapiens
  misc_RNA (1)...(19): siRNA sense strand
gcaaagugauggaacagaa

SEQ ID NO: 1693203 - RNA, 19 nt, Homo sapiens
  misc_RNA (1)...(19): siRNA sense strand
gaugaaagcuuuacagaac

SEQ ID NO: 1693204 - RNA, 19 nt, Homo sapiens
  misc_RNA (1)...(19): siRNA sense strand
ggaaugccaucucaaaugu

SEQ ID NO: 1693205 - RNA, 19 nt, Homo sapiens
  misc_RNA (1)...(19): siRNA sense strand
gaaggaaagacgugucaua

SEQ ID NO: 1693206 - RNA, 19 nt, Homo sapiens
  misc_RNA (1)...(19): siRNA sense strand
guaugugucuguaaaugua

SEQ ID NO: 1693207 - RNA, 19 nt, Homo sapiens
  misc_RNA (1)...(19): siRNA sense strand
gcccaaguuugaugaaaua

SEQ ID NO: 1693208 - RNA, 19 nt, Homo sapiens
  misc_RNA (1)...(19): siRNA sense strand
gaauggcucuuuagauaca

SEQ ID NO: 1693209 - RNA, 19 nt, Homo sapiens
  misc_RNA (1)...(19): siRNA sense strand
ccagaaacaucuuaaucaa

SEQ ID NO: 1693210 - RNA, 19 nt, Homo sapiens
  misc_RNA (1)...(19): siRNA sense strand
caaucaagcuguccacgaa

SEQ ID NO: 1693211 - RNA, 19 nt, Homo sapiens
  misc_RNA (1)...(19): siRNA sense strand
caucauguaucaccauuga

SEQ ID NO: 1693212 - RNA, 19 nt, Homo sapiens
  misc_RNA (1)...(19): siRNA sense strand
gaaguaccuuucugacaug

SEQ ID NO: 1693213 - RNA, 19 nt, Homo sapiens
  misc_RNA (1)...(19): siRNA sense strand
ggagaaacaucaaggaaaa

SEQ ID NO: 1693214 - RNA, 19 nt, Homo sapiens
  misc_RNA (1)...(19): siRNA sense strand
ggcaggauaugaagagaaa

SEQ ID NO: 1693215 - RNA, 19 nt, Homo sapiens
  misc_RNA (1)...(19): siRNA sense strand
cgaauuugcuaaggagaua

SEQ ID NO: 1693216 - RNA, 19 nt, Homo sapiens
  misc_RNA (1)...(19): siRNA sense strand
aaacaccucugucaugaug

SEQ ID NO: 1693217 - RNA, 19 nt, Homo sapiens
  misc_RNA (1)...(19): siRNA sense strand
gaaagacgugucauauuau

SEQ ID NO: 1693218 - RNA, 19 nt, Homo sapiens
  misc_RNA (1)...(19): siRNA sense strand
ggaagagauuggugaagug

SEQ ID NO: 1693219 - RNA, 19 nt, Homo sapiens
  misc_RNA (1)...(19): siRNA sense strand
uggacaagcugauacguaa

SEQ ID NO: 1693220 - RNA, 19 nt, Homo sapiens
  misc_RNA (1)...(19): siRNA sense strand
ggagauagaagcaucaugu

SEQ ID NO: 1693221 - RNA, 19 nt, Homo sapiens
  misc_RNA (1)...(19): siRNA sense strand
gcauugcucugguuucugu

SEQ ID NO: 1693222 - RNA, 19 nt, Homo sapiens
  misc_RNA (1)...(19): siRNA sense strand
ggaaugaaguaccuuucug

SEQ ID NO: 1693223 - RNA, 19 nt, Homo sapiens
  misc_RNA (1)...(19): siRNA sense strand
ugugggaaguugugucuua

SEQ ID NO: 1693224 - RNA, 19 nt, Homo sapiens
  misc_RNA (1)...(19): siRNA sense strand
aaugccaucucaaauguua

SEQ ID NO: 1693225 - RNA, 19 nt, Homo sapiens
  misc_RNA (1)...(19): siRNA sense strand
ugaagacgcugguuaaugc

SEQ ID NO: 1693226 - RNA, 19 nt, Homo sapiens
  misc_RNA (1)...(19): siRNA sense strand
ugaaguaccuuucugacau

SEQ ID NO: 1693227 - RNA, 19 nt, Homo sapiens
  misc_RNA (1)...(19): siRNA sense strand
caacgaagugaauuuauug

SEQ ID NO: 1693228 - RNA, 19 nt, Homo sapiens
  misc_RNA (1)...(19): siRNA sense strand
cagaauaacuggcuuuuga

SEQ ID NO: 1693229 - RNA, 19 nt, Homo sapiens
  misc_RNA (1)...(19): siRNA sense strand
gaaaauggauacaguucaa

SEQ ID NO: 1693230 - RNA, 19 nt, Homo sapiens
  misc_RNA (1)...(19): siRNA sense strand
gaaauagcaggcccaaguu

SEQ ID NO: 1693231 - RNA, 19 nt, Homo sapiens
  misc_RNA (1)...(19): siRNA sense strand
gauuaaagcgguagaggaa

SEQ ID NO: 1693232 - RNA, 19 nt, Homo sapiens
  misc_RNA (1)...(19): siRNA sense strand
guuuaugucuuccaaauuc

SEQ ID NO: 1693233 - RNA, 19 nt, Homo sapiens
  misc_RNA (1)...(19): siRNA sense strand
gaaugaaguaccuuucuga

SEQ ID NO: 1693234 - RNA, 19 nt, Homo sapiens
  misc_RNA (1)...(19): siRNA sense strand
uguaggaccucuaagcaaa

SEQ ID NO: 1693235 - RNA, 19 nt, Homo sapiens
  misc_RNA (1)...(19): siRNA sense strand
cagaguauauggagaaugg

SEQ ID NO: 1693236 - RNA, 19 nt, Homo sapiens
  misc_RNA (1)...(19): siRNA sense strand
gggaagagauuggugaagu

SEQ ID NO: 1693237 - RNA, 19 nt, Homo sapiens
  misc_RNA (1)...(19): siRNA sense strand
ggcaguaugugucuguaaa

SEQ ID NO: 1693238 - RNA, 19 nt, Homo sapiens
  misc_RNA (1)...(19): siRNA sense strand
gaacagaaucagaauaacu

SEQ ID NO: 1693239 - RNA, 19 nt, Homo sapiens
  misc_RNA (1)...(19): siRNA sense strand
caaguuugaugaaauaguc

SEQ ID NO: 1693240 - RNA, 19 nt, Homo sapiens
  misc_RNA (1)...(19): siRNA sense strand
cgaagugaauuuauuggau

SEQ ID NO: 1693241 - RNA, 19 nt, Homo sapiens
  misc_RNA (1)...(19): siRNA sense strand
ucacacaaacuauaccuuu

SEQ ID NO: 1693242 - RNA, 19 nt, Homo sapiens
  misc_RNA (1)...(19): siRNA sense strand
ugucuggaguuauggaaua

SEQ ID NO: 1693243 - RNA, 19 nt, Homo sapiens
  misc_RNA (1)...(19): siRNA sense strand
uauggagaauggcucuuua

SEQ ID NO: 1693244 - RNA, 19 nt, Homo sapiens
  misc_RNA (1)...(19): siRNA sense strand
ccaauggaaucauccuaga

SEQ ID NO: 1693245 - RNA, 19 nt, Homo sapiens
  misc_RNA (1)...(19): siRNA sense strand
cgaaauagcaggcccaagu

SEQ ID NO: 1693246 - RNA, 19 nt, Homo sapiens
  misc_RNA (1)...(19): siRNA sense strand
acaguaaccuugugugcaa

SEQ ID NO: 1693247 - RNA, 19 nt, Homo sapiens
  misc_RNA (1)...(19): siRNA sense strand
ugagucagaugaucagaau

SEQ ID NO: 1693248 - RNA, 19 nt, Homo sapiens
  misc_RNA (1)...(19): siRNA sense strand
ggagaugaccaaucaagau

SEQ ID NO: 1693249 - RNA, 19 nt, Homo sapiens
  misc_RNA (1)...(19): siRNA sense strand
gagcugauucuucccaauu

SEQ ID NO: 1693250 - RNA, 19 nt, Homo sapiens
  misc_RNA (1)...(19): siRNA sense strand
uaccaaguaugcaaaguga

SEQ ID NO: 1693251 - RNA, 19 nt, Homo sapiens
  misc_RNA (1)...(19): siRNA sense strand
agaagaagaucaugaacag

SEQ ID NO: 1693252 - RNA, 19 nt, Homo sapiens
  misc_RNA (1)...(19): siRNA sense strand
ugaauuuggugaaguuugu

SEQ ID NO: 1693253 - RNA, 19 nt, Homo sapiens
  misc_RNA (1)...(19): siRNA sense strand
gugcagaccuggguucuuc

SEQ ID NO: 1693254 - RNA, 19 nt, Homo sapiens
  misc_RNA (1)...(19): siRNA sense strand
gggagaaacaucaaggaaa

SEQ ID NO: 1693255 - RNA, 19 nt, Homo sapiens
  misc_RNA (1)...(19): siRNA sense strand
gugaauggcuagaggcaau

SEQ ID NO: 1693256 - RNA, 19 nt, Homo sapiens
  misc_RNA (1)...(19): siRNA sense strand
gaugaaauagucaacaugu

SEQ ID NO: 1693257 - RNA, 19 nt, Homo sapiens
  misc_RNA (1)...(19): siRNA sense strand
caucauccauuuagaaggu

SEQ ID NO: 1693258 - RNA, 19 nt, Homo sapiens
  misc_RNA (1)...(19): siRNA sense strand
gagauagaagcaucaugua

SEQ ID NO: 1693259 - RNA, 19 nt, Homo sapiens
  misc_RNA (1)...(19): siRNA sense strand
gaccugggauggauugcuu

SEQ ID NO: 1693260 - RNA, 19 nt, Homo sapiens
  misc_RNA (1)...(19): siRNA sense strand
cagcaacgaagugaauuua

SEQ ID NO: 1693261 - RNA, 19 nt, Homo sapiens
  misc_RNA (1)...(19): siRNA sense strand
uggaacagaaucagaauaa

SEQ ID NO: 1693262 - RNA, 19 nt, Homo sapiens
  misc_RNA (1)...(19): siRNA sense strand
cugcagaguaucuaauuua

SEQ ID NO: 1693263 - RNA, 19 nt, Homo sapiens
  misc_RNA (1)...(19): siRNA sense strand
gagaauuaccuguggcuau

SEQ ID NO: 1693264 - RNA, 19 nt, Homo sapiens
  misc_RNA (1)...(19): siRNA sense strand
gaucuuggugaccguguua

SEQ ID NO: 1693265 - RNA, 19 nt, Homo sapiens
  misc_RNA (1)...(19): siRNA sense strand
ggagaauggcucuuuagau

SEQ ID NO: 1693266 - RNA, 19 nt, Homo sapiens
  misc_RNA (1)...(19): siRNA sense strand
uauuggagcaggugaauuu

SEQ ID NO: 1693267 - RNA, 19 nt, Homo sapiens
  misc_RNA (1)...(19): siRNA sense strand
guaaauguaaccacaaauc

SEQ ID NO: 1693268 - RNA, 19 nt, Homo sapiens
  misc_RNA (1)...(19): siRNA sense strand
gaauggaguguccgacuug

SEQ ID NO: 1693269 - RNA, 19 nt, Homo sapiens
  misc_RNA (1)...(19): siRNA sense strand
gaaaagcaacgcagagauu

SEQ ID NO: 1693270 - RNA, 19 nt, Homo sapiens
  misc_RNA (1)...(19): siRNA sense strand
gaugaccaaucaagaugug

SEQ ID NO: 1693271 - RNA, 19 nt, Homo sapiens
  misc_RNA (1)...(19): siRNA sense strand
gagaugaccaaucaagaug

SEQ ID NO: 1693272 - RNA, 19 nt, Homo sapiens
  misc_RNA (1)...(19): siRNA sense strand
gccagaaacaucuuaauca

SEQ ID NO: 1693273 - RNA, 19 nt, Homo sapiens
  misc_RNA (1)...(19): siRNA sense strand
ugaaagcuuuacagaacuu

SEQ ID NO: 1693274 - RNA, 19 nt, Homo sapiens
  misc_RNA (1)...(19): siRNA sense strand
gcugcucucuaucaguuaa

SEQ ID NO: 1693275 - RNA, 19 nt, Homo sapiens
  misc_RNA (1)...(19): siRNA sense strand
gggaaguugugucuuaugg

SEQ ID NO: 1693276 - RNA, 19 nt, Homo sapiens
  misc_RNA (1)...(19): siRNA sense strand
ugacagaguauauggagaa

SEQ ID NO: 1693277 - RNA, 19 nt, Homo sapiens
  misc_RNA (1)...(19): siRNA sense strand
auagaagcaucauguauca

SEQ ID NO: 1693278 - RNA, 19 nt, Homo sapiens
  misc_RNA (1)...(19): siRNA sense strand
uauggugucuucagucgaa

SEQ ID NO: 1693279 - RNA, 19 nt, Homo sapiens
  misc_RNA (1)...(19): siRNA sense strand
gcagcuccaucuccaguca

SEQ ID NO: 1693280 - RNA, 19 nt, Homo sapiens
  misc_RNA (1)...(19): siRNA sense strand
uaccauugcugccgaugaa

SEQ ID NO: 1693281 - RNA, 19 nt, Homo sapiens
  misc_RNA (1)...(19): siRNA sense strand
gcaggaaugaaguaccuuu

SEQ ID NO: 1693282 - RNA, 19 nt, Homo sapiens
  misc_RNA (1)...(19): siRNA sense strand
ggaaucauccuagaguaug

SEQ ID NO: 1693283 - RNA, 19 nt, Homo sapiens
  misc_RNA (1)...(19): siRNA sense strand
ugacacugguggaaggaaa

SEQ ID NO: 1693284 - RNA, 19 nt, Homo sapiens
  misc_RNA (1)...(19): siRNA sense strand
auacagaggucagagaugu

SEQ ID NO: 1693285 - RNA, 19 nt, Homo sapiens
  misc_RNA (1)...(19): siRNA sense strand
gaucagaaugggagaaaca

SEQ ID NO: 1693286 - RNA, 19 nt, Homo sapiens
  misc_RNA (1)...(19): siRNA sense strand
ggcagaacauagcccacua

SEQ ID NO: 1693287 - RNA, 19 nt, Homo sapiens
  misc_RNA (1)...(19): siRNA sense strand
gaauacagaggucagagau

SEQ ID NO: 1693288 - RNA, 19 nt, Homo sapiens
  misc_RNA (1)...(19): siRNA sense strand
caguuuaugucuuccaaau

SEQ ID NO: 1693289 - RNA, 19 nt, Homo sapiens
  misc_RNA (1)...(19): siRNA sense strand
gcugauacguaacccaagu

SEQ ID NO: 1693290 - RNA, 19 nt, Homo sapiens
  misc_RNA (1)...(19): siRNA sense strand
caaagccagauuccuguaa

SEQ ID NO: 1693291 - RNA, 19 nt, Homo sapiens
  misc_RNA (1)...(19): siRNA sense strand
uguauuacuuugagucaga

SEQ ID NO: 1693292 - RNA, 19 nt, Homo sapiens
  misc_RNA (1)...(19): siRNA sense strand
ggcccaaguuugaugaaau

SEQ ID NO: 1693293 - RNA, 19 nt, Homo sapiens
  misc_RNA (1)...(19): siRNA sense strand
acgcagagauuuccuaggu

SEQ ID NO: 1693294 - RNA, 19 nt, Homo sapiens
  misc_RNA (1)...(19): siRNA sense strand
ugaauggaguguccgacuu

SEQ ID NO: 1693295 - RNA, 19 nt, Homo sapiens
  misc_RNA (1)...(19): siRNA sense strand
gugcaaggcaggauaugaa

SEQ ID NO: 1693296 - RNA, 19 nt, Homo sapiens
  misc_RNA (1)...(19): siRNA sense strand
ggaaagacgugucauauua

SEQ ID NO: 1693297 - RNA, 19 nt, Homo sapiens
  misc_RNA (1)...(19): siRNA sense strand
gagaauggcucuuuagaua

SEQ ID NO: 1693298 - RNA, 19 nt, Homo sapiens
  misc_RNA (1)...(19): siRNA sense strand
gaacauagcccacuaggau

SEQ ID NO: 1693299 - RNA, 19 nt, Homo sapiens
  misc_RNA (1)...(19): siRNA sense strand
gaacagccuucaagaaaug

SEQ ID NO: 1693300 - RNA, 19 nt, Homo sapiens
  misc_RNA (1)...(19): siRNA sense strand
gcaacgaagugaauuuauu

SEQ ID NO: 1693301 - RNA, 19 nt, Homo sapiens
  misc_RNA (1)...(19): siRNA sense strand
gagaccagcuacacgauua

SEQ ID NO: 1693302 - RNA, 19 nt, Homo sapiens
  misc_RNA (1)...(19): siRNA sense strand
gcaaagugauggaacagaa

SEQ ID NO: 1693303 - RNA, 19 nt, Homo sapiens
  misc_RNA (1)...(19): siRNA sense strand
gaugaaagcuuuacagaac

SEQ ID NO: 1693304 - RNA, 19 nt, Homo sapiens
  misc_RNA (1)...(19): siRNA sense strand
ggaaugccaucucaaaugu

SEQ ID NO: 1693305 - RNA, 19 nt, Homo sapiens
  misc_RNA (1)...(19): siRNA sense strand
gaaggaaagacgugucaua

SEQ ID NO: 1693306 - RNA, 19 nt, Homo sapiens
  misc_RNA (1)...(19): siRNA sense strand
guaugugucuguaaaugua

SEQ ID NO: 1693307 - RNA, 19 nt, Homo sapiens
  misc_RNA (1)...(19): siRNA sense strand
gcccaaguuugaugaaaua

SEQ ID NO: 1693308 - RNA, 19 nt, Homo sapiens
  misc_RNA (1)...(19): siRNA sense strand
gaauggcucuuuagauaca

SEQ ID NO: 1693309 - RNA, 19 nt, Homo sapiens
  misc_RNA (1)...(19): siRNA sense strand
ccagaaacaucuuaaucaa

SEQ ID NO: 1693310 - RNA, 19 nt, Homo sapiens
  misc_RNA (1)...(19): siRNA sense strand
caaucaagcuguccacgaa

SEQ ID NO: 1693311 - RNA, 19 nt, Homo sapiens
  misc_RNA (1)...(19): siRNA sense strand
caucauguaucaccauuga

SEQ ID NO: 1693312 - RNA, 19 nt, Homo sapiens
  misc_RNA (1)...(19): siRNA sense strand
gaaguaccuuucugacaug

SEQ ID NO: 1693313 - RNA, 19 nt, Homo sapiens
  misc_RNA (1)...(19): siRNA sense strand
ggagaaacaucaaggaaaa

SEQ ID NO: 1693314 - RNA, 19 nt, Homo sapiens
  misc_RNA (1)...(19): siRNA sense strand
ggcaggauaugaagagaaa

SEQ ID NO: 1693315 - RNA, 19 nt, Homo sapiens
  misc_RNA (1)...(19): siRNA sense strand
cgaauuugcuaaggagaua

SEQ ID NO: 1693316 - RNA, 19 nt, Homo sapiens
  misc_RNA (1)...(19): siRNA sense strand
aaacaccucugucaugaug

SEQ ID NO: 1693317 - RNA, 19 nt, Homo sapiens
  misc_RNA (1)...(19): siRNA sense strand
gaaagacgugucauauuau

SEQ ID NO: 1693318 - RNA, 19 nt, Homo sapiens
  misc_RNA (1)...(19): siRNA sense strand
ggaagagauuggugaagug

SEQ ID NO: 1693319 - RNA, 19 nt, Homo sapiens
  misc_RNA (1)...(19): siRNA sense strand
uggacaagcugauacguaa

SEQ ID NO: 1693320 - RNA, 19 nt, Homo sapiens
  misc_RNA (1)...(19): siRNA sense strand
ggagauagaagcaucaugu

SEQ ID NO: 1693321 - RNA, 19 nt, Homo sapiens
  misc_RNA (1)...(19): siRNA sense strand
gcauugcucugguuucugu

SEQ ID NO: 1693322 - RNA, 19 nt, Homo sapiens
  misc_RNA (1)...(19): siRNA sense strand
ggaaugaaguaccuuucug

SEQ ID NO: 1693323 - RNA, 19 nt, Homo sapiens
  misc_RNA (1)...(19): siRNA sense strand
ugugggaaguugugucuua

SEQ ID NO: 1693324 - RNA, 19 nt, Homo sapiens
  misc_RNA (1)...(19): siRNA sense strand
aaugccaucucaaauguua

SEQ ID NO: 1693325 - RNA, 19 nt, Homo sapiens
  misc_RNA (1)...(19): siRNA sense strand
ugaagacgcugguuaaugc

SEQ ID NO: 1693326 - RNA, 19 nt, Homo sapiens
  misc_RNA (1)...(19): siRNA sense strand
ugaaguaccuuucugacau

SEQ ID NO: 1693327 - RNA, 19 nt, Homo sapiens
  misc_RNA (1)...(19): siRNA sense strand
caacgaagugaauuuauug

SEQ ID NO: 1693328 - RNA, 19 nt, Homo sapiens
  misc_RNA (1)...(19): siRNA sense strand
cagaauaacuggcuuuuga

SEQ ID NO: 1693329 - RNA, 19 nt, Homo sapiens
  misc_RNA (1)...(19): siRNA sense strand
gaaaauggauacaguucaa

SEQ ID NO: 1693330 - RNA, 19 nt, Homo sapiens
  misc_RNA (1)...(19): siRNA sense strand
gaaauagcaggcccaaguu

SEQ ID NO: 1693331 - RNA, 19 nt, Homo sapiens
  misc_RNA (1)...(19): siRNA sense strand
gauuaaagcgguagaggaa

SEQ ID NO: 1693332 - RNA, 19 nt, Homo sapiens
  misc_RNA (1)...(19): siRNA sense strand
guuuaugucuuccaaauuc

SEQ ID NO: 1693333 - RNA, 19 nt, Homo sapiens
  misc_RNA (1)...(19): siRNA sense strand
gaaugaaguaccuuucuga

SEQ ID NO: 1693334 - RNA, 19 nt, Homo sapiens
  misc_RNA (1)...(19): siRNA sense strand
uguaggaccucuaagcaaa

SEQ ID NO: 1693335 - RNA, 19 nt, Homo sapiens
  misc_RNA (1)...(19): siRNA sense strand
cagaguauauggagaaugg

SEQ ID NO: 1693336 - RNA, 19 nt, Homo sapiens
  misc_RNA (1)...(19): siRNA sense strand
gggaagagauuggugaagu

SEQ ID NO: 1693337 - RNA, 19 nt, Homo sapiens
  misc_RNA (1)...(19): siRNA sense strand
ggcaguaugugucuguaaa

SEQ ID NO: 1693338 - RNA, 19 nt, Homo sapiens
  misc_RNA (1)...(19): siRNA sense strand
gaacagaaucagaauaacu

SEQ ID NO: 1693339 - RNA, 19 nt, Homo sapiens
  misc_RNA (1)...(19): siRNA sense strand
caaguuugaugaaauaguc

SEQ ID NO: 1693340 - RNA, 19 nt, Homo sapiens
  misc_RNA (1)...(19): siRNA sense strand
cgaagugaauuuauuggau

SEQ ID NO: 1693341 - RNA, 19 nt, Homo sapiens
  misc_RNA (1)...(19): siRNA sense strand
ucacacaaacuauaccuuu

SEQ ID NO: 1693342 - RNA, 19 nt, Homo sapiens
  misc_RNA (1)...(19): siRNA sense strand
ugucuggaguuauggaaua

SEQ ID NO: 1693343 - RNA, 19 nt, Homo sapiens
  misc_RNA (1)...(19): siRNA sense strand
uauggagaauggcucuuua

SEQ ID NO: 1693344 - RNA, 19 nt, Homo sapiens
  misc_RNA (1)...(19): siRNA sense strand
ccaauggaaucauccuaga

SEQ ID NO: 1693345 - RNA, 19 nt, Homo sapiens
  misc_RNA (1)...(19): siRNA sense strand
cgaaauagcaggcccaagu

SEQ ID NO: 1693346 - RNA, 19 nt, Homo sapiens
  misc_RNA (1)...(19): siRNA sense strand
acaguaaccuugugugcaa

SEQ ID NO: 1693347 - RNA, 19 nt, Homo sapiens
  misc_RNA (1)...(19): siRNA sense strand
ugagucagaugaucagaau

SEQ ID NO: 1693348 - RNA, 19 nt, Homo sapiens
  misc_RNA (1)...(19): siRNA sense strand
ggagaugaccaaucaagau

SEQ ID NO: 1693349 - RNA, 19 nt, Homo sapiens
  misc_RNA (1)...(19): siRNA sense strand
gagcugauucuucccaauu

SEQ ID NO: 1693350 - RNA, 19 nt, Homo sapiens
  misc_RNA (1)...(19): siRNA sense strand
uaccaaguaugcaaaguga

SEQ ID NO: 1693351 - RNA, 19 nt, Homo sapiens
  misc_RNA (1)...(19): siRNA sense strand
agaagaagaucaugaacag

SEQ ID NO: 1693352 - RNA, 19 nt, Homo sapiens
  misc_RNA (1)...(19): siRNA sense strand
ugaauuuggugaaguuugu

SEQ ID NO: 1693353 - RNA, 19 nt, Homo sapiens
  misc_RNA (1)...(19): siRNA sense strand
gugcagaccuggguucuuc

SEQ ID NO: 1693354 - RNA, 19 nt, Homo sapiens
  misc_RNA (1)...(19): siRNA sense strand
gggagaaacaucaaggaaa

SEQ ID NO: 1693355 - RNA, 19 nt, Homo sapiens
  misc_RNA (1)...(19): siRNA sense strand
gugaauggcuagaggcaau

SEQ ID NO: 1693356 - RNA, 19 nt, Homo sapiens
  misc_RNA (1)...(19): siRNA sense strand
gaugaaauagucaacaugu

SEQ ID NO: 1693357 - RNA, 19 nt, Homo sapiens
  misc_RNA (1)...(19): siRNA sense strand
caucauccauuuagaaggu

SEQ ID NO: 1693358 - RNA, 19 nt, Homo sapiens
  misc_RNA (1)...(19): siRNA sense strand
gagauagaagcaucaugua

SEQ ID NO: 1693359 - RNA, 19 nt, Homo sapiens
  misc_RNA (1)...(19): siRNA sense strand
gaccugggauggauugcuu

SEQ ID NO: 1693360 - RNA, 19 nt, Homo sapiens
  misc_RNA (1)...(19): siRNA sense strand
cagcaacgaagugaauuua

SEQ ID NO: 1693361 - RNA, 19 nt, Homo sapiens
  misc_RNA (1)...(19): siRNA sense strand
uggaacagaaucagaauaa

SEQ ID NO: 1693362 - RNA, 19 nt, Homo sapiens
  misc_RNA (1)...(19): siRNA sense strand
cugcagaguaucuaauuua

SEQ ID NO: 1693363 - RNA, 19 nt, Homo sapiens
  misc_RNA (1)...(19): siRNA sense strand
gagaauuaccuguggcuau

SEQ ID NO: 1693364 - RNA, 19 nt, Homo sapiens
  misc_RNA (1)...(19): siRNA sense strand
gaucuuggugaccguguua

SEQ ID NO: 1693365 - RNA, 19 nt, Homo sapiens
  misc_RNA (1)...(19): siRNA sense strand
ggagaauggcucuuuagau

SEQ ID NO: 1693366 - RNA, 19 nt, Homo sapiens
  misc_RNA (1)...(19): siRNA sense strand
uauuggagcaggugaauuu

SEQ ID NO: 1693367 - RNA, 19 nt, Homo sapiens
  misc_RNA (1)...(19): siRNA sense strand
guaaauguaaccacaaauc

SEQ ID NO: 1693368 - RNA, 19 nt, Homo sapiens
  misc_RNA (1)...(19): siRNA sense strand
gaauggaguguccgacuug

SEQ ID NO: 1693369 - RNA, 19 nt, Homo sapiens
  misc_RNA (1)...(19): siRNA sense strand
gaaaagcaacgcagagauu

SEQ ID NO: 1693370 - RNA, 19 nt, Homo sapiens
  misc_RNA (1)...(19): siRNA sense strand
gaugaccaaucaagaugug

SEQ ID NO: 1693371 - RNA, 19 nt, Homo sapiens
  misc_RNA (1)...(19): siRNA sense strand
gagaugaccaaucaagaug

SEQ ID NO: 1693372 - RNA, 19 nt, Homo sapiens
  misc_RNA (1)...(19): siRNA sense strand
gccagaaacaucuuaauca

SEQ ID NO: 1693373 - RNA, 19 nt, Homo sapiens
  misc_RNA (1)...(19): siRNA sense strand
ugaaagcuuuacagaacuu

SEQ ID NO: 1693374 - RNA, 19 nt, Homo sapiens
  misc_RNA (1)...(19): siRNA sense strand
gcugcucucuaucaguuaa

SEQ ID NO: 1693375 - RNA, 19 nt, Homo sapiens
  misc_RNA (1)...(19): siRNA sense strand
gggaaguugugucuuaugg

SEQ ID NO: 1693376 - RNA, 19 nt, Homo sapiens
  misc_RNA (1)...(19): siRNA sense strand
ugacagaguauauggagaa

SEQ ID NO: 1693377 - RNA, 19 nt, Homo sapiens
  misc_RNA (1)...(19): siRNA sense strand
auagaagcaucauguauca

SEQ ID NO: 1693378 - RNA, 19 nt, Homo sapiens
  misc_RNA (1)...(19): siRNA sense strand
uauggugucuucagucgaa

SEQ ID NO: 1693379 - RNA, 19 nt, Homo sapiens
  misc_RNA (1)...(19): siRNA sense strand
gcagcuccaucuccaguca

SEQ ID NO: 1693380 - RNA, 19 nt, Homo sapiens
  misc_RNA (1)...(19): siRNA sense strand
uaccauugcugccgaugaa

SEQ ID NO: 1693381 - RNA, 19 nt, Homo sapiens
  misc_RNA (1)...(19): siRNA sense strand
gcaggaaugaaguaccuuu

SEQ ID NO: 1693382 - RNA, 19 nt, Homo sapiens
  misc_RNA (1)...(19): siRNA sense strand
ggaaucauccuagaguaug

SEQ ID NO: 1693383 - RNA, 19 nt, Homo sapiens
  misc_RNA (1)...(19): siRNA sense strand
ugacacugguggaaggaaa

SEQ ID NO: 1693384 - RNA, 19 nt, Homo sapiens
  misc_RNA (1)...(19): siRNA sense strand
auacagaggucagagaugu

SEQ ID NO: 1693385 - RNA, 19 nt, Homo sapiens
  misc_RNA (1)...(19): siRNA sense strand
gaucagaaugggagaaaca

SEQ ID NO: 1693386 - RNA, 19 nt, Homo sapiens
  misc_RNA (1)...(19): siRNA sense strand
ggcagaacauagcccacua

SEQ ID NO: 1693387 - RNA, 19 nt, Homo sapiens
  misc_RNA (1)...(19): siRNA sense strand
gaauacagaggucagagau

SEQ ID NO: 1693388 - RNA, 19 nt, Homo sapiens
  misc_RNA (1)...(19): siRNA sense strand
caguuuaugucuuccaaau

SEQ ID NO: 1693389 - RNA, 19 nt, Homo sapiens
  misc_RNA (1)...(19): siRNA sense strand
gcugauacguaacccaagu

SEQ ID NO: 1693390 - RNA, 19 nt, Homo sapiens
  misc_RNA (1)...(19): siRNA sense strand
caaagccagauuccuguaa

SEQ ID NO: 1693391 - RNA, 19 nt, Homo sapiens
  misc_RNA (1)...(19): siRNA sense strand
uguauuacuuugagucaga

SEQ ID NO: 1693392 - RNA, 19 nt, Homo sapiens
  misc_RNA (1)...(19): siRNA sense strand
ggcccaaguuugaugaaau

SEQ ID NO: 1693393 - RNA, 19 nt, Homo sapiens
  misc_RNA (1)...(19): siRNA sense strand
acgcagagauuuccuaggu

SEQ ID NO: 1693394 - RNA, 19 nt, Homo sapiens
  misc_RNA (1)...(19): siRNA sense strand
ugaauggaguguccgacuu

SEQ ID NO: 1693395 - RNA, 19 nt, Homo sapiens
  misc_RNA (1)...(19): siRNA sense strand
gugcaaggcaggauaugaa

SEQ ID NO: 1693396 - RNA, 19 nt, Homo sapiens
  misc_RNA (1)...(19): siRNA sense strand
ggaaagacgugucauauua

SEQ ID NO: 1693397 - RNA, 19 nt, Homo sapiens
  misc_RNA (1)...(19): siRNA sense strand
gagaauggcucuuuagaua

SEQ ID NO: 1693398 - RNA, 19 nt, Homo sapiens
  misc_RNA (1)...(19): siRNA sense strand
gaacauagcccacuaggau

SEQ ID NO: 1693399 - RNA, 19 nt, Homo sapiens
  misc_RNA (1)...(19): siRNA sense strand
gaacagccuucaagaaaug

SEQ ID NO: 1693400 - RNA, 19 nt, Homo sapiens
  misc_RNA (1)...(19): siRNA sense strand
gcaacgaagugaauuuauu

SEQ ID NO: 1693401 - RNA, 19 nt, Homo sapiens
  misc_RNA (1)...(19): siRNA sense strand
gagaccagcuacacgauua

SEQ ID NO: 1693402 - RNA, 19 nt, Homo sapiens
  misc_RNA (1)...(19): siRNA sense strand
gcaaagugauggaacagaa

SEQ ID NO: 1693403 - RNA, 19 nt, Homo sapiens
  misc_RNA (1)...(19): siRNA sense strand
gaugaaagcuuuacagaac

SEQ ID NO: 1693404 - RNA, 19 nt, Homo sapiens
  misc_RNA (1)...(19): siRNA sense strand
ggaaugccaucucaaaugu

SEQ ID NO: 1693405 - RNA, 19 nt, Homo sapiens
  misc_RNA (1)...(19): siRNA sense strand
gaaggaaagacgugucaua

SEQ ID NO: 1693406 - RNA, 19 nt, Homo sapiens
  misc_RNA (1)...(19): siRNA sense strand
guaugugucuguaaaugua

SEQ ID NO: 1693407 - RNA, 19 nt, Homo sapiens
  misc_RNA (1)...(19): siRNA sense strand
gcccaaguuugaugaaaua

SEQ ID NO: 1693408 - RNA, 19 nt, Homo sapiens
  misc_RNA (1)...(19): siRNA sense strand
gaauggcucuuuagauaca

SEQ ID NO: 1693409 - RNA, 19 nt, Homo sapiens
  misc_RNA (1)...(19): siRNA sense strand
ccagaaacaucuuaaucaa

SEQ ID NO: 1693410 - RNA, 19 nt, Homo sapiens
  misc_RNA (1)...(19): siRNA sense strand
caaucaagcuguccacgaa

SEQ ID NO: 1693411 - RNA, 19 nt, Homo sapiens
  misc_RNA (1)...(19): siRNA sense strand
caucauguaucaccauuga

SEQ ID NO: 1693412 - RNA, 19 nt, Homo sapiens
  misc_RNA (1)...(19): siRNA sense strand
gaaguaccuuucugacaug

SEQ ID NO: 1693413 - RNA, 19 nt, Homo sapiens
  misc_RNA (1)...(19): siRNA sense strand
ggagaaacaucaaggaaaa

SEQ ID NO: 1693414 - RNA, 19 nt, Homo sapiens
  misc_RNA (1)...(19): siRNA sense strand
ggcaggauaugaagagaaa

SEQ ID NO: 1693415 - RNA, 19 nt, Homo sapiens
  misc_RNA (1)...(19): siRNA sense strand
cgaauuugcuaaggagaua

SEQ ID NO: 1693416 - RNA, 19 nt, Homo sapiens
  misc_RNA (1)...(19): siRNA sense strand
aaacaccucugucaugaug

SEQ ID NO: 1693417 - RNA, 19 nt, Homo sapiens
  misc_RNA (1)...(19): siRNA sense strand
gaaagacgugucauauuau

SEQ ID NO: 1693418 - RNA, 19 nt, Homo sapiens
  misc_RNA (1)...(19): siRNA sense strand
ggaagagauuggugaagug

SEQ ID NO: 1693419 - RNA, 19 nt, Homo sapiens
  misc_RNA (1)...(19): siRNA sense strand
uggacaagcugauacguaa

SEQ ID NO: 1693420 - RNA, 19 nt, Homo sapiens
  misc_RNA (1)...(19): siRNA sense strand
ggagauagaagcaucaugu

SEQ ID NO: 1693421 - RNA, 19 nt, Homo sapiens
  misc_RNA (1)...(19): siRNA sense strand
gcauugcucugguuucugu

SEQ ID NO: 1693422 - RNA, 19 nt, Homo sapiens
  misc_RNA (1)...(19): siRNA sense strand
ggaaugaaguaccuuucug

SEQ ID NO: 1693423 - RNA, 19 nt, Homo sapiens
  misc_RNA (1)...(19): siRNA sense strand
ugugggaaguugugucuua

SEQ ID NO: 1693424 - RNA, 19 nt, Homo sapiens
  misc_RNA (1)...(19): siRNA sense strand
aaugccaucucaaauguua

SEQ ID NO: 1693425 - RNA, 19 nt, Homo sapiens
  misc_RNA (1)...(19): siRNA sense strand
ugaagacgcugguuaaugc

SEQ ID NO: 1693426 - RNA, 19 nt, Homo sapiens
  misc_RNA (1)...(19): siRNA sense strand
ugaaguaccuuucugacau

SEQ ID NO: 1693427 - RNA, 19 nt, Homo sapiens
  misc_RNA (1)...(19): siRNA sense strand
caacgaagugaauuuauug

SEQ ID NO: 1693428 - RNA, 19 nt, Homo sapiens
  misc_RNA (1)...(19): siRNA sense strand
cagaauaacuggcuuuuga

SEQ ID NO: 1693429 - RNA, 19 nt, Homo sapiens
  misc_RNA (1)...(19): siRNA sense strand
gaaaauggauacaguucaa

SEQ ID NO: 1693430 - RNA, 19 nt, Homo sapiens
  misc_RNA (1)...(19): siRNA sense strand
gaaauagcaggcccaaguu

SEQ ID NO: 1693431 - RNA, 19 nt, Homo sapiens
  misc_RNA (1)...(19): siRNA sense strand
gauuaaagcgguagaggaa

SEQ ID NO: 1693432 - RNA, 19 nt, Homo sapiens
  misc_RNA (1)...(19): siRNA sense strand
guuuaugucuuccaaauuc

SEQ ID NO: 1693433 - RNA, 19 nt, Homo sapiens
  misc_RNA (1)...(19): siRNA sense strand
gaaugaaguaccuuucuga

SEQ ID NO: 1693434 - RNA, 19 nt, Homo sapiens
  misc_RNA (1)...(19): siRNA sense strand
uguaggaccucuaagcaaa

SEQ ID NO: 1693435 - RNA, 19 nt, Homo sapiens
  misc_RNA (1)...(19): siRNA sense strand
cagaguauauggagaaugg

SEQ ID NO: 1693436 - RNA, 19 nt, Homo sapiens
  misc_RNA (1)...(19): siRNA sense strand
gggaagagauuggugaagu

SEQ ID NO: 1693437 - RNA, 19 nt, Homo sapiens
  misc_RNA (1)...(19): siRNA sense strand
ggcaguaugugucuguaaa

SEQ ID NO: 1693438 - RNA, 19 nt, Homo sapiens
  misc_RNA (1)...(19): siRNA sense strand
gaacagaaucagaauaacu

SEQ ID NO: 1693439 - RNA, 19 nt, Homo sapiens
  misc_RNA (1)...(19): siRNA sense strand
caaguuugaugaaauaguc

SEQ ID NO: 1693440 - RNA, 19 nt, Homo sapiens
  misc_RNA (1)...(19): siRNA sense strand
cgaagugaauuuauuggau

SEQ ID NO: 1693441 - RNA, 19 nt, Homo sapiens
  misc_RNA (1)...(19): siRNA sense strand
ucacacaaacuauaccuuu

SEQ ID NO: 1693442 - RNA, 19 nt, Homo sapiens
  misc_RNA (1)...(19): siRNA sense strand
ugucuggaguuauggaaua

SEQ ID NO: 1693443 - RNA, 19 nt, Homo sapiens
  misc_RNA (1)...(19): siRNA sense strand
uauggagaauggcucuuua

SEQ ID NO: 1693444 - RNA, 19 nt, Homo sapiens
  misc_RNA (1)...(19): siRNA sense strand
ccaauggaaucauccuaga

SEQ ID NO: 1693445 - RNA, 19 nt, Homo sapiens
  misc_RNA (1)...(19): siRNA sense strand
cgaaauagcaggcccaagu

SEQ ID NO: 1693446 - RNA, 19 nt, Homo sapiens
  misc_RNA (1)...(19): siRNA sense strand
acaguaaccuugugugcaa

SEQ ID NO: 1693447 - RNA, 19 nt, Homo sapiens
  misc_RNA (1)...(19): siRNA sense strand
ugagucagaugaucagaau

SEQ ID NO: 1693448 - RNA, 19 nt, Homo sapiens
  misc_RNA (1)...(19): siRNA sense strand
ggagaugaccaaucaagau

SEQ ID NO: 1693449 - RNA, 19 nt, Homo sapiens
  misc_RNA (1)...(19): siRNA sense strand
gagcugauucuucccaauu

SEQ ID NO: 1693450 - RNA, 19 nt, Homo sapiens
  misc_RNA (1)...(19): siRNA sense strand
uaccaaguaugcaaaguga

SEQ ID NO: 1693451 - RNA, 19 nt, Homo sapiens
  misc_RNA (1)...(19): siRNA sense strand
agaagaagaucaugaacag

SEQ ID NO: 1693452 - RNA, 19 nt, Homo sapiens
  misc_RNA (1)...(19): siRNA sense strand
ugaauuuggugaaguuugu

SEQ ID NO: 1693453 - RNA, 19 nt, Homo sapiens
  misc_RNA (1)...(19): siRNA sense strand
gugcagaccuggguucuuc

SEQ ID NO: 1693454 - RNA, 19 nt, Homo sapiens
  misc_RNA (1)...(19): siRNA sense strand
gggagaaacaucaaggaaa

SEQ ID NO: 1693455 - RNA, 19 nt, Homo sapiens
  misc_RNA (1)...(19): siRNA sense strand
gugaauggcuagaggcaau

SEQ ID NO: 1693456 - RNA, 19 nt, Homo sapiens
  misc_RNA (1)...(19): siRNA sense strand
gaugaaauagucaacaugu

SEQ ID NO: 1693457 - RNA, 19 nt, Homo sapiens
  misc_RNA (1)...(19): siRNA sense strand
caucauccauuuagaaggu

SEQ ID NO: 1693458 - RNA, 19 nt, Homo sapiens
  misc_RNA (1)...(19): siRNA sense strand
gagauagaagcaucaugua

SEQ ID NO: 1693459 - RNA, 19 nt, Homo sapiens
  misc_RNA (1)...(19): siRNA sense strand
gaccugggauggauugcuu

SEQ ID NO: 1693460 - RNA, 19 nt, Homo sapiens
  misc_RNA (1)...(19): siRNA sense strand
cagcaacgaagugaauuua

SEQ ID NO: 1693461 - RNA, 19 nt, Homo sapiens
  misc_RNA (1)...(19): siRNA sense strand
uggaacagaaucagaauaa

SEQ ID NO: 1693462 - RNA, 19 nt, Homo sapiens
  misc_RNA (1)...(19): siRNA sense strand
cugcagaguaucuaauuua

SEQ ID NO: 1693463 - RNA, 19 nt, Homo sapiens
  misc_RNA (1)...(19): siRNA sense strand
gagaauuaccuguggcuau

SEQ ID NO: 1693464 - RNA, 19 nt, Homo sapiens
  misc_RNA (1)...(19): siRNA sense strand
gaucuuggugaccguguua

SEQ ID NO: 1693465 - RNA, 19 nt, Homo sapiens
  misc_RNA (1)...(19): siRNA sense strand
ggagaauggcucuuuagau

SEQ ID NO: 1693466 - RNA, 19 nt, Homo sapiens
  misc_RNA (1)...(19): siRNA sense strand
uauuggagcaggugaauuu

SEQ ID NO: 1693467 - RNA, 19 nt, Homo sapiens
  misc_RNA (1)...(19): siRNA sense strand
guaaauguaaccacaaauc

SEQ ID NO: 1693468 - RNA, 19 nt, Homo sapiens
  misc_RNA (1)...(19): siRNA sense strand
gaauggaguguccgacuug

SEQ ID NO: 1693469 - RNA, 19 nt, Homo sapiens
  misc_RNA (1)...(19): siRNA sense strand
gaaaagcaacgcagagauu

SEQ ID NO: 1693470 - RNA, 19 nt, Homo sapiens
  misc_RNA (1)...(19): siRNA sense strand
gaugaccaaucaagaugug

SEQ ID NO: 1693471 - RNA, 19 nt, Homo sapiens
  misc_RNA (1)...(19): siRNA sense strand
gagaugaccaaucaagaug

SEQ ID NO: 1693472 - RNA, 19 nt, Homo sapiens
  misc_RNA (1)...(19): siRNA sense strand
gccagaaacaucuuaauca

SEQ ID NO: 1693473 - RNA, 19 nt, Homo sapiens
  misc_RNA (1)...(19): siRNA sense strand
ugaaagcuuuacagaacuu

SEQ ID NO: 1693474 - RNA, 19 nt, Homo sapiens
  misc_RNA (1)...(19): siRNA sense strand
gcugcucucuaucaguuaa

SEQ ID NO: 1693475 - RNA, 19 nt, Homo sapiens
  misc_RNA (1)...(19): siRNA sense strand
gggaaguugugucuuaugg

SEQ ID NO: 1693476 - RNA, 19 nt, Homo sapiens
  misc_RNA (1)...(19): siRNA sense strand
ugacagaguauauggagaa

SEQ ID NO: 1693477 - RNA, 19 nt, Homo sapiens
  misc_RNA (1)...(19): siRNA sense strand
auagaagcaucauguauca

SEQ ID NO: 1693478 - RNA, 19 nt, Homo sapiens
  misc_RNA (1)...(19): siRNA sense strand
uauggugucuucagucgaa

SEQ ID NO: 1693479 - RNA, 19 nt, Homo sapiens
  misc_RNA (1)...(19): siRNA sense strand
gcagcuccaucuccaguca

SEQ ID NO: 1693480 - RNA, 19 nt, Homo sapiens
  misc_RNA (1)...(19): siRNA sense strand
uaccauugcugccgaugaa

SEQ ID NO: 1693481 - RNA, 19 nt, Homo sapiens
  misc_RNA (1)...(19): siRNA sense strand
gcaggaaugaaguaccuuu

SEQ ID NO: 1693482 - RNA, 19 nt, Homo sapiens
  misc_RNA (1)...(19): siRNA sense strand
ggaaucauccuagaguaug

SEQ ID NO: 1693483 - RNA, 19 nt, Homo sapiens
  misc_RNA (1)...(19): siRNA sense strand
ugacacugguggaaggaaa

SEQ ID NO: 1693484 - RNA, 19 nt, Homo sapiens
  misc_RNA (1)...(19): siRNA sense strand
auacagaggucagagaugu

SEQ ID NO: 1693485 - RNA, 19 nt, Homo sapiens
  misc_RNA (1)...(19): siRNA sense strand
gaucagaaugggagaaaca

SEQ ID NO: 1693486 - RNA, 19 nt, Homo sapiens
  misc_RNA (1)...(19): siRNA sense strand
ggcagaacauagcccacua

SEQ ID NO: 1693487 - RNA, 19 nt, Homo sapiens
  misc_RNA (1)...(19): siRNA sense strand
gaauacagaggucagagau

SEQ ID NO: 1693488 - RNA, 19 nt, Homo sapiens
  misc_RNA (1)...(19): siRNA sense strand
caguuuaugucuuccaaau

SEQ ID NO: 1693489 - RNA, 19 nt, Homo sapiens
  misc_RNA (1)...(19): siRNA sense strand
gcugauacguaacccaagu

SEQ ID NO: 1693490 - RNA, 19 nt, Homo sapiens
  misc_RNA (1)...(19): siRNA sense strand
caaagccagauuccuguaa

SEQ ID NO: 1693491 - RNA, 19 nt, Homo sapiens
  misc_RNA (1)...(19): siRNA sense strand
uguauuacuuugagucaga

SEQ ID NO: 1693492 - RNA, 19 nt, Homo sapiens
  misc_RNA (1)...(19): siRNA sense strand
ggcccaaguuugaugaaau

SEQ ID NO: 1693493 - RNA, 19 nt, Homo sapiens
  misc_RNA (1)...(19): siRNA sense strand
acgcagagauuuccuaggu

SEQ ID NO: 1693494 - RNA, 19 nt, Homo sapiens
  misc_RNA (1)...(19): siRNA sense strand
ugaauggaguguccgacuu

SEQ ID NO: 1693495 - RNA, 19 nt, Homo sapiens
  misc_RNA (1)...(19): siRNA sense strand
gugcaaggcaggauaugaa

SEQ ID NO: 1693496 - RNA, 19 nt, Homo sapiens
  misc_RNA (1)...(19): siRNA sense strand
gauauucacuuucaugaca

SEQ ID NO: 1693497 - RNA, 19 nt, Homo sapiens
  misc_RNA (1)...(19): siRNA sense strand
cgaagcagguccaaagaaa

SEQ ID NO: 1693498 - RNA, 19 nt, Homo sapiens
  misc_RNA (1)...(19): siRNA sense strand
caaagaaaguacuggagaa

SEQ ID NO: 1693499 - RNA, 19 nt, Homo sapiens
  misc_RNA (1)...(19): siRNA sense strand
agaaaguacuggagaaauu

SEQ ID NO: 1693500 - RNA, 19 nt, Homo sapiens
  misc_RNA (1)...(19): siRNA sense strand
gagcaaagccauucgcuau

SEQ ID NO: 1693501 - RNA, 19 nt, Homo sapiens
  misc_RNA (1)...(19): siRNA sense strand
gcaaagccauucgcuauac

SEQ ID NO: 1693502 - RNA, 19 nt, Homo sapiens
  misc_RNA (1)...(19): siRNA sense strand
gaaaguacuggagaaauug

SEQ ID NO: 1693503 - RNA, 19 nt, Homo sapiens
  misc_RNA (1)...(19): siRNA sense strand
gcuauaucguggagaauga

SEQ ID NO: 1693504 - RNA, 19 nt, Homo sapiens
  misc_RNA (1)...(19): siRNA sense strand
cagaggcccugauaauguu

SEQ ID NO: 1693505 - RNA, 19 nt, Homo sapiens
  misc_RNA (1)...(19): siRNA sense strand
ccucacagguuaugaaaca

SEQ ID NO: 1693506 - RNA, 19 nt, Homo sapiens
  misc_RNA (1)...(19): siRNA sense strand
caacguagccuggcagaga

SEQ ID NO: 1693507 - RNA, 19 nt, Homo sapiens
  misc_RNA (1)...(19): siRNA sense strand
cgaguucuguuuccucuug

SEQ ID NO: 1693508 - RNA, 19 nt, Homo sapiens
  misc_RNA (1)...(19): siRNA sense strand
gaaauugucagaaacuuac

SEQ ID NO: 1693509 - RNA, 19 nt, Homo sapiens
  misc_RNA (1)...(19): siRNA sense strand
ucacaacacugcucuucug

SEQ ID NO: 1693510 - RNA, 19 nt, Homo sapiens
  misc_RNA (1)...(19): siRNA sense strand
uaccuggccuuguccauuu

SEQ ID NO: 1693511 - RNA, 19 nt, Homo sapiens
  misc_RNA (1)...(19): siRNA sense strand
gaaagacagcgucacaaca

SEQ ID NO: 1693512 - RNA, 19 nt, Homo sapiens
  misc_RNA (1)...(19): siRNA sense strand
gagaaauugucagaaacuu

SEQ ID NO: 1693513 - RNA, 19 nt, Homo sapiens
  misc_RNA (1)...(19): siRNA sense strand
aaugugagcuggaacuaug

SEQ ID NO: 1693514 - RNA, 19 nt, Homo sapiens
  misc_RNA (1)...(19): siRNA sense strand
cuggagaaauugucagaaa

SEQ ID NO: 1693515 - RNA, 19 nt, Homo sapiens
  misc_RNA (1)...(19): siRNA sense strand
uagaugacaugggcuauau

SEQ ID NO: 1693516 - RNA, 19 nt, Homo sapiens
  misc_RNA (1)...(19): siRNA sense strand
cugcaacgcuucucaguag

SEQ ID NO: 1693517 - RNA, 19 nt, Homo sapiens
  misc_RNA (1)...(19): siRNA sense strand
gaacagauuauggccuuug

SEQ ID NO: 1693518 - RNA, 19 nt, Homo sapiens
  misc_RNA (1)...(19): siRNA sense strand
ccacucaaagaacagauua

SEQ ID NO: 1693519 - RNA, 19 nt, Homo sapiens
  misc_RNA (1)...(19): siRNA sense strand
gcccugauaauguuugaua

SEQ ID NO: 1693520 - RNA, 19 nt, Homo sapiens
  misc_RNA (1)...(19): siRNA sense strand
gcaccuuccagaccaaauu

SEQ ID NO: 1693521 - RNA, 19 nt, Homo sapiens
  misc_RNA (1)...(19): siRNA sense strand
guugauaggugcagauggu

SEQ ID NO: 1693522 - RNA, 19 nt, Homo sapiens
  misc_RNA (1)...(19): siRNA sense strand
gcccuuggguucauauuac

SEQ ID NO: 1693523 - RNA, 19 nt, Homo sapiens
  misc_RNA (1)...(19): siRNA sense strand
caacagggucagcuccauu

SEQ ID NO: 1693524 - RNA, 19 nt, Homo sapiens
  misc_RNA (1)...(19): siRNA sense strand
ugaccagucugcuguugug

SEQ ID NO: 1693525 - RNA, 19 nt, Homo sapiens
  misc_RNA (1)...(19): siRNA sense strand
gcucgaagcagguccaaag

SEQ ID NO: 1693526 - RNA, 19 nt, Homo sapiens
  misc_RNA (1)...(19): siRNA sense strand
cagaccaaauuguugauag

SEQ ID NO: 1693527 - RNA, 19 nt, Homo sapiens
  misc_RNA (1)...(19): siRNA sense strand
ggagaaauugucagaaacu

SEQ ID NO: 1693528 - RNA, 19 nt, Homo sapiens
  misc_RNA (1)...(19): siRNA sense strand
ucagaaacuuacagcaaca

SEQ ID NO: 1693529 - RNA, 19 nt, Homo sapiens
  misc_RNA (1)...(19): siRNA sense strand
cauauuacccuaggugaug

SEQ ID NO: 1693530 - RNA, 19 nt, Homo sapiens
  misc_RNA (1)...(19): siRNA sense strand
uggcuacucugcauuuauc

SEQ ID NO: 1693531 - RNA, 19 nt, Homo sapiens
  misc_RNA (1)...(19): siRNA sense strand
caccuugaguuccuugguu

SEQ ID NO: 1693532 - RNA, 19 nt, Homo sapiens
  misc_RNA (1)...(19): siRNA sense strand
ggccacaaaugcagugucu

SEQ ID NO: 1693533 - RNA, 19 nt, Homo sapiens
  misc_RNA (1)...(19): siRNA sense strand
caucaugcaugcucucacu

SEQ ID NO: 1693534 - RNA, 19 nt, Homo sapiens
  misc_RNA (1)...(19): siRNA sense strand
aaagaaaguacuggagaaa

SEQ ID NO: 1693535 - RNA, 19 nt, Homo sapiens
  misc_RNA (1)...(19): siRNA sense strand
gggacaugcugcugaguac

SEQ ID NO: 1693536 - RNA, 19 nt, Homo sapiens
  misc_RNA (1)...(19): siRNA sense strand
gaaugugagcuggaacuau

SEQ ID NO: 1693537 - RNA, 19 nt, Homo sapiens
  misc_RNA (1)...(19): siRNA sense strand
gcaacagggucagcuccau

SEQ ID NO: 1693538 - RNA, 19 nt, Homo sapiens
  misc_RNA (1)...(19): siRNA sense strand
gagugacgguucucuacag

SEQ ID NO: 1693539 - RNA, 19 nt, Homo sapiens
  misc_RNA (1)...(19): siRNA sense strand
guacggcagccuucaaugg

SEQ ID NO: 1693540 - RNA, 19 nt, Homo sapiens
  misc_RNA (1)...(19): siRNA sense strand
gcagcaccuuccagaccaa

SEQ ID NO: 1693541 - RNA, 19 nt, Homo sapiens
  misc_RNA (1)...(19): siRNA sense strand
gaagcagguccaaagaaag

SEQ ID NO: 1693542 - RNA, 19 nt, Homo sapiens
  misc_RNA (1)...(19): siRNA sense strand
cacagguuaugaaacagaa

SEQ ID NO: 1693543 - RNA, 19 nt, Homo sapiens
  misc_RNA (1)...(19): siRNA sense strand
ugucagaaacuuacagcaa

SEQ ID NO: 1693544 - RNA, 19 nt, Homo sapiens
  misc_RNA (1)...(19): siRNA sense strand
caaaagccgaguucuguuu

SEQ ID NO: 1693545 - RNA, 19 nt, Homo sapiens
  misc_RNA (1)...(19): siRNA sense strand
ucaugcaugcucucacuaa

SEQ ID NO: 1693546 - RNA, 19 nt, Homo sapiens
  misc_RNA (1)...(19): siRNA sense strand
gcaguuggaggcugugucu

SEQ ID NO: 1693547 - RNA, 19 nt, Homo sapiens
  misc_RNA (1)...(19): siRNA sense strand
ugucuccacucaaagaaca

SEQ ID NO: 1693548 - RNA, 19 nt, Homo sapiens
  misc_RNA (1)...(19): siRNA sense strand
ucacagguuaugaaacaga

SEQ ID NO: 1693549 - RNA, 19 nt, Homo sapiens
  misc_RNA (1)...(19): siRNA sense strand
ccucuuggguugggacaug

SEQ ID NO: 1693550 - RNA, 19 nt, Homo sapiens
  misc_RNA (1)...(19): siRNA sense strand
ucagacaccuugaguuccu

SEQ ID NO: 1693551 - RNA, 19 nt, Homo sapiens
  misc_RNA (1)...(19): siRNA sense strand
uaucagaggccacagaaaa

SEQ ID NO: 1693552 - RNA, 19 nt, Homo sapiens
  misc_RNA (1)...(19): siRNA sense strand
ggaguacggcaggcuguug

SEQ ID NO: 1693553 - RNA, 19 nt, Homo sapiens
  misc_RNA (1)...(19): siRNA sense strand
ccagaccaaauuguugaua

SEQ ID NO: 1693554 - RNA, 19 nt, Homo sapiens
  misc_RNA (1)...(19): siRNA sense strand
cagauuauggccuuugcaa

SEQ ID NO: 1693555 - RNA, 19 nt, Homo sapiens
  misc_RNA (1)...(19): siRNA sense strand
acagaaagacagcgucaca

SEQ ID NO: 1693556 - RNA, 19 nt, Homo sapiens
  misc_RNA (1)...(19): siRNA sense strand
gcugcuacagacuuacuaa

SEQ ID NO: 1693557 - RNA, 19 nt, Homo sapiens
  misc_RNA (1)...(19): siRNA sense strand
ugggcuauaucguggagaa

SEQ ID NO: 1693558 - RNA, 19 nt, Homo sapiens
  misc_RNA (1)...(19): siRNA sense strand
guuaugaaacagaaagaca

SEQ ID NO: 1693559 - RNA, 19 nt, Homo sapiens
  misc_RNA (1)...(19): siRNA sense strand
gugccaugcugcaguaugc

SEQ ID NO: 1693560 - RNA, 19 nt, Homo sapiens
  misc_RNA (1)...(19): siRNA sense strand
cuggugccaugcugcagua

SEQ ID NO: 1693561 - RNA, 19 nt, Homo sapiens
  misc_RNA (1)...(19): siRNA sense strand
uguggcuacucugcauuua

SEQ ID NO: 1693562 - RNA, 19 nt, Homo sapiens
  misc_RNA (1)...(19): siRNA sense strand
cuacaggagcaaagccauu

SEQ ID NO: 1693563 - RNA, 19 nt, Homo sapiens
  misc_RNA (1)...(19): siRNA sense strand
agaccaaauuguugauagg

SEQ ID NO: 1693564 - RNA, 19 nt, Homo sapiens
  misc_RNA (1)...(19): siRNA sense strand
ugaacaugcagcagagcua

SEQ ID NO: 1693565 - RNA, 19 nt, Homo sapiens
  misc_RNA (1)...(19): siRNA sense strand
uuagaugacaugggcuaua

SEQ ID NO: 1693566 - RNA, 19 nt, Homo sapiens
  misc_RNA (1)...(19): siRNA sense strand
ggccuuguccauuuccuau

SEQ ID NO: 1693567 - RNA, 19 nt, Homo sapiens
  misc_RNA (1)...(19): siRNA sense strand
aagcagguccaaagaaagu

SEQ ID NO: 1693568 - RNA, 19 nt, Homo sapiens
  misc_RNA (1)...(19): siRNA sense strand
cugauaauguuugauaagg

SEQ ID NO: 1693569 - RNA, 19 nt, Homo sapiens
  misc_RNA (1)...(19): siRNA sense strand
gaugacaugggcuauaucg

SEQ ID NO: 1693570 - RNA, 19 nt, Homo sapiens
  misc_RNA (1)...(19): siRNA sense strand
uaugaccagucugcuguug

SEQ ID NO: 1693571 - RNA, 19 nt, Homo sapiens
  misc_RNA (1)...(19): siRNA sense strand
ggauaauuuagaugacaug

SEQ ID NO: 1693572 - RNA, 19 nt, Homo sapiens
  misc_RNA (1)...(19): siRNA sense strand
uggagaaauugucagaaac

SEQ ID NO: 1693573 - RNA, 19 nt, Homo sapiens
  misc_RNA (1)...(19): siRNA sense strand
cccugauaauguuugauaa

SEQ ID NO: 1693574 - RNA, 19 nt, Homo sapiens
  misc_RNA (1)...(19): siRNA sense strand
ugggacaugcugcugagua

SEQ ID NO: 1693575 - RNA, 19 nt, Homo sapiens
  misc_RNA (1)...(19): siRNA sense strand
aaagacagcgucacaacac

SEQ ID NO: 1693576 - RNA, 19 nt, Homo sapiens
  misc_RNA (1)...(19): siRNA sense strand
gauauucacuuucaugaca

SEQ ID NO: 1693577 - RNA, 19 nt, Homo sapiens
  misc_RNA (1)...(19): siRNA sense strand
cgaagcagguccaaagaaa

SEQ ID NO: 1693578 - RNA, 19 nt, Homo sapiens
  misc_RNA (1)...(19): siRNA sense strand
caaagaaaguacuggagaa

SEQ ID NO: 1693579 - RNA, 19 nt, Homo sapiens
  misc_RNA (1)...(19): siRNA sense strand
agaaaguacuggagaaauu

SEQ ID NO: 1693580 - RNA, 19 nt, Homo sapiens
  misc_RNA (1)...(19): siRNA sense strand
gagcaaagccauucgcuau

SEQ ID NO: 1693581 - RNA, 19 nt, Homo sapiens
  misc_RNA (1)...(19): siRNA sense strand
gcaaagccauucgcuauac

SEQ ID NO: 1693582 - RNA, 19 nt, Homo sapiens
  misc_RNA (1)...(19): siRNA sense strand
gaaaguacuggagaaauug

SEQ ID NO: 1693583 - RNA, 19 nt, Homo sapiens
  misc_RNA (1)...(19): siRNA sense strand
gcuauaucguggagaauga

SEQ ID NO: 1693584 - RNA, 19 nt, Homo sapiens
  misc_RNA (1)...(19): siRNA sense strand
cagaggcccugauaauguu

SEQ ID NO: 1693585 - RNA, 19 nt, Homo sapiens
  misc_RNA (1)...(19): siRNA sense strand
ccucacagguuaugaaaca

SEQ ID NO: 1693586 - RNA, 19 nt, Homo sapiens
  misc_RNA (1)...(19): siRNA sense strand
caacguagccuggcagaga

SEQ ID NO: 1693587 - RNA, 19 nt, Homo sapiens
  misc_RNA (1)...(19): siRNA sense strand
cgaguucuguuuccucuug

SEQ ID NO: 1693588 - RNA, 19 nt, Homo sapiens
  misc_RNA (1)...(19): siRNA sense strand
gaaauugucagaaacuuac

SEQ ID NO: 1693589 - RNA, 19 nt, Homo sapiens
  misc_RNA (1)...(19): siRNA sense strand
ucacaacacugcucuucug

SEQ ID NO: 1693590 - RNA, 19 nt, Homo sapiens
  misc_RNA (1)...(19): siRNA sense strand
uaccuggccuuguccauuu

SEQ ID NO: 1693591 - RNA, 19 nt, Homo sapiens
  misc_RNA (1)...(19): siRNA sense strand
gaaagacagcgucacaaca

SEQ ID NO: 1693592 - RNA, 19 nt, Homo sapiens
  misc_RNA (1)...(19): siRNA sense strand
gagaaauugucagaaacuu

SEQ ID NO: 1693593 - RNA, 19 nt, Homo sapiens
  misc_RNA (1)...(19): siRNA sense strand
aaugugagcuggaacuaug

SEQ ID NO: 1693594 - RNA, 19 nt, Homo sapiens
  misc_RNA (1)...(19): siRNA sense strand
cuggagaaauugucagaaa

SEQ ID NO: 1693595 - RNA, 19 nt, Homo sapiens
  misc_RNA (1)...(19): siRNA sense strand
uagaugacaugggcuauau

SEQ ID NO: 1693596 - RNA, 19 nt, Homo sapiens
  misc_RNA (1)...(19): siRNA sense strand
cugcaacgcuucucaguag

SEQ ID NO: 1693597 - RNA, 19 nt, Homo sapiens
  misc_RNA (1)...(19): siRNA sense strand
gaacagauuauggccuuug

SEQ ID NO: 1693598 - RNA, 19 nt, Homo sapiens
  misc_RNA (1)...(19): siRNA sense strand
ccacucaaagaacagauua

SEQ ID NO: 1693599 - RNA, 19 nt, Homo sapiens
  misc_RNA (1)...(19): siRNA sense strand
gcccugauaauguuugaua

SEQ ID NO: 1693600 - RNA, 19 nt, Homo sapiens
  misc_RNA (1)...(19): siRNA sense strand
gcaccuuccagaccaaauu

SEQ ID NO: 1693601 - RNA, 19 nt, Homo sapiens
  misc_RNA (1)...(19): siRNA sense strand
guugauaggugcagauggu

SEQ ID NO: 1693602 - RNA, 19 nt, Homo sapiens
  misc_RNA (1)...(19): siRNA sense strand
gcccuuggguucauauuac

SEQ ID NO: 1693603 - RNA, 19 nt, Homo sapiens
  misc_RNA (1)...(19): siRNA sense strand
caacagggucagcuccauu

SEQ ID NO: 1693604 - RNA, 19 nt, Homo sapiens
  misc_RNA (1)...(19): siRNA sense strand
ugaccagucugcuguugug

SEQ ID NO: 1693605 - RNA, 19 nt, Homo sapiens
  misc_RNA (1)...(19): siRNA sense strand
cagaccaaauuguugauag

SEQ ID NO: 1693606 - RNA, 19 nt, Homo sapiens
  misc_RNA (1)...(19): siRNA sense strand
gcucgaagcagguccaaag

SEQ ID NO: 1693607 - RNA, 19 nt, Homo sapiens
  misc_RNA (1)...(19): siRNA sense strand
ggagaaauugucagaaacu

SEQ ID NO: 1693608 - RNA, 19 nt, Homo sapiens
  misc_RNA (1)...(19): siRNA sense strand
ucagaaacuuacagcaaca

SEQ ID NO: 1693609 - RNA, 19 nt, Homo sapiens
  misc_RNA (1)...(19): siRNA sense strand
cauauuacccuaggugaug

SEQ ID NO: 1693610 - RNA, 19 nt, Homo sapiens
  misc_RNA (1)...(19): siRNA sense strand
uggcuacucugcauuuauc

SEQ ID NO: 1693611 - RNA, 19 nt, Homo sapiens
  misc_RNA (1)...(19): siRNA sense strand
caccuugaguuccuugguu

SEQ ID NO: 1693612 - RNA, 19 nt, Homo sapiens
  misc_RNA (1)...(19): siRNA sense strand
ggccacaaaugcagugucu

SEQ ID NO: 1693613 - RNA, 19 nt, Homo sapiens
  misc_RNA (1)...(19): siRNA sense strand
caucaugcaugcucucacu

SEQ ID NO: 1693614 - RNA, 19 nt, Homo sapiens
  misc_RNA (1)...(19): siRNA sense strand
aaagaaaguacuggagaaa

SEQ ID NO: 1693615 - RNA, 19 nt, Homo sapiens
  misc_RNA (1)...(19): siRNA sense strand
gggacaugcugcugaguac

SEQ ID NO: 1693616 - RNA, 19 nt, Homo sapiens
  misc_RNA (1)...(19): siRNA sense strand
gaaugugagcuggaacuau

SEQ ID NO: 1693617 - RNA, 19 nt, Homo sapiens
  misc_RNA (1)...(19): siRNA sense strand
gcaacagggucagcuccau

SEQ ID NO: 1693618 - RNA, 19 nt, Homo sapiens
  misc_RNA (1)...(19): siRNA sense strand
gagugacgguucucuacag

SEQ ID NO: 1693619 - RNA, 19 nt, Homo sapiens
  misc_RNA (1)...(19): siRNA sense strand
guacggcagccuucaaugg

SEQ ID NO: 1693620 - RNA, 19 nt, Homo sapiens
  misc_RNA (1)...(19): siRNA sense strand
gaagcagguccaaagaaag

SEQ ID NO: 1693621 - RNA, 19 nt, Homo sapiens
  misc_RNA (1)...(19): siRNA sense strand
gcagcaccuuccagaccaa

SEQ ID NO: 1693622 - RNA, 19 nt, Homo sapiens
  misc_RNA (1)...(19): siRNA sense strand
cacagguuaugaaacagaa

SEQ ID NO: 1693623 - RNA, 19 nt, Homo sapiens
  misc_RNA (1)...(19): siRNA sense strand
caaaagccgaguucuguuu

SEQ ID NO: 1693624 - RNA, 19 nt, Homo sapiens
  misc_RNA (1)...(19): siRNA sense strand
ugucagaaacuuacagcaa

SEQ ID NO: 1693625 - RNA, 19 nt, Homo sapiens
  misc_RNA (1)...(19): siRNA sense strand
ucaugcaugcucucacuaa

SEQ ID NO: 1693626 - RNA, 19 nt, Homo sapiens
  misc_RNA (1)...(19): siRNA sense strand
gcaguuggaggcugugucu

SEQ ID NO: 1693627 - RNA, 19 nt, Homo sapiens
  misc_RNA (1)...(19): siRNA sense strand
ugucuccacucaaagaaca

SEQ ID NO: 1693628 - RNA, 19 nt, Homo sapiens
  misc_RNA (1)...(19): siRNA sense strand
ucacagguuaugaaacaga

SEQ ID NO: 1693629 - RNA, 19 nt, Homo sapiens
  misc_RNA (1)...(19): siRNA sense strand
ccucuuggguugggacaug

SEQ ID NO: 1693630 - RNA, 19 nt, Homo sapiens
  misc_RNA (1)...(19): siRNA sense strand
ucagacaccuugaguuccu

SEQ ID NO: 1693631 - RNA, 19 nt, Homo sapiens
  misc_RNA (1)...(19): siRNA sense strand
uaucagaggccacagaaaa

SEQ ID NO: 1693632 - RNA, 19 nt, Homo sapiens
  misc_RNA (1)...(19): siRNA sense strand
ggaguacggcaggcuguug

SEQ ID NO: 1693633 - RNA, 19 nt, Homo sapiens
  misc_RNA (1)...(19): siRNA sense strand
ccagaccaaauuguugaua

SEQ ID NO: 1693634 - RNA, 19 nt, Homo sapiens
  misc_RNA (1)...(19): siRNA sense strand
cagauuauggccuuugcaa

SEQ ID NO: 1693635 - RNA, 19 nt, Homo sapiens
  misc_RNA (1)...(19): siRNA sense strand
acagaaagacagcgucaca

SEQ ID NO: 1693636 - RNA, 19 nt, Homo sapiens
  misc_RNA (1)...(19): siRNA sense strand
gcugcuacagacuuacuaa

SEQ ID NO: 1693637 - RNA, 19 nt, Homo sapiens
  misc_RNA (1)...(19): siRNA sense strand
ugggcuauaucguggagaa

SEQ ID NO: 1693638 - RNA, 19 nt, Homo sapiens
  misc_RNA (1)...(19): siRNA sense strand
guuaugaaacagaaagaca

SEQ ID NO: 1693639 - RNA, 19 nt, Homo sapiens
  misc_RNA (1)...(19): siRNA sense strand
gugccaugcugcaguaugc

SEQ ID NO: 1693640 - RNA, 19 nt, Homo sapiens
  misc_RNA (1)...(19): siRNA sense strand
cuggugccaugcugcagua

SEQ ID NO: 1693641 - RNA, 19 nt, Homo sapiens
  misc_RNA (1)...(19): siRNA sense strand
uguggcuacucugcauuua

SEQ ID NO: 1693642 - RNA, 19 nt, Homo sapiens
  misc_RNA (1)...(19): siRNA sense strand
cuacaggagcaaagccauu

SEQ ID NO: 1693643 - RNA, 19 nt, Homo sapiens
  misc_RNA (1)...(19): siRNA sense strand
agaccaaauuguugauagg

SEQ ID NO: 1693644 - RNA, 19 nt, Homo sapiens
  misc_RNA (1)...(19): siRNA sense strand
uuagaugacaugggcuaua

SEQ ID NO: 1693645 - RNA, 19 nt, Homo sapiens
  misc_RNA (1)...(19): siRNA sense strand
ugaacaugcagcagagcua

SEQ ID NO: 1693646 - RNA, 19 nt, Homo sapiens
  misc_RNA (1)...(19): siRNA sense strand
aagcagguccaaagaaagu

SEQ ID NO: 1693647 - RNA, 19 nt, Homo sapiens
  misc_RNA (1)...(19): siRNA sense strand
cugauaauguuugauaagg

SEQ ID NO: 1693648 - RNA, 19 nt, Homo sapiens
  misc_RNA (1)...(19): siRNA sense strand
gaugacaugggcuauaucg

SEQ ID NO: 1693649 - RNA, 19 nt, Homo sapiens
  misc_RNA (1)...(19): siRNA sense strand
uaugaccagucugcuguug

SEQ ID NO: 1693650 - RNA, 19 nt, Homo sapiens
  misc_RNA (1)...(19): siRNA sense strand
ggccuuguccauuuccuau

SEQ ID NO: 1693651 - RNA, 19 nt, Homo sapiens
  misc_RNA (1)...(19): siRNA sense strand
uggagaaauugucagaaac

SEQ ID NO: 1693652 - RNA, 19 nt, Homo sapiens
  misc_RNA (1)...(19): siRNA sense strand
cccugauaauguuugauaa

SEQ ID NO: 1693653 - RNA, 19 nt, Homo sapiens
  misc_RNA (1)...(19): siRNA sense strand
ggauaauuuagaugacaug

SEQ ID NO: 1693654 - RNA, 19 nt, Homo sapiens
  misc_RNA (1)...(19): siRNA sense strand
ugggacaugcugcugagua

SEQ ID NO: 1693655 - RNA, 19 nt, Homo sapiens
  misc_RNA (1)...(19): siRNA sense strand
aaagacagcgucacaacac

SEQ ID NO: 1693656 - RNA, 19 nt, Homo sapiens
  misc_RNA (1)...(19): siRNA sense strand
gaacggcccucuccaguga

SEQ ID NO: 1693657 - RNA, 19 nt, Homo sapiens
  misc_RNA (1)...(19): siRNA sense strand
gaagccgccaccaccauua

SEQ ID NO: 1693658 - RNA, 19 nt, Homo sapiens
  misc_RNA (1)...(19): siRNA sense strand
uggccaagcuggagcacua

SEQ ID NO: 1693659 - RNA, 19 nt, Homo sapiens
  misc_RNA (1)...(19): siRNA sense strand
ggaagccgccaccaccauu

SEQ ID NO: 1693660 - RNA, 19 nt, Homo sapiens
  misc_RNA (1)...(19): siRNA sense strand
ggccacccauuccaacuga

SEQ ID NO: 1693661 - RNA, 19 nt, Homo sapiens
  misc_RNA (1)...(19): siRNA sense strand
ccaccaccauuaccuucug

SEQ ID NO: 1693662 - RNA, 19 nt, Homo sapiens
  misc_RNA (1)...(19): siRNA sense strand
gcuggagcacuacgacuug

SEQ ID NO: 1693663 - RNA, 19 nt, Homo sapiens
  misc_RNA (1)...(19): siRNA sense strand
caccaccauuaccuucuga

SEQ ID NO: 1693664 - RNA, 19 nt, Homo sapiens
  misc_RNA (1)...(19): siRNA sense strand
gaacggcccucuccaguga

SEQ ID NO: 1693665 - RNA, 19 nt, Homo sapiens
  misc_RNA (1)...(19): siRNA sense strand
gaagccgccaccaccauua

SEQ ID NO: 1693666 - RNA, 19 nt, Homo sapiens
  misc_RNA (1)...(19): siRNA sense strand
ggaagccgccaccaccauu

SEQ ID NO: 1693667 - RNA, 19 nt, Homo sapiens
  misc_RNA (1)...(19): siRNA sense strand
ccaccaccauuaccuucug

SEQ ID NO: 1693668 - RNA, 19 nt, Homo sapiens
  misc_RNA (1)...(19): siRNA sense strand
caccaccauuaccuucuga

SEQ ID NO: 1693669 - RNA, 19 nt, Homo sapiens
  misc_RNA (1)...(19): siRNA sense strand
gaacggcccucuccaguga

SEQ ID NO: 1693670 - RNA, 19 nt, Homo sapiens
  misc_RNA (1)...(19): siRNA sense strand
gaagccgccaccaccauua

SEQ ID NO: 1693671 - RNA, 19 nt, Homo sapiens
  misc_RNA (1)...(19): siRNA sense strand
uggccaagcuggagcacua

SEQ ID NO: 1693672 - RNA, 19 nt, Homo sapiens
  misc_RNA (1)...(19): siRNA sense strand
ggaagccgccaccaccauu

SEQ ID NO: 1693673 - RNA, 19 nt, Homo sapiens
  misc_RNA (1)...(19): siRNA sense strand
ggccacccauuccaacuga

SEQ ID NO: 1693674 - RNA, 19 nt, Homo sapiens
  misc_RNA (1)...(19): siRNA sense strand
ccaccaccauuaccuucug

SEQ ID NO: 1693675 - RNA, 19 nt, Homo sapiens
  misc_RNA (1)...(19): siRNA sense strand
gcuggagcacuacgacuug

SEQ ID NO: 1693676 - RNA, 19 nt, Homo sapiens
  misc_RNA (1)...(19): siRNA sense strand
caccaccauuaccuucuga

SEQ ID NO: 1693677 - RNA, 19 nt, Homo sapiens
  misc_RNA (1)...(19): siRNA sense strand
gaacggcccucuccaguga

SEQ ID NO: 1693678 - RNA, 19 nt, Homo sapiens
  misc_RNA (1)...(19): siRNA sense strand
gaagccgccaccaccauua

SEQ ID NO: 1693679 - RNA, 19 nt, Homo sapiens
  misc_RNA (1)...(19): siRNA sense strand
ggaagccgccaccaccauu

SEQ ID NO: 1693680 - RNA, 19 nt, Homo sapiens
  misc_RNA (1)...(19): siRNA sense strand
ccaccaccauuaccuucug

SEQ ID NO: 1693681 - RNA, 19 nt, Homo sapiens
  misc_RNA (1)...(19): siRNA sense strand
caccaccauuaccuucuga

SEQ ID NO: 1693682 - RNA, 19 nt, Homo sapiens
  misc_RNA (1)...(19): siRNA sense strand
gauauucacuuucaugaca

SEQ ID NO: 1693683 - RNA, 19 nt, Homo sapiens
  misc_RNA (1)...(19): siRNA sense strand
cgaagcagguccaaagaaa

SEQ ID NO: 1693684 - RNA, 19 nt, Homo sapiens
  misc_RNA (1)...(19): siRNA sense strand
caaagaaaguacuggagaa

SEQ ID NO: 1693685 - RNA, 19 nt, Homo sapiens
  misc_RNA (1)...(19): siRNA sense strand
agaaaguacuggagaaauu

SEQ ID NO: 1693686 - RNA, 19 nt, Homo sapiens
  misc_RNA (1)...(19): siRNA sense strand
gagcaaagccauucgcuau

SEQ ID NO: 1693687 - RNA, 19 nt, Homo sapiens
  misc_RNA (1)...(19): siRNA sense strand
gcaaagccauucgcuauac

SEQ ID NO: 1693688 - RNA, 19 nt, Homo sapiens
  misc_RNA (1)...(19): siRNA sense strand
gaaaguacuggagaaauug

SEQ ID NO: 1693689 - RNA, 19 nt, Homo sapiens
  misc_RNA (1)...(19): siRNA sense strand
gcuauaucguggagaauga

SEQ ID NO: 1693690 - RNA, 19 nt, Homo sapiens
  misc_RNA (1)...(19): siRNA sense strand
cagaggcccugauaauguu

SEQ ID NO: 1693691 - RNA, 19 nt, Homo sapiens
  misc_RNA (1)...(19): siRNA sense strand
ccucacagguuaugaaaca

SEQ ID NO: 1693692 - RNA, 19 nt, Homo sapiens
  misc_RNA (1)...(19): siRNA sense strand
caacguagccuggcagaga

SEQ ID NO: 1693693 - RNA, 19 nt, Homo sapiens
  misc_RNA (1)...(19): siRNA sense strand
cgaguucuguuuccucuug

SEQ ID NO: 1693694 - RNA, 19 nt, Homo sapiens
  misc_RNA (1)...(19): siRNA sense strand
gaaauugucagaaacuuac

SEQ ID NO: 1693695 - RNA, 19 nt, Homo sapiens
  misc_RNA (1)...(19): siRNA sense strand
ucacaacacugcucuucug

SEQ ID NO: 1693696 - RNA, 19 nt, Homo sapiens
  misc_RNA (1)...(19): siRNA sense strand
uaccuggccuuguccauuu

SEQ ID NO: 1693697 - RNA, 19 nt, Homo sapiens
  misc_RNA (1)...(19): siRNA sense strand
gaaagacagcgucacaaca

SEQ ID NO: 1693698 - RNA, 19 nt, Homo sapiens
  misc_RNA (1)...(19): siRNA sense strand
gagaaauugucagaaacuu

SEQ ID NO: 1693699 - RNA, 19 nt, Homo sapiens
  misc_RNA (1)...(19): siRNA sense strand
aaugugagcuggaacuaug

SEQ ID NO: 1693700 - RNA, 19 nt, Homo sapiens
  misc_RNA (1)...(19): siRNA sense strand
cuggagaaauugucagaaa

SEQ ID NO: 1693701 - RNA, 19 nt, Homo sapiens
  misc_RNA (1)...(19): siRNA sense strand
uagaugacaugggcuauau

SEQ ID NO: 1693702 - RNA, 19 nt, Homo sapiens
  misc_RNA (1)...(19): siRNA sense strand
cugcaacgcuucucaguag

SEQ ID NO: 1693703 - RNA, 19 nt, Homo sapiens
  misc_RNA (1)...(19): siRNA sense strand
gaacagauuauggccuuug

SEQ ID NO: 1693704 - RNA, 19 nt, Homo sapiens
  misc_RNA (1)...(19): siRNA sense strand
ccacucaaagaacagauua

SEQ ID NO: 1693705 - RNA, 19 nt, Homo sapiens
  misc_RNA (1)...(19): siRNA sense strand
gcccugauaauguuugaua

SEQ ID NO: 1693706 - RNA, 19 nt, Homo sapiens
  misc_RNA (1)...(19): siRNA sense strand
gcaccuuccagaccaaauu

SEQ ID NO: 1693707 - RNA, 19 nt, Homo sapiens
  misc_RNA (1)...(19): siRNA sense strand
guugauaggugcagauggu

SEQ ID NO: 1693708 - RNA, 19 nt, Homo sapiens
  misc_RNA (1)...(19): siRNA sense strand
gcccuuggguucauauuac

SEQ ID NO: 1693709 - RNA, 19 nt, Homo sapiens
  misc_RNA (1)...(19): siRNA sense strand
caacagggucagcuccauu

SEQ ID NO: 1693710 - RNA, 19 nt, Homo sapiens
  misc_RNA (1)...(19): siRNA sense strand
ugaccagucugcuguugug

SEQ ID NO: 1693711 - RNA, 19 nt, Homo sapiens
  misc_RNA (1)...(19): siRNA sense strand
gcucgaagcagguccaaag

SEQ ID NO: 1693712 - RNA, 19 nt, Homo sapiens
  misc_RNA (1)...(19): siRNA sense strand
cagaccaaauuguugauag

SEQ ID NO: 1693713 - RNA, 19 nt, Homo sapiens
  misc_RNA (1)...(19): siRNA sense strand
ggagaaauugucagaaacu

SEQ ID NO: 1693714 - RNA, 19 nt, Homo sapiens
  misc_RNA (1)...(19): siRNA sense strand
ucagaaacuuacagcaaca

SEQ ID NO: 1693715 - RNA, 19 nt, Homo sapiens
  misc_RNA (1)...(19): siRNA sense strand
cauauuacccuaggugaug

SEQ ID NO: 1693716 - RNA, 19 nt, Homo sapiens
  misc_RNA (1)...(19): siRNA sense strand
uggcuacucugcauuuauc

SEQ ID NO: 1693717 - RNA, 19 nt, Homo sapiens
  misc_RNA (1)...(19): siRNA sense strand
caccuugaguuccuugguu

SEQ ID NO: 1693718 - RNA, 19 nt, Homo sapiens
  misc_RNA (1)...(19): siRNA sense strand
ggccacaaaugcagugucu

SEQ ID NO: 1693719 - RNA, 19 nt, Homo sapiens
  misc_RNA (1)...(19): siRNA sense strand
caucaugcaugcucucacu

SEQ ID NO: 1693720 - RNA, 19 nt, Homo sapiens
  misc_RNA (1)...(19): siRNA sense strand
aaagaaaguacuggagaaa

SEQ ID NO: 1693721 - RNA, 19 nt, Homo sapiens
  misc_RNA (1)...(19): siRNA sense strand
gggacaugcugcugaguac

SEQ ID NO: 1693722 - RNA, 19 nt, Homo sapiens
  misc_RNA (1)...(19): siRNA sense strand
gaaugugagcuggaacuau

SEQ ID NO: 1693723 - RNA, 19 nt, Homo sapiens
  misc_RNA (1)...(19): siRNA sense strand
gcaacagggucagcuccau

SEQ ID NO: 1693724 - RNA, 19 nt, Homo sapiens
  misc_RNA (1)...(19): siRNA sense strand
gagugacgguucucuacag

SEQ ID NO: 1693725 - RNA, 19 nt, Homo sapiens
  misc_RNA (1)...(19): siRNA sense strand
guacggcagccuucaaugg

SEQ ID NO: 1693726 - RNA, 19 nt, Homo sapiens
  misc_RNA (1)...(19): siRNA sense strand
gcagcaccuuccagaccaa

SEQ ID NO: 1693727 - RNA, 19 nt, Homo sapiens
  misc_RNA (1)...(19): siRNA sense strand
gaagcagguccaaagaaag

SEQ ID NO: 1693728 - RNA, 19 nt, Homo sapiens
  misc_RNA (1)...(19): siRNA sense strand
cacagguuaugaaacagaa

SEQ ID NO: 1693729 - RNA, 19 nt, Homo sapiens
  misc_RNA (1)...(19): siRNA sense strand
ugucagaaacuuacagcaa

SEQ ID NO: 1693730 - RNA, 19 nt, Homo sapiens
  misc_RNA (1)...(19): siRNA sense strand
caaaagccgaguucuguuu

SEQ ID NO: 1693731 - RNA, 19 nt, Homo sapiens
  misc_RNA (1)...(19): siRNA sense strand
ucaugcaugcucucacuaa

SEQ ID NO: 1693732 - RNA, 19 nt, Homo sapiens
  misc_RNA (1)...(19): siRNA sense strand
gcaguuggaggcugugucu

SEQ ID NO: 1693733 - RNA, 19 nt, Homo sapiens
  misc_RNA (1)...(19): siRNA sense strand
ugucuccacucaaagaaca

SEQ ID NO: 1693734 - RNA, 19 nt, Homo sapiens
  misc_RNA (1)...(19): siRNA sense strand
ucacagguuaugaaacaga

SEQ ID NO: 1693735 - RNA, 19 nt, Homo sapiens
  misc_RNA (1)...(19): siRNA sense strand
ccucuuggguugggacaug

SEQ ID NO: 1693736 - RNA, 19 nt, Homo sapiens
  misc_RNA (1)...(19): siRNA sense strand
ucagacaccuugaguuccu

SEQ ID NO: 1693737 - RNA, 19 nt, Homo sapiens
  misc_RNA (1)...(19): siRNA sense strand
uaucagaggccacagaaaa

SEQ ID NO: 1693738 - RNA, 19 nt, Homo sapiens
  misc_RNA (1)...(19): siRNA sense strand
ggaguacggcaggcuguug

SEQ ID NO: 1693739 - RNA, 19 nt, Homo sapiens
  misc_RNA (1)...(19): siRNA sense strand
ccagaccaaauuguugaua

SEQ ID NO: 1693740 - RNA, 19 nt, Homo sapiens
  misc_RNA (1)...(19): siRNA sense strand
cagauuauggccuuugcaa

SEQ ID NO: 1693741 - RNA, 19 nt, Homo sapiens
  misc_RNA (1)...(19): siRNA sense strand
acagaaagacagcgucaca

SEQ ID NO: 1693742 - RNA, 19 nt, Homo sapiens
  misc_RNA (1)...(19): siRNA sense strand
gcugcuacagacuuacuaa

SEQ ID NO: 1693743 - RNA, 19 nt, Homo sapiens
  misc_RNA (1)...(19): siRNA sense strand
ugggcuauaucguggagaa

SEQ ID NO: 1693744 - RNA, 19 nt, Homo sapiens
  misc_RNA (1)...(19): siRNA sense strand
guuaugaaacagaaagaca

SEQ ID NO: 1693745 - RNA, 19 nt, Homo sapiens
  misc_RNA (1)...(19): siRNA sense strand
gugccaugcugcaguaugc

SEQ ID NO: 1693746 - RNA, 19 nt, Homo sapiens
  misc_RNA (1)...(19): siRNA sense strand
cuggugccaugcugcagua

SEQ ID NO: 1693747 - RNA, 19 nt, Homo sapiens
  misc_RNA (1)...(19): siRNA sense strand
uguggcuacucugcauuua

SEQ ID NO: 1693748 - RNA, 19 nt, Homo sapiens
  misc_RNA (1)...(19): siRNA sense strand
cuacaggagcaaagccauu

SEQ ID NO: 1693749 - RNA, 19 nt, Homo sapiens
  misc_RNA (1)...(19): siRNA sense strand
agaccaaauuguugauagg

SEQ ID NO: 1693750 - RNA, 19 nt, Homo sapiens
  misc_RNA (1)...(19): siRNA sense strand
ugaacaugcagcagagcua

SEQ ID NO: 1693751 - RNA, 19 nt, Homo sapiens
  misc_RNA (1)...(19): siRNA sense strand
uuagaugacaugggcuaua

SEQ ID NO: 1693752 - RNA, 19 nt, Homo sapiens
  misc_RNA (1)...(19): siRNA sense strand
ggccuuguccauuuccuau

SEQ ID NO: 1693753 - RNA, 19 nt, Homo sapiens
  misc_RNA (1)...(19): siRNA sense strand
aagcagguccaaagaaagu

SEQ ID NO: 1693754 - RNA, 19 nt, Homo sapiens
  misc_RNA (1)...(19): siRNA sense strand
cugauaauguuugauaagg

SEQ ID NO: 1693755 - RNA, 19 nt, Homo sapiens
  misc_RNA (1)...(19): siRNA sense strand
gaugacaugggcuauaucg

SEQ ID NO: 1693756 - RNA, 19 nt, Homo sapiens
  misc_RNA (1)...(19): siRNA sense strand
uaugaccagucugcuguug

SEQ ID NO: 1693757 - RNA, 19 nt, Homo sapiens
  misc_RNA (1)...(19): siRNA sense strand
ggauaauuuagaugacaug

SEQ ID NO: 1693758 - RNA, 19 nt, Homo sapiens
  misc_RNA (1)...(19): siRNA sense strand
uggagaaauugucagaaac

SEQ ID NO: 1693759 - RNA, 19 nt, Homo sapiens
  misc_RNA (1)...(19): siRNA sense strand
cccugauaauguuugauaa

SEQ ID NO: 1693760 - RNA, 19 nt, Homo sapiens
  misc_RNA (1)...(19): siRNA sense strand
ugggacaugcugcugagua

SEQ ID NO: 1693761 - RNA, 19 nt, Homo sapiens
  misc_RNA (1)...(19): siRNA sense strand
aaagacagcgucacaacac

SEQ ID NO: 1693762 - RNA, 19 nt, Homo sapiens
  misc_RNA (1)...(19): siRNA sense strand
gauauucacuuucaugaca

SEQ ID NO: 1693763 - RNA, 19 nt, Homo sapiens
  misc_RNA (1)...(19): siRNA sense strand
cgaagcagguccaaagaaa

SEQ ID NO: 1693764 - RNA, 19 nt, Homo sapiens
  misc_RNA (1)...(19): siRNA sense strand
caaagaaaguacuggagaa

SEQ ID NO: 1693765 - RNA, 19 nt, Homo sapiens
  misc_RNA (1)...(19): siRNA sense strand
agaaaguacuggagaaauu

SEQ ID NO: 1693766 - RNA, 19 nt, Homo sapiens
  misc_RNA (1)...(19): siRNA sense strand
gagcaaagccauucgcuau

SEQ ID NO: 1693767 - RNA, 19 nt, Homo sapiens
  misc_RNA (1)...(19): siRNA sense strand
gcaaagccauucgcuauac

SEQ ID NO: 1693768 - RNA, 19 nt, Homo sapiens
  misc_RNA (1)...(19): siRNA sense strand
gaaaguacuggagaaauug

SEQ ID NO: 1693769 - RNA, 19 nt, Homo sapiens
  misc_RNA (1)...(19): siRNA sense strand
gcuauaucguggagaauga

SEQ ID NO: 1693770 - RNA, 19 nt, Homo sapiens
  misc_RNA (1)...(19): siRNA sense strand
cagaggcccugauaauguu

SEQ ID NO: 1693771 - RNA, 19 nt, Homo sapiens
  misc_RNA (1)...(19): siRNA sense strand
ccucacagguuaugaaaca

SEQ ID NO: 1693772 - RNA, 19 nt, Homo sapiens
  misc_RNA (1)...(19): siRNA sense strand
caacguagccuggcagaga

SEQ ID NO: 1693773 - RNA, 19 nt, Homo sapiens
  misc_RNA (1)...(19): siRNA sense strand
cgaguucuguuuccucuug

SEQ ID NO: 1693774 - RNA, 19 nt, Homo sapiens
  misc_RNA (1)...(19): siRNA sense strand
gaaauugucagaaacuuac

SEQ ID NO: 1693775 - RNA, 19 nt, Homo sapiens
  misc_RNA (1)...(19): siRNA sense strand
ucacaacacugcucuucug

SEQ ID NO: 1693776 - RNA, 19 nt, Homo sapiens
  misc_RNA (1)...(19): siRNA sense strand
uaccuggccuuguccauuu

SEQ ID NO: 1693777 - RNA, 19 nt, Homo sapiens
  misc_RNA (1)...(19): siRNA sense strand
gaaagacagcgucacaaca

SEQ ID NO: 1693778 - RNA, 19 nt, Homo sapiens
  misc_RNA (1)...(19): siRNA sense strand
gagaaauugucagaaacuu

SEQ ID NO: 1693779 - RNA, 19 nt, Homo sapiens
  misc_RNA (1)...(19): siRNA sense strand
aaugugagcuggaacuaug

SEQ ID NO: 1693780 - RNA, 19 nt, Homo sapiens
  misc_RNA (1)...(19): siRNA sense strand
cuggagaaauugucagaaa

SEQ ID NO: 1693781 - RNA, 19 nt, Homo sapiens
  misc_RNA (1)...(19): siRNA sense strand
uagaugacaugggcuauau

SEQ ID NO: 1693782 - RNA, 19 nt, Homo sapiens
  misc_RNA (1)...(19): siRNA sense strand
cugcaacgcuucucaguag

SEQ ID NO: 1693783 - RNA, 19 nt, Homo sapiens
  misc_RNA (1)...(19): siRNA sense strand
gaacagauuauggccuuug

SEQ ID NO: 1693784 - RNA, 19 nt, Homo sapiens
  misc_RNA (1)...(19): siRNA sense strand
ccacucaaagaacagauua

SEQ ID NO: 1693785 - RNA, 19 nt, Homo sapiens
  misc_RNA (1)...(19): siRNA sense strand
gcccugauaauguuugaua

SEQ ID NO: 1693786 - RNA, 19 nt, Homo sapiens
  misc_RNA (1)...(19): siRNA sense strand
gcaccuuccagaccaaauu

SEQ ID NO: 1693787 - RNA, 19 nt, Homo sapiens
  misc_RNA (1)...(19): siRNA sense strand
guugauaggugcagauggu

SEQ ID NO: 1693788 - RNA, 19 nt, Homo sapiens
  misc_RNA (1)...(19): siRNA sense strand
gcccuuggguucauauuac

SEQ ID NO: 1693789 - RNA, 19 nt, Homo sapiens
  misc_RNA (1)...(19): siRNA sense strand
caacagggucagcuccauu

SEQ ID NO: 1693790 - RNA, 19 nt, Homo sapiens
  misc_RNA (1)...(19): siRNA sense strand
ugaccagucugcuguugug

SEQ ID NO: 1693791 - RNA, 19 nt, Homo sapiens
  misc_RNA (1)...(19): siRNA sense strand
cagaccaaauuguugauag

SEQ ID NO: 1693792 - RNA, 19 nt, Homo sapiens
  misc_RNA (1)...(19): siRNA sense strand
gcucgaagcagguccaaag

SEQ ID NO: 1693793 - RNA, 19 nt, Homo sapiens
  misc_RNA (1)...(19): siRNA sense strand
ggagaaauugucagaaacu

SEQ ID NO: 1693794 - RNA, 19 nt, Homo sapiens
  misc_RNA (1)...(19): siRNA sense strand
ucagaaacuuacagcaaca

SEQ ID NO: 1693795 - RNA, 19 nt, Homo sapiens
  misc_RNA (1)...(19): siRNA sense strand
cauauuacccuaggugaug

SEQ ID NO: 1693796 - RNA, 19 nt, Homo sapiens
  misc_RNA (1)...(19): siRNA sense strand
uggcuacucugcauuuauc

SEQ ID NO: 1693797 - RNA, 19 nt, Homo sapiens
  misc_RNA (1)...(19): siRNA sense strand
caccuugaguuccuugguu

SEQ ID NO: 1693798 - RNA, 19 nt, Homo sapiens
  misc_RNA (1)...(19): siRNA sense strand
ggccacaaaugcagugucu

SEQ ID NO: 1693799 - RNA, 19 nt, Homo sapiens
  misc_RNA (1)...(19): siRNA sense strand
caucaugcaugcucucacu

SEQ ID NO: 1693800 - RNA, 19 nt, Homo sapiens
  misc_RNA (1)...(19): siRNA sense strand
aaagaaaguacuggagaaa

SEQ ID NO: 1693801 - RNA, 19 nt, Homo sapiens
  misc_RNA (1)...(19): siRNA sense strand
gggacaugcugcugaguac

SEQ ID NO: 1693802 - RNA, 19 nt, Homo sapiens
  misc_RNA (1)...(19): siRNA sense strand
gaaugugagcuggaacuau

SEQ ID NO: 1693803 - RNA, 19 nt, Homo sapiens
  misc_RNA (1)...(19): siRNA sense strand
gcaacagggucagcuccau

SEQ ID NO: 1693804 - RNA, 19 nt, Homo sapiens
  misc_RNA (1)...(19): siRNA sense strand
gagugacgguucucuacag

SEQ ID NO: 1693805 - RNA, 19 nt, Homo sapiens
  misc_RNA (1)...(19): siRNA sense strand
guacggcagccuucaaugg

SEQ ID NO: 1693806 - RNA, 19 nt, Homo sapiens
  misc_RNA (1)...(19): siRNA sense strand
gaagcagguccaaagaaag

SEQ ID NO: 1693807 - RNA, 19 nt, Homo sapiens
  misc_RNA (1)...(19): siRNA sense strand
gcagcaccuuccagaccaa

SEQ ID NO: 1693808 - RNA, 19 nt, Homo sapiens
  misc_RNA (1)...(19): siRNA sense strand
cacagguuaugaaacagaa

SEQ ID NO: 1693809 - RNA, 19 nt, Homo sapiens
  misc_RNA (1)...(19): siRNA sense strand
caaaagccgaguucuguuu

SEQ ID NO: 1693810 - RNA, 19 nt, Homo sapiens
  misc_RNA (1)...(19): siRNA sense strand
ugucagaaacuuacagcaa

SEQ ID NO: 1693811 - RNA, 19 nt, Homo sapiens
  misc_RNA (1)...(19): siRNA sense strand
ucaugcaugcucucacuaa

SEQ ID NO: 1693812 - RNA, 19 nt, Homo sapiens
  misc_RNA (1)...(19): siRNA sense strand
gcaguuggaggcugugucu

SEQ ID NO: 1693813 - RNA, 19 nt, Homo sapiens
  misc_RNA (1)...(19): siRNA sense strand
ugucuccacucaaagaaca

SEQ ID NO: 1693814 - RNA, 19 nt, Homo sapiens
  misc_RNA (1)...(19): siRNA sense strand
ucacagguuaugaaacaga

SEQ ID NO: 1693815 - RNA, 19 nt, Homo sapiens
  misc_RNA (1)...(19): siRNA sense strand
ccucuuggguugggacaug

SEQ ID NO: 1693816 - RNA, 19 nt, Homo sapiens
  misc_RNA (1)...(19): siRNA sense strand
ucagacaccuugaguuccu

SEQ ID NO: 1693817 - RNA, 19 nt, Homo sapiens
  misc_RNA (1)...(19): siRNA sense strand
uaucagaggccacagaaaa

SEQ ID NO: 1693818 - RNA, 19 nt, Homo sapiens
  misc_RNA (1)...(19): siRNA sense strand
ggaguacggcaggcuguug

SEQ ID NO: 1693819 - RNA, 19 nt, Homo sapiens
  misc_RNA (1)...(19): siRNA sense strand
ccagaccaaauuguugaua

SEQ ID NO: 1693820 - RNA, 19 nt, Homo sapiens
  misc_RNA (1)...(19): siRNA sense strand
cagauuauggccuuugcaa

SEQ ID NO: 1693821 - RNA, 19 nt, Homo sapiens
  misc_RNA (1)...(19): siRNA sense strand
acagaaagacagcgucaca

SEQ ID NO: 1693822 - RNA, 19 nt, Homo sapiens
  misc_RNA (1)...(19): siRNA sense strand
gcugcuacagacuuacuaa

SEQ ID NO: 1693823 - RNA, 19 nt, Homo sapiens
  misc_RNA (1)...(19): siRNA sense strand
ugggcuauaucguggagaa

SEQ ID NO: 1693824 - RNA, 19 nt, Homo sapiens
  misc_RNA (1)...(19): siRNA sense strand
guuaugaaacagaaagaca

SEQ ID NO: 1693825 - RNA, 19 nt, Homo sapiens
  misc_RNA (1)...(19): siRNA sense strand
gugccaugcugcaguaugc

SEQ ID NO: 1693826 - RNA, 19 nt, Homo sapiens
  misc_RNA (1)...(19): siRNA sense strand
cuggugccaugcugcagua

SEQ ID NO: 1693827 - RNA, 19 nt, Homo sapiens
  misc_RNA (1)...(19): siRNA sense strand
uguggcuacucugcauuua

SEQ ID NO: 1693828 - RNA, 19 nt, Homo sapiens
  misc_RNA (1)...(19): siRNA sense strand
cuacaggagcaaagccauu

SEQ ID NO: 1693829 - RNA, 19 nt, Homo sapiens
  misc_RNA (1)...(19): siRNA sense strand
agaccaaauuguugauagg

SEQ ID NO: 1693830 - RNA, 19 nt, Homo sapiens
  misc_RNA (1)...(19): siRNA sense strand
uuagaugacaugggcuaua

SEQ ID NO: 1693831 - RNA, 19 nt, Homo sapiens
  misc_RNA (1)...(19): siRNA sense strand
ugaacaugcagcagagcua

SEQ ID NO: 1693832 - RNA, 19 nt, Homo sapiens
  misc_RNA (1)...(19): siRNA sense strand
aagcagguccaaagaaagu

SEQ ID NO: 1693833 - RNA, 19 nt, Homo sapiens
  misc_RNA (1)...(19): siRNA sense strand
cugauaauguuugauaagg

SEQ ID NO: 1693834 - RNA, 19 nt, Homo sapiens
  misc_RNA (1)...(19): siRNA sense strand
gaugacaugggcuauaucg

SEQ ID NO: 1693835 - RNA, 19 nt, Homo sapiens
  misc_RNA (1)...(19): siRNA sense strand
uaugaccagucugcuguug

SEQ ID NO: 1693836 - RNA, 19 nt, Homo sapiens
  misc_RNA (1)...(19): siRNA sense strand
ggccuuguccauuuccuau

SEQ ID NO: 1693837 - RNA, 19 nt, Homo sapiens
  misc_RNA (1)...(19): siRNA sense strand
uggagaaauugucagaaac

SEQ ID NO: 1693838 - RNA, 19 nt, Homo sapiens
  misc_RNA (1)...(19): siRNA sense strand
cccugauaauguuugauaa

SEQ ID NO: 1693839 - RNA, 19 nt, Homo sapiens
  misc_RNA (1)...(19): siRNA sense strand
ggauaauuuagaugacaug

SEQ ID NO: 1693840 - RNA, 19 nt, Homo sapiens
  misc_RNA (1)...(19): siRNA sense strand
ugggacaugcugcugagua

SEQ ID NO: 1693841 - RNA, 19 nt, Homo sapiens
  misc_RNA (1)...(19): siRNA sense strand
aaagacagcgucacaacac

SEQ ID NO: 1693842 - RNA, 19 nt, Homo sapiens
  misc_RNA (1)...(19): siRNA sense strand
acaaagagcuggcugauga

SEQ ID NO: 1693843 - RNA, 19 nt, Homo sapiens
  misc_RNA (1)...(19): siRNA sense strand
caaagagcauggagcugua

SEQ ID NO: 1693844 - RNA, 19 nt, Homo sapiens
  misc_RNA (1)...(19): siRNA sense strand
aaucagagccuaccacaaa

SEQ ID NO: 1693845 - RNA, 19 nt, Homo sapiens
  misc_RNA (1)...(19): siRNA sense strand
ggaggcuggugcagaaauu

SEQ ID NO: 1693846 - RNA, 19 nt, Homo sapiens
  misc_RNA (1)...(19): siRNA sense strand
agccagcucuuccaucuua

SEQ ID NO: 1693847 - RNA, 19 nt, Homo sapiens
  misc_RNA (1)...(19): siRNA sense strand
ccacaaacauccaaauucg

SEQ ID NO: 1693848 - RNA, 19 nt, Homo sapiens
  misc_RNA (1)...(19): siRNA sense strand
ggacaggugaacuuggaua

SEQ ID NO: 1693849 - RNA, 19 nt, Homo sapiens
  misc_RNA (1)...(19): siRNA sense strand
gaagccaaccugcucaaug

SEQ ID NO: 1693850 - RNA, 19 nt, Homo sapiens
  misc_RNA (1)...(19): siRNA sense strand
gauaauggagaacucagaa

SEQ ID NO: 1693851 - RNA, 19 nt, Homo sapiens
  misc_RNA (1)...(19): siRNA sense strand
gaacaaagagcuggcugau

SEQ ID NO: 1693852 - RNA, 19 nt, Homo sapiens
  misc_RNA (1)...(19): siRNA sense strand
ggacgaggacuuugugaag

SEQ ID NO: 1693853 - RNA, 19 nt, Homo sapiens
  misc_RNA (1)...(19): siRNA sense strand
ggauucagccuggauaaug

SEQ ID NO: 1693854 - RNA, 19 nt, Homo sapiens
  misc_RNA (1)...(19): siRNA sense strand
ugaccaagaugaagaugag

SEQ ID NO: 1693855 - RNA, 19 nt, Homo sapiens
  misc_RNA (1)...(19): siRNA sense strand
gcucuuccaucuuaaucga

SEQ ID NO: 1693856 - RNA, 19 nt, Homo sapiens
  misc_RNA (1)...(19): siRNA sense strand
ugacuacuuucccgaacaa

SEQ ID NO: 1693857 - RNA, 19 nt, Homo sapiens
  misc_RNA (1)...(19): siRNA sense strand
guggacaggugaacuugga

SEQ ID NO: 1693858 - RNA, 19 nt, Homo sapiens
  misc_RNA (1)...(19): siRNA sense strand
caggugaacuuggauaugg

SEQ ID NO: 1693859 - RNA, 19 nt, Homo sapiens
  misc_RNA (1)...(19): siRNA sense strand
gauucagccuggauaaugg

SEQ ID NO: 1693860 - RNA, 19 nt, Homo sapiens
  misc_RNA (1)...(19): siRNA sense strand
aaagccagcucuuccaucu

SEQ ID NO: 1693861 - RNA, 19 nt, Homo sapiens
  misc_RNA (1)...(19): siRNA sense strand
guauugaaacucuggaaga

SEQ ID NO: 1693862 - RNA, 19 nt, Homo sapiens
  misc_RNA (1)...(19): siRNA sense strand
caucuuaaucgacgaauca

SEQ ID NO: 1693863 - RNA, 19 nt, Homo sapiens
  misc_RNA (1)...(19): siRNA sense strand
cagccuggauaauggagaa

SEQ ID NO: 1693864 - RNA, 19 nt, Homo sapiens
  misc_RNA (1)...(19): siRNA sense strand
cauguaguauugaaacucu

SEQ ID NO: 1693865 - RNA, 19 nt, Homo sapiens
  misc_RNA (1)...(19): siRNA sense strand
ggauaauggagaacucaga

SEQ ID NO: 1693866 - RNA, 19 nt, Homo sapiens
  misc_RNA (1)...(19): siRNA sense strand
agaugaagaugaggaggaa

SEQ ID NO: 1693867 - RNA, 19 nt, Homo sapiens
  misc_RNA (1)...(19): siRNA sense strand
gauaauagagugacauccu

SEQ ID NO: 1693868 - RNA, 19 nt, Homo sapiens
  misc_RNA (1)...(19): siRNA sense strand
auaauagagugacauccuu

SEQ ID NO: 1693869 - RNA, 19 nt, Homo sapiens
  misc_RNA (1)...(19): siRNA sense strand
ggaggugccagcagagcuu

SEQ ID NO: 1693870 - RNA, 19 nt, Homo sapiens
  misc_RNA (1)...(19): siRNA sense strand
uaccaagacccauccaaug

SEQ ID NO: 1693871 - RNA, 19 nt, Homo sapiens
  misc_RNA (1)...(19): siRNA sense strand
uaccacaaacauccaaauu

SEQ ID NO: 1693872 - RNA, 19 nt, Homo sapiens
  misc_RNA (1)...(19): siRNA sense strand
auggagaacucagaagcua

SEQ ID NO: 1693873 - RNA, 19 nt, Homo sapiens
  misc_RNA (1)...(19): siRNA sense strand
cccauccaaugcccaguuu

SEQ ID NO: 1693874 - RNA, 19 nt, Homo sapiens
  misc_RNA (1)...(19): siRNA sense strand
ggcagaaaaugaagccaaa

SEQ ID NO: 1693875 - RNA, 19 nt, Homo sapiens
  misc_RNA (1)...(19): siRNA sense strand
gcuuuauccucaugacuac

SEQ ID NO: 1693876 - RNA, 19 nt, Homo sapiens
  misc_RNA (1)...(19): siRNA sense strand
gacaggugaacuuggauau

SEQ ID NO: 1693877 - RNA, 19 nt, Homo sapiens
  misc_RNA (1)...(19): siRNA sense strand
cgacauccgacucuucauc

SEQ ID NO: 1693878 - RNA, 19 nt, Homo sapiens
  misc_RNA (1)...(19): siRNA sense strand
gaaucagagccuaccacaa

SEQ ID NO: 1693879 - RNA, 19 nt, Homo sapiens
  misc_RNA (1)...(19): siRNA sense strand
uagagugacauccuucaga

SEQ ID NO: 1693880 - RNA, 19 nt, Homo sapiens
  misc_RNA (1)...(19): siRNA sense strand
cuaccaagacccauccaau

SEQ ID NO: 1693881 - RNA, 19 nt, Homo sapiens
  misc_RNA (1)...(19): siRNA sense strand
caccagcuuuauccucaug

SEQ ID NO: 1693882 - RNA, 19 nt, Homo sapiens
  misc_RNA (1)...(19): siRNA sense strand
gggacgaggacuuugugaa

SEQ ID NO: 1693883 - RNA, 19 nt, Homo sapiens
  misc_RNA (1)...(19): siRNA sense strand
gagccagacccugaaggaa

SEQ ID NO: 1693884 - RNA, 19 nt, Homo sapiens
  misc_RNA (1)...(19): siRNA sense strand
ucgugcagcgguuaacaua

SEQ ID NO: 1693885 - RNA, 19 nt, Homo sapiens
  misc_RNA (1)...(19): siRNA sense strand
aggcuggugcagaaauuua

SEQ ID NO: 1693886 - RNA, 19 nt, Homo sapiens
  misc_RNA (1)...(19): siRNA sense strand
aggaggcgcugagggaguu

SEQ ID NO: 1693887 - RNA, 19 nt, Homo sapiens
  misc_RNA (1)...(19): siRNA sense strand
gaggcuggugcagaaauuu

SEQ ID NO: 1693888 - RNA, 19 nt, Homo sapiens
  misc_RNA (1)...(19): siRNA sense strand
ggaagccaaccugcucaau

SEQ ID NO: 1693889 - RNA, 19 nt, Homo sapiens
  misc_RNA (1)...(19): siRNA sense strand
ggcuggugcagaaauuuaa

SEQ ID NO: 1693890 - RNA, 19 nt, Homo sapiens
  misc_RNA (1)...(19): siRNA sense strand
cuucagagaccucauucau

SEQ ID NO: 1693891 - RNA, 19 nt, Homo sapiens
  misc_RNA (1)...(19): siRNA sense strand
acaaagagcuggcugauga

SEQ ID NO: 1693892 - RNA, 19 nt, Homo sapiens
  misc_RNA (1)...(19): siRNA sense strand
caaagagcauggagcugua

SEQ ID NO: 1693893 - RNA, 19 nt, Homo sapiens
  misc_RNA (1)...(19): siRNA sense strand
aaucagagccuaccacaaa

SEQ ID NO: 1693894 - RNA, 19 nt, Homo sapiens
  misc_RNA (1)...(19): siRNA sense strand
ggaggcuggugcagaaauu

SEQ ID NO: 1693895 - RNA, 19 nt, Homo sapiens
  misc_RNA (1)...(19): siRNA sense strand
agccagcucuuccaucuua

SEQ ID NO: 1693896 - RNA, 19 nt, Homo sapiens
  misc_RNA (1)...(19): siRNA sense strand
ccacaaacauccaaauucg

SEQ ID NO: 1693897 - RNA, 19 nt, Homo sapiens
  misc_RNA (1)...(19): siRNA sense strand
ggacaggugaacuuggaua

SEQ ID NO: 1693898 - RNA, 19 nt, Homo sapiens
  misc_RNA (1)...(19): siRNA sense strand
gaagccaaccugcucaaug

SEQ ID NO: 1693899 - RNA, 19 nt, Homo sapiens
  misc_RNA (1)...(19): siRNA sense strand
gauaauggagaacucagaa

SEQ ID NO: 1693900 - RNA, 19 nt, Homo sapiens
  misc_RNA (1)...(19): siRNA sense strand
gaacaaagagcuggcugau

SEQ ID NO: 1693901 - RNA, 19 nt, Homo sapiens
  misc_RNA (1)...(19): siRNA sense strand
ggacgaggacuuugugaag

SEQ ID NO: 1693902 - RNA, 19 nt, Homo sapiens
  misc_RNA (1)...(19): siRNA sense strand
ggauucagccuggauaaug

SEQ ID NO: 1693903 - RNA, 19 nt, Homo sapiens
  misc_RNA (1)...(19): siRNA sense strand
ugaccaagaugaagaugag

SEQ ID NO: 1693904 - RNA, 19 nt, Homo sapiens
  misc_RNA (1)...(19): siRNA sense strand
gcucuuccaucuuaaucga

SEQ ID NO: 1693905 - RNA, 19 nt, Homo sapiens
  misc_RNA (1)...(19): siRNA sense strand
ugacuacuuucccgaacaa

SEQ ID NO: 1693906 - RNA, 19 nt, Homo sapiens
  misc_RNA (1)...(19): siRNA sense strand
guggacaggugaacuugga

SEQ ID NO: 1693907 - RNA, 19 nt, Homo sapiens
  misc_RNA (1)...(19): siRNA sense strand
caggugaacuuggauaugg

SEQ ID NO: 1693908 - RNA, 19 nt, Homo sapiens
  misc_RNA (1)...(19): siRNA sense strand
gauucagccuggauaaugg

SEQ ID NO: 1693909 - RNA, 19 nt, Homo sapiens
  misc_RNA (1)...(19): siRNA sense strand
aaagccagcucuuccaucu

SEQ ID NO: 1693910 - RNA, 19 nt, Homo sapiens
  misc_RNA (1)...(19): siRNA sense strand
guauugaaacucuggaaga

SEQ ID NO: 1693911 - RNA, 19 nt, Homo sapiens
  misc_RNA (1)...(19): siRNA sense strand
caucuuaaucgacgaauca

SEQ ID NO: 1693912 - RNA, 19 nt, Homo sapiens
  misc_RNA (1)...(19): siRNA sense strand
cagccuggauaauggagaa

SEQ ID NO: 1693913 - RNA, 19 nt, Homo sapiens
  misc_RNA (1)...(19): siRNA sense strand
cauguaguauugaaacucu

SEQ ID NO: 1693914 - RNA, 19 nt, Homo sapiens
  misc_RNA (1)...(19): siRNA sense strand
ggauaauggagaacucaga

SEQ ID NO: 1693915 - RNA, 19 nt, Homo sapiens
  misc_RNA (1)...(19): siRNA sense strand
agaugaagaugaggaggaa

SEQ ID NO: 1693916 - RNA, 19 nt, Homo sapiens
  misc_RNA (1)...(19): siRNA sense strand
gauaauagagugacauccu

SEQ ID NO: 1693917 - RNA, 19 nt, Homo sapiens
  misc_RNA (1)...(19): siRNA sense strand
auaauagagugacauccuu

SEQ ID NO: 1693918 - RNA, 19 nt, Homo sapiens
  misc_RNA (1)...(19): siRNA sense strand
ggaggugccagcagagcuu

SEQ ID NO: 1693919 - RNA, 19 nt, Homo sapiens
  misc_RNA (1)...(19): siRNA sense strand
uaccaagacccauccaaug

SEQ ID NO: 1693920 - RNA, 19 nt, Homo sapiens
  misc_RNA (1)...(19): siRNA sense strand
uaccacaaacauccaaauu

SEQ ID NO: 1693921 - RNA, 19 nt, Homo sapiens
  misc_RNA (1)...(19): siRNA sense strand
auggagaacucagaagcua

SEQ ID NO: 1693922 - RNA, 19 nt, Homo sapiens
  misc_RNA (1)...(19): siRNA sense strand
cccauccaaugcccaguuu

SEQ ID NO: 1693923 - RNA, 19 nt, Homo sapiens
  misc_RNA (1)...(19): siRNA sense strand
ggcagaaaaugaagccaaa

SEQ ID NO: 1693924 - RNA, 19 nt, Homo sapiens
  misc_RNA (1)...(19): siRNA sense strand
gcuuuauccucaugacuac

SEQ ID NO: 1693925 - RNA, 19 nt, Homo sapiens
  misc_RNA (1)...(19): siRNA sense strand
gacaggugaacuuggauau

SEQ ID NO: 1693926 - RNA, 19 nt, Homo sapiens
  misc_RNA (1)...(19): siRNA sense strand
cgacauccgacucuucauc

SEQ ID NO: 1693927 - RNA, 19 nt, Homo sapiens
  misc_RNA (1)...(19): siRNA sense strand
gaaucagagccuaccacaa

SEQ ID NO: 1693928 - RNA, 19 nt, Homo sapiens
  misc_RNA (1)...(19): siRNA sense strand
uagagugacauccuucaga

SEQ ID NO: 1693929 - RNA, 19 nt, Homo sapiens
  misc_RNA (1)...(19): siRNA sense strand
cuaccaagacccauccaau

SEQ ID NO: 1693930 - RNA, 19 nt, Homo sapiens
  misc_RNA (1)...(19): siRNA sense strand
caccagcuuuauccucaug

SEQ ID NO: 1693931 - RNA, 19 nt, Homo sapiens
  misc_RNA (1)...(19): siRNA sense strand
gggacgaggacuuugugaa

SEQ ID NO: 1693932 - RNA, 19 nt, Homo sapiens
  misc_RNA (1)...(19): siRNA sense strand
gagccagacccugaaggaa

SEQ ID NO: 1693933 - RNA, 19 nt, Homo sapiens
  misc_RNA (1)...(19): siRNA sense strand
ucgugcagcgguuaacaua

SEQ ID NO: 1693934 - RNA, 19 nt, Homo sapiens
  misc_RNA (1)...(19): siRNA sense strand
aggcuggugcagaaauuua

SEQ ID NO: 1693935 - RNA, 19 nt, Homo sapiens
  misc_RNA (1)...(19): siRNA sense strand
aggaggcgcugagggaguu

SEQ ID NO: 1693936 - RNA, 19 nt, Homo sapiens
  misc_RNA (1)...(19): siRNA sense strand
gaggcuggugcagaaauuu

SEQ ID NO: 1693937 - RNA, 19 nt, Homo sapiens
  misc_RNA (1)...(19): siRNA sense strand
ggaagccaaccugcucaau

SEQ ID NO: 1693938 - RNA, 19 nt, Homo sapiens
  misc_RNA (1)...(19): siRNA sense strand
ggcuggugcagaaauuuaa

SEQ ID NO: 1693939 - RNA, 19 nt, Homo sapiens
  misc_RNA (1)...(19): siRNA sense strand
cuucagagaccucauucau

SEQ ID NO: 1693940 - RNA, 19 nt, Homo sapiens
  misc_RNA (1)...(19): siRNA sense strand
acaaagagcuggcugauga

SEQ ID NO: 1693941 - RNA, 19 nt, Homo sapiens
  misc_RNA (1)...(19): siRNA sense strand
caaagagcauggagcugua

SEQ ID NO: 1693942 - RNA, 19 nt, Homo sapiens
  misc_RNA (1)...(19): siRNA sense strand
aaucagagccuaccacaaa

SEQ ID NO: 1693943 - RNA, 19 nt, Homo sapiens
  misc_RNA (1)...(19): siRNA sense strand
ggaggcuggugcagaaauu

SEQ ID NO: 1693944 - RNA, 19 nt, Homo sapiens
  misc_RNA (1)...(19): siRNA sense strand
agccagcucuuccaucuua

SEQ ID NO: 1693945 - RNA, 19 nt, Homo sapiens
  misc_RNA (1)...(19): siRNA sense strand
ccacaaacauccaaauucg

SEQ ID NO: 1693946 - RNA, 19 nt, Homo sapiens
  misc_RNA (1)...(19): siRNA sense strand
ggacaggugaacuuggaua

SEQ ID NO: 1693947 - RNA, 19 nt, Homo sapiens
  misc_RNA (1)...(19): siRNA sense strand
gaagccaaccugcucaaug

SEQ ID NO: 1693948 - RNA, 19 nt, Homo sapiens
  misc_RNA (1)...(19): siRNA sense strand
gauaauggagaacucagaa

SEQ ID NO: 1693949 - RNA, 19 nt, Homo sapiens
  misc_RNA (1)...(19): siRNA sense strand
gaacaaagagcuggcugau

SEQ ID NO: 1693950 - RNA, 19 nt, Homo sapiens
  misc_RNA (1)...(19): siRNA sense strand
ggacgaggacuuugugaag

SEQ ID NO: 1693951 - RNA, 19 nt, Homo sapiens
  misc_RNA (1)...(19): siRNA sense strand
ggauucagccuggauaaug

SEQ ID NO: 1693952 - RNA, 19 nt, Homo sapiens
  misc_RNA (1)...(19): siRNA sense strand
gcucuuccaucuuaaucga

SEQ ID NO: 1693953 - RNA, 19 nt, Homo sapiens
  misc_RNA (1)...(19): siRNA sense strand
ugacuacuuucccgaacaa

SEQ ID NO: 1693954 - RNA, 19 nt, Homo sapiens
  misc_RNA (1)...(19): siRNA sense strand
guggacaggugaacuugga

SEQ ID NO: 1693955 - RNA, 19 nt, Homo sapiens
  misc_RNA (1)...(19): siRNA sense strand
caggugaacuuggauaugg

SEQ ID NO: 1693956 - RNA, 19 nt, Homo sapiens
  misc_RNA (1)...(19): siRNA sense strand
gauucagccuggauaaugg

SEQ ID NO: 1693957 - RNA, 19 nt, Homo sapiens
  misc_RNA (1)...(19): siRNA sense strand
aaagccagcucuuccaucu

SEQ ID NO: 1693958 - RNA, 19 nt, Homo sapiens
  misc_RNA (1)...(19): siRNA sense strand
guauugaaacucuggaaga

SEQ ID NO: 1693959 - RNA, 19 nt, Homo sapiens
  misc_RNA (1)...(19): siRNA sense strand
caucuuaaucgacgaauca

SEQ ID NO: 1693960 - RNA, 19 nt, Homo sapiens
  misc_RNA (1)...(19): siRNA sense strand
cagccuggauaauggagaa

SEQ ID NO: 1693961 - RNA, 19 nt, Homo sapiens
  misc_RNA (1)...(19): siRNA sense strand
cauguaguauugaaacucu

SEQ ID NO: 1693962 - RNA, 19 nt, Homo sapiens
  misc_RNA (1)...(19): siRNA sense strand
ggauaauggagaacucaga

SEQ ID NO: 1693963 - RNA, 19 nt, Homo sapiens
  misc_RNA (1)...(19): siRNA sense strand
agaugaagaugaggaggaa

SEQ ID NO: 1693964 - RNA, 19 nt, Homo sapiens
  misc_RNA (1)...(19): siRNA sense strand
ggaggugccagcagagcuu

SEQ ID NO: 1693965 - RNA, 19 nt, Homo sapiens
  misc_RNA (1)...(19): siRNA sense strand
uaccaagacccauccaaug

SEQ ID NO: 1693966 - RNA, 19 nt, Homo sapiens
  misc_RNA (1)...(19): siRNA sense strand
uaccacaaacauccaaauu

SEQ ID NO: 1693967 - RNA, 19 nt, Homo sapiens
  misc_RNA (1)...(19): siRNA sense strand
auggagaacucagaagcua

SEQ ID NO: 1693968 - RNA, 19 nt, Homo sapiens
  misc_RNA (1)...(19): siRNA sense strand
cccauccaaugcccaguuu

SEQ ID NO: 1693969 - RNA, 19 nt, Homo sapiens
  misc_RNA (1)...(19): siRNA sense strand
ggcagaaaaugaagccaaa

SEQ ID NO: 1693970 - RNA, 19 nt, Homo sapiens
  misc_RNA (1)...(19): siRNA sense strand
gcuuuauccucaugacuac

SEQ ID NO: 1693971 - RNA, 19 nt, Homo sapiens
  misc_RNA (1)...(19): siRNA sense strand
gacaggugaacuuggauau

SEQ ID NO: 1693972 - RNA, 19 nt, Homo sapiens
  misc_RNA (1)...(19): siRNA sense strand
cgacauccgacucuucauc

SEQ ID NO: 1693973 - RNA, 19 nt, Homo sapiens
  misc_RNA (1)...(19): siRNA sense strand
gaaucagagccuaccacaa

SEQ ID NO: 1693974 - RNA, 19 nt, Homo sapiens
  misc_RNA (1)...(19): siRNA sense strand
cuaccaagacccauccaau

SEQ ID NO: 1693975 - RNA, 19 nt, Homo sapiens
  misc_RNA (1)...(19): siRNA sense strand
caccagcuuuauccucaug

SEQ ID NO: 1693976 - RNA, 19 nt, Homo sapiens
  misc_RNA (1)...(19): siRNA sense strand
gggacgaggacuuugugaa

SEQ ID NO: 1693977 - RNA, 19 nt, Homo sapiens
  misc_RNA (1)...(19): siRNA sense strand
gagccagacccugaaggaa

SEQ ID NO: 1693978 - RNA, 19 nt, Homo sapiens
  misc_RNA (1)...(19): siRNA sense strand
ucgugcagcgguuaacaua

SEQ ID NO: 1693979 - RNA, 19 nt, Homo sapiens
  misc_RNA (1)...(19): siRNA sense strand
aggcuggugcagaaauuua

SEQ ID NO: 1693980 - RNA, 19 nt, Homo sapiens
  misc_RNA (1)...(19): siRNA sense strand
gaggcuggugcagaaauuu

SEQ ID NO: 1693981 - RNA, 19 nt, Homo sapiens
  misc_RNA (1)...(19): siRNA sense strand
ggaagccaaccugcucaau

SEQ ID NO: 1693982 - RNA, 19 nt, Homo sapiens
  misc_RNA (1)...(19): siRNA sense strand
ggcuggugcagaaauuuaa

SEQ ID NO: 1693983 - RNA, 19 nt, Homo sapiens
  misc_RNA (1)...(19): siRNA sense strand
gagaucagacccuacauua

SEQ ID NO: 1693984 - RNA, 19 nt, Homo sapiens
  misc_RNA (1)...(19): siRNA sense strand
gaucagacccuacauuaau

SEQ ID NO: 1693985 - RNA, 19 nt, Homo sapiens
  misc_RNA (1)...(19): siRNA sense strand
ggaauuacaaggagacgua

SEQ ID NO: 1693986 - RNA, 19 nt, Homo sapiens
  misc_RNA (1)...(19): siRNA sense strand
gcaacgacuucgacaccua

SEQ ID NO: 1693987 - RNA, 19 nt, Homo sapiens
  misc_RNA (1)...(19): siRNA sense strand
gugcacagcuggaauuaca

SEQ ID NO: 1693988 - RNA, 19 nt, Homo sapiens
  misc_RNA (1)...(19): siRNA sense strand
gaaccuugaugggugcuuu

SEQ ID NO: 1693989 - RNA, 19 nt, Homo sapiens
  misc_RNA (1)...(19): siRNA sense strand
agacguacgugcacauuau

SEQ ID NO: 1693990 - RNA, 19 nt, Homo sapiens
  misc_RNA (1)...(19): siRNA sense strand
gagacguacgugcacauua

SEQ ID NO: 1693991 - RNA, 19 nt, Homo sapiens
  misc_RNA (1)...(19): siRNA sense strand
ggagcucaccuuugacaga

SEQ ID NO: 1693992 - RNA, 19 nt, Homo sapiens
  misc_RNA (1)...(19): siRNA sense strand
ccagaaagaggcugucauc

SEQ ID NO: 1693993 - RNA, 19 nt, Homo sapiens
  misc_RNA (1)...(19): siRNA sense strand
aucagacccuacauuaaua

SEQ ID NO: 1693994 - RNA, 19 nt, Homo sapiens
  misc_RNA (1)...(19): siRNA sense strand
aagaggcugucauccugua

SEQ ID NO: 1693995 - RNA, 19 nt, Homo sapiens
  misc_RNA (1)...(19): siRNA sense strand
ccuggauccugcccaugua

SEQ ID NO: 1693996 - RNA, 19 nt, Homo sapiens
  misc_RNA (1)...(19): siRNA sense strand
gcacagcuggaauuacaag

SEQ ID NO: 1693997 - RNA, 19 nt, Homo sapiens
  misc_RNA (1)...(19): siRNA sense strand
ggagacguacgugcacauu

SEQ ID NO: 1693998 - RNA, 19 nt, Homo sapiens
  misc_RNA (1)...(19): siRNA sense strand
ugagaucagacccuacauu

SEQ ID NO: 1693999 - RNA, 19 nt, Homo sapiens
  misc_RNA (1)...(19): siRNA sense strand
cuugaugggugcuuugaca

SEQ ID NO: 1694000 - RNA, 19 nt, Homo sapiens
  misc_RNA (1)...(19): siRNA sense strand
gcagagccagagugugaug

SEQ ID NO: 1694001 - RNA, 19 nt, Homo sapiens
  misc_RNA (1)...(19): siRNA sense strand
augcagagccagaguguga

SEQ ID NO: 1694002 - RNA, 19 nt, Homo sapiens
  misc_RNA (1)...(19): siRNA sense strand
agaacgccaucuacagcaa

SEQ ID NO: 1694003 - RNA, 19 nt, Homo sapiens
  misc_RNA (1)...(19): siRNA sense strand
caaggccgaggacgacuga

SEQ ID NO: 1694004 - RNA, 19 nt, Homo sapiens
  misc_RNA (1)...(19): siRNA sense strand
agaucagacccuacauuaa

SEQ ID NO: 1694005 - RNA, 19 nt, Homo sapiens
  misc_RNA (1)...(19): siRNA sense strand
cgacuucgacaccuacauc

SEQ ID NO: 1694006 - RNA, 19 nt, Homo sapiens
  misc_RNA (1)...(19): siRNA sense strand
gacccuacauuaauaucac

SEQ ID NO: 1694007 - RNA, 19 nt, Homo sapiens
  misc_RNA (1)...(19): siRNA sense strand
uaauaucaccauccugaag

SEQ ID NO: 1694008 - RNA, 19 nt, Homo sapiens
  misc_RNA (1)...(19): siRNA sense strand
cguggcaucuacuucuuca

SEQ ID NO: 1694009 - RNA, 19 nt, Homo sapiens
  misc_RNA (1)...(19): siRNA sense strand
gcgagaacgccaucuacag

SEQ ID NO: 1694010 - RNA, 19 nt, Homo sapiens
  misc_RNA (1)...(19): siRNA sense strand
ucagacccuacauuaauau

SEQ ID NO: 1694011 - RNA, 19 nt, Homo sapiens
  misc_RNA (1)...(19): siRNA sense strand
gagaucagacccuacauua

SEQ ID NO: 1694012 - RNA, 19 nt, Homo sapiens
  misc_RNA (1)...(19): siRNA sense strand
gaucagacccuacauuaau

SEQ ID NO: 1694013 - RNA, 19 nt, Homo sapiens
  misc_RNA (1)...(19): siRNA sense strand
ggaauuacaaggagacgua

SEQ ID NO: 1694014 - RNA, 19 nt, Homo sapiens
  misc_RNA (1)...(19): siRNA sense strand
gcaacgacuucgacaccua

SEQ ID NO: 1694015 - RNA, 19 nt, Homo sapiens
  misc_RNA (1)...(19): siRNA sense strand
gugcacagcuggaauuaca

SEQ ID NO: 1694016 - RNA, 19 nt, Homo sapiens
  misc_RNA (1)...(19): siRNA sense strand
gaaccuugaugggugcuuu

SEQ ID NO: 1694017 - RNA, 19 nt, Homo sapiens
  misc_RNA (1)...(19): siRNA sense strand
agacguacgugcacauuau

SEQ ID NO: 1694018 - RNA, 19 nt, Homo sapiens
  misc_RNA (1)...(19): siRNA sense strand
gagacguacgugcacauua

SEQ ID NO: 1694019 - RNA, 19 nt, Homo sapiens
  misc_RNA (1)...(19): siRNA sense strand
ggagcucaccuuugacaga

SEQ ID NO: 1694020 - RNA, 19 nt, Homo sapiens
  misc_RNA (1)...(19): siRNA sense strand
ccagaaagaggcugucauc

SEQ ID NO: 1694021 - RNA, 19 nt, Homo sapiens
  misc_RNA (1)...(19): siRNA sense strand
aucagacccuacauuaaua

SEQ ID NO: 1694022 - RNA, 19 nt, Homo sapiens
  misc_RNA (1)...(19): siRNA sense strand
aagaggcugucauccugua

SEQ ID NO: 1694023 - RNA, 19 nt, Homo sapiens
  misc_RNA (1)...(19): siRNA sense strand
ccuggauccugcccaugua

SEQ ID NO: 1694024 - RNA, 19 nt, Homo sapiens
  misc_RNA (1)...(19): siRNA sense strand
gcacagcuggaauuacaag

SEQ ID NO: 1694025 - RNA, 19 nt, Homo sapiens
  misc_RNA (1)...(19): siRNA sense strand
ggagacguacgugcacauu

SEQ ID NO: 1694026 - RNA, 19 nt, Homo sapiens
  misc_RNA (1)...(19): siRNA sense strand
ugagaucagacccuacauu

SEQ ID NO: 1694027 - RNA, 19 nt, Homo sapiens
  misc_RNA (1)...(19): siRNA sense strand
cuugaugggugcuuugaca

SEQ ID NO: 1694028 - RNA, 19 nt, Homo sapiens
  misc_RNA (1)...(19): siRNA sense strand
gcagagccagagugugaug

SEQ ID NO: 1694029 - RNA, 19 nt, Homo sapiens
  misc_RNA (1)...(19): siRNA sense strand
augcagagccagaguguga

SEQ ID NO: 1694030 - RNA, 19 nt, Homo sapiens
  misc_RNA (1)...(19): siRNA sense strand
agaacgccaucuacagcaa

SEQ ID NO: 1694031 - RNA, 19 nt, Homo sapiens
  misc_RNA (1)...(19): siRNA sense strand
caaggccgaggacgacuga

SEQ ID NO: 1694032 - RNA, 19 nt, Homo sapiens
  misc_RNA (1)...(19): siRNA sense strand
agaucagacccuacauuaa

SEQ ID NO: 1694033 - RNA, 19 nt, Homo sapiens
  misc_RNA (1)...(19): siRNA sense strand
cgacuucgacaccuacauc

SEQ ID NO: 1694034 - RNA, 19 nt, Homo sapiens
  misc_RNA (1)...(19): siRNA sense strand
gacccuacauuaauaucac

SEQ ID NO: 1694035 - RNA, 19 nt, Homo sapiens
  misc_RNA (1)...(19): siRNA sense strand
uaauaucaccauccugaag

SEQ ID NO: 1694036 - RNA, 19 nt, Homo sapiens
  misc_RNA (1)...(19): siRNA sense strand
cguggcaucuacuucuuca

SEQ ID NO: 1694037 - RNA, 19 nt, Homo sapiens
  misc_RNA (1)...(19): siRNA sense strand
gcgagaacgccaucuacag

SEQ ID NO: 1694038 - RNA, 19 nt, Homo sapiens
  misc_RNA (1)...(19): siRNA sense strand
ucagacccuacauuaauau

SEQ ID NO: 1694039 - RNA, 19 nt, Homo sapiens
  misc_RNA (1)...(19): siRNA sense strand
gccagaaccuuccuuauua

SEQ ID NO: 1694040 - RNA, 19 nt, Homo sapiens
  misc_RNA (1)...(19): siRNA sense strand
gaggaaagcugcaucuuau

SEQ ID NO: 1694041 - RNA, 19 nt, Homo sapiens
  misc_RNA (1)...(19): siRNA sense strand
gcaagugcauacagaaaua

SEQ ID NO: 1694042 - RNA, 19 nt, Homo sapiens
  misc_RNA (1)...(19): siRNA sense strand
gaaccuuccuuauuagaaa

SEQ ID NO: 1694043 - RNA, 19 nt, Homo sapiens
  misc_RNA (1)...(19): siRNA sense strand
gaacauuucugcagagaca

SEQ ID NO: 1694044 - RNA, 19 nt, Homo sapiens
  misc_RNA (1)...(19): siRNA sense strand
ggaggaaagcugcaucuua

SEQ ID NO: 1694045 - RNA, 19 nt, Homo sapiens
  misc_RNA (1)...(19): siRNA sense strand
gaaauaugcccacacauca

SEQ ID NO: 1694046 - RNA, 19 nt, Homo sapiens
  misc_RNA (1)...(19): siRNA sense strand
gugcauuauuucugucuua

SEQ ID NO: 1694047 - RNA, 19 nt, Homo sapiens
  misc_RNA (1)...(19): siRNA sense strand
aaacaucgcccaacacaga

SEQ ID NO: 1694048 - RNA, 19 nt, Homo sapiens
  misc_RNA (1)...(19): siRNA sense strand
gaagacuuaucccaacaga

SEQ ID NO: 1694049 - RNA, 19 nt, Homo sapiens
  misc_RNA (1)...(19): siRNA sense strand
ggacugcuccucucuuaga

SEQ ID NO: 1694050 - RNA, 19 nt, Homo sapiens
  misc_RNA (1)...(19): siRNA sense strand
ugacaaacaucgcccaaca

SEQ ID NO: 1694051 - RNA, 19 nt, Homo sapiens
  misc_RNA (1)...(19): siRNA sense strand
gaucuaacaguaagaaaug

SEQ ID NO: 1694052 - RNA, 19 nt, Homo sapiens
  misc_RNA (1)...(19): siRNA sense strand
ucaaauguccacaguguaa

SEQ ID NO: 1694053 - RNA, 19 nt, Homo sapiens
  misc_RNA (1)...(19): siRNA sense strand
ggccagaaccuuccuuauu

SEQ ID NO: 1694054 - RNA, 19 nt, Homo sapiens
  misc_RNA (1)...(19): siRNA sense strand
gacaacaccuuggaagaga

SEQ ID NO: 1694055 - RNA, 19 nt, Homo sapiens
  misc_RNA (1)...(19): siRNA sense strand
aaagggagcugcuaucaac

SEQ ID NO: 1694056 - RNA, 19 nt, Homo sapiens
  misc_RNA (1)...(19): siRNA sense strand
ggaaagcugcaucuuaugu

SEQ ID NO: 1694057 - RNA, 19 nt, Homo sapiens
  misc_RNA (1)...(19): siRNA sense strand
gaaggaaugccagagauug

SEQ ID NO: 1694058 - RNA, 19 nt, Homo sapiens
  misc_RNA (1)...(19): siRNA sense strand
caagaaaugcugagaaugg

SEQ ID NO: 1694059 - RNA, 19 nt, Homo sapiens
  misc_RNA (1)...(19): siRNA sense strand
cagcaaagcauuucuucaa

SEQ ID NO: 1694060 - RNA, 19 nt, Homo sapiens
  misc_RNA (1)...(19): siRNA sense strand
aggaagaucugcuuugugu

SEQ ID NO: 1694061 - RNA, 19 nt, Homo sapiens
  misc_RNA (1)...(19): siRNA sense strand
gaaagcugcaucuuauguu

SEQ ID NO: 1694062 - RNA, 19 nt, Homo sapiens
  misc_RNA (1)...(19): siRNA sense strand
cuacauaccugaaaacuca

SEQ ID NO: 1694063 - RNA, 19 nt, Homo sapiens
  misc_RNA (1)...(19): siRNA sense strand
ggguugccuuucacaauuu

SEQ ID NO: 1694064 - RNA, 19 nt, Homo sapiens
  misc_RNA (1)...(19): siRNA sense strand
acagaaauaugcccacaca

SEQ ID NO: 1694065 - RNA, 19 nt, Homo sapiens
  misc_RNA (1)...(19): siRNA sense strand
cuuauguugugaagacuua

SEQ ID NO: 1694066 - RNA, 19 nt, Homo sapiens
  misc_RNA (1)...(19): siRNA sense strand
caacacagaacauccaaca

SEQ ID NO: 1694067 - RNA, 19 nt, Homo sapiens
  misc_RNA (1)...(19): siRNA sense strand
acacagaacauccaacaug

SEQ ID NO: 1694068 - RNA, 19 nt, Homo sapiens
  misc_RNA (1)...(19): siRNA sense strand
cagcgugcauuauuucugu

SEQ ID NO: 1694069 - RNA, 19 nt, Homo sapiens
  misc_RNA (1)...(19): siRNA sense strand
ccagaaccuuccuuauuag

SEQ ID NO: 1694070 - RNA, 19 nt, Homo sapiens
  misc_RNA (1)...(19): siRNA sense strand
aaagcugcaucuuauguug

SEQ ID NO: 1694071 - RNA, 19 nt, Homo sapiens
  misc_RNA (1)...(19): siRNA sense strand
gaucagugccucagaaacu

SEQ ID NO: 1694072 - RNA, 19 nt, Homo sapiens
  misc_RNA (1)...(19): siRNA sense strand
guaagaaaugggaguguga

SEQ ID NO: 1694073 - RNA, 19 nt, Homo sapiens
  misc_RNA (1)...(19): siRNA sense strand
cuucaaauguccacagugu

SEQ ID NO: 1694074 - RNA, 19 nt, Homo sapiens
  misc_RNA (1)...(19): siRNA sense strand
gagaaaaucugccaagacu

SEQ ID NO: 1694075 - RNA, 19 nt, Homo sapiens
  misc_RNA (1)...(19): siRNA sense strand
gcagagacaacaccuugga

SEQ ID NO: 1694076 - RNA, 19 nt, Homo sapiens
  misc_RNA (1)...(19): siRNA sense strand
agggacugcuccucucuua

SEQ ID NO: 1694077 - RNA, 19 nt, Homo sapiens
  misc_RNA (1)...(19): siRNA sense strand
gagacaacaccuuggaaga

SEQ ID NO: 1694078 - RNA, 19 nt, Homo sapiens
  misc_RNA (1)...(19): siRNA sense strand
gacaauaucagcgugcauu

SEQ ID NO: 1694079 - RNA, 19 nt, Homo sapiens
  misc_RNA (1)...(19): siRNA sense strand
acacaucagcaaagcauuu

SEQ ID NO: 1694080 - RNA, 19 nt, Homo sapiens
  misc_RNA (1)...(19): siRNA sense strand
cuaggaagaucugcuuugu

SEQ ID NO: 1694081 - RNA, 19 nt, Homo sapiens
  misc_RNA (1)...(19): siRNA sense strand
agcaaagcauuucuucaaa

SEQ ID NO: 1694082 - RNA, 19 nt, Homo sapiens
  misc_RNA (1)...(19): siRNA sense strand
guccaagggugucagaauc

SEQ ID NO: 1694083 - RNA, 19 nt, Homo sapiens
  misc_RNA (1)...(19): siRNA sense strand
agacuuaucccaacagagu

SEQ ID NO: 1694084 - RNA, 19 nt, Homo sapiens
  misc_RNA (1)...(19): siRNA sense strand
gaaaaucugccaagacuag

SEQ ID NO: 1694085 - RNA, 19 nt, Homo sapiens
  misc_RNA (1)...(19): siRNA sense strand
agaaauaugcccacacauc

SEQ ID NO: 1694086 - RNA, 19 nt, Homo sapiens
  misc_RNA (1)...(19): siRNA sense strand
gugaagacuuaucccaaca

SEQ ID NO: 1694087 - RNA, 19 nt, Homo sapiens
  misc_RNA (1)...(19): siRNA sense strand
aaagaaggaaugccagaga

SEQ ID NO: 1694088 - RNA, 19 nt, Homo sapiens
  misc_RNA (1)...(19): siRNA sense strand
ggaaugccagagauugaga

SEQ ID NO: 1694089 - RNA, 19 nt, Homo sapiens
  misc_RNA (1)...(19): siRNA sense strand
aaggaucagugccucagaa

SEQ ID NO: 1694090 - RNA, 19 nt, Homo sapiens
  misc_RNA (1)...(19): siRNA sense strand
acaauaucagcgugcauua

SEQ ID NO: 1694091 - RNA, 19 nt, Homo sapiens
  misc_RNA (1)...(19): siRNA sense strand
caccgcaagugcauacaga

SEQ ID NO: 1694092 - RNA, 19 nt, Homo sapiens
  misc_RNA (1)...(19): siRNA sense strand
aagaaggaaugccagagau

SEQ ID NO: 1694093 - RNA, 19 nt, Homo sapiens
  misc_RNA (1)...(19): siRNA sense strand
gggguugccuuucacaauu

SEQ ID NO: 1694094 - RNA, 19 nt, Homo sapiens
  misc_RNA (1)...(19): siRNA sense strand
auaucagcgugcauuauuu

SEQ ID NO: 1694095 - RNA, 19 nt, Homo sapiens
  misc_RNA (1)...(19): siRNA sense strand
gaaggaucagugccucaga

SEQ ID NO: 1694096 - RNA, 19 nt, Homo sapiens
  misc_RNA (1)...(19): siRNA sense strand
ccacacaucagcaaagcau

SEQ ID NO: 1694097 - RNA, 19 nt, Homo sapiens
  misc_RNA (1)...(19): siRNA sense strand
auccagagcccguguugua

SEQ ID NO: 1694098 - RNA, 19 nt, Homo sapiens
  misc_RNA (1)...(19): siRNA sense strand
aaacuuccaucugccuugu

SEQ ID NO: 1694099 - RNA, 19 nt, Homo sapiens
  misc_RNA (1)...(19): siRNA sense strand
gccaagacuaggaggguaa

SEQ ID NO: 1694100 - RNA, 19 nt, Homo sapiens
  misc_RNA (1)...(19): siRNA sense strand
caauaucagcgugcauuau

SEQ ID NO: 1694101 - RNA, 19 nt, Homo sapiens
  misc_RNA (1)...(19): siRNA sense strand
aaaagaguuuccucaagaa

SEQ ID NO: 1694102 - RNA, 19 nt, Homo sapiens
  misc_RNA (1)...(19): siRNA sense strand
gguccaagggugucagaau

SEQ ID NO: 1694103 - RNA, 19 nt, Homo sapiens
  misc_RNA (1)...(19): siRNA sense strand
ggccuuucuuggacugauu

SEQ ID NO: 1694104 - RNA, 19 nt, Homo sapiens
  misc_RNA (1)...(19): siRNA sense strand
acaacaccuuggaagagaa

SEQ ID NO: 1694105 - RNA, 19 nt, Homo sapiens
  misc_RNA (1)...(19): siRNA sense strand
acaaacaucgcccaacaca

SEQ ID NO: 1694106 - RNA, 19 nt, Homo sapiens
  misc_RNA (1)...(19): siRNA sense strand
ggugucagaaucacuaaca

SEQ ID NO: 1694107 - RNA, 19 nt, Homo sapiens
  misc_RNA (1)...(19): siRNA sense strand
gaaugccagagauugagaa

SEQ ID NO: 1694108 - RNA, 19 nt, Homo sapiens
  misc_RNA (1)...(19): siRNA sense strand
agaaggaaugccagagauu

SEQ ID NO: 1694109 - RNA, 19 nt, Homo sapiens
  misc_RNA (1)...(19): siRNA sense strand
ugccagagauugagaaaau

SEQ ID NO: 1694110 - RNA, 19 nt, Homo sapiens
  misc_RNA (1)...(19): siRNA sense strand
gggccuguuugcuggcuau

SEQ ID NO: 1694111 - RNA, 19 nt, Homo sapiens
  misc_RNA (1)...(19): siRNA sense strand
caacaccuuggaagagaau

SEQ ID NO: 1694112 - RNA, 19 nt, Homo sapiens
  misc_RNA (1)...(19): siRNA sense strand
gagcccguguuguagucaa

SEQ ID NO: 1694113 - RNA, 19 nt, Homo sapiens
  misc_RNA (1)...(19): siRNA sense strand
uaucagcgugcauuauuuc

SEQ ID NO: 1694114 - RNA, 19 nt, Homo sapiens
  misc_RNA (1)...(19): siRNA sense strand
ccgcaagugcauacagaaa

SEQ ID NO: 1694115 - RNA, 19 nt, Homo sapiens
  misc_RNA (1)...(19): siRNA sense strand
caucagcaaagcauuucuu

SEQ ID NO: 1694116 - RNA, 19 nt, Homo sapiens
  misc_RNA (1)...(19): siRNA sense strand
cagagcccguguuguaguc

SEQ ID NO: 1694117 - RNA, 19 nt, Homo sapiens
  misc_RNA (1)...(19): siRNA sense strand
ucuaguaagcugccucaga

SEQ ID NO: 1694118 - RNA, 19 nt, Homo sapiens
  misc_RNA (1)...(19): siRNA sense strand
caagugcauacagaaauau

SEQ ID NO: 1694119 - RNA, 19 nt, Homo sapiens
  misc_RNA (1)...(19): siRNA sense strand
aaggaaugccagagauuga

SEQ ID NO: 1694120 - RNA, 19 nt, Homo sapiens
  misc_RNA (1)...(19): siRNA sense strand
cagaaccuuccuuauuaga

SEQ ID NO: 1694121 - RNA, 19 nt, Homo sapiens
  misc_RNA (1)...(19): siRNA sense strand
cuucagaaagacaauauca

SEQ ID NO: 1694122 - RNA, 19 nt, Homo sapiens
  misc_RNA (1)...(19): siRNA sense strand
ucaacugccagaaggauca

SEQ ID NO: 1694123 - RNA, 19 nt, Homo sapiens
  misc_RNA (1)...(19): siRNA sense strand
gccagaaccuuccuuauua

SEQ ID NO: 1694124 - RNA, 19 nt, Homo sapiens
  misc_RNA (1)...(19): siRNA sense strand
gaggaaagcugcaucuuau

SEQ ID NO: 1694125 - RNA, 19 nt, Homo sapiens
  misc_RNA (1)...(19): siRNA sense strand
gcaagugcauacagaaaua

SEQ ID NO: 1694126 - RNA, 19 nt, Homo sapiens
  misc_RNA (1)...(19): siRNA sense strand
gaaccuuccuuauuagaaa

SEQ ID NO: 1694127 - RNA, 19 nt, Homo sapiens
  misc_RNA (1)...(19): siRNA sense strand
gaacauuucugcagagaca

SEQ ID NO: 1694128 - RNA, 19 nt, Homo sapiens
  misc_RNA (1)...(19): siRNA sense strand
ggaggaaagcugcaucuua

SEQ ID NO: 1694129 - RNA, 19 nt, Homo sapiens
  misc_RNA (1)...(19): siRNA sense strand
gaaauaugcccacacauca

SEQ ID NO: 1694130 - RNA, 19 nt, Homo sapiens
  misc_RNA (1)...(19): siRNA sense strand
gugcauuauuucugucuua

SEQ ID NO: 1694131 - RNA, 19 nt, Homo sapiens
  misc_RNA (1)...(19): siRNA sense strand
aaacaucgcccaacacaga

SEQ ID NO: 1694132 - RNA, 19 nt, Homo sapiens
  misc_RNA (1)...(19): siRNA sense strand
gaagacuuaucccaacaga

SEQ ID NO: 1694133 - RNA, 19 nt, Homo sapiens
  misc_RNA (1)...(19): siRNA sense strand
ggacugcuccucucuuaga

SEQ ID NO: 1694134 - RNA, 19 nt, Homo sapiens
  misc_RNA (1)...(19): siRNA sense strand
ugacaaacaucgcccaaca

SEQ ID NO: 1694135 - RNA, 19 nt, Homo sapiens
  misc_RNA (1)...(19): siRNA sense strand
gaucuaacaguaagaaaug

SEQ ID NO: 1694136 - RNA, 19 nt, Homo sapiens
  misc_RNA (1)...(19): siRNA sense strand
ucaaauguccacaguguaa

SEQ ID NO: 1694137 - RNA, 19 nt, Homo sapiens
  misc_RNA (1)...(19): siRNA sense strand
ggccagaaccuuccuuauu

SEQ ID NO: 1694138 - RNA, 19 nt, Homo sapiens
  misc_RNA (1)...(19): siRNA sense strand
gacaacaccuuggaagaga

SEQ ID NO: 1694139 - RNA, 19 nt, Homo sapiens
  misc_RNA (1)...(19): siRNA sense strand
aaagggagcugcuaucaac

SEQ ID NO: 1694140 - RNA, 19 nt, Homo sapiens
  misc_RNA (1)...(19): siRNA sense strand
ggaaagcugcaucuuaugu

SEQ ID NO: 1694141 - RNA, 19 nt, Homo sapiens
  misc_RNA (1)...(19): siRNA sense strand
gaaggaaugccagagauug

SEQ ID NO: 1694142 - RNA, 19 nt, Homo sapiens
  misc_RNA (1)...(19): siRNA sense strand
caagaaaugcugagaaugg

SEQ ID NO: 1694143 - RNA, 19 nt, Homo sapiens
  misc_RNA (1)...(19): siRNA sense strand
cagcaaagcauuucuucaa

SEQ ID NO: 1694144 - RNA, 19 nt, Homo sapiens
  misc_RNA (1)...(19): siRNA sense strand
aggaagaucugcuuugugu

SEQ ID NO: 1694145 - RNA, 19 nt, Homo sapiens
  misc_RNA (1)...(19): siRNA sense strand
gaaagcugcaucuuauguu

SEQ ID NO: 1694146 - RNA, 19 nt, Homo sapiens
  misc_RNA (1)...(19): siRNA sense strand
cuacauaccugaaaacuca

SEQ ID NO: 1694147 - RNA, 19 nt, Homo sapiens
  misc_RNA (1)...(19): siRNA sense strand
ggguugccuuucacaauuu

SEQ ID NO: 1694148 - RNA, 19 nt, Homo sapiens
  misc_RNA (1)...(19): siRNA sense strand
acagaaauaugcccacaca

SEQ ID NO: 1694149 - RNA, 19 nt, Homo sapiens
  misc_RNA (1)...(19): siRNA sense strand
cuuauguugugaagacuua

SEQ ID NO: 1694150 - RNA, 19 nt, Homo sapiens
  misc_RNA (1)...(19): siRNA sense strand
caacacagaacauccaaca

SEQ ID NO: 1694151 - RNA, 19 nt, Homo sapiens
  misc_RNA (1)...(19): siRNA sense strand
acacagaacauccaacaug

SEQ ID NO: 1694152 - RNA, 19 nt, Homo sapiens
  misc_RNA (1)...(19): siRNA sense strand
cagcgugcauuauuucugu

SEQ ID NO: 1694153 - RNA, 19 nt, Homo sapiens
  misc_RNA (1)...(19): siRNA sense strand
ccagaaccuuccuuauuag

SEQ ID NO: 1694154 - RNA, 19 nt, Homo sapiens
  misc_RNA (1)...(19): siRNA sense strand
aaagcugcaucuuauguug

SEQ ID NO: 1694155 - RNA, 19 nt, Homo sapiens
  misc_RNA (1)...(19): siRNA sense strand
gaucagugccucagaaacu

SEQ ID NO: 1694156 - RNA, 19 nt, Homo sapiens
  misc_RNA (1)...(19): siRNA sense strand
guaagaaaugggaguguga

SEQ ID NO: 1694157 - RNA, 19 nt, Homo sapiens
  misc_RNA (1)...(19): siRNA sense strand
cuucaaauguccacagugu

SEQ ID NO: 1694158 - RNA, 19 nt, Homo sapiens
  misc_RNA (1)...(19): siRNA sense strand
gagaaaaucugccaagacu

SEQ ID NO: 1694159 - RNA, 19 nt, Homo sapiens
  misc_RNA (1)...(19): siRNA sense strand
gcagagacaacaccuugga

SEQ ID NO: 1694160 - RNA, 19 nt, Homo sapiens
  misc_RNA (1)...(19): siRNA sense strand
agggacugcuccucucuua

SEQ ID NO: 1694161 - RNA, 19 nt, Homo sapiens
  misc_RNA (1)...(19): siRNA sense strand
gagacaacaccuuggaaga

SEQ ID NO: 1694162 - RNA, 19 nt, Homo sapiens
  misc_RNA (1)...(19): siRNA sense strand
gacaauaucagcgugcauu

SEQ ID NO: 1694163 - RNA, 19 nt, Homo sapiens
  misc_RNA (1)...(19): siRNA sense strand
acacaucagcaaagcauuu

SEQ ID NO: 1694164 - RNA, 19 nt, Homo sapiens
  misc_RNA (1)...(19): siRNA sense strand
cuaggaagaucugcuuugu

SEQ ID NO: 1694165 - RNA, 19 nt, Homo sapiens
  misc_RNA (1)...(19): siRNA sense strand
agcaaagcauuucuucaaa

SEQ ID NO: 1694166 - RNA, 19 nt, Homo sapiens
  misc_RNA (1)...(19): siRNA sense strand
guccaagggugucagaauc

SEQ ID NO: 1694167 - RNA, 19 nt, Homo sapiens
  misc_RNA (1)...(19): siRNA sense strand
agacuuaucccaacagagu

SEQ ID NO: 1694168 - RNA, 19 nt, Homo sapiens
  misc_RNA (1)...(19): siRNA sense strand
gaaaaucugccaagacuag

SEQ ID NO: 1694169 - RNA, 19 nt, Homo sapiens
  misc_RNA (1)...(19): siRNA sense strand
agaaauaugcccacacauc

SEQ ID NO: 1694170 - RNA, 19 nt, Homo sapiens
  misc_RNA (1)...(19): siRNA sense strand
gugaagacuuaucccaaca

SEQ ID NO: 1694171 - RNA, 19 nt, Homo sapiens
  misc_RNA (1)...(19): siRNA sense strand
aaagaaggaaugccagaga

SEQ ID NO: 1694172 - RNA, 19 nt, Homo sapiens
  misc_RNA (1)...(19): siRNA sense strand
ggaaugccagagauugaga

SEQ ID NO: 1694173 - RNA, 19 nt, Homo sapiens
  misc_RNA (1)...(19): siRNA sense strand
aaggaucagugccucagaa

SEQ ID NO: 1694174 - RNA, 19 nt, Homo sapiens
  misc_RNA (1)...(19): siRNA sense strand
acaauaucagcgugcauua

SEQ ID NO: 1694175 - RNA, 19 nt, Homo sapiens
  misc_RNA (1)...(19): siRNA sense strand
caccgcaagugcauacaga

SEQ ID NO: 1694176 - RNA, 19 nt, Homo sapiens
  misc_RNA (1)...(19): siRNA sense strand
aagaaggaaugccagagau

SEQ ID NO: 1694177 - RNA, 19 nt, Homo sapiens
  misc_RNA (1)...(19): siRNA sense strand
gggguugccuuucacaauu

SEQ ID NO: 1694178 - RNA, 19 nt, Homo sapiens
  misc_RNA (1)...(19): siRNA sense strand
auaucagcgugcauuauuu

SEQ ID NO: 1694179 - RNA, 19 nt, Homo sapiens
  misc_RNA (1)...(19): siRNA sense strand
gaaggaucagugccucaga

SEQ ID NO: 1694180 - RNA, 19 nt, Homo sapiens
  misc_RNA (1)...(19): siRNA sense strand
ccacacaucagcaaagcau

SEQ ID NO: 1694181 - RNA, 19 nt, Homo sapiens
  misc_RNA (1)...(19): siRNA sense strand
auccagagcccguguugua

SEQ ID NO: 1694182 - RNA, 19 nt, Homo sapiens
  misc_RNA (1)...(19): siRNA sense strand
aaacuuccaucugccuugu

SEQ ID NO: 1694183 - RNA, 19 nt, Homo sapiens
  misc_RNA (1)...(19): siRNA sense strand
gccaagacuaggaggguaa

SEQ ID NO: 1694184 - RNA, 19 nt, Homo sapiens
  misc_RNA (1)...(19): siRNA sense strand
caauaucagcgugcauuau

SEQ ID NO: 1694185 - RNA, 19 nt, Homo sapiens
  misc_RNA (1)...(19): siRNA sense strand
aaaagaguuuccucaagaa

SEQ ID NO: 1694186 - RNA, 19 nt, Homo sapiens
  misc_RNA (1)...(19): siRNA sense strand
gguccaagggugucagaau

SEQ ID NO: 1694187 - RNA, 19 nt, Homo sapiens
  misc_RNA (1)...(19): siRNA sense strand
ggccuuucuuggacugauu

SEQ ID NO: 1694188 - RNA, 19 nt, Homo sapiens
  misc_RNA (1)...(19): siRNA sense strand
acaacaccuuggaagagaa

SEQ ID NO: 1694189 - RNA, 19 nt, Homo sapiens
  misc_RNA (1)...(19): siRNA sense strand
acaaacaucgcccaacaca

SEQ ID NO: 1694190 - RNA, 19 nt, Homo sapiens
  misc_RNA (1)...(19): siRNA sense strand
ggugucagaaucacuaaca

SEQ ID NO: 1694191 - RNA, 19 nt, Homo sapiens
  misc_RNA (1)...(19): siRNA sense strand
gaaugccagagauugagaa

SEQ ID NO: 1694192 - RNA, 19 nt, Homo sapiens
  misc_RNA (1)...(19): siRNA sense strand
agaaggaaugccagagauu

SEQ ID NO: 1694193 - RNA, 19 nt, Homo sapiens
  misc_RNA (1)...(19): siRNA sense strand
ugccagagauugagaaaau

SEQ ID NO: 1694194 - RNA, 19 nt, Homo sapiens
  misc_RNA (1)...(19): siRNA sense strand
gggccuguuugcuggcuau

SEQ ID NO: 1694195 - RNA, 19 nt, Homo sapiens
  misc_RNA (1)...(19): siRNA sense strand
caacaccuuggaagagaau

SEQ ID NO: 1694196 - RNA, 19 nt, Homo sapiens
  misc_RNA (1)...(19): siRNA sense strand
gagcccguguuguagucaa

SEQ ID NO: 1694197 - RNA, 19 nt, Homo sapiens
  misc_RNA (1)...(19): siRNA sense strand
uaucagcgugcauuauuuc

SEQ ID NO: 1694198 - RNA, 19 nt, Homo sapiens
  misc_RNA (1)...(19): siRNA sense strand
ccgcaagugcauacagaaa

SEQ ID NO: 1694199 - RNA, 19 nt, Homo sapiens
  misc_RNA (1)...(19): siRNA sense strand
caucagcaaagcauuucuu

SEQ ID NO: 1694200 - RNA, 19 nt, Homo sapiens
  misc_RNA (1)...(19): siRNA sense strand
cagagcccguguuguaguc

SEQ ID NO: 1694201 - RNA, 19 nt, Homo sapiens
  misc_RNA (1)...(19): siRNA sense strand
ucuaguaagcugccucaga

SEQ ID NO: 1694202 - RNA, 19 nt, Homo sapiens
  misc_RNA (1)...(19): siRNA sense strand
caagugcauacagaaauau

SEQ ID NO: 1694203 - RNA, 19 nt, Homo sapiens
  misc_RNA (1)...(19): siRNA sense strand
aaggaaugccagagauuga

SEQ ID NO: 1694204 - RNA, 19 nt, Homo sapiens
  misc_RNA (1)...(19): siRNA sense strand
cagaaccuuccuuauuaga

SEQ ID NO: 1694205 - RNA, 19 nt, Homo sapiens
  misc_RNA (1)...(19): siRNA sense strand
cuucagaaagacaauauca

SEQ ID NO: 1694206 - RNA, 19 nt, Homo sapiens
  misc_RNA (1)...(19): siRNA sense strand
ucaacugccagaaggauca

SEQ ID NO: 1694207 - RNA, 19 nt, Homo sapiens
  misc_RNA (1)...(19): siRNA sense strand
ggaaacaucuauauucuga

SEQ ID NO: 1694208 - RNA, 19 nt, Homo sapiens
  misc_RNA (1)...(19): siRNA sense strand
gaaccuggcugacgaggau

SEQ ID NO: 1694209 - RNA, 19 nt, Homo sapiens
  misc_RNA (1)...(19): siRNA sense strand
gcaaugaggccaauucgaa

SEQ ID NO: 1694210 - RNA, 19 nt, Homo sapiens
  misc_RNA (1)...(19): siRNA sense strand
caaauccucuggaacaaga

SEQ ID NO: 1694211 - RNA, 19 nt, Homo sapiens
  misc_RNA (1)...(19): siRNA sense strand
ggacaacacccucaucaug

SEQ ID NO: 1694212 - RNA, 19 nt, Homo sapiens
  misc_RNA (1)...(19): siRNA sense strand
gcaauggaaacaucuauau

SEQ ID NO: 1694213 - RNA, 19 nt, Homo sapiens
  misc_RNA (1)...(19): siRNA sense strand
gccuagcgcuggcagauuu

SEQ ID NO: 1694214 - RNA, 19 nt, Homo sapiens
  misc_RNA (1)...(19): siRNA sense strand
acaaggcccugcucaaugu

SEQ ID NO: 1694215 - RNA, 19 nt, Homo sapiens
  misc_RNA (1)...(19): siRNA sense strand
ggagagguccgcauuuauc

SEQ ID NO: 1694216 - RNA, 19 nt, Homo sapiens
  misc_RNA (1)...(19): siRNA sense strand
ggaggcauuuguaaaccaa

SEQ ID NO: 1694217 - RNA, 19 nt, Homo sapiens
  misc_RNA (1)...(19): siRNA sense strand
ccaguuugauguugaguuc

SEQ ID NO: 1694218 - RNA, 19 nt, Homo sapiens
  misc_RNA (1)...(19): siRNA sense strand
ggacuuauccggguacaca

SEQ ID NO: 1694219 - RNA, 19 nt, Homo sapiens
  misc_RNA (1)...(19): siRNA sense strand
gcccuugugucuaugugua

SEQ ID NO: 1694220 - RNA, 19 nt, Homo sapiens
  misc_RNA (1)...(19): siRNA sense strand
gcagccauccugaccauga

SEQ ID NO: 1694221 - RNA, 19 nt, Homo sapiens
  misc_RNA (1)...(19): siRNA sense strand
agagguuucuggccaguuu

SEQ ID NO: 1694222 - RNA, 19 nt, Homo sapiens
  misc_RNA (1)...(19): siRNA sense strand
cccgaggccuucaccauuu

SEQ ID NO: 1694223 - RNA, 19 nt, Homo sapiens
  misc_RNA (1)...(19): siRNA sense strand
gacaaggcccugcucaaug

SEQ ID NO: 1694224 - RNA, 19 nt, Homo sapiens
  misc_RNA (1)...(19): siRNA sense strand
ccuuuaagcucacacuuca

SEQ ID NO: 1694225 - RNA, 19 nt, Homo sapiens
  misc_RNA (1)...(19): siRNA sense strand
gaagcguacagcaguguuu

SEQ ID NO: 1694226 - RNA, 19 nt, Homo sapiens
  misc_RNA (1)...(19): siRNA sense strand
ugacgaggaugcugugucu

SEQ ID NO: 1694227 - RNA, 19 nt, Homo sapiens
  misc_RNA (1)...(19): siRNA sense strand
guaacaagggcaucucaga

SEQ ID NO: 1694228 - RNA, 19 nt, Homo sapiens
  misc_RNA (1)...(19): siRNA sense strand
auggagagguccgcauuua

SEQ ID NO: 1694229 - RNA, 19 nt, Homo sapiens
  misc_RNA (1)...(19): siRNA sense strand
ucucagacaucaucaaggu

SEQ ID NO: 1694230 - RNA, 19 nt, Homo sapiens
  misc_RNA (1)...(19): siRNA sense strand
ggaauacaagcugguggua

SEQ ID NO: 1694231 - RNA, 19 nt, Homo sapiens
  misc_RNA (1)...(19): siRNA sense strand
gugucuauguguauaagaa

SEQ ID NO: 1694232 - RNA, 19 nt, Homo sapiens
  misc_RNA (1)...(19): siRNA sense strand
ugaccaccuugaagaagaa

SEQ ID NO: 1694233 - RNA, 19 nt, Homo sapiens
  misc_RNA (1)...(19): siRNA sense strand
cagaggagccuuuguccau

SEQ ID NO: 1694234 - RNA, 19 nt, Homo sapiens
  misc_RNA (1)...(19): siRNA sense strand
ugacaaggcccugcucaau

SEQ ID NO: 1694235 - RNA, 19 nt, Homo sapiens
  misc_RNA (1)...(19): siRNA sense strand
guacaacgaggcgcucuau

SEQ ID NO: 1694236 - RNA, 19 nt, Homo sapiens
  misc_RNA (1)...(19): siRNA sense strand
acaacgaggcgcucuauuc

SEQ ID NO: 1694237 - RNA, 19 nt, Homo sapiens
  misc_RNA (1)...(19): siRNA sense strand
ccaauugccuccaaauccu

SEQ ID NO: 1694238 - RNA, 19 nt, Homo sapiens
  misc_RNA (1)...(19): siRNA sense strand
gggcaucucagacaucauc

SEQ ID NO: 1694239 - RNA, 19 nt, Homo sapiens
  misc_RNA (1)...(19): siRNA sense strand
cagccauccugaccaugaa

SEQ ID NO: 1694240 - RNA, 19 nt, Homo sapiens
  misc_RNA (1)...(19): siRNA sense strand
ucucagacccuacuucaag

SEQ ID NO: 1694241 - RNA, 19 nt, Homo sapiens
  misc_RNA (1)...(19): siRNA sense strand
ggccaaagaggaccgaauc

SEQ ID NO: 1694242 - RNA, 19 nt, Homo sapiens
  misc_RNA (1)...(19): siRNA sense strand
gugaccagccuuugcuuug

SEQ ID NO: 1694243 - RNA, 19 nt, Homo sapiens
  misc_RNA (1)...(19): siRNA sense strand
uaaaccaacacaaguccaa

SEQ ID NO: 1694244 - RNA, 19 nt, Homo sapiens
  misc_RNA (1)...(19): siRNA sense strand
ucaccaccaugaccaccuu

SEQ ID NO: 1694245 - RNA, 19 nt, Homo sapiens
  misc_RNA (1)...(19): siRNA sense strand
gccugaaggugcucaaagg

SEQ ID NO: 1694246 - RNA, 19 nt, Homo sapiens
  misc_RNA (1)...(19): siRNA sense strand
cugcagaacaccucaacaa

SEQ ID NO: 1694247 - RNA, 19 nt, Homo sapiens
  misc_RNA (1)...(19): siRNA sense strand
gcugcguccucaucggauu

SEQ ID NO: 1694248 - RNA, 19 nt, Homo sapiens
  misc_RNA (1)...(19): siRNA sense strand
cugcggagcugagagcaau

SEQ ID NO: 1694249 - RNA, 19 nt, Homo sapiens
  misc_RNA (1)...(19): siRNA sense strand
acacuucaccugcagaaca

SEQ ID NO: 1694250 - RNA, 19 nt, Homo sapiens
  misc_RNA (1)...(19): siRNA sense strand
gcccaggccaugaaacuca

SEQ ID NO: 1694251 - RNA, 19 nt, Homo sapiens
  misc_RNA (1)...(19): siRNA sense strand
ccacuggugaugaccgaaa

SEQ ID NO: 1694252 - RNA, 19 nt, Homo sapiens
  misc_RNA (1)...(19): siRNA sense strand
acaagggcaucucagacau

SEQ ID NO: 1694253 - RNA, 19 nt, Homo sapiens
  misc_RNA (1)...(19): siRNA sense strand
ccaugaccaccuugaagaa

SEQ ID NO: 1694254 - RNA, 19 nt, Homo sapiens
  misc_RNA (1)...(19): siRNA sense strand
cauccagucacucagguuu

SEQ ID NO: 1694255 - RNA, 19 nt, Homo sapiens
  misc_RNA (1)...(19): siRNA sense strand
aacaagaccuuuggaacca

SEQ ID NO: 1694256 - RNA, 19 nt, Homo sapiens
  misc_RNA (1)...(19): siRNA sense strand
ccaaagaggaccgaaucga

SEQ ID NO: 1694257 - RNA, 19 nt, Homo sapiens
  misc_RNA (1)...(19): siRNA sense strand
ggagaccuuuguggagagu

SEQ ID NO: 1694258 - RNA, 19 nt, Homo sapiens
  misc_RNA (1)...(19): siRNA sense strand
caacgaggcgcucuauucc

SEQ ID NO: 1694259 - RNA, 19 nt, Homo sapiens
  misc_RNA (1)...(19): siRNA sense strand
ugagagcaaugaggccaau

SEQ ID NO: 1694260 - RNA, 19 nt, Homo sapiens
  misc_RNA (1)...(19): siRNA sense strand
ggaccgaaucgaccccuua

SEQ ID NO: 1694261 - RNA, 19 nt, Homo sapiens
  misc_RNA (1)...(19): siRNA sense strand
uucaggcccuugugucuau

SEQ ID NO: 1694262 - RNA, 19 nt, Homo sapiens
  misc_RNA (1)...(19): siRNA sense strand
uggccaauauccacaccuu

SEQ ID NO: 1694263 - RNA, 19 nt, Homo sapiens
  misc_RNA (1)...(19): siRNA sense strand
gcagugaccagccuuugcu

SEQ ID NO: 1694264 - RNA, 19 nt, Homo sapiens
  misc_RNA (1)...(19): siRNA sense strand
ccgcauuuaucgugacaag

SEQ ID NO: 1694265 - RNA, 19 nt, Homo sapiens
  misc_RNA (1)...(19): siRNA sense strand
ccuugugucuauguguaua

SEQ ID NO: 1694266 - RNA, 19 nt, Homo sapiens
  misc_RNA (1)...(19): siRNA sense strand
ugaccagccuuugcuuugg

SEQ ID NO: 1694267 - RNA, 19 nt, Homo sapiens
  misc_RNA (1)...(19): siRNA sense strand
cgcaauggaaacaucuaua

SEQ ID NO: 1694268 - RNA, 19 nt, Homo sapiens
  misc_RNA (1)...(19): siRNA sense strand
gaaucucagacccuacuuc

SEQ ID NO: 1694269 - RNA, 19 nt, Homo sapiens
  misc_RNA (1)...(19): siRNA sense strand
gccaauauccacaccuuuu

SEQ ID NO: 1694270 - RNA, 19 nt, Homo sapiens
  misc_RNA (1)...(19): siRNA sense strand
agacagucaucaccaccau

SEQ ID NO: 1694271 - RNA, 19 nt, Homo sapiens
  misc_RNA (1)...(19): siRNA sense strand
ccaccaugaccaccuugaa

SEQ ID NO: 1694272 - RNA, 19 nt, Homo sapiens
  misc_RNA (1)...(19): siRNA sense strand
aagggcaucucagacauca

SEQ ID NO: 1694273 - RNA, 19 nt, Homo sapiens
  misc_RNA (1)...(19): siRNA sense strand
acgaggaugcugugucuug

SEQ ID NO: 1694274 - RNA, 19 nt, Homo sapiens
  misc_RNA (1)...(19): siRNA sense strand
ccgcagccauccugaccau

SEQ ID NO: 1694275 - RNA, 19 nt, Homo sapiens
  misc_RNA (1)...(19): siRNA sense strand
gagaucagacccuacauua

SEQ ID NO: 1694276 - RNA, 19 nt, Homo sapiens
  misc_RNA (1)...(19): siRNA sense strand
gaucagacccuacauuaau

SEQ ID NO: 1694277 - RNA, 19 nt, Homo sapiens
  misc_RNA (1)...(19): siRNA sense strand
ggaauuacaaggagacgua

SEQ ID NO: 1694278 - RNA, 19 nt, Homo sapiens
  misc_RNA (1)...(19): siRNA sense strand
gcaacgacuucgacaccua

SEQ ID NO: 1694279 - RNA, 19 nt, Homo sapiens
  misc_RNA (1)...(19): siRNA sense strand
gugcacagcuggaauuaca

SEQ ID NO: 1694280 - RNA, 19 nt, Homo sapiens
  misc_RNA (1)...(19): siRNA sense strand
gaaccuugaugggugcuuu

SEQ ID NO: 1694281 - RNA, 19 nt, Homo sapiens
  misc_RNA (1)...(19): siRNA sense strand
agacguacgugcacauuau

SEQ ID NO: 1694282 - RNA, 19 nt, Homo sapiens
  misc_RNA (1)...(19): siRNA sense strand
gagacguacgugcacauua

SEQ ID NO: 1694283 - RNA, 19 nt, Homo sapiens
  misc_RNA (1)...(19): siRNA sense strand
ggagcucaccuuugacaga

SEQ ID NO: 1694284 - RNA, 19 nt, Homo sapiens
  misc_RNA (1)...(19): siRNA sense strand
ccagaaagaggcugucauc

SEQ ID NO: 1694285 - RNA, 19 nt, Homo sapiens
  misc_RNA (1)...(19): siRNA sense strand
aucagacccuacauuaaua

SEQ ID NO: 1694286 - RNA, 19 nt, Homo sapiens
  misc_RNA (1)...(19): siRNA sense strand
aagaggcugucauccugua

SEQ ID NO: 1694287 - RNA, 19 nt, Homo sapiens
  misc_RNA (1)...(19): siRNA sense strand
ccuggauccugcccaugua

SEQ ID NO: 1694288 - RNA, 19 nt, Homo sapiens
  misc_RNA (1)...(19): siRNA sense strand
gcacagcuggaauuacaag

SEQ ID NO: 1694289 - RNA, 19 nt, Homo sapiens
  misc_RNA (1)...(19): siRNA sense strand
ggagacguacgugcacauu

SEQ ID NO: 1694290 - RNA, 19 nt, Homo sapiens
  misc_RNA (1)...(19): siRNA sense strand
ugagaucagacccuacauu

SEQ ID NO: 1694291 - RNA, 19 nt, Homo sapiens
  misc_RNA (1)...(19): siRNA sense strand
cuugaugggugcuuugaca

SEQ ID NO: 1694292 - RNA, 19 nt, Homo sapiens
  misc_RNA (1)...(19): siRNA sense strand
gcagagccagagugugaug

SEQ ID NO: 1694293 - RNA, 19 nt, Homo sapiens
  misc_RNA (1)...(19): siRNA sense strand
augcagagccagaguguga

SEQ ID NO: 1694294 - RNA, 19 nt, Homo sapiens
  misc_RNA (1)...(19): siRNA sense strand
agaacgccaucuacagcaa

SEQ ID NO: 1694295 - RNA, 19 nt, Homo sapiens
  misc_RNA (1)...(19): siRNA sense strand
caaggccgaggacgacuga

SEQ ID NO: 1694296 - RNA, 19 nt, Homo sapiens
  misc_RNA (1)...(19): siRNA sense strand
agaucagacccuacauuaa

SEQ ID NO: 1694297 - RNA, 19 nt, Homo sapiens
  misc_RNA (1)...(19): siRNA sense strand
cgacuucgacaccuacauc

SEQ ID NO: 1694298 - RNA, 19 nt, Homo sapiens
  misc_RNA (1)...(19): siRNA sense strand
gacccuacauuaauaucac

SEQ ID NO: 1694299 - RNA, 19 nt, Homo sapiens
  misc_RNA (1)...(19): siRNA sense strand
uaauaucaccauccugaag

SEQ ID NO: 1694300 - RNA, 19 nt, Homo sapiens
  misc_RNA (1)...(19): siRNA sense strand
cguggcaucuacuucuuca

SEQ ID NO: 1694301 - RNA, 19 nt, Homo sapiens
  misc_RNA (1)...(19): siRNA sense strand
gcgagaacgccaucuacag

SEQ ID NO: 1694302 - RNA, 19 nt, Homo sapiens
  misc_RNA (1)...(19): siRNA sense strand
ucagacccuacauuaauau

SEQ ID NO: 1694303 - RNA, 19 nt, Homo sapiens
  misc_RNA (1)...(19): siRNA sense strand
gagaucagacccuacauua

SEQ ID NO: 1694304 - RNA, 19 nt, Homo sapiens
  misc_RNA (1)...(19): siRNA sense strand
gaucagacccuacauuaau

SEQ ID NO: 1694305 - RNA, 19 nt, Homo sapiens
  misc_RNA (1)...(19): siRNA sense strand
ggaauuacaaggagacgua

SEQ ID NO: 1694306 - RNA, 19 nt, Homo sapiens
  misc_RNA (1)...(19): siRNA sense strand
gcaacgacuucgacaccua

SEQ ID NO: 1694307 - RNA, 19 nt, Homo sapiens
  misc_RNA (1)...(19): siRNA sense strand
gugcacagcuggaauuaca

SEQ ID NO: 1694308 - RNA, 19 nt, Homo sapiens
  misc_RNA (1)...(19): siRNA sense strand
gaaccuugaugggugcuuu

SEQ ID NO: 1694309 - RNA, 19 nt, Homo sapiens
  misc_RNA (1)...(19): siRNA sense strand
agacguacgugcacauuau

SEQ ID NO: 1694310 - RNA, 19 nt, Homo sapiens
  misc_RNA (1)...(19): siRNA sense strand
gagacguacgugcacauua

SEQ ID NO: 1694311 - RNA, 19 nt, Homo sapiens
  misc_RNA (1)...(19): siRNA sense strand
ggagcucaccuuugacaga

SEQ ID NO: 1694312 - RNA, 19 nt, Homo sapiens
  misc_RNA (1)...(19): siRNA sense strand
ccagaaagaggcugucauc

SEQ ID NO: 1694313 - RNA, 19 nt, Homo sapiens
  misc_RNA (1)...(19): siRNA sense strand
aucagacccuacauuaaua

SEQ ID NO: 1694314 - RNA, 19 nt, Homo sapiens
  misc_RNA (1)...(19): siRNA sense strand
aagaggcugucauccugua

SEQ ID NO: 1694315 - RNA, 19 nt, Homo sapiens
  misc_RNA (1)...(19): siRNA sense strand
ccuggauccugcccaugua

SEQ ID NO: 1694316 - RNA, 19 nt, Homo sapiens
  misc_RNA (1)...(19): siRNA sense strand
gcacagcuggaauuacaag

SEQ ID NO: 1694317 - RNA, 19 nt, Homo sapiens
  misc_RNA (1)...(19): siRNA sense strand
ggagacguacgugcacauu

SEQ ID NO: 1694318 - RNA, 19 nt, Homo sapiens
  misc_RNA (1)...(19): siRNA sense strand
ugagaucagacccuacauu

SEQ ID NO: 1694319 - RNA, 19 nt, Homo sapiens
  misc_RNA (1)...(19): siRNA sense strand
cuugaugggugcuuugaca

SEQ ID NO: 1694320 - RNA, 19 nt, Homo sapiens
  misc_RNA (1)...(19): siRNA sense strand
gcagagccagagugugaug

SEQ ID NO: 1694321 - RNA, 19 nt, Homo sapiens
  misc_RNA (1)...(19): siRNA sense strand
augcagagccagaguguga

SEQ ID NO: 1694322 - RNA, 19 nt, Homo sapiens
  misc_RNA (1)...(19): siRNA sense strand
agaacgccaucuacagcaa

SEQ ID NO: 1694323 - RNA, 19 nt, Homo sapiens
  misc_RNA (1)...(19): siRNA sense strand
caaggccgaggacgacuga

SEQ ID NO: 1694324 - RNA, 19 nt, Homo sapiens
  misc_RNA (1)...(19): siRNA sense strand
agaucagacccuacauuaa

SEQ ID NO: 1694325 - RNA, 19 nt, Homo sapiens
  misc_RNA (1)...(19): siRNA sense strand
cgacuucgacaccuacauc

SEQ ID NO: 1694326 - RNA, 19 nt, Homo sapiens
  misc_RNA (1)...(19): siRNA sense strand
gacccuacauuaauaucac

SEQ ID NO: 1694327 - RNA, 19 nt, Homo sapiens
  misc_RNA (1)...(19): siRNA sense strand
uaauaucaccauccugaag

SEQ ID NO: 1694328 - RNA, 19 nt, Homo sapiens
  misc_RNA (1)...(19): siRNA sense strand
cguggcaucuacuucuuca

SEQ ID NO: 1694329 - RNA, 19 nt, Homo sapiens
  misc_RNA (1)...(19): siRNA sense strand
gcgagaacgccaucuacag

SEQ ID NO: 1694330 - RNA, 19 nt, Homo sapiens
  misc_RNA (1)...(19): siRNA sense strand
ucagacccuacauuaauau

SEQ ID NO: 1694331 - RNA, 19 nt, Homo sapiens
  misc_RNA (1)...(19): siRNA sense strand
gagauaagcucaugauuga

SEQ ID NO: 1694332 - RNA, 19 nt, Homo sapiens
  misc_RNA (1)...(19): siRNA sense strand
gaggaggacucaucgacua

SEQ ID NO: 1694333 - RNA, 19 nt, Homo sapiens
  misc_RNA (1)...(19): siRNA sense strand
ccaaagaccuggagacuac

SEQ ID NO: 1694334 - RNA, 19 nt, Homo sapiens
  misc_RNA (1)...(19): siRNA sense strand
ggagauaagcucaugauug

SEQ ID NO: 1694335 - RNA, 19 nt, Homo sapiens
  misc_RNA (1)...(19): siRNA sense strand
ggacaucgcaguagaagug

SEQ ID NO: 1694336 - RNA, 19 nt, Homo sapiens
  misc_RNA (1)...(19): siRNA sense strand
ccaauggcauguuugaaga

SEQ ID NO: 1694337 - RNA, 19 nt, Homo sapiens
  misc_RNA (1)...(19): siRNA sense strand
acaaagcgcuggugaaggu

SEQ ID NO: 1694338 - RNA, 19 nt, Homo sapiens
  misc_RNA (1)...(19): siRNA sense strand
caacaucgacuuuagcaau

SEQ ID NO: 1694339 - RNA, 19 nt, Homo sapiens
  misc_RNA (1)...(19): siRNA sense strand
gauaagcucaugauugaug

SEQ ID NO: 1694340 - RNA, 19 nt, Homo sapiens
  misc_RNA (1)...(19): siRNA sense strand
ccaaucucguggacaauuu

SEQ ID NO: 1694341 - RNA, 19 nt, Homo sapiens
  misc_RNA (1)...(19): siRNA sense strand
uaucaccaauggcauguuu

SEQ ID NO: 1694342 - RNA, 19 nt, Homo sapiens
  misc_RNA (1)...(19): siRNA sense strand
ggccaugucugccaacuuc

SEQ ID NO: 1694343 - RNA, 19 nt, Homo sapiens
  misc_RNA (1)...(19): siRNA sense strand
ccucguggauucucugauu

SEQ ID NO: 1694344 - RNA, 19 nt, Homo sapiens
  misc_RNA (1)...(19): siRNA sense strand
ccaagguguuccagcagua

SEQ ID NO: 1694345 - RNA, 19 nt, Homo sapiens
  misc_RNA (1)...(19): siRNA sense strand
ggacaaagcgcuggugaag

SEQ ID NO: 1694346 - RNA, 19 nt, Homo sapiens
  misc_RNA (1)...(19): siRNA sense strand
gauauucccuacaaugacu

SEQ ID NO: 1694347 - RNA, 19 nt, Homo sapiens
  misc_RNA (1)...(19): siRNA sense strand
gaggugcccuuggguguug

SEQ ID NO: 1694348 - RNA, 19 nt, Homo sapiens
  misc_RNA (1)...(19): siRNA sense strand
gugggcaacuuugauauug

SEQ ID NO: 1694349 - RNA, 19 nt, Homo sapiens
  misc_RNA (1)...(19): siRNA sense strand
gcagugccgagaaugcaua

SEQ ID NO: 1694350 - RNA, 19 nt, Homo sapiens
  misc_RNA (1)...(19): siRNA sense strand
gugauauucccuacaauga

SEQ ID NO: 1694351 - RNA, 19 nt, Homo sapiens
  misc_RNA (1)...(19): siRNA sense strand
cagaauucuuggccucauu

SEQ ID NO: 1694352 - RNA, 19 nt, Homo sapiens
  misc_RNA (1)...(19): siRNA sense strand
ucauugacguggacacaga

SEQ ID NO: 1694353 - RNA, 19 nt, Homo sapiens
  misc_RNA (1)...(19): siRNA sense strand
cccgaguccugcccacuua

SEQ ID NO: 1694354 - RNA, 19 nt, Homo sapiens
  misc_RNA (1)...(19): siRNA sense strand
ccauggaccgcacggguua

SEQ ID NO: 1694355 - RNA, 19 nt, Homo sapiens
  misc_RNA (1)...(19): siRNA sense strand
agaaggagauaagcucaug

SEQ ID NO: 1694356 - RNA, 19 nt, Homo sapiens
  misc_RNA (1)...(19): siRNA sense strand
gaaaucccaccuggaguug

SEQ ID NO: 1694357 - RNA, 19 nt, Homo sapiens
  misc_RNA (1)...(19): siRNA sense strand
gcugcagccuggagaaauc

SEQ ID NO: 1694358 - RNA, 19 nt, Homo sapiens
  misc_RNA (1)...(19): siRNA sense strand
ggugauggaggacuucuug

SEQ ID NO: 1694359 - RNA, 19 nt, Homo sapiens
  misc_RNA (1)...(19): siRNA sense strand
gcaguagaagugaacauca

SEQ ID NO: 1694360 - RNA, 19 nt, Homo sapiens
  misc_RNA (1)...(19): siRNA sense strand
ccucaaacgugggcaacuu

SEQ ID NO: 1694361 - RNA, 19 nt, Homo sapiens
  misc_RNA (1)...(19): siRNA sense strand
ggugauauucccuacaaug

SEQ ID NO: 1694362 - RNA, 19 nt, Homo sapiens
  misc_RNA (1)...(19): siRNA sense strand
caaucucguggacaauuua

SEQ ID NO: 1694363 - RNA, 19 nt, Homo sapiens
  misc_RNA (1)...(19): siRNA sense strand
gauauggugagauccuuga

SEQ ID NO: 1694364 - RNA, 19 nt, Homo sapiens
  misc_RNA (1)...(19): siRNA sense strand
ggugcugggucuugucaau

SEQ ID NO: 1694365 - RNA, 19 nt, Homo sapiens
  misc_RNA (1)...(19): siRNA sense strand
gcucuagaccuggauauca

SEQ ID NO: 1694366 - RNA, 19 nt, Homo sapiens
  misc_RNA (1)...(19): siRNA sense strand
gggcaaauaccgauauggu

SEQ ID NO: 1694367 - RNA, 19 nt, Homo sapiens
  misc_RNA (1)...(19): siRNA sense strand
gaaggagauaagcucauga

SEQ ID NO: 1694368 - RNA, 19 nt, Homo sapiens
  misc_RNA (1)...(19): siRNA sense strand
ugacguggacacagaauuc

SEQ ID NO: 1694369 - RNA, 19 nt, Homo sapiens
  misc_RNA (1)...(19): siRNA sense strand
agaaaucccaccuggaguu

SEQ ID NO: 1694370 - RNA, 19 nt, Homo sapiens
  misc_RNA (1)...(19): siRNA sense strand
uggaggugcugguggagaa

SEQ ID NO: 1694371 - RNA, 19 nt, Homo sapiens
  misc_RNA (1)...(19): siRNA sense strand
acuaccaucugccucauug

SEQ ID NO: 1694372 - RNA, 19 nt, Homo sapiens
  misc_RNA (1)...(19): siRNA sense strand
ucaccaauggcauguuuga

SEQ ID NO: 1694373 - RNA, 19 nt, Homo sapiens
  misc_RNA (1)...(19): siRNA sense strand
gugucuaccugagcuugua

SEQ ID NO: 1694374 - RNA, 19 nt, Homo sapiens
  misc_RNA (1)...(19): siRNA sense strand
acucaucgacuacccauug

SEQ ID NO: 1694375 - RNA, 19 nt, Homo sapiens
  misc_RNA (1)...(19): siRNA sense strand
aacaucgacuuuagcaaug

SEQ ID NO: 1694376 - RNA, 19 nt, Homo sapiens
  misc_RNA (1)...(19): siRNA sense strand
ggagaagaccagccucaac

SEQ ID NO: 1694377 - RNA, 19 nt, Homo sapiens
  misc_RNA (1)...(19): siRNA sense strand
ugacucuacugcagaagca

SEQ ID NO: 1694378 - RNA, 19 nt, Homo sapiens
  misc_RNA (1)...(19): siRNA sense strand
gagcugcagccuggagaaa

SEQ ID NO: 1694379 - RNA, 19 nt, Homo sapiens
  misc_RNA (1)...(19): siRNA sense strand
gcccuuggguguuggugau

SEQ ID NO: 1694380 - RNA, 19 nt, Homo sapiens
  misc_RNA (1)...(19): siRNA sense strand
ccaguauggucacauugag

SEQ ID NO: 1694381 - RNA, 19 nt, Homo sapiens
  misc_RNA (1)...(19): siRNA sense strand
augcagacauugacguguu

SEQ ID NO: 1694382 - RNA, 19 nt, Homo sapiens
  misc_RNA (1)...(19): siRNA sense strand
auaccgauauggugagauc

SEQ ID NO: 1694383 - RNA, 19 nt, Homo sapiens
  misc_RNA (1)...(19): siRNA sense strand
ugcugggucuugucaauga

SEQ ID NO: 1694384 - RNA, 19 nt, Homo sapiens
  misc_RNA (1)...(19): siRNA sense strand
uuggugauauucccuacaa

SEQ ID NO: 1694385 - RNA, 19 nt, Homo sapiens
  misc_RNA (1)...(19): siRNA sense strand
cgacguccucccugacuug

SEQ ID NO: 1694386 - RNA, 19 nt, Homo sapiens
  misc_RNA (1)...(19): siRNA sense strand
agaauucuuggccucauuu

SEQ ID NO: 1694387 - RNA, 19 nt, Homo sapiens
  misc_RNA (1)...(19): siRNA sense strand
uggcauguuugaagagcuu

SEQ ID NO: 1694388 - RNA, 19 nt, Homo sapiens
  misc_RNA (1)...(19): siRNA sense strand
ucagggaccuccgaaacag

SEQ ID NO: 1694389 - RNA, 19 nt, Homo sapiens
  misc_RNA (1)...(19): siRNA sense strand
agaccuggauaucaccaau

SEQ ID NO: 1694390 - RNA, 19 nt, Homo sapiens
  misc_RNA (1)...(19): siRNA sense strand
cagcugggccucguggauu

SEQ ID NO: 1694391 - RNA, 19 nt, Homo sapiens
  misc_RNA (1)...(19): siRNA sense strand
gugcugaacccaccaucug

SEQ ID NO: 1694392 - RNA, 19 nt, Homo sapiens
  misc_RNA (1)...(19): siRNA sense strand
aaauaccgauauggugaga

SEQ ID NO: 1694393 - RNA, 19 nt, Homo sapiens
  misc_RNA (1)...(19): siRNA sense strand
ccaaaauccucaacaucga

SEQ ID NO: 1694394 - RNA, 19 nt, Homo sapiens
  misc_RNA (1)...(19): siRNA sense strand
aaacgugggcaacuuugau

SEQ ID NO: 1694395 - RNA, 19 nt, Homo sapiens
  misc_RNA (1)...(19): siRNA sense strand
acauugagaccaacgacaa

SEQ ID NO: 1694396 - RNA, 19 nt, Homo sapiens
  misc_RNA (1)...(19): siRNA sense strand
caucagggaccuccgaaac

SEQ ID NO: 1694397 - RNA, 19 nt, Homo sapiens
  misc_RNA (1)...(19): siRNA sense strand
gauguggugcugggucuug

SEQ ID NO: 1694398 - RNA, 19 nt, Homo sapiens
  misc_RNA (1)...(19): siRNA sense strand
gauaucaccaauggcaugu

SEQ ID NO: 1694399 - RNA, 19 nt, Homo sapiens
  misc_RNA (1)...(19): siRNA sense strand
cguggacacagaauucuug

SEQ ID NO: 1694400 - RNA, 19 nt, Homo sapiens
  misc_RNA (1)...(19): siRNA sense strand
cuacaaugacuuccauguc

SEQ ID NO: 1694401 - RNA, 19 nt, Homo sapiens
  misc_RNA (1)...(19): siRNA sense strand
ccacggagcugaugaacuu

SEQ ID NO: 1694402 - RNA, 19 nt, Homo sapiens
  misc_RNA (1)...(19): siRNA sense strand
acauggaccuggccaaaua

SEQ ID NO: 1694403 - RNA, 19 nt, Homo sapiens
  misc_RNA (1)...(19): siRNA sense strand
cagacaccauugacauuua

SEQ ID NO: 1694404 - RNA, 19 nt, Homo sapiens
  misc_RNA (1)...(19): siRNA sense strand
caaguccgcuggccaguuc

SEQ ID NO: 1694405 - RNA, 19 nt, Homo sapiens
  misc_RNA (1)...(19): siRNA sense strand
gaacgccauuguccucuuc

SEQ ID NO: 1694406 - RNA, 19 nt, Homo sapiens
  misc_RNA (1)...(19): siRNA sense strand
gcagacaccauugacauuu

SEQ ID NO: 1694407 - RNA, 19 nt, Homo sapiens
  misc_RNA (1)...(19): siRNA sense strand
cggaggacaucgucuacua

SEQ ID NO: 1694408 - RNA, 19 nt, Homo sapiens
  misc_RNA (1)...(19): siRNA sense strand
ucaaggcacuggacgucua

SEQ ID NO: 1694409 - RNA, 19 nt, Homo sapiens
  misc_RNA (1)...(19): siRNA sense strand
gcaccagagcgaugaauga

SEQ ID NO: 1694410 - RNA, 19 nt, Homo sapiens
  misc_RNA (1)...(19): siRNA sense strand
ugaaugacaucggcgacua

SEQ ID NO: 1694411 - RNA, 19 nt, Homo sapiens
  misc_RNA (1)...(19): siRNA sense strand
ggagagcuacgguuacuca

SEQ ID NO: 1694412 - RNA, 19 nt, Homo sapiens
  misc_RNA (1)...(19): siRNA sense strand
ccagagcgaugaaugacau

SEQ ID NO: 1694413 - RNA, 19 nt, Homo sapiens
  misc_RNA (1)...(19): siRNA sense strand
gaguacgccuuugcucauu

SEQ ID NO: 1694414 - RNA, 19 nt, Homo sapiens
  misc_RNA (1)...(19): siRNA sense strand
ggaacgccauuguccucuu

SEQ ID NO: 1694415 - RNA, 19 nt, Homo sapiens
  misc_RNA (1)...(19): siRNA sense strand
acagcaggcucuccuacaa

SEQ ID NO: 1694416 - RNA, 19 nt, Homo sapiens
  misc_RNA (1)...(19): siRNA sense strand
caaccuggacgggcugaua

SEQ ID NO: 1694417 - RNA, 19 nt, Homo sapiens
  misc_RNA (1)...(19): siRNA sense strand
cagcaucgaccacaucuca

SEQ ID NO: 1694418 - RNA, 19 nt, Homo sapiens
  misc_RNA (1)...(19): siRNA sense strand
guacgccuuugcucauuuc

SEQ ID NO: 1694419 - RNA, 19 nt, Homo sapiens
  misc_RNA (1)...(19): siRNA sense strand
gcguguacaucauccaauc

SEQ ID NO: 1694420 - RNA, 19 nt, Homo sapiens
  misc_RNA (1)...(19): siRNA sense strand
ggaguacgccuuugcucau

SEQ ID NO: 1694421 - RNA, 19 nt, Homo sapiens
  misc_RNA (1)...(19): siRNA sense strand
cgacauggaccuggccaaa

SEQ ID NO: 1694422 - RNA, 19 nt, Homo sapiens
  misc_RNA (1)...(19): siRNA sense strand
caucgacgcagacaccauu

SEQ ID NO: 1694423 - RNA, 19 nt, Homo sapiens
  misc_RNA (1)...(19): siRNA sense strand
gcaucgaccacaucucaga

SEQ ID NO: 1694424 - RNA, 19 nt, Homo sapiens
  misc_RNA (1)...(19): siRNA sense strand
gcacuggacgucuacuucu

SEQ ID NO: 1694425 - RNA, 19 nt, Homo sapiens
  misc_RNA (1)...(19): siRNA sense strand
ccacgggcaucagccauca

SEQ ID NO: 1694426 - RNA, 19 nt, Homo sapiens
  misc_RNA (1)...(19): siRNA sense strand
ggaaccugaugggcuccua

SEQ ID NO: 1694427 - RNA, 19 nt, Homo sapiens
  misc_RNA (1)...(19): siRNA sense strand
gcagaaggccaaggucaag

SEQ ID NO: 1694428 - RNA, 19 nt, Homo sapiens
  misc_RNA (1)...(19): siRNA sense strand
caucggaggacaucgucua

SEQ ID NO: 1694429 - RNA, 19 nt, Homo sapiens
  misc_RNA (1)...(19): siRNA sense strand
ccacggugcugacgaugac

SEQ ID NO: 1694430 - RNA, 19 nt, Homo sapiens
  misc_RNA (1)...(19): siRNA sense strand
ucucagaggccaacaugga

SEQ ID NO: 1694431 - RNA, 19 nt, Homo sapiens
  misc_RNA (1)...(19): siRNA sense strand
ggccgucaaugucaucuac

SEQ ID NO: 1694432 - RNA, 19 nt, Homo sapiens
  misc_RNA (1)...(19): siRNA sense strand
caucauccaauccuacaug

SEQ ID NO: 1694433 - RNA, 19 nt, Homo sapiens
  misc_RNA (1)...(19): siRNA sense strand
ggacgugaggaacgccauu

SEQ ID NO: 1694434 - RNA, 19 nt, Homo sapiens
  misc_RNA (1)...(19): siRNA sense strand
agacaccauugacauuuac

SEQ ID NO: 1694435 - RNA, 19 nt, Homo sapiens
  misc_RNA (1)...(19): siRNA sense strand
cagaggccaacauggagua

SEQ ID NO: 1694436 - RNA, 19 nt, Homo sapiens
  misc_RNA (1)...(19): siRNA sense strand
caucucagaggccaacaug

SEQ ID NO: 1694437 - RNA, 19 nt, Homo sapiens
  misc_RNA (1)...(19): siRNA sense strand
gcgacuacgugggcuccaa

SEQ ID NO: 1694438 - RNA, 19 nt, Homo sapiens
  misc_RNA (1)...(19): siRNA sense strand
ccgacggcgugauccugua

SEQ ID NO: 1694439 - RNA, 19 nt, Homo sapiens
  misc_RNA (1)...(19): siRNA sense strand
gacauggaccuggccaaau

SEQ ID NO: 1694440 - RNA, 19 nt, Homo sapiens
  misc_RNA (1)...(19): siRNA sense strand
aguacgccuuugcucauuu

SEQ ID NO: 1694441 - RNA, 19 nt, Homo sapiens
  misc_RNA (1)...(19): siRNA sense strand
ggaggacaucgucuacuac

SEQ ID NO: 1694442 - RNA, 19 nt, Homo sapiens
  misc_RNA (1)...(19): siRNA sense strand
ugcuggaccuggagagcua

SEQ ID NO: 1694443 - RNA, 19 nt, Homo sapiens
  misc_RNA (1)...(19): siRNA sense strand
uguguucccugcggcguuu

SEQ ID NO: 1694444 - RNA, 19 nt, Homo sapiens
  misc_RNA (1)...(19): siRNA sense strand
gacgucuacuucuggaucu

SEQ ID NO: 1694445 - RNA, 19 nt, Homo sapiens
  misc_RNA (1)...(19): siRNA sense strand
gacagcaggcucuccuaca

SEQ ID NO: 1694446 - RNA, 19 nt, Homo sapiens
  misc_RNA (1)...(19): siRNA sense strand
gaaugacaucggcgacuac

SEQ ID NO: 1694447 - RNA, 19 nt, Homo sapiens
  misc_RNA (1)...(19): siRNA sense strand
ccaaggagcugaucaauaa

SEQ ID NO: 1694448 - RNA, 19 nt, Homo sapiens
  misc_RNA (1)...(19): siRNA sense strand
gaagaagagaagaucaaua

SEQ ID NO: 1694449 - RNA, 19 nt, Homo sapiens
  misc_RNA (1)...(19): siRNA sense strand
ggagaacauuaucgacauu

SEQ ID NO: 1694450 - RNA, 19 nt, Homo sapiens
  misc_RNA (1)...(19): siRNA sense strand
gaggaggugugccagacua

SEQ ID NO: 1694451 - RNA, 19 nt, Homo sapiens
  misc_RNA (1)...(19): siRNA sense strand
gaaaccugcuaguggagaa

SEQ ID NO: 1694452 - RNA, 19 nt, Homo sapiens
  misc_RNA (1)...(19): siRNA sense strand
ggcagaagcaguuguuaaa

SEQ ID NO: 1694453 - RNA, 19 nt, Homo sapiens
  misc_RNA (1)...(19): siRNA sense strand
gcgaggagcaugaagaaga

SEQ ID NO: 1694454 - RNA, 19 nt, Homo sapiens
  misc_RNA (1)...(19): siRNA sense strand
gccaaggagcugaucaaua

SEQ ID NO: 1694455 - RNA, 19 nt, Homo sapiens
  misc_RNA (1)...(19): siRNA sense strand
gaacauuaucgacauuuac

SEQ ID NO: 1694456 - RNA, 19 nt, Homo sapiens
  misc_RNA (1)...(19): siRNA sense strand
ggucuucggugcccacaag

SEQ ID NO: 1694457 - RNA, 19 nt, Homo sapiens
  misc_RNA (1)...(19): siRNA sense strand
gagaacauuaucgacauuu

SEQ ID NO: 1694458 - RNA, 19 nt, Homo sapiens
  misc_RNA (1)...(19): siRNA sense strand
ggaggcagaagcaguuguu

SEQ ID NO: 1694459 - RNA, 19 nt, Homo sapiens
  misc_RNA (1)...(19): siRNA sense strand
cauggaagagccacaaaug

SEQ ID NO: 1694460 - RNA, 19 nt, Homo sapiens
  misc_RNA (1)...(19): siRNA sense strand
caaccugugccgcaaaugu

SEQ ID NO: 1694461 - RNA, 19 nt, Homo sapiens
  misc_RNA (1)...(19): siRNA sense strand
cgaggagcaugaagaagag

SEQ ID NO: 1694462 - RNA, 19 nt, Homo sapiens
  misc_RNA (1)...(19): siRNA sense strand
gccagacuaucgaggacaa

SEQ ID NO: 1694463 - RNA, 19 nt, Homo sapiens
  misc_RNA (1)...(19): siRNA sense strand
agaagcaguuguuaaacca

SEQ ID NO: 1694464 - RNA, 19 nt, Homo sapiens
  misc_RNA (1)...(19): siRNA sense strand
aagcagugaucacacagau

SEQ ID NO: 1694465 - RNA, 19 nt, Homo sapiens
  misc_RNA (1)...(19): siRNA sense strand
cagaagcaguuguuaaacc

SEQ ID NO: 1694466 - RNA, 19 nt, Homo sapiens
  misc_RNA (1)...(19): siRNA sense strand
uggagaacauuaucgacau

SEQ ID NO: 1694467 - RNA, 19 nt, Homo sapiens
  misc_RNA (1)...(19): siRNA sense strand
ccacaaauggcgcuguauc

SEQ ID NO: 1694468 - RNA, 19 nt, Homo sapiens
  misc_RNA (1)...(19): siRNA sense strand
gugcgaggagcaugaagaa

SEQ ID NO: 1694469 - RNA, 19 nt, Homo sapiens
  misc_RNA (1)...(19): siRNA sense strand
ucuacggccugcagcgaaa

SEQ ID NO: 1694470 - RNA, 19 nt, Homo sapiens
  misc_RNA (1)...(19): siRNA sense strand
ccacugcccaccauuuaca

SEQ ID NO: 1694471 - RNA, 19 nt, Homo sapiens
  misc_RNA (1)...(19): siRNA sense strand
gcaugaagaagagaagauc

SEQ ID NO: 1694472 - RNA, 19 nt, Homo sapiens
  misc_RNA (1)...(19): siRNA sense strand
gaggcagaagcaguuguua

SEQ ID NO: 1694473 - RNA, 19 nt, Homo sapiens
  misc_RNA (1)...(19): siRNA sense strand
cagacuaucgaggacaaua

SEQ ID NO: 1694474 - RNA, 19 nt, Homo sapiens
  misc_RNA (1)...(19): siRNA sense strand
auggagcaauucaccguaa

SEQ ID NO: 1694475 - RNA, 19 nt, Homo sapiens
  misc_RNA (1)...(19): siRNA sense strand
aggcagaagcaguuguuaa

SEQ ID NO: 1694476 - RNA, 19 nt, Homo sapiens
  misc_RNA (1)...(19): siRNA sense strand
ggccucgaauccucuaugg

SEQ ID NO: 1694477 - RNA, 19 nt, Homo sapiens
  misc_RNA (1)...(19): siRNA sense strand
augagagcauggagcaauu

SEQ ID NO: 1694478 - RNA, 19 nt, Homo sapiens
  misc_RNA (1)...(19): siRNA sense strand
ggagcacguggccgaaaug

SEQ ID NO: 1694479 - RNA, 19 nt, Homo sapiens
  misc_RNA (1)...(19): siRNA sense strand
gagcaugaagaagagaaga

SEQ ID NO: 1694480 - RNA, 19 nt, Homo sapiens
  misc_RNA (1)...(19): siRNA sense strand
gagagcauggagcaauuca

SEQ ID NO: 1694481 - RNA, 19 nt, Homo sapiens
  misc_RNA (1)...(19): siRNA sense strand
ggccucauccgucaguaug

SEQ ID NO: 1694482 - RNA, 19 nt, Homo sapiens
  misc_RNA (1)...(19): siRNA sense strand
gcagaagcaguuguuaaac

SEQ ID NO: 1694483 - RNA, 19 nt, Homo sapiens
  misc_RNA (1)...(19): siRNA sense strand
gugcccaccugcucucucu

SEQ ID NO: 1694484 - RNA, 19 nt, Homo sapiens
  misc_RNA (1)...(19): siRNA sense strand
ugaagaagagaagaucaau

SEQ ID NO: 1694485 - RNA, 19 nt, Homo sapiens
  misc_RNA (1)...(19): siRNA sense strand
uuaucgacauuuacaagca

SEQ ID NO: 1694486 - RNA, 19 nt, Homo sapiens
  misc_RNA (1)...(19): siRNA sense strand
uggagcacguggccgaaau

SEQ ID NO: 1694487 - RNA, 19 nt, Homo sapiens
  misc_RNA (1)...(19): siRNA sense strand
ugcaagcagugaucacaca

SEQ ID NO: 1694488 - RNA, 19 nt, Homo sapiens
  misc_RNA (1)...(19): siRNA sense strand
gcuaguggagaacauuauc

SEQ ID NO: 1694489 - RNA, 19 nt, Homo sapiens
  misc_RNA (1)...(19): siRNA sense strand
uaugagagcauggagcaau

SEQ ID NO: 1694490 - RNA, 19 nt, Homo sapiens
  misc_RNA (1)...(19): siRNA sense strand
ccaaggagcugaucaauaa

SEQ ID NO: 1694491 - RNA, 19 nt, Homo sapiens
  misc_RNA (1)...(19): siRNA sense strand
gaagaagagaagaucaaua

SEQ ID NO: 1694492 - RNA, 19 nt, Homo sapiens
  misc_RNA (1)...(19): siRNA sense strand
ggagaacauuaucgacauu

SEQ ID NO: 1694493 - RNA, 19 nt, Homo sapiens
  misc_RNA (1)...(19): siRNA sense strand
gaggaggugugccagacua

SEQ ID NO: 1694494 - RNA, 19 nt, Homo sapiens
  misc_RNA (1)...(19): siRNA sense strand
gaaaccugcuaguggagaa

SEQ ID NO: 1694495 - RNA, 19 nt, Homo sapiens
  misc_RNA (1)...(19): siRNA sense strand
ggcagaagcaguuguuaaa

SEQ ID NO: 1694496 - RNA, 19 nt, Homo sapiens
  misc_RNA (1)...(19): siRNA sense strand
gcgaggagcaugaagaaga

SEQ ID NO: 1694497 - RNA, 19 nt, Homo sapiens
  misc_RNA (1)...(19): siRNA sense strand
gccaaggagcugaucaaua

SEQ ID NO: 1694498 - RNA, 19 nt, Homo sapiens
  misc_RNA (1)...(19): siRNA sense strand
gaacauuaucgacauuuac

SEQ ID NO: 1694499 - RNA, 19 nt, Homo sapiens
  misc_RNA (1)...(19): siRNA sense strand
ggucuucggugcccacaag

SEQ ID NO: 1694500 - RNA, 19 nt, Homo sapiens
  misc_RNA (1)...(19): siRNA sense strand
gagaacauuaucgacauuu

SEQ ID NO: 1694501 - RNA, 19 nt, Homo sapiens
  misc_RNA (1)...(19): siRNA sense strand
ggaggcagaagcaguuguu

SEQ ID NO: 1694502 - RNA, 19 nt, Homo sapiens
  misc_RNA (1)...(19): siRNA sense strand
cauggaagagccacaaaug

SEQ ID NO: 1694503 - RNA, 19 nt, Homo sapiens
  misc_RNA (1)...(19): siRNA sense strand
caaccugugccgcaaaugu

SEQ ID NO: 1694504 - RNA, 19 nt, Homo sapiens
  misc_RNA (1)...(19): siRNA sense strand
cgaggagcaugaagaagag

SEQ ID NO: 1694505 - RNA, 19 nt, Homo sapiens
  misc_RNA (1)...(19): siRNA sense strand
gccagacuaucgaggacaa

SEQ ID NO: 1694506 - RNA, 19 nt, Homo sapiens
  misc_RNA (1)...(19): siRNA sense strand
agaagcaguuguuaaacca

SEQ ID NO: 1694507 - RNA, 19 nt, Homo sapiens
  misc_RNA (1)...(19): siRNA sense strand
aagcagugaucacacagau

SEQ ID NO: 1694508 - RNA, 19 nt, Homo sapiens
  misc_RNA (1)...(19): siRNA sense strand
cagaagcaguuguuaaacc

SEQ ID NO: 1694509 - RNA, 19 nt, Homo sapiens
  misc_RNA (1)...(19): siRNA sense strand
uggagaacauuaucgacau

SEQ ID NO: 1694510 - RNA, 19 nt, Homo sapiens
  misc_RNA (1)...(19): siRNA sense strand
ccacaaauggcgcuguauc

SEQ ID NO: 1694511 - RNA, 19 nt, Homo sapiens
  misc_RNA (1)...(19): siRNA sense strand
gugcgaggagcaugaagaa

SEQ ID NO: 1694512 - RNA, 19 nt, Homo sapiens
  misc_RNA (1)...(19): siRNA sense strand
ucuacggccugcagcgaaa

SEQ ID NO: 1694513 - RNA, 19 nt, Homo sapiens
  misc_RNA (1)...(19): siRNA sense strand
ccacugcccaccauuuaca

SEQ ID NO: 1694514 - RNA, 19 nt, Homo sapiens
  misc_RNA (1)...(19): siRNA sense strand
gcaugaagaagagaagauc

SEQ ID NO: 1694515 - RNA, 19 nt, Homo sapiens
  misc_RNA (1)...(19): siRNA sense strand
gaggcagaagcaguuguua

SEQ ID NO: 1694516 - RNA, 19 nt, Homo sapiens
  misc_RNA (1)...(19): siRNA sense strand
cagacuaucgaggacaaua

SEQ ID NO: 1694517 - RNA, 19 nt, Homo sapiens
  misc_RNA (1)...(19): siRNA sense strand
auggagcaauucaccguaa

SEQ ID NO: 1694518 - RNA, 19 nt, Homo sapiens
  misc_RNA (1)...(19): siRNA sense strand
aggcagaagcaguuguuaa

SEQ ID NO: 1694519 - RNA, 19 nt, Homo sapiens
  misc_RNA (1)...(19): siRNA sense strand
ggccucgaauccucuaugg

SEQ ID NO: 1694520 - RNA, 19 nt, Homo sapiens
  misc_RNA (1)...(19): siRNA sense strand
augagagcauggagcaauu

SEQ ID NO: 1694521 - RNA, 19 nt, Homo sapiens
  misc_RNA (1)...(19): siRNA sense strand
ggagcacguggccgaaaug

SEQ ID NO: 1694522 - RNA, 19 nt, Homo sapiens
  misc_RNA (1)...(19): siRNA sense strand
gagcaugaagaagagaaga

SEQ ID NO: 1694523 - RNA, 19 nt, Homo sapiens
  misc_RNA (1)...(19): siRNA sense strand
gagagcauggagcaauuca

SEQ ID NO: 1694524 - RNA, 19 nt, Homo sapiens
  misc_RNA (1)...(19): siRNA sense strand
ggccucauccgucaguaug

SEQ ID NO: 1694525 - RNA, 19 nt, Homo sapiens
  misc_RNA (1)...(19): siRNA sense strand
gcagaagcaguuguuaaac

SEQ ID NO: 1694526 - RNA, 19 nt, Homo sapiens
  misc_RNA (1)...(19): siRNA sense strand
gugcccaccugcucucucu

SEQ ID NO: 1694527 - RNA, 19 nt, Homo sapiens
  misc_RNA (1)...(19): siRNA sense strand
ugaagaagagaagaucaau

SEQ ID NO: 1694528 - RNA, 19 nt, Homo sapiens
  misc_RNA (1)...(19): siRNA sense strand
uuaucgacauuuacaagca

SEQ ID NO: 1694529 - RNA, 19 nt, Homo sapiens
  misc_RNA (1)...(19): siRNA sense strand
uggagcacguggccgaaau

SEQ ID NO: 1694530 - RNA, 19 nt, Homo sapiens
  misc_RNA (1)...(19): siRNA sense strand
ugcaagcagugaucacaca

SEQ ID NO: 1694531 - RNA, 19 nt, Homo sapiens
  misc_RNA (1)...(19): siRNA sense strand
gcuaguggagaacauuauc

SEQ ID NO: 1694532 - RNA, 19 nt, Homo sapiens
  misc_RNA (1)...(19): siRNA sense strand
uaugagagcauggagcaau

SEQ ID NO: 1694533 - RNA, 19 nt, Homo sapiens
  misc_RNA (1)...(19): siRNA sense strand
gcaaaggaauguuaaucua

SEQ ID NO: 1694534 - RNA, 19 nt, Homo sapiens
  misc_RNA (1)...(19): siRNA sense strand
gaauggauauuugcagaua

SEQ ID NO: 1694535 - RNA, 19 nt, Homo sapiens
  misc_RNA (1)...(19): siRNA sense strand
cagaaucacugaaagcaaa

SEQ ID NO: 1694536 - RNA, 19 nt, Homo sapiens
  misc_RNA (1)...(19): siRNA sense strand
caucguggcgcauguauua

SEQ ID NO: 1694537 - RNA, 19 nt, Homo sapiens
  misc_RNA (1)...(19): siRNA sense strand
gaagacaauuauucacguu

SEQ ID NO: 1694538 - RNA, 19 nt, Homo sapiens
  misc_RNA (1)...(19): siRNA sense strand
gaaaccaaauccugaucaa

SEQ ID NO: 1694539 - RNA, 19 nt, Homo sapiens
  misc_RNA (1)...(19): siRNA sense strand
caagagcaaaggaauguua

SEQ ID NO: 1694540 - RNA, 19 nt, Homo sapiens
  misc_RNA (1)...(19): siRNA sense strand
ccauuaaaguuacugguuu

SEQ ID NO: 1694541 - RNA, 19 nt, Homo sapiens
  misc_RNA (1)...(19): siRNA sense strand
uaaguacgauguucaagug

SEQ ID NO: 1694542 - RNA, 19 nt, Homo sapiens
  misc_RNA (1)...(19): siRNA sense strand
gaaaauaaacgcuccaaaa

SEQ ID NO: 1694543 - RNA, 19 nt, Homo sapiens
  misc_RNA (1)...(19): siRNA sense strand
gaaaccagaaucacugaaa

SEQ ID NO: 1694544 - RNA, 19 nt, Homo sapiens
  misc_RNA (1)...(19): siRNA sense strand
gaguggagccaaccuauuu

SEQ ID NO: 1694545 - RNA, 19 nt, Homo sapiens
  misc_RNA (1)...(19): siRNA sense strand
gcagaacgaccacucacua

SEQ ID NO: 1694546 - RNA, 19 nt, Homo sapiens
  misc_RNA (1)...(19): siRNA sense strand
caaauaaauccuccacuga

SEQ ID NO: 1694547 - RNA, 19 nt, Homo sapiens
  misc_RNA (1)...(19): siRNA sense strand
ccuggaaccucaauuguga

SEQ ID NO: 1694548 - RNA, 19 nt, Homo sapiens
  misc_RNA (1)...(19): siRNA sense strand
ucacgccauugaucaaaua

SEQ ID NO: 1694549 - RNA, 19 nt, Homo sapiens
  misc_RNA (1)...(19): siRNA sense strand
ccacaaacacuacagaaga

SEQ ID NO: 1694550 - RNA, 19 nt, Homo sapiens
  misc_RNA (1)...(19): siRNA sense strand
ugaaggaacucgucucucu

SEQ ID NO: 1694551 - RNA, 19 nt, Homo sapiens
  misc_RNA (1)...(19): siRNA sense strand
gagccaaccuauuuaugug

SEQ ID NO: 1694552 - RNA, 19 nt, Homo sapiens
  misc_RNA (1)...(19): siRNA sense strand
gaacucgucucucuaucca

SEQ ID NO: 1694553 - RNA, 19 nt, Homo sapiens
  misc_RNA (1)...(19): siRNA sense strand
gaagaugacuaugaaacca

SEQ ID NO: 1694554 - RNA, 19 nt, Homo sapiens
  misc_RNA (1)...(19): siRNA sense strand
ugacuuacuuccugaugaa

SEQ ID NO: 1694555 - RNA, 19 nt, Homo sapiens
  misc_RNA (1)...(19): siRNA sense strand
gaaagcaaauguguaacca

SEQ ID NO: 1694556 - RNA, 19 nt, Homo sapiens
  misc_RNA (1)...(19): siRNA sense strand
gcagggcucuggagugagu

SEQ ID NO: 1694557 - RNA, 19 nt, Homo sapiens
  misc_RNA (1)...(19): siRNA sense strand
gaaugucacagcagagauu

SEQ ID NO: 1694558 - RNA, 19 nt, Homo sapiens
  misc_RNA (1)...(19): siRNA sense strand
uacaaggaauggauauuug

SEQ ID NO: 1694559 - RNA, 19 nt, Homo sapiens
  misc_RNA (1)...(19): siRNA sense strand
guacgauguucaagugaga

SEQ ID NO: 1694560 - RNA, 19 nt, Homo sapiens
  misc_RNA (1)...(19): siRNA sense strand
ccugucaauuucaccauua

SEQ ID NO: 1694561 - RNA, 19 nt, Homo sapiens
  misc_RNA (1)...(19): siRNA sense strand
ggagccaaccuauuuaugu

SEQ ID NO: 1694562 - RNA, 19 nt, Homo sapiens
  misc_RNA (1)...(19): siRNA sense strand
agaaaccagugucugcuuu

SEQ ID NO: 1694563 - RNA, 19 nt, Homo sapiens
  misc_RNA (1)...(19): siRNA sense strand
gaacgaccacucacuacug

SEQ ID NO: 1694564 - RNA, 19 nt, Homo sapiens
  misc_RNA (1)...(19): siRNA sense strand
gaaggaacucgucucucua

SEQ ID NO: 1694565 - RNA, 19 nt, Homo sapiens
  misc_RNA (1)...(19): siRNA sense strand
gauacugcaagcugacuua

SEQ ID NO: 1694566 - RNA, 19 nt, Homo sapiens
  misc_RNA (1)...(19): siRNA sense strand
cuacagaagacaauuauuc

SEQ ID NO: 1694567 - RNA, 19 nt, Homo sapiens
  misc_RNA (1)...(19): siRNA sense strand
ccaaugcauucaucucaau

SEQ ID NO: 1694568 - RNA, 19 nt, Homo sapiens
  misc_RNA (1)...(19): siRNA sense strand
ggaccauccugcagaacga

SEQ ID NO: 1694569 - RNA, 19 nt, Homo sapiens
  misc_RNA (1)...(19): siRNA sense strand
aauaaacgcuccaaaagaa

SEQ ID NO: 1694570 - RNA, 19 nt, Homo sapiens
  misc_RNA (1)...(19): siRNA sense strand
caaaagaagaugacuauga

SEQ ID NO: 1694571 - RNA, 19 nt, Homo sapiens
  misc_RNA (1)...(19): siRNA sense strand
aaauaucgcaugcugguuu

SEQ ID NO: 1694572 - RNA, 19 nt, Homo sapiens
  misc_RNA (1)...(19): siRNA sense strand
aaauaaauccuccacugaa

SEQ ID NO: 1694573 - RNA, 19 nt, Homo sapiens
  misc_RNA (1)...(19): siRNA sense strand
cauuaaaguuacugguuug

SEQ ID NO: 1694574 - RNA, 19 nt, Homo sapiens
  misc_RNA (1)...(19): siRNA sense strand
aauaaauccuccacugaau

SEQ ID NO: 1694575 - RNA, 19 nt, Homo sapiens
  misc_RNA (1)...(19): siRNA sense strand
caaaggaauguuaaucuag

SEQ ID NO: 1694576 - RNA, 19 nt, Homo sapiens
  misc_RNA (1)...(19): siRNA sense strand
cgccauugaucaaauaaau

SEQ ID NO: 1694577 - RNA, 19 nt, Homo sapiens
  misc_RNA (1)...(19): siRNA sense strand
acacuacagaagacaauua

SEQ ID NO: 1694578 - RNA, 19 nt, Homo sapiens
  misc_RNA (1)...(19): siRNA sense strand
ggaaaccaaauccugauca

SEQ ID NO: 1694579 - RNA, 19 nt, Homo sapiens
  misc_RNA (1)...(19): siRNA sense strand
gaucaagagcaaaggaaug

SEQ ID NO: 1694580 - RNA, 19 nt, Homo sapiens
  misc_RNA (1)...(19): siRNA sense strand
ugaagaaugccaagaauac

SEQ ID NO: 1694581 - RNA, 19 nt, Homo sapiens
  misc_RNA (1)...(19): siRNA sense strand
gagcaaaggaauguuaauc

SEQ ID NO: 1694582 - RNA, 19 nt, Homo sapiens
  misc_RNA (1)...(19): siRNA sense strand
gaccaaugcauucaucuca

SEQ ID NO: 1694583 - RNA, 19 nt, Homo sapiens
  misc_RNA (1)...(19): siRNA sense strand
gaagaaugccaagaauaca

SEQ ID NO: 1694584 - RNA, 19 nt, Homo sapiens
  misc_RNA (1)...(19): siRNA sense strand
aaccaaauccugaucaaga

SEQ ID NO: 1694585 - RNA, 19 nt, Homo sapiens
  misc_RNA (1)...(19): siRNA sense strand
acugaaagcaaauguguaa

SEQ ID NO: 1694586 - RNA, 19 nt, Homo sapiens
  misc_RNA (1)...(19): siRNA sense strand
gcaaauguguaaccauccu

SEQ ID NO: 1694587 - RNA, 19 nt, Homo sapiens
  misc_RNA (1)...(19): siRNA sense strand
caagugagagcagcaguga

SEQ ID NO: 1694588 - RNA, 19 nt, Homo sapiens
  misc_RNA (1)...(19): siRNA sense strand
acugcaagcugacuuacuu

SEQ ID NO: 1694589 - RNA, 19 nt, Homo sapiens
  misc_RNA (1)...(19): siRNA sense strand
gcccuuugaucagcuguuu

SEQ ID NO: 1694590 - RNA, 19 nt, Homo sapiens
  misc_RNA (1)...(19): siRNA sense strand
uuaaggucauaccaaguuu

SEQ ID NO: 1694591 - RNA, 19 nt, Homo sapiens
  misc_RNA (1)...(19): siRNA sense strand
aggcagggcucuggaguga

SEQ ID NO: 1694592 - RNA, 19 nt, Homo sapiens
  misc_RNA (1)...(19): siRNA sense strand
ccauugcuuugauuaugaa

SEQ ID NO: 1694593 - RNA, 19 nt, Homo sapiens
  misc_RNA (1)...(19): siRNA sense strand
uaaauccuccacugaaugu

SEQ ID NO: 1694594 - RNA, 19 nt, Homo sapiens
  misc_RNA (1)...(19): siRNA sense strand
ggcuugcggugcuuguuaa

SEQ ID NO: 1694595 - RNA, 19 nt, Homo sapiens
  misc_RNA (1)...(19): siRNA sense strand
ucacuucucccaccuguca

SEQ ID NO: 1694596 - RNA, 19 nt, Homo sapiens
  misc_RNA (1)...(19): siRNA sense strand
cugaggacacgcaguauuu

SEQ ID NO: 1694597 - RNA, 19 nt, Homo sapiens
  misc_RNA (1)...(19): siRNA sense strand
aaaccagaaucacugaaag

SEQ ID NO: 1694598 - RNA, 19 nt, Homo sapiens
  misc_RNA (1)...(19): siRNA sense strand
uaaccauccuccacaaagg

SEQ ID NO: 1694599 - RNA, 19 nt, Homo sapiens
  misc_RNA (1)...(19): siRNA sense strand
ggauauuugcagauagaaa

SEQ ID NO: 1694600 - RNA, 19 nt, Homo sapiens
  misc_RNA (1)...(19): siRNA sense strand
acaauacaaggaauggaua

SEQ ID NO: 1694601 - RNA, 19 nt, Homo sapiens
  misc_RNA (1)...(19): siRNA sense strand
gaucaucguggcgcaugua

SEQ ID NO: 1694602 - RNA, 19 nt, Homo sapiens
  misc_RNA (1)...(19): siRNA sense strand
uccauugcuuugauuauga

SEQ ID NO: 1694603 - RNA, 19 nt, Homo sapiens
  misc_RNA (1)...(19): siRNA sense strand
gagaaaccagugucugcuu

SEQ ID NO: 1694604 - RNA, 19 nt, Homo sapiens
  misc_RNA (1)...(19): siRNA sense strand
ucacugaaagcaaaugugu

SEQ ID NO: 1694605 - RNA, 19 nt, Homo sapiens
  misc_RNA (1)...(19): siRNA sense strand
gcaccacaaacacuacaga

SEQ ID NO: 1694606 - RNA, 19 nt, Homo sapiens
  misc_RNA (1)...(19): siRNA sense strand
caaugcauucaucucaaua

SEQ ID NO: 1694607 - RNA, 19 nt, Homo sapiens
  misc_RNA (1)...(19): siRNA sense strand
gacugaagaaugccaagaa

SEQ ID NO: 1694608 - RNA, 19 nt, Homo sapiens
  misc_RNA (1)...(19): siRNA sense strand
guauggcucuuggacugaa

SEQ ID NO: 1694609 - RNA, 19 nt, Homo sapiens
  misc_RNA (1)...(19): siRNA sense strand
caagaauacagcaaagaca

SEQ ID NO: 1694610 - RNA, 19 nt, Homo sapiens
  misc_RNA (1)...(19): siRNA sense strand
guaaccauccuccacaaag

SEQ ID NO: 1694611 - RNA, 19 nt, Homo sapiens
  misc_RNA (1)...(19): siRNA sense strand
cugaagaaugccaagaaua

SEQ ID NO: 1694612 - RNA, 19 nt, Homo sapiens
  misc_RNA (1)...(19): siRNA sense strand
ucucccaccugucaauuuc

SEQ ID NO: 1694613 - RNA, 19 nt, Homo sapiens
  misc_RNA (1)...(19): siRNA sense strand
cauaccaaguuucccuuca

SEQ ID NO: 1694614 - RNA, 19 nt, Homo sapiens
  misc_RNA (1)...(19): siRNA sense strand
cacaaacacuacagaagac

SEQ ID NO: 1694615 - RNA, 19 nt, Homo sapiens
  misc_RNA (1)...(19): siRNA sense strand
cacugcaccuggcuuguug

SEQ ID NO: 1694616 - RNA, 19 nt, Homo sapiens
  misc_RNA (1)...(19): siRNA sense strand
ggaauggauauuugcagau

SEQ ID NO: 1694617 - RNA, 19 nt, Homo sapiens
  misc_RNA (1)...(19): siRNA sense strand
ggacugaagaaugccaaga

SEQ ID NO: 1694618 - RNA, 19 nt, Homo sapiens
  misc_RNA (1)...(19): siRNA sense strand
acucgucucucuauccaau

SEQ ID NO: 1694619 - RNA, 19 nt, Homo sapiens
  misc_RNA (1)...(19): siRNA sense strand
caauacaaggaauggauau

SEQ ID NO: 1694620 - RNA, 19 nt, Homo sapiens
  misc_RNA (1)...(19): siRNA sense strand
ugguuuggcucaaguucuu

SEQ ID NO: 1694621 - RNA, 19 nt, Homo sapiens
  misc_RNA (1)...(19): siRNA sense strand
acugaagaaugccaagaau

SEQ ID NO: 1694622 - RNA, 19 nt, Homo sapiens
  misc_RNA (1)...(19): siRNA sense strand
cugacuuacuuccugauga

SEQ ID NO: 1694623 - RNA, 19 nt, Homo sapiens
  misc_RNA (1)...(19): siRNA sense strand
gaaauaucgcaugcugguu

SEQ ID NO: 1694624 - RNA, 19 nt, Homo sapiens
  misc_RNA (1)...(19): siRNA sense strand
guguaaccauccuccacaa

SEQ ID NO: 1694625 - RNA, 19 nt, Homo sapiens
  misc_RNA (1)...(19): siRNA sense strand
ggacuuuuauccucagcaa

SEQ ID NO: 1694626 - RNA, 19 nt, Homo sapiens
  misc_RNA (1)...(19): siRNA sense strand
uuuaaggucauaccaaguu

SEQ ID NO: 1694627 - RNA, 19 nt, Homo sapiens
  misc_RNA (1)...(19): siRNA sense strand
gcauguauuacucauccuu

SEQ ID NO: 1694628 - RNA, 19 nt, Homo sapiens
  misc_RNA (1)...(19): siRNA sense strand
uggcuugcggugcuuguua

SEQ ID NO: 1694629 - RNA, 19 nt, Homo sapiens
  misc_RNA (1)...(19): siRNA sense strand
aaacacuacagaagacaau

SEQ ID NO: 1694630 - RNA, 19 nt, Homo sapiens
  misc_RNA (1)...(19): siRNA sense strand
caaacacuacagaagacaa

SEQ ID NO: 1694631 - RNA, 19 nt, Homo sapiens
  misc_RNA (1)...(19): siRNA sense strand
gacuaugaaaccagaauca

SEQ ID NO: 1694632 - RNA, 19 nt, Homo sapiens
  misc_RNA (1)...(19): siRNA sense strand
auggauauuugcagauaga

SEQ ID NO: 1694633 - RNA, 19 nt, Homo sapiens
  misc_RNA (1)...(19): siRNA sense strand
gcaaaggaauguuaaucua

SEQ ID NO: 1694634 - RNA, 19 nt, Homo sapiens
  misc_RNA (1)...(19): siRNA sense strand
gaauggauauuugcagaua

SEQ ID NO: 1694635 - RNA, 19 nt, Homo sapiens
  misc_RNA (1)...(19): siRNA sense strand
cagaaucacugaaagcaaa

SEQ ID NO: 1694636 - RNA, 19 nt, Homo sapiens
  misc_RNA (1)...(19): siRNA sense strand
caucguggcgcauguauua

SEQ ID NO: 1694637 - RNA, 19 nt, Homo sapiens
  misc_RNA (1)...(19): siRNA sense strand
gaagacaauuauucacguu

SEQ ID NO: 1694638 - RNA, 19 nt, Homo sapiens
  misc_RNA (1)...(19): siRNA sense strand
gaaaccaaauccugaucaa

SEQ ID NO: 1694639 - RNA, 19 nt, Homo sapiens
  misc_RNA (1)...(19): siRNA sense strand
caagagcaaaggaauguua

SEQ ID NO: 1694640 - RNA, 19 nt, Homo sapiens
  misc_RNA (1)...(19): siRNA sense strand
ccauuaaaguuacugguuu

SEQ ID NO: 1694641 - RNA, 19 nt, Homo sapiens
  misc_RNA (1)...(19): siRNA sense strand
uaaguacgauguucaagug

SEQ ID NO: 1694642 - RNA, 19 nt, Homo sapiens
  misc_RNA (1)...(19): siRNA sense strand
gaaaauaaacgcuccaaaa

SEQ ID NO: 1694643 - RNA, 19 nt, Homo sapiens
  misc_RNA (1)...(19): siRNA sense strand
gaaaccagaaucacugaaa

SEQ ID NO: 1694644 - RNA, 19 nt, Homo sapiens
  misc_RNA (1)...(19): siRNA sense strand
gaguggagccaaccuauuu

SEQ ID NO: 1694645 - RNA, 19 nt, Homo sapiens
  misc_RNA (1)...(19): siRNA sense strand
gcagaacgaccacucacua

SEQ ID NO: 1694646 - RNA, 19 nt, Homo sapiens
  misc_RNA (1)...(19): siRNA sense strand
caaauaaauccuccacuga

SEQ ID NO: 1694647 - RNA, 19 nt, Homo sapiens
  misc_RNA (1)...(19): siRNA sense strand
ccuggaaccucaauuguga

SEQ ID NO: 1694648 - RNA, 19 nt, Homo sapiens
  misc_RNA (1)...(19): siRNA sense strand
ucacgccauugaucaaaua

SEQ ID NO: 1694649 - RNA, 19 nt, Homo sapiens
  misc_RNA (1)...(19): siRNA sense strand
ccacaaacacuacagaaga

SEQ ID NO: 1694650 - RNA, 19 nt, Homo sapiens
  misc_RNA (1)...(19): siRNA sense strand
ugaaggaacucgucucucu

SEQ ID NO: 1694651 - RNA, 19 nt, Homo sapiens
  misc_RNA (1)...(19): siRNA sense strand
gagccaaccuauuuaugug

SEQ ID NO: 1694652 - RNA, 19 nt, Homo sapiens
  misc_RNA (1)...(19): siRNA sense strand
gaacucgucucucuaucca

SEQ ID NO: 1694653 - RNA, 19 nt, Homo sapiens
  misc_RNA (1)...(19): siRNA sense strand
gaagaugacuaugaaacca

SEQ ID NO: 1694654 - RNA, 19 nt, Homo sapiens
  misc_RNA (1)...(19): siRNA sense strand
ugacuuacuuccugaugaa

SEQ ID NO: 1694655 - RNA, 19 nt, Homo sapiens
  misc_RNA (1)...(19): siRNA sense strand
gaaagcaaauguguaacca

SEQ ID NO: 1694656 - RNA, 19 nt, Homo sapiens
  misc_RNA (1)...(19): siRNA sense strand
gcagggcucuggagugagu

SEQ ID NO: 1694657 - RNA, 19 nt, Homo sapiens
  misc_RNA (1)...(19): siRNA sense strand
gaaugucacagcagagauu

SEQ ID NO: 1694658 - RNA, 19 nt, Homo sapiens
  misc_RNA (1)...(19): siRNA sense strand
uacaaggaauggauauuug

SEQ ID NO: 1694659 - RNA, 19 nt, Homo sapiens
  misc_RNA (1)...(19): siRNA sense strand
guacgauguucaagugaga

SEQ ID NO: 1694660 - RNA, 19 nt, Homo sapiens
  misc_RNA (1)...(19): siRNA sense strand
ccugucaauuucaccauua

SEQ ID NO: 1694661 - RNA, 19 nt, Homo sapiens
  misc_RNA (1)...(19): siRNA sense strand
ggagccaaccuauuuaugu

SEQ ID NO: 1694662 - RNA, 19 nt, Homo sapiens
  misc_RNA (1)...(19): siRNA sense strand
agaaaccagugucugcuuu

SEQ ID NO: 1694663 - RNA, 19 nt, Homo sapiens
  misc_RNA (1)...(19): siRNA sense strand
gaacgaccacucacuacug

SEQ ID NO: 1694664 - RNA, 19 nt, Homo sapiens
  misc_RNA (1)...(19): siRNA sense strand
gaaggaacucgucucucua

SEQ ID NO: 1694665 - RNA, 19 nt, Homo sapiens
  misc_RNA (1)...(19): siRNA sense strand
gauacugcaagcugacuua

SEQ ID NO: 1694666 - RNA, 19 nt, Homo sapiens
  misc_RNA (1)...(19): siRNA sense strand
cuacagaagacaauuauuc

SEQ ID NO: 1694667 - RNA, 19 nt, Homo sapiens
  misc_RNA (1)...(19): siRNA sense strand
ccaaugcauucaucucaau

SEQ ID NO: 1694668 - RNA, 19 nt, Homo sapiens
  misc_RNA (1)...(19): siRNA sense strand
ggaccauccugcagaacga

SEQ ID NO: 1694669 - RNA, 19 nt, Homo sapiens
  misc_RNA (1)...(19): siRNA sense strand
aauaaacgcuccaaaagaa

SEQ ID NO: 1694670 - RNA, 19 nt, Homo sapiens
  misc_RNA (1)...(19): siRNA sense strand
caaaagaagaugacuauga

SEQ ID NO: 1694671 - RNA, 19 nt, Homo sapiens
  misc_RNA (1)...(19): siRNA sense strand
aaauaucgcaugcugguuu

SEQ ID NO: 1694672 - RNA, 19 nt, Homo sapiens
  misc_RNA (1)...(19): siRNA sense strand
aaauaaauccuccacugaa

SEQ ID NO: 1694673 - RNA, 19 nt, Homo sapiens
  misc_RNA (1)...(19): siRNA sense strand
cauuaaaguuacugguuug

SEQ ID NO: 1694674 - RNA, 19 nt, Homo sapiens
  misc_RNA (1)...(19): siRNA sense strand
aauaaauccuccacugaau

SEQ ID NO: 1694675 - RNA, 19 nt, Homo sapiens
  misc_RNA (1)...(19): siRNA sense strand
caaaggaauguuaaucuag

SEQ ID NO: 1694676 - RNA, 19 nt, Homo sapiens
  misc_RNA (1)...(19): siRNA sense strand
cgccauugaucaaauaaau

SEQ ID NO: 1694677 - RNA, 19 nt, Homo sapiens
  misc_RNA (1)...(19): siRNA sense strand
acacuacagaagacaauua

SEQ ID NO: 1694678 - RNA, 19 nt, Homo sapiens
  misc_RNA (1)...(19): siRNA sense strand
ggaaaccaaauccugauca

SEQ ID NO: 1694679 - RNA, 19 nt, Homo sapiens
  misc_RNA (1)...(19): siRNA sense strand
gaucaagagcaaaggaaug

SEQ ID NO: 1694680 - RNA, 19 nt, Homo sapiens
  misc_RNA (1)...(19): siRNA sense strand
ugaagaaugccaagaauac

SEQ ID NO: 1694681 - RNA, 19 nt, Homo sapiens
  misc_RNA (1)...(19): siRNA sense strand
gagcaaaggaauguuaauc

SEQ ID NO: 1694682 - RNA, 19 nt, Homo sapiens
  misc_RNA (1)...(19): siRNA sense strand
gaccaaugcauucaucuca

SEQ ID NO: 1694683 - RNA, 19 nt, Homo sapiens
  misc_RNA (1)...(19): siRNA sense strand
gaagaaugccaagaauaca

SEQ ID NO: 1694684 - RNA, 19 nt, Homo sapiens
  misc_RNA (1)...(19): siRNA sense strand
aaccaaauccugaucaaga

SEQ ID NO: 1694685 - RNA, 19 nt, Homo sapiens
  misc_RNA (1)...(19): siRNA sense strand
acugaaagcaaauguguaa

SEQ ID NO: 1694686 - RNA, 19 nt, Homo sapiens
  misc_RNA (1)...(19): siRNA sense strand
gcaaauguguaaccauccu

SEQ ID NO: 1694687 - RNA, 19 nt, Homo sapiens
  misc_RNA (1)...(19): siRNA sense strand
caagugagagcagcaguga

SEQ ID NO: 1694688 - RNA, 19 nt, Homo sapiens
  misc_RNA (1)...(19): siRNA sense strand
acugcaagcugacuuacuu

SEQ ID NO: 1694689 - RNA, 19 nt, Homo sapiens
  misc_RNA (1)...(19): siRNA sense strand
gcccuuugaucagcuguuu

SEQ ID NO: 1694690 - RNA, 19 nt, Homo sapiens
  misc_RNA (1)...(19): siRNA sense strand
uuaaggucauaccaaguuu

SEQ ID NO: 1694691 - RNA, 19 nt, Homo sapiens
  misc_RNA (1)...(19): siRNA sense strand
aggcagggcucuggaguga

SEQ ID NO: 1694692 - RNA, 19 nt, Homo sapiens
  misc_RNA (1)...(19): siRNA sense strand
ccauugcuuugauuaugaa

SEQ ID NO: 1694693 - RNA, 19 nt, Homo sapiens
  misc_RNA (1)...(19): siRNA sense strand
uaaauccuccacugaaugu

SEQ ID NO: 1694694 - RNA, 19 nt, Homo sapiens
  misc_RNA (1)...(19): siRNA sense strand
ggcuugcggugcuuguuaa

SEQ ID NO: 1694695 - RNA, 19 nt, Homo sapiens
  misc_RNA (1)...(19): siRNA sense strand
ucacuucucccaccuguca

SEQ ID NO: 1694696 - RNA, 19 nt, Homo sapiens
  misc_RNA (1)...(19): siRNA sense strand
cugaggacacgcaguauuu

SEQ ID NO: 1694697 - RNA, 19 nt, Homo sapiens
  misc_RNA (1)...(19): siRNA sense strand
aaaccagaaucacugaaag

SEQ ID NO: 1694698 - RNA, 19 nt, Homo sapiens
  misc_RNA (1)...(19): siRNA sense strand
uaaccauccuccacaaagg

SEQ ID NO: 1694699 - RNA, 19 nt, Homo sapiens
  misc_RNA (1)...(19): siRNA sense strand
ggauauuugcagauagaaa

SEQ ID NO: 1694700 - RNA, 19 nt, Homo sapiens
  misc_RNA (1)...(19): siRNA sense strand
acaauacaaggaauggaua

SEQ ID NO: 1694701 - RNA, 19 nt, Homo sapiens
  misc_RNA (1)...(19): siRNA sense strand
gaucaucguggcgcaugua

SEQ ID NO: 1694702 - RNA, 19 nt, Homo sapiens
  misc_RNA (1)...(19): siRNA sense strand
uccauugcuuugauuauga

SEQ ID NO: 1694703 - RNA, 19 nt, Homo sapiens
  misc_RNA (1)...(19): siRNA sense strand
gagaaaccagugucugcuu

SEQ ID NO: 1694704 - RNA, 19 nt, Homo sapiens
  misc_RNA (1)...(19): siRNA sense strand
ucacugaaagcaaaugugu

SEQ ID NO: 1694705 - RNA, 19 nt, Homo sapiens
  misc_RNA (1)...(19): siRNA sense strand
gcaccacaaacacuacaga

SEQ ID NO: 1694706 - RNA, 19 nt, Homo sapiens
  misc_RNA (1)...(19): siRNA sense strand
caaugcauucaucucaaua

SEQ ID NO: 1694707 - RNA, 19 nt, Homo sapiens
  misc_RNA (1)...(19): siRNA sense strand
gacugaagaaugccaagaa

SEQ ID NO: 1694708 - RNA, 19 nt, Homo sapiens
  misc_RNA (1)...(19): siRNA sense strand
guauggcucuuggacugaa

SEQ ID NO: 1694709 - RNA, 19 nt, Homo sapiens
  misc_RNA (1)...(19): siRNA sense strand
caagaauacagcaaagaca

SEQ ID NO: 1694710 - RNA, 19 nt, Homo sapiens
  misc_RNA (1)...(19): siRNA sense strand
guaaccauccuccacaaag

SEQ ID NO: 1694711 - RNA, 19 nt, Homo sapiens
  misc_RNA (1)...(19): siRNA sense strand
cugaagaaugccaagaaua

SEQ ID NO: 1694712 - RNA, 19 nt, Homo sapiens
  misc_RNA (1)...(19): siRNA sense strand
ucucccaccugucaauuuc

SEQ ID NO: 1694713 - RNA, 19 nt, Homo sapiens
  misc_RNA (1)...(19): siRNA sense strand
cauaccaaguuucccuuca

SEQ ID NO: 1694714 - RNA, 19 nt, Homo sapiens
  misc_RNA (1)...(19): siRNA sense strand
cacaaacacuacagaagac

SEQ ID NO: 1694715 - RNA, 19 nt, Homo sapiens
  misc_RNA (1)...(19): siRNA sense strand
cacugcaccuggcuuguug

SEQ ID NO: 1694716 - RNA, 19 nt, Homo sapiens
  misc_RNA (1)...(19): siRNA sense strand
ggaauggauauuugcagau

SEQ ID NO: 1694717 - RNA, 19 nt, Homo sapiens
  misc_RNA (1)...(19): siRNA sense strand
ggacugaagaaugccaaga

SEQ ID NO: 1694718 - RNA, 19 nt, Homo sapiens
  misc_RNA (1)...(19): siRNA sense strand
acucgucucucuauccaau

SEQ ID NO: 1694719 - RNA, 19 nt, Homo sapiens
  misc_RNA (1)...(19): siRNA sense strand
caauacaaggaauggauau

SEQ ID NO: 1694720 - RNA, 19 nt, Homo sapiens
  misc_RNA (1)...(19): siRNA sense strand
ugguuuggcucaaguucuu

SEQ ID NO: 1694721 - RNA, 19 nt, Homo sapiens
  misc_RNA (1)...(19): siRNA sense strand
acugaagaaugccaagaau

SEQ ID NO: 1694722 - RNA, 19 nt, Homo sapiens
  misc_RNA (1)...(19): siRNA sense strand
cugacuuacuuccugauga

SEQ ID NO: 1694723 - RNA, 19 nt, Homo sapiens
  misc_RNA (1)...(19): siRNA sense strand
gaaauaucgcaugcugguu

SEQ ID NO: 1694724 - RNA, 19 nt, Homo sapiens
  misc_RNA (1)...(19): siRNA sense strand
guguaaccauccuccacaa

SEQ ID NO: 1694725 - RNA, 19 nt, Homo sapiens
  misc_RNA (1)...(19): siRNA sense strand
ggacuuuuauccucagcaa

SEQ ID NO: 1694726 - RNA, 19 nt, Homo sapiens
  misc_RNA (1)...(19): siRNA sense strand
uuuaaggucauaccaaguu

SEQ ID NO: 1694727 - RNA, 19 nt, Homo sapiens
  misc_RNA (1)...(19): siRNA sense strand
gcauguauuacucauccuu

SEQ ID NO: 1694728 - RNA, 19 nt, Homo sapiens
  misc_RNA (1)...(19): siRNA sense strand
uggcuugcggugcuuguua

SEQ ID NO: 1694729 - RNA, 19 nt, Homo sapiens
  misc_RNA (1)...(19): siRNA sense strand
aaacacuacagaagacaau

SEQ ID NO: 1694730 - RNA, 19 nt, Homo sapiens
  misc_RNA (1)...(19): siRNA sense strand
caaacacuacagaagacaa

SEQ ID NO: 1694731 - RNA, 19 nt, Homo sapiens
  misc_RNA (1)...(19): siRNA sense strand
gacuaugaaaccagaauca

SEQ ID NO: 1694732 - RNA, 19 nt, Homo sapiens
  misc_RNA (1)...(19): siRNA sense strand
auggauauuugcagauaga

SEQ ID NO: 1694733 - RNA, 19 nt, Homo sapiens
  misc_RNA (1)...(19): siRNA sense strand
gcaaaggaauguuaaucua

SEQ ID NO: 1694734 - RNA, 19 nt, Homo sapiens
  misc_RNA (1)...(19): siRNA sense strand
gaauggauauuugcagaua

SEQ ID NO: 1694735 - RNA, 19 nt, Homo sapiens
  misc_RNA (1)...(19): siRNA sense strand
cagaaucacugaaagcaaa

SEQ ID NO: 1694736 - RNA, 19 nt, Homo sapiens
  misc_RNA (1)...(19): siRNA sense strand
caucguggcgcauguauua

SEQ ID NO: 1694737 - RNA, 19 nt, Homo sapiens
  misc_RNA (1)...(19): siRNA sense strand
gaagacaauuauucacguu

SEQ ID NO: 1694738 - RNA, 19 nt, Homo sapiens
  misc_RNA (1)...(19): siRNA sense strand
gaaaccaaauccugaucaa

SEQ ID NO: 1694739 - RNA, 19 nt, Homo sapiens
  misc_RNA (1)...(19): siRNA sense strand
caagagcaaaggaauguua

SEQ ID NO: 1694740 - RNA, 19 nt, Homo sapiens
  misc_RNA (1)...(19): siRNA sense strand
ccauuaaaguuacugguuu

SEQ ID NO: 1694741 - RNA, 19 nt, Homo sapiens
  misc_RNA (1)...(19): siRNA sense strand
uaaguacgauguucaagug

SEQ ID NO: 1694742 - RNA, 19 nt, Homo sapiens
  misc_RNA (1)...(19): siRNA sense strand
gaaaauaaacgcuccaaaa

SEQ ID NO: 1694743 - RNA, 19 nt, Homo sapiens
  misc_RNA (1)...(19): siRNA sense strand
gaaaccagaaucacugaaa

SEQ ID NO: 1694744 - RNA, 19 nt, Homo sapiens
  misc_RNA (1)...(19): siRNA sense strand
gaguggagccaaccuauuu

SEQ ID NO: 1694745 - RNA, 19 nt, Homo sapiens
  misc_RNA (1)...(19): siRNA sense strand
gcagaacgaccacucacua

SEQ ID NO: 1694746 - RNA, 19 nt, Homo sapiens
  misc_RNA (1)...(19): siRNA sense strand
caaauaaauccuccacuga

SEQ ID NO: 1694747 - RNA, 19 nt, Homo sapiens
  misc_RNA (1)...(19): siRNA sense strand
ccuggaaccucaauuguga

SEQ ID NO: 1694748 - RNA, 19 nt, Homo sapiens
  misc_RNA (1)...(19): siRNA sense strand
ucacgccauugaucaaaua

SEQ ID NO: 1694749 - RNA, 19 nt, Homo sapiens
  misc_RNA (1)...(19): siRNA sense strand
ccacaaacacuacagaaga

SEQ ID NO: 1694750 - RNA, 19 nt, Homo sapiens
  misc_RNA (1)...(19): siRNA sense strand
ugaaggaacucgucucucu

SEQ ID NO: 1694751 - RNA, 19 nt, Homo sapiens
  misc_RNA (1)...(19): siRNA sense strand
gagccaaccuauuuaugug

SEQ ID NO: 1694752 - RNA, 19 nt, Homo sapiens
  misc_RNA (1)...(19): siRNA sense strand
gaacucgucucucuaucca

SEQ ID NO: 1694753 - RNA, 19 nt, Homo sapiens
  misc_RNA (1)...(19): siRNA sense strand
gaagaugacuaugaaacca

SEQ ID NO: 1694754 - RNA, 19 nt, Homo sapiens
  misc_RNA (1)...(19): siRNA sense strand
ugacuuacuuccugaugaa

SEQ ID NO: 1694755 - RNA, 19 nt, Homo sapiens
  misc_RNA (1)...(19): siRNA sense strand
gaaagcaaauguguaacca

SEQ ID NO: 1694756 - RNA, 19 nt, Homo sapiens
  misc_RNA (1)...(19): siRNA sense strand
gcagggcucuggagugagu

SEQ ID NO: 1694757 - RNA, 19 nt, Homo sapiens
  misc_RNA (1)...(19): siRNA sense strand
gaaugucacagcagagauu

SEQ ID NO: 1694758 - RNA, 19 nt, Homo sapiens
  misc_RNA (1)...(19): siRNA sense strand
uacaaggaauggauauuug

SEQ ID NO: 1694759 - RNA, 19 nt, Homo sapiens
  misc_RNA (1)...(19): siRNA sense strand
guacgauguucaagugaga

SEQ ID NO: 1694760 - RNA, 19 nt, Homo sapiens
  misc_RNA (1)...(19): siRNA sense strand
ccugucaauuucaccauua

SEQ ID NO: 1694761 - RNA, 19 nt, Homo sapiens
  misc_RNA (1)...(19): siRNA sense strand
ggagccaaccuauuuaugu

SEQ ID NO: 1694762 - RNA, 19 nt, Homo sapiens
  misc_RNA (1)...(19): siRNA sense strand
agaaaccagugucugcuuu

SEQ ID NO: 1694763 - RNA, 19 nt, Homo sapiens
  misc_RNA (1)...(19): siRNA sense strand
gaacgaccacucacuacug

SEQ ID NO: 1694764 - RNA, 19 nt, Homo sapiens
  misc_RNA (1)...(19): siRNA sense strand
gaaggaacucgucucucua

SEQ ID NO: 1694765 - RNA, 19 nt, Homo sapiens
  misc_RNA (1)...(19): siRNA sense strand
gauacugcaagcugacuua

SEQ ID NO: 1694766 - RNA, 19 nt, Homo sapiens
  misc_RNA (1)...(19): siRNA sense strand
cuacagaagacaauuauuc

SEQ ID NO: 1694767 - RNA, 19 nt, Homo sapiens
  misc_RNA (1)...(19): siRNA sense strand
ccaaugcauucaucucaau

SEQ ID NO: 1694768 - RNA, 19 nt, Homo sapiens
  misc_RNA (1)...(19): siRNA sense strand
ggaccauccugcagaacga

SEQ ID NO: 1694769 - RNA, 19 nt, Homo sapiens
  misc_RNA (1)...(19): siRNA sense strand
aauaaacgcuccaaaagaa

SEQ ID NO: 1694770 - RNA, 19 nt, Homo sapiens
  misc_RNA (1)...(19): siRNA sense strand
caaaagaagaugacuauga

SEQ ID NO: 1694771 - RNA, 19 nt, Homo sapiens
  misc_RNA (1)...(19): siRNA sense strand
aaauaucgcaugcugguuu

SEQ ID NO: 1694772 - RNA, 19 nt, Homo sapiens
  misc_RNA (1)...(19): siRNA sense strand
aaauaaauccuccacugaa

SEQ ID NO: 1694773 - RNA, 19 nt, Homo sapiens
  misc_RNA (1)...(19): siRNA sense strand
cauuaaaguuacugguuug

SEQ ID NO: 1694774 - RNA, 19 nt, Homo sapiens
  misc_RNA (1)...(19): siRNA sense strand
aauaaauccuccacugaau

SEQ ID NO: 1694775 - RNA, 19 nt, Homo sapiens
  misc_RNA (1)...(19): siRNA sense strand
caaaggaauguuaaucuag

SEQ ID NO: 1694776 - RNA, 19 nt, Homo sapiens
  misc_RNA (1)...(19): siRNA sense strand
cgccauugaucaaauaaau

SEQ ID NO: 1694777 - RNA, 19 nt, Homo sapiens
  misc_RNA (1)...(19): siRNA sense strand
acacuacagaagacaauua

SEQ ID NO: 1694778 - RNA, 19 nt, Homo sapiens
  misc_RNA (1)...(19): siRNA sense strand
ggaaaccaaauccugauca

SEQ ID NO: 1694779 - RNA, 19 nt, Homo sapiens
  misc_RNA (1)...(19): siRNA sense strand
gaucaagagcaaaggaaug

SEQ ID NO: 1694780 - RNA, 19 nt, Homo sapiens
  misc_RNA (1)...(19): siRNA sense strand
ugaagaaugccaagaauac

SEQ ID NO: 1694781 - RNA, 19 nt, Homo sapiens
  misc_RNA (1)...(19): siRNA sense strand
gagcaaaggaauguuaauc

SEQ ID NO: 1694782 - RNA, 19 nt, Homo sapiens
  misc_RNA (1)...(19): siRNA sense strand
gaccaaugcauucaucuca

SEQ ID NO: 1694783 - RNA, 19 nt, Homo sapiens
  misc_RNA (1)...(19): siRNA sense strand
gaagaaugccaagaauaca

SEQ ID NO: 1694784 - RNA, 19 nt, Homo sapiens
  misc_RNA (1)...(19): siRNA sense strand
aaccaaauccugaucaaga

SEQ ID NO: 1694785 - RNA, 19 nt, Homo sapiens
  misc_RNA (1)...(19): siRNA sense strand
acugaaagcaaauguguaa

SEQ ID NO: 1694786 - RNA, 19 nt, Homo sapiens
  misc_RNA (1)...(19): siRNA sense strand
gcaaauguguaaccauccu

SEQ ID NO: 1694787 - RNA, 19 nt, Homo sapiens
  misc_RNA (1)...(19): siRNA sense strand
caagugagagcagcaguga

SEQ ID NO: 1694788 - RNA, 19 nt, Homo sapiens
  misc_RNA (1)...(19): siRNA sense strand
acugcaagcugacuuacuu

SEQ ID NO: 1694789 - RNA, 19 nt, Homo sapiens
  misc_RNA (1)...(19): siRNA sense strand
gcccuuugaucagcuguuu

SEQ ID NO: 1694790 - RNA, 19 nt, Homo sapiens
  misc_RNA (1)...(19): siRNA sense strand
uuaaggucauaccaaguuu

SEQ ID NO: 1694791 - RNA, 19 nt, Homo sapiens
  misc_RNA (1)...(19): siRNA sense strand
aggcagggcucuggaguga

SEQ ID NO: 1694792 - RNA, 19 nt, Homo sapiens
  misc_RNA (1)...(19): siRNA sense strand
ccauugcuuugauuaugaa

SEQ ID NO: 1694793 - RNA, 19 nt, Homo sapiens
  misc_RNA (1)...(19): siRNA sense strand
uaaauccuccacugaaugu

SEQ ID NO: 1694794 - RNA, 19 nt, Homo sapiens
  misc_RNA (1)...(19): siRNA sense strand
ggcuugcggugcuuguuaa

SEQ ID NO: 1694795 - RNA, 19 nt, Homo sapiens
  misc_RNA (1)...(19): siRNA sense strand
ucacuucucccaccuguca

SEQ ID NO: 1694796 - RNA, 19 nt, Homo sapiens
  misc_RNA (1)...(19): siRNA sense strand
cugaggacacgcaguauuu

SEQ ID NO: 1694797 - RNA, 19 nt, Homo sapiens
  misc_RNA (1)...(19): siRNA sense strand
aaaccagaaucacugaaag

SEQ ID NO: 1694798 - RNA, 19 nt, Homo sapiens
  misc_RNA (1)...(19): siRNA sense strand
uaaccauccuccacaaagg

SEQ ID NO: 1694799 - RNA, 19 nt, Homo sapiens
  misc_RNA (1)...(19): siRNA sense strand
ggauauuugcagauagaaa

SEQ ID NO: 1694800 - RNA, 19 nt, Homo sapiens
  misc_RNA (1)...(19): siRNA sense strand
acaauacaaggaauggaua

SEQ ID NO: 1694801 - RNA, 19 nt, Homo sapiens
  misc_RNA (1)...(19): siRNA sense strand
gaucaucguggcgcaugua

SEQ ID NO: 1694802 - RNA, 19 nt, Homo sapiens
  misc_RNA (1)...(19): siRNA sense strand
uccauugcuuugauuauga

SEQ ID NO: 1694803 - RNA, 19 nt, Homo sapiens
  misc_RNA (1)...(19): siRNA sense strand
gagaaaccagugucugcuu

SEQ ID NO: 1694804 - RNA, 19 nt, Homo sapiens
  misc_RNA (1)...(19): siRNA sense strand
ucacugaaagcaaaugugu

SEQ ID NO: 1694805 - RNA, 19 nt, Homo sapiens
  misc_RNA (1)...(19): siRNA sense strand
gcaccacaaacacuacaga

SEQ ID NO: 1694806 - RNA, 19 nt, Homo sapiens
  misc_RNA (1)...(19): siRNA sense strand
caaugcauucaucucaaua

SEQ ID NO: 1694807 - RNA, 19 nt, Homo sapiens
  misc_RNA (1)...(19): siRNA sense strand
gacugaagaaugccaagaa

SEQ ID NO: 1694808 - RNA, 19 nt, Homo sapiens
  misc_RNA (1)...(19): siRNA sense strand
guauggcucuuggacugaa

SEQ ID NO: 1694809 - RNA, 19 nt, Homo sapiens
  misc_RNA (1)...(19): siRNA sense strand
caagaauacagcaaagaca

SEQ ID NO: 1694810 - RNA, 19 nt, Homo sapiens
  misc_RNA (1)...(19): siRNA sense strand
guaaccauccuccacaaag

SEQ ID NO: 1694811 - RNA, 19 nt, Homo sapiens
  misc_RNA (1)...(19): siRNA sense strand
cugaagaaugccaagaaua

SEQ ID NO: 1694812 - RNA, 19 nt, Homo sapiens
  misc_RNA (1)...(19): siRNA sense strand
ucucccaccugucaauuuc

SEQ ID NO: 1694813 - RNA, 19 nt, Homo sapiens
  misc_RNA (1)...(19): siRNA sense strand
cauaccaaguuucccuuca

SEQ ID NO: 1694814 - RNA, 19 nt, Homo sapiens
  misc_RNA (1)...(19): siRNA sense strand
cacaaacacuacagaagac

SEQ ID NO: 1694815 - RNA, 19 nt, Homo sapiens
  misc_RNA (1)...(19): siRNA sense strand
cacugcaccuggcuuguug

SEQ ID NO: 1694816 - RNA, 19 nt, Homo sapiens
  misc_RNA (1)...(19): siRNA sense strand
ggaauggauauuugcagau

SEQ ID NO: 1694817 - RNA, 19 nt, Homo sapiens
  misc_RNA (1)...(19): siRNA sense strand
ggacugaagaaugccaaga

SEQ ID NO: 1694818 - RNA, 19 nt, Homo sapiens
  misc_RNA (1)...(19): siRNA sense strand
acucgucucucuauccaau

SEQ ID NO: 1694819 - RNA, 19 nt, Homo sapiens
  misc_RNA (1)...(19): siRNA sense strand
caauacaaggaauggauau

SEQ ID NO: 1694820 - RNA, 19 nt, Homo sapiens
  misc_RNA (1)...(19): siRNA sense strand
ugguuuggcucaaguucuu

SEQ ID NO: 1694821 - RNA, 19 nt, Homo sapiens
  misc_RNA (1)...(19): siRNA sense strand
acugaagaaugccaagaau

SEQ ID NO: 1694822 - RNA, 19 nt, Homo sapiens
  misc_RNA (1)...(19): siRNA sense strand
cugacuuacuuccugauga

SEQ ID NO: 1694823 - RNA, 19 nt, Homo sapiens
  misc_RNA (1)...(19): siRNA sense strand
gaaauaucgcaugcugguu

SEQ ID NO: 1694824 - RNA, 19 nt, Homo sapiens
  misc_RNA (1)...(19): siRNA sense strand
guguaaccauccuccacaa

SEQ ID NO: 1694825 - RNA, 19 nt, Homo sapiens
  misc_RNA (1)...(19): siRNA sense strand
ggacuuuuauccucagcaa

SEQ ID NO: 1694826 - RNA, 19 nt, Homo sapiens
  misc_RNA (1)...(19): siRNA sense strand
uuuaaggucauaccaaguu

SEQ ID NO: 1694827 - RNA, 19 nt, Homo sapiens
  misc_RNA (1)...(19): siRNA sense strand
gcauguauuacucauccuu

SEQ ID NO: 1694828 - RNA, 19 nt, Homo sapiens
  misc_RNA (1)...(19): siRNA sense strand
uggcuugcggugcuuguua

SEQ ID NO: 1694829 - RNA, 19 nt, Homo sapiens
  misc_RNA (1)...(19): siRNA sense strand
aaacacuacagaagacaau

SEQ ID NO: 1694830 - RNA, 19 nt, Homo sapiens
  misc_RNA (1)...(19): siRNA sense strand
caaacacuacagaagacaa

SEQ ID NO: 1694831 - RNA, 19 nt, Homo sapiens
  misc_RNA (1)...(19): siRNA sense strand
gacuaugaaaccagaauca

SEQ ID NO: 1694832 - RNA, 19 nt, Homo sapiens
  misc_RNA (1)...(19): siRNA sense strand
auggauauuugcagauaga

SEQ ID NO: 1694833 - RNA, 19 nt, Homo sapiens
  misc_RNA (1)...(19): siRNA sense strand
gcaaaggaauguuaaucua

SEQ ID NO: 1694834 - RNA, 19 nt, Homo sapiens
  misc_RNA (1)...(19): siRNA sense strand
gaauggauauuugcagaua

SEQ ID NO: 1694835 - RNA, 19 nt, Homo sapiens
  misc_RNA (1)...(19): siRNA sense strand
cagaaucacugaaagcaaa

SEQ ID NO: 1694836 - RNA, 19 nt, Homo sapiens
  misc_RNA (1)...(19): siRNA sense strand
caucguggcgcauguauua

SEQ ID NO: 1694837 - RNA, 19 nt, Homo sapiens
  misc_RNA (1)...(19): siRNA sense strand
gaagacaauuauucacguu

SEQ ID NO: 1694838 - RNA, 19 nt, Homo sapiens
  misc_RNA (1)...(19): siRNA sense strand
gaaaccaaauccugaucaa

SEQ ID NO: 1694839 - RNA, 19 nt, Homo sapiens
  misc_RNA (1)...(19): siRNA sense strand
caagagcaaaggaauguua

SEQ ID NO: 1694840 - RNA, 19 nt, Homo sapiens
  misc_RNA (1)...(19): siRNA sense strand
ccauuaaaguuacugguuu

SEQ ID NO: 1694841 - RNA, 19 nt, Homo sapiens
  misc_RNA (1)...(19): siRNA sense strand
uaaguacgauguucaagug

SEQ ID NO: 1694842 - RNA, 19 nt, Homo sapiens
  misc_RNA (1)...(19): siRNA sense strand
gaaaauaaacgcuccaaaa

SEQ ID NO: 1694843 - RNA, 19 nt, Homo sapiens
  misc_RNA (1)...(19): siRNA sense strand
gaaaccagaaucacugaaa

SEQ ID NO: 1694844 - RNA, 19 nt, Homo sapiens
  misc_RNA (1)...(19): siRNA sense strand
gaguggagccaaccuauuu

SEQ ID NO: 1694845 - RNA, 19 nt, Homo sapiens
  misc_RNA (1)...(19): siRNA sense strand
gcagaacgaccacucacua

SEQ ID NO: 1694846 - RNA, 19 nt, Homo sapiens
  misc_RNA (1)...(19): siRNA sense strand
caaauaaauccuccacuga

SEQ ID NO: 1694847 - RNA, 19 nt, Homo sapiens
  misc_RNA (1)...(19): siRNA sense strand
ccuggaaccucaauuguga

SEQ ID NO: 1694848 - RNA, 19 nt, Homo sapiens
  misc_RNA (1)...(19): siRNA sense strand
ucacgccauugaucaaaua

SEQ ID NO: 1694849 - RNA, 19 nt, Homo sapiens
  misc_RNA (1)...(19): siRNA sense strand
ccacaaacacuacagaaga

SEQ ID NO: 1694850 - RNA, 19 nt, Homo sapiens
  misc_RNA (1)...(19): siRNA sense strand
ugaaggaacucgucucucu

SEQ ID NO: 1694851 - RNA, 19 nt, Homo sapiens
  misc_RNA (1)...(19): siRNA sense strand
gagccaaccuauuuaugug

SEQ ID NO: 1694852 - RNA, 19 nt, Homo sapiens
  misc_RNA (1)...(19): siRNA sense strand
gaacucgucucucuaucca

SEQ ID NO: 1694853 - RNA, 19 nt, Homo sapiens
  misc_RNA (1)...(19): siRNA sense strand
gaagaugacuaugaaacca

SEQ ID NO: 1694854 - RNA, 19 nt, Homo sapiens
  misc_RNA (1)...(19): siRNA sense strand
ugacuuacuuccugaugaa

SEQ ID NO: 1694855 - RNA, 19 nt, Homo sapiens
  misc_RNA (1)...(19): siRNA sense strand
gaaagcaaauguguaacca

SEQ ID NO: 1694856 - RNA, 19 nt, Homo sapiens
  misc_RNA (1)...(19): siRNA sense strand
gcagggcucuggagugagu

SEQ ID NO: 1694857 - RNA, 19 nt, Homo sapiens
  misc_RNA (1)...(19): siRNA sense strand
gaaugucacagcagagauu

SEQ ID NO: 1694858 - RNA, 19 nt, Homo sapiens
  misc_RNA (1)...(19): siRNA sense strand
uacaaggaauggauauuug

SEQ ID NO: 1694859 - RNA, 19 nt, Homo sapiens
  misc_RNA (1)...(19): siRNA sense strand
guacgauguucaagugaga

SEQ ID NO: 1694860 - RNA, 19 nt, Homo sapiens
  misc_RNA (1)...(19): siRNA sense strand
ccugucaauuucaccauua

SEQ ID NO: 1694861 - RNA, 19 nt, Homo sapiens
  misc_RNA (1)...(19): siRNA sense strand
ggagccaaccuauuuaugu

SEQ ID NO: 1694862 - RNA, 19 nt, Homo sapiens
  misc_RNA (1)...(19): siRNA sense strand
agaaaccagugucugcuuu

SEQ ID NO: 1694863 - RNA, 19 nt, Homo sapiens
  misc_RNA (1)...(19): siRNA sense strand
gaacgaccacucacuacug

SEQ ID NO: 1694864 - RNA, 19 nt, Homo sapiens
  misc_RNA (1)...(19): siRNA sense strand
gaaggaacucgucucucua

SEQ ID NO: 1694865 - RNA, 19 nt, Homo sapiens
  misc_RNA (1)...(19): siRNA sense strand
gauacugcaagcugacuua

SEQ ID NO: 1694866 - RNA, 19 nt, Homo sapiens
  misc_RNA (1)...(19): siRNA sense strand
cuacagaagacaauuauuc

SEQ ID NO: 1694867 - RNA, 19 nt, Homo sapiens
  misc_RNA (1)...(19): siRNA sense strand
ccaaugcauucaucucaau

SEQ ID NO: 1694868 - RNA, 19 nt, Homo sapiens
  misc_RNA (1)...(19): siRNA sense strand
ggaccauccugcagaacga

SEQ ID NO: 1694869 - RNA, 19 nt, Homo sapiens
  misc_RNA (1)...(19): siRNA sense strand
aauaaacgcuccaaaagaa

SEQ ID NO: 1694870 - RNA, 19 nt, Homo sapiens
  misc_RNA (1)...(19): siRNA sense strand
caaaagaagaugacuauga

SEQ ID NO: 1694871 - RNA, 19 nt, Homo sapiens
  misc_RNA (1)...(19): siRNA sense strand
aaauaucgcaugcugguuu

SEQ ID NO: 1694872 - RNA, 19 nt, Homo sapiens
  misc_RNA (1)...(19): siRNA sense strand
aaauaaauccuccacugaa

SEQ ID NO: 1694873 - RNA, 19 nt, Homo sapiens
  misc_RNA (1)...(19): siRNA sense strand
cauuaaaguuacugguuug

SEQ ID NO: 1694874 - RNA, 19 nt, Homo sapiens
  misc_RNA (1)...(19): siRNA sense strand
aauaaauccuccacugaau

SEQ ID NO: 1694875 - RNA, 19 nt, Homo sapiens
  misc_RNA (1)...(19): siRNA sense strand
caaaggaauguuaaucuag

SEQ ID NO: 1694876 - RNA, 19 nt, Homo sapiens
  misc_RNA (1)...(19): siRNA sense strand
cgccauugaucaaauaaau

SEQ ID NO: 1694877 - RNA, 19 nt, Homo sapiens
  misc_RNA (1)...(19): siRNA sense strand
acacuacagaagacaauua

SEQ ID NO: 1694878 - RNA, 19 nt, Homo sapiens
  misc_RNA (1)...(19): siRNA sense strand
ggaaaccaaauccugauca

SEQ ID NO: 1694879 - RNA, 19 nt, Homo sapiens
  misc_RNA (1)...(19): siRNA sense strand
gaucaagagcaaaggaaug

SEQ ID NO: 1694880 - RNA, 19 nt, Homo sapiens
  misc_RNA (1)...(19): siRNA sense strand
ugaagaaugccaagaauac

SEQ ID NO: 1694881 - RNA, 19 nt, Homo sapiens
  misc_RNA (1)...(19): siRNA sense strand
gagcaaaggaauguuaauc

SEQ ID NO: 1694882 - RNA, 19 nt, Homo sapiens
  misc_RNA (1)...(19): siRNA sense strand
gaccaaugcauucaucuca

SEQ ID NO: 1694883 - RNA, 19 nt, Homo sapiens
  misc_RNA (1)...(19): siRNA sense strand
gaagaaugccaagaauaca

SEQ ID NO: 1694884 - RNA, 19 nt, Homo sapiens
  misc_RNA (1)...(19): siRNA sense strand
aaccaaauccugaucaaga

SEQ ID NO: 1694885 - RNA, 19 nt, Homo sapiens
  misc_RNA (1)...(19): siRNA sense strand
acugaaagcaaauguguaa

SEQ ID NO: 1694886 - RNA, 19 nt, Homo sapiens
  misc_RNA (1)...(19): siRNA sense strand
gcaaauguguaaccauccu

SEQ ID NO: 1694887 - RNA, 19 nt, Homo sapiens
  misc_RNA (1)...(19): siRNA sense strand
caagugagagcagcaguga

SEQ ID NO: 1694888 - RNA, 19 nt, Homo sapiens
  misc_RNA (1)...(19): siRNA sense strand
acugcaagcugacuuacuu

SEQ ID NO: 1694889 - RNA, 19 nt, Homo sapiens
  misc_RNA (1)...(19): siRNA sense strand
gcccuuugaucagcuguuu

SEQ ID NO: 1694890 - RNA, 19 nt, Homo sapiens
  misc_RNA (1)...(19): siRNA sense strand
uuaaggucauaccaaguuu

SEQ ID NO: 1694891 - RNA, 19 nt, Homo sapiens
  misc_RNA (1)...(19): siRNA sense strand
aggcagggcucuggaguga

SEQ ID NO: 1694892 - RNA, 19 nt, Homo sapiens
  misc_RNA (1)...(19): siRNA sense strand
ccauugcuuugauuaugaa

SEQ ID NO: 1694893 - RNA, 19 nt, Homo sapiens
  misc_RNA (1)...(19): siRNA sense strand
uaaauccuccacugaaugu

SEQ ID NO: 1694894 - RNA, 19 nt, Homo sapiens
  misc_RNA (1)...(19): siRNA sense strand
ggcuugcggugcuuguuaa

SEQ ID NO: 1694895 - RNA, 19 nt, Homo sapiens
  misc_RNA (1)...(19): siRNA sense strand
ucacuucucccaccuguca

SEQ ID NO: 1694896 - RNA, 19 nt, Homo sapiens
  misc_RNA (1)...(19): siRNA sense strand
cugaggacacgcaguauuu

SEQ ID NO: 1694897 - RNA, 19 nt, Homo sapiens
  misc_RNA (1)...(19): siRNA sense strand
aaaccagaaucacugaaag

SEQ ID NO: 1694898 - RNA, 19 nt, Homo sapiens
  misc_RNA (1)...(19): siRNA sense strand
uaaccauccuccacaaagg

SEQ ID NO: 1694899 - RNA, 19 nt, Homo sapiens
  misc_RNA (1)...(19): siRNA sense strand
ggauauuugcagauagaaa

SEQ ID NO: 1694900 - RNA, 19 nt, Homo sapiens
  misc_RNA (1)...(19): siRNA sense strand
acaauacaaggaauggaua

SEQ ID NO: 1694901 - RNA, 19 nt, Homo sapiens
  misc_RNA (1)...(19): siRNA sense strand
gaucaucguggcgcaugua

SEQ ID NO: 1694902 - RNA, 19 nt, Homo sapiens
  misc_RNA (1)...(19): siRNA sense strand
uccauugcuuugauuauga

SEQ ID NO: 1694903 - RNA, 19 nt, Homo sapiens
  misc_RNA (1)...(19): siRNA sense strand
gagaaaccagugucugcuu

SEQ ID NO: 1694904 - RNA, 19 nt, Homo sapiens
  misc_RNA (1)...(19): siRNA sense strand
ucacugaaagcaaaugugu

SEQ ID NO: 1694905 - RNA, 19 nt, Homo sapiens
  misc_RNA (1)...(19): siRNA sense strand
gcaccacaaacacuacaga

SEQ ID NO: 1694906 - RNA, 19 nt, Homo sapiens
  misc_RNA (1)...(19): siRNA sense strand
caaugcauucaucucaaua

SEQ ID NO: 1694907 - RNA, 19 nt, Homo sapiens
  misc_RNA (1)...(19): siRNA sense strand
gacugaagaaugccaagaa

SEQ ID NO: 1694908 - RNA, 19 nt, Homo sapiens
  misc_RNA (1)...(19): siRNA sense strand
guauggcucuuggacugaa

SEQ ID NO: 1694909 - RNA, 19 nt, Homo sapiens
  misc_RNA (1)...(19): siRNA sense strand
caagaauacagcaaagaca

SEQ ID NO: 1694910 - RNA, 19 nt, Homo sapiens
  misc_RNA (1)...(19): siRNA sense strand
guaaccauccuccacaaag

SEQ ID NO: 1694911 - RNA, 19 nt, Homo sapiens
  misc_RNA (1)...(19): siRNA sense strand
cugaagaaugccaagaaua

SEQ ID NO: 1694912 - RNA, 19 nt, Homo sapiens
  misc_RNA (1)...(19): siRNA sense strand
ucucccaccugucaauuuc

SEQ ID NO: 1694913 - RNA, 19 nt, Homo sapiens
  misc_RNA (1)...(19): siRNA sense strand
cauaccaaguuucccuuca

SEQ ID NO: 1694914 - RNA, 19 nt, Homo sapiens
  misc_RNA (1)...(19): siRNA sense strand
cacaaacacuacagaagac

SEQ ID NO: 1694915 - RNA, 19 nt, Homo sapiens
  misc_RNA (1)...(19): siRNA sense strand
cacugcaccuggcuuguug

SEQ ID NO: 1694916 - RNA, 19 nt, Homo sapiens
  misc_RNA (1)...(19): siRNA sense strand
ggaauggauauuugcagau

SEQ ID NO: 1694917 - RNA, 19 nt, Homo sapiens
  misc_RNA (1)...(19): siRNA sense strand
ggacugaagaaugccaaga

SEQ ID NO: 1694918 - RNA, 19 nt, Homo sapiens
  misc_RNA (1)...(19): siRNA sense strand
acucgucucucuauccaau

SEQ ID NO: 1694919 - RNA, 19 nt, Homo sapiens
  misc_RNA (1)...(19): siRNA sense strand
caauacaaggaauggauau

SEQ ID NO: 1694920 - RNA, 19 nt, Homo sapiens
  misc_RNA (1)...(19): siRNA sense strand
ugguuuggcucaaguucuu

SEQ ID NO: 1694921 - RNA, 19 nt, Homo sapiens
  misc_RNA (1)...(19): siRNA sense strand
acugaagaaugccaagaau

SEQ ID NO: 1694922 - RNA, 19 nt, Homo sapiens
  misc_RNA (1)...(19): siRNA sense strand
cugacuuacuuccugauga

SEQ ID NO: 1694923 - RNA, 19 nt, Homo sapiens
  misc_RNA (1)...(19): siRNA sense strand
gaaauaucgcaugcugguu

SEQ ID NO: 1694924 - RNA, 19 nt, Homo sapiens
  misc_RNA (1)...(19): siRNA sense strand
guguaaccauccuccacaa

SEQ ID NO: 1694925 - RNA, 19 nt, Homo sapiens
  misc_RNA (1)...(19): siRNA sense strand
ggacuuuuauccucagcaa

SEQ ID NO: 1694926 - RNA, 19 nt, Homo sapiens
  misc_RNA (1)...(19): siRNA sense strand
uuuaaggucauaccaaguu

SEQ ID NO: 1694927 - RNA, 19 nt, Homo sapiens
  misc_RNA (1)...(19): siRNA sense strand
gcauguauuacucauccuu

SEQ ID NO: 1694928 - RNA, 19 nt, Homo sapiens
  misc_RNA (1)...(19): siRNA sense strand
uggcuugcggugcuuguua

SEQ ID NO: 1694929 - RNA, 19 nt, Homo sapiens
  misc_RNA (1)...(19): siRNA sense strand
aaacacuacagaagacaau

SEQ ID NO: 1694930 - RNA, 19 nt, Homo sapiens
  misc_RNA (1)...(19): siRNA sense strand
caaacacuacagaagacaa

SEQ ID NO: 1694931 - RNA, 19 nt, Homo sapiens
  misc_RNA (1)...(19): siRNA sense strand
gacuaugaaaccagaauca

SEQ ID NO: 1694932 - RNA, 19 nt, Homo sapiens
  misc_RNA (1)...(19): siRNA sense strand
auggauauuugcagauaga

SEQ ID NO: 1694933 - RNA, 19 nt, Homo sapiens
  misc_RNA (1)...(19): siRNA sense strand
gcaaaggaauguuaaucua

SEQ ID NO: 1694934 - RNA, 19 nt, Homo sapiens
  misc_RNA (1)...(19): siRNA sense strand
gaauggauauuugcagaua

SEQ ID NO: 1694935 - RNA, 19 nt, Homo sapiens
  misc_RNA (1)...(19): siRNA sense strand
cagaaucacugaaagcaaa

SEQ ID NO: 1694936 - RNA, 19 nt, Homo sapiens
  misc_RNA (1)...(19): siRNA sense strand
caucguggcgcauguauua

SEQ ID NO: 1694937 - RNA, 19 nt, Homo sapiens
  misc_RNA (1)...(19): siRNA sense strand
gaagacaauuauucacguu

SEQ ID NO: 1694938 - RNA, 19 nt, Homo sapiens
  misc_RNA (1)...(19): siRNA sense strand
gaaaccaaauccugaucaa

SEQ ID NO: 1694939 - RNA, 19 nt, Homo sapiens
  misc_RNA (1)...(19): siRNA sense strand
caagagcaaaggaauguua

SEQ ID NO: 1694940 - RNA, 19 nt, Homo sapiens
  misc_RNA (1)...(19): siRNA sense strand
ccauuaaaguuacugguuu

SEQ ID NO: 1694941 - RNA, 19 nt, Homo sapiens
  misc_RNA (1)...(19): siRNA sense strand
uaaguacgauguucaagug

SEQ ID NO: 1694942 - RNA, 19 nt, Homo sapiens
  misc_RNA (1)...(19): siRNA sense strand
gaaaauaaacgcuccaaaa

SEQ ID NO: 1694943 - RNA, 19 nt, Homo sapiens
  misc_RNA (1)...(19): siRNA sense strand
gaaaccagaaucacugaaa

SEQ ID NO: 1694944 - RNA, 19 nt, Homo sapiens
  misc_RNA (1)...(19): siRNA sense strand
gaguggagccaaccuauuu

SEQ ID NO: 1694945 - RNA, 19 nt, Homo sapiens
  misc_RNA (1)...(19): siRNA sense strand
gcagaacgaccacucacua

SEQ ID NO: 1694946 - RNA, 19 nt, Homo sapiens
  misc_RNA (1)...(19): siRNA sense strand
caaauaaauccuccacuga

SEQ ID NO: 1694947 - RNA, 19 nt, Homo sapiens
  misc_RNA (1)...(19): siRNA sense strand
ccuggaaccucaauuguga

SEQ ID NO: 1694948 - RNA, 19 nt, Homo sapiens
  misc_RNA (1)...(19): siRNA sense strand
ucacgccauugaucaaaua

SEQ ID NO: 1694949 - RNA, 19 nt, Homo sapiens
  misc_RNA (1)...(19): siRNA sense strand
ccacaaacacuacagaaga

SEQ ID NO: 1694950 - RNA, 19 nt, Homo sapiens
  misc_RNA (1)...(19): siRNA sense strand
ugaaggaacucgucucucu

SEQ ID NO: 1694951 - RNA, 19 nt, Homo sapiens
  misc_RNA (1)...(19): siRNA sense strand
gagccaaccuauuuaugug

SEQ ID NO: 1694952 - RNA, 19 nt, Homo sapiens
  misc_RNA (1)...(19): siRNA sense strand
gaacucgucucucuaucca

SEQ ID NO: 1694953 - RNA, 19 nt, Homo sapiens
  misc_RNA (1)...(19): siRNA sense strand
gaagaugacuaugaaacca

SEQ ID NO: 1694954 - RNA, 19 nt, Homo sapiens
  misc_RNA (1)...(19): siRNA sense strand
ugacuuacuuccugaugaa

SEQ ID NO: 1694955 - RNA, 19 nt, Homo sapiens
  misc_RNA (1)...(19): siRNA sense strand
gaaagcaaauguguaacca

SEQ ID NO: 1694956 - RNA, 19 nt, Homo sapiens
  misc_RNA (1)...(19): siRNA sense strand
gcagggcucuggagugagu

SEQ ID NO: 1694957 - RNA, 19 nt, Homo sapiens
  misc_RNA (1)...(19): siRNA sense strand
gaaugucacagcagagauu

SEQ ID NO: 1694958 - RNA, 19 nt, Homo sapiens
  misc_RNA (1)...(19): siRNA sense strand
uacaaggaauggauauuug

SEQ ID NO: 1694959 - RNA, 19 nt, Homo sapiens
  misc_RNA (1)...(19): siRNA sense strand
guacgauguucaagugaga

SEQ ID NO: 1694960 - RNA, 19 nt, Homo sapiens
  misc_RNA (1)...(19): siRNA sense strand
ccugucaauuucaccauua

SEQ ID NO: 1694961 - RNA, 19 nt, Homo sapiens
  misc_RNA (1)...(19): siRNA sense strand
ggagccaaccuauuuaugu

SEQ ID NO: 1694962 - RNA, 19 nt, Homo sapiens
  misc_RNA (1)...(19): siRNA sense strand
agaaaccagugucugcuuu

SEQ ID NO: 1694963 - RNA, 19 nt, Homo sapiens
  misc_RNA (1)...(19): siRNA sense strand
gaacgaccacucacuacug

SEQ ID NO: 1694964 - RNA, 19 nt, Homo sapiens
  misc_RNA (1)...(19): siRNA sense strand
gaaggaacucgucucucua

SEQ ID NO: 1694965 - RNA, 19 nt, Homo sapiens
  misc_RNA (1)...(19): siRNA sense strand
gauacugcaagcugacuua

SEQ ID NO: 1694966 - RNA, 19 nt, Homo sapiens
  misc_RNA (1)...(19): siRNA sense strand
cuacagaagacaauuauuc

SEQ ID NO: 1694967 - RNA, 19 nt, Homo sapiens
  misc_RNA (1)...(19): siRNA sense strand
ccaaugcauucaucucaau

SEQ ID NO: 1694968 - RNA, 19 nt, Homo sapiens
  misc_RNA (1)...(19): siRNA sense strand
ggaccauccugcagaacga

SEQ ID NO: 1694969 - RNA, 19 nt, Homo sapiens
  misc_RNA (1)...(19): siRNA sense strand
aauaaacgcuccaaaagaa

SEQ ID NO: 1694970 - RNA, 19 nt, Homo sapiens
  misc_RNA (1)...(19): siRNA sense strand
caaaagaagaugacuauga

SEQ ID NO: 1694971 - RNA, 19 nt, Homo sapiens
  misc_RNA (1)...(19): siRNA sense strand
aaauaucgcaugcugguuu

SEQ ID NO: 1694972 - RNA, 19 nt, Homo sapiens
  misc_RNA (1)...(19): siRNA sense strand
aaauaaauccuccacugaa

SEQ ID NO: 1694973 - RNA, 19 nt, Homo sapiens
  misc_RNA (1)...(19): siRNA sense strand
cauuaaaguuacugguuug

SEQ ID NO: 1694974 - RNA, 19 nt, Homo sapiens
  misc_RNA (1)...(19): siRNA sense strand
aauaaauccuccacugaau

SEQ ID NO: 1694975 - RNA, 19 nt, Homo sapiens
  misc_RNA (1)...(19): siRNA sense strand
caaaggaauguuaaucuag

SEQ ID NO: 1694976 - RNA, 19 nt, Homo sapiens
  misc_RNA (1)...(19): siRNA sense strand
cgccauugaucaaauaaau

SEQ ID NO: 1694977 - RNA, 19 nt, Homo sapiens
  misc_RNA (1)...(19): siRNA sense strand
acacuacagaagacaauua

SEQ ID NO: 1694978 - RNA, 19 nt, Homo sapiens
  misc_RNA (1)...(19): siRNA sense strand
ggaaaccaaauccugauca

SEQ ID NO: 1694979 - RNA, 19 nt, Homo sapiens
  misc_RNA (1)...(19): siRNA sense strand
gaucaagagcaaaggaaug

SEQ ID NO: 1694980 - RNA, 19 nt, Homo sapiens
  misc_RNA (1)...(19): siRNA sense strand
ugaagaaugccaagaauac

SEQ ID NO: 1694981 - RNA, 19 nt, Homo sapiens
  misc_RNA (1)...(19): siRNA sense strand
gagcaaaggaauguuaauc

SEQ ID NO: 1694982 - RNA, 19 nt, Homo sapiens
  misc_RNA (1)...(19): siRNA sense strand
gaccaaugcauucaucuca

SEQ ID NO: 1694983 - RNA, 19 nt, Homo sapiens
  misc_RNA (1)...(19): siRNA sense strand
gaagaaugccaagaauaca

SEQ ID NO: 1694984 - RNA, 19 nt, Homo sapiens
  misc_RNA (1)...(19): siRNA sense strand
aaccaaauccugaucaaga

SEQ ID NO: 1694985 - RNA, 19 nt, Homo sapiens
  misc_RNA (1)...(19): siRNA sense strand
acugaaagcaaauguguaa

SEQ ID NO: 1694986 - RNA, 19 nt, Homo sapiens
  misc_RNA (1)...(19): siRNA sense strand
gcaaauguguaaccauccu

SEQ ID NO: 1694987 - RNA, 19 nt, Homo sapiens
  misc_RNA (1)...(19): siRNA sense strand
caagugagagcagcaguga

SEQ ID NO: 1694988 - RNA, 19 nt, Homo sapiens
  misc_RNA (1)...(19): siRNA sense strand
acugcaagcugacuuacuu

SEQ ID NO: 1694989 - RNA, 19 nt, Homo sapiens
  misc_RNA (1)...(19): siRNA sense strand
gcccuuugaucagcuguuu

SEQ ID NO: 1694990 - RNA, 19 nt, Homo sapiens
  misc_RNA (1)...(19): siRNA sense strand
uuaaggucauaccaaguuu

SEQ ID NO: 1694991 - RNA, 19 nt, Homo sapiens
  misc_RNA (1)...(19): siRNA sense strand
aggcagggcucuggaguga

SEQ ID NO: 1694992 - RNA, 19 nt, Homo sapiens
  misc_RNA (1)...(19): siRNA sense strand
ccauugcuuugauuaugaa

SEQ ID NO: 1694993 - RNA, 19 nt, Homo sapiens
  misc_RNA (1)...(19): siRNA sense strand
uaaauccuccacugaaugu

SEQ ID NO: 1694994 - RNA, 19 nt, Homo sapiens
  misc_RNA (1)...(19): siRNA sense strand
ggcuugcggugcuuguuaa

SEQ ID NO: 1694995 - RNA, 19 nt, Homo sapiens
  misc_RNA (1)...(19): siRNA sense strand
ucacuucucccaccuguca

SEQ ID NO: 1694996 - RNA, 19 nt, Homo sapiens
  misc_RNA (1)...(19): siRNA sense strand
cugaggacacgcaguauuu

SEQ ID NO: 1694997 - RNA, 19 nt, Homo sapiens
  misc_RNA (1)...(19): siRNA sense strand
aaaccagaaucacugaaag

SEQ ID NO: 1694998 - RNA, 19 nt, Homo sapiens
  misc_RNA (1)...(19): siRNA sense strand
uaaccauccuccacaaagg

SEQ ID NO: 1694999 - RNA, 19 nt, Homo sapiens
  misc_RNA (1)...(19): siRNA sense strand
ggauauuugcagauagaaa

SEQ ID NO: 1695000 - RNA, 19 nt, Homo sapiens
  misc_RNA (1)...(19): siRNA sense strand
acaauacaaggaauggaua

SEQ ID NO: 1695001 - RNA, 19 nt, Homo sapiens
  misc_RNA (1)...(19): siRNA sense strand
gaucaucguggcgcaugua

SEQ ID NO: 1695002 - RNA, 19 nt, Homo sapiens
  misc_RNA (1)...(19): siRNA sense strand
uccauugcuuugauuauga

SEQ ID NO: 1695003 - RNA, 19 nt, Homo sapiens
  misc_RNA (1)...(19): siRNA sense strand
gagaaaccagugucugcuu

SEQ ID NO: 1695004 - RNA, 19 nt, Homo sapiens
  misc_RNA (1)...(19): siRNA sense strand
ucacugaaagcaaaugugu

SEQ ID NO: 1695005 - RNA, 19 nt, Homo sapiens
  misc_RNA (1)...(19): siRNA sense strand
gcaccacaaacacuacaga

SEQ ID NO: 1695006 - RNA, 19 nt, Homo sapiens
  misc_RNA (1)...(19): siRNA sense strand
caaugcauucaucucaaua

SEQ ID NO: 1695007 - RNA, 19 nt, Homo sapiens
  misc_RNA (1)...(19): siRNA sense strand
gacugaagaaugccaagaa

SEQ ID NO: 1695008 - RNA, 19 nt, Homo sapiens
  misc_RNA (1)...(19): siRNA sense strand
guauggcucuuggacugaa

SEQ ID NO: 1695009 - RNA, 19 nt, Homo sapiens
  misc_RNA (1)...(19): siRNA sense strand
caagaauacagcaaagaca

SEQ ID NO: 1695010 - RNA, 19 nt, Homo sapiens
  misc_RNA (1)...(19): siRNA sense strand
guaaccauccuccacaaag

SEQ ID NO: 1695011 - RNA, 19 nt, Homo sapiens
  misc_RNA (1)...(19): siRNA sense strand
cugaagaaugccaagaaua

SEQ ID NO: 1695012 - RNA, 19 nt, Homo sapiens
  misc_RNA (1)...(19): siRNA sense strand
ucucccaccugucaauuuc

SEQ ID NO: 1695013 - RNA, 19 nt, Homo sapiens
  misc_RNA (1)...(19): siRNA sense strand
cauaccaaguuucccuuca

SEQ ID NO: 1695014 - RNA, 19 nt, Homo sapiens
  misc_RNA (1)...(19): siRNA sense strand
cacaaacacuacagaagac

SEQ ID NO: 1695015 - RNA, 19 nt, Homo sapiens
  misc_RNA (1)...(19): siRNA sense strand
cacugcaccuggcuuguug

SEQ ID NO: 1695016 - RNA, 19 nt, Homo sapiens
  misc_RNA (1)...(19): siRNA sense strand
ggaauggauauuugcagau

SEQ ID NO: 1695017 - RNA, 19 nt, Homo sapiens
  misc_RNA (1)...(19): siRNA sense strand
ggacugaagaaugccaaga

SEQ ID NO: 1695018 - RNA, 19 nt, Homo sapiens
  misc_RNA (1)...(19): siRNA sense strand
acucgucucucuauccaau

SEQ ID NO: 1695019 - RNA, 19 nt, Homo sapiens
  misc_RNA (1)...(19): siRNA sense strand
caauacaaggaauggauau

SEQ ID NO: 1695020 - RNA, 19 nt, Homo sapiens
  misc_RNA (1)...(19): siRNA sense strand
ugguuuggcucaaguucuu

SEQ ID NO: 1695021 - RNA, 19 nt, Homo sapiens
  misc_RNA (1)...(19): siRNA sense strand
acugaagaaugccaagaau

SEQ ID NO: 1695022 - RNA, 19 nt, Homo sapiens
  misc_RNA (1)...(19): siRNA sense strand
cugacuuacuuccugauga

SEQ ID NO: 1695023 - RNA, 19 nt, Homo sapiens
  misc_RNA (1)...(19): siRNA sense strand
gaaauaucgcaugcugguu

SEQ ID NO: 1695024 - RNA, 19 nt, Homo sapiens
  misc_RNA (1)...(19): siRNA sense strand
guguaaccauccuccacaa

SEQ ID NO: 1695025 - RNA, 19 nt, Homo sapiens
  misc_RNA (1)...(19): siRNA sense strand
ggacuuuuauccucagcaa

SEQ ID NO: 1695026 - RNA, 19 nt, Homo sapiens
  misc_RNA (1)...(19): siRNA sense strand
uuuaaggucauaccaaguu

SEQ ID NO: 1695027 - RNA, 19 nt, Homo sapiens
  misc_RNA (1)...(19): siRNA sense strand
gcauguauuacucauccuu

SEQ ID NO: 1695028 - RNA, 19 nt, Homo sapiens
  misc_RNA (1)...(19): siRNA sense strand
uggcuugcggugcuuguua

SEQ ID NO: 1695029 - RNA, 19 nt, Homo sapiens
  misc_RNA (1)...(19): siRNA sense strand
aaacacuacagaagacaau

SEQ ID NO: 1695030 - RNA, 19 nt, Homo sapiens
  misc_RNA (1)...(19): siRNA sense strand
caaacacuacagaagacaa

SEQ ID NO: 1695031 - RNA, 19 nt, Homo sapiens
  misc_RNA (1)...(19): siRNA sense strand
gacuaugaaaccagaauca

SEQ ID NO: 1695032 - RNA, 19 nt, Homo sapiens
  misc_RNA (1)...(19): siRNA sense strand
auggauauuugcagauaga

SEQ ID NO: 1695033 - RNA, 19 nt, Homo sapiens
  misc_RNA (1)...(19): siRNA sense strand
gcaaaggaauguuaaucua

SEQ ID NO: 1695034 - RNA, 19 nt, Homo sapiens
  misc_RNA (1)...(19): siRNA sense strand
gaauggauauuugcagaua

SEQ ID NO: 1695035 - RNA, 19 nt, Homo sapiens
  misc_RNA (1)...(19): siRNA sense strand
cagaaucacugaaagcaaa

SEQ ID NO: 1695036 - RNA, 19 nt, Homo sapiens
  misc_RNA (1)...(19): siRNA sense strand
caucguggcgcauguauua

SEQ ID NO: 1695037 - RNA, 19 nt, Homo sapiens
  misc_RNA (1)...(19): siRNA sense strand
gaagacaauuauucacguu

SEQ ID NO: 1695038 - RNA, 19 nt, Homo sapiens
  misc_RNA (1)...(19): siRNA sense strand
gaaaccaaauccugaucaa

SEQ ID NO: 1695039 - RNA, 19 nt, Homo sapiens
  misc_RNA (1)...(19): siRNA sense strand
caagagcaaaggaauguua

SEQ ID NO: 1695040 - RNA, 19 nt, Homo sapiens
  misc_RNA (1)...(19): siRNA sense strand
ccauuaaaguuacugguuu

SEQ ID NO: 1695041 - RNA, 19 nt, Homo sapiens
  misc_RNA (1)...(19): siRNA sense strand
uaaguacgauguucaagug

SEQ ID NO: 1695042 - RNA, 19 nt, Homo sapiens
  misc_RNA (1)...(19): siRNA sense strand
gaaaauaaacgcuccaaaa

SEQ ID NO: 1695043 - RNA, 19 nt, Homo sapiens
  misc_RNA (1)...(19): siRNA sense strand
gaaaccagaaucacugaaa

SEQ ID NO: 1695044 - RNA, 19 nt, Homo sapiens
  misc_RNA (1)...(19): siRNA sense strand
gaguggagccaaccuauuu

SEQ ID NO: 1695045 - RNA, 19 nt, Homo sapiens
  misc_RNA (1)...(19): siRNA sense strand
gcagaacgaccacucacua

SEQ ID NO: 1695046 - RNA, 19 nt, Homo sapiens
  misc_RNA (1)...(19): siRNA sense strand
caaauaaauccuccacuga

SEQ ID NO: 1695047 - RNA, 19 nt, Homo sapiens
  misc_RNA (1)...(19): siRNA sense strand
ccuggaaccucaauuguga

SEQ ID NO: 1695048 - RNA, 19 nt, Homo sapiens
  misc_RNA (1)...(19): siRNA sense strand
ucacgccauugaucaaaua

SEQ ID NO: 1695049 - RNA, 19 nt, Homo sapiens
  misc_RNA (1)...(19): siRNA sense strand
ccacaaacacuacagaaga

SEQ ID NO: 1695050 - RNA, 19 nt, Homo sapiens
  misc_RNA (1)...(19): siRNA sense strand
ugaaggaacucgucucucu

SEQ ID NO: 1695051 - RNA, 19 nt, Homo sapiens
  misc_RNA (1)...(19): siRNA sense strand
gagccaaccuauuuaugug

SEQ ID NO: 1695052 - RNA, 19 nt, Homo sapiens
  misc_RNA (1)...(19): siRNA sense strand
gaacucgucucucuaucca

SEQ ID NO: 1695053 - RNA, 19 nt, Homo sapiens
  misc_RNA (1)...(19): siRNA sense strand
gaagaugacuaugaaacca

SEQ ID NO: 1695054 - RNA, 19 nt, Homo sapiens
  misc_RNA (1)...(19): siRNA sense strand
ugacuuacuuccugaugaa

SEQ ID NO: 1695055 - RNA, 19 nt, Homo sapiens
  misc_RNA (1)...(19): siRNA sense strand
gaaagcaaauguguaacca

SEQ ID NO: 1695056 - RNA, 19 nt, Homo sapiens
  misc_RNA (1)...(19): siRNA sense strand
gcagggcucuggagugagu

SEQ ID NO: 1695057 - RNA, 19 nt, Homo sapiens
  misc_RNA (1)...(19): siRNA sense strand
gaaugucacagcagagauu

SEQ ID NO: 1695058 - RNA, 19 nt, Homo sapiens
  misc_RNA (1)...(19): siRNA sense strand
uacaaggaauggauauuug

SEQ ID NO: 1695059 - RNA, 19 nt, Homo sapiens
  misc_RNA (1)...(19): siRNA sense strand
guacgauguucaagugaga

SEQ ID NO: 1695060 - RNA, 19 nt, Homo sapiens
  misc_RNA (1)...(19): siRNA sense strand
ccugucaauuucaccauua

SEQ ID NO: 1695061 - RNA, 19 nt, Homo sapiens
  misc_RNA (1)...(19): siRNA sense strand
ggagccaaccuauuuaugu

SEQ ID NO: 1695062 - RNA, 19 nt, Homo sapiens
  misc_RNA (1)...(19): siRNA sense strand
agaaaccagugucugcuuu

SEQ ID NO: 1695063 - RNA, 19 nt, Homo sapiens
  misc_RNA (1)...(19): siRNA sense strand
gaacgaccacucacuacug

SEQ ID NO: 1695064 - RNA, 19 nt, Homo sapiens
  misc_RNA (1)...(19): siRNA sense strand
gaaggaacucgucucucua

SEQ ID NO: 1695065 - RNA, 19 nt, Homo sapiens
  misc_RNA (1)...(19): siRNA sense strand
gauacugcaagcugacuua

SEQ ID NO: 1695066 - RNA, 19 nt, Homo sapiens
  misc_RNA (1)...(19): siRNA sense strand
cuacagaagacaauuauuc

SEQ ID NO: 1695067 - RNA, 19 nt, Homo sapiens
  misc_RNA (1)...(19): siRNA sense strand
ccaaugcauucaucucaau

SEQ ID NO: 1695068 - RNA, 19 nt, Homo sapiens
  misc_RNA (1)...(19): siRNA sense strand
ggaccauccugcagaacga

SEQ ID NO: 1695069 - RNA, 19 nt, Homo sapiens
  misc_RNA (1)...(19): siRNA sense strand
aauaaacgcuccaaaagaa

SEQ ID NO: 1695070 - RNA, 19 nt, Homo sapiens
  misc_RNA (1)...(19): siRNA sense strand
caaaagaagaugacuauga

SEQ ID NO: 1695071 - RNA, 19 nt, Homo sapiens
  misc_RNA (1)...(19): siRNA sense strand
aaauaucgcaugcugguuu

SEQ ID NO: 1695072 - RNA, 19 nt, Homo sapiens
  misc_RNA (1)...(19): siRNA sense strand
aaauaaauccuccacugaa

SEQ ID NO: 1695073 - RNA, 19 nt, Homo sapiens
  misc_RNA (1)...(19): siRNA sense strand
cauuaaaguuacugguuug

SEQ ID NO: 1695074 - RNA, 19 nt, Homo sapiens
  misc_RNA (1)...(19): siRNA sense strand
aauaaauccuccacugaau

SEQ ID NO: 1695075 - RNA, 19 nt, Homo sapiens
  misc_RNA (1)...(19): siRNA sense strand
caaaggaauguuaaucuag

SEQ ID NO: 1695076 - RNA, 19 nt, Homo sapiens
  misc_RNA (1)...(19): siRNA sense strand
cgccauugaucaaauaaau

SEQ ID NO: 1695077 - RNA, 19 nt, Homo sapiens
  misc_RNA (1)...(19): siRNA sense strand
acacuacagaagacaauua

SEQ ID NO: 1695078 - RNA, 19 nt, Homo sapiens
  misc_RNA (1)...(19): siRNA sense strand
ggaaaccaaauccugauca

SEQ ID NO: 1695079 - RNA, 19 nt, Homo sapiens
  misc_RNA (1)...(19): siRNA sense strand
gaucaagagcaaaggaaug

SEQ ID NO: 1695080 - RNA, 19 nt, Homo sapiens
  misc_RNA (1)...(19): siRNA sense strand
ugaagaaugccaagaauac

SEQ ID NO: 1695081 - RNA, 19 nt, Homo sapiens
  misc_RNA (1)...(19): siRNA sense strand
gagcaaaggaauguuaauc

SEQ ID NO: 1695082 - RNA, 19 nt, Homo sapiens
  misc_RNA (1)...(19): siRNA sense strand
gaccaaugcauucaucuca

SEQ ID NO: 1695083 - RNA, 19 nt, Homo sapiens
  misc_RNA (1)...(19): siRNA sense strand
gaagaaugccaagaauaca

SEQ ID NO: 1695084 - RNA, 19 nt, Homo sapiens
  misc_RNA (1)...(19): siRNA sense strand
aaccaaauccugaucaaga

SEQ ID NO: 1695085 - RNA, 19 nt, Homo sapiens
  misc_RNA (1)...(19): siRNA sense strand
acugaaagcaaauguguaa

SEQ ID NO: 1695086 - RNA, 19 nt, Homo sapiens
  misc_RNA (1)...(19): siRNA sense strand
gcaaauguguaaccauccu

SEQ ID NO: 1695087 - RNA, 19 nt, Homo sapiens
  misc_RNA (1)...(19): siRNA sense strand
caagugagagcagcaguga

SEQ ID NO: 1695088 - RNA, 19 nt, Homo sapiens
  misc_RNA (1)...(19): siRNA sense strand
acugcaagcugacuuacuu

SEQ ID NO: 1695089 - RNA, 19 nt, Homo sapiens
  misc_RNA (1)...(19): siRNA sense strand
gcccuuugaucagcuguuu

SEQ ID NO: 1695090 - RNA, 19 nt, Homo sapiens
  misc_RNA (1)...(19): siRNA sense strand
uuaaggucauaccaaguuu

SEQ ID NO: 1695091 - RNA, 19 nt, Homo sapiens
  misc_RNA (1)...(19): siRNA sense strand
aggcagggcucuggaguga

SEQ ID NO: 1695092 - RNA, 19 nt, Homo sapiens
  misc_RNA (1)...(19): siRNA sense strand
ccauugcuuugauuaugaa

SEQ ID NO: 1695093 - RNA, 19 nt, Homo sapiens
  misc_RNA (1)...(19): siRNA sense strand
uaaauccuccacugaaugu

SEQ ID NO: 1695094 - RNA, 19 nt, Homo sapiens
  misc_RNA (1)...(19): siRNA sense strand
ggcuugcggugcuuguuaa

SEQ ID NO: 1695095 - RNA, 19 nt, Homo sapiens
  misc_RNA (1)...(19): siRNA sense strand
ucacuucucccaccuguca

SEQ ID NO: 1695096 - RNA, 19 nt, Homo sapiens
  misc_RNA (1)...(19): siRNA sense strand
cugaggacacgcaguauuu

SEQ ID NO: 1695097 - RNA, 19 nt, Homo sapiens
  misc_RNA (1)...(19): siRNA sense strand
aaaccagaaucacugaaag

SEQ ID NO: 1695098 - RNA, 19 nt, Homo sapiens
  misc_RNA (1)...(19): siRNA sense strand
uaaccauccuccacaaagg

SEQ ID NO: 1695099 - RNA, 19 nt, Homo sapiens
  misc_RNA (1)...(19): siRNA sense strand
ggauauuugcagauagaaa

SEQ ID NO: 1695100 - RNA, 19 nt, Homo sapiens
  misc_RNA (1)...(19): siRNA sense strand
acaauacaaggaauggaua

SEQ ID NO: 1695101 - RNA, 19 nt, Homo sapiens
  misc_RNA (1)...(19): siRNA sense strand
gaucaucguggcgcaugua

SEQ ID NO: 1695102 - RNA, 19 nt, Homo sapiens
  misc_RNA (1)...(19): siRNA sense strand
uccauugcuuugauuauga

SEQ ID NO: 1695103 - RNA, 19 nt, Homo sapiens
  misc_RNA (1)...(19): siRNA sense strand
gagaaaccagugucugcuu

SEQ ID NO: 1695104 - RNA, 19 nt, Homo sapiens
  misc_RNA (1)...(19): siRNA sense strand
ucacugaaagcaaaugugu

SEQ ID NO: 1695105 - RNA, 19 nt, Homo sapiens
  misc_RNA (1)...(19): siRNA sense strand
gcaccacaaacacuacaga

SEQ ID NO: 1695106 - RNA, 19 nt, Homo sapiens
  misc_RNA (1)...(19): siRNA sense strand
caaugcauucaucucaaua

SEQ ID NO: 1695107 - RNA, 19 nt, Homo sapiens
  misc_RNA (1)...(19): siRNA sense strand
gacugaagaaugccaagaa

SEQ ID NO: 1695108 - RNA, 19 nt, Homo sapiens
  misc_RNA (1)...(19): siRNA sense strand
guauggcucuuggacugaa

SEQ ID NO: 1695109 - RNA, 19 nt, Homo sapiens
  misc_RNA (1)...(19): siRNA sense strand
caagaauacagcaaagaca

SEQ ID NO: 1695110 - RNA, 19 nt, Homo sapiens
  misc_RNA (1)...(19): siRNA sense strand
guaaccauccuccacaaag

SEQ ID NO: 1695111 - RNA, 19 nt, Homo sapiens
  misc_RNA (1)...(19): siRNA sense strand
cugaagaaugccaagaaua

SEQ ID NO: 1695112 - RNA, 19 nt, Homo sapiens
  misc_RNA (1)...(19): siRNA sense strand
ucucccaccugucaauuuc

SEQ ID NO: 1695113 - RNA, 19 nt, Homo sapiens
  misc_RNA (1)...(19): siRNA sense strand
cauaccaaguuucccuuca

SEQ ID NO: 1695114 - RNA, 19 nt, Homo sapiens
  misc_RNA (1)...(19): siRNA sense strand
cacaaacacuacagaagac

SEQ ID NO: 1695115 - RNA, 19 nt, Homo sapiens
  misc_RNA (1)...(19): siRNA sense strand
cacugcaccuggcuuguug

SEQ ID NO: 1695116 - RNA, 19 nt, Homo sapiens
  misc_RNA (1)...(19): siRNA sense strand
ggaauggauauuugcagau

SEQ ID NO: 1695117 - RNA, 19 nt, Homo sapiens
  misc_RNA (1)...(19): siRNA sense strand
ggacugaagaaugccaaga

SEQ ID NO: 1695118 - RNA, 19 nt, Homo sapiens
  misc_RNA (1)...(19): siRNA sense strand
acucgucucucuauccaau

SEQ ID NO: 1695119 - RNA, 19 nt, Homo sapiens
  misc_RNA (1)...(19): siRNA sense strand
caauacaaggaauggauau

SEQ ID NO: 1695120 - RNA, 19 nt, Homo sapiens
  misc_RNA (1)...(19): siRNA sense strand
ugguuuggcucaaguucuu

SEQ ID NO: 1695121 - RNA, 19 nt, Homo sapiens
  misc_RNA (1)...(19): siRNA sense strand
acugaagaaugccaagaau

SEQ ID NO: 1695122 - RNA, 19 nt, Homo sapiens
  misc_RNA (1)...(19): siRNA sense strand
cugacuuacuuccugauga

SEQ ID NO: 1695123 - RNA, 19 nt, Homo sapiens
  misc_RNA (1)...(19): siRNA sense strand
gaaauaucgcaugcugguu

SEQ ID NO: 1695124 - RNA, 19 nt, Homo sapiens
  misc_RNA (1)...(19): siRNA sense strand
guguaaccauccuccacaa

SEQ ID NO: 1695125 - RNA, 19 nt, Homo sapiens
  misc_RNA (1)...(19): siRNA sense strand
ggacuuuuauccucagcaa

SEQ ID NO: 1695126 - RNA, 19 nt, Homo sapiens
  misc_RNA (1)...(19): siRNA sense strand
uuuaaggucauaccaaguu

SEQ ID NO: 1695127 - RNA, 19 nt, Homo sapiens
  misc_RNA (1)...(19): siRNA sense strand
gcauguauuacucauccuu

SEQ ID NO: 1695128 - RNA, 19 nt, Homo sapiens
  misc_RNA (1)...(19): siRNA sense strand
uggcuugcggugcuuguua

SEQ ID NO: 1695129 - RNA, 19 nt, Homo sapiens
  misc_RNA (1)...(19): siRNA sense strand
aaacacuacagaagacaau

SEQ ID NO: 1695130 - RNA, 19 nt, Homo sapiens
  misc_RNA (1)...(19): siRNA sense strand
caaacacuacagaagacaa

SEQ ID NO: 1695131 - RNA, 19 nt, Homo sapiens
  misc_RNA (1)...(19): siRNA sense strand
gacuaugaaaccagaauca

SEQ ID NO: 1695132 - RNA, 19 nt, Homo sapiens
  misc_RNA (1)...(19): siRNA sense strand
auggauauuugcagauaga

SEQ ID NO: 1695133 - RNA, 19 nt, Homo sapiens
  misc_RNA (1)...(19): siRNA sense strand
gaaagcagcuggugguuua

SEQ ID NO: 1695134 - RNA, 19 nt, Homo sapiens
  misc_RNA (1)...(19): siRNA sense strand
gaacggagacgacgccuuu

SEQ ID NO: 1695135 - RNA, 19 nt, Homo sapiens
  misc_RNA (1)...(19): siRNA sense strand
ugaggaagaugacgaguaa

SEQ ID NO: 1695136 - RNA, 19 nt, Homo sapiens
  misc_RNA (1)...(19): siRNA sense strand
gaaaggccuucgaugauau

SEQ ID NO: 1695137 - RNA, 19 nt, Homo sapiens
  misc_RNA (1)...(19): siRNA sense strand
uaaacgggcugcagacuuc

SEQ ID NO: 1695138 - RNA, 19 nt, Homo sapiens
  misc_RNA (1)...(19): siRNA sense strand
gccaaauacuucucuaaga

SEQ ID NO: 1695139 - RNA, 19 nt, Homo sapiens
  misc_RNA (1)...(19): siRNA sense strand
cagggaugaugcucaaaua

SEQ ID NO: 1695140 - RNA, 19 nt, Homo sapiens
  misc_RNA (1)...(19): siRNA sense strand
gaugaaauccucggagaaa

SEQ ID NO: 1695141 - RNA, 19 nt, Homo sapiens
  misc_RNA (1)...(19): siRNA sense strand
ggucaugacuaaacuaggu

SEQ ID NO: 1695142 - RNA, 19 nt, Homo sapiens
  misc_RNA (1)...(19): siRNA sense strand
gcucaaauaucagagaagu

SEQ ID NO: 1695143 - RNA, 19 nt, Homo sapiens
  misc_RNA (1)...(19): siRNA sense strand
ucagagaaguuacgaaagg

SEQ ID NO: 1695144 - RNA, 19 nt, Homo sapiens
  misc_RNA (1)...(19): siRNA sense strand
gaaaaucgucuauguguau

SEQ ID NO: 1695145 - RNA, 19 nt, Homo sapiens
  misc_RNA (1)...(19): siRNA sense strand
ccacaggaaucagguugaa

SEQ ID NO: 1695146 - RNA, 19 nt, Homo sapiens
  misc_RNA (1)...(19): siRNA sense strand
uaucagagaaguuacgaaa

SEQ ID NO: 1695147 - RNA, 19 nt, Homo sapiens
  misc_RNA (1)...(19): siRNA sense strand
gaucgaaaccacaggaauc

SEQ ID NO: 1695148 - RNA, 19 nt, Homo sapiens
  misc_RNA (1)...(19): siRNA sense strand
gguugaacguccucagaug

SEQ ID NO: 1695149 - RNA, 19 nt, Homo sapiens
  misc_RNA (1)...(19): siRNA sense strand
gggaugaugcucaaauauc

SEQ ID NO: 1695150 - RNA, 19 nt, Homo sapiens
  misc_RNA (1)...(19): siRNA sense strand
guaaacgggcugcagacuu

SEQ ID NO: 1695151 - RNA, 19 nt, Homo sapiens
  misc_RNA (1)...(19): siRNA sense strand
caaggagacccagggauga

SEQ ID NO: 1695152 - RNA, 19 nt, Homo sapiens
  misc_RNA (1)...(19): siRNA sense strand
gagaaaaucgucuaugugu

SEQ ID NO: 1695153 - RNA, 19 nt, Homo sapiens
  misc_RNA (1)...(19): siRNA sense strand
gcuggugguuuaugaagag

SEQ ID NO: 1695154 - RNA, 19 nt, Homo sapiens
  misc_RNA (1)...(19): siRNA sense strand
ccaccuuucaugcguagua

SEQ ID NO: 1695155 - RNA, 19 nt, Homo sapiens
  misc_RNA (1)...(19): siRNA sense strand
gaacguccucagaugacuu

SEQ ID NO: 1695156 - RNA, 19 nt, Homo sapiens
  misc_RNA (1)...(19): siRNA sense strand
ggagacgacgccuuugcaa

SEQ ID NO: 1695157 - RNA, 19 nt, Homo sapiens
  misc_RNA (1)...(19): siRNA sense strand
cagcgacccugaggaagau

SEQ ID NO: 1695158 - RNA, 19 nt, Homo sapiens
  misc_RNA (1)...(19): siRNA sense strand
ccacagacugcgugagaga

SEQ ID NO: 1695159 - RNA, 19 nt, Homo sapiens
  misc_RNA (1)...(19): siRNA sense strand
guugaacguccucagauga

SEQ ID NO: 1695160 - RNA, 19 nt, Homo sapiens
  misc_RNA (1)...(19): siRNA sense strand
ggugguuuaugaagagauc

SEQ ID NO: 1695161 - RNA, 19 nt, Homo sapiens
  misc_RNA (1)...(19): siRNA sense strand
ggaaugauuuugguaacga

SEQ ID NO: 1695162 - RNA, 19 nt, Homo sapiens
  misc_RNA (1)...(19): siRNA sense strand
aaucgucuauguguauaug

SEQ ID NO: 1695163 - RNA, 19 nt, Homo sapiens
  misc_RNA (1)...(19): siRNA sense strand
caccuuucaugcguaguaa

SEQ ID NO: 1695164 - RNA, 19 nt, Homo sapiens
  misc_RNA (1)...(19): siRNA sense strand
ccagggaugaugcucaaau

SEQ ID NO: 1695165 - RNA, 19 nt, Homo sapiens
  misc_RNA (1)...(19): siRNA sense strand
gcagcuggugguuuaugaa

SEQ ID NO: 1695166 - RNA, 19 nt, Homo sapiens
  misc_RNA (1)...(19): siRNA sense strand
gaaagagugggaaaagaug

SEQ ID NO: 1695167 - RNA, 19 nt, Homo sapiens
  misc_RNA (1)...(19): siRNA sense strand
agaaagcagcuggugguuu

SEQ ID NO: 1695168 - RNA, 19 nt, Homo sapiens
  misc_RNA (1)...(19): siRNA sense strand
gagaaagcagcuggugguu

SEQ ID NO: 1695169 - RNA, 19 nt, Homo sapiens
  misc_RNA (1)...(19): siRNA sense strand
gaggucaugacuaaacuag

SEQ ID NO: 1695170 - RNA, 19 nt, Homo sapiens
  misc_RNA (1)...(19): siRNA sense strand
cggagaaaaucgucuaugu

SEQ ID NO: 1695171 - RNA, 19 nt, Homo sapiens
  misc_RNA (1)...(19): siRNA sense strand
agaaaaucgucuaugugua

SEQ ID NO: 1695172 - RNA, 19 nt, Homo sapiens
  misc_RNA (1)...(19): siRNA sense strand
gaugcucaaauaucagaga

SEQ ID NO: 1695173 - RNA, 19 nt, Homo sapiens
  misc_RNA (1)...(19): siRNA sense strand
ucgucuauguguauaugaa

SEQ ID NO: 1695174 - RNA, 19 nt, Homo sapiens
  misc_RNA (1)...(19): siRNA sense strand
acagacugcgugagagaaa

SEQ ID NO: 1695175 - RNA, 19 nt, Homo sapiens
  misc_RNA (1)...(19): siRNA sense strand
cuucgaugauauugccaaa

SEQ ID NO: 1695176 - RNA, 19 nt, Homo sapiens
  misc_RNA (1)...(19): siRNA sense strand
cugaggaagaugacgagua

SEQ ID NO: 1695177 - RNA, 19 nt, Homo sapiens
  misc_RNA (1)...(19): siRNA sense strand
gaaagcagcuggugguuua

SEQ ID NO: 1695178 - RNA, 19 nt, Homo sapiens
  misc_RNA (1)...(19): siRNA sense strand
gaacggagacgacgccuuu

SEQ ID NO: 1695179 - RNA, 19 nt, Homo sapiens
  misc_RNA (1)...(19): siRNA sense strand
ugaggaagaugacgaguaa

SEQ ID NO: 1695180 - RNA, 19 nt, Homo sapiens
  misc_RNA (1)...(19): siRNA sense strand
gaaaggccuucgaugauau

SEQ ID NO: 1695181 - RNA, 19 nt, Homo sapiens
  misc_RNA (1)...(19): siRNA sense strand
uaaacgggcugcagacuuc

SEQ ID NO: 1695182 - RNA, 19 nt, Homo sapiens
  misc_RNA (1)...(19): siRNA sense strand
gccaaauacuucucuaaga

SEQ ID NO: 1695183 - RNA, 19 nt, Homo sapiens
  misc_RNA (1)...(19): siRNA sense strand
cagggaugaugcucaaaua

SEQ ID NO: 1695184 - RNA, 19 nt, Homo sapiens
  misc_RNA (1)...(19): siRNA sense strand
gaugaaauccucggagaaa

SEQ ID NO: 1695185 - RNA, 19 nt, Homo sapiens
  misc_RNA (1)...(19): siRNA sense strand
ggucaugacuaaacuaggu

SEQ ID NO: 1695186 - RNA, 19 nt, Homo sapiens
  misc_RNA (1)...(19): siRNA sense strand
gcucaaauaucagagaagu

SEQ ID NO: 1695187 - RNA, 19 nt, Homo sapiens
  misc_RNA (1)...(19): siRNA sense strand
ucagagaaguuacgaaagg

SEQ ID NO: 1695188 - RNA, 19 nt, Homo sapiens
  misc_RNA (1)...(19): siRNA sense strand
gaaaaucgucuauguguau

SEQ ID NO: 1695189 - RNA, 19 nt, Homo sapiens
  misc_RNA (1)...(19): siRNA sense strand
ccacaggaaucagguugaa

SEQ ID NO: 1695190 - RNA, 19 nt, Homo sapiens
  misc_RNA (1)...(19): siRNA sense strand
uaucagagaaguuacgaaa

SEQ ID NO: 1695191 - RNA, 19 nt, Homo sapiens
  misc_RNA (1)...(19): siRNA sense strand
gaucgaaaccacaggaauc

SEQ ID NO: 1695192 - RNA, 19 nt, Homo sapiens
  misc_RNA (1)...(19): siRNA sense strand
gguugaacguccucagaug

SEQ ID NO: 1695193 - RNA, 19 nt, Homo sapiens
  misc_RNA (1)...(19): siRNA sense strand
gggaugaugcucaaauauc

SEQ ID NO: 1695194 - RNA, 19 nt, Homo sapiens
  misc_RNA (1)...(19): siRNA sense strand
guaaacgggcugcagacuu

SEQ ID NO: 1695195 - RNA, 19 nt, Homo sapiens
  misc_RNA (1)...(19): siRNA sense strand
caaggagacccagggauga

SEQ ID NO: 1695196 - RNA, 19 nt, Homo sapiens
  misc_RNA (1)...(19): siRNA sense strand
gagaaaaucgucuaugugu

SEQ ID NO: 1695197 - RNA, 19 nt, Homo sapiens
  misc_RNA (1)...(19): siRNA sense strand
gcuggugguuuaugaagag

SEQ ID NO: 1695198 - RNA, 19 nt, Homo sapiens
  misc_RNA (1)...(19): siRNA sense strand
ccaccuuucaugcguagua

SEQ ID NO: 1695199 - RNA, 19 nt, Homo sapiens
  misc_RNA (1)...(19): siRNA sense strand
gaacguccucagaugacuu

SEQ ID NO: 1695200 - RNA, 19 nt, Homo sapiens
  misc_RNA (1)...(19): siRNA sense strand
ggagacgacgccuuugcaa

SEQ ID NO: 1695201 - RNA, 19 nt, Homo sapiens
  misc_RNA (1)...(19): siRNA sense strand
cagcgacccugaggaagau

SEQ ID NO: 1695202 - RNA, 19 nt, Homo sapiens
  misc_RNA (1)...(19): siRNA sense strand
ccacagacugcgugagaga

SEQ ID NO: 1695203 - RNA, 19 nt, Homo sapiens
  misc_RNA (1)...(19): siRNA sense strand
guugaacguccucagauga

SEQ ID NO: 1695204 - RNA, 19 nt, Homo sapiens
  misc_RNA (1)...(19): siRNA sense strand
ggugguuuaugaagagauc

SEQ ID NO: 1695205 - RNA, 19 nt, Homo sapiens
  misc_RNA (1)...(19): siRNA sense strand
ggaaugauuuugguaacga

SEQ ID NO: 1695206 - RNA, 19 nt, Homo sapiens
  misc_RNA (1)...(19): siRNA sense strand
aaucgucuauguguauaug

SEQ ID NO: 1695207 - RNA, 19 nt, Homo sapiens
  misc_RNA (1)...(19): siRNA sense strand
caccuuucaugcguaguaa

SEQ ID NO: 1695208 - RNA, 19 nt, Homo sapiens
  misc_RNA (1)...(19): siRNA sense strand
ccagggaugaugcucaaau

SEQ ID NO: 1695209 - RNA, 19 nt, Homo sapiens
  misc_RNA (1)...(19): siRNA sense strand
gcagcuggugguuuaugaa

SEQ ID NO: 1695210 - RNA, 19 nt, Homo sapiens
  misc_RNA (1)...(19): siRNA sense strand
gaaagagugggaaaagaug

SEQ ID NO: 1695211 - RNA, 19 nt, Homo sapiens
  misc_RNA (1)...(19): siRNA sense strand
agaaagcagcuggugguuu

SEQ ID NO: 1695212 - RNA, 19 nt, Homo sapiens
  misc_RNA (1)...(19): siRNA sense strand
gagaaagcagcuggugguu

SEQ ID NO: 1695213 - RNA, 19 nt, Homo sapiens
  misc_RNA (1)...(19): siRNA sense strand
gaggucaugacuaaacuag

SEQ ID NO: 1695214 - RNA, 19 nt, Homo sapiens
  misc_RNA (1)...(19): siRNA sense strand
cggagaaaaucgucuaugu

SEQ ID NO: 1695215 - RNA, 19 nt, Homo sapiens
  misc_RNA (1)...(19): siRNA sense strand
agaaaaucgucuaugugua

SEQ ID NO: 1695216 - RNA, 19 nt, Homo sapiens
  misc_RNA (1)...(19): siRNA sense strand
gaugcucaaauaucagaga

SEQ ID NO: 1695217 - RNA, 19 nt, Homo sapiens
  misc_RNA (1)...(19): siRNA sense strand
ucgucuauguguauaugaa

SEQ ID NO: 1695218 - RNA, 19 nt, Homo sapiens
  misc_RNA (1)...(19): siRNA sense strand
acagacugcgugagagaaa

SEQ ID NO: 1695219 - RNA, 19 nt, Homo sapiens
  misc_RNA (1)...(19): siRNA sense strand
cuucgaugauauugccaaa

SEQ ID NO: 1695220 - RNA, 19 nt, Homo sapiens
  misc_RNA (1)...(19): siRNA sense strand
cugaggaagaugacgagua

SEQ ID NO: 1695221 - RNA, 19 nt, Homo sapiens
  misc_RNA (1)...(19): siRNA sense strand
gaacugaacuuuguauaug

SEQ ID NO: 1695222 - RNA, 19 nt, Homo sapiens
  misc_RNA (1)...(19): siRNA sense strand
gcaaagacauguuuucuaa

SEQ ID NO: 1695223 - RNA, 19 nt, Homo sapiens
  misc_RNA (1)...(19): siRNA sense strand
ggaagaagacagagacuuu

SEQ ID NO: 1695224 - RNA, 19 nt, Homo sapiens
  misc_RNA (1)...(19): siRNA sense strand
caucaaaucugccaaaaua

SEQ ID NO: 1695225 - RNA, 19 nt, Homo sapiens
  misc_RNA (1)...(19): siRNA sense strand
gaaguaacauuuccuguac

SEQ ID NO: 1695226 - RNA, 19 nt, Homo sapiens
  misc_RNA (1)...(19): siRNA sense strand
ggacugugcuuucccuuug

SEQ ID NO: 1695227 - RNA, 19 nt, Homo sapiens
  misc_RNA (1)...(19): siRNA sense strand
gaaccuggaugaauguaga

SEQ ID NO: 1695228 - RNA, 19 nt, Homo sapiens
  misc_RNA (1)...(19): siRNA sense strand
ggauggaacugaacuuugu

SEQ ID NO: 1695229 - RNA, 19 nt, Homo sapiens
  misc_RNA (1)...(19): siRNA sense strand
cagcaucacuggauuaugu

SEQ ID NO: 1695230 - RNA, 19 nt, Homo sapiens
  misc_RNA (1)...(19): siRNA sense strand
gggaaaggaucuucaagga

SEQ ID NO: 1695231 - RNA, 19 nt, Homo sapiens
  misc_RNA (1)...(19): siRNA sense strand
aaaguuaggucaucugguu

SEQ ID NO: 1695232 - RNA, 19 nt, Homo sapiens
  misc_RNA (1)...(19): siRNA sense strand
gaaaggugcuguguuuaca

SEQ ID NO: 1695233 - RNA, 19 nt, Homo sapiens
  misc_RNA (1)...(19): siRNA sense strand
ggaugaauguagagagaaa

SEQ ID NO: 1695234 - RNA, 19 nt, Homo sapiens
  misc_RNA (1)...(19): siRNA sense strand
cauauccucuucucaguuu

SEQ ID NO: 1695235 - RNA, 19 nt, Homo sapiens
  misc_RNA (1)...(19): siRNA sense strand
guggaugucuuucuucuga

SEQ ID NO: 1695236 - RNA, 19 nt, Homo sapiens
  misc_RNA (1)...(19): siRNA sense strand
cuacugagguaucacauug

SEQ ID NO: 1695237 - RNA, 19 nt, Homo sapiens
  misc_RNA (1)...(19): siRNA sense strand
ugggaaaggugcuguguuu

SEQ ID NO: 1695238 - RNA, 19 nt, Homo sapiens
  misc_RNA (1)...(19): siRNA sense strand
gguaucacauugacacuug

SEQ ID NO: 1695239 - RNA, 19 nt, Homo sapiens
  misc_RNA (1)...(19): siRNA sense strand
caguagacaugaccaguuu

SEQ ID NO: 1695240 - RNA, 19 nt, Homo sapiens
  misc_RNA (1)...(19): siRNA sense strand
ggacaccaucagccaauua

SEQ ID NO: 1695241 - RNA, 19 nt, Homo sapiens
  misc_RNA (1)...(19): siRNA sense strand
ucagugggcuuauucguau

SEQ ID NO: 1695242 - RNA, 19 nt, Homo sapiens
  misc_RNA (1)...(19): siRNA sense strand
ggaacugaacuuuguauau

SEQ ID NO: 1695243 - RNA, 19 nt, Homo sapiens
  misc_RNA (1)...(19): siRNA sense strand
gagccuggaugaucauguu

SEQ ID NO: 1695244 - RNA, 19 nt, Homo sapiens
  misc_RNA (1)...(19): siRNA sense strand
gaacaggaccguggaagug

SEQ ID NO: 1695245 - RNA, 19 nt, Homo sapiens
  misc_RNA (1)...(19): siRNA sense strand
cauagaacguccugauguu

SEQ ID NO: 1695246 - RNA, 19 nt, Homo sapiens
  misc_RNA (1)...(19): siRNA sense strand
gcauguggaugucuuucuu

SEQ ID NO: 1695247 - RNA, 19 nt, Homo sapiens
  misc_RNA (1)...(19): siRNA sense strand
gauauaaacagaagagcaa

SEQ ID NO: 1695248 - RNA, 19 nt, Homo sapiens
  misc_RNA (1)...(19): siRNA sense strand
gcaaagaugagauuaagag

SEQ ID NO: 1695249 - RNA, 19 nt, Homo sapiens
  misc_RNA (1)...(19): siRNA sense strand
gagcagcgauuuucuguga

SEQ ID NO: 1695250 - RNA, 19 nt, Homo sapiens
  misc_RNA (1)...(19): siRNA sense strand
ugaaguaacauuuccugua

SEQ ID NO: 1695251 - RNA, 19 nt, Homo sapiens
  misc_RNA (1)...(19): siRNA sense strand
guaccaaggcugcuaguga

SEQ ID NO: 1695252 - RNA, 19 nt, Homo sapiens
  misc_RNA (1)...(19): siRNA sense strand
cagcuucccucuacaagug

SEQ ID NO: 1695253 - RNA, 19 nt, Homo sapiens
  misc_RNA (1)...(19): siRNA sense strand
agaccaacaucaagaguga

SEQ ID NO: 1695254 - RNA, 19 nt, Homo sapiens
  misc_RNA (1)...(19): siRNA sense strand
cugcacaguucuauuauau

SEQ ID NO: 1695255 - RNA, 19 nt, Homo sapiens
  misc_RNA (1)...(19): siRNA sense strand
caagacauuuucucaagua

SEQ ID NO: 1695256 - RNA, 19 nt, Homo sapiens
  misc_RNA (1)...(19): siRNA sense strand
ugagaacccugagguguga

SEQ ID NO: 1695257 - RNA, 19 nt, Homo sapiens
  misc_RNA (1)...(19): siRNA sense strand
ccaaagaccaacaucaaga

SEQ ID NO: 1695258 - RNA, 19 nt, Homo sapiens
  misc_RNA (1)...(19): siRNA sense strand
uaccaaggcugcuagugaa

SEQ ID NO: 1695259 - RNA, 19 nt, Homo sapiens
  misc_RNA (1)...(19): siRNA sense strand
gcgggaagauugccguguu

SEQ ID NO: 1695260 - RNA, 19 nt, Homo sapiens
  misc_RNA (1)...(19): siRNA sense strand
gcagguugaaguaacauuu

SEQ ID NO: 1695261 - RNA, 19 nt, Homo sapiens
  misc_RNA (1)...(19): siRNA sense strand
ggaaaggugcuguguuuac

SEQ ID NO: 1695262 - RNA, 19 nt, Homo sapiens
  misc_RNA (1)...(19): siRNA sense strand
ggugugagcgccacuuuga

SEQ ID NO: 1695263 - RNA, 19 nt, Homo sapiens
  misc_RNA (1)...(19): siRNA sense strand
gcaaguccaagcugauuug

SEQ ID NO: 1695264 - RNA, 19 nt, Homo sapiens
  misc_RNA (1)...(19): siRNA sense strand
gaacguccugauguuaaua

SEQ ID NO: 1695265 - RNA, 19 nt, Homo sapiens
  misc_RNA (1)...(19): siRNA sense strand
ggaugucuuucuucugaga

SEQ ID NO: 1695266 - RNA, 19 nt, Homo sapiens
  misc_RNA (1)...(19): siRNA sense strand
cgaccuuccugcacacauu

SEQ ID NO: 1695267 - RNA, 19 nt, Homo sapiens
  misc_RNA (1)...(19): siRNA sense strand
gcucagcaucacuggauua

SEQ ID NO: 1695268 - RNA, 19 nt, Homo sapiens
  misc_RNA (1)...(19): siRNA sense strand
cuaccgaccucuccacugu

SEQ ID NO: 1695269 - RNA, 19 nt, Homo sapiens
  misc_RNA (1)...(19): siRNA sense strand
gagagcagguugaaguaac

SEQ ID NO: 1695270 - RNA, 19 nt, Homo sapiens
  misc_RNA (1)...(19): siRNA sense strand
gcaguagacaugaccaguu

SEQ ID NO: 1695271 - RNA, 19 nt, Homo sapiens
  misc_RNA (1)...(19): siRNA sense strand
aaugguggcugucuaagug

SEQ ID NO: 1695272 - RNA, 19 nt, Homo sapiens
  misc_RNA (1)...(19): siRNA sense strand
ggaaucgcuuucaguccuu

SEQ ID NO: 1695273 - RNA, 19 nt, Homo sapiens
  misc_RNA (1)...(19): siRNA sense strand
cgugugugcuggaaacaaa

SEQ ID NO: 1695274 - RNA, 19 nt, Homo sapiens
  misc_RNA (1)...(19): siRNA sense strand
uguggaaccuggaugaaug

SEQ ID NO: 1695275 - RNA, 19 nt, Homo sapiens
  misc_RNA (1)...(19): siRNA sense strand
agucugcacaguucuauua

SEQ ID NO: 1695276 - RNA, 19 nt, Homo sapiens
  misc_RNA (1)...(19): siRNA sense strand
aaccaucuguuacucguuu

SEQ ID NO: 1695277 - RNA, 19 nt, Homo sapiens
  misc_RNA (1)...(19): siRNA sense strand
ggagagcagguugaaguaa

SEQ ID NO: 1695278 - RNA, 19 nt, Homo sapiens
  misc_RNA (1)...(19): siRNA sense strand
gaagaagacagagacuuuc

SEQ ID NO: 1695279 - RNA, 19 nt, Homo sapiens
  misc_RNA (1)...(19): siRNA sense strand
cuucucaguuuauucauug

SEQ ID NO: 1695280 - RNA, 19 nt, Homo sapiens
  misc_RNA (1)...(19): siRNA sense strand
gagcaaguccaagcugauu

SEQ ID NO: 1695281 - RNA, 19 nt, Homo sapiens
  misc_RNA (1)...(19): siRNA sense strand
uauacagucugcacaguuc

SEQ ID NO: 1695282 - RNA, 19 nt, Homo sapiens
  misc_RNA (1)...(19): siRNA sense strand
ccaaggagucugugucuca

SEQ ID NO: 1695283 - RNA, 19 nt, Homo sapiens
  misc_RNA (1)...(19): siRNA sense strand
gaucuucaguuugauggau

SEQ ID NO: 1695284 - RNA, 19 nt, Homo sapiens
  misc_RNA (1)...(19): siRNA sense strand
cuuuggaucuucaguuuga

SEQ ID NO: 1695285 - RNA, 19 nt, Homo sapiens
  misc_RNA (1)...(19): siRNA sense strand
uagaacguccugauguuaa

SEQ ID NO: 1695286 - RNA, 19 nt, Homo sapiens
  misc_RNA (1)...(19): siRNA sense strand
ccgaguagcugggauuaca

SEQ ID NO: 1695287 - RNA, 19 nt, Homo sapiens
  misc_RNA (1)...(19): siRNA sense strand
caucuguguuaucagcaua

SEQ ID NO: 1695288 - RNA, 19 nt, Homo sapiens
  misc_RNA (1)...(19): siRNA sense strand
cauugacacuugcaaagau

SEQ ID NO: 1695289 - RNA, 19 nt, Homo sapiens
  misc_RNA (1)...(19): siRNA sense strand
caauuacugcuauggcuuu

SEQ ID NO: 1695290 - RNA, 19 nt, Homo sapiens
  misc_RNA (1)...(19): siRNA sense strand
guagacaugaccaguuuau

SEQ ID NO: 1695291 - RNA, 19 nt, Homo sapiens
  misc_RNA (1)...(19): siRNA sense strand
caccaaagaccaacaucaa

SEQ ID NO: 1695292 - RNA, 19 nt, Homo sapiens
  misc_RNA (1)...(19): siRNA sense strand
gaacuuuguauauggaaca

SEQ ID NO: 1695293 - RNA, 19 nt, Homo sapiens
  misc_RNA (1)...(19): siRNA sense strand
gaauguagagagaaaguac

SEQ ID NO: 1695294 - RNA, 19 nt, Homo sapiens
  misc_RNA (1)...(19): siRNA sense strand
gacgggacccugcgaaugu

SEQ ID NO: 1695295 - RNA, 19 nt, Homo sapiens
  misc_RNA (1)...(19): siRNA sense strand
ggguugaccuaaggaagaa

SEQ ID NO: 1695296 - RNA, 19 nt, Homo sapiens
  misc_RNA (1)...(19): siRNA sense strand
ccauuguacaggaucauua

SEQ ID NO: 1695297 - RNA, 19 nt, Homo sapiens
  misc_RNA (1)...(19): siRNA sense strand
guagagagaaaguacuuca

SEQ ID NO: 1695298 - RNA, 19 nt, Homo sapiens
  misc_RNA (1)...(19): siRNA sense strand
ugacugcgguggaguucug

SEQ ID NO: 1695299 - RNA, 19 nt, Homo sapiens
  misc_RNA (1)...(19): siRNA sense strand
ucugcacaguucuauuaua

SEQ ID NO: 1695300 - RNA, 19 nt, Homo sapiens
  misc_RNA (1)...(19): siRNA sense strand
guauauggaacacuaagga

SEQ ID NO: 1695301 - RNA, 19 nt, Homo sapiens
  misc_RNA (1)...(19): siRNA sense strand
ggaaaauccccaagacauu

SEQ ID NO: 1695302 - RNA, 19 nt, Homo sapiens
  misc_RNA (1)...(19): siRNA sense strand
ggaccauuguacaggauca

SEQ ID NO: 1695303 - RNA, 19 nt, Homo sapiens
  misc_RNA (1)...(19): siRNA sense strand
gggaaaggugcuguguuua

SEQ ID NO: 1695304 - RNA, 19 nt, Homo sapiens
  misc_RNA (1)...(19): siRNA sense strand
acgcuuacguguaugaaau

SEQ ID NO: 1695305 - RNA, 19 nt, Homo sapiens
  misc_RNA (1)...(19): siRNA sense strand
ccucaggcuuauaaccuuu

SEQ ID NO: 1695306 - RNA, 19 nt, Homo sapiens
  misc_RNA (1)...(19): siRNA sense strand
gaucgugugcccugaggaa

SEQ ID NO: 1695307 - RNA, 19 nt, Homo sapiens
  misc_RNA (1)...(19): siRNA sense strand
gcaucacuggauuauguua

SEQ ID NO: 1695308 - RNA, 19 nt, Homo sapiens
  misc_RNA (1)...(19): siRNA sense strand
gguaaacuccagcucuuuc

SEQ ID NO: 1695309 - RNA, 19 nt, Homo sapiens
  misc_RNA (1)...(19): siRNA sense strand
cacggaacgucaugaagga

SEQ ID NO: 1695310 - RNA, 19 nt, Homo sapiens
  misc_RNA (1)...(19): siRNA sense strand
caucccaaauucugcaugu

SEQ ID NO: 1695311 - RNA, 19 nt, Homo sapiens
  misc_RNA (1)...(19): siRNA sense strand
gcauauccucuucucaguu

SEQ ID NO: 1695312 - RNA, 19 nt, Homo sapiens
  misc_RNA (1)...(19): siRNA sense strand
caguucaucuguguuauca

SEQ ID NO: 1695313 - RNA, 19 nt, Homo sapiens
  misc_RNA (1)...(19): siRNA sense strand
cugcacacauucucucaga

SEQ ID NO: 1695314 - RNA, 19 nt, Homo sapiens
  misc_RNA (1)...(19): siRNA sense strand
uauucaugcuggauauuga

SEQ ID NO: 1695315 - RNA, 19 nt, Homo sapiens
  misc_RNA (1)...(19): siRNA sense strand
ggaacaggaccguggaagu

SEQ ID NO: 1695316 - RNA, 19 nt, Homo sapiens
  misc_RNA (1)...(19): siRNA sense strand
cuacaagugcucugggaaa

SEQ ID NO: 1695317 - RNA, 19 nt, Homo sapiens
  misc_RNA (1)...(19): siRNA sense strand
uuaauaaccgccacaaagu

SEQ ID NO: 1695318 - RNA, 19 nt, Homo sapiens
  misc_RNA (1)...(19): siRNA sense strand
caaagaugagauuaagaga

SEQ ID NO: 1695319 - RNA, 19 nt, Homo sapiens
  misc_RNA (1)...(19): siRNA sense strand
gauggaacugaacuuugua

SEQ ID NO: 1695320 - RNA, 19 nt, Homo sapiens
  misc_RNA (1)...(19): siRNA sense strand
caucagccaauuacugcua

SEQ ID NO: 1695321 - RNA, 19 nt, Homo sapiens
  misc_RNA (1)...(19): siRNA sense strand
gguuguagcuccuguauua

SEQ ID NO: 1695322 - RNA, 19 nt, Homo sapiens
  misc_RNA (1)...(19): siRNA sense strand
ccacaucuaucccaaauuu

SEQ ID NO: 1695323 - RNA, 19 nt, Homo sapiens
  misc_RNA (1)...(19): siRNA sense strand
cagaauauguucaggauuu

SEQ ID NO: 1695324 - RNA, 19 nt, Homo sapiens
  misc_RNA (1)...(19): siRNA sense strand
gauccuaacuacuuuauga

SEQ ID NO: 1695325 - RNA, 19 nt, Homo sapiens
  misc_RNA (1)...(19): siRNA sense strand
guaauuaccugucccauca

SEQ ID NO: 1695326 - RNA, 19 nt, Homo sapiens
  misc_RNA (1)...(19): siRNA sense strand
gagcucgccuguguaauua

SEQ ID NO: 1695327 - RNA, 19 nt, Homo sapiens
  misc_RNA (1)...(19): siRNA sense strand
gaagaugcuuggaaggaaa

SEQ ID NO: 1695328 - RNA, 19 nt, Homo sapiens
  misc_RNA (1)...(19): siRNA sense strand
ggaagaaauuauucagaga

SEQ ID NO: 1695329 - RNA, 19 nt, Homo sapiens
  misc_RNA (1)...(19): siRNA sense strand
gcagagacccugaaugguu

SEQ ID NO: 1695330 - RNA, 19 nt, Homo sapiens
  misc_RNA (1)...(19): siRNA sense strand
ccaaauuucucuuauaugg

SEQ ID NO: 1695331 - RNA, 19 nt, Homo sapiens
  misc_RNA (1)...(19): siRNA sense strand
caagagaaauaccaagaau

SEQ ID NO: 1695332 - RNA, 19 nt, Homo sapiens
  misc_RNA (1)...(19): siRNA sense strand
guagaacuccggucaagua

SEQ ID NO: 1695333 - RNA, 19 nt, Homo sapiens
  misc_RNA (1)...(19): siRNA sense strand
gggaugaaguuacucgaaa

SEQ ID NO: 1695334 - RNA, 19 nt, Homo sapiens
  misc_RNA (1)...(19): siRNA sense strand
ccaccuaguucacaggaua

SEQ ID NO: 1695335 - RNA, 19 nt, Homo sapiens
  misc_RNA (1)...(19): siRNA sense strand
ggaagaugcuuggaaggaa

SEQ ID NO: 1695336 - RNA, 19 nt, Homo sapiens
  misc_RNA (1)...(19): siRNA sense strand
gaacuccggucaaguaacu

SEQ ID NO: 1695337 - RNA, 19 nt, Homo sapiens
  misc_RNA (1)...(19): siRNA sense strand
ggagcucgccuguguaauu

SEQ ID NO: 1695338 - RNA, 19 nt, Homo sapiens
  misc_RNA (1)...(19): siRNA sense strand
gggaacaaauggacagguu

SEQ ID NO: 1695339 - RNA, 19 nt, Homo sapiens
  misc_RNA (1)...(19): siRNA sense strand
gauagaagaagcuuaugaa

SEQ ID NO: 1695340 - RNA, 19 nt, Homo sapiens
  misc_RNA (1)...(19): siRNA sense strand
cagauuaccaagagaaaua

SEQ ID NO: 1695341 - RNA, 19 nt, Homo sapiens
  misc_RNA (1)...(19): siRNA sense strand
ggacugaauaugaaguuaa

SEQ ID NO: 1695342 - RNA, 19 nt, Homo sapiens
  misc_RNA (1)...(19): siRNA sense strand
ugucuaagcugucugugaa

SEQ ID NO: 1695343 - RNA, 19 nt, Homo sapiens
  misc_RNA (1)...(19): siRNA sense strand
uggaugauauugaugauga

SEQ ID NO: 1695344 - RNA, 19 nt, Homo sapiens
  misc_RNA (1)...(19): siRNA sense strand
ccaugcaacuucaacauau

SEQ ID NO: 1695345 - RNA, 19 nt, Homo sapiens
  misc_RNA (1)...(19): siRNA sense strand
aaagaugucggacugaaua

SEQ ID NO: 1695346 - RNA, 19 nt, Homo sapiens
  misc_RNA (1)...(19): siRNA sense strand
aaacugcaguagagaugua

SEQ ID NO: 1695347 - RNA, 19 nt, Homo sapiens
  misc_RNA (1)...(19): siRNA sense strand
ggaacaaauggacagguua

SEQ ID NO: 1695348 - RNA, 19 nt, Homo sapiens
  misc_RNA (1)...(19): siRNA sense strand
ugagauggacccagagaua

SEQ ID NO: 1695349 - RNA, 19 nt, Homo sapiens
  misc_RNA (1)...(19): siRNA sense strand
gaaagauggauauggaaga

SEQ ID NO: 1695350 - RNA, 19 nt, Homo sapiens
  misc_RNA (1)...(19): siRNA sense strand
caugcaacuucaacauaua

SEQ ID NO: 1695351 - RNA, 19 nt, Homo sapiens
  misc_RNA (1)...(19): siRNA sense strand
uacaacagaugaugcuuug

SEQ ID NO: 1695352 - RNA, 19 nt, Homo sapiens
  misc_RNA (1)...(19): siRNA sense strand
aaagauggauauggaagaa

SEQ ID NO: 1695353 - RNA, 19 nt, Homo sapiens
  misc_RNA (1)...(19): siRNA sense strand
aaggaaagauggauaugga

SEQ ID NO: 1695354 - RNA, 19 nt, Homo sapiens
  misc_RNA (1)...(19): siRNA sense strand
uccuauggaugacaauuua

SEQ ID NO: 1695355 - RNA, 19 nt, Homo sapiens
  misc_RNA (1)...(19): siRNA sense strand
uaugggagcucgccugugu

SEQ ID NO: 1695356 - RNA, 19 nt, Homo sapiens
  misc_RNA (1)...(19): siRNA sense strand
cagguuauucuuccaguua

SEQ ID NO: 1695357 - RNA, 19 nt, Homo sapiens
  misc_RNA (1)...(19): siRNA sense strand
ugaaugcccuguuuucuaa

SEQ ID NO: 1695358 - RNA, 19 nt, Homo sapiens
  misc_RNA (1)...(19): siRNA sense strand
gaugucggacugaauauga

SEQ ID NO: 1695359 - RNA, 19 nt, Homo sapiens
  misc_RNA (1)...(19): siRNA sense strand
ucaaagaugucggacugaa

SEQ ID NO: 1695360 - RNA, 19 nt, Homo sapiens
  misc_RNA (1)...(19): siRNA sense strand
caacuuccgccaauugcua

SEQ ID NO: 1695361 - RNA, 19 nt, Homo sapiens
  misc_RNA (1)...(19): siRNA sense strand
gcaaacugcaguagagaug

SEQ ID NO: 1695362 - RNA, 19 nt, Homo sapiens
  misc_RNA (1)...(19): siRNA sense strand
ggccacaucuaucccaaau

SEQ ID NO: 1695363 - RNA, 19 nt, Homo sapiens
  misc_RNA (1)...(19): siRNA sense strand
aaucagagcguaagcgaaa

SEQ ID NO: 1695364 - RNA, 19 nt, Homo sapiens
  misc_RNA (1)...(19): siRNA sense strand
agaagaagcuuaugaaaag

SEQ ID NO: 1695365 - RNA, 19 nt, Homo sapiens
  misc_RNA (1)...(19): siRNA sense strand
gaggaugguugugaggauu

SEQ ID NO: 1695366 - RNA, 19 nt, Homo sapiens
  misc_RNA (1)...(19): siRNA sense strand
gcuccuguauuaaugucua

SEQ ID NO: 1695367 - RNA, 19 nt, Homo sapiens
  misc_RNA (1)...(19): siRNA sense strand
gaacaaauggacagguuac

SEQ ID NO: 1695368 - RNA, 19 nt, Homo sapiens
  misc_RNA (1)...(19): siRNA sense strand
ccugagagcuccaccuagu

SEQ ID NO: 1695369 - RNA, 19 nt, Homo sapiens
  misc_RNA (1)...(19): siRNA sense strand
ugauauugaugaugagaug

SEQ ID NO: 1695370 - RNA, 19 nt, Homo sapiens
  misc_RNA (1)...(19): siRNA sense strand
caacuucaacauauagaga

SEQ ID NO: 1695371 - RNA, 19 nt, Homo sapiens
  misc_RNA (1)...(19): siRNA sense strand
ccuaacuacuuuaugaaug

SEQ ID NO: 1695372 - RNA, 19 nt, Homo sapiens
  misc_RNA (1)...(19): siRNA sense strand
ggagaucaagggaacaaau

SEQ ID NO: 1695373 - RNA, 19 nt, Homo sapiens
  misc_RNA (1)...(19): siRNA sense strand
gagaucaagggaacaaaug

SEQ ID NO: 1695374 - RNA, 19 nt, Homo sapiens
  misc_RNA (1)...(19): siRNA sense strand
caacagaugaugcuuugca

SEQ ID NO: 1695375 - RNA, 19 nt, Homo sapiens
  misc_RNA (1)...(19): siRNA sense strand
gccaauugcuacuucaaag

SEQ ID NO: 1695376 - RNA, 19 nt, Homo sapiens
  misc_RNA (1)...(19): siRNA sense strand
cagaugaugcuuugcaaga

SEQ ID NO: 1695377 - RNA, 19 nt, Homo sapiens
  misc_RNA (1)...(19): siRNA sense strand
ccaagagaaauaccaagaa

SEQ ID NO: 1695378 - RNA, 19 nt, Homo sapiens
  misc_RNA (1)...(19): siRNA sense strand
cagagcagccuggcaguuu

SEQ ID NO: 1695379 - RNA, 19 nt, Homo sapiens
  misc_RNA (1)...(19): siRNA sense strand
ggacccagagauagaagaa

SEQ ID NO: 1695380 - RNA, 19 nt, Homo sapiens
  misc_RNA (1)...(19): siRNA sense strand
agauggauauggaagaaau

SEQ ID NO: 1695381 - RNA, 19 nt, Homo sapiens
  misc_RNA (1)...(19): siRNA sense strand
caaauggacagguuacaag

SEQ ID NO: 1695382 - RNA, 19 nt, Homo sapiens
  misc_RNA (1)...(19): siRNA sense strand
ugaaugccccugaauuuua

SEQ ID NO: 1695383 - RNA, 19 nt, Homo sapiens
  misc_RNA (1)...(19): siRNA sense strand
uuaaagaucaagcugcaaa

SEQ ID NO: 1695384 - RNA, 19 nt, Homo sapiens
  misc_RNA (1)...(19): siRNA sense strand
agagauagaagaagcuuau

SEQ ID NO: 1695385 - RNA, 19 nt, Homo sapiens
  misc_RNA (1)...(19): siRNA sense strand
gcagaguccaugcaacuuc

SEQ ID NO: 1695386 - RNA, 19 nt, Homo sapiens
  misc_RNA (1)...(19): siRNA sense strand
ucagguuggucuucgagaa

SEQ ID NO: 1695387 - RNA, 19 nt, Homo sapiens
  misc_RNA (1)...(19): siRNA sense strand
gaugaugcuuugcaagaac

SEQ ID NO: 1695388 - RNA, 19 nt, Homo sapiens
  misc_RNA (1)...(19): siRNA sense strand
gaagaaaauggaacagauu

SEQ ID NO: 1695389 - RNA, 19 nt, Homo sapiens
  misc_RNA (1)...(19): siRNA sense strand
cagaguccaugcaacuuca

SEQ ID NO: 1695390 - RNA, 19 nt, Homo sapiens
  misc_RNA (1)...(19): siRNA sense strand
cccaucaucugacaauuag

SEQ ID NO: 1695391 - RNA, 19 nt, Homo sapiens
  misc_RNA (1)...(19): siRNA sense strand
ucccaucaucugacaauua

SEQ ID NO: 1695392 - RNA, 19 nt, Homo sapiens
  misc_RNA (1)...(19): siRNA sense strand
gaucaagggaacaaaugga

SEQ ID NO: 1695393 - RNA, 19 nt, Homo sapiens
  misc_RNA (1)...(19): siRNA sense strand
ccaguuacacagaauccua

SEQ ID NO: 1695394 - RNA, 19 nt, Homo sapiens
  misc_RNA (1)...(19): siRNA sense strand
gauccagauuaccaagaga

SEQ ID NO: 1695395 - RNA, 19 nt, Homo sapiens
  misc_RNA (1)...(19): siRNA sense strand
ggaugaaguuacucgaaaa

SEQ ID NO: 1695396 - RNA, 19 nt, Homo sapiens
  misc_RNA (1)...(19): siRNA sense strand
uagagaagcaacaccagaa

SEQ ID NO: 1695397 - RNA, 19 nt, Homo sapiens
  misc_RNA (1)...(19): siRNA sense strand
gacccugaaugguuguguu

SEQ ID NO: 1695398 - RNA, 19 nt, Homo sapiens
  misc_RNA (1)...(19): siRNA sense strand
gcaaaaggggaugaaguua

SEQ ID NO: 1695399 - RNA, 19 nt, Homo sapiens
  misc_RNA (1)...(19): siRNA sense strand
cggacugaauaugaaguua

SEQ ID NO: 1695400 - RNA, 19 nt, Homo sapiens
  misc_RNA (1)...(19): siRNA sense strand
uuguggaacucaucuauca

SEQ ID NO: 1695401 - RNA, 19 nt, Homo sapiens
  misc_RNA (1)...(19): siRNA sense strand
uuacaacagaugaugcuuu

SEQ ID NO: 1695402 - RNA, 19 nt, Homo sapiens
  misc_RNA (1)...(19): siRNA sense strand
gaacuuguggaacucaucu

SEQ ID NO: 1695403 - RNA, 19 nt, Homo sapiens
  misc_RNA (1)...(19): siRNA sense strand
gagauggacccagagauag

SEQ ID NO: 1695404 - RNA, 19 nt, Homo sapiens
  misc_RNA (1)...(19): siRNA sense strand
caacaggccacaucuaucc

SEQ ID NO: 1695405 - RNA, 19 nt, Homo sapiens
  misc_RNA (1)...(19): siRNA sense strand
agaugaugcuuugcaagaa

SEQ ID NO: 1695406 - RNA, 19 nt, Homo sapiens
  misc_RNA (1)...(19): siRNA sense strand
gaugagauggacccagaga

SEQ ID NO: 1695407 - RNA, 19 nt, Homo sapiens
  misc_RNA (1)...(19): siRNA sense strand
aaaguugacaggaucaguu

SEQ ID NO: 1695408 - RNA, 19 nt, Homo sapiens
  misc_RNA (1)...(19): siRNA sense strand
ggaugguugugaggauuau

SEQ ID NO: 1695409 - RNA, 19 nt, Homo sapiens
  misc_RNA (1)...(19): siRNA sense strand
uguagcuccuguauuaaug

SEQ ID NO: 1695410 - RNA, 19 nt, Homo sapiens
  misc_RNA (1)...(19): siRNA sense strand
acgauuucaugcauuugua

SEQ ID NO: 1695411 - RNA, 19 nt, Homo sapiens
  misc_RNA (1)...(19): siRNA sense strand
caaagaugucggacugaau

SEQ ID NO: 1695412 - RNA, 19 nt, Homo sapiens
  misc_RNA (1)...(19): siRNA sense strand
caauugcuacuucaaagau

SEQ ID NO: 1695413 - RNA, 19 nt, Homo sapiens
  misc_RNA (1)...(19): siRNA sense strand
ccaauugcuacuucaaaga

SEQ ID NO: 1695414 - RNA, 19 nt, Homo sapiens
  misc_RNA (1)...(19): siRNA sense strand
auccuacucuaucagaaua

SEQ ID NO: 1695415 - RNA, 19 nt, Homo sapiens
  misc_RNA (1)...(19): siRNA sense strand
cugcagcugauccagauua

SEQ ID NO: 1695416 - RNA, 19 nt, Homo sapiens
  misc_RNA (1)...(19): siRNA sense strand
cuucgagaauugcugaaug

SEQ ID NO: 1695417 - RNA, 19 nt, Homo sapiens
  misc_RNA (1)...(19): siRNA sense strand
ucagagaauugaaaacguu

SEQ ID NO: 1695418 - RNA, 19 nt, Homo sapiens
  misc_RNA (1)...(19): siRNA sense strand
gauggacccagagauagaa

SEQ ID NO: 1695419 - RNA, 19 nt, Homo sapiens
  misc_RNA (1)...(19): siRNA sense strand
guagagauguaaaacagau

SEQ ID NO: 1695420 - RNA, 19 nt, Homo sapiens
  misc_RNA (1)...(19): siRNA sense strand
ugaaaacguuguccuagau

SEQ ID NO: 1695421 - RNA, 19 nt, Homo sapiens
  misc_RNA (1)...(19): siRNA sense strand
gguuguagcuccuguauua

SEQ ID NO: 1695422 - RNA, 19 nt, Homo sapiens
  misc_RNA (1)...(19): siRNA sense strand
ccacaucuaucccaaauuu

SEQ ID NO: 1695423 - RNA, 19 nt, Homo sapiens
  misc_RNA (1)...(19): siRNA sense strand
cagaauauguucaggauuu

SEQ ID NO: 1695424 - RNA, 19 nt, Homo sapiens
  misc_RNA (1)...(19): siRNA sense strand
gauccuaacuacuuuauga

SEQ ID NO: 1695425 - RNA, 19 nt, Homo sapiens
  misc_RNA (1)...(19): siRNA sense strand
guaauuaccugucccauca

SEQ ID NO: 1695426 - RNA, 19 nt, Homo sapiens
  misc_RNA (1)...(19): siRNA sense strand
gagcucgccuguguaauua

SEQ ID NO: 1695427 - RNA, 19 nt, Homo sapiens
  misc_RNA (1)...(19): siRNA sense strand
gaagaugcuuggaaggaaa

SEQ ID NO: 1695428 - RNA, 19 nt, Homo sapiens
  misc_RNA (1)...(19): siRNA sense strand
ggaagaaauuauucagaga

SEQ ID NO: 1695429 - RNA, 19 nt, Homo sapiens
  misc_RNA (1)...(19): siRNA sense strand
gcagagacccugaaugguu

SEQ ID NO: 1695430 - RNA, 19 nt, Homo sapiens
  misc_RNA (1)...(19): siRNA sense strand
ccaaauuucucuuauaugg

SEQ ID NO: 1695431 - RNA, 19 nt, Homo sapiens
  misc_RNA (1)...(19): siRNA sense strand
caagagaaauaccaagaau

SEQ ID NO: 1695432 - RNA, 19 nt, Homo sapiens
  misc_RNA (1)...(19): siRNA sense strand
guagaacuccggucaagua

SEQ ID NO: 1695433 - RNA, 19 nt, Homo sapiens
  misc_RNA (1)...(19): siRNA sense strand
gggaugaaguuacucgaaa

SEQ ID NO: 1695434 - RNA, 19 nt, Homo sapiens
  misc_RNA (1)...(19): siRNA sense strand
ccaccuaguucacaggaua

SEQ ID NO: 1695435 - RNA, 19 nt, Homo sapiens
  misc_RNA (1)...(19): siRNA sense strand
ggaagaugcuuggaaggaa

SEQ ID NO: 1695436 - RNA, 19 nt, Homo sapiens
  misc_RNA (1)...(19): siRNA sense strand
gaacuccggucaaguaacu

SEQ ID NO: 1695437 - RNA, 19 nt, Homo sapiens
  misc_RNA (1)...(19): siRNA sense strand
ggagcucgccuguguaauu

SEQ ID NO: 1695438 - RNA, 19 nt, Homo sapiens
  misc_RNA (1)...(19): siRNA sense strand
gggaacaaauggacagguu

SEQ ID NO: 1695439 - RNA, 19 nt, Homo sapiens
  misc_RNA (1)...(19): siRNA sense strand
gauagaagaagcuuaugaa

SEQ ID NO: 1695440 - RNA, 19 nt, Homo sapiens
  misc_RNA (1)...(19): siRNA sense strand
cagauuaccaagagaaaua

SEQ ID NO: 1695441 - RNA, 19 nt, Homo sapiens
  misc_RNA (1)...(19): siRNA sense strand
ggacugaauaugaaguuaa

SEQ ID NO: 1695442 - RNA, 19 nt, Homo sapiens
  misc_RNA (1)...(19): siRNA sense strand
ugucuaagcugucugugaa

SEQ ID NO: 1695443 - RNA, 19 nt, Homo sapiens
  misc_RNA (1)...(19): siRNA sense strand
uggaugauauugaugauga

SEQ ID NO: 1695444 - RNA, 19 nt, Homo sapiens
  misc_RNA (1)...(19): siRNA sense strand
ccaugcaacuucaacauau

SEQ ID NO: 1695445 - RNA, 19 nt, Homo sapiens
  misc_RNA (1)...(19): siRNA sense strand
aaagaugucggacugaaua

SEQ ID NO: 1695446 - RNA, 19 nt, Homo sapiens
  misc_RNA (1)...(19): siRNA sense strand
aaacugcaguagagaugua

SEQ ID NO: 1695447 - RNA, 19 nt, Homo sapiens
  misc_RNA (1)...(19): siRNA sense strand
ggaacaaauggacagguua

SEQ ID NO: 1695448 - RNA, 19 nt, Homo sapiens
  misc_RNA (1)...(19): siRNA sense strand
ugagauggacccagagaua

SEQ ID NO: 1695449 - RNA, 19 nt, Homo sapiens
  misc_RNA (1)...(19): siRNA sense strand
gaaagauggauauggaaga

SEQ ID NO: 1695450 - RNA, 19 nt, Homo sapiens
  misc_RNA (1)...(19): siRNA sense strand
caugcaacuucaacauaua

SEQ ID NO: 1695451 - RNA, 19 nt, Homo sapiens
  misc_RNA (1)...(19): siRNA sense strand
uacaacagaugaugcuuug

SEQ ID NO: 1695452 - RNA, 19 nt, Homo sapiens
  misc_RNA (1)...(19): siRNA sense strand
aaagauggauauggaagaa

SEQ ID NO: 1695453 - RNA, 19 nt, Homo sapiens
  misc_RNA (1)...(19): siRNA sense strand
aaggaaagauggauaugga

SEQ ID NO: 1695454 - RNA, 19 nt, Homo sapiens
  misc_RNA (1)...(19): siRNA sense strand
uccuauggaugacaauuua

SEQ ID NO: 1695455 - RNA, 19 nt, Homo sapiens
  misc_RNA (1)...(19): siRNA sense strand
uaugggagcucgccugugu

SEQ ID NO: 1695456 - RNA, 19 nt, Homo sapiens
  misc_RNA (1)...(19): siRNA sense strand
cagguuauucuuccaguua

SEQ ID NO: 1695457 - RNA, 19 nt, Homo sapiens
  misc_RNA (1)...(19): siRNA sense strand
ugaaugcccuguuuucuaa

SEQ ID NO: 1695458 - RNA, 19 nt, Homo sapiens
  misc_RNA (1)...(19): siRNA sense strand
gaugucggacugaauauga

SEQ ID NO: 1695459 - RNA, 19 nt, Homo sapiens
  misc_RNA (1)...(19): siRNA sense strand
ucaaagaugucggacugaa

SEQ ID NO: 1695460 - RNA, 19 nt, Homo sapiens
  misc_RNA (1)...(19): siRNA sense strand
caacuuccgccaauugcua

SEQ ID NO: 1695461 - RNA, 19 nt, Homo sapiens
  misc_RNA (1)...(19): siRNA sense strand
gcaaacugcaguagagaug

SEQ ID NO: 1695462 - RNA, 19 nt, Homo sapiens
  misc_RNA (1)...(19): siRNA sense strand
ggccacaucuaucccaaau

SEQ ID NO: 1695463 - RNA, 19 nt, Homo sapiens
  misc_RNA (1)...(19): siRNA sense strand
aaucagagcguaagcgaaa

SEQ ID NO: 1695464 - RNA, 19 nt, Homo sapiens
  misc_RNA (1)...(19): siRNA sense strand
agaagaagcuuaugaaaag

SEQ ID NO: 1695465 - RNA, 19 nt, Homo sapiens
  misc_RNA (1)...(19): siRNA sense strand
gaggaugguugugaggauu

SEQ ID NO: 1695466 - RNA, 19 nt, Homo sapiens
  misc_RNA (1)...(19): siRNA sense strand
gcuccuguauuaaugucua

SEQ ID NO: 1695467 - RNA, 19 nt, Homo sapiens
  misc_RNA (1)...(19): siRNA sense strand
gaacaaauggacagguuac

SEQ ID NO: 1695468 - RNA, 19 nt, Homo sapiens
  misc_RNA (1)...(19): siRNA sense strand
ccugagagcuccaccuagu

SEQ ID NO: 1695469 - RNA, 19 nt, Homo sapiens
  misc_RNA (1)...(19): siRNA sense strand
ugauauugaugaugagaug

SEQ ID NO: 1695470 - RNA, 19 nt, Homo sapiens
  misc_RNA (1)...(19): siRNA sense strand
caacuucaacauauagaga

SEQ ID NO: 1695471 - RNA, 19 nt, Homo sapiens
  misc_RNA (1)...(19): siRNA sense strand
ccuaacuacuuuaugaaug

SEQ ID NO: 1695472 - RNA, 19 nt, Homo sapiens
  misc_RNA (1)...(19): siRNA sense strand
ggagaucaagggaacaaau

SEQ ID NO: 1695473 - RNA, 19 nt, Homo sapiens
  misc_RNA (1)...(19): siRNA sense strand
gagaucaagggaacaaaug

SEQ ID NO: 1695474 - RNA, 19 nt, Homo sapiens
  misc_RNA (1)...(19): siRNA sense strand
caacagaugaugcuuugca

SEQ ID NO: 1695475 - RNA, 19 nt, Homo sapiens
  misc_RNA (1)...(19): siRNA sense strand
gccaauugcuacuucaaag

SEQ ID NO: 1695476 - RNA, 19 nt, Homo sapiens
  misc_RNA (1)...(19): siRNA sense strand
cagaugaugcuuugcaaga

SEQ ID NO: 1695477 - RNA, 19 nt, Homo sapiens
  misc_RNA (1)...(19): siRNA sense strand
ccaagagaaauaccaagaa

SEQ ID NO: 1695478 - RNA, 19 nt, Homo sapiens
  misc_RNA (1)...(19): siRNA sense strand
cagagcagccuggcaguuu

SEQ ID NO: 1695479 - RNA, 19 nt, Homo sapiens
  misc_RNA (1)...(19): siRNA sense strand
ggacccagagauagaagaa

SEQ ID NO: 1695480 - RNA, 19 nt, Homo sapiens
  misc_RNA (1)...(19): siRNA sense strand
agauggauauggaagaaau

SEQ ID NO: 1695481 - RNA, 19 nt, Homo sapiens
  misc_RNA (1)...(19): siRNA sense strand
caaauggacagguuacaag

SEQ ID NO: 1695482 - RNA, 19 nt, Homo sapiens
  misc_RNA (1)...(19): siRNA sense strand
ugaaugccccugaauuuua

SEQ ID NO: 1695483 - RNA, 19 nt, Homo sapiens
  misc_RNA (1)...(19): siRNA sense strand
uuaaagaucaagcugcaaa

SEQ ID NO: 1695484 - RNA, 19 nt, Homo sapiens
  misc_RNA (1)...(19): siRNA sense strand
agagauagaagaagcuuau

SEQ ID NO: 1695485 - RNA, 19 nt, Homo sapiens
  misc_RNA (1)...(19): siRNA sense strand
gcagaguccaugcaacuuc

SEQ ID NO: 1695486 - RNA, 19 nt, Homo sapiens
  misc_RNA (1)...(19): siRNA sense strand
ucagguuggucuucgagaa

SEQ ID NO: 1695487 - RNA, 19 nt, Homo sapiens
  misc_RNA (1)...(19): siRNA sense strand
gaugaugcuuugcaagaac

SEQ ID NO: 1695488 - RNA, 19 nt, Homo sapiens
  misc_RNA (1)...(19): siRNA sense strand
gaagaaaauggaacagauu

SEQ ID NO: 1695489 - RNA, 19 nt, Homo sapiens
  misc_RNA (1)...(19): siRNA sense strand
cagaguccaugcaacuuca

SEQ ID NO: 1695490 - RNA, 19 nt, Homo sapiens
  misc_RNA (1)...(19): siRNA sense strand
cccaucaucugacaauuag

SEQ ID NO: 1695491 - RNA, 19 nt, Homo sapiens
  misc_RNA (1)...(19): siRNA sense strand
ucccaucaucugacaauua

SEQ ID NO: 1695492 - RNA, 19 nt, Homo sapiens
  misc_RNA (1)...(19): siRNA sense strand
gaucaagggaacaaaugga

SEQ ID NO: 1695493 - RNA, 19 nt, Homo sapiens
  misc_RNA (1)...(19): siRNA sense strand
ccaguuacacagaauccua

SEQ ID NO: 1695494 - RNA, 19 nt, Homo sapiens
  misc_RNA (1)...(19): siRNA sense strand
gauccagauuaccaagaga

SEQ ID NO: 1695495 - RNA, 19 nt, Homo sapiens
  misc_RNA (1)...(19): siRNA sense strand
ggaugaaguuacucgaaaa

SEQ ID NO: 1695496 - RNA, 19 nt, Homo sapiens
  misc_RNA (1)...(19): siRNA sense strand
uagagaagcaacaccagaa

SEQ ID NO: 1695497 - RNA, 19 nt, Homo sapiens
  misc_RNA (1)...(19): siRNA sense strand
gacccugaaugguuguguu

SEQ ID NO: 1695498 - RNA, 19 nt, Homo sapiens
  misc_RNA (1)...(19): siRNA sense strand
gcaaaaggggaugaaguua

SEQ ID NO: 1695499 - RNA, 19 nt, Homo sapiens
  misc_RNA (1)...(19): siRNA sense strand
cggacugaauaugaaguua

SEQ ID NO: 1695500 - RNA, 19 nt, Homo sapiens
  misc_RNA (1)...(19): siRNA sense strand
uuguggaacucaucuauca

SEQ ID NO: 1695501 - RNA, 19 nt, Homo sapiens
  misc_RNA (1)...(19): siRNA sense strand
uuacaacagaugaugcuuu

SEQ ID NO: 1695502 - RNA, 19 nt, Homo sapiens
  misc_RNA (1)...(19): siRNA sense strand
gaacuuguggaacucaucu

SEQ ID NO: 1695503 - RNA, 19 nt, Homo sapiens
  misc_RNA (1)...(19): siRNA sense strand
gagauggacccagagauag

SEQ ID NO: 1695504 - RNA, 19 nt, Homo sapiens
  misc_RNA (1)...(19): siRNA sense strand
caacaggccacaucuaucc

SEQ ID NO: 1695505 - RNA, 19 nt, Homo sapiens
  misc_RNA (1)...(19): siRNA sense strand
agaugaugcuuugcaagaa

SEQ ID NO: 1695506 - RNA, 19 nt, Homo sapiens
  misc_RNA (1)...(19): siRNA sense strand
gaugagauggacccagaga

SEQ ID NO: 1695507 - RNA, 19 nt, Homo sapiens
  misc_RNA (1)...(19): siRNA sense strand
aaaguugacaggaucaguu

SEQ ID NO: 1695508 - RNA, 19 nt, Homo sapiens
  misc_RNA (1)...(19): siRNA sense strand
ggaugguugugaggauuau

SEQ ID NO: 1695509 - RNA, 19 nt, Homo sapiens
  misc_RNA (1)...(19): siRNA sense strand
uguagcuccuguauuaaug

SEQ ID NO: 1695510 - RNA, 19 nt, Homo sapiens
  misc_RNA (1)...(19): siRNA sense strand
acgauuucaugcauuugua

SEQ ID NO: 1695511 - RNA, 19 nt, Homo sapiens
  misc_RNA (1)...(19): siRNA sense strand
caaagaugucggacugaau

SEQ ID NO: 1695512 - RNA, 19 nt, Homo sapiens
  misc_RNA (1)...(19): siRNA sense strand
caauugcuacuucaaagau

SEQ ID NO: 1695513 - RNA, 19 nt, Homo sapiens
  misc_RNA (1)...(19): siRNA sense strand
ccaauugcuacuucaaaga

SEQ ID NO: 1695514 - RNA, 19 nt, Homo sapiens
  misc_RNA (1)...(19): siRNA sense strand
auccuacucuaucagaaua

SEQ ID NO: 1695515 - RNA, 19 nt, Homo sapiens
  misc_RNA (1)...(19): siRNA sense strand
cugcagcugauccagauua

SEQ ID NO: 1695516 - RNA, 19 nt, Homo sapiens
  misc_RNA (1)...(19): siRNA sense strand
cuucgagaauugcugaaug

SEQ ID NO: 1695517 - RNA, 19 nt, Homo sapiens
  misc_RNA (1)...(19): siRNA sense strand
ucagagaauugaaaacguu

SEQ ID NO: 1695518 - RNA, 19 nt, Homo sapiens
  misc_RNA (1)...(19): siRNA sense strand
gauggacccagagauagaa

SEQ ID NO: 1695519 - RNA, 19 nt, Homo sapiens
  misc_RNA (1)...(19): siRNA sense strand
guagagauguaaaacagau

SEQ ID NO: 1695520 - RNA, 19 nt, Homo sapiens
  misc_RNA (1)...(19): siRNA sense strand
ugaaaacguuguccuagau

SEQ ID NO: 1695521 - RNA, 19 nt, Homo sapiens
  misc_RNA (1)...(19): siRNA sense strand
gguuguagcuccuguauua

SEQ ID NO: 1695522 - RNA, 19 nt, Homo sapiens
  misc_RNA (1)...(19): siRNA sense strand
ccacaucuaucccaaauuu

SEQ ID NO: 1695523 - RNA, 19 nt, Homo sapiens
  misc_RNA (1)...(19): siRNA sense strand
cagaauauguucaggauuu

SEQ ID NO: 1695524 - RNA, 19 nt, Homo sapiens
  misc_RNA (1)...(19): siRNA sense strand
gauccuaacuacuuuauga

SEQ ID NO: 1695525 - RNA, 19 nt, Homo sapiens
  misc_RNA (1)...(19): siRNA sense strand
guaauuaccugucccauca

SEQ ID NO: 1695526 - RNA, 19 nt, Homo sapiens
  misc_RNA (1)...(19): siRNA sense strand
gagcucgccuguguaauua

SEQ ID NO: 1695527 - RNA, 19 nt, Homo sapiens
  misc_RNA (1)...(19): siRNA sense strand
gaagaugcuuggaaggaaa

SEQ ID NO: 1695528 - RNA, 19 nt, Homo sapiens
  misc_RNA (1)...(19): siRNA sense strand
ggaagaaauuauucagaga

SEQ ID NO: 1695529 - RNA, 19 nt, Homo sapiens
  misc_RNA (1)...(19): siRNA sense strand
gcagagacccugaaugguu

SEQ ID NO: 1695530 - RNA, 19 nt, Homo sapiens
  misc_RNA (1)...(19): siRNA sense strand
ccaaauuucucuuauaugg

SEQ ID NO: 1695531 - RNA, 19 nt, Homo sapiens
  misc_RNA (1)...(19): siRNA sense strand
caagagaaauaccaagaau

SEQ ID NO: 1695532 - RNA, 19 nt, Homo sapiens
  misc_RNA (1)...(19): siRNA sense strand
guagaacuccggucaagua

SEQ ID NO: 1695533 - RNA, 19 nt, Homo sapiens
  misc_RNA (1)...(19): siRNA sense strand
gggaugaaguuacucgaaa

SEQ ID NO: 1695534 - RNA, 19 nt, Homo sapiens
  misc_RNA (1)...(19): siRNA sense strand
ggaagaugcuuggaaggaa

SEQ ID NO: 1695535 - RNA, 19 nt, Homo sapiens
  misc_RNA (1)...(19): siRNA sense strand
gaacuccggucaaguaacu

SEQ ID NO: 1695536 - RNA, 19 nt, Homo sapiens
  misc_RNA (1)...(19): siRNA sense strand
ggagcucgccuguguaauu

SEQ ID NO: 1695537 - RNA, 19 nt, Homo sapiens
  misc_RNA (1)...(19): siRNA sense strand
gggaacaaauggacagguu

SEQ ID NO: 1695538 - RNA, 19 nt, Homo sapiens
  misc_RNA (1)...(19): siRNA sense strand
gauagaagaagcuuaugaa

SEQ ID NO: 1695539 - RNA, 19 nt, Homo sapiens
  misc_RNA (1)...(19): siRNA sense strand
cagauuaccaagagaaaua

SEQ ID NO: 1695540 - RNA, 19 nt, Homo sapiens
  misc_RNA (1)...(19): siRNA sense strand
ggacugaauaugaaguuaa

SEQ ID NO: 1695541 - RNA, 19 nt, Homo sapiens
  misc_RNA (1)...(19): siRNA sense strand
ugucuaagcugucugugaa

SEQ ID NO: 1695542 - RNA, 19 nt, Homo sapiens
  misc_RNA (1)...(19): siRNA sense strand
uggaugauauugaugauga

SEQ ID NO: 1695543 - RNA, 19 nt, Homo sapiens
  misc_RNA (1)...(19): siRNA sense strand
ccaugcaacuucaacauau

SEQ ID NO: 1695544 - RNA, 19 nt, Homo sapiens
  misc_RNA (1)...(19): siRNA sense strand
aaagaugucggacugaaua

SEQ ID NO: 1695545 - RNA, 19 nt, Homo sapiens
  misc_RNA (1)...(19): siRNA sense strand
aaacugcaguagagaugua

SEQ ID NO: 1695546 - RNA, 19 nt, Homo sapiens
  misc_RNA (1)...(19): siRNA sense strand
ggaacaaauggacagguua

SEQ ID NO: 1695547 - RNA, 19 nt, Homo sapiens
  misc_RNA (1)...(19): siRNA sense strand
ugagauggacccagagaua

SEQ ID NO: 1695548 - RNA, 19 nt, Homo sapiens
  misc_RNA (1)...(19): siRNA sense strand
gaaagauggauauggaaga

SEQ ID NO: 1695549 - RNA, 19 nt, Homo sapiens
  misc_RNA (1)...(19): siRNA sense strand
caugcaacuucaacauaua

SEQ ID NO: 1695550 - RNA, 19 nt, Homo sapiens
  misc_RNA (1)...(19): siRNA sense strand
uacaacagaugaugcuuug

SEQ ID NO: 1695551 - RNA, 19 nt, Homo sapiens
  misc_RNA (1)...(19): siRNA sense strand
aaagauggauauggaagaa

SEQ ID NO: 1695552 - RNA, 19 nt, Homo sapiens
  misc_RNA (1)...(19): siRNA sense strand
aaggaaagauggauaugga

SEQ ID NO: 1695553 - RNA, 19 nt, Homo sapiens
  misc_RNA (1)...(19): siRNA sense strand
uccuauggaugacaauuua

SEQ ID NO: 1695554 - RNA, 19 nt, Homo sapiens
  misc_RNA (1)...(19): siRNA sense strand
uaugggagcucgccugugu

SEQ ID NO: 1695555 - RNA, 19 nt, Homo sapiens
  misc_RNA (1)...(19): siRNA sense strand
cagguuauucuuccaguua

SEQ ID NO: 1695556 - RNA, 19 nt, Homo sapiens
  misc_RNA (1)...(19): siRNA sense strand
ugaaugcccuguuuucuaa

SEQ ID NO: 1695557 - RNA, 19 nt, Homo sapiens
  misc_RNA (1)...(19): siRNA sense strand
gaugucggacugaauauga

SEQ ID NO: 1695558 - RNA, 19 nt, Homo sapiens
  misc_RNA (1)...(19): siRNA sense strand
ucaaagaugucggacugaa

SEQ ID NO: 1695559 - RNA, 19 nt, Homo sapiens
  misc_RNA (1)...(19): siRNA sense strand
caacuuccgccaauugcua

SEQ ID NO: 1695560 - RNA, 19 nt, Homo sapiens
  misc_RNA (1)...(19): siRNA sense strand
gcaaacugcaguagagaug

SEQ ID NO: 1695561 - RNA, 19 nt, Homo sapiens
  misc_RNA (1)...(19): siRNA sense strand
ggccacaucuaucccaaau

SEQ ID NO: 1695562 - RNA, 19 nt, Homo sapiens
  misc_RNA (1)...(19): siRNA sense strand
aaucagagcguaagcgaaa

SEQ ID NO: 1695563 - RNA, 19 nt, Homo sapiens
  misc_RNA (1)...(19): siRNA sense strand
agaagaagcuuaugaaaag

SEQ ID NO: 1695564 - RNA, 19 nt, Homo sapiens
  misc_RNA (1)...(19): siRNA sense strand
gaggaugguugugaggauu

SEQ ID NO: 1695565 - RNA, 19 nt, Homo sapiens
  misc_RNA (1)...(19): siRNA sense strand
gaacaaauggacagguuac

SEQ ID NO: 1695566 - RNA, 19 nt, Homo sapiens
  misc_RNA (1)...(19): siRNA sense strand
gcuccuguauuaaugucua

SEQ ID NO: 1695567 - RNA, 19 nt, Homo sapiens
  misc_RNA (1)...(19): siRNA sense strand
caacuucaacauauagaga

SEQ ID NO: 1695568 - RNA, 19 nt, Homo sapiens
  misc_RNA (1)...(19): siRNA sense strand
ugauauugaugaugagaug

SEQ ID NO: 1695569 - RNA, 19 nt, Homo sapiens
  misc_RNA (1)...(19): siRNA sense strand
ccuaacuacuuuaugaaug

SEQ ID NO: 1695570 - RNA, 19 nt, Homo sapiens
  misc_RNA (1)...(19): siRNA sense strand
ggagaucaagggaacaaau

SEQ ID NO: 1695571 - RNA, 19 nt, Homo sapiens
  misc_RNA (1)...(19): siRNA sense strand
gagaucaagggaacaaaug

SEQ ID NO: 1695572 - RNA, 19 nt, Homo sapiens
  misc_RNA (1)...(19): siRNA sense strand
caacagaugaugcuuugca

SEQ ID NO: 1695573 - RNA, 19 nt, Homo sapiens
  misc_RNA (1)...(19): siRNA sense strand
gccaauugcuacuucaaag

SEQ ID NO: 1695574 - RNA, 19 nt, Homo sapiens
  misc_RNA (1)...(19): siRNA sense strand
cagaugaugcuuugcaaga

SEQ ID NO: 1695575 - RNA, 19 nt, Homo sapiens
  misc_RNA (1)...(19): siRNA sense strand
ccaagagaaauaccaagaa

SEQ ID NO: 1695576 - RNA, 19 nt, Homo sapiens
  misc_RNA (1)...(19): siRNA sense strand
cagagcagccuggcaguuu

SEQ ID NO: 1695577 - RNA, 19 nt, Homo sapiens
  misc_RNA (1)...(19): siRNA sense strand
ggacccagagauagaagaa

SEQ ID NO: 1695578 - RNA, 19 nt, Homo sapiens
  misc_RNA (1)...(19): siRNA sense strand
agauggauauggaagaaau

SEQ ID NO: 1695579 - RNA, 19 nt, Homo sapiens
  misc_RNA (1)...(19): siRNA sense strand
ugaaugccccugaauuuua

SEQ ID NO: 1695580 - RNA, 19 nt, Homo sapiens
  misc_RNA (1)...(19): siRNA sense strand
caaauggacagguuacaag

SEQ ID NO: 1695581 - RNA, 19 nt, Homo sapiens
  misc_RNA (1)...(19): siRNA sense strand
uuaaagaucaagcugcaaa

SEQ ID NO: 1695582 - RNA, 19 nt, Homo sapiens
  misc_RNA (1)...(19): siRNA sense strand
agagauagaagaagcuuau

SEQ ID NO: 1695583 - RNA, 19 nt, Homo sapiens
  misc_RNA (1)...(19): siRNA sense strand
gcagaguccaugcaacuuc

SEQ ID NO: 1695584 - RNA, 19 nt, Homo sapiens
  misc_RNA (1)...(19): siRNA sense strand
ucagguuggucuucgagaa

SEQ ID NO: 1695585 - RNA, 19 nt, Homo sapiens
  misc_RNA (1)...(19): siRNA sense strand
gaugaugcuuugcaagaac

SEQ ID NO: 1695586 - RNA, 19 nt, Homo sapiens
  misc_RNA (1)...(19): siRNA sense strand
gaagaaaauggaacagauu

SEQ ID NO: 1695587 - RNA, 19 nt, Homo sapiens
  misc_RNA (1)...(19): siRNA sense strand
cagaguccaugcaacuuca

SEQ ID NO: 1695588 - RNA, 19 nt, Homo sapiens
  misc_RNA (1)...(19): siRNA sense strand
cccaucaucugacaauuag

SEQ ID NO: 1695589 - RNA, 19 nt, Homo sapiens
  misc_RNA (1)...(19): siRNA sense strand
ucccaucaucugacaauua

SEQ ID NO: 1695590 - RNA, 19 nt, Homo sapiens
  misc_RNA (1)...(19): siRNA sense strand
gaucaagggaacaaaugga

SEQ ID NO: 1695591 - RNA, 19 nt, Homo sapiens
  misc_RNA (1)...(19): siRNA sense strand
ccaguuacacagaauccua

SEQ ID NO: 1695592 - RNA, 19 nt, Homo sapiens
  misc_RNA (1)...(19): siRNA sense strand
gauccagauuaccaagaga

SEQ ID NO: 1695593 - RNA, 19 nt, Homo sapiens
  misc_RNA (1)...(19): siRNA sense strand
ggaugaaguuacucgaaaa

SEQ ID NO: 1695594 - RNA, 19 nt, Homo sapiens
  misc_RNA (1)...(19): siRNA sense strand
uagagaagcaacaccagaa

SEQ ID NO: 1695595 - RNA, 19 nt, Homo sapiens
  misc_RNA (1)...(19): siRNA sense strand
gacccugaaugguuguguu

SEQ ID NO: 1695596 - RNA, 19 nt, Homo sapiens
  misc_RNA (1)...(19): siRNA sense strand
gcaaaaggggaugaaguua

SEQ ID NO: 1695597 - RNA, 19 nt, Homo sapiens
  misc_RNA (1)...(19): siRNA sense strand
cggacugaauaugaaguua

SEQ ID NO: 1695598 - RNA, 19 nt, Homo sapiens
  misc_RNA (1)...(19): siRNA sense strand
uuguggaacucaucuauca

SEQ ID NO: 1695599 - RNA, 19 nt, Homo sapiens
  misc_RNA (1)...(19): siRNA sense strand
uuacaacagaugaugcuuu

SEQ ID NO: 1695600 - RNA, 19 nt, Homo sapiens
  misc_RNA (1)...(19): siRNA sense strand
gaacuuguggaacucaucu

SEQ ID NO: 1695601 - RNA, 19 nt, Homo sapiens
  misc_RNA (1)...(19): siRNA sense strand
gagauggacccagagauag

SEQ ID NO: 1695602 - RNA, 19 nt, Homo sapiens
  misc_RNA (1)...(19): siRNA sense strand
caacaggccacaucuaucc

SEQ ID NO: 1695603 - RNA, 19 nt, Homo sapiens
  misc_RNA (1)...(19): siRNA sense strand
agaugaugcuuugcaagaa

SEQ ID NO: 1695604 - RNA, 19 nt, Homo sapiens
  misc_RNA (1)...(19): siRNA sense strand
gaugagauggacccagaga

SEQ ID NO: 1695605 - RNA, 19 nt, Homo sapiens
  misc_RNA (1)...(19): siRNA sense strand
uguagcuccuguauuaaug

SEQ ID NO: 1695606 - RNA, 19 nt, Homo sapiens
  misc_RNA (1)...(19): siRNA sense strand
aaaguugacaggaucaguu

SEQ ID NO: 1695607 - RNA, 19 nt, Homo sapiens
  misc_RNA (1)...(19): siRNA sense strand
acgauuucaugcauuugua

SEQ ID NO: 1695608 - RNA, 19 nt, Homo sapiens
  misc_RNA (1)...(19): siRNA sense strand
ggaugguugugaggauuau

SEQ ID NO: 1695609 - RNA, 19 nt, Homo sapiens
  misc_RNA (1)...(19): siRNA sense strand
caaagaugucggacugaau

SEQ ID NO: 1695610 - RNA, 19 nt, Homo sapiens
  misc_RNA (1)...(19): siRNA sense strand
caauugcuacuucaaagau

SEQ ID NO: 1695611 - RNA, 19 nt, Homo sapiens
  misc_RNA (1)...(19): siRNA sense strand
ccaauugcuacuucaaaga

SEQ ID NO: 1695612 - RNA, 19 nt, Homo sapiens
  misc_RNA (1)...(19): siRNA sense strand
auccuacucuaucagaaua

SEQ ID NO: 1695613 - RNA, 19 nt, Homo sapiens
  misc_RNA (1)...(19): siRNA sense strand
cugcagcugauccagauua

SEQ ID NO: 1695614 - RNA, 19 nt, Homo sapiens
  misc_RNA (1)...(19): siRNA sense strand
cuucgagaauugcugaaug

SEQ ID NO: 1695615 - RNA, 19 nt, Homo sapiens
  misc_RNA (1)...(19): siRNA sense strand
ccugaaugguuguguuaca

SEQ ID NO: 1695616 - RNA, 19 nt, Homo sapiens
  misc_RNA (1)...(19): siRNA sense strand
gauggacccagagauagaa

SEQ ID NO: 1695617 - RNA, 19 nt, Homo sapiens
  misc_RNA (1)...(19): siRNA sense strand
guagagauguaaaacagau

SEQ ID NO: 1695618 - RNA, 19 nt, Homo sapiens
  misc_RNA (1)...(19): siRNA sense strand
ugaaaacguuguccuagau

SEQ ID NO: 1695619 - RNA, 19 nt, Homo sapiens
  misc_RNA (1)...(19): siRNA sense strand
ucagagaauugaaaacguu

SEQ ID NO: 1695620 - RNA, 19 nt, Homo sapiens
  misc_RNA (1)...(19): siRNA sense strand
agauagaagaagcuuauga

SEQ ID NO: 1695621 - RNA, 19 nt, Homo sapiens
  misc_RNA (1)...(19): siRNA sense strand
aaacagagcugcagcaaug

SEQ ID NO: 1695622 - RNA, 19 nt, Homo sapiens
  misc_RNA (1)...(19): siRNA sense strand
gaaagaaagcgaaguagaa

SEQ ID NO: 1695623 - RNA, 19 nt, Homo sapiens
  misc_RNA (1)...(19): siRNA sense strand
gaaaguauccagcugauga

SEQ ID NO: 1695624 - RNA, 19 nt, Homo sapiens
  misc_RNA (1)...(19): siRNA sense strand
ggaaaggacuggaauugau

SEQ ID NO: 1695625 - RNA, 19 nt, Homo sapiens
  misc_RNA (1)...(19): siRNA sense strand
caagggauauggauuuauu

SEQ ID NO: 1695626 - RNA, 19 nt, Homo sapiens
  misc_RNA (1)...(19): siRNA sense strand
gauaacagcagcauaugua

SEQ ID NO: 1695627 - RNA, 19 nt, Homo sapiens
  misc_RNA (1)...(19): siRNA sense strand
gagagaaccuauugauaau

SEQ ID NO: 1695628 - RNA, 19 nt, Homo sapiens
  misc_RNA (1)...(19): siRNA sense strand
gauuaaggaugaugugauu

SEQ ID NO: 1695629 - RNA, 19 nt, Homo sapiens
  misc_RNA (1)...(19): siRNA sense strand
ugagagaaccuauugauaa

SEQ ID NO: 1695630 - RNA, 19 nt, Homo sapiens
  misc_RNA (1)...(19): siRNA sense strand
ggaacaacuuaauggauuu

SEQ ID NO: 1695631 - RNA, 19 nt, Homo sapiens
  misc_RNA (1)...(19): siRNA sense strand
ccaaaggaauugcuuaugu

SEQ ID NO: 1695632 - RNA, 19 nt, Homo sapiens
  misc_RNA (1)...(19): siRNA sense strand
ccucauagcaucaaauuaa

SEQ ID NO: 1695633 - RNA, 19 nt, Homo sapiens
  misc_RNA (1)...(19): siRNA sense strand
gcaggugguuugcugguaa

SEQ ID NO: 1695634 - RNA, 19 nt, Homo sapiens
  misc_RNA (1)...(19): siRNA sense strand
ccaacucucuaacauguuu

SEQ ID NO: 1695635 - RNA, 19 nt, Homo sapiens
  misc_RNA (1)...(19): siRNA sense strand
gaaaggacuggaauugauu

SEQ ID NO: 1695636 - RNA, 19 nt, Homo sapiens
  misc_RNA (1)...(19): siRNA sense strand
caaaggaauugcuuaugug

SEQ ID NO: 1695637 - RNA, 19 nt, Homo sapiens
  misc_RNA (1)...(19): siRNA sense strand
gaagcgaaguagagacaga

SEQ ID NO: 1695638 - RNA, 19 nt, Homo sapiens
  misc_RNA (1)...(19): siRNA sense strand
gaaaguuggucauguuacu

SEQ ID NO: 1695639 - RNA, 19 nt, Homo sapiens
  misc_RNA (1)...(19): siRNA sense strand
aagauuggguugccucaua

SEQ ID NO: 1695640 - RNA, 19 nt, Homo sapiens
  misc_RNA (1)...(19): siRNA sense strand
caagggauuuggaagaguu

SEQ ID NO: 1695641 - RNA, 19 nt, Homo sapiens
  misc_RNA (1)...(19): siRNA sense strand
gaugggauaccgagauuaa

SEQ ID NO: 1695642 - RNA, 19 nt, Homo sapiens
  misc_RNA (1)...(19): siRNA sense strand
caagagcccugugagagaa

SEQ ID NO: 1695643 - RNA, 19 nt, Homo sapiens
  misc_RNA (1)...(19): siRNA sense strand
uggaacaacuuaauggauu

SEQ ID NO: 1695644 - RNA, 19 nt, Homo sapiens
  misc_RNA (1)...(19): siRNA sense strand
gacagaaauucaagacguu

SEQ ID NO: 1695645 - RNA, 19 nt, Homo sapiens
  misc_RNA (1)...(19): siRNA sense strand
gaacggaagcgaaguagag

SEQ ID NO: 1695646 - RNA, 19 nt, Homo sapiens
  misc_RNA (1)...(19): siRNA sense strand
gaagaaguuggaugggaua

SEQ ID NO: 1695647 - RNA, 19 nt, Homo sapiens
  misc_RNA (1)...(19): siRNA sense strand
gggaagugcuggaccuaug

SEQ ID NO: 1695648 - RNA, 19 nt, Homo sapiens
  misc_RNA (1)...(19): siRNA sense strand
gagcagaagucguagucau

SEQ ID NO: 1695649 - RNA, 19 nt, Homo sapiens
  misc_RNA (1)...(19): siRNA sense strand
auaccgagauuaaggauga

SEQ ID NO: 1695650 - RNA, 19 nt, Homo sapiens
  misc_RNA (1)...(19): siRNA sense strand
acagcaagcucuacagaug

SEQ ID NO: 1695651 - RNA, 19 nt, Homo sapiens
  misc_RNA (1)...(19): siRNA sense strand
gggaacaacuggucgucuu

SEQ ID NO: 1695652 - RNA, 19 nt, Homo sapiens
  misc_RNA (1)...(19): siRNA sense strand
ggaauugauuugggaacaa

SEQ ID NO: 1695653 - RNA, 19 nt, Homo sapiens
  misc_RNA (1)...(19): siRNA sense strand
gcaggaagaccaaugaaag

SEQ ID NO: 1695654 - RNA, 19 nt, Homo sapiens
  misc_RNA (1)...(19): siRNA sense strand
caacuuaccacaaccuguu

SEQ ID NO: 1695655 - RNA, 19 nt, Homo sapiens
  misc_RNA (1)...(19): siRNA sense strand
ucaaacagaagaagaaguu

SEQ ID NO: 1695656 - RNA, 19 nt, Homo sapiens
  misc_RNA (1)...(19): siRNA sense strand
gaguggcucuuuggcauuu

SEQ ID NO: 1695657 - RNA, 19 nt, Homo sapiens
  misc_RNA (1)...(19): siRNA sense strand
ggaagaccaaugaaaguug

SEQ ID NO: 1695658 - RNA, 19 nt, Homo sapiens
  misc_RNA (1)...(19): siRNA sense strand
gaacuggaaaggacuggaa

SEQ ID NO: 1695659 - RNA, 19 nt, Homo sapiens
  misc_RNA (1)...(19): siRNA sense strand
gugaagugcccaucaauug

SEQ ID NO: 1695660 - RNA, 19 nt, Homo sapiens
  misc_RNA (1)...(19): siRNA sense strand
cgaaguagaagcaaagaga

SEQ ID NO: 1695661 - RNA, 19 nt, Homo sapiens
  misc_RNA (1)...(19): siRNA sense strand
gcacagcaagcucuacaga

SEQ ID NO: 1695662 - RNA, 19 nt, Homo sapiens
  misc_RNA (1)...(19): siRNA sense strand
gcagaagucguagucauga

SEQ ID NO: 1695663 - RNA, 19 nt, Homo sapiens
  misc_RNA (1)...(19): siRNA sense strand
cgaaagagaagcaaaagua

SEQ ID NO: 1695664 - RNA, 19 nt, Homo sapiens
  misc_RNA (1)...(19): siRNA sense strand
cagcaauggcaaacaauuu

SEQ ID NO: 1695665 - RNA, 19 nt, Homo sapiens
  misc_RNA (1)...(19): siRNA sense strand
gugagagaaccuauugaua

SEQ ID NO: 1695666 - RNA, 19 nt, Homo sapiens
  misc_RNA (1)...(19): siRNA sense strand
gaacuagcaggaagaccaa

SEQ ID NO: 1695667 - RNA, 19 nt, Homo sapiens
  misc_RNA (1)...(19): siRNA sense strand
ggaagugcuggaccuauga

SEQ ID NO: 1695668 - RNA, 19 nt, Homo sapiens
  misc_RNA (1)...(19): siRNA sense strand
gcagcuggcggcaagaauu

SEQ ID NO: 1695669 - RNA, 19 nt, Homo sapiens
  misc_RNA (1)...(19): siRNA sense strand
ggaaagguucgagauguga

SEQ ID NO: 1695670 - RNA, 19 nt, Homo sapiens
  misc_RNA (1)...(19): siRNA sense strand
gaaagagaagcaaaaguaa

SEQ ID NO: 1695671 - RNA, 19 nt, Homo sapiens
  misc_RNA (1)...(19): siRNA sense strand
gcagcaauggcaaacaauu

SEQ ID NO: 1695672 - RNA, 19 nt, Homo sapiens
  misc_RNA (1)...(19): siRNA sense strand
cucagugccucuagcaaua

SEQ ID NO: 1695673 - RNA, 19 nt, Homo sapiens
  misc_RNA (1)...(19): siRNA sense strand
gaacgaaagagaagcaaaa

SEQ ID NO: 1695674 - RNA, 19 nt, Homo sapiens
  misc_RNA (1)...(19): siRNA sense strand
ggguacagguuugcagauu

SEQ ID NO: 1695675 - RNA, 19 nt, Homo sapiens
  misc_RNA (1)...(19): siRNA sense strand
caacggccaugaagaacgu

SEQ ID NO: 1695676 - RNA, 19 nt, Homo sapiens
  misc_RNA (1)...(19): siRNA sense strand
cgagaugugaggaugauuu

SEQ ID NO: 1695677 - RNA, 19 nt, Homo sapiens
  misc_RNA (1)...(19): siRNA sense strand
uaggaaagguucgagaugu

SEQ ID NO: 1695678 - RNA, 19 nt, Homo sapiens
  misc_RNA (1)...(19): siRNA sense strand
gcaaaaguccauucagaaa

SEQ ID NO: 1695679 - RNA, 19 nt, Homo sapiens
  misc_RNA (1)...(19): siRNA sense strand
gcaaaagccgugaaagaaa

SEQ ID NO: 1695680 - RNA, 19 nt, Homo sapiens
  misc_RNA (1)...(19): siRNA sense strand
cacaaccuguuuccugauu

SEQ ID NO: 1695681 - RNA, 19 nt, Homo sapiens
  misc_RNA (1)...(19): siRNA sense strand
acagaugaguggcucuuug

SEQ ID NO: 1695682 - RNA, 19 nt, Homo sapiens
  misc_RNA (1)...(19): siRNA sense strand
gguacagguuugcagauuc

SEQ ID NO: 1695683 - RNA, 19 nt, Homo sapiens
  misc_RNA (1)...(19): siRNA sense strand
ggaccuaugaggcuuuaug

SEQ ID NO: 1695684 - RNA, 19 nt, Homo sapiens
  misc_RNA (1)...(19): siRNA sense strand
aggaugaugugauugaaga

SEQ ID NO: 1695685 - RNA, 19 nt, Homo sapiens
  misc_RNA (1)...(19): siRNA sense strand
uaacauguuuaacccucaa

SEQ ID NO: 1695686 - RNA, 19 nt, Homo sapiens
  misc_RNA (1)...(19): siRNA sense strand
aaauuaagcagacgacguu

SEQ ID NO: 1695687 - RNA, 19 nt, Homo sapiens
  misc_RNA (1)...(19): siRNA sense strand
uaaggaugaugugauugaa

SEQ ID NO: 1695688 - RNA, 19 nt, Homo sapiens
  misc_RNA (1)...(19): siRNA sense strand
uaauggauuugaacuagca

SEQ ID NO: 1695689 - RNA, 19 nt, Homo sapiens
  misc_RNA (1)...(19): siRNA sense strand
gaacaacuuaauggauuug

SEQ ID NO: 1695690 - RNA, 19 nt, Homo sapiens
  misc_RNA (1)...(19): siRNA sense strand
aaagcgaaguagaagcaaa

SEQ ID NO: 1695691 - RNA, 19 nt, Homo sapiens
  misc_RNA (1)...(19): siRNA sense strand
ugaaagaaagcgaaguaga

SEQ ID NO: 1695692 - RNA, 19 nt, Homo sapiens
  misc_RNA (1)...(19): siRNA sense strand
aggauuaacuggccaacga

SEQ ID NO: 1695693 - RNA, 19 nt, Homo sapiens
  misc_RNA (1)...(19): siRNA sense strand
gcaaacaauuuacaaaagg

SEQ ID NO: 1695694 - RNA, 19 nt, Homo sapiens
  misc_RNA (1)...(19): siRNA sense strand
gcauauguaccucuuccaa

SEQ ID NO: 1695695 - RNA, 19 nt, Homo sapiens
  misc_RNA (1)...(19): siRNA sense strand
cgugaaagaaagcgaagua

SEQ ID NO: 1695696 - RNA, 19 nt, Homo sapiens
  misc_RNA (1)...(19): siRNA sense strand
gaacaacuggucgucuuca

SEQ ID NO: 1695697 - RNA, 19 nt, Homo sapiens
  misc_RNA (1)...(19): siRNA sense strand
aaugauaacagcagcauau

SEQ ID NO: 1695698 - RNA, 19 nt, Homo sapiens
  misc_RNA (1)...(19): siRNA sense strand
gcucagugccucuagcaau

SEQ ID NO: 1695699 - RNA, 19 nt, Homo sapiens
  misc_RNA (1)...(19): siRNA sense strand
uaugugaagugcccaucaa

SEQ ID NO: 1695700 - RNA, 19 nt, Homo sapiens
  misc_RNA (1)...(19): siRNA sense strand
gauuugcaaacaagacuuu

SEQ ID NO: 1695701 - RNA, 19 nt, Homo sapiens
  misc_RNA (1)...(19): siRNA sense strand
gagcaaaagccgugaaaga

SEQ ID NO: 1695702 - RNA, 19 nt, Homo sapiens
  misc_RNA (1)...(19): siRNA sense strand
gaauugauuugggaacaac

SEQ ID NO: 1695703 - RNA, 19 nt, Homo sapiens
  misc_RNA (1)...(19): siRNA sense strand
agcaauggcaaacaauuua

SEQ ID NO: 1695704 - RNA, 19 nt, Homo sapiens
  misc_RNA (1)...(19): siRNA sense strand
agcaagagcagaagucgua

SEQ ID NO: 1695705 - RNA, 19 nt, Homo sapiens
  misc_RNA (1)...(19): siRNA sense strand
uuaaggaugaugugauuga

SEQ ID NO: 1695706 - RNA, 19 nt, Homo sapiens
  misc_RNA (1)...(19): siRNA sense strand
uggaugggauaccgagauu

SEQ ID NO: 1695707 - RNA, 19 nt, Homo sapiens
  misc_RNA (1)...(19): siRNA sense strand
cuuaauggauuugaacuag

SEQ ID NO: 1695708 - RNA, 19 nt, Homo sapiens
  misc_RNA (1)...(19): siRNA sense strand
agaauucgaccaagggauu

SEQ ID NO: 1695709 - RNA, 19 nt, Homo sapiens
  misc_RNA (1)...(19): siRNA sense strand
gaauucgaccaagggauuu

SEQ ID NO: 1695710 - RNA, 19 nt, Homo sapiens
  misc_RNA (1)...(19): siRNA sense strand
caaccuguuuccugauucu

SEQ ID NO: 1695711 - RNA, 19 nt, Homo sapiens
  misc_RNA (1)...(19): siRNA sense strand
auguaccucuuccaacuua

SEQ ID NO: 1695712 - RNA, 19 nt, Homo sapiens
  misc_RNA (1)...(19): siRNA sense strand
caaaagccgugaaagaaag

SEQ ID NO: 1695713 - RNA, 19 nt, Homo sapiens
  misc_RNA (1)...(19): siRNA sense strand
cagaagucguagucaugaa

SEQ ID NO: 1695714 - RNA, 19 nt, Homo sapiens
  misc_RNA (1)...(19): siRNA sense strand
uggaagaauugaaaguauc

SEQ ID NO: 1695715 - RNA, 19 nt, Homo sapiens
  misc_RNA (1)...(19): siRNA sense strand
uaugugggcucauuacacu

SEQ ID NO: 1695716 - RNA, 19 nt, Homo sapiens
  misc_RNA (1)...(19): siRNA sense strand
cugcagcaauggcaaacaa

SEQ ID NO: 1695717 - RNA, 19 nt, Homo sapiens
  misc_RNA (1)...(19): siRNA sense strand
guaggaaagguucgagaug

SEQ ID NO: 1695718 - RNA, 19 nt, Homo sapiens
  misc_RNA (1)...(19): siRNA sense strand
gagauuaaggaugauguga

SEQ ID NO: 1695719 - RNA, 19 nt, Homo sapiens
  misc_RNA (1)...(19): siRNA sense strand
gcaauguguaugugaagug

SEQ ID NO: 1695720 - RNA, 19 nt, Homo sapiens
  misc_RNA (1)...(19): siRNA sense strand
ugaugugauugaagaaugu

SEQ ID NO: 1695721 - RNA, 19 nt, Homo sapiens
  misc_RNA (1)...(19): siRNA sense strand
aaacagagcugcagcaaug

SEQ ID NO: 1695722 - RNA, 19 nt, Homo sapiens
  misc_RNA (1)...(19): siRNA sense strand
gaaagaaagcgaaguagaa

SEQ ID NO: 1695723 - RNA, 19 nt, Homo sapiens
  misc_RNA (1)...(19): siRNA sense strand
gaaaguauccagcugauga

SEQ ID NO: 1695724 - RNA, 19 nt, Homo sapiens
  misc_RNA (1)...(19): siRNA sense strand
ggaaaggacuggaauugau

SEQ ID NO: 1695725 - RNA, 19 nt, Homo sapiens
  misc_RNA (1)...(19): siRNA sense strand
caagggauauggauuuauu

SEQ ID NO: 1695726 - RNA, 19 nt, Homo sapiens
  misc_RNA (1)...(19): siRNA sense strand
gauaacagcagcauaugua

SEQ ID NO: 1695727 - RNA, 19 nt, Homo sapiens
  misc_RNA (1)...(19): siRNA sense strand
gagagaaccuauugauaau

SEQ ID NO: 1695728 - RNA, 19 nt, Homo sapiens
  misc_RNA (1)...(19): siRNA sense strand
gauuaaggaugaugugauu

SEQ ID NO: 1695729 - RNA, 19 nt, Homo sapiens
  misc_RNA (1)...(19): siRNA sense strand
ugagagaaccuauugauaa

SEQ ID NO: 1695730 - RNA, 19 nt, Homo sapiens
  misc_RNA (1)...(19): siRNA sense strand
ggaacaacuuaauggauuu

SEQ ID NO: 1695731 - RNA, 19 nt, Homo sapiens
  misc_RNA (1)...(19): siRNA sense strand
ccaaaggaauugcuuaugu

SEQ ID NO: 1695732 - RNA, 19 nt, Homo sapiens
  misc_RNA (1)...(19): siRNA sense strand
ccucauagcaucaaauuaa

SEQ ID NO: 1695733 - RNA, 19 nt, Homo sapiens
  misc_RNA (1)...(19): siRNA sense strand
gcaggugguuugcugguaa

SEQ ID NO: 1695734 - RNA, 19 nt, Homo sapiens
  misc_RNA (1)...(19): siRNA sense strand
ccaacucucuaacauguuu

SEQ ID NO: 1695735 - RNA, 19 nt, Homo sapiens
  misc_RNA (1)...(19): siRNA sense strand
gaaaggacuggaauugauu

SEQ ID NO: 1695736 - RNA, 19 nt, Homo sapiens
  misc_RNA (1)...(19): siRNA sense strand
caaaggaauugcuuaugug

SEQ ID NO: 1695737 - RNA, 19 nt, Homo sapiens
  misc_RNA (1)...(19): siRNA sense strand
gaagcgaaguagagacaga

SEQ ID NO: 1695738 - RNA, 19 nt, Homo sapiens
  misc_RNA (1)...(19): siRNA sense strand
gaaaguuggucauguuacu

SEQ ID NO: 1695739 - RNA, 19 nt, Homo sapiens
  misc_RNA (1)...(19): siRNA sense strand
aagauuggguugccucaua

SEQ ID NO: 1695740 - RNA, 19 nt, Homo sapiens
  misc_RNA (1)...(19): siRNA sense strand
caagggauuuggaagaguu

SEQ ID NO: 1695741 - RNA, 19 nt, Homo sapiens
  misc_RNA (1)...(19): siRNA sense strand
gaugggauaccgagauuaa

SEQ ID NO: 1695742 - RNA, 19 nt, Homo sapiens
  misc_RNA (1)...(19): siRNA sense strand
caagagcccugugagagaa

SEQ ID NO: 1695743 - RNA, 19 nt, Homo sapiens
  misc_RNA (1)...(19): siRNA sense strand
uggaacaacuuaauggauu

SEQ ID NO: 1695744 - RNA, 19 nt, Homo sapiens
  misc_RNA (1)...(19): siRNA sense strand
gacagaaauucaagacguu

SEQ ID NO: 1695745 - RNA, 19 nt, Homo sapiens
  misc_RNA (1)...(19): siRNA sense strand
gaacggaagcgaaguagag

SEQ ID NO: 1695746 - RNA, 19 nt, Homo sapiens
  misc_RNA (1)...(19): siRNA sense strand
gaagaaguuggaugggaua

SEQ ID NO: 1695747 - RNA, 19 nt, Homo sapiens
  misc_RNA (1)...(19): siRNA sense strand
gggaagugcuggaccuaug

SEQ ID NO: 1695748 - RNA, 19 nt, Homo sapiens
  misc_RNA (1)...(19): siRNA sense strand
gagcagaagucguagucau

SEQ ID NO: 1695749 - RNA, 19 nt, Homo sapiens
  misc_RNA (1)...(19): siRNA sense strand
auaccgagauuaaggauga

SEQ ID NO: 1695750 - RNA, 19 nt, Homo sapiens
  misc_RNA (1)...(19): siRNA sense strand
acagcaagcucuacagaug

SEQ ID NO: 1695751 - RNA, 19 nt, Homo sapiens
  misc_RNA (1)...(19): siRNA sense strand
gggaacaacuggucgucuu

SEQ ID NO: 1695752 - RNA, 19 nt, Homo sapiens
  misc_RNA (1)...(19): siRNA sense strand
ggaauugauuugggaacaa

SEQ ID NO: 1695753 - RNA, 19 nt, Homo sapiens
  misc_RNA (1)...(19): siRNA sense strand
gcaggaagaccaaugaaag

SEQ ID NO: 1695754 - RNA, 19 nt, Homo sapiens
  misc_RNA (1)...(19): siRNA sense strand
caacuuaccacaaccuguu

SEQ ID NO: 1695755 - RNA, 19 nt, Homo sapiens
  misc_RNA (1)...(19): siRNA sense strand
ucaaacagaagaagaaguu

SEQ ID NO: 1695756 - RNA, 19 nt, Homo sapiens
  misc_RNA (1)...(19): siRNA sense strand
gaguggcucuuuggcauuu

SEQ ID NO: 1695757 - RNA, 19 nt, Homo sapiens
  misc_RNA (1)...(19): siRNA sense strand
ggaagaccaaugaaaguug

SEQ ID NO: 1695758 - RNA, 19 nt, Homo sapiens
  misc_RNA (1)...(19): siRNA sense strand
gaacuggaaaggacuggaa

SEQ ID NO: 1695759 - RNA, 19 nt, Homo sapiens
  misc_RNA (1)...(19): siRNA sense strand
gugaagugcccaucaauug

SEQ ID NO: 1695760 - RNA, 19 nt, Homo sapiens
  misc_RNA (1)...(19): siRNA sense strand
cgaaguagaagcaaagaga

SEQ ID NO: 1695761 - RNA, 19 nt, Homo sapiens
  misc_RNA (1)...(19): siRNA sense strand
gcacagcaagcucuacaga

SEQ ID NO: 1695762 - RNA, 19 nt, Homo sapiens
  misc_RNA (1)...(19): siRNA sense strand
gcagaagucguagucauga

SEQ ID NO: 1695763 - RNA, 19 nt, Homo sapiens
  misc_RNA (1)...(19): siRNA sense strand
cgaaagagaagcaaaagua

SEQ ID NO: 1695764 - RNA, 19 nt, Homo sapiens
  misc_RNA (1)...(19): siRNA sense strand
cagcaauggcaaacaauuu

SEQ ID NO: 1695765 - RNA, 19 nt, Homo sapiens
  misc_RNA (1)...(19): siRNA sense strand
gugagagaaccuauugaua

SEQ ID NO: 1695766 - RNA, 19 nt, Homo sapiens
  misc_RNA (1)...(19): siRNA sense strand
gaacuagcaggaagaccaa

SEQ ID NO: 1695767 - RNA, 19 nt, Homo sapiens
  misc_RNA (1)...(19): siRNA sense strand
ggaagugcuggaccuauga

SEQ ID NO: 1695768 - RNA, 19 nt, Homo sapiens
  misc_RNA (1)...(19): siRNA sense strand
gcagcuggcggcaagaauu

SEQ ID NO: 1695769 - RNA, 19 nt, Homo sapiens
  misc_RNA (1)...(19): siRNA sense strand
ggaaagguucgagauguga

SEQ ID NO: 1695770 - RNA, 19 nt, Homo sapiens
  misc_RNA (1)...(19): siRNA sense strand
gaaagagaagcaaaaguaa

SEQ ID NO: 1695771 - RNA, 19 nt, Homo sapiens
  misc_RNA (1)...(19): siRNA sense strand
gcagcaauggcaaacaauu

SEQ ID NO: 1695772 - RNA, 19 nt, Homo sapiens
  misc_RNA (1)...(19): siRNA sense strand
cucagugccucuagcaaua

SEQ ID NO: 1695773 - RNA, 19 nt, Homo sapiens
  misc_RNA (1)...(19): siRNA sense strand
gaacgaaagagaagcaaaa

SEQ ID NO: 1695774 - RNA, 19 nt, Homo sapiens
  misc_RNA (1)...(19): siRNA sense strand
ggguacagguuugcagauu

SEQ ID NO: 1695775 - RNA, 19 nt, Homo sapiens
  misc_RNA (1)...(19): siRNA sense strand
caacggccaugaagaacgu

SEQ ID NO: 1695776 - RNA, 19 nt, Homo sapiens
  misc_RNA (1)...(19): siRNA sense strand
cgagaugugaggaugauuu

SEQ ID NO: 1695777 - RNA, 19 nt, Homo sapiens
  misc_RNA (1)...(19): siRNA sense strand
uaggaaagguucgagaugu

SEQ ID NO: 1695778 - RNA, 19 nt, Homo sapiens
  misc_RNA (1)...(19): siRNA sense strand
gcaaaaguccauucagaaa

SEQ ID NO: 1695779 - RNA, 19 nt, Homo sapiens
  misc_RNA (1)...(19): siRNA sense strand
gcaaaagccgugaaagaaa

SEQ ID NO: 1695780 - RNA, 19 nt, Homo sapiens
  misc_RNA (1)...(19): siRNA sense strand
cacaaccuguuuccugauu

SEQ ID NO: 1695781 - RNA, 19 nt, Homo sapiens
  misc_RNA (1)...(19): siRNA sense strand
acagaugaguggcucuuug

SEQ ID NO: 1695782 - RNA, 19 nt, Homo sapiens
  misc_RNA (1)...(19): siRNA sense strand
gguacagguuugcagauuc

SEQ ID NO: 1695783 - RNA, 19 nt, Homo sapiens
  misc_RNA (1)...(19): siRNA sense strand
ggaccuaugaggcuuuaug

SEQ ID NO: 1695784 - RNA, 19 nt, Homo sapiens
  misc_RNA (1)...(19): siRNA sense strand
aggaugaugugauugaaga

SEQ ID NO: 1695785 - RNA, 19 nt, Homo sapiens
  misc_RNA (1)...(19): siRNA sense strand
uaacauguuuaacccucaa

SEQ ID NO: 1695786 - RNA, 19 nt, Homo sapiens
  misc_RNA (1)...(19): siRNA sense strand
aaauuaagcagacgacguu

SEQ ID NO: 1695787 - RNA, 19 nt, Homo sapiens
  misc_RNA (1)...(19): siRNA sense strand
uaaggaugaugugauugaa

SEQ ID NO: 1695788 - RNA, 19 nt, Homo sapiens
  misc_RNA (1)...(19): siRNA sense strand
uaauggauuugaacuagca

SEQ ID NO: 1695789 - RNA, 19 nt, Homo sapiens
  misc_RNA (1)...(19): siRNA sense strand
gaacaacuuaauggauuug

SEQ ID NO: 1695790 - RNA, 19 nt, Homo sapiens
  misc_RNA (1)...(19): siRNA sense strand
aaagcgaaguagaagcaaa

SEQ ID NO: 1695791 - RNA, 19 nt, Homo sapiens
  misc_RNA (1)...(19): siRNA sense strand
ugaaagaaagcgaaguaga

SEQ ID NO: 1695792 - RNA, 19 nt, Homo sapiens
  misc_RNA (1)...(19): siRNA sense strand
aggauuaacuggccaacga

SEQ ID NO: 1695793 - RNA, 19 nt, Homo sapiens
  misc_RNA (1)...(19): siRNA sense strand
gcaaacaauuuacaaaagg

SEQ ID NO: 1695794 - RNA, 19 nt, Homo sapiens
  misc_RNA (1)...(19): siRNA sense strand
gcauauguaccucuuccaa

SEQ ID NO: 1695795 - RNA, 19 nt, Homo sapiens
  misc_RNA (1)...(19): siRNA sense strand
cgugaaagaaagcgaagua

SEQ ID NO: 1695796 - RNA, 19 nt, Homo sapiens
  misc_RNA (1)...(19): siRNA sense strand
gaacaacuggucgucuuca

SEQ ID NO: 1695797 - RNA, 19 nt, Homo sapiens
  misc_RNA (1)...(19): siRNA sense strand
aaugauaacagcagcauau

SEQ ID NO: 1695798 - RNA, 19 nt, Homo sapiens
  misc_RNA (1)...(19): siRNA sense strand
gcucagugccucuagcaau

SEQ ID NO: 1695799 - RNA, 19 nt, Homo sapiens
  misc_RNA (1)...(19): siRNA sense strand
uaugugaagugcccaucaa

SEQ ID NO: 1695800 - RNA, 19 nt, Homo sapiens
  misc_RNA (1)...(19): siRNA sense strand
gauuugcaaacaagacuuu

SEQ ID NO: 1695801 - RNA, 19 nt, Homo sapiens
  misc_RNA (1)...(19): siRNA sense strand
gagcaaaagccgugaaaga

SEQ ID NO: 1695802 - RNA, 19 nt, Homo sapiens
  misc_RNA (1)...(19): siRNA sense strand
gaauugauuugggaacaac

SEQ ID NO: 1695803 - RNA, 19 nt, Homo sapiens
  misc_RNA (1)...(19): siRNA sense strand
agcaauggcaaacaauuua

SEQ ID NO: 1695804 - RNA, 19 nt, Homo sapiens
  misc_RNA (1)...(19): siRNA sense strand
agcaagagcagaagucgua

SEQ ID NO: 1695805 - RNA, 19 nt, Homo sapiens
  misc_RNA (1)...(19): siRNA sense strand
uuaaggaugaugugauuga

SEQ ID NO: 1695806 - RNA, 19 nt, Homo sapiens
  misc_RNA (1)...(19): siRNA sense strand
uggaugggauaccgagauu

SEQ ID NO: 1695807 - RNA, 19 nt, Homo sapiens
  misc_RNA (1)...(19): siRNA sense strand
cuuaauggauuugaacuag

SEQ ID NO: 1695808 - RNA, 19 nt, Homo sapiens
  misc_RNA (1)...(19): siRNA sense strand
agaauucgaccaagggauu

SEQ ID NO: 1695809 - RNA, 19 nt, Homo sapiens
  misc_RNA (1)...(19): siRNA sense strand
gaauucgaccaagggauuu

SEQ ID NO: 1695810 - RNA, 19 nt, Homo sapiens
  misc_RNA (1)...(19): siRNA sense strand
caaccuguuuccugauucu

SEQ ID NO: 1695811 - RNA, 19 nt, Homo sapiens
  misc_RNA (1)...(19): siRNA sense strand
auguaccucuuccaacuua

SEQ ID NO: 1695812 - RNA, 19 nt, Homo sapiens
  misc_RNA (1)...(19): siRNA sense strand
caaaagccgugaaagaaag

SEQ ID NO: 1695813 - RNA, 19 nt, Homo sapiens
  misc_RNA (1)...(19): siRNA sense strand
cagaagucguagucaugaa

SEQ ID NO: 1695814 - RNA, 19 nt, Homo sapiens
  misc_RNA (1)...(19): siRNA sense strand
uggaagaauugaaaguauc

SEQ ID NO: 1695815 - RNA, 19 nt, Homo sapiens
  misc_RNA (1)...(19): siRNA sense strand
uaugugggcucauuacacu

SEQ ID NO: 1695816 - RNA, 19 nt, Homo sapiens
  misc_RNA (1)...(19): siRNA sense strand
cugcagcaauggcaaacaa

SEQ ID NO: 1695817 - RNA, 19 nt, Homo sapiens
  misc_RNA (1)...(19): siRNA sense strand
guaggaaagguucgagaug

SEQ ID NO: 1695818 - RNA, 19 nt, Homo sapiens
  misc_RNA (1)...(19): siRNA sense strand
gagauuaaggaugauguga

SEQ ID NO: 1695819 - RNA, 19 nt, Homo sapiens
  misc_RNA (1)...(19): siRNA sense strand
gcaauguguaugugaagug

SEQ ID NO: 1695820 - RNA, 19 nt, Homo sapiens
  misc_RNA (1)...(19): siRNA sense strand
ugaugugauugaagaaugu

SEQ ID NO: 1695821 - RNA, 19 nt, Homo sapiens
  misc_RNA (1)...(19): siRNA sense strand
aaacagagcugcagcaaug

SEQ ID NO: 1695822 - RNA, 19 nt, Homo sapiens
  misc_RNA (1)...(19): siRNA sense strand
gaaaguauccagcugauga

SEQ ID NO: 1695823 - RNA, 19 nt, Homo sapiens
  misc_RNA (1)...(19): siRNA sense strand
ggaaaggacuggaauugau

SEQ ID NO: 1695824 - RNA, 19 nt, Homo sapiens
  misc_RNA (1)...(19): siRNA sense strand
caagggauauggauuuauu

SEQ ID NO: 1695825 - RNA, 19 nt, Homo sapiens
  misc_RNA (1)...(19): siRNA sense strand
gauaacagcagcauaugua

SEQ ID NO: 1695826 - RNA, 19 nt, Homo sapiens
  misc_RNA (1)...(19): siRNA sense strand
gauuaaggaugaugugauu

SEQ ID NO: 1695827 - RNA, 19 nt, Homo sapiens
  misc_RNA (1)...(19): siRNA sense strand
ggaacaacuuaauggauuu

SEQ ID NO: 1695828 - RNA, 19 nt, Homo sapiens
  misc_RNA (1)...(19): siRNA sense strand
ccaaaggaauugcuuaugu

SEQ ID NO: 1695829 - RNA, 19 nt, Homo sapiens
  misc_RNA (1)...(19): siRNA sense strand
gcaggugguuugcugguaa

SEQ ID NO: 1695830 - RNA, 19 nt, Homo sapiens
  misc_RNA (1)...(19): siRNA sense strand
ccaacucucuaacauguuu

SEQ ID NO: 1695831 - RNA, 19 nt, Homo sapiens
  misc_RNA (1)...(19): siRNA sense strand
gaaaggacuggaauugauu

SEQ ID NO: 1695832 - RNA, 19 nt, Homo sapiens
  misc_RNA (1)...(19): siRNA sense strand
caaaggaauugcuuaugug

SEQ ID NO: 1695833 - RNA, 19 nt, Homo sapiens
  misc_RNA (1)...(19): siRNA sense strand
gaaaguuggucauguuacu

SEQ ID NO: 1695834 - RNA, 19 nt, Homo sapiens
  misc_RNA (1)...(19): siRNA sense strand
gaugggauaccgagauuaa

SEQ ID NO: 1695835 - RNA, 19 nt, Homo sapiens
  misc_RNA (1)...(19): siRNA sense strand
caagggauuuggaagaguu

SEQ ID NO: 1695836 - RNA, 19 nt, Homo sapiens
  misc_RNA (1)...(19): siRNA sense strand
uggaacaacuuaauggauu

SEQ ID NO: 1695837 - RNA, 19 nt, Homo sapiens
  misc_RNA (1)...(19): siRNA sense strand
gacagaaauucaagacguu

SEQ ID NO: 1695838 - RNA, 19 nt, Homo sapiens
  misc_RNA (1)...(19): siRNA sense strand
gaagaaguuggaugggaua

SEQ ID NO: 1695839 - RNA, 19 nt, Homo sapiens
  misc_RNA (1)...(19): siRNA sense strand
gggaagugcuggaccuaug

SEQ ID NO: 1695840 - RNA, 19 nt, Homo sapiens
  misc_RNA (1)...(19): siRNA sense strand
gggaacaacuggucgucuu

SEQ ID NO: 1695841 - RNA, 19 nt, Homo sapiens
  misc_RNA (1)...(19): siRNA sense strand
auaccgagauuaaggauga

SEQ ID NO: 1695842 - RNA, 19 nt, Homo sapiens
  misc_RNA (1)...(19): siRNA sense strand
acagcaagcucuacagaug

SEQ ID NO: 1695843 - RNA, 19 nt, Homo sapiens
  misc_RNA (1)...(19): siRNA sense strand
ggaauugauuugggaacaa

SEQ ID NO: 1695844 - RNA, 19 nt, Homo sapiens
  misc_RNA (1)...(19): siRNA sense strand
gcaggaagaccaaugaaag

SEQ ID NO: 1695845 - RNA, 19 nt, Homo sapiens
  misc_RNA (1)...(19): siRNA sense strand
caacuuaccacaaccuguu

SEQ ID NO: 1695846 - RNA, 19 nt, Homo sapiens
  misc_RNA (1)...(19): siRNA sense strand
ucaaacagaagaagaaguu

SEQ ID NO: 1695847 - RNA, 19 nt, Homo sapiens
  misc_RNA (1)...(19): siRNA sense strand
gaguggcucuuuggcauuu

SEQ ID NO: 1695848 - RNA, 19 nt, Homo sapiens
  misc_RNA (1)...(19): siRNA sense strand
ggaagaccaaugaaaguug

SEQ ID NO: 1695849 - RNA, 19 nt, Homo sapiens
  misc_RNA (1)...(19): siRNA sense strand
gaacuggaaaggacuggaa

SEQ ID NO: 1695850 - RNA, 19 nt, Homo sapiens
  misc_RNA (1)...(19): siRNA sense strand
gugaagugcccaucaauug

SEQ ID NO: 1695851 - RNA, 19 nt, Homo sapiens
  misc_RNA (1)...(19): siRNA sense strand
gcacagcaagcucuacaga

SEQ ID NO: 1695852 - RNA, 19 nt, Homo sapiens
  misc_RNA (1)...(19): siRNA sense strand
cagcaauggcaaacaauuu

SEQ ID NO: 1695853 - RNA, 19 nt, Homo sapiens
  misc_RNA (1)...(19): siRNA sense strand
gcagcuggcggcaagaauu

SEQ ID NO: 1695854 - RNA, 19 nt, Homo sapiens
  misc_RNA (1)...(19): siRNA sense strand
gaacuagcaggaagaccaa

SEQ ID NO: 1695855 - RNA, 19 nt, Homo sapiens
  misc_RNA (1)...(19): siRNA sense strand
ggaagugcuggaccuauga

SEQ ID NO: 1695856 - RNA, 19 nt, Homo sapiens
  misc_RNA (1)...(19): siRNA sense strand
cucagugccucuagcaaua

SEQ ID NO: 1695857 - RNA, 19 nt, Homo sapiens
  misc_RNA (1)...(19): siRNA sense strand
ggaaagguucgagauguga

SEQ ID NO: 1695858 - RNA, 19 nt, Homo sapiens
  misc_RNA (1)...(19): siRNA sense strand
gcagcaauggcaaacaauu

SEQ ID NO: 1695859 - RNA, 19 nt, Homo sapiens
  misc_RNA (1)...(19): siRNA sense strand
cgagaugugaggaugauuu

SEQ ID NO: 1695860 - RNA, 19 nt, Homo sapiens
  misc_RNA (1)...(19): siRNA sense strand
uaggaaagguucgagaugu

SEQ ID NO: 1695861 - RNA, 19 nt, Homo sapiens
  misc_RNA (1)...(19): siRNA sense strand
ggguacagguuugcagauu

SEQ ID NO: 1695862 - RNA, 19 nt, Homo sapiens
  misc_RNA (1)...(19): siRNA sense strand
gguacagguuugcagauuc

SEQ ID NO: 1695863 - RNA, 19 nt, Homo sapiens
  misc_RNA (1)...(19): siRNA sense strand
cacaaccuguuuccugauu

SEQ ID NO: 1695864 - RNA, 19 nt, Homo sapiens
  misc_RNA (1)...(19): siRNA sense strand
acagaugaguggcucuuug

SEQ ID NO: 1695865 - RNA, 19 nt, Homo sapiens
  misc_RNA (1)...(19): siRNA sense strand
ggaccuaugaggcuuuaug

SEQ ID NO: 1695866 - RNA, 19 nt, Homo sapiens
  misc_RNA (1)...(19): siRNA sense strand
aggaugaugugauugaaga

SEQ ID NO: 1695867 - RNA, 19 nt, Homo sapiens
  misc_RNA (1)...(19): siRNA sense strand
uaacauguuuaacccucaa

SEQ ID NO: 1695868 - RNA, 19 nt, Homo sapiens
  misc_RNA (1)...(19): siRNA sense strand
gaacaacuuaauggauuug

SEQ ID NO: 1695869 - RNA, 19 nt, Homo sapiens
  misc_RNA (1)...(19): siRNA sense strand
uaaggaugaugugauugaa

SEQ ID NO: 1695870 - RNA, 19 nt, Homo sapiens
  misc_RNA (1)...(19): siRNA sense strand
uaauggauuugaacuagca

SEQ ID NO: 1695871 - RNA, 19 nt, Homo sapiens
  misc_RNA (1)...(19): siRNA sense strand
aggauuaacuggccaacga

SEQ ID NO: 1695872 - RNA, 19 nt, Homo sapiens
  misc_RNA (1)...(19): siRNA sense strand
gcaaacaauuuacaaaagg

SEQ ID NO: 1695873 - RNA, 19 nt, Homo sapiens
  misc_RNA (1)...(19): siRNA sense strand
gcauauguaccucuuccaa

SEQ ID NO: 1695874 - RNA, 19 nt, Homo sapiens
  misc_RNA (1)...(19): siRNA sense strand
gaacaacuggucgucuuca

SEQ ID NO: 1695875 - RNA, 19 nt, Homo sapiens
  misc_RNA (1)...(19): siRNA sense strand
aaugauaacagcagcauau

SEQ ID NO: 1695876 - RNA, 19 nt, Homo sapiens
  misc_RNA (1)...(19): siRNA sense strand
agcaauggcaaacaauuua

SEQ ID NO: 1695877 - RNA, 19 nt, Homo sapiens
  misc_RNA (1)...(19): siRNA sense strand
uaugugaagugcccaucaa

SEQ ID NO: 1695878 - RNA, 19 nt, Homo sapiens
  misc_RNA (1)...(19): siRNA sense strand
gauuugcaaacaagacuuu

SEQ ID NO: 1695879 - RNA, 19 nt, Homo sapiens
  misc_RNA (1)...(19): siRNA sense strand
gaauugauuugggaacaac

SEQ ID NO: 1695880 - RNA, 19 nt, Homo sapiens
  misc_RNA (1)...(19): siRNA sense strand
gcucagugccucuagcaau

SEQ ID NO: 1695881 - RNA, 19 nt, Homo sapiens
  misc_RNA (1)...(19): siRNA sense strand
cuuaauggauuugaacuag

SEQ ID NO: 1695882 - RNA, 19 nt, Homo sapiens
  misc_RNA (1)...(19): siRNA sense strand
uuaaggaugaugugauuga

SEQ ID NO: 1695883 - RNA, 19 nt, Homo sapiens
  misc_RNA (1)...(19): siRNA sense strand
agaauucgaccaagggauu

SEQ ID NO: 1695884 - RNA, 19 nt, Homo sapiens
  misc_RNA (1)...(19): siRNA sense strand
uggaugggauaccgagauu

SEQ ID NO: 1695885 - RNA, 19 nt, Homo sapiens
  misc_RNA (1)...(19): siRNA sense strand
cugcagcaauggcaaacaa

SEQ ID NO: 1695886 - RNA, 19 nt, Homo sapiens
  misc_RNA (1)...(19): siRNA sense strand
caaccuguuuccugauucu

SEQ ID NO: 1695887 - RNA, 19 nt, Homo sapiens
  misc_RNA (1)...(19): siRNA sense strand
auguaccucuuccaacuua

SEQ ID NO: 1695888 - RNA, 19 nt, Homo sapiens
  misc_RNA (1)...(19): siRNA sense strand
guaggaaagguucgagaug

SEQ ID NO: 1695889 - RNA, 19 nt, Homo sapiens
  misc_RNA (1)...(19): siRNA sense strand
gaauucgaccaagggauuu

SEQ ID NO: 1695890 - RNA, 19 nt, Homo sapiens
  misc_RNA (1)...(19): siRNA sense strand
uggaagaauugaaaguauc

SEQ ID NO: 1695891 - RNA, 19 nt, Homo sapiens
  misc_RNA (1)...(19): siRNA sense strand
uaugugggcucauuacacu

SEQ ID NO: 1695892 - RNA, 19 nt, Homo sapiens
  misc_RNA (1)...(19): siRNA sense strand
gccucuagcaauaggauua

SEQ ID NO: 1695893 - RNA, 19 nt, Homo sapiens
  misc_RNA (1)...(19): siRNA sense strand
gcaauguguaugugaagug

SEQ ID NO: 1695894 - RNA, 19 nt, Homo sapiens
  misc_RNA (1)...(19): siRNA sense strand
ugaugugauugaagaaugu

SEQ ID NO: 1695895 - RNA, 19 nt, Homo sapiens
  misc_RNA (1)...(19): siRNA sense strand
gagauuaaggaugauguga

SEQ ID NO: 1695896 - RNA, 19 nt, Homo sapiens
  misc_RNA (1)...(19): siRNA sense strand
cagcaagcucuacagauga

SEQ ID NO: 1695897 - RNA, 19 nt, Homo sapiens
  misc_RNA (1)...(19): siRNA sense strand
ugacucagaaugugccaaa

SEQ ID NO: 1695898 - RNA, 19 nt, Homo sapiens
  misc_RNA (1)...(19): siRNA sense strand
cucauuacacuucaacaua

SEQ ID NO: 1695899 - RNA, 19 nt, Homo sapiens
  misc_RNA (1)...(19): siRNA sense strand
gagaugugaggaugauuuc

SEQ ID NO: 1695900 - RNA, 19 nt, Homo sapiens
  misc_RNA (1)...(19): siRNA sense strand
gaugugaggaugauuucug

SEQ ID NO: 1695901 - RNA, 19 nt, Homo sapiens
  misc_RNA (1)...(19): siRNA sense strand
acacaauguuuccaacucu

SEQ ID NO: 1695902 - RNA, 19 nt, Homo sapiens
  misc_RNA (1)...(19): siRNA sense strand
guacagguuugcagauucc

SEQ ID NO: 1695903 - RNA, 19 nt, Homo sapiens
  misc_RNA (1)...(19): siRNA sense strand
uucaagacguuccaaagga

SEQ ID NO: 1695904 - RNA, 19 nt, Homo sapiens
  misc_RNA (1)...(19): siRNA sense strand
aaauucagcucagggcaau

SEQ ID NO: 1695905 - RNA, 19 nt, Homo sapiens
  misc_RNA (1)...(19): siRNA sense strand
uuccaacucucuaacaugu

SEQ ID NO: 1695906 - RNA, 19 nt, Homo sapiens
  misc_RNA (1)...(19): siRNA sense strand
ggaacaacuggucgucuuc

SEQ ID NO: 1695907 - RNA, 19 nt, Homo sapiens
  misc_RNA (1)...(19): siRNA sense strand
gaugauggacagugaaacu

SEQ ID NO: 1695908 - RNA, 19 nt, Homo sapiens
  misc_RNA (1)...(19): siRNA sense strand
ggcaggugguuugcuggua

SEQ ID NO: 1695909 - RNA, 19 nt, Homo sapiens
  misc_RNA (1)...(19): siRNA sense strand
gagcugcagcaauggcaaa

SEQ ID NO: 1695910 - RNA, 19 nt, Homo sapiens
  misc_RNA (1)...(19): siRNA sense strand
gaauugcuuauguggaguu

SEQ ID NO: 1695911 - RNA, 19 nt, Homo sapiens
  misc_RNA (1)...(19): siRNA sense strand
caacuuaauggauuugaac

SEQ ID NO: 1695912 - RNA, 19 nt, Homo sapiens
  misc_RNA (1)...(19): siRNA sense strand
cagcucagggcaaugugua

SEQ ID NO: 1695913 - RNA, 19 nt, Homo sapiens
  misc_RNA (1)...(19): siRNA sense strand
caggugguuugcugguaaa

SEQ ID NO: 1695914 - RNA, 19 nt, Homo sapiens
  misc_RNA (1)...(19): siRNA sense strand
gcaauggcaaacaauuuac

SEQ ID NO: 1695915 - RNA, 19 nt, Homo sapiens
  misc_RNA (1)...(19): siRNA sense strand
gaagugcccaucaauugcu

SEQ ID NO: 1695916 - RNA, 19 nt, Homo sapiens
  misc_RNA (1)...(19): siRNA sense strand
aaaggacuggaauugauuu

SEQ ID NO: 1695917 - RNA, 19 nt, Homo sapiens
  misc_RNA (1)...(19): siRNA sense strand
gaaauucaagacguuccaa

SEQ ID NO: 1695918 - RNA, 19 nt, Homo sapiens
  misc_RNA (1)...(19): siRNA sense strand
caggaagaccaaugaaagu

SEQ ID NO: 1695919 - RNA, 19 nt, Homo sapiens
  misc_RNA (1)...(19): siRNA sense strand
uugcagaggguacagguuu

SEQ ID NO: 1695920 - RNA, 19 nt, Homo sapiens
  misc_RNA (1)...(19): siRNA sense strand
uucgagugcuaguucauuu

SEQ ID NO: 1695921 - RNA, 19 nt, Homo sapiens
  misc_RNA (1)...(19): siRNA sense strand
aaacagagcugcagcaaug

SEQ ID NO: 1695922 - RNA, 19 nt, Homo sapiens
  misc_RNA (1)...(19): siRNA sense strand
gaaaguauccagcugauga

SEQ ID NO: 1695923 - RNA, 19 nt, Homo sapiens
  misc_RNA (1)...(19): siRNA sense strand
ggaaaggacuggaauugau

SEQ ID NO: 1695924 - RNA, 19 nt, Homo sapiens
  misc_RNA (1)...(19): siRNA sense strand
caagggauauggauuuauu

SEQ ID NO: 1695925 - RNA, 19 nt, Homo sapiens
  misc_RNA (1)...(19): siRNA sense strand
gauaacagcagcauaugua

SEQ ID NO: 1695926 - RNA, 19 nt, Homo sapiens
  misc_RNA (1)...(19): siRNA sense strand
gauuaaggaugaugugauu

SEQ ID NO: 1695927 - RNA, 19 nt, Homo sapiens
  misc_RNA (1)...(19): siRNA sense strand
ggaacaacuuaauggauuu

SEQ ID NO: 1695928 - RNA, 19 nt, Homo sapiens
  misc_RNA (1)...(19): siRNA sense strand
ccaaaggaauugcuuaugu

SEQ ID NO: 1695929 - RNA, 19 nt, Homo sapiens
  misc_RNA (1)...(19): siRNA sense strand
gcaggugguuugcugguaa

SEQ ID NO: 1695930 - RNA, 19 nt, Homo sapiens
  misc_RNA (1)...(19): siRNA sense strand
ccaacucucuaacauguuu

SEQ ID NO: 1695931 - RNA, 19 nt, Homo sapiens
  misc_RNA (1)...(19): siRNA sense strand
gaaaggacuggaauugauu

SEQ ID NO: 1695932 - RNA, 19 nt, Homo sapiens
  misc_RNA (1)...(19): siRNA sense strand
caaaggaauugcuuaugug

SEQ ID NO: 1695933 - RNA, 19 nt, Homo sapiens
  misc_RNA (1)...(19): siRNA sense strand
gaaaguuggucauguuacu

SEQ ID NO: 1695934 - RNA, 19 nt, Homo sapiens
  misc_RNA (1)...(19): siRNA sense strand
gaugggauaccgagauuaa

SEQ ID NO: 1695935 - RNA, 19 nt, Homo sapiens
  misc_RNA (1)...(19): siRNA sense strand
caagggauuuggaagaguu

SEQ ID NO: 1695936 - RNA, 19 nt, Homo sapiens
  misc_RNA (1)...(19): siRNA sense strand
uggaacaacuuaauggauu

SEQ ID NO: 1695937 - RNA, 19 nt, Homo sapiens
  misc_RNA (1)...(19): siRNA sense strand
gacagaaauucaagacguu

SEQ ID NO: 1695938 - RNA, 19 nt, Homo sapiens
  misc_RNA (1)...(19): siRNA sense strand
gaagaaguuggaugggaua

SEQ ID NO: 1695939 - RNA, 19 nt, Homo sapiens
  misc_RNA (1)...(19): siRNA sense strand
gggaagugcuggaccuaug

SEQ ID NO: 1695940 - RNA, 19 nt, Homo sapiens
  misc_RNA (1)...(19): siRNA sense strand
gggaacaacuggucgucuu

SEQ ID NO: 1695941 - RNA, 19 nt, Homo sapiens
  misc_RNA (1)...(19): siRNA sense strand
auaccgagauuaaggauga

SEQ ID NO: 1695942 - RNA, 19 nt, Homo sapiens
  misc_RNA (1)...(19): siRNA sense strand
acagcaagcucuacagaug

SEQ ID NO: 1695943 - RNA, 19 nt, Homo sapiens
  misc_RNA (1)...(19): siRNA sense strand
ggaauugauuugggaacaa

SEQ ID NO: 1695944 - RNA, 19 nt, Homo sapiens
  misc_RNA (1)...(19): siRNA sense strand
gcaggaagaccaaugaaag

SEQ ID NO: 1695945 - RNA, 19 nt, Homo sapiens
  misc_RNA (1)...(19): siRNA sense strand
caacuuaccacaaccuguu

SEQ ID NO: 1695946 - RNA, 19 nt, Homo sapiens
  misc_RNA (1)...(19): siRNA sense strand
ucaaacagaagaagaaguu

SEQ ID NO: 1695947 - RNA, 19 nt, Homo sapiens
  misc_RNA (1)...(19): siRNA sense strand
gaguggcucuuuggcauuu

SEQ ID NO: 1695948 - RNA, 19 nt, Homo sapiens
  misc_RNA (1)...(19): siRNA sense strand
ggaagaccaaugaaaguug

SEQ ID NO: 1695949 - RNA, 19 nt, Homo sapiens
  misc_RNA (1)...(19): siRNA sense strand
gaacuggaaaggacuggaa

SEQ ID NO: 1695950 - RNA, 19 nt, Homo sapiens
  misc_RNA (1)...(19): siRNA sense strand
gugaagugcccaucaauug

SEQ ID NO: 1695951 - RNA, 19 nt, Homo sapiens
  misc_RNA (1)...(19): siRNA sense strand
gcacagcaagcucuacaga

SEQ ID NO: 1695952 - RNA, 19 nt, Homo sapiens
  misc_RNA (1)...(19): siRNA sense strand
cagcaauggcaaacaauuu

SEQ ID NO: 1695953 - RNA, 19 nt, Homo sapiens
  misc_RNA (1)...(19): siRNA sense strand
gcagcuggcggcaagaauu

SEQ ID NO: 1695954 - RNA, 19 nt, Homo sapiens
  misc_RNA (1)...(19): siRNA sense strand
gaacuagcaggaagaccaa

SEQ ID NO: 1695955 - RNA, 19 nt, Homo sapiens
  misc_RNA (1)...(19): siRNA sense strand
ggaagugcuggaccuauga

SEQ ID NO: 1695956 - RNA, 19 nt, Homo sapiens
  misc_RNA (1)...(19): siRNA sense strand
cucagugccucuagcaaua

SEQ ID NO: 1695957 - RNA, 19 nt, Homo sapiens
  misc_RNA (1)...(19): siRNA sense strand
ggaaagguucgagauguga

SEQ ID NO: 1695958 - RNA, 19 nt, Homo sapiens
  misc_RNA (1)...(19): siRNA sense strand
gcagcaauggcaaacaauu

SEQ ID NO: 1695959 - RNA, 19 nt, Homo sapiens
  misc_RNA (1)...(19): siRNA sense strand
cgagaugugaggaugauuu

SEQ ID NO: 1695960 - RNA, 19 nt, Homo sapiens
  misc_RNA (1)...(19): siRNA sense strand
uaggaaagguucgagaugu

SEQ ID NO: 1695961 - RNA, 19 nt, Homo sapiens
  misc_RNA (1)...(19): siRNA sense strand
ggguacagguuugcagauu

SEQ ID NO: 1695962 - RNA, 19 nt, Homo sapiens
  misc_RNA (1)...(19): siRNA sense strand
gguacagguuugcagauuc

SEQ ID NO: 1695963 - RNA, 19 nt, Homo sapiens
  misc_RNA (1)...(19): siRNA sense strand
cacaaccuguuuccugauu

SEQ ID NO: 1695964 - RNA, 19 nt, Homo sapiens
  misc_RNA (1)...(19): siRNA sense strand
acagaugaguggcucuuug

SEQ ID NO: 1695965 - RNA, 19 nt, Homo sapiens
  misc_RNA (1)...(19): siRNA sense strand
ggaccuaugaggcuuuaug

SEQ ID NO: 1695966 - RNA, 19 nt, Homo sapiens
  misc_RNA (1)...(19): siRNA sense strand
aggaugaugugauugaaga

SEQ ID NO: 1695967 - RNA, 19 nt, Homo sapiens
  misc_RNA (1)...(19): siRNA sense strand
uaacauguuuaacccucaa

SEQ ID NO: 1695968 - RNA, 19 nt, Homo sapiens
  misc_RNA (1)...(19): siRNA sense strand
gaacaacuuaauggauuug

SEQ ID NO: 1695969 - RNA, 19 nt, Homo sapiens
  misc_RNA (1)...(19): siRNA sense strand
uaaggaugaugugauugaa

SEQ ID NO: 1695970 - RNA, 19 nt, Homo sapiens
  misc_RNA (1)...(19): siRNA sense strand
uaauggauuugaacuagca

SEQ ID NO: 1695971 - RNA, 19 nt, Homo sapiens
  misc_RNA (1)...(19): siRNA sense strand
aggauuaacuggccaacga

SEQ ID NO: 1695972 - RNA, 19 nt, Homo sapiens
  misc_RNA (1)...(19): siRNA sense strand
gcaaacaauuuacaaaagg

SEQ ID NO: 1695973 - RNA, 19 nt, Homo sapiens
  misc_RNA (1)...(19): siRNA sense strand
gcauauguaccucuuccaa

SEQ ID NO: 1695974 - RNA, 19 nt, Homo sapiens
  misc_RNA (1)...(19): siRNA sense strand
gaacaacuggucgucuuca

SEQ ID NO: 1695975 - RNA, 19 nt, Homo sapiens
  misc_RNA (1)...(19): siRNA sense strand
aaugauaacagcagcauau

SEQ ID NO: 1695976 - RNA, 19 nt, Homo sapiens
  misc_RNA (1)...(19): siRNA sense strand
agcaauggcaaacaauuua

SEQ ID NO: 1695977 - RNA, 19 nt, Homo sapiens
  misc_RNA (1)...(19): siRNA sense strand
uaugugaagugcccaucaa

SEQ ID NO: 1695978 - RNA, 19 nt, Homo sapiens
  misc_RNA (1)...(19): siRNA sense strand
gauuugcaaacaagacuuu

SEQ ID NO: 1695979 - RNA, 19 nt, Homo sapiens
  misc_RNA (1)...(19): siRNA sense strand
gaauugauuugggaacaac

SEQ ID NO: 1695980 - RNA, 19 nt, Homo sapiens
  misc_RNA (1)...(19): siRNA sense strand
gcucagugccucuagcaau

SEQ ID NO: 1695981 - RNA, 19 nt, Homo sapiens
  misc_RNA (1)...(19): siRNA sense strand
cuuaauggauuugaacuag

SEQ ID NO: 1695982 - RNA, 19 nt, Homo sapiens
  misc_RNA (1)...(19): siRNA sense strand
uuaaggaugaugugauuga

SEQ ID NO: 1695983 - RNA, 19 nt, Homo sapiens
  misc_RNA (1)...(19): siRNA sense strand
agaauucgaccaagggauu

SEQ ID NO: 1695984 - RNA, 19 nt, Homo sapiens
  misc_RNA (1)...(19): siRNA sense strand
uggaugggauaccgagauu

SEQ ID NO: 1695985 - RNA, 19 nt, Homo sapiens
  misc_RNA (1)...(19): siRNA sense strand
cugcagcaauggcaaacaa

SEQ ID NO: 1695986 - RNA, 19 nt, Homo sapiens
  misc_RNA (1)...(19): siRNA sense strand
caaccuguuuccugauucu

SEQ ID NO: 1695987 - RNA, 19 nt, Homo sapiens
  misc_RNA (1)...(19): siRNA sense strand
auguaccucuuccaacuua

SEQ ID NO: 1695988 - RNA, 19 nt, Homo sapiens
  misc_RNA (1)...(19): siRNA sense strand
guaggaaagguucgagaug

SEQ ID NO: 1695989 - RNA, 19 nt, Homo sapiens
  misc_RNA (1)...(19): siRNA sense strand
gaauucgaccaagggauuu

SEQ ID NO: 1695990 - RNA, 19 nt, Homo sapiens
  misc_RNA (1)...(19): siRNA sense strand
uggaagaauugaaaguauc

SEQ ID NO: 1695991 - RNA, 19 nt, Homo sapiens
  misc_RNA (1)...(19): siRNA sense strand
uaugugggcucauuacacu

SEQ ID NO: 1695992 - RNA, 19 nt, Homo sapiens
  misc_RNA (1)...(19): siRNA sense strand
gccucuagcaauaggauua

SEQ ID NO: 1695993 - RNA, 19 nt, Homo sapiens
  misc_RNA (1)...(19): siRNA sense strand
gcaauguguaugugaagug

SEQ ID NO: 1695994 - RNA, 19 nt, Homo sapiens
  misc_RNA (1)...(19): siRNA sense strand
ugaugugauugaagaaugu

SEQ ID NO: 1695995 - RNA, 19 nt, Homo sapiens
  misc_RNA (1)...(19): siRNA sense strand
gagauuaaggaugauguga

SEQ ID NO: 1695996 - RNA, 19 nt, Homo sapiens
  misc_RNA (1)...(19): siRNA sense strand
cagcaagcucuacagauga

SEQ ID NO: 1695997 - RNA, 19 nt, Homo sapiens
  misc_RNA (1)...(19): siRNA sense strand
ugacucagaaugugccaaa

SEQ ID NO: 1695998 - RNA, 19 nt, Homo sapiens
  misc_RNA (1)...(19): siRNA sense strand
cucauuacacuucaacaua

SEQ ID NO: 1695999 - RNA, 19 nt, Homo sapiens
  misc_RNA (1)...(19): siRNA sense strand
gagaugugaggaugauuuc

SEQ ID NO: 1696000 - RNA, 19 nt, Homo sapiens
  misc_RNA (1)...(19): siRNA sense strand
gaugugaggaugauuucug

SEQ ID NO: 1696001 - RNA, 19 nt, Homo sapiens
  misc_RNA (1)...(19): siRNA sense strand
acacaauguuuccaacucu

SEQ ID NO: 1696002 - RNA, 19 nt, Homo sapiens
  misc_RNA (1)...(19): siRNA sense strand
guacagguuugcagauucc

SEQ ID NO: 1696003 - RNA, 19 nt, Homo sapiens
  misc_RNA (1)...(19): siRNA sense strand
uucaagacguuccaaagga

SEQ ID NO: 1696004 - RNA, 19 nt, Homo sapiens
  misc_RNA (1)...(19): siRNA sense strand
aaauucagcucagggcaau

SEQ ID NO: 1696005 - RNA, 19 nt, Homo sapiens
  misc_RNA (1)...(19): siRNA sense strand
uuccaacucucuaacaugu

SEQ ID NO: 1696006 - RNA, 19 nt, Homo sapiens
  misc_RNA (1)...(19): siRNA sense strand
ggaacaacuggucgucuuc

SEQ ID NO: 1696007 - RNA, 19 nt, Homo sapiens
  misc_RNA (1)...(19): siRNA sense strand
gaugauggacagugaaacu

SEQ ID NO: 1696008 - RNA, 19 nt, Homo sapiens
  misc_RNA (1)...(19): siRNA sense strand
ggcaggugguuugcuggua

SEQ ID NO: 1696009 - RNA, 19 nt, Homo sapiens
  misc_RNA (1)...(19): siRNA sense strand
gagcugcagcaauggcaaa

SEQ ID NO: 1696010 - RNA, 19 nt, Homo sapiens
  misc_RNA (1)...(19): siRNA sense strand
gaauugcuuauguggaguu

SEQ ID NO: 1696011 - RNA, 19 nt, Homo sapiens
  misc_RNA (1)...(19): siRNA sense strand
caacuuaauggauuugaac

SEQ ID NO: 1696012 - RNA, 19 nt, Homo sapiens
  misc_RNA (1)...(19): siRNA sense strand
cagcucagggcaaugugua

SEQ ID NO: 1696013 - RNA, 19 nt, Homo sapiens
  misc_RNA (1)...(19): siRNA sense strand
caggugguuugcugguaaa

SEQ ID NO: 1696014 - RNA, 19 nt, Homo sapiens
  misc_RNA (1)...(19): siRNA sense strand
gcaauggcaaacaauuuac

SEQ ID NO: 1696015 - RNA, 19 nt, Homo sapiens
  misc_RNA (1)...(19): siRNA sense strand
gaagugcccaucaauugcu

SEQ ID NO: 1696016 - RNA, 19 nt, Homo sapiens
  misc_RNA (1)...(19): siRNA sense strand
aaaggacuggaauugauuu

SEQ ID NO: 1696017 - RNA, 19 nt, Homo sapiens
  misc_RNA (1)...(19): siRNA sense strand
gaaauucaagacguuccaa

SEQ ID NO: 1696018 - RNA, 19 nt, Homo sapiens
  misc_RNA (1)...(19): siRNA sense strand
caggaagaccaaugaaagu

SEQ ID NO: 1696019 - RNA, 19 nt, Homo sapiens
  misc_RNA (1)...(19): siRNA sense strand
uugcagaggguacagguuu

SEQ ID NO: 1696020 - RNA, 19 nt, Homo sapiens
  misc_RNA (1)...(19): siRNA sense strand
uucgagugcuaguucauuu

SEQ ID NO: 1696021 - RNA, 19 nt, Homo sapiens
  misc_RNA (1)...(19): siRNA sense strand
aaacagagcugcagcaaug

SEQ ID NO: 1696022 - RNA, 19 nt, Homo sapiens
  misc_RNA (1)...(19): siRNA sense strand
gaaaguauccagcugauga

SEQ ID NO: 1696023 - RNA, 19 nt, Homo sapiens
  misc_RNA (1)...(19): siRNA sense strand
ggaaaggacuggaauugau

SEQ ID NO: 1696024 - RNA, 19 nt, Homo sapiens
  misc_RNA (1)...(19): siRNA sense strand
caagggauauggauuuauu

SEQ ID NO: 1696025 - RNA, 19 nt, Homo sapiens
  misc_RNA (1)...(19): siRNA sense strand
gauaacagcagcauaugua

SEQ ID NO: 1696026 - RNA, 19 nt, Homo sapiens
  misc_RNA (1)...(19): siRNA sense strand
gauuaaggaugaugugauu

SEQ ID NO: 1696027 - RNA, 19 nt, Homo sapiens
  misc_RNA (1)...(19): siRNA sense strand
ggaacaacuuaauggauuu

SEQ ID NO: 1696028 - RNA, 19 nt, Homo sapiens
  misc_RNA (1)...(19): siRNA sense strand
ccaaaggaauugcuuaugu

SEQ ID NO: 1696029 - RNA, 19 nt, Homo sapiens
  misc_RNA (1)...(19): siRNA sense strand
gcaggugguuugcugguaa

SEQ ID NO: 1696030 - RNA, 19 nt, Homo sapiens
  misc_RNA (1)...(19): siRNA sense strand
ccaacucucuaacauguuu

SEQ ID NO: 1696031 - RNA, 19 nt, Homo sapiens
  misc_RNA (1)...(19): siRNA sense strand
gaaaggacuggaauugauu

SEQ ID NO: 1696032 - RNA, 19 nt, Homo sapiens
  misc_RNA (1)...(19): siRNA sense strand
caaaggaauugcuuaugug

SEQ ID NO: 1696033 - RNA, 19 nt, Homo sapiens
  misc_RNA (1)...(19): siRNA sense strand
gaaaguuggucauguuacu

SEQ ID NO: 1696034 - RNA, 19 nt, Homo sapiens
  misc_RNA (1)...(19): siRNA sense strand
gaugggauaccgagauuaa

SEQ ID NO: 1696035 - RNA, 19 nt, Homo sapiens
  misc_RNA (1)...(19): siRNA sense strand
caagggauuuggaagaguu

SEQ ID NO: 1696036 - RNA, 19 nt, Homo sapiens
  misc_RNA (1)...(19): siRNA sense strand
uggaacaacuuaauggauu

SEQ ID NO: 1696037 - RNA, 19 nt, Homo sapiens
  misc_RNA (1)...(19): siRNA sense strand
gacagaaauucaagacguu

SEQ ID NO: 1696038 - RNA, 19 nt, Homo sapiens
  misc_RNA (1)...(19): siRNA sense strand
gaagaaguuggaugggaua

SEQ ID NO: 1696039 - RNA, 19 nt, Homo sapiens
  misc_RNA (1)...(19): siRNA sense strand
gggaagugcuggaccuaug

SEQ ID NO: 1696040 - RNA, 19 nt, Homo sapiens
  misc_RNA (1)...(19): siRNA sense strand
gggaacaacuggucgucuu

SEQ ID NO: 1696041 - RNA, 19 nt, Homo sapiens
  misc_RNA (1)...(19): siRNA sense strand
auaccgagauuaaggauga

SEQ ID NO: 1696042 - RNA, 19 nt, Homo sapiens
  misc_RNA (1)...(19): siRNA sense strand
acagcaagcucuacagaug

SEQ ID NO: 1696043 - RNA, 19 nt, Homo sapiens
  misc_RNA (1)...(19): siRNA sense strand
ggaauugauuugggaacaa

SEQ ID NO: 1696044 - RNA, 19 nt, Homo sapiens
  misc_RNA (1)...(19): siRNA sense strand
gcaggaagaccaaugaaag

SEQ ID NO: 1696045 - RNA, 19 nt, Homo sapiens
  misc_RNA (1)...(19): siRNA sense strand
caacuuaccacaaccuguu

SEQ ID NO: 1696046 - RNA, 19 nt, Homo sapiens
  misc_RNA (1)...(19): siRNA sense strand
ucaaacagaagaagaaguu

SEQ ID NO: 1696047 - RNA, 19 nt, Homo sapiens
  misc_RNA (1)...(19): siRNA sense strand
gaguggcucuuuggcauuu

SEQ ID NO: 1696048 - RNA, 19 nt, Homo sapiens
  misc_RNA (1)...(19): siRNA sense strand
ggaagaccaaugaaaguug

SEQ ID NO: 1696049 - RNA, 19 nt, Homo sapiens
  misc_RNA (1)...(19): siRNA sense strand
gaacuggaaaggacuggaa

SEQ ID NO: 1696050 - RNA, 19 nt, Homo sapiens
  misc_RNA (1)...(19): siRNA sense strand
gugaagugcccaucaauug

SEQ ID NO: 1696051 - RNA, 19 nt, Homo sapiens
  misc_RNA (1)...(19): siRNA sense strand
gcacagcaagcucuacaga

SEQ ID NO: 1696052 - RNA, 19 nt, Homo sapiens
  misc_RNA (1)...(19): siRNA sense strand
cagcaauggcaaacaauuu

SEQ ID NO: 1696053 - RNA, 19 nt, Homo sapiens
  misc_RNA (1)...(19): siRNA sense strand
gcagcuggcggcaagaauu

SEQ ID NO: 1696054 - RNA, 19 nt, Homo sapiens
  misc_RNA (1)...(19): siRNA sense strand
gaacuagcaggaagaccaa

SEQ ID NO: 1696055 - RNA, 19 nt, Homo sapiens
  misc_RNA (1)...(19): siRNA sense strand
ggaagugcuggaccuauga

SEQ ID NO: 1696056 - RNA, 19 nt, Homo sapiens
  misc_RNA (1)...(19): siRNA sense strand
cucagugccucuagcaaua

SEQ ID NO: 1696057 - RNA, 19 nt, Homo sapiens
  misc_RNA (1)...(19): siRNA sense strand
ggaaagguucgagauguga

SEQ ID NO: 1696058 - RNA, 19 nt, Homo sapiens
  misc_RNA (1)...(19): siRNA sense strand
gcagcaauggcaaacaauu

SEQ ID NO: 1696059 - RNA, 19 nt, Homo sapiens
  misc_RNA (1)...(19): siRNA sense strand
cgagaugugaggaugauuu

SEQ ID NO: 1696060 - RNA, 19 nt, Homo sapiens
  misc_RNA (1)...(19): siRNA sense strand
uaggaaagguucgagaugu

SEQ ID NO: 1696061 - RNA, 19 nt, Homo sapiens
  misc_RNA (1)...(19): siRNA sense strand
ggguacagguuugcagauu

SEQ ID NO: 1696062 - RNA, 19 nt, Homo sapiens
  misc_RNA (1)...(19): siRNA sense strand
gguacagguuugcagauuc

SEQ ID NO: 1696063 - RNA, 19 nt, Homo sapiens
  misc_RNA (1)...(19): siRNA sense strand
cacaaccuguuuccugauu

SEQ ID NO: 1696064 - RNA, 19 nt, Homo sapiens
  misc_RNA (1)...(19): siRNA sense strand
acagaugaguggcucuuug

SEQ ID NO: 1696065 - RNA, 19 nt, Homo sapiens
  misc_RNA (1)...(19): siRNA sense strand
ggaccuaugaggcuuuaug

SEQ ID NO: 1696066 - RNA, 19 nt, Homo sapiens
  misc_RNA (1)...(19): siRNA sense strand
aggaugaugugauugaaga

SEQ ID NO: 1696067 - RNA, 19 nt, Homo sapiens
  misc_RNA (1)...(19): siRNA sense strand
uaacauguuuaacccucaa

SEQ ID NO: 1696068 - RNA, 19 nt, Homo sapiens
  misc_RNA (1)...(19): siRNA sense strand
gaacaacuuaauggauuug

SEQ ID NO: 1696069 - RNA, 19 nt, Homo sapiens
  misc_RNA (1)...(19): siRNA sense strand
uaaggaugaugugauugaa

SEQ ID NO: 1696070 - RNA, 19 nt, Homo sapiens
  misc_RNA (1)...(19): siRNA sense strand
uaauggauuugaacuagca

SEQ ID NO: 1696071 - RNA, 19 nt, Homo sapiens
  misc_RNA (1)...(19): siRNA sense strand
aggauuaacuggccaacga

SEQ ID NO: 1696072 - RNA, 19 nt, Homo sapiens
  misc_RNA (1)...(19): siRNA sense strand
gcaaacaauuuacaaaagg

SEQ ID NO: 1696073 - RNA, 19 nt, Homo sapiens
  misc_RNA (1)...(19): siRNA sense strand
gcauauguaccucuuccaa

SEQ ID NO: 1696074 - RNA, 19 nt, Homo sapiens
  misc_RNA (1)...(19): siRNA sense strand
gaacaacuggucgucuuca

SEQ ID NO: 1696075 - RNA, 19 nt, Homo sapiens
  misc_RNA (1)...(19): siRNA sense strand
aaugauaacagcagcauau

SEQ ID NO: 1696076 - RNA, 19 nt, Homo sapiens
  misc_RNA (1)...(19): siRNA sense strand
agcaauggcaaacaauuua

SEQ ID NO: 1696077 - RNA, 19 nt, Homo sapiens
  misc_RNA (1)...(19): siRNA sense strand
uaugugaagugcccaucaa

SEQ ID NO: 1696078 - RNA, 19 nt, Homo sapiens
  misc_RNA (1)...(19): siRNA sense strand
gauuugcaaacaagacuuu

SEQ ID NO: 1696079 - RNA, 19 nt, Homo sapiens
  misc_RNA (1)...(19): siRNA sense strand
gaauugauuugggaacaac

SEQ ID NO: 1696080 - RNA, 19 nt, Homo sapiens
  misc_RNA (1)...(19): siRNA sense strand
gcucagugccucuagcaau

SEQ ID NO: 1696081 - RNA, 19 nt, Homo sapiens
  misc_RNA (1)...(19): siRNA sense strand
cuuaauggauuugaacuag

SEQ ID NO: 1696082 - RNA, 19 nt, Homo sapiens
  misc_RNA (1)...(19): siRNA sense strand
uuaaggaugaugugauuga

SEQ ID NO: 1696083 - RNA, 19 nt, Homo sapiens
  misc_RNA (1)...(19): siRNA sense strand
agaauucgaccaagggauu

SEQ ID NO: 1696084 - RNA, 19 nt, Homo sapiens
  misc_RNA (1)...(19): siRNA sense strand
uggaugggauaccgagauu

SEQ ID NO: 1696085 - RNA, 19 nt, Homo sapiens
  misc_RNA (1)...(19): siRNA sense strand
cugcagcaauggcaaacaa

SEQ ID NO: 1696086 - RNA, 19 nt, Homo sapiens
  misc_RNA (1)...(19): siRNA sense strand
caaccuguuuccugauucu

SEQ ID NO: 1696087 - RNA, 19 nt, Homo sapiens
  misc_RNA (1)...(19): siRNA sense strand
auguaccucuuccaacuua

SEQ ID NO: 1696088 - RNA, 19 nt, Homo sapiens
  misc_RNA (1)...(19): siRNA sense strand
guaggaaagguucgagaug

SEQ ID NO: 1696089 - RNA, 19 nt, Homo sapiens
  misc_RNA (1)...(19): siRNA sense strand
gaauucgaccaagggauuu

SEQ ID NO: 1696090 - RNA, 19 nt, Homo sapiens
  misc_RNA (1)...(19): siRNA sense strand
uggaagaauugaaaguauc

SEQ ID NO: 1696091 - RNA, 19 nt, Homo sapiens
  misc_RNA (1)...(19): siRNA sense strand
uaugugggcucauuacacu

SEQ ID NO: 1696092 - RNA, 19 nt, Homo sapiens
  misc_RNA (1)...(19): siRNA sense strand
gccucuagcaauaggauua

SEQ ID NO: 1696093 - RNA, 19 nt, Homo sapiens
  misc_RNA (1)...(19): siRNA sense strand
gcaauguguaugugaagug

SEQ ID NO: 1696094 - RNA, 19 nt, Homo sapiens
  misc_RNA (1)...(19): siRNA sense strand
ugaugugauugaagaaugu

SEQ ID NO: 1696095 - RNA, 19 nt, Homo sapiens
  misc_RNA (1)...(19): siRNA sense strand
gagauuaaggaugauguga

SEQ ID NO: 1696096 - RNA, 19 nt, Homo sapiens
  misc_RNA (1)...(19): siRNA sense strand
cagcaagcucuacagauga

SEQ ID NO: 1696097 - RNA, 19 nt, Homo sapiens
  misc_RNA (1)...(19): siRNA sense strand
ugacucagaaugugccaaa

SEQ ID NO: 1696098 - RNA, 19 nt, Homo sapiens
  misc_RNA (1)...(19): siRNA sense strand
cucauuacacuucaacaua

SEQ ID NO: 1696099 - RNA, 19 nt, Homo sapiens
  misc_RNA (1)...(19): siRNA sense strand
gagaugugaggaugauuuc

SEQ ID NO: 1696100 - RNA, 19 nt, Homo sapiens
  misc_RNA (1)...(19): siRNA sense strand
gaugugaggaugauuucug

SEQ ID NO: 1696101 - RNA, 19 nt, Homo sapiens
  misc_RNA (1)...(19): siRNA sense strand
acacaauguuuccaacucu

SEQ ID NO: 1696102 - RNA, 19 nt, Homo sapiens
  misc_RNA (1)...(19): siRNA sense strand
guacagguuugcagauucc

SEQ ID NO: 1696103 - RNA, 19 nt, Homo sapiens
  misc_RNA (1)...(19): siRNA sense strand
uucaagacguuccaaagga

SEQ ID NO: 1696104 - RNA, 19 nt, Homo sapiens
  misc_RNA (1)...(19): siRNA sense strand
aaauucagcucagggcaau

SEQ ID NO: 1696105 - RNA, 19 nt, Homo sapiens
  misc_RNA (1)...(19): siRNA sense strand
uuccaacucucuaacaugu

SEQ ID NO: 1696106 - RNA, 19 nt, Homo sapiens
  misc_RNA (1)...(19): siRNA sense strand
ggaacaacuggucgucuuc

SEQ ID NO: 1696107 - RNA, 19 nt, Homo sapiens
  misc_RNA (1)...(19): siRNA sense strand
gaugauggacagugaaacu

SEQ ID NO: 1696108 - RNA, 19 nt, Homo sapiens
  misc_RNA (1)...(19): siRNA sense strand
ggcaggugguuugcuggua

SEQ ID NO: 1696109 - RNA, 19 nt, Homo sapiens
  misc_RNA (1)...(19): siRNA sense strand
gagcugcagcaauggcaaa

SEQ ID NO: 1696110 - RNA, 19 nt, Homo sapiens
  misc_RNA (1)...(19): siRNA sense strand
gaauugcuuauguggaguu

SEQ ID NO: 1696111 - RNA, 19 nt, Homo sapiens
  misc_RNA (1)...(19): siRNA sense strand
caacuuaauggauuugaac

SEQ ID NO: 1696112 - RNA, 19 nt, Homo sapiens
  misc_RNA (1)...(19): siRNA sense strand
cagcucagggcaaugugua

SEQ ID NO: 1696113 - RNA, 19 nt, Homo sapiens
  misc_RNA (1)...(19): siRNA sense strand
caggugguuugcugguaaa

SEQ ID NO: 1696114 - RNA, 19 nt, Homo sapiens
  misc_RNA (1)...(19): siRNA sense strand
gcaauggcaaacaauuuac

SEQ ID NO: 1696115 - RNA, 19 nt, Homo sapiens
  misc_RNA (1)...(19): siRNA sense strand
gaagugcccaucaauugcu

SEQ ID NO: 1696116 - RNA, 19 nt, Homo sapiens
  misc_RNA (1)...(19): siRNA sense strand
aaaggacuggaauugauuu

SEQ ID NO: 1696117 - RNA, 19 nt, Homo sapiens
  misc_RNA (1)...(19): siRNA sense strand
gaaauucaagacguuccaa

SEQ ID NO: 1696118 - RNA, 19 nt, Homo sapiens
  misc_RNA (1)...(19): siRNA sense strand
caggaagaccaaugaaagu

SEQ ID NO: 1696119 - RNA, 19 nt, Homo sapiens
  misc_RNA (1)...(19): siRNA sense strand
uugcagaggguacagguuu

SEQ ID NO: 1696120 - RNA, 19 nt, Homo sapiens
  misc_RNA (1)...(19): siRNA sense strand
uucgagugcuaguucauuu

SEQ ID NO: 1696121 - RNA, 19 nt, Homo sapiens
  misc_RNA (1)...(19): siRNA sense strand
aaacagagcugcagcaaug

SEQ ID NO: 1696122 - RNA, 19 nt, Homo sapiens
  misc_RNA (1)...(19): siRNA sense strand
gaaagaaagcgaaguagaa

SEQ ID NO: 1696123 - RNA, 19 nt, Homo sapiens
  misc_RNA (1)...(19): siRNA sense strand
gaaaguauccagcugauga

SEQ ID NO: 1696124 - RNA, 19 nt, Homo sapiens
  misc_RNA (1)...(19): siRNA sense strand
ggaaaggacuggaauugau

SEQ ID NO: 1696125 - RNA, 19 nt, Homo sapiens
  misc_RNA (1)...(19): siRNA sense strand
caagggauauggauuuauu

SEQ ID NO: 1696126 - RNA, 19 nt, Homo sapiens
  misc_RNA (1)...(19): siRNA sense strand
gauaacagcagcauaugua

SEQ ID NO: 1696127 - RNA, 19 nt, Homo sapiens
  misc_RNA (1)...(19): siRNA sense strand
gagagaaccuauugauaau

SEQ ID NO: 1696128 - RNA, 19 nt, Homo sapiens
  misc_RNA (1)...(19): siRNA sense strand
gauuaaggaugaugugauu

SEQ ID NO: 1696129 - RNA, 19 nt, Homo sapiens
  misc_RNA (1)...(19): siRNA sense strand
ugagagaaccuauugauaa

SEQ ID NO: 1696130 - RNA, 19 nt, Homo sapiens
  misc_RNA (1)...(19): siRNA sense strand
ggaacaacuuaauggauuu

SEQ ID NO: 1696131 - RNA, 19 nt, Homo sapiens
  misc_RNA (1)...(19): siRNA sense strand
ccaaaggaauugcuuaugu

SEQ ID NO: 1696132 - RNA, 19 nt, Homo sapiens
  misc_RNA (1)...(19): siRNA sense strand
ccucauagcaucaaauuaa

SEQ ID NO: 1696133 - RNA, 19 nt, Homo sapiens
  misc_RNA (1)...(19): siRNA sense strand
gcaggugguuugcugguaa

SEQ ID NO: 1696134 - RNA, 19 nt, Homo sapiens
  misc_RNA (1)...(19): siRNA sense strand
ccaacucucuaacauguuu

SEQ ID NO: 1696135 - RNA, 19 nt, Homo sapiens
  misc_RNA (1)...(19): siRNA sense strand
gaaaggacuggaauugauu

SEQ ID NO: 1696136 - RNA, 19 nt, Homo sapiens
  misc_RNA (1)...(19): siRNA sense strand
caaaggaauugcuuaugug

SEQ ID NO: 1696137 - RNA, 19 nt, Homo sapiens
  misc_RNA (1)...(19): siRNA sense strand
gaagcgaaguagagacaga

SEQ ID NO: 1696138 - RNA, 19 nt, Homo sapiens
  misc_RNA (1)...(19): siRNA sense strand
gaaaguuggucauguuacu

SEQ ID NO: 1696139 - RNA, 19 nt, Homo sapiens
  misc_RNA (1)...(19): siRNA sense strand
aagauuggguugccucaua

SEQ ID NO: 1696140 - RNA, 19 nt, Homo sapiens
  misc_RNA (1)...(19): siRNA sense strand
caagggauuuggaagaguu

SEQ ID NO: 1696141 - RNA, 19 nt, Homo sapiens
  misc_RNA (1)...(19): siRNA sense strand
gaugggauaccgagauuaa

SEQ ID NO: 1696142 - RNA, 19 nt, Homo sapiens
  misc_RNA (1)...(19): siRNA sense strand
caagagcccugugagagaa

SEQ ID NO: 1696143 - RNA, 19 nt, Homo sapiens
  misc_RNA (1)...(19): siRNA sense strand
uggaacaacuuaauggauu

SEQ ID NO: 1696144 - RNA, 19 nt, Homo sapiens
  misc_RNA (1)...(19): siRNA sense strand
gacagaaauucaagacguu

SEQ ID NO: 1696145 - RNA, 19 nt, Homo sapiens
  misc_RNA (1)...(19): siRNA sense strand
gaacggaagcgaaguagag

SEQ ID NO: 1696146 - RNA, 19 nt, Homo sapiens
  misc_RNA (1)...(19): siRNA sense strand
gaagaaguuggaugggaua

SEQ ID NO: 1696147 - RNA, 19 nt, Homo sapiens
  misc_RNA (1)...(19): siRNA sense strand
gggaagugcuggaccuaug

SEQ ID NO: 1696148 - RNA, 19 nt, Homo sapiens
  misc_RNA (1)...(19): siRNA sense strand
gagcagaagucguagucau

SEQ ID NO: 1696149 - RNA, 19 nt, Homo sapiens
  misc_RNA (1)...(19): siRNA sense strand
auaccgagauuaaggauga

SEQ ID NO: 1696150 - RNA, 19 nt, Homo sapiens
  misc_RNA (1)...(19): siRNA sense strand
acagcaagcucuacagaug

SEQ ID NO: 1696151 - RNA, 19 nt, Homo sapiens
  misc_RNA (1)...(19): siRNA sense strand
gggaacaacuggucgucuu

SEQ ID NO: 1696152 - RNA, 19 nt, Homo sapiens
  misc_RNA (1)...(19): siRNA sense strand
ggaauugauuugggaacaa

SEQ ID NO: 1696153 - RNA, 19 nt, Homo sapiens
  misc_RNA (1)...(19): siRNA sense strand
gcaggaagaccaaugaaag

SEQ ID NO: 1696154 - RNA, 19 nt, Homo sapiens
  misc_RNA (1)...(19): siRNA sense strand
caacuuaccacaaccuguu

SEQ ID NO: 1696155 - RNA, 19 nt, Homo sapiens
  misc_RNA (1)...(19): siRNA sense strand
ucaaacagaagaagaaguu

SEQ ID NO: 1696156 - RNA, 19 nt, Homo sapiens
  misc_RNA (1)...(19): siRNA sense strand
gaguggcucuuuggcauuu

SEQ ID NO: 1696157 - RNA, 19 nt, Homo sapiens
  misc_RNA (1)...(19): siRNA sense strand
ggaagaccaaugaaaguug

SEQ ID NO: 1696158 - RNA, 19 nt, Homo sapiens
  misc_RNA (1)...(19): siRNA sense strand
gaacuggaaaggacuggaa

SEQ ID NO: 1696159 - RNA, 19 nt, Homo sapiens
  misc_RNA (1)...(19): siRNA sense strand
gugaagugcccaucaauug

SEQ ID NO: 1696160 - RNA, 19 nt, Homo sapiens
  misc_RNA (1)...(19): siRNA sense strand
cgaaguagaagcaaagaga

SEQ ID NO: 1696161 - RNA, 19 nt, Homo sapiens
  misc_RNA (1)...(19): siRNA sense strand
gcacagcaagcucuacaga

SEQ ID NO: 1696162 - RNA, 19 nt, Homo sapiens
  misc_RNA (1)...(19): siRNA sense strand
gcagaagucguagucauga

SEQ ID NO: 1696163 - RNA, 19 nt, Homo sapiens
  misc_RNA (1)...(19): siRNA sense strand
cgaaagagaagcaaaagua

SEQ ID NO: 1696164 - RNA, 19 nt, Homo sapiens
  misc_RNA (1)...(19): siRNA sense strand
cagcaauggcaaacaauuu

SEQ ID NO: 1696165 - RNA, 19 nt, Homo sapiens
  misc_RNA (1)...(19): siRNA sense strand
gugagagaaccuauugaua

SEQ ID NO: 1696166 - RNA, 19 nt, Homo sapiens
  misc_RNA (1)...(19): siRNA sense strand
gaacuagcaggaagaccaa

SEQ ID NO: 1696167 - RNA, 19 nt, Homo sapiens
  misc_RNA (1)...(19): siRNA sense strand
ggaagugcuggaccuauga

SEQ ID NO: 1696168 - RNA, 19 nt, Homo sapiens
  misc_RNA (1)...(19): siRNA sense strand
gcagcuggcggcaagaauu

SEQ ID NO: 1696169 - RNA, 19 nt, Homo sapiens
  misc_RNA (1)...(19): siRNA sense strand
ggaaagguucgagauguga

SEQ ID NO: 1696170 - RNA, 19 nt, Homo sapiens
  misc_RNA (1)...(19): siRNA sense strand
gaaagagaagcaaaaguaa

SEQ ID NO: 1696171 - RNA, 19 nt, Homo sapiens
  misc_RNA (1)...(19): siRNA sense strand
gcagcaauggcaaacaauu

SEQ ID NO: 1696172 - RNA, 19 nt, Homo sapiens
  misc_RNA (1)...(19): siRNA sense strand
cucagugccucuagcaaua

SEQ ID NO: 1696173 - RNA, 19 nt, Homo sapiens
  misc_RNA (1)...(19): siRNA sense strand
gaacgaaagagaagcaaaa

SEQ ID NO: 1696174 - RNA, 19 nt, Homo sapiens
  misc_RNA (1)...(19): siRNA sense strand
ggguacagguuugcagauu

SEQ ID NO: 1696175 - RNA, 19 nt, Homo sapiens
  misc_RNA (1)...(19): siRNA sense strand
caacggccaugaagaacgu

SEQ ID NO: 1696176 - RNA, 19 nt, Homo sapiens
  misc_RNA (1)...(19): siRNA sense strand
cgagaugugaggaugauuu

SEQ ID NO: 1696177 - RNA, 19 nt, Homo sapiens
  misc_RNA (1)...(19): siRNA sense strand
uaggaaagguucgagaugu

SEQ ID NO: 1696178 - RNA, 19 nt, Homo sapiens
  misc_RNA (1)...(19): siRNA sense strand
gcaaaaguccauucagaaa

SEQ ID NO: 1696179 - RNA, 19 nt, Homo sapiens
  misc_RNA (1)...(19): siRNA sense strand
gcaaaagccgugaaagaaa

SEQ ID NO: 1696180 - RNA, 19 nt, Homo sapiens
  misc_RNA (1)...(19): siRNA sense strand
cacaaccuguuuccugauu

SEQ ID NO: 1696181 - RNA, 19 nt, Homo sapiens
  misc_RNA (1)...(19): siRNA sense strand
acagaugaguggcucuuug

SEQ ID NO: 1696182 - RNA, 19 nt, Homo sapiens
  misc_RNA (1)...(19): siRNA sense strand
gguacagguuugcagauuc

SEQ ID NO: 1696183 - RNA, 19 nt, Homo sapiens
  misc_RNA (1)...(19): siRNA sense strand
ggaccuaugaggcuuuaug

SEQ ID NO: 1696184 - RNA, 19 nt, Homo sapiens
  misc_RNA (1)...(19): siRNA sense strand
aggaugaugugauugaaga

SEQ ID NO: 1696185 - RNA, 19 nt, Homo sapiens
  misc_RNA (1)...(19): siRNA sense strand
uaacauguuuaacccucaa

SEQ ID NO: 1696186 - RNA, 19 nt, Homo sapiens
  misc_RNA (1)...(19): siRNA sense strand
aaauuaagcagacgacguu

SEQ ID NO: 1696187 - RNA, 19 nt, Homo sapiens
  misc_RNA (1)...(19): siRNA sense strand
uaaggaugaugugauugaa

SEQ ID NO: 1696188 - RNA, 19 nt, Homo sapiens
  misc_RNA (1)...(19): siRNA sense strand
uaauggauuugaacuagca

SEQ ID NO: 1696189 - RNA, 19 nt, Homo sapiens
  misc_RNA (1)...(19): siRNA sense strand
gaacaacuuaauggauuug

SEQ ID NO: 1696190 - RNA, 19 nt, Homo sapiens
  misc_RNA (1)...(19): siRNA sense strand
aaagcgaaguagaagcaaa

SEQ ID NO: 1696191 - RNA, 19 nt, Homo sapiens
  misc_RNA (1)...(19): siRNA sense strand
ugaaagaaagcgaaguaga

SEQ ID NO: 1696192 - RNA, 19 nt, Homo sapiens
  misc_RNA (1)...(19): siRNA sense strand
aggauuaacuggccaacga

SEQ ID NO: 1696193 - RNA, 19 nt, Homo sapiens
  misc_RNA (1)...(19): siRNA sense strand
gcaaacaauuuacaaaagg

SEQ ID NO: 1696194 - RNA, 19 nt, Homo sapiens
  misc_RNA (1)...(19): siRNA sense strand
gcauauguaccucuuccaa

SEQ ID NO: 1696195 - RNA, 19 nt, Homo sapiens
  misc_RNA (1)...(19): siRNA sense strand
cgugaaagaaagcgaagua

SEQ ID NO: 1696196 - RNA, 19 nt, Homo sapiens
  misc_RNA (1)...(19): siRNA sense strand
gaacaacuggucgucuuca

SEQ ID NO: 1696197 - RNA, 19 nt, Homo sapiens
  misc_RNA (1)...(19): siRNA sense strand
aaugauaacagcagcauau

SEQ ID NO: 1696198 - RNA, 19 nt, Homo sapiens
  misc_RNA (1)...(19): siRNA sense strand
gcucagugccucuagcaau

SEQ ID NO: 1696199 - RNA, 19 nt, Homo sapiens
  misc_RNA (1)...(19): siRNA sense strand
uaugugaagugcccaucaa

SEQ ID NO: 1696200 - RNA, 19 nt, Homo sapiens
  misc_RNA (1)...(19): siRNA sense strand
gauuugcaaacaagacuuu

SEQ ID NO: 1696201 - RNA, 19 nt, Homo sapiens
  misc_RNA (1)...(19): siRNA sense strand
gagcaaaagccgugaaaga

SEQ ID NO: 1696202 - RNA, 19 nt, Homo sapiens
  misc_RNA (1)...(19): siRNA sense strand
gaauugauuugggaacaac

SEQ ID NO: 1696203 - RNA, 19 nt, Homo sapiens
  misc_RNA (1)...(19): siRNA sense strand
agcaauggcaaacaauuua

SEQ ID NO: 1696204 - RNA, 19 nt, Homo sapiens
  misc_RNA (1)...(19): siRNA sense strand
agcaagagcagaagucgua

SEQ ID NO: 1696205 - RNA, 19 nt, Homo sapiens
  misc_RNA (1)...(19): siRNA sense strand
uuaaggaugaugugauuga

SEQ ID NO: 1696206 - RNA, 19 nt, Homo sapiens
  misc_RNA (1)...(19): siRNA sense strand
uggaugggauaccgagauu

SEQ ID NO: 1696207 - RNA, 19 nt, Homo sapiens
  misc_RNA (1)...(19): siRNA sense strand
cuuaauggauuugaacuag

SEQ ID NO: 1696208 - RNA, 19 nt, Homo sapiens
  misc_RNA (1)...(19): siRNA sense strand
agaauucgaccaagggauu

SEQ ID NO: 1696209 - RNA, 19 nt, Homo sapiens
  misc_RNA (1)...(19): siRNA sense strand
gaauucgaccaagggauuu

SEQ ID NO: 1696210 - RNA, 19 nt, Homo sapiens
  misc_RNA (1)...(19): siRNA sense strand
caaccuguuuccugauucu

SEQ ID NO: 1696211 - RNA, 19 nt, Homo sapiens
  misc_RNA (1)...(19): siRNA sense strand
auguaccucuuccaacuua

SEQ ID NO: 1696212 - RNA, 19 nt, Homo sapiens
  misc_RNA (1)...(19): siRNA sense strand
caaaagccgugaaagaaag

SEQ ID NO: 1696213 - RNA, 19 nt, Homo sapiens
  misc_RNA (1)...(19): siRNA sense strand
cagaagucguagucaugaa

SEQ ID NO: 1696214 - RNA, 19 nt, Homo sapiens
  misc_RNA (1)...(19): siRNA sense strand
uggaagaauugaaaguauc

SEQ ID NO: 1696215 - RNA, 19 nt, Homo sapiens
  misc_RNA (1)...(19): siRNA sense strand
uaugugggcucauuacacu

SEQ ID NO: 1696216 - RNA, 19 nt, Homo sapiens
  misc_RNA (1)...(19): siRNA sense strand
cugcagcaauggcaaacaa

SEQ ID NO: 1696217 - RNA, 19 nt, Homo sapiens
  misc_RNA (1)...(19): siRNA sense strand
guaggaaagguucgagaug

SEQ ID NO: 1696218 - RNA, 19 nt, Homo sapiens
  misc_RNA (1)...(19): siRNA sense strand
gagauuaaggaugauguga

SEQ ID NO: 1696219 - RNA, 19 nt, Homo sapiens
  misc_RNA (1)...(19): siRNA sense strand
gcaauguguaugugaagug

SEQ ID NO: 1696220 - RNA, 19 nt, Homo sapiens
  misc_RNA (1)...(19): siRNA sense strand
ugaugugauugaagaaugu

SEQ ID NO: 1696221 - RNA, 19 nt, Homo sapiens
  misc_RNA (1)...(19): siRNA sense strand
aaacagagcugcagcaaug

SEQ ID NO: 1696222 - RNA, 19 nt, Homo sapiens
  misc_RNA (1)...(19): siRNA sense strand
gaaagaaagcgaaguagaa

SEQ ID NO: 1696223 - RNA, 19 nt, Homo sapiens
  misc_RNA (1)...(19): siRNA sense strand
gaaaguauccagcugauga

SEQ ID NO: 1696224 - RNA, 19 nt, Homo sapiens
  misc_RNA (1)...(19): siRNA sense strand
ggaaaggacuggaauugau

SEQ ID NO: 1696225 - RNA, 19 nt, Homo sapiens
  misc_RNA (1)...(19): siRNA sense strand
caagggauauggauuuauu

SEQ ID NO: 1696226 - RNA, 19 nt, Homo sapiens
  misc_RNA (1)...(19): siRNA sense strand
gauaacagcagcauaugua

SEQ ID NO: 1696227 - RNA, 19 nt, Homo sapiens
  misc_RNA (1)...(19): siRNA sense strand
gagagaaccuauugauaau

SEQ ID NO: 1696228 - RNA, 19 nt, Homo sapiens
  misc_RNA (1)...(19): siRNA sense strand
gauuaaggaugaugugauu

SEQ ID NO: 1696229 - RNA, 19 nt, Homo sapiens
  misc_RNA (1)...(19): siRNA sense strand
ugagagaaccuauugauaa

SEQ ID NO: 1696230 - RNA, 19 nt, Homo sapiens
  misc_RNA (1)...(19): siRNA sense strand
ggaacaacuuaauggauuu

SEQ ID NO: 1696231 - RNA, 19 nt, Homo sapiens
  misc_RNA (1)...(19): siRNA sense strand
ccaaaggaauugcuuaugu

SEQ ID NO: 1696232 - RNA, 19 nt, Homo sapiens
  misc_RNA (1)...(19): siRNA sense strand
ccucauagcaucaaauuaa

SEQ ID NO: 1696233 - RNA, 19 nt, Homo sapiens
  misc_RNA (1)...(19): siRNA sense strand
gcaggugguuugcugguaa

SEQ ID NO: 1696234 - RNA, 19 nt, Homo sapiens
  misc_RNA (1)...(19): siRNA sense strand
ccaacucucuaacauguuu

SEQ ID NO: 1696235 - RNA, 19 nt, Homo sapiens
  misc_RNA (1)...(19): siRNA sense strand
gaaaggacuggaauugauu

SEQ ID NO: 1696236 - RNA, 19 nt, Homo sapiens
  misc_RNA (1)...(19): siRNA sense strand
caaaggaauugcuuaugug

SEQ ID NO: 1696237 - RNA, 19 nt, Homo sapiens
  misc_RNA (1)...(19): siRNA sense strand
gaagcgaaguagagacaga

SEQ ID NO: 1696238 - RNA, 19 nt, Homo sapiens
  misc_RNA (1)...(19): siRNA sense strand
gaaaguuggucauguuacu

SEQ ID NO: 1696239 - RNA, 19 nt, Homo sapiens
  misc_RNA (1)...(19): siRNA sense strand
aagauuggguugccucaua

SEQ ID NO: 1696240 - RNA, 19 nt, Homo sapiens
  misc_RNA (1)...(19): siRNA sense strand
caagggauuuggaagaguu

SEQ ID NO: 1696241 - RNA, 19 nt, Homo sapiens
  misc_RNA (1)...(19): siRNA sense strand
gaugggauaccgagauuaa

SEQ ID NO: 1696242 - RNA, 19 nt, Homo sapiens
  misc_RNA (1)...(19): siRNA sense strand
caagagcccugugagagaa

SEQ ID NO: 1696243 - RNA, 19 nt, Homo sapiens
  misc_RNA (1)...(19): siRNA sense strand
uggaacaacuuaauggauu

SEQ ID NO: 1696244 - RNA, 19 nt, Homo sapiens
  misc_RNA (1)...(19): siRNA sense strand
gacagaaauucaagacguu

SEQ ID NO: 1696245 - RNA, 19 nt, Homo sapiens
  misc_RNA (1)...(19): siRNA sense strand
gaacggaagcgaaguagag

SEQ ID NO: 1696246 - RNA, 19 nt, Homo sapiens
  misc_RNA (1)...(19): siRNA sense strand
gaagaaguuggaugggaua

SEQ ID NO: 1696247 - RNA, 19 nt, Homo sapiens
  misc_RNA (1)...(19): siRNA sense strand
gggaagugcuggaccuaug

SEQ ID NO: 1696248 - RNA, 19 nt, Homo sapiens
  misc_RNA (1)...(19): siRNA sense strand
gagcagaagucguagucau

SEQ ID NO: 1696249 - RNA, 19 nt, Homo sapiens
  misc_RNA (1)...(19): siRNA sense strand
auaccgagauuaaggauga

SEQ ID NO: 1696250 - RNA, 19 nt, Homo sapiens
  misc_RNA (1)...(19): siRNA sense strand
acagcaagcucuacagaug

SEQ ID NO: 1696251 - RNA, 19 nt, Homo sapiens
  misc_RNA (1)...(19): siRNA sense strand
gggaacaacuggucgucuu

SEQ ID NO: 1696252 - RNA, 19 nt, Homo sapiens
  misc_RNA (1)...(19): siRNA sense strand
ggaauugauuugggaacaa

SEQ ID NO: 1696253 - RNA, 19 nt, Homo sapiens
  misc_RNA (1)...(19): siRNA sense strand
gcaggaagaccaaugaaag

SEQ ID NO: 1696254 - RNA, 19 nt, Homo sapiens
  misc_RNA (1)...(19): siRNA sense strand
caacuuaccacaaccuguu

SEQ ID NO: 1696255 - RNA, 19 nt, Homo sapiens
  misc_RNA (1)...(19): siRNA sense strand
ucaaacagaagaagaaguu

SEQ ID NO: 1696256 - RNA, 19 nt, Homo sapiens
  misc_RNA (1)...(19): siRNA sense strand
gaguggcucuuuggcauuu

SEQ ID NO: 1696257 - RNA, 19 nt, Homo sapiens
  misc_RNA (1)...(19): siRNA sense strand
ggaagaccaaugaaaguug

SEQ ID NO: 1696258 - RNA, 19 nt, Homo sapiens
  misc_RNA (1)...(19): siRNA sense strand
gaacuggaaaggacuggaa

SEQ ID NO: 1696259 - RNA, 19 nt, Homo sapiens
  misc_RNA (1)...(19): siRNA sense strand
gugaagugcccaucaauug

SEQ ID NO: 1696260 - RNA, 19 nt, Homo sapiens
  misc_RNA (1)...(19): siRNA sense strand
cgaaguagaagcaaagaga

SEQ ID NO: 1696261 - RNA, 19 nt, Homo sapiens
  misc_RNA (1)...(19): siRNA sense strand
gcacagcaagcucuacaga

SEQ ID NO: 1696262 - RNA, 19 nt, Homo sapiens
  misc_RNA (1)...(19): siRNA sense strand
gcagaagucguagucauga

SEQ ID NO: 1696263 - RNA, 19 nt, Homo sapiens
  misc_RNA (1)...(19): siRNA sense strand
cgaaagagaagcaaaagua

SEQ ID NO: 1696264 - RNA, 19 nt, Homo sapiens
  misc_RNA (1)...(19): siRNA sense strand
cagcaauggcaaacaauuu

SEQ ID NO: 1696265 - RNA, 19 nt, Homo sapiens
  misc_RNA (1)...(19): siRNA sense strand
gugagagaaccuauugaua

SEQ ID NO: 1696266 - RNA, 19 nt, Homo sapiens
  misc_RNA (1)...(19): siRNA sense strand
gaacuagcaggaagaccaa

SEQ ID NO: 1696267 - RNA, 19 nt, Homo sapiens
  misc_RNA (1)...(19): siRNA sense strand
ggaagugcuggaccuauga

SEQ ID NO: 1696268 - RNA, 19 nt, Homo sapiens
  misc_RNA (1)...(19): siRNA sense strand
gcagcuggcggcaagaauu

SEQ ID NO: 1696269 - RNA, 19 nt, Homo sapiens
  misc_RNA (1)...(19): siRNA sense strand
ggaaagguucgagauguga

SEQ ID NO: 1696270 - RNA, 19 nt, Homo sapiens
  misc_RNA (1)...(19): siRNA sense strand
gaaagagaagcaaaaguaa

SEQ ID NO: 1696271 - RNA, 19 nt, Homo sapiens
  misc_RNA (1)...(19): siRNA sense strand
gcagcaauggcaaacaauu

SEQ ID NO: 1696272 - RNA, 19 nt, Homo sapiens
  misc_RNA (1)...(19): siRNA sense strand
cucagugccucuagcaaua

SEQ ID NO: 1696273 - RNA, 19 nt, Homo sapiens
  misc_RNA (1)...(19): siRNA sense strand
gaacgaaagagaagcaaaa

SEQ ID NO: 1696274 - RNA, 19 nt, Homo sapiens
  misc_RNA (1)...(19): siRNA sense strand
ggguacagguuugcagauu

SEQ ID NO: 1696275 - RNA, 19 nt, Homo sapiens
  misc_RNA (1)...(19): siRNA sense strand
caacggccaugaagaacgu

SEQ ID NO: 1696276 - RNA, 19 nt, Homo sapiens
  misc_RNA (1)...(19): siRNA sense strand
cgagaugugaggaugauuu

SEQ ID NO: 1696277 - RNA, 19 nt, Homo sapiens
  misc_RNA (1)...(19): siRNA sense strand
uaggaaagguucgagaugu

SEQ ID NO: 1696278 - RNA, 19 nt, Homo sapiens
  misc_RNA (1)...(19): siRNA sense strand
gcaaaaguccauucagaaa

SEQ ID NO: 1696279 - RNA, 19 nt, Homo sapiens
  misc_RNA (1)...(19): siRNA sense strand
gcaaaagccgugaaagaaa

SEQ ID NO: 1696280 - RNA, 19 nt, Homo sapiens
  misc_RNA (1)...(19): siRNA sense strand
cacaaccuguuuccugauu

SEQ ID NO: 1696281 - RNA, 19 nt, Homo sapiens
  misc_RNA (1)...(19): siRNA sense strand
acagaugaguggcucuuug

SEQ ID NO: 1696282 - RNA, 19 nt, Homo sapiens
  misc_RNA (1)...(19): siRNA sense strand
gguacagguuugcagauuc

SEQ ID NO: 1696283 - RNA, 19 nt, Homo sapiens
  misc_RNA (1)...(19): siRNA sense strand
ggaccuaugaggcuuuaug

SEQ ID NO: 1696284 - RNA, 19 nt, Homo sapiens
  misc_RNA (1)...(19): siRNA sense strand
aggaugaugugauugaaga

SEQ ID NO: 1696285 - RNA, 19 nt, Homo sapiens
  misc_RNA (1)...(19): siRNA sense strand
uaacauguuuaacccucaa

SEQ ID NO: 1696286 - RNA, 19 nt, Homo sapiens
  misc_RNA (1)...(19): siRNA sense strand
aaauuaagcagacgacguu

SEQ ID NO: 1696287 - RNA, 19 nt, Homo sapiens
  misc_RNA (1)...(19): siRNA sense strand
uaaggaugaugugauugaa

SEQ ID NO: 1696288 - RNA, 19 nt, Homo sapiens
  misc_RNA (1)...(19): siRNA sense strand
uaauggauuugaacuagca

SEQ ID NO: 1696289 - RNA, 19 nt, Homo sapiens
  misc_RNA (1)...(19): siRNA sense strand
gaacaacuuaauggauuug

SEQ ID NO: 1696290 - RNA, 19 nt, Homo sapiens
  misc_RNA (1)...(19): siRNA sense strand
aaagcgaaguagaagcaaa

SEQ ID NO: 1696291 - RNA, 19 nt, Homo sapiens
  misc_RNA (1)...(19): siRNA sense strand
ugaaagaaagcgaaguaga

SEQ ID NO: 1696292 - RNA, 19 nt, Homo sapiens
  misc_RNA (1)...(19): siRNA sense strand
aggauuaacuggccaacga

SEQ ID NO: 1696293 - RNA, 19 nt, Homo sapiens
  misc_RNA (1)...(19): siRNA sense strand
gcaaacaauuuacaaaagg

SEQ ID NO: 1696294 - RNA, 19 nt, Homo sapiens
  misc_RNA (1)...(19): siRNA sense strand
gcauauguaccucuuccaa

SEQ ID NO: 1696295 - RNA, 19 nt, Homo sapiens
  misc_RNA (1)...(19): siRNA sense strand
cgugaaagaaagcgaagua

SEQ ID NO: 1696296 - RNA, 19 nt, Homo sapiens
  misc_RNA (1)...(19): siRNA sense strand
gaacaacuggucgucuuca

SEQ ID NO: 1696297 - RNA, 19 nt, Homo sapiens
  misc_RNA (1)...(19): siRNA sense strand
aaugauaacagcagcauau

SEQ ID NO: 1696298 - RNA, 19 nt, Homo sapiens
  misc_RNA (1)...(19): siRNA sense strand
gcucagugccucuagcaau

SEQ ID NO: 1696299 - RNA, 19 nt, Homo sapiens
  misc_RNA (1)...(19): siRNA sense strand
uaugugaagugcccaucaa

SEQ ID NO: 1696300 - RNA, 19 nt, Homo sapiens
  misc_RNA (1)...(19): siRNA sense strand
gauuugcaaacaagacuuu

SEQ ID NO: 1696301 - RNA, 19 nt, Homo sapiens
  misc_RNA (1)...(19): siRNA sense strand
gagcaaaagccgugaaaga

SEQ ID NO: 1696302 - RNA, 19 nt, Homo sapiens
  misc_RNA (1)...(19): siRNA sense strand
gaauugauuugggaacaac

SEQ ID NO: 1696303 - RNA, 19 nt, Homo sapiens
  misc_RNA (1)...(19): siRNA sense strand
agcaauggcaaacaauuua

SEQ ID NO: 1696304 - RNA, 19 nt, Homo sapiens
  misc_RNA (1)...(19): siRNA sense strand
agcaagagcagaagucgua

SEQ ID NO: 1696305 - RNA, 19 nt, Homo sapiens
  misc_RNA (1)...(19): siRNA sense strand
uuaaggaugaugugauuga

SEQ ID NO: 1696306 - RNA, 19 nt, Homo sapiens
  misc_RNA (1)...(19): siRNA sense strand
uggaugggauaccgagauu

SEQ ID NO: 1696307 - RNA, 19 nt, Homo sapiens
  misc_RNA (1)...(19): siRNA sense strand
cuuaauggauuugaacuag

SEQ ID NO: 1696308 - RNA, 19 nt, Homo sapiens
  misc_RNA (1)...(19): siRNA sense strand
agaauucgaccaagggauu

SEQ ID NO: 1696309 - RNA, 19 nt, Homo sapiens
  misc_RNA (1)...(19): siRNA sense strand
gaauucgaccaagggauuu

SEQ ID NO: 1696310 - RNA, 19 nt, Homo sapiens
  misc_RNA (1)...(19): siRNA sense strand
caaccuguuuccugauucu

SEQ ID NO: 1696311 - RNA, 19 nt, Homo sapiens
  misc_RNA (1)...(19): siRNA sense strand
auguaccucuuccaacuua

SEQ ID NO: 1696312 - RNA, 19 nt, Homo sapiens
  misc_RNA (1)...(19): siRNA sense strand
caaaagccgugaaagaaag

SEQ ID NO: 1696313 - RNA, 19 nt, Homo sapiens
  misc_RNA (1)...(19): siRNA sense strand
cagaagucguagucaugaa

SEQ ID NO: 1696314 - RNA, 19 nt, Homo sapiens
  misc_RNA (1)...(19): siRNA sense strand
uggaagaauugaaaguauc

SEQ ID NO: 1696315 - RNA, 19 nt, Homo sapiens
  misc_RNA (1)...(19): siRNA sense strand
uaugugggcucauuacacu

SEQ ID NO: 1696316 - RNA, 19 nt, Homo sapiens
  misc_RNA (1)...(19): siRNA sense strand
cugcagcaauggcaaacaa

SEQ ID NO: 1696317 - RNA, 19 nt, Homo sapiens
  misc_RNA (1)...(19): siRNA sense strand
guaggaaagguucgagaug

SEQ ID NO: 1696318 - RNA, 19 nt, Homo sapiens
  misc_RNA (1)...(19): siRNA sense strand
gagauuaaggaugauguga

SEQ ID NO: 1696319 - RNA, 19 nt, Homo sapiens
  misc_RNA (1)...(19): siRNA sense strand
gcaauguguaugugaagug

SEQ ID NO: 1696320 - RNA, 19 nt, Homo sapiens
  misc_RNA (1)...(19): siRNA sense strand
ugaugugauugaagaaugu

SEQ ID NO: 1696321 - RNA, 19 nt, Homo sapiens
  misc_RNA (1)...(19): siRNA sense strand
aaacagagcugcagcaaug

SEQ ID NO: 1696322 - RNA, 19 nt, Homo sapiens
  misc_RNA (1)...(19): siRNA sense strand
gaaaguauccagcugauga

SEQ ID NO: 1696323 - RNA, 19 nt, Homo sapiens
  misc_RNA (1)...(19): siRNA sense strand
ggaaaggacuggaauugau

SEQ ID NO: 1696324 - RNA, 19 nt, Homo sapiens
  misc_RNA (1)...(19): siRNA sense strand
caagggauauggauuuauu

SEQ ID NO: 1696325 - RNA, 19 nt, Homo sapiens
  misc_RNA (1)...(19): siRNA sense strand
gauaacagcagcauaugua

SEQ ID NO: 1696326 - RNA, 19 nt, Homo sapiens
  misc_RNA (1)...(19): siRNA sense strand
gauuaaggaugaugugauu

SEQ ID NO: 1696327 - RNA, 19 nt, Homo sapiens
  misc_RNA (1)...(19): siRNA sense strand
ggaacaacuuaauggauuu

SEQ ID NO: 1696328 - RNA, 19 nt, Homo sapiens
  misc_RNA (1)...(19): siRNA sense strand
ccaaaggaauugcuuaugu

SEQ ID NO: 1696329 - RNA, 19 nt, Homo sapiens
  misc_RNA (1)...(19): siRNA sense strand
gcaggugguuugcugguaa

SEQ ID NO: 1696330 - RNA, 19 nt, Homo sapiens
  misc_RNA (1)...(19): siRNA sense strand
ccaacucucuaacauguuu

SEQ ID NO: 1696331 - RNA, 19 nt, Homo sapiens
  misc_RNA (1)...(19): siRNA sense strand
gaaaggacuggaauugauu

SEQ ID NO: 1696332 - RNA, 19 nt, Homo sapiens
  misc_RNA (1)...(19): siRNA sense strand
caaaggaauugcuuaugug

SEQ ID NO: 1696333 - RNA, 19 nt, Homo sapiens
  misc_RNA (1)...(19): siRNA sense strand
gaaaguuggucauguuacu

SEQ ID NO: 1696334 - RNA, 19 nt, Homo sapiens
  misc_RNA (1)...(19): siRNA sense strand
gaugggauaccgagauuaa

SEQ ID NO: 1696335 - RNA, 19 nt, Homo sapiens
  misc_RNA (1)...(19): siRNA sense strand
caagggauuuggaagaguu

SEQ ID NO: 1696336 - RNA, 19 nt, Homo sapiens
  misc_RNA (1)...(19): siRNA sense strand
uggaacaacuuaauggauu

SEQ ID NO: 1696337 - RNA, 19 nt, Homo sapiens
  misc_RNA (1)...(19): siRNA sense strand
gacagaaauucaagacguu

SEQ ID NO: 1696338 - RNA, 19 nt, Homo sapiens
  misc_RNA (1)...(19): siRNA sense strand
gaagaaguuggaugggaua

SEQ ID NO: 1696339 - RNA, 19 nt, Homo sapiens
  misc_RNA (1)...(19): siRNA sense strand
gggaagugcuggaccuaug

SEQ ID NO: 1696340 - RNA, 19 nt, Homo sapiens
  misc_RNA (1)...(19): siRNA sense strand
gggaacaacuggucgucuu

SEQ ID NO: 1696341 - RNA, 19 nt, Homo sapiens
  misc_RNA (1)...(19): siRNA sense strand
auaccgagauuaaggauga

SEQ ID NO: 1696342 - RNA, 19 nt, Homo sapiens
  misc_RNA (1)...(19): siRNA sense strand
acagcaagcucuacagaug

SEQ ID NO: 1696343 - RNA, 19 nt, Homo sapiens
  misc_RNA (1)...(19): siRNA sense strand
ggaauugauuugggaacaa

SEQ ID NO: 1696344 - RNA, 19 nt, Homo sapiens
  misc_RNA (1)...(19): siRNA sense strand
gcaggaagaccaaugaaag

SEQ ID NO: 1696345 - RNA, 19 nt, Homo sapiens
  misc_RNA (1)...(19): siRNA sense strand
caacuuaccacaaccuguu

SEQ ID NO: 1696346 - RNA, 19 nt, Homo sapiens
  misc_RNA (1)...(19): siRNA sense strand
ucaaacagaagaagaaguu

SEQ ID NO: 1696347 - RNA, 19 nt, Homo sapiens
  misc_RNA (1)...(19): siRNA sense strand
gaguggcucuuuggcauuu

SEQ ID NO: 1696348 - RNA, 19 nt, Homo sapiens
  misc_RNA (1)...(19): siRNA sense strand
ggaagaccaaugaaaguug

SEQ ID NO: 1696349 - RNA, 19 nt, Homo sapiens
  misc_RNA (1)...(19): siRNA sense strand
gaacuggaaaggacuggaa

SEQ ID NO: 1696350 - RNA, 19 nt, Homo sapiens
  misc_RNA (1)...(19): siRNA sense strand
gugaagugcccaucaauug

SEQ ID NO: 1696351 - RNA, 19 nt, Homo sapiens
  misc_RNA (1)...(19): siRNA sense strand
gcacagcaagcucuacaga

SEQ ID NO: 1696352 - RNA, 19 nt, Homo sapiens
  misc_RNA (1)...(19): siRNA sense strand
cagcaauggcaaacaauuu

SEQ ID NO: 1696353 - RNA, 19 nt, Homo sapiens
  misc_RNA (1)...(19): siRNA sense strand
gcagcuggcggcaagaauu

SEQ ID NO: 1696354 - RNA, 19 nt, Homo sapiens
  misc_RNA (1)...(19): siRNA sense strand
gaacuagcaggaagaccaa

SEQ ID NO: 1696355 - RNA, 19 nt, Homo sapiens
  misc_RNA (1)...(19): siRNA sense strand
ggaagugcuggaccuauga

SEQ ID NO: 1696356 - RNA, 19 nt, Homo sapiens
  misc_RNA (1)...(19): siRNA sense strand
cucagugccucuagcaaua

SEQ ID NO: 1696357 - RNA, 19 nt, Homo sapiens
  misc_RNA (1)...(19): siRNA sense strand
ggaaagguucgagauguga

SEQ ID NO: 1696358 - RNA, 19 nt, Homo sapiens
  misc_RNA (1)...(19): siRNA sense strand
gcagcaauggcaaacaauu

SEQ ID NO: 1696359 - RNA, 19 nt, Homo sapiens
  misc_RNA (1)...(19): siRNA sense strand
cgagaugugaggaugauuu

SEQ ID NO: 1696360 - RNA, 19 nt, Homo sapiens
  misc_RNA (1)...(19): siRNA sense strand
uaggaaagguucgagaugu

SEQ ID NO: 1696361 - RNA, 19 nt, Homo sapiens
  misc_RNA (1)...(19): siRNA sense strand
ggguacagguuugcagauu

SEQ ID NO: 1696362 - RNA, 19 nt, Homo sapiens
  misc_RNA (1)...(19): siRNA sense strand
gguacagguuugcagauuc

SEQ ID NO: 1696363 - RNA, 19 nt, Homo sapiens
  misc_RNA (1)...(19): siRNA sense strand
cacaaccuguuuccugauu

SEQ ID NO: 1696364 - RNA, 19 nt, Homo sapiens
  misc_RNA (1)...(19): siRNA sense strand
acagaugaguggcucuuug

SEQ ID NO: 1696365 - RNA, 19 nt, Homo sapiens
  misc_RNA (1)...(19): siRNA sense strand
ggaccuaugaggcuuuaug

SEQ ID NO: 1696366 - RNA, 19 nt, Homo sapiens
  misc_RNA (1)...(19): siRNA sense strand
aggaugaugugauugaaga

SEQ ID NO: 1696367 - RNA, 19 nt, Homo sapiens
  misc_RNA (1)...(19): siRNA sense strand
uaacauguuuaacccucaa

SEQ ID NO: 1696368 - RNA, 19 nt, Homo sapiens
  misc_RNA (1)...(19): siRNA sense strand
gaacaacuuaauggauuug

SEQ ID NO: 1696369 - RNA, 19 nt, Homo sapiens
  misc_RNA (1)...(19): siRNA sense strand
uaaggaugaugugauugaa

SEQ ID NO: 1696370 - RNA, 19 nt, Homo sapiens
  misc_RNA (1)...(19): siRNA sense strand
uaauggauuugaacuagca

SEQ ID NO: 1696371 - RNA, 19 nt, Homo sapiens
  misc_RNA (1)...(19): siRNA sense strand
aggauuaacuggccaacga

SEQ ID NO: 1696372 - RNA, 19 nt, Homo sapiens
  misc_RNA (1)...(19): siRNA sense strand
gcaaacaauuuacaaaagg

SEQ ID NO: 1696373 - RNA, 19 nt, Homo sapiens
  misc_RNA (1)...(19): siRNA sense strand
gcauauguaccucuuccaa

SEQ ID NO: 1696374 - RNA, 19 nt, Homo sapiens
  misc_RNA (1)...(19): siRNA sense strand
gaacaacuggucgucuuca

SEQ ID NO: 1696375 - RNA, 19 nt, Homo sapiens
  misc_RNA (1)...(19): siRNA sense strand
aaugauaacagcagcauau

SEQ ID NO: 1696376 - RNA, 19 nt, Homo sapiens
  misc_RNA (1)...(19): siRNA sense strand
agcaauggcaaacaauuua

SEQ ID NO: 1696377 - RNA, 19 nt, Homo sapiens
  misc_RNA (1)...(19): siRNA sense strand
uaugugaagugcccaucaa

SEQ ID NO: 1696378 - RNA, 19 nt, Homo sapiens
  misc_RNA (1)...(19): siRNA sense strand
gauuugcaaacaagacuuu

SEQ ID NO: 1696379 - RNA, 19 nt, Homo sapiens
  misc_RNA (1)...(19): siRNA sense strand
gaauugauuugggaacaac

SEQ ID NO: 1696380 - RNA, 19 nt, Homo sapiens
  misc_RNA (1)...(19): siRNA sense strand
gcucagugccucuagcaau

SEQ ID NO: 1696381 - RNA, 19 nt, Homo sapiens
  misc_RNA (1)...(19): siRNA sense strand
cuuaauggauuugaacuag

SEQ ID NO: 1696382 - RNA, 19 nt, Homo sapiens
  misc_RNA (1)...(19): siRNA sense strand
uuaaggaugaugugauuga

SEQ ID NO: 1696383 - RNA, 19 nt, Homo sapiens
  misc_RNA (1)...(19): siRNA sense strand
agaauucgaccaagggauu

SEQ ID NO: 1696384 - RNA, 19 nt, Homo sapiens
  misc_RNA (1)...(19): siRNA sense strand
uggaugggauaccgagauu

SEQ ID NO: 1696385 - RNA, 19 nt, Homo sapiens
  misc_RNA (1)...(19): siRNA sense strand
cugcagcaauggcaaacaa

SEQ ID NO: 1696386 - RNA, 19 nt, Homo sapiens
  misc_RNA (1)...(19): siRNA sense strand
caaccuguuuccugauucu

SEQ ID NO: 1696387 - RNA, 19 nt, Homo sapiens
  misc_RNA (1)...(19): siRNA sense strand
auguaccucuuccaacuua

SEQ ID NO: 1696388 - RNA, 19 nt, Homo sapiens
  misc_RNA (1)...(19): siRNA sense strand
guaggaaagguucgagaug

SEQ ID NO: 1696389 - RNA, 19 nt, Homo sapiens
  misc_RNA (1)...(19): siRNA sense strand
gaauucgaccaagggauuu

SEQ ID NO: 1696390 - RNA, 19 nt, Homo sapiens
  misc_RNA (1)...(19): siRNA sense strand
uggaagaauugaaaguauc

SEQ ID NO: 1696391 - RNA, 19 nt, Homo sapiens
  misc_RNA (1)...(19): siRNA sense strand
uaugugggcucauuacacu

SEQ ID NO: 1696392 - RNA, 19 nt, Homo sapiens
  misc_RNA (1)...(19): siRNA sense strand
gccucuagcaauaggauua

SEQ ID NO: 1696393 - RNA, 19 nt, Homo sapiens
  misc_RNA (1)...(19): siRNA sense strand
gcaauguguaugugaagug

SEQ ID NO: 1696394 - RNA, 19 nt, Homo sapiens
  misc_RNA (1)...(19): siRNA sense strand
ugaugugauugaagaaugu

SEQ ID NO: 1696395 - RNA, 19 nt, Homo sapiens
  misc_RNA (1)...(19): siRNA sense strand
gagauuaaggaugauguga

SEQ ID NO: 1696396 - RNA, 19 nt, Homo sapiens
  misc_RNA (1)...(19): siRNA sense strand
cagcaagcucuacagauga

SEQ ID NO: 1696397 - RNA, 19 nt, Homo sapiens
  misc_RNA (1)...(19): siRNA sense strand
ugacucagaaugugccaaa

SEQ ID NO: 1696398 - RNA, 19 nt, Homo sapiens
  misc_RNA (1)...(19): siRNA sense strand
cucauuacacuucaacaua

SEQ ID NO: 1696399 - RNA, 19 nt, Homo sapiens
  misc_RNA (1)...(19): siRNA sense strand
gagaugugaggaugauuuc

SEQ ID NO: 1696400 - RNA, 19 nt, Homo sapiens
  misc_RNA (1)...(19): siRNA sense strand
gaugugaggaugauuucug

SEQ ID NO: 1696401 - RNA, 19 nt, Homo sapiens
  misc_RNA (1)...(19): siRNA sense strand
acacaauguuuccaacucu

SEQ ID NO: 1696402 - RNA, 19 nt, Homo sapiens
  misc_RNA (1)...(19): siRNA sense strand
guacagguuugcagauucc

SEQ ID NO: 1696403 - RNA, 19 nt, Homo sapiens
  misc_RNA (1)...(19): siRNA sense strand
uucaagacguuccaaagga

SEQ ID NO: 1696404 - RNA, 19 nt, Homo sapiens
  misc_RNA (1)...(19): siRNA sense strand
aaauucagcucagggcaau

SEQ ID NO: 1696405 - RNA, 19 nt, Homo sapiens
  misc_RNA (1)...(19): siRNA sense strand
uuccaacucucuaacaugu

SEQ ID NO: 1696406 - RNA, 19 nt, Homo sapiens
  misc_RNA (1)...(19): siRNA sense strand
ggaacaacuggucgucuuc

SEQ ID NO: 1696407 - RNA, 19 nt, Homo sapiens
  misc_RNA (1)...(19): siRNA sense strand
gaugauggacagugaaacu

SEQ ID NO: 1696408 - RNA, 19 nt, Homo sapiens
  misc_RNA (1)...(19): siRNA sense strand
ggcaggugguuugcuggua

SEQ ID NO: 1696409 - RNA, 19 nt, Homo sapiens
  misc_RNA (1)...(19): siRNA sense strand
gagcugcagcaauggcaaa

SEQ ID NO: 1696410 - RNA, 19 nt, Homo sapiens
  misc_RNA (1)...(19): siRNA sense strand
gaauugcuuauguggaguu

SEQ ID NO: 1696411 - RNA, 19 nt, Homo sapiens
  misc_RNA (1)...(19): siRNA sense strand
caacuuaauggauuugaac

SEQ ID NO: 1696412 - RNA, 19 nt, Homo sapiens
  misc_RNA (1)...(19): siRNA sense strand
cagcucagggcaaugugua

SEQ ID NO: 1696413 - RNA, 19 nt, Homo sapiens
  misc_RNA (1)...(19): siRNA sense strand
caggugguuugcugguaaa

SEQ ID NO: 1696414 - RNA, 19 nt, Homo sapiens
  misc_RNA (1)...(19): siRNA sense strand
gcaauggcaaacaauuuac

SEQ ID NO: 1696415 - RNA, 19 nt, Homo sapiens
  misc_RNA (1)...(19): siRNA sense strand
gaagugcccaucaauugcu

SEQ ID NO: 1696416 - RNA, 19 nt, Homo sapiens
  misc_RNA (1)...(19): siRNA sense strand
aaaggacuggaauugauuu

SEQ ID NO: 1696417 - RNA, 19 nt, Homo sapiens
  misc_RNA (1)...(19): siRNA sense strand
gaaauucaagacguuccaa

SEQ ID NO: 1696418 - RNA, 19 nt, Homo sapiens
  misc_RNA (1)...(19): siRNA sense strand
caggaagaccaaugaaagu

SEQ ID NO: 1696419 - RNA, 19 nt, Homo sapiens
  misc_RNA (1)...(19): siRNA sense strand
uugcagaggguacagguuu

SEQ ID NO: 1696420 - RNA, 19 nt, Homo sapiens
  misc_RNA (1)...(19): siRNA sense strand
uucgagugcuaguucauuu

SEQ ID NO: 1696421 - RNA, 19 nt, Homo sapiens
  misc_RNA (1)...(19): siRNA sense strand
aaacagagcugcagcaaug

SEQ ID NO: 1696422 - RNA, 19 nt, Homo sapiens
  misc_RNA (1)...(19): siRNA sense strand
gaaaguauccagcugauga

SEQ ID NO: 1696423 - RNA, 19 nt, Homo sapiens
  misc_RNA (1)...(19): siRNA sense strand
ggaaaggacuggaauugau

SEQ ID NO: 1696424 - RNA, 19 nt, Homo sapiens
  misc_RNA (1)...(19): siRNA sense strand
caagggauauggauuuauu

SEQ ID NO: 1696425 - RNA, 19 nt, Homo sapiens
  misc_RNA (1)...(19): siRNA sense strand
gauaacagcagcauaugua

SEQ ID NO: 1696426 - RNA, 19 nt, Homo sapiens
  misc_RNA (1)...(19): siRNA sense strand
gauuaaggaugaugugauu

SEQ ID NO: 1696427 - RNA, 19 nt, Homo sapiens
  misc_RNA (1)...(19): siRNA sense strand
ggaacaacuuaauggauuu

SEQ ID NO: 1696428 - RNA, 19 nt, Homo sapiens
  misc_RNA (1)...(19): siRNA sense strand
ccaaaggaauugcuuaugu

SEQ ID NO: 1696429 - RNA, 19 nt, Homo sapiens
  misc_RNA (1)...(19): siRNA sense strand
gcaggugguuugcugguaa

SEQ ID NO: 1696430 - RNA, 19 nt, Homo sapiens
  misc_RNA (1)...(19): siRNA sense strand
ccaacucucuaacauguuu

SEQ ID NO: 1696431 - RNA, 19 nt, Homo sapiens
  misc_RNA (1)...(19): siRNA sense strand
gaaaggacuggaauugauu

SEQ ID NO: 1696432 - RNA, 19 nt, Homo sapiens
  misc_RNA (1)...(19): siRNA sense strand
caaaggaauugcuuaugug

SEQ ID NO: 1696433 - RNA, 19 nt, Homo sapiens
  misc_RNA (1)...(19): siRNA sense strand
gaaaguuggucauguuacu

SEQ ID NO: 1696434 - RNA, 19 nt, Homo sapiens
  misc_RNA (1)...(19): siRNA sense strand
gaugggauaccgagauuaa

SEQ ID NO: 1696435 - RNA, 19 nt, Homo sapiens
  misc_RNA (1)...(19): siRNA sense strand
caagggauuuggaagaguu

SEQ ID NO: 1696436 - RNA, 19 nt, Homo sapiens
  misc_RNA (1)...(19): siRNA sense strand
uggaacaacuuaauggauu

SEQ ID NO: 1696437 - RNA, 19 nt, Homo sapiens
  misc_RNA (1)...(19): siRNA sense strand
gacagaaauucaagacguu

SEQ ID NO: 1696438 - RNA, 19 nt, Homo sapiens
  misc_RNA (1)...(19): siRNA sense strand
gaagaaguuggaugggaua

SEQ ID NO: 1696439 - RNA, 19 nt, Homo sapiens
  misc_RNA (1)...(19): siRNA sense strand
gggaagugcuggaccuaug

SEQ ID NO: 1696440 - RNA, 19 nt, Homo sapiens
  misc_RNA (1)...(19): siRNA sense strand
gggaacaacuggucgucuu

SEQ ID NO: 1696441 - RNA, 19 nt, Homo sapiens
  misc_RNA (1)...(19): siRNA sense strand
auaccgagauuaaggauga

SEQ ID NO: 1696442 - RNA, 19 nt, Homo sapiens
  misc_RNA (1)...(19): siRNA sense strand
acagcaagcucuacagaug

SEQ ID NO: 1696443 - RNA, 19 nt, Homo sapiens
  misc_RNA (1)...(19): siRNA sense strand
ggaauugauuugggaacaa

SEQ ID NO: 1696444 - RNA, 19 nt, Homo sapiens
  misc_RNA (1)...(19): siRNA sense strand
gcaggaagaccaaugaaag

SEQ ID NO: 1696445 - RNA, 19 nt, Homo sapiens
  misc_RNA (1)...(19): siRNA sense strand
caacuuaccacaaccuguu

SEQ ID NO: 1696446 - RNA, 19 nt, Homo sapiens
  misc_RNA (1)...(19): siRNA sense strand
ucaaacagaagaagaaguu

SEQ ID NO: 1696447 - RNA, 19 nt, Homo sapiens
  misc_RNA (1)...(19): siRNA sense strand
gaguggcucuuuggcauuu

SEQ ID NO: 1696448 - RNA, 19 nt, Homo sapiens
  misc_RNA (1)...(19): siRNA sense strand
ggaagaccaaugaaaguug

SEQ ID NO: 1696449 - RNA, 19 nt, Homo sapiens
  misc_RNA (1)...(19): siRNA sense strand
gaacuggaaaggacuggaa

SEQ ID NO: 1696450 - RNA, 19 nt, Homo sapiens
  misc_RNA (1)...(19): siRNA sense strand
gugaagugcccaucaauug

SEQ ID NO: 1696451 - RNA, 19 nt, Homo sapiens
  misc_RNA (1)...(19): siRNA sense strand
gcacagcaagcucuacaga

SEQ ID NO: 1696452 - RNA, 19 nt, Homo sapiens
  misc_RNA (1)...(19): siRNA sense strand
cagcaauggcaaacaauuu

SEQ ID NO: 1696453 - RNA, 19 nt, Homo sapiens
  misc_RNA (1)...(19): siRNA sense strand
gcagcuggcggcaagaauu

SEQ ID NO: 1696454 - RNA, 19 nt, Homo sapiens
  misc_RNA (1)...(19): siRNA sense strand
gaacuagcaggaagaccaa

SEQ ID NO: 1696455 - RNA, 19 nt, Homo sapiens
  misc_RNA (1)...(19): siRNA sense strand
ggaagugcuggaccuauga

SEQ ID NO: 1696456 - RNA, 19 nt, Homo sapiens
  misc_RNA (1)...(19): siRNA sense strand
cucagugccucuagcaaua

SEQ ID NO: 1696457 - RNA, 19 nt, Homo sapiens
  misc_RNA (1)...(19): siRNA sense strand
ggaaagguucgagauguga

SEQ ID NO: 1696458 - RNA, 19 nt, Homo sapiens
  misc_RNA (1)...(19): siRNA sense strand
gcagcaauggcaaacaauu

SEQ ID NO: 1696459 - RNA, 19 nt, Homo sapiens
  misc_RNA (1)...(19): siRNA sense strand
cgagaugugaggaugauuu

SEQ ID NO: 1696460 - RNA, 19 nt, Homo sapiens
  misc_RNA (1)...(19): siRNA sense strand
uaggaaagguucgagaugu

SEQ ID NO: 1696461 - RNA, 19 nt, Homo sapiens
  misc_RNA (1)...(19): siRNA sense strand
ggguacagguuugcagauu

SEQ ID NO: 1696462 - RNA, 19 nt, Homo sapiens
  misc_RNA (1)...(19): siRNA sense strand
gguacagguuugcagauuc

SEQ ID NO: 1696463 - RNA, 19 nt, Homo sapiens
  misc_RNA (1)...(19): siRNA sense strand
cacaaccuguuuccugauu

SEQ ID NO: 1696464 - RNA, 19 nt, Homo sapiens
  misc_RNA (1)...(19): siRNA sense strand
acagaugaguggcucuuug

SEQ ID NO: 1696465 - RNA, 19 nt, Homo sapiens
  misc_RNA (1)...(19): siRNA sense strand
ggaccuaugaggcuuuaug

SEQ ID NO: 1696466 - RNA, 19 nt, Homo sapiens
  misc_RNA (1)...(19): siRNA sense strand
aggaugaugugauugaaga

SEQ ID NO: 1696467 - RNA, 19 nt, Homo sapiens
  misc_RNA (1)...(19): siRNA sense strand
uaacauguuuaacccucaa

SEQ ID NO: 1696468 - RNA, 19 nt, Homo sapiens
  misc_RNA (1)...(19): siRNA sense strand
gaacaacuuaauggauuug

SEQ ID NO: 1696469 - RNA, 19 nt, Homo sapiens
  misc_RNA (1)...(19): siRNA sense strand
uaaggaugaugugauugaa

SEQ ID NO: 1696470 - RNA, 19 nt, Homo sapiens
  misc_RNA (1)...(19): siRNA sense strand
uaauggauuugaacuagca

SEQ ID NO: 1696471 - RNA, 19 nt, Homo sapiens
  misc_RNA (1)...(19): siRNA sense strand
aggauuaacuggccaacga

SEQ ID NO: 1696472 - RNA, 19 nt, Homo sapiens
  misc_RNA (1)...(19): siRNA sense strand
gcaaacaauuuacaaaagg

SEQ ID NO: 1696473 - RNA, 19 nt, Homo sapiens
  misc_RNA (1)...(19): siRNA sense strand
gcauauguaccucuuccaa

SEQ ID NO: 1696474 - RNA, 19 nt, Homo sapiens
  misc_RNA (1)...(19): siRNA sense strand
gaacaacuggucgucuuca

SEQ ID NO: 1696475 - RNA, 19 nt, Homo sapiens
  misc_RNA (1)...(19): siRNA sense strand
aaugauaacagcagcauau

SEQ ID NO: 1696476 - RNA, 19 nt, Homo sapiens
  misc_RNA (1)...(19): siRNA sense strand
agcaauggcaaacaauuua

SEQ ID NO: 1696477 - RNA, 19 nt, Homo sapiens
  misc_RNA (1)...(19): siRNA sense strand
uaugugaagugcccaucaa

SEQ ID NO: 1696478 - RNA, 19 nt, Homo sapiens
  misc_RNA (1)...(19): siRNA sense strand
gauuugcaaacaagacuuu

SEQ ID NO: 1696479 - RNA, 19 nt, Homo sapiens
  misc_RNA (1)...(19): siRNA sense strand
gaauugauuugggaacaac

SEQ ID NO: 1696480 - RNA, 19 nt, Homo sapiens
  misc_RNA (1)...(19): siRNA sense strand
gcucagugccucuagcaau

SEQ ID NO: 1696481 - RNA, 19 nt, Homo sapiens
  misc_RNA (1)...(19): siRNA sense strand
cuuaauggauuugaacuag

SEQ ID NO: 1696482 - RNA, 19 nt, Homo sapiens
  misc_RNA (1)...(19): siRNA sense strand
uuaaggaugaugugauuga

SEQ ID NO: 1696483 - RNA, 19 nt, Homo sapiens
  misc_RNA (1)...(19): siRNA sense strand
agaauucgaccaagggauu

SEQ ID NO: 1696484 - RNA, 19 nt, Homo sapiens
  misc_RNA (1)...(19): siRNA sense strand
uggaugggauaccgagauu

SEQ ID NO: 1696485 - RNA, 19 nt, Homo sapiens
  misc_RNA (1)...(19): siRNA sense strand
cugcagcaauggcaaacaa

SEQ ID NO: 1696486 - RNA, 19 nt, Homo sapiens
  misc_RNA (1)...(19): siRNA sense strand
caaccuguuuccugauucu

SEQ ID NO: 1696487 - RNA, 19 nt, Homo sapiens
  misc_RNA (1)...(19): siRNA sense strand
auguaccucuuccaacuua

SEQ ID NO: 1696488 - RNA, 19 nt, Homo sapiens
  misc_RNA (1)...(19): siRNA sense strand
guaggaaagguucgagaug

SEQ ID NO: 1696489 - RNA, 19 nt, Homo sapiens
  misc_RNA (1)...(19): siRNA sense strand
gaauucgaccaagggauuu

SEQ ID NO: 1696490 - RNA, 19 nt, Homo sapiens
  misc_RNA (1)...(19): siRNA sense strand
uggaagaauugaaaguauc

SEQ ID NO: 1696491 - RNA, 19 nt, Homo sapiens
  misc_RNA (1)...(19): siRNA sense strand
uaugugggcucauuacacu

SEQ ID NO: 1696492 - RNA, 19 nt, Homo sapiens
  misc_RNA (1)...(19): siRNA sense strand
gccucuagcaauaggauua

SEQ ID NO: 1696493 - RNA, 19 nt, Homo sapiens
  misc_RNA (1)...(19): siRNA sense strand
gcaauguguaugugaagug

SEQ ID NO: 1696494 - RNA, 19 nt, Homo sapiens
  misc_RNA (1)...(19): siRNA sense strand
ugaugugauugaagaaugu

SEQ ID NO: 1696495 - RNA, 19 nt, Homo sapiens
  misc_RNA (1)...(19): siRNA sense strand
gagauuaaggaugauguga

SEQ ID NO: 1696496 - RNA, 19 nt, Homo sapiens
  misc_RNA (1)...(19): siRNA sense strand
cagcaagcucuacagauga

SEQ ID NO: 1696497 - RNA, 19 nt, Homo sapiens
  misc_RNA (1)...(19): siRNA sense strand
ugacucagaaugugccaaa

SEQ ID NO: 1696498 - RNA, 19 nt, Homo sapiens
  misc_RNA (1)...(19): siRNA sense strand
cucauuacacuucaacaua

SEQ ID NO: 1696499 - RNA, 19 nt, Homo sapiens
  misc_RNA (1)...(19): siRNA sense strand
gagaugugaggaugauuuc

SEQ ID NO: 1696500 - RNA, 19 nt, Homo sapiens
  misc_RNA (1)...(19): siRNA sense strand
gaugugaggaugauuucug

SEQ ID NO: 1696501 - RNA, 19 nt, Homo sapiens
  misc_RNA (1)...(19): siRNA sense strand
acacaauguuuccaacucu

SEQ ID NO: 1696502 - RNA, 19 nt, Homo sapiens
  misc_RNA (1)...(19): siRNA sense strand
guacagguuugcagauucc

SEQ ID NO: 1696503 - RNA, 19 nt, Homo sapiens
  misc_RNA (1)...(19): siRNA sense strand
uucaagacguuccaaagga

SEQ ID NO: 1696504 - RNA, 19 nt, Homo sapiens
  misc_RNA (1)...(19): siRNA sense strand
aaauucagcucagggcaau

SEQ ID NO: 1696505 - RNA, 19 nt, Homo sapiens
  misc_RNA (1)...(19): siRNA sense strand
uuccaacucucuaacaugu

SEQ ID NO: 1696506 - RNA, 19 nt, Homo sapiens
  misc_RNA (1)...(19): siRNA sense strand
ggaacaacuggucgucuuc

SEQ ID NO: 1696507 - RNA, 19 nt, Homo sapiens
  misc_RNA (1)...(19): siRNA sense strand
gaugauggacagugaaacu

SEQ ID NO: 1696508 - RNA, 19 nt, Homo sapiens
  misc_RNA (1)...(19): siRNA sense strand
ggcaggugguuugcuggua

SEQ ID NO: 1696509 - RNA, 19 nt, Homo sapiens
  misc_RNA (1)...(19): siRNA sense strand
gagcugcagcaauggcaaa

SEQ ID NO: 1696510 - RNA, 19 nt, Homo sapiens
  misc_RNA (1)...(19): siRNA sense strand
gaauugcuuauguggaguu

SEQ ID NO: 1696511 - RNA, 19 nt, Homo sapiens
  misc_RNA (1)...(19): siRNA sense strand
caacuuaauggauuugaac

SEQ ID NO: 1696512 - RNA, 19 nt, Homo sapiens
  misc_RNA (1)...(19): siRNA sense strand
cagcucagggcaaugugua

SEQ ID NO: 1696513 - RNA, 19 nt, Homo sapiens
  misc_RNA (1)...(19): siRNA sense strand
caggugguuugcugguaaa

SEQ ID NO: 1696514 - RNA, 19 nt, Homo sapiens
  misc_RNA (1)...(19): siRNA sense strand
gcaauggcaaacaauuuac

SEQ ID NO: 1696515 - RNA, 19 nt, Homo sapiens
  misc_RNA (1)...(19): siRNA sense strand
gaagugcccaucaauugcu

SEQ ID NO: 1696516 - RNA, 19 nt, Homo sapiens
  misc_RNA (1)...(19): siRNA sense strand
aaaggacuggaauugauuu

SEQ ID NO: 1696517 - RNA, 19 nt, Homo sapiens
  misc_RNA (1)...(19): siRNA sense strand
gaaauucaagacguuccaa

SEQ ID NO: 1696518 - RNA, 19 nt, Homo sapiens
  misc_RNA (1)...(19): siRNA sense strand
caggaagaccaaugaaagu

SEQ ID NO: 1696519 - RNA, 19 nt, Homo sapiens
  misc_RNA (1)...(19): siRNA sense strand
uugcagaggguacagguuu

SEQ ID NO: 1696520 - RNA, 19 nt, Homo sapiens
  misc_RNA (1)...(19): siRNA sense strand
uucgagugcuaguucauuu

SEQ ID NO: 1696521 - RNA, 19 nt, Homo sapiens
  misc_RNA (1)...(19): siRNA sense strand
aaacagagcugcagcaaug

SEQ ID NO: 1696522 - RNA, 19 nt, Homo sapiens
  misc_RNA (1)...(19): siRNA sense strand
gaaaguauccagcugauga

SEQ ID NO: 1696523 - RNA, 19 nt, Homo sapiens
  misc_RNA (1)...(19): siRNA sense strand
ggaaaggacuggaauugau

SEQ ID NO: 1696524 - RNA, 19 nt, Homo sapiens
  misc_RNA (1)...(19): siRNA sense strand
caagggauauggauuuauu

SEQ ID NO: 1696525 - RNA, 19 nt, Homo sapiens
  misc_RNA (1)...(19): siRNA sense strand
gauaacagcagcauaugua

SEQ ID NO: 1696526 - RNA, 19 nt, Homo sapiens
  misc_RNA (1)...(19): siRNA sense strand
gauuaaggaugaugugauu

SEQ ID NO: 1696527 - RNA, 19 nt, Homo sapiens
  misc_RNA (1)...(19): siRNA sense strand
ggaacaacuuaauggauuu

SEQ ID NO: 1696528 - RNA, 19 nt, Homo sapiens
  misc_RNA (1)...(19): siRNA sense strand
ccaaaggaauugcuuaugu

SEQ ID NO: 1696529 - RNA, 19 nt, Homo sapiens
  misc_RNA (1)...(19): siRNA sense strand
gcaggugguuugcugguaa

SEQ ID NO: 1696530 - RNA, 19 nt, Homo sapiens
  misc_RNA (1)...(19): siRNA sense strand
ccaacucucuaacauguuu

SEQ ID NO: 1696531 - RNA, 19 nt, Homo sapiens
  misc_RNA (1)...(19): siRNA sense strand
gaaaggacuggaauugauu

SEQ ID NO: 1696532 - RNA, 19 nt, Homo sapiens
  misc_RNA (1)...(19): siRNA sense strand
caaaggaauugcuuaugug

SEQ ID NO: 1696533 - RNA, 19 nt, Homo sapiens
  misc_RNA (1)...(19): siRNA sense strand
gaaaguuggucauguuacu

SEQ ID NO: 1696534 - RNA, 19 nt, Homo sapiens
  misc_RNA (1)...(19): siRNA sense strand
gaugggauaccgagauuaa

SEQ ID NO: 1696535 - RNA, 19 nt, Homo sapiens
  misc_RNA (1)...(19): siRNA sense strand
caagggauuuggaagaguu

SEQ ID NO: 1696536 - RNA, 19 nt, Homo sapiens
  misc_RNA (1)...(19): siRNA sense strand
uggaacaacuuaauggauu

SEQ ID NO: 1696537 - RNA, 19 nt, Homo sapiens
  misc_RNA (1)...(19): siRNA sense strand
gacagaaauucaagacguu

SEQ ID NO: 1696538 - RNA, 19 nt, Homo sapiens
  misc_RNA (1)...(19): siRNA sense strand
gaagaaguuggaugggaua

SEQ ID NO: 1696539 - RNA, 19 nt, Homo sapiens
  misc_RNA (1)...(19): siRNA sense strand
gggaagugcuggaccuaug

SEQ ID NO: 1696540 - RNA, 19 nt, Homo sapiens
  misc_RNA (1)...(19): siRNA sense strand
gggaacaacuggucgucuu

SEQ ID NO: 1696541 - RNA, 19 nt, Homo sapiens
  misc_RNA (1)...(19): siRNA sense strand
auaccgagauuaaggauga

SEQ ID NO: 1696542 - RNA, 19 nt, Homo sapiens
  misc_RNA (1)...(19): siRNA sense strand
acagcaagcucuacagaug

SEQ ID NO: 1696543 - RNA, 19 nt, Homo sapiens
  misc_RNA (1)...(19): siRNA sense strand
ggaauugauuugggaacaa

SEQ ID NO: 1696544 - RNA, 19 nt, Homo sapiens
  misc_RNA (1)...(19): siRNA sense strand
gcaggaagaccaaugaaag

SEQ ID NO: 1696545 - RNA, 19 nt, Homo sapiens
  misc_RNA (1)...(19): siRNA sense strand
caacuuaccacaaccuguu

SEQ ID NO: 1696546 - RNA, 19 nt, Homo sapiens
  misc_RNA (1)...(19): siRNA sense strand
ucaaacagaagaagaaguu

SEQ ID NO: 1696547 - RNA, 19 nt, Homo sapiens
  misc_RNA (1)...(19): siRNA sense strand
gaguggcucuuuggcauuu

SEQ ID NO: 1696548 - RNA, 19 nt, Homo sapiens
  misc_RNA (1)...(19): siRNA sense strand
ggaagaccaaugaaaguug

SEQ ID NO: 1696549 - RNA, 19 nt, Homo sapiens
  misc_RNA (1)...(19): siRNA sense strand
gaacuggaaaggacuggaa

SEQ ID NO: 1696550 - RNA, 19 nt, Homo sapiens
  misc_RNA (1)...(19): siRNA sense strand
gugaagugcccaucaauug

SEQ ID NO: 1696551 - RNA, 19 nt, Homo sapiens
  misc_RNA (1)...(19): siRNA sense strand
gcacagcaagcucuacaga

SEQ ID NO: 1696552 - RNA, 19 nt, Homo sapiens
  misc_RNA (1)...(19): siRNA sense strand
cagcaauggcaaacaauuu

SEQ ID NO: 1696553 - RNA, 19 nt, Homo sapiens
  misc_RNA (1)...(19): siRNA sense strand
gcagcuggcggcaagaauu

SEQ ID NO: 1696554 - RNA, 19 nt, Homo sapiens
  misc_RNA (1)...(19): siRNA sense strand
gaacuagcaggaagaccaa

SEQ ID NO: 1696555 - RNA, 19 nt, Homo sapiens
  misc_RNA (1)...(19): siRNA sense strand
ggaagugcuggaccuauga

SEQ ID NO: 1696556 - RNA, 19 nt, Homo sapiens
  misc_RNA (1)...(19): siRNA sense strand
cucagugccucuagcaaua

SEQ ID NO: 1696557 - RNA, 19 nt, Homo sapiens
  misc_RNA (1)...(19): siRNA sense strand
ggaaagguucgagauguga

SEQ ID NO: 1696558 - RNA, 19 nt, Homo sapiens
  misc_RNA (1)...(19): siRNA sense strand
gcagcaauggcaaacaauu

SEQ ID NO: 1696559 - RNA, 19 nt, Homo sapiens
  misc_RNA (1)...(19): siRNA sense strand
cgagaugugaggaugauuu

SEQ ID NO: 1696560 - RNA, 19 nt, Homo sapiens
  misc_RNA (1)...(19): siRNA sense strand
uaggaaagguucgagaugu

SEQ ID NO: 1696561 - RNA, 19 nt, Homo sapiens
  misc_RNA (1)...(19): siRNA sense strand
ggguacagguuugcagauu

SEQ ID NO: 1696562 - RNA, 19 nt, Homo sapiens
  misc_RNA (1)...(19): siRNA sense strand
gguacagguuugcagauuc

SEQ ID NO: 1696563 - RNA, 19 nt, Homo sapiens
  misc_RNA (1)...(19): siRNA sense strand
cacaaccuguuuccugauu

SEQ ID NO: 1696564 - RNA, 19 nt, Homo sapiens
  misc_RNA (1)...(19): siRNA sense strand
acagaugaguggcucuuug

SEQ ID NO: 1696565 - RNA, 19 nt, Homo sapiens
  misc_RNA (1)...(19): siRNA sense strand
ggaccuaugaggcuuuaug

SEQ ID NO: 1696566 - RNA, 19 nt, Homo sapiens
  misc_RNA (1)...(19): siRNA sense strand
aggaugaugugauugaaga

SEQ ID NO: 1696567 - RNA, 19 nt, Homo sapiens
  misc_RNA (1)...(19): siRNA sense strand
uaacauguuuaacccucaa

SEQ ID NO: 1696568 - RNA, 19 nt, Homo sapiens
  misc_RNA (1)...(19): siRNA sense strand
gaacaacuuaauggauuug

SEQ ID NO: 1696569 - RNA, 19 nt, Homo sapiens
  misc_RNA (1)...(19): siRNA sense strand
uaaggaugaugugauugaa

SEQ ID NO: 1696570 - RNA, 19 nt, Homo sapiens
  misc_RNA (1)...(19): siRNA sense strand
uaauggauuugaacuagca

SEQ ID NO: 1696571 - RNA, 19 nt, Homo sapiens
  misc_RNA (1)...(19): siRNA sense strand
aggauuaacuggccaacga

SEQ ID NO: 1696572 - RNA, 19 nt, Homo sapiens
  misc_RNA (1)...(19): siRNA sense strand
gcaaacaauuuacaaaagg

SEQ ID NO: 1696573 - RNA, 19 nt, Homo sapiens
  misc_RNA (1)...(19): siRNA sense strand
gcauauguaccucuuccaa

SEQ ID NO: 1696574 - RNA, 19 nt, Homo sapiens
  misc_RNA (1)...(19): siRNA sense strand
gaacaacuggucgucuuca

SEQ ID NO: 1696575 - RNA, 19 nt, Homo sapiens
  misc_RNA (1)...(19): siRNA sense strand
aaugauaacagcagcauau

SEQ ID NO: 1696576 - RNA, 19 nt, Homo sapiens
  misc_RNA (1)...(19): siRNA sense strand
agcaauggcaaacaauuua

SEQ ID NO: 1696577 - RNA, 19 nt, Homo sapiens
  misc_RNA (1)...(19): siRNA sense strand
uaugugaagugcccaucaa

SEQ ID NO: 1696578 - RNA, 19 nt, Homo sapiens
  misc_RNA (1)...(19): siRNA sense strand
gauuugcaaacaagacuuu

SEQ ID NO: 1696579 - RNA, 19 nt, Homo sapiens
  misc_RNA (1)...(19): siRNA sense strand
gaauugauuugggaacaac

SEQ ID NO: 1696580 - RNA, 19 nt, Homo sapiens
  misc_RNA (1)...(19): siRNA sense strand
gcucagugccucuagcaau

SEQ ID NO: 1696581 - RNA, 19 nt, Homo sapiens
  misc_RNA (1)...(19): siRNA sense strand
cuuaauggauuugaacuag

SEQ ID NO: 1696582 - RNA, 19 nt, Homo sapiens
  misc_RNA (1)...(19): siRNA sense strand
uuaaggaugaugugauuga

SEQ ID NO: 1696583 - RNA, 19 nt, Homo sapiens
  misc_RNA (1)...(19): siRNA sense strand
agaauucgaccaagggauu

SEQ ID NO: 1696584 - RNA, 19 nt, Homo sapiens
  misc_RNA (1)...(19): siRNA sense strand
uggaugggauaccgagauu

SEQ ID NO: 1696585 - RNA, 19 nt, Homo sapiens
  misc_RNA (1)...(19): siRNA sense strand
cugcagcaauggcaaacaa

SEQ ID NO: 1696586 - RNA, 19 nt, Homo sapiens
  misc_RNA (1)...(19): siRNA sense strand
caaccuguuuccugauucu

SEQ ID NO: 1696587 - RNA, 19 nt, Homo sapiens
  misc_RNA (1)...(19): siRNA sense strand
auguaccucuuccaacuua

SEQ ID NO: 1696588 - RNA, 19 nt, Homo sapiens
  misc_RNA (1)...(19): siRNA sense strand
guaggaaagguucgagaug

SEQ ID NO: 1696589 - RNA, 19 nt, Homo sapiens
  misc_RNA (1)...(19): siRNA sense strand
gaauucgaccaagggauuu

SEQ ID NO: 1696590 - RNA, 19 nt, Homo sapiens
  misc_RNA (1)...(19): siRNA sense strand
uggaagaauugaaaguauc

SEQ ID NO: 1696591 - RNA, 19 nt, Homo sapiens
  misc_RNA (1)...(19): siRNA sense strand
uaugugggcucauuacacu

SEQ ID NO: 1696592 - RNA, 19 nt, Homo sapiens
  misc_RNA (1)...(19): siRNA sense strand
gccucuagcaauaggauua

SEQ ID NO: 1696593 - RNA, 19 nt, Homo sapiens
  misc_RNA (1)...(19): siRNA sense strand
gcaauguguaugugaagug

SEQ ID NO: 1696594 - RNA, 19 nt, Homo sapiens
  misc_RNA (1)...(19): siRNA sense strand
ugaugugauugaagaaugu

SEQ ID NO: 1696595 - RNA, 19 nt, Homo sapiens
  misc_RNA (1)...(19): siRNA sense strand
gagauuaaggaugauguga

SEQ ID NO: 1696596 - RNA, 19 nt, Homo sapiens
  misc_RNA (1)...(19): siRNA sense strand
cagcaagcucuacagauga

SEQ ID NO: 1696597 - RNA, 19 nt, Homo sapiens
  misc_RNA (1)...(19): siRNA sense strand
ugacucagaaugugccaaa

SEQ ID NO: 1696598 - RNA, 19 nt, Homo sapiens
  misc_RNA (1)...(19): siRNA sense strand
cucauuacacuucaacaua

SEQ ID NO: 1696599 - RNA, 19 nt, Homo sapiens
  misc_RNA (1)...(19): siRNA sense strand
gagaugugaggaugauuuc

SEQ ID NO: 1696600 - RNA, 19 nt, Homo sapiens
  misc_RNA (1)...(19): siRNA sense strand
gaugugaggaugauuucug

SEQ ID NO: 1696601 - RNA, 19 nt, Homo sapiens
  misc_RNA (1)...(19): siRNA sense strand
acacaauguuuccaacucu

SEQ ID NO: 1696602 - RNA, 19 nt, Homo sapiens
  misc_RNA (1)...(19): siRNA sense strand
guacagguuugcagauucc

SEQ ID NO: 1696603 - RNA, 19 nt, Homo sapiens
  misc_RNA (1)...(19): siRNA sense strand
uucaagacguuccaaagga

SEQ ID NO: 1696604 - RNA, 19 nt, Homo sapiens
  misc_RNA (1)...(19): siRNA sense strand
aaauucagcucagggcaau

SEQ ID NO: 1696605 - RNA, 19 nt, Homo sapiens
  misc_RNA (1)...(19): siRNA sense strand
uuccaacucucuaacaugu

SEQ ID NO: 1696606 - RNA, 19 nt, Homo sapiens
  misc_RNA (1)...(19): siRNA sense strand
ggaacaacuggucgucuuc

SEQ ID NO: 1696607 - RNA, 19 nt, Homo sapiens
  misc_RNA (1)...(19): siRNA sense strand
gaugauggacagugaaacu

SEQ ID NO: 1696608 - RNA, 19 nt, Homo sapiens
  misc_RNA (1)...(19): siRNA sense strand
ggcaggugguuugcuggua

SEQ ID NO: 1696609 - RNA, 19 nt, Homo sapiens
  misc_RNA (1)...(19): siRNA sense strand
gagcugcagcaauggcaaa

SEQ ID NO: 1696610 - RNA, 19 nt, Homo sapiens
  misc_RNA (1)...(19): siRNA sense strand
gaauugcuuauguggaguu

SEQ ID NO: 1696611 - RNA, 19 nt, Homo sapiens
  misc_RNA (1)...(19): siRNA sense strand
caacuuaauggauuugaac

SEQ ID NO: 1696612 - RNA, 19 nt, Homo sapiens
  misc_RNA (1)...(19): siRNA sense strand
cagcucagggcaaugugua

SEQ ID NO: 1696613 - RNA, 19 nt, Homo sapiens
  misc_RNA (1)...(19): siRNA sense strand
caggugguuugcugguaaa

SEQ ID NO: 1696614 - RNA, 19 nt, Homo sapiens
  misc_RNA (1)...(19): siRNA sense strand
gcaauggcaaacaauuuac

SEQ ID NO: 1696615 - RNA, 19 nt, Homo sapiens
  misc_RNA (1)...(19): siRNA sense strand
gaagugcccaucaauugcu

SEQ ID NO: 1696616 - RNA, 19 nt, Homo sapiens
  misc_RNA (1)...(19): siRNA sense strand
aaaggacuggaauugauuu

SEQ ID NO: 1696617 - RNA, 19 nt, Homo sapiens
  misc_RNA (1)...(19): siRNA sense strand
gaaauucaagacguuccaa

SEQ ID NO: 1696618 - RNA, 19 nt, Homo sapiens
  misc_RNA (1)...(19): siRNA sense strand
caggaagaccaaugaaagu

SEQ ID NO: 1696619 - RNA, 19 nt, Homo sapiens
  misc_RNA (1)...(19): siRNA sense strand
uugcagaggguacagguuu

SEQ ID NO: 1696620 - RNA, 19 nt, Homo sapiens
  misc_RNA (1)...(19): siRNA sense strand
uucgagugcuaguucauuu

SEQ ID NO: 1696621 - RNA, 19 nt, Homo sapiens
  misc_RNA (1)...(19): siRNA sense strand
ggaaggaacugaccgacuu

SEQ ID NO: 1696622 - RNA, 19 nt, Homo sapiens
  misc_RNA (1)...(19): siRNA sense strand
cugacaaacuggaagauga

SEQ ID NO: 1696623 - RNA, 19 nt, Homo sapiens
  misc_RNA (1)...(19): siRNA sense strand
caaacuggaagaugagaaa

SEQ ID NO: 1696624 - RNA, 19 nt, Homo sapiens
  misc_RNA (1)...(19): siRNA sense strand
gucaggagcugcaguggau

SEQ ID NO: 1696625 - RNA, 19 nt, Homo sapiens
  misc_RNA (1)...(19): siRNA sense strand
gcggagacccauccucuga

SEQ ID NO: 1696626 - RNA, 19 nt, Homo sapiens
  misc_RNA (1)...(19): siRNA sense strand
uugaggagcugcagaagca

SEQ ID NO: 1696627 - RNA, 19 nt, Homo sapiens
  misc_RNA (1)...(19): siRNA sense strand
ccaagcaucaacaccauga

SEQ ID NO: 1696628 - RNA, 19 nt, Homo sapiens
  misc_RNA (1)...(19): siRNA sense strand
cuccaacccuccucgcuuu

SEQ ID NO: 1696629 - RNA, 19 nt, Homo sapiens
  misc_RNA (1)...(19): siRNA sense strand
ggaugguacagccucauuu

SEQ ID NO: 1696630 - RNA, 19 nt, Homo sapiens
  misc_RNA (1)...(19): siRNA sense strand
gaugguacagccucauuuc

SEQ ID NO: 1696631 - RNA, 19 nt, Homo sapiens
  misc_RNA (1)...(19): siRNA sense strand
gcaggaaccggaggaagga

SEQ ID NO: 1696632 - RNA, 19 nt, Homo sapiens
  misc_RNA (1)...(19): siRNA sense strand
gcagaaggagcgccuagag

SEQ ID NO: 1696633 - RNA, 19 nt, Homo sapiens
  misc_RNA (1)...(19): siRNA sense strand
ggcggagacugacaaacug

SEQ ID NO: 1696634 - RNA, 19 nt, Homo sapiens
  misc_RNA (1)...(19): siRNA sense strand
ccaccgacccaucugcaaa

SEQ ID NO: 1696635 - RNA, 19 nt, Homo sapiens
  misc_RNA (1)...(19): siRNA sense strand
gaccacacccucccuaacu

SEQ ID NO: 1696636 - RNA, 19 nt, Homo sapiens
  misc_RNA (1)...(19): siRNA sense strand
gcucaucgcaagaguagca

SEQ ID NO: 1696637 - RNA, 19 nt, Homo sapiens
  misc_RNA (1)...(19): siRNA sense strand
cgaaggccuugugaacaga

SEQ ID NO: 1696638 - RNA, 19 nt, Homo sapiens
  misc_RNA (1)...(19): siRNA sense strand
cacccucccuaacuccuuu

SEQ ID NO: 1696639 - RNA, 19 nt, Homo sapiens
  misc_RNA (1)...(19): siRNA sense strand
ucgaaggccuugugaacag

SEQ ID NO: 1696640 - RNA, 19 nt, Homo sapiens
  misc_RNA (1)...(19): siRNA sense strand
caacccuccucgcuuugug

SEQ ID NO: 1696641 - RNA, 19 nt, Homo sapiens
  misc_RNA (1)...(19): siRNA sense strand
ggagacugacaaacuggaa

SEQ ID NO: 1696642 - RNA, 19 nt, Homo sapiens
  misc_RNA (1)...(19): siRNA sense strand
guacgucgaaggccuugug

SEQ ID NO: 1696643 - RNA, 19 nt, Homo sapiens
  misc_RNA (1)...(19): siRNA sense strand
guaaggcgcgagcggaaca

SEQ ID NO: 1696644 - RNA, 19 nt, Homo sapiens
  misc_RNA (1)...(19): siRNA sense strand
gcaggcggagacugacaaa

SEQ ID NO: 1696645 - RNA, 19 nt, Homo sapiens
  misc_RNA (1)...(19): siRNA sense strand
uaccuuguaucucccuuuc

SEQ ID NO: 1696646 - RNA, 19 nt, Homo sapiens
  misc_RNA (1)...(19): siRNA sense strand
cagcucaucgcaagaguag

SEQ ID NO: 1696647 - RNA, 19 nt, Homo sapiens
  misc_RNA (1)...(19): siRNA sense strand
gaagcccaccgacccaucu

SEQ ID NO: 1696648 - RNA, 19 nt, Homo sapiens
  misc_RNA (1)...(19): siRNA sense strand
ugaccuacccucaguacag

SEQ ID NO: 1696649 - RNA, 19 nt, Homo sapiens
  misc_RNA (1)...(19): siRNA sense strand
gaucagcccggaggaagag

SEQ ID NO: 1696650 - RNA, 19 nt, Homo sapiens
  misc_RNA (1)...(19): siRNA sense strand
guaccuuguaucucccuuu

SEQ ID NO: 1696651 - RNA, 19 nt, Homo sapiens
  misc_RNA (1)...(19): siRNA sense strand
ggaucaagcuuacauauaa

SEQ ID NO: 1696652 - RNA, 19 nt, Homo sapiens
  misc_RNA (1)...(19): siRNA sense strand
gaagauagaauucaccuuu

SEQ ID NO: 1696653 - RNA, 19 nt, Homo sapiens
  misc_RNA (1)...(19): siRNA sense strand
gaaagaaugugcugcaauc

SEQ ID NO: 1696654 - RNA, 19 nt, Homo sapiens
  misc_RNA (1)...(19): siRNA sense strand
ggaagagccuauucaggua

SEQ ID NO: 1696655 - RNA, 19 nt, Homo sapiens
  misc_RNA (1)...(19): siRNA sense strand
gaaguuauguucgugauga

SEQ ID NO: 1696656 - RNA, 19 nt, Homo sapiens
  misc_RNA (1)...(19): siRNA sense strand
gagaaugccugucauggaa

SEQ ID NO: 1696657 - RNA, 19 nt, Homo sapiens
  misc_RNA (1)...(19): siRNA sense strand
gaaagucucugcagcuugu

SEQ ID NO: 1696658 - RNA, 19 nt, Homo sapiens
  misc_RNA (1)...(19): siRNA sense strand
caagaaauaugaccacaug

SEQ ID NO: 1696659 - RNA, 19 nt, Homo sapiens
  misc_RNA (1)...(19): siRNA sense strand
gagaaaugauccagaaaga

SEQ ID NO: 1696660 - RNA, 19 nt, Homo sapiens
  misc_RNA (1)...(19): siRNA sense strand
gagaagaagacaauacaua

SEQ ID NO: 1696661 - RNA, 19 nt, Homo sapiens
  misc_RNA (1)...(19): siRNA sense strand
gaaaugauccagaaagaau

SEQ ID NO: 1696662 - RNA, 19 nt, Homo sapiens
  misc_RNA (1)...(19): siRNA sense strand
gaugaaguguuggauauuu

SEQ ID NO: 1696663 - RNA, 19 nt, Homo sapiens
  misc_RNA (1)...(19): siRNA sense strand
gcacagagcuagauaugac

SEQ ID NO: 1696664 - RNA, 19 nt, Homo sapiens
  misc_RNA (1)...(19): siRNA sense strand
caaacgcauuggcuauuua

SEQ ID NO: 1696665 - RNA, 19 nt, Homo sapiens
  misc_RNA (1)...(19): siRNA sense strand
gaaaguguccuaaucucua

SEQ ID NO: 1696666 - RNA, 19 nt, Homo sapiens
  misc_RNA (1)...(19): siRNA sense strand
gcagagggcaguagaauau

SEQ ID NO: 1696667 - RNA, 19 nt, Homo sapiens
  misc_RNA (1)...(19): siRNA sense strand
gggcuacccugcucacuuu

SEQ ID NO: 1696668 - RNA, 19 nt, Homo sapiens
  misc_RNA (1)...(19): siRNA sense strand
uaaagaaccucaucauguc

SEQ ID NO: 1696669 - RNA, 19 nt, Homo sapiens
  misc_RNA (1)...(19): siRNA sense strand
uagcacagguugccacuaa

SEQ ID NO: 1696670 - RNA, 19 nt, Homo sapiens
  misc_RNA (1)...(19): siRNA sense strand
uagcagaggugaacaacuu

SEQ ID NO: 1696671 - RNA, 19 nt, Homo sapiens
  misc_RNA (1)...(19): siRNA sense strand
caagugaagcuaugaauga

SEQ ID NO: 1696672 - RNA, 19 nt, Homo sapiens
  misc_RNA (1)...(19): siRNA sense strand
cagccucucuucaaugaua

SEQ ID NO: 1696673 - RNA, 19 nt, Homo sapiens
  misc_RNA (1)...(19): siRNA sense strand
gcucugacaucuuuguuga

SEQ ID NO: 1696674 - RNA, 19 nt, Homo sapiens
  misc_RNA (1)...(19): siRNA sense strand
gcaauccggucaucuuuua

SEQ ID NO: 1696675 - RNA, 19 nt, Homo sapiens
  misc_RNA (1)...(19): siRNA sense strand
gcacagguugccacuaaua

SEQ ID NO: 1696676 - RNA, 19 nt, Homo sapiens
  misc_RNA (1)...(19): siRNA sense strand
ccaacuguaucaagaauga

SEQ ID NO: 1696677 - RNA, 19 nt, Homo sapiens
  misc_RNA (1)...(19): siRNA sense strand
gggcaaugcugcuguuaga

SEQ ID NO: 1696678 - RNA, 19 nt, Homo sapiens
  misc_RNA (1)...(19): siRNA sense strand
uauccugggucguuucuua

SEQ ID NO: 1696679 - RNA, 19 nt, Homo sapiens
  misc_RNA (1)...(19): siRNA sense strand
guccuaaucucuaauaugu

SEQ ID NO: 1696680 - RNA, 19 nt, Homo sapiens
  misc_RNA (1)...(19): siRNA sense strand
gcuguuagaugaaagacaa

SEQ ID NO: 1696681 - RNA, 19 nt, Homo sapiens
  misc_RNA (1)...(19): siRNA sense strand
aagaauggcuugaagauag

SEQ ID NO: 1696682 - RNA, 19 nt, Homo sapiens
  misc_RNA (1)...(19): siRNA sense strand
gggaggaaaugacauaaca

SEQ ID NO: 1696683 - RNA, 19 nt, Homo sapiens
  misc_RNA (1)...(19): siRNA sense strand
gcagacaaauggagagaca

SEQ ID NO: 1696684 - RNA, 19 nt, Homo sapiens
  misc_RNA (1)...(19): siRNA sense strand
gugaagcuaugaaugauau

SEQ ID NO: 1696685 - RNA, 19 nt, Homo sapiens
  misc_RNA (1)...(19): siRNA sense strand
ucacacaagucauuaaagu

SEQ ID NO: 1696686 - RNA, 19 nt, Homo sapiens
  misc_RNA (1)...(19): siRNA sense strand
gaaaugaugaugauucaag

SEQ ID NO: 1696687 - RNA, 19 nt, Homo sapiens
  misc_RNA (1)...(19): siRNA sense strand
agauuuggaugucucaaua

SEQ ID NO: 1696688 - RNA, 19 nt, Homo sapiens
  misc_RNA (1)...(19): siRNA sense strand
aagcaauucuuggugauua

SEQ ID NO: 1696689 - RNA, 19 nt, Homo sapiens
  misc_RNA (1)...(19): siRNA sense strand
gauauucaccagaacauga

SEQ ID NO: 1696690 - RNA, 19 nt, Homo sapiens
  misc_RNA (1)...(19): siRNA sense strand
caacugcgccuacaagcaa

SEQ ID NO: 1696691 - RNA, 19 nt, Homo sapiens
  misc_RNA (1)...(19): siRNA sense strand
caaugcugcuguuagauga

SEQ ID NO: 1696692 - RNA, 19 nt, Homo sapiens
  misc_RNA (1)...(19): siRNA sense strand
cgaaugcggaucaagcuua

SEQ ID NO: 1696693 - RNA, 19 nt, Homo sapiens
  misc_RNA (1)...(19): siRNA sense strand
aaaguguccuaaucucuaa

SEQ ID NO: 1696694 - RNA, 19 nt, Homo sapiens
  misc_RNA (1)...(19): siRNA sense strand
uaaauauccugggucguuu

SEQ ID NO: 1696695 - RNA, 19 nt, Homo sapiens
  misc_RNA (1)...(19): siRNA sense strand
uuaaagaaccucaucaugu

SEQ ID NO: 1696696 - RNA, 19 nt, Homo sapiens
  misc_RNA (1)...(19): siRNA sense strand
guacagacagaucauaaug

SEQ ID NO: 1696697 - RNA, 19 nt, Homo sapiens
  misc_RNA (1)...(19): siRNA sense strand
gauaugacggacuuuguuu

SEQ ID NO: 1696698 - RNA, 19 nt, Homo sapiens
  misc_RNA (1)...(19): siRNA sense strand
acaaauggcccuacugaga

SEQ ID NO: 1696699 - RNA, 19 nt, Homo sapiens
  misc_RNA (1)...(19): siRNA sense strand
caugaggucugcccuacuu

SEQ ID NO: 1696700 - RNA, 19 nt, Homo sapiens
  misc_RNA (1)...(19): siRNA sense strand
gaagagccuauucagguaa

SEQ ID NO: 1696701 - RNA, 19 nt, Homo sapiens
  misc_RNA (1)...(19): siRNA sense strand
acaaacgcauuggcuauuu

SEQ ID NO: 1696702 - RNA, 19 nt, Homo sapiens
  misc_RNA (1)...(19): siRNA sense strand
uaacagugauaacgauaca

SEQ ID NO: 1696703 - RNA, 19 nt, Homo sapiens
  misc_RNA (1)...(19): siRNA sense strand
ccacaaauggcccuacuga

SEQ ID NO: 1696704 - RNA, 19 nt, Homo sapiens
  misc_RNA (1)...(19): siRNA sense strand
ucgauucacuuguacugua

SEQ ID NO: 1696705 - RNA, 19 nt, Homo sapiens
  misc_RNA (1)...(19): siRNA sense strand
ucaacaaccuuugguacaa

SEQ ID NO: 1696706 - RNA, 19 nt, Homo sapiens
  misc_RNA (1)...(19): siRNA sense strand
gaggcaugaugaaagaauu

SEQ ID NO: 1696707 - RNA, 19 nt, Homo sapiens
  misc_RNA (1)...(19): siRNA sense strand
ucagagaugugcagagauc

SEQ ID NO: 1696708 - RNA, 19 nt, Homo sapiens
  misc_RNA (1)...(19): siRNA sense strand
gcaaugcugcuguuagaug

SEQ ID NO: 1696709 - RNA, 19 nt, Homo sapiens
  misc_RNA (1)...(19): siRNA sense strand
gaccaacuguaucaagaau

SEQ ID NO: 1696710 - RNA, 19 nt, Homo sapiens
  misc_RNA (1)...(19): siRNA sense strand
gaccaucacacaagucauu

SEQ ID NO: 1696711 - RNA, 19 nt, Homo sapiens
  misc_RNA (1)...(19): siRNA sense strand
cacagccucucuucaauga

SEQ ID NO: 1696712 - RNA, 19 nt, Homo sapiens
  misc_RNA (1)...(19): siRNA sense strand
agagggcaguagaauauaa

SEQ ID NO: 1696713 - RNA, 19 nt, Homo sapiens
  misc_RNA (1)...(19): siRNA sense strand
ggagaugcaugccuauacu

SEQ ID NO: 1696714 - RNA, 19 nt, Homo sapiens
  misc_RNA (1)...(19): siRNA sense strand
uggcauauagacacaauua

SEQ ID NO: 1696715 - RNA, 19 nt, Homo sapiens
  misc_RNA (1)...(19): siRNA sense strand
ucauggauauuaagucaga

SEQ ID NO: 1696716 - RNA, 19 nt, Homo sapiens
  misc_RNA (1)...(19): siRNA sense strand
ggaaaugcuauucuuuaug

SEQ ID NO: 1696717 - RNA, 19 nt, Homo sapiens
  misc_RNA (1)...(19): siRNA sense strand
agauagaauucaccuuuga

SEQ ID NO: 1696718 - RNA, 19 nt, Homo sapiens
  misc_RNA (1)...(19): siRNA sense strand
cagccaggccaaugauuua

SEQ ID NO: 1696719 - RNA, 19 nt, Homo sapiens
  misc_RNA (1)...(19): siRNA sense strand
ggucguuucuuauugaaca

SEQ ID NO: 1696720 - RNA, 19 nt, Homo sapiens
  misc_RNA (1)...(19): siRNA sense strand
ccucagagaugugcagaga

SEQ ID NO: 1696721 - RNA, 19 nt, Homo sapiens
  misc_RNA (1)...(19): siRNA sense strand
gcucagcaaugcaagaucu

SEQ ID NO: 1696722 - RNA, 19 nt, Homo sapiens
  misc_RNA (1)...(19): siRNA sense strand
cgauucacuuguacuguaa

SEQ ID NO: 1696723 - RNA, 19 nt, Homo sapiens
  misc_RNA (1)...(19): siRNA sense strand
guacaaagcaauucuuggu

SEQ ID NO: 1696724 - RNA, 19 nt, Homo sapiens
  misc_RNA (1)...(19): siRNA sense strand
guaggaaaugcuauucuuu

SEQ ID NO: 1696725 - RNA, 19 nt, Homo sapiens
  misc_RNA (1)...(19): siRNA sense strand
caucacagccucucuucaa

SEQ ID NO: 1696726 - RNA, 19 nt, Homo sapiens
  misc_RNA (1)...(19): siRNA sense strand
gaggaugaaguguuggaua

SEQ ID NO: 1696727 - RNA, 19 nt, Homo sapiens
  misc_RNA (1)...(19): siRNA sense strand
gaagaggaagagccuauuc

SEQ ID NO: 1696728 - RNA, 19 nt, Homo sapiens
  misc_RNA (1)...(19): siRNA sense strand
guugaagacuguacagaca

SEQ ID NO: 1696729 - RNA, 19 nt, Homo sapiens
  misc_RNA (1)...(19): siRNA sense strand
caucauguccggauauuca

SEQ ID NO: 1696730 - RNA, 19 nt, Homo sapiens
  misc_RNA (1)...(19): siRNA sense strand
cugcagcucuugucuccua

SEQ ID NO: 1696731 - RNA, 19 nt, Homo sapiens
  misc_RNA (1)...(19): siRNA sense strand
uaagaauggcuugaagaua

SEQ ID NO: 1696732 - RNA, 19 nt, Homo sapiens
  misc_RNA (1)...(19): siRNA sense strand
ugaauauggugaucuucuu

SEQ ID NO: 1696733 - RNA, 19 nt, Homo sapiens
  misc_RNA (1)...(19): siRNA sense strand
ugacaacggcaggaaguua

SEQ ID NO: 1696734 - RNA, 19 nt, Homo sapiens
  misc_RNA (1)...(19): siRNA sense strand
guaugcaccuuccaaacga

SEQ ID NO: 1696735 - RNA, 19 nt, Homo sapiens
  misc_RNA (1)...(19): siRNA sense strand
cgugugagccagaauuuaa

SEQ ID NO: 1696736 - RNA, 19 nt, Homo sapiens
  misc_RNA (1)...(19): siRNA sense strand
guacagaggcacagaagca

SEQ ID NO: 1696737 - RNA, 19 nt, Homo sapiens
  misc_RNA (1)...(19): siRNA sense strand
ccacuaauacugagacuag

SEQ ID NO: 1696738 - RNA, 19 nt, Homo sapiens
  misc_RNA (1)...(19): siRNA sense strand
guacagggguuagcacuuu

SEQ ID NO: 1696739 - RNA, 19 nt, Homo sapiens
  misc_RNA (1)...(19): siRNA sense strand
caaauggcccuacugagau

SEQ ID NO: 1696740 - RNA, 19 nt, Homo sapiens
  misc_RNA (1)...(19): siRNA sense strand
gacagaucauaaugcagua

SEQ ID NO: 1696741 - RNA, 19 nt, Homo sapiens
  misc_RNA (1)...(19): siRNA sense strand
gauggcauauagacacaau

SEQ ID NO: 1696742 - RNA, 19 nt, Homo sapiens
  misc_RNA (1)...(19): siRNA sense strand
guaagaauggcuugaagau

SEQ ID NO: 1696743 - RNA, 19 nt, Homo sapiens
  misc_RNA (1)...(19): siRNA sense strand
gacagaaccagcuccacua

SEQ ID NO: 1696744 - RNA, 19 nt, Homo sapiens
  misc_RNA (1)...(19): siRNA sense strand
gaauauggugaucuucuug

SEQ ID NO: 1696745 - RNA, 19 nt, Homo sapiens
  misc_RNA (1)...(19): siRNA sense strand
uccaaacgauggcauauag

SEQ ID NO: 1696746 - RNA, 19 nt, Homo sapiens
  misc_RNA (1)...(19): siRNA sense strand
ucacaagggcucagcaaug

SEQ ID NO: 1696747 - RNA, 19 nt, Homo sapiens
  misc_RNA (1)...(19): siRNA sense strand
aggaugaaguguuggauau

SEQ ID NO: 1696748 - RNA, 19 nt, Homo sapiens
  misc_RNA (1)...(19): siRNA sense strand
caaagcaauucuuggugau

SEQ ID NO: 1696749 - RNA, 19 nt, Homo sapiens
  misc_RNA (1)...(19): siRNA sense strand
acacaagucauuaaaguuc

SEQ ID NO: 1696750 - RNA, 19 nt, Homo sapiens
  misc_RNA (1)...(19): siRNA sense strand
gaaugcggaucaagcuuac

SEQ ID NO: 1696751 - RNA, 19 nt, Homo sapiens
  misc_RNA (1)...(19): siRNA sense strand
gccgggagcugacagagaa

SEQ ID NO: 1696752 - RNA, 19 nt, Homo sapiens
  misc_RNA (1)...(19): siRNA sense strand
gaaauuccggguagauaug

SEQ ID NO: 1696753 - RNA, 19 nt, Homo sapiens
  misc_RNA (1)...(19): siRNA sense strand
ggcccagugugcaagauua

SEQ ID NO: 1696754 - RNA, 19 nt, Homo sapiens
  misc_RNA (1)...(19): siRNA sense strand
gagcagcugucuccugaag

SEQ ID NO: 1696755 - RNA, 19 nt, Homo sapiens
  misc_RNA (1)...(19): siRNA sense strand
ccacucugcuggcucugua

SEQ ID NO: 1696756 - RNA, 19 nt, Homo sapiens
  misc_RNA (1)...(19): siRNA sense strand
gaagcuggaguucauguug

SEQ ID NO: 1696757 - RNA, 19 nt, Homo sapiens
  misc_RNA (1)...(19): siRNA sense strand
gcagcugucuccugaagag

SEQ ID NO: 1696758 - RNA, 19 nt, Homo sapiens
  misc_RNA (1)...(19): siRNA sense strand
gcucaccgcagaagcagua

SEQ ID NO: 1696759 - RNA, 19 nt, Homo sapiens
  misc_RNA (1)...(19): siRNA sense strand
uugcugagcugcagaagga

SEQ ID NO: 1696760 - RNA, 19 nt, Homo sapiens
  misc_RNA (1)...(19): siRNA sense strand
acacauggcccucccaaga

SEQ ID NO: 1696761 - RNA, 19 nt, Homo sapiens
  misc_RNA (1)...(19): siRNA sense strand
gaaccucgucuucaccuau

SEQ ID NO: 1696762 - RNA, 19 nt, Homo sapiens
  misc_RNA (1)...(19): siRNA sense strand
gcccagcgcucugucauca

SEQ ID NO: 1696763 - RNA, 19 nt, Homo sapiens
  misc_RNA (1)...(19): siRNA sense strand
ccacagugaucaccuccau

SEQ ID NO: 1696764 - RNA, 19 nt, Homo sapiens
  misc_RNA (1)...(19): siRNA sense strand
cccaagaccuggcgugauc

SEQ ID NO: 1696765 - RNA, 19 nt, Homo sapiens
  misc_RNA (1)...(19): siRNA sense strand
cagaaauuccggguagaua

SEQ ID NO: 1696766 - RNA, 19 nt, Homo sapiens
  misc_RNA (1)...(19): siRNA sense strand
agucaggccugcagaagga

SEQ ID NO: 1696767 - RNA, 19 nt, Homo sapiens
  misc_RNA (1)...(19): siRNA sense strand
aggagaagcuggaguucau

SEQ ID NO: 1696768 - RNA, 19 nt, Homo sapiens
  misc_RNA (1)...(19): siRNA sense strand
gcgcuguaguggugaaaca

SEQ ID NO: 1696769 - RNA, 19 nt, Homo sapiens
  misc_RNA (1)...(19): siRNA sense strand
caucaagcccaucagcauu

SEQ ID NO: 1696770 - RNA, 19 nt, Homo sapiens
  misc_RNA (1)...(19): siRNA sense strand
gauuaucccgggaacuuug

SEQ ID NO: 1696771 - RNA, 19 nt, Homo sapiens
  misc_RNA (1)...(19): siRNA sense strand
gcagaaauuccggguagau

SEQ ID NO: 1696772 - RNA, 19 nt, Homo sapiens
  misc_RNA (1)...(19): siRNA sense strand
agaaggagaagcuggaguu

SEQ ID NO: 1696773 - RNA, 19 nt, Homo sapiens
  misc_RNA (1)...(19): siRNA sense strand
ccagcgcucugucaucaag

SEQ ID NO: 1696774 - RNA, 19 nt, Homo sapiens
  misc_RNA (1)...(19): siRNA sense strand
agaaauuccggguagauau

SEQ ID NO: 1696775 - RNA, 19 nt, Homo sapiens
  misc_RNA (1)...(19): siRNA sense strand
gaagucaggccugcagaag

SEQ ID NO: 1696776 - RNA, 19 nt, Homo sapiens
  misc_RNA (1)...(19): siRNA sense strand
gagaagcuggaguucaugu

SEQ ID NO: 1696777 - RNA, 19 nt, Homo sapiens
  misc_RNA (1)...(19): siRNA sense strand
gaccuggcgugaucaagac

SEQ ID NO: 1696778 - RNA, 19 nt, Homo sapiens
  misc_RNA (1)...(19): siRNA sense strand
gaaggagaagcuggaguuc

SEQ ID NO: 1696779 - RNA, 19 nt, Homo sapiens
  misc_RNA (1)...(19): siRNA sense strand
acagugaucaccuccaugu

SEQ ID NO: 1696780 - RNA, 19 nt, Homo sapiens
  misc_RNA (1)...(19): siRNA sense strand
gcaggagucacccgcaucu

SEQ ID NO: 1696781 - RNA, 19 nt, Homo sapiens
  misc_RNA (1)...(19): siRNA sense strand
cgaaccucgucuucaccua

SEQ ID NO: 1696782 - RNA, 19 nt, Homo sapiens
  misc_RNA (1)...(19): siRNA sense strand
agaccuggcgugaucaaga

SEQ ID NO: 1696783 - RNA, 19 nt, Homo sapiens
  misc_RNA (1)...(19): siRNA sense strand
ggcgugaucaagaccauug

SEQ ID NO: 1696784 - RNA, 19 nt, Homo sapiens
  misc_RNA (1)...(19): siRNA sense strand
caucagacuccuugaacuc

SEQ ID NO: 1696785 - RNA, 19 nt, Homo sapiens
  misc_RNA (1)...(19): siRNA sense strand
ccgcaucucccuccgaauc

SEQ ID NO: 1696786 - RNA, 19 nt, Homo sapiens
  misc_RNA (1)...(19): siRNA sense strand
ccucgaaccucgucuucac

SEQ ID NO: 1696787 - RNA, 19 nt, Homo sapiens
  misc_RNA (1)...(19): siRNA sense strand
gcaccucgaaccucgucuu

SEQ ID NO: 1696788 - RNA, 19 nt, Homo sapiens
  misc_RNA (1)...(19): siRNA sense strand
gaaaguauauucugauugc

SEQ ID NO: 1696789 - RNA, 19 nt, Homo sapiens
  misc_RNA (1)...(19): siRNA sense strand
caagaaacuuugacagaaa

SEQ ID NO: 1696790 - RNA, 19 nt, Homo sapiens
  misc_RNA (1)...(19): siRNA sense strand
ggacaaggauauaaguuuc

SEQ ID NO: 1696791 - RNA, 19 nt, Homo sapiens
  misc_RNA (1)...(19): siRNA sense strand
caccaaacauugaaacuuu

SEQ ID NO: 1696792 - RNA, 19 nt, Homo sapiens
  misc_RNA (1)...(19): siRNA sense strand
caagagagauccaaucagu

SEQ ID NO: 1696793 - RNA, 19 nt, Homo sapiens
  misc_RNA (1)...(19): siRNA sense strand
gcuugaaugugacagauua

SEQ ID NO: 1696794 - RNA, 19 nt, Homo sapiens
  misc_RNA (1)...(19): siRNA sense strand
ccagagagaccaauuauau

SEQ ID NO: 1696795 - RNA, 19 nt, Homo sapiens
  misc_RNA (1)...(19): siRNA sense strand
gaccagaauuggcuuuauu

SEQ ID NO: 1696796 - RNA, 19 nt, Homo sapiens
  misc_RNA (1)...(19): siRNA sense strand
caaggcaucuuaagacuuc

SEQ ID NO: 1696797 - RNA, 19 nt, Homo sapiens
  misc_RNA (1)...(19): siRNA sense strand
gugcaacucuguucacauu

SEQ ID NO: 1696798 - RNA, 19 nt, Homo sapiens
  misc_RNA (1)...(19): siRNA sense strand
gauauaaguuucugggaau

SEQ ID NO: 1696799 - RNA, 19 nt, Homo sapiens
  misc_RNA (1)...(19): siRNA sense strand
uaacuugggucucugauca

SEQ ID NO: 1696800 - RNA, 19 nt, Homo sapiens
  misc_RNA (1)...(19): siRNA sense strand
ccacaucucugcuuguuca

SEQ ID NO: 1696801 - RNA, 19 nt, Homo sapiens
  misc_RNA (1)...(19): siRNA sense strand
cugaggagcuugaauguga

SEQ ID NO: 1696802 - RNA, 19 nt, Homo sapiens
  misc_RNA (1)...(19): siRNA sense strand
gcaauaaggcagaugagaa

SEQ ID NO: 1696803 - RNA, 19 nt, Homo sapiens
  misc_RNA (1)...(19): siRNA sense strand
gaacaaguccaaagagaca

SEQ ID NO: 1696804 - RNA, 19 nt, Homo sapiens
  misc_RNA (1)...(19): siRNA sense strand
gaagaguacuacaggaauc

SEQ ID NO: 1696805 - RNA, 19 nt, Homo sapiens
  misc_RNA (1)...(19): siRNA sense strand
uaaacgaaaucgcaagaga

SEQ ID NO: 1696806 - RNA, 19 nt, Homo sapiens
  misc_RNA (1)...(19): siRNA sense strand
ucgcaaaucuggaauguuc

SEQ ID NO: 1696807 - RNA, 19 nt, Homo sapiens
  misc_RNA (1)...(19): siRNA sense strand
gaaaauggccuacaacaug

SEQ ID NO: 1696808 - RNA, 19 nt, Homo sapiens
  misc_RNA (1)...(19): siRNA sense strand
acaagaaacuuugacagaa

SEQ ID NO: 1696809 - RNA, 19 nt, Homo sapiens
  misc_RNA (1)...(19): siRNA sense strand
gcuuguaucuugugccauu

SEQ ID NO: 1696810 - RNA, 19 nt, Homo sapiens
  misc_RNA (1)...(19): siRNA sense strand
gaaggaaggauuaguccaa

SEQ ID NO: 1696811 - RNA, 19 nt, Homo sapiens
  misc_RNA (1)...(19): siRNA sense strand
ugacacuucucggauguua

SEQ ID NO: 1696812 - RNA, 19 nt, Homo sapiens
  misc_RNA (1)...(19): siRNA sense strand
cagaacaaguccaaagaga

SEQ ID NO: 1696813 - RNA, 19 nt, Homo sapiens
  misc_RNA (1)...(19): siRNA sense strand
gaaccaagcagccucaaag

SEQ ID NO: 1696814 - RNA, 19 nt, Homo sapiens
  misc_RNA (1)...(19): siRNA sense strand
gcacaggagcuacagcaaa

SEQ ID NO: 1696815 - RNA, 19 nt, Homo sapiens
  misc_RNA (1)...(19): siRNA sense strand
gagcaagugaacaggauua

SEQ ID NO: 1696816 - RNA, 19 nt, Homo sapiens
  misc_RNA (1)...(19): siRNA sense strand
guugggcucucucuucuuu

SEQ ID NO: 1696817 - RNA, 19 nt, Homo sapiens
  misc_RNA (1)...(19): siRNA sense strand
gacaagaaacuuugacaga

SEQ ID NO: 1696818 - RNA, 19 nt, Homo sapiens
  misc_RNA (1)...(19): siRNA sense strand
gcaauuacuagccaugauu

SEQ ID NO: 1696819 - RNA, 19 nt, Homo sapiens
  misc_RNA (1)...(19): siRNA sense strand
ggaugcuucucgcuacuuu

SEQ ID NO: 1696820 - RNA, 19 nt, Homo sapiens
  misc_RNA (1)...(19): siRNA sense strand
guaccaaccugcauagaac

SEQ ID NO: 1696821 - RNA, 19 nt, Homo sapiens
  misc_RNA (1)...(19): siRNA sense strand
ccaagcagccucaaagguu

SEQ ID NO: 1696822 - RNA, 19 nt, Homo sapiens
  misc_RNA (1)...(19): siRNA sense strand
ggaaggauuaguccaaaga

SEQ ID NO: 1696823 - RNA, 19 nt, Homo sapiens
  misc_RNA (1)...(19): siRNA sense strand
gggacaaggauauaaguuu

SEQ ID NO: 1696824 - RNA, 19 nt, Homo sapiens
  misc_RNA (1)...(19): siRNA sense strand
ccucaaagguuccacaucu

SEQ ID NO: 1696825 - RNA, 19 nt, Homo sapiens
  misc_RNA (1)...(19): siRNA sense strand
caaagagugauauuacuga

SEQ ID NO: 1696826 - RNA, 19 nt, Homo sapiens
  misc_RNA (1)...(19): siRNA sense strand
ucauggcacuucugcagua

SEQ ID NO: 1696827 - RNA, 19 nt, Homo sapiens
  misc_RNA (1)...(19): siRNA sense strand
cugaugacauuaauuguug

SEQ ID NO: 1696828 - RNA, 19 nt, Homo sapiens
  misc_RNA (1)...(19): siRNA sense strand
cagagagaccaauuauaua

SEQ ID NO: 1696829 - RNA, 19 nt, Homo sapiens
  misc_RNA (1)...(19): siRNA sense strand
gaugagacuguuccuguaa

SEQ ID NO: 1696830 - RNA, 19 nt, Homo sapiens
  misc_RNA (1)...(19): siRNA sense strand
gcagggaggugguugucau

SEQ ID NO: 1696831 - RNA, 19 nt, Homo sapiens
  misc_RNA (1)...(19): siRNA sense strand
caauuacuagccaugauua

SEQ ID NO: 1696832 - RNA, 19 nt, Homo sapiens
  misc_RNA (1)...(19): siRNA sense strand
cacaggagcuacagcaaau

SEQ ID NO: 1696833 - RNA, 19 nt, Homo sapiens
  misc_RNA (1)...(19): siRNA sense strand
cagugaaagucgaagagua

SEQ ID NO: 1696834 - RNA, 19 nt, Homo sapiens
  misc_RNA (1)...(19): siRNA sense strand
gauagcacagccugcaaua

SEQ ID NO: 1696835 - RNA, 19 nt, Homo sapiens
  misc_RNA (1)...(19): siRNA sense strand
uaaggcagaugagaagcua

SEQ ID NO: 1696836 - RNA, 19 nt, Homo sapiens
  misc_RNA (1)...(19): siRNA sense strand
gcauagaacaaauucaugu

SEQ ID NO: 1696837 - RNA, 19 nt, Homo sapiens
  misc_RNA (1)...(19): siRNA sense strand
cgacaagucauacaacaug

SEQ ID NO: 1696838 - RNA, 19 nt, Homo sapiens
  misc_RNA (1)...(19): siRNA sense strand
gaaugugacagauuacaau

SEQ ID NO: 1696839 - RNA, 19 nt, Homo sapiens
  misc_RNA (1)...(19): siRNA sense strand
ccagaauuggcuuuauuua

SEQ ID NO: 1696840 - RNA, 19 nt, Homo sapiens
  misc_RNA (1)...(19): siRNA sense strand
aggauuaccugggagauaa

SEQ ID NO: 1696841 - RNA, 19 nt, Homo sapiens
  misc_RNA (1)...(19): siRNA sense strand
gaacuuggugacacuguug

SEQ ID NO: 1696842 - RNA, 19 nt, Homo sapiens
  misc_RNA (1)...(19): siRNA sense strand
caauuacuguucccagaug

SEQ ID NO: 1696843 - RNA, 19 nt, Homo sapiens
  misc_RNA (1)...(19): siRNA sense strand
ugaugagacuguuccugua

SEQ ID NO: 1696844 - RNA, 19 nt, Homo sapiens
  misc_RNA (1)...(19): siRNA sense strand
cauuguaucucuuauguac

SEQ ID NO: 1696845 - RNA, 19 nt, Homo sapiens
  misc_RNA (1)...(19): siRNA sense strand
guccuaggcucucaaaaua

SEQ ID NO: 1696846 - RNA, 19 nt, Homo sapiens
  misc_RNA (1)...(19): siRNA sense strand
gaugagaagcuagaacuug

SEQ ID NO: 1696847 - RNA, 19 nt, Homo sapiens
  misc_RNA (1)...(19): siRNA sense strand
ucucuuauguacuucauug

SEQ ID NO: 1696848 - RNA, 19 nt, Homo sapiens
  misc_RNA (1)...(19): siRNA sense strand
gaagcacuauaaaccaagu

SEQ ID NO: 1696849 - RNA, 19 nt, Homo sapiens
  misc_RNA (1)...(19): siRNA sense strand
acaggaaucaugugaguuu

SEQ ID NO: 1696850 - RNA, 19 nt, Homo sapiens
  misc_RNA (1)...(19): siRNA sense strand
uggcaucucugcugucuuc

SEQ ID NO: 1696851 - RNA, 19 nt, Homo sapiens
  misc_RNA (1)...(19): siRNA sense strand
ucucggauguuacgucuau

SEQ ID NO: 1696852 - RNA, 19 nt, Homo sapiens
  misc_RNA (1)...(19): siRNA sense strand
gaaggagacaacauuagug

SEQ ID NO: 1696853 - RNA, 19 nt, Homo sapiens
  misc_RNA (1)...(19): siRNA sense strand
ggaagaaaauggaguugug

SEQ ID NO: 1696854 - RNA, 19 nt, Homo sapiens
  misc_RNA (1)...(19): siRNA sense strand
caacauuaguggaguuugc

SEQ ID NO: 1696855 - RNA, 19 nt, Homo sapiens
  misc_RNA (1)...(19): siRNA sense strand
ggauuaguccaaagaguga

SEQ ID NO: 1696856 - RNA, 19 nt, Homo sapiens
  misc_RNA (1)...(19): siRNA sense strand
caaccugcauagaacaaau

SEQ ID NO: 1696857 - RNA, 19 nt, Homo sapiens
  misc_RNA (1)...(19): siRNA sense strand
cuacaggaaucaugugagu

SEQ ID NO: 1696858 - RNA, 19 nt, Homo sapiens
  misc_RNA (1)...(19): siRNA sense strand
agagagauccaaucaguga

SEQ ID NO: 1696859 - RNA, 19 nt, Homo sapiens
  misc_RNA (1)...(19): siRNA sense strand
gugaugagcuagaguuugc

SEQ ID NO: 1696860 - RNA, 19 nt, Homo sapiens
  misc_RNA (1)...(19): siRNA sense strand
gggaggugguugucauuca

SEQ ID NO: 1696861 - RNA, 19 nt, Homo sapiens
  misc_RNA (1)...(19): siRNA sense strand
aagaagcacuauaaaccaa

SEQ ID NO: 1696862 - RNA, 19 nt, Homo sapiens
  misc_RNA (1)...(19): siRNA sense strand
gaaagugcgcggagugaag

SEQ ID NO: 1696863 - RNA, 19 nt, Homo sapiens
  misc_RNA (1)...(19): siRNA sense strand
gauguuagaagauucagau

SEQ ID NO: 1696864 - RNA, 19 nt, Homo sapiens
  misc_RNA (1)...(19): siRNA sense strand
uggcacagagcaacaauuu

SEQ ID NO: 1696865 - RNA, 19 nt, Homo sapiens
  misc_RNA (1)...(19): siRNA sense strand
agaacaaauucaugugguu

SEQ ID NO: 1696866 - RNA, 19 nt, Homo sapiens
  misc_RNA (1)...(19): siRNA sense strand
gcaggcaguguaucugaaa

SEQ ID NO: 1696867 - RNA, 19 nt, Homo sapiens
  misc_RNA (1)...(19): siRNA sense strand
auccaaaccucaccagaaa

SEQ ID NO: 1696868 - RNA, 19 nt, Homo sapiens
  misc_RNA (1)...(19): siRNA sense strand
uaaaccaaguucacacaag

SEQ ID NO: 1696869 - RNA, 19 nt, Homo sapiens
  misc_RNA (1)...(19): siRNA sense strand
agacuguuccuguaacuuu

SEQ ID NO: 1696870 - RNA, 19 nt, Homo sapiens
  misc_RNA (1)...(19): siRNA sense strand
uaaaucauguucgacaagu

SEQ ID NO: 1696871 - RNA, 19 nt, Homo sapiens
  misc_RNA (1)...(19): siRNA sense strand
aauaaggcuugcaccguuu

SEQ ID NO: 1696872 - RNA, 19 nt, Homo sapiens
  misc_RNA (1)...(19): siRNA sense strand
uuacaauacugugaugaga

SEQ ID NO: 1696873 - RNA, 19 nt, Homo sapiens
  misc_RNA (1)...(19): siRNA sense strand
gaagaaaacagaacaaguc

SEQ ID NO: 1696874 - RNA, 19 nt, Homo sapiens
  misc_RNA (1)...(19): siRNA sense strand
gagcuugaaugugacagau

SEQ ID NO: 1696875 - RNA, 19 nt, Homo sapiens
  misc_RNA (1)...(19): siRNA sense strand
caauaaggcagaugagaag

SEQ ID NO: 1696876 - RNA, 19 nt, Homo sapiens
  misc_RNA (1)...(19): siRNA sense strand
gcauccaucuccagacucu

SEQ ID NO: 1696877 - RNA, 19 nt, Homo sapiens
  misc_RNA (1)...(19): siRNA sense strand
gaaagucgaagaguacuac

SEQ ID NO: 1696878 - RNA, 19 nt, Homo sapiens
  misc_RNA (1)...(19): siRNA sense strand
cgaaaucgcaagagagauc

SEQ ID NO: 1696879 - RNA, 19 nt, Homo sapiens
  misc_RNA (1)...(19): siRNA sense strand
ccacugugccuuugugugu

SEQ ID NO: 1696880 - RNA, 19 nt, Homo sapiens
  misc_RNA (1)...(19): siRNA sense strand
gaaaacagaacaaguccaa

SEQ ID NO: 1696881 - RNA, 19 nt, Homo sapiens
  misc_RNA (1)...(19): siRNA sense strand
gucguaaacuuugugagaa

SEQ ID NO: 1696882 - RNA, 19 nt, Homo sapiens
  misc_RNA (1)...(19): siRNA sense strand
ucguaaacuuugugagaaa

SEQ ID NO: 1696883 - RNA, 19 nt, Homo sapiens
  misc_RNA (1)...(19): siRNA sense strand
uagcuggcauuauuuccuu

SEQ ID NO: 1696884 - RNA, 19 nt, Homo sapiens
  misc_RNA (1)...(19): siRNA sense strand
agacaacauuaguggaguu

SEQ ID NO: 1696885 - RNA, 19 nt, Homo sapiens
  misc_RNA (1)...(19): siRNA sense strand
aaacagaacaaguccaaag

SEQ ID NO: 1696886 - RNA, 19 nt, Homo sapiens
  misc_RNA (1)...(19): siRNA sense strand
cgaccagaauuggcuuuau

SEQ ID NO: 1696887 - RNA, 19 nt, Homo sapiens
  misc_RNA (1)...(19): siRNA sense strand
ggaaccagcacaggagcua

SEQ ID NO: 1696888 - RNA, 19 nt, Homo sapiens
  misc_RNA (1)...(19): siRNA sense strand
caagauugcugaauacaaa

SEQ ID NO: 1696889 - RNA, 19 nt, Homo sapiens
  misc_RNA (1)...(19): siRNA sense strand
gaagucaagucgagucuau

SEQ ID NO: 1696890 - RNA, 19 nt, Homo sapiens
  misc_RNA (1)...(19): siRNA sense strand
ggacaagauugcugaauac

SEQ ID NO: 1696891 - RNA, 19 nt, Homo sapiens
  misc_RNA (1)...(19): siRNA sense strand
caacgaggcuuggagauuc

SEQ ID NO: 1696892 - RNA, 19 nt, Homo sapiens
  misc_RNA (1)...(19): siRNA sense strand
cgacagaacccgacuaugu

SEQ ID NO: 1696893 - RNA, 19 nt, Homo sapiens
  misc_RNA (1)...(19): siRNA sense strand
uggacaagauugcugaaua

SEQ ID NO: 1696894 - RNA, 19 nt, Homo sapiens
  misc_RNA (1)...(19): siRNA sense strand
caucagagcacaucaaauc

SEQ ID NO: 1696895 - RNA, 19 nt, Homo sapiens
  misc_RNA (1)...(19): siRNA sense strand
acacagacauacccaguug

SEQ ID NO: 1696896 - RNA, 19 nt, Homo sapiens
  misc_RNA (1)...(19): siRNA sense strand
ccaaagugguggacaagau

SEQ ID NO: 1696897 - RNA, 19 nt, Homo sapiens
  misc_RNA (1)...(19): siRNA sense strand
caauggagauucccagagu

SEQ ID NO: 1696898 - RNA, 19 nt, Homo sapiens
  misc_RNA (1)...(19): siRNA sense strand
gaagaggaaacgugaugaa

SEQ ID NO: 1696899 - RNA, 19 nt, Homo sapiens
  misc_RNA (1)...(19): siRNA sense strand
gacagaacccgacuauguu

SEQ ID NO: 1696900 - RNA, 19 nt, Homo sapiens
  misc_RNA (1)...(19): siRNA sense strand
gagaagaggaaacgugaug

SEQ ID NO: 1696901 - RNA, 19 nt, Homo sapiens
  misc_RNA (1)...(19): siRNA sense strand
cagagcacaucaaaucaga

SEQ ID NO: 1696902 - RNA, 19 nt, Homo sapiens
  misc_RNA (1)...(19): siRNA sense strand
agagugguguggacaguuu

SEQ ID NO: 1696903 - RNA, 19 nt, Homo sapiens
  misc_RNA (1)...(19): siRNA sense strand
gagggcaucugugacaaug

SEQ ID NO: 1696904 - RNA, 19 nt, Homo sapiens
  misc_RNA (1)...(19): siRNA sense strand
caaagugguggacaagauu

SEQ ID NO: 1696905 - RNA, 19 nt, Homo sapiens
  misc_RNA (1)...(19): siRNA sense strand
cagcgucucuuccaucaac

SEQ ID NO: 1696906 - RNA, 19 nt, Homo sapiens
  misc_RNA (1)...(19): siRNA sense strand
gcacaucaaaucagaacag

SEQ ID NO: 1696907 - RNA, 19 nt, Homo sapiens
  misc_RNA (1)...(19): siRNA sense strand
gggcaucugugacaaugac

SEQ ID NO: 1696908 - RNA, 19 nt, Homo sapiens
  misc_RNA (1)...(19): siRNA sense strand
ucucuuccaucaacagaau

SEQ ID NO: 1696909 - RNA, 19 nt, Homo sapiens
  misc_RNA (1)...(19): siRNA sense strand
ggauccuacuccaucaaug

SEQ ID NO: 1696910 - RNA, 19 nt, Homo sapiens
  misc_RNA (1)...(19): siRNA sense strand
ggcaucagagcacaucaaa

SEQ ID NO: 1696911 - RNA, 19 nt, Homo sapiens
  misc_RNA (1)...(19): siRNA sense strand
ccaauggugagaagaggaa

SEQ ID NO: 1696912 - RNA, 19 nt, Homo sapiens
  misc_RNA (1)...(19): siRNA sense strand
gagcacaucaaaucagaac

SEQ ID NO: 1696913 - RNA, 19 nt, Homo sapiens
  misc_RNA (1)...(19): siRNA sense strand
agaaucauccggaccaaag

SEQ ID NO: 1696914 - RNA, 19 nt, Homo sapiens
  misc_RNA (1)...(19): siRNA sense strand
acaacgaggcuuggagauu

SEQ ID NO: 1696915 - RNA, 19 nt, Homo sapiens
  misc_RNA (1)...(19): siRNA sense strand
uauguucgccugggagauu

SEQ ID NO: 1696916 - RNA, 19 nt, Homo sapiens
  misc_RNA (1)...(19): siRNA sense strand
ccagagugguguggacagu

SEQ ID NO: 1696917 - RNA, 19 nt, Homo sapiens
  misc_RNA (1)...(19): siRNA sense strand
cccagcgucucuuccauca

SEQ ID NO: 1696918 - RNA, 19 nt, Homo sapiens
  misc_RNA (1)...(19): siRNA sense strand
acaagauugcugaauacaa

SEQ ID NO: 1696919 - RNA, 19 nt, Homo sapiens
  misc_RNA (1)...(19): siRNA sense strand
gggauccuacuccaucaau

SEQ ID NO: 1696920 - RNA, 19 nt, Homo sapiens
  misc_RNA (1)...(19): siRNA sense strand
ccacuggccagggaagcua

SEQ ID NO: 1696921 - RNA, 19 nt, Homo sapiens
  misc_RNA (1)...(19): siRNA sense strand
ucuuugagcguccuuccua

SEQ ID NO: 1696922 - RNA, 19 nt, Homo sapiens
  misc_RNA (1)...(19): siRNA sense strand
caagauugcugaauacaaa

SEQ ID NO: 1696923 - RNA, 19 nt, Homo sapiens
  misc_RNA (1)...(19): siRNA sense strand
gaagucaagucgagucuau

SEQ ID NO: 1696924 - RNA, 19 nt, Homo sapiens
  misc_RNA (1)...(19): siRNA sense strand
ggacaagauugcugaauac

SEQ ID NO: 1696925 - RNA, 19 nt, Homo sapiens
  misc_RNA (1)...(19): siRNA sense strand
caacgaggcuuggagauuc

SEQ ID NO: 1696926 - RNA, 19 nt, Homo sapiens
  misc_RNA (1)...(19): siRNA sense strand
cgacagaacccgacuaugu

SEQ ID NO: 1696927 - RNA, 19 nt, Homo sapiens
  misc_RNA (1)...(19): siRNA sense strand
uggacaagauugcugaaua

SEQ ID NO: 1696928 - RNA, 19 nt, Homo sapiens
  misc_RNA (1)...(19): siRNA sense strand
caucagagcacaucaaauc

SEQ ID NO: 1696929 - RNA, 19 nt, Homo sapiens
  misc_RNA (1)...(19): siRNA sense strand
acacagacauacccaguug

SEQ ID NO: 1696930 - RNA, 19 nt, Homo sapiens
  misc_RNA (1)...(19): siRNA sense strand
ccaaagugguggacaagau

SEQ ID NO: 1696931 - RNA, 19 nt, Homo sapiens
  misc_RNA (1)...(19): siRNA sense strand
caauggagauucccagagu

SEQ ID NO: 1696932 - RNA, 19 nt, Homo sapiens
  misc_RNA (1)...(19): siRNA sense strand
gaagaggaaacgugaugaa

SEQ ID NO: 1696933 - RNA, 19 nt, Homo sapiens
  misc_RNA (1)...(19): siRNA sense strand
gacagaacccgacuauguu

SEQ ID NO: 1696934 - RNA, 19 nt, Homo sapiens
  misc_RNA (1)...(19): siRNA sense strand
gagaagaggaaacgugaug

SEQ ID NO: 1696935 - RNA, 19 nt, Homo sapiens
  misc_RNA (1)...(19): siRNA sense strand
cagagcacaucaaaucaga

SEQ ID NO: 1696936 - RNA, 19 nt, Homo sapiens
  misc_RNA (1)...(19): siRNA sense strand
agagugguguggacaguuu

SEQ ID NO: 1696937 - RNA, 19 nt, Homo sapiens
  misc_RNA (1)...(19): siRNA sense strand
gagggcaucugugacaaug

SEQ ID NO: 1696938 - RNA, 19 nt, Homo sapiens
  misc_RNA (1)...(19): siRNA sense strand
caaagugguggacaagauu

SEQ ID NO: 1696939 - RNA, 19 nt, Homo sapiens
  misc_RNA (1)...(19): siRNA sense strand
cagcgucucuuccaucaac

SEQ ID NO: 1696940 - RNA, 19 nt, Homo sapiens
  misc_RNA (1)...(19): siRNA sense strand
gcacaucaaaucagaacag

SEQ ID NO: 1696941 - RNA, 19 nt, Homo sapiens
  misc_RNA (1)...(19): siRNA sense strand
gggcaucugugacaaugac

SEQ ID NO: 1696942 - RNA, 19 nt, Homo sapiens
  misc_RNA (1)...(19): siRNA sense strand
ucucuuccaucaacagaau

SEQ ID NO: 1696943 - RNA, 19 nt, Homo sapiens
  misc_RNA (1)...(19): siRNA sense strand
ggauccuacuccaucaaug

SEQ ID NO: 1696944 - RNA, 19 nt, Homo sapiens
  misc_RNA (1)...(19): siRNA sense strand
ggcaucagagcacaucaaa

SEQ ID NO: 1696945 - RNA, 19 nt, Homo sapiens
  misc_RNA (1)...(19): siRNA sense strand
ccaauggugagaagaggaa

SEQ ID NO: 1696946 - RNA, 19 nt, Homo sapiens
  misc_RNA (1)...(19): siRNA sense strand
gagcacaucaaaucagaac

SEQ ID NO: 1696947 - RNA, 19 nt, Homo sapiens
  misc_RNA (1)...(19): siRNA sense strand
agaaucauccggaccaaag

SEQ ID NO: 1696948 - RNA, 19 nt, Homo sapiens
  misc_RNA (1)...(19): siRNA sense strand
acaacgaggcuuggagauu

SEQ ID NO: 1696949 - RNA, 19 nt, Homo sapiens
  misc_RNA (1)...(19): siRNA sense strand
uauguucgccugggagauu

SEQ ID NO: 1696950 - RNA, 19 nt, Homo sapiens
  misc_RNA (1)...(19): siRNA sense strand
ccagagugguguggacagu

SEQ ID NO: 1696951 - RNA, 19 nt, Homo sapiens
  misc_RNA (1)...(19): siRNA sense strand
cccagcgucucuuccauca

SEQ ID NO: 1696952 - RNA, 19 nt, Homo sapiens
  misc_RNA (1)...(19): siRNA sense strand
acaagauugcugaauacaa

SEQ ID NO: 1696953 - RNA, 19 nt, Homo sapiens
  misc_RNA (1)...(19): siRNA sense strand
gggauccuacuccaucaau

SEQ ID NO: 1696954 - RNA, 19 nt, Homo sapiens
  misc_RNA (1)...(19): siRNA sense strand
ccacuggccagggaagcua

SEQ ID NO: 1696955 - RNA, 19 nt, Homo sapiens
  misc_RNA (1)...(19): siRNA sense strand
ucuuugagcguccuuccua

SEQ ID NO: 1696956 - RNA, 19 nt, Homo sapiens
  misc_RNA (1)...(19): siRNA sense strand
caagauugcugaauacaaa

SEQ ID NO: 1696957 - RNA, 19 nt, Homo sapiens
  misc_RNA (1)...(19): siRNA sense strand
gaagucaagucgagucuau

SEQ ID NO: 1696958 - RNA, 19 nt, Homo sapiens
  misc_RNA (1)...(19): siRNA sense strand
ggacaagauugcugaauac

SEQ ID NO: 1696959 - RNA, 19 nt, Homo sapiens
  misc_RNA (1)...(19): siRNA sense strand
caacgaggcuuggagauuc

SEQ ID NO: 1696960 - RNA, 19 nt, Homo sapiens
  misc_RNA (1)...(19): siRNA sense strand
cgacagaacccgacuaugu

SEQ ID NO: 1696961 - RNA, 19 nt, Homo sapiens
  misc_RNA (1)...(19): siRNA sense strand
uggacaagauugcugaaua

SEQ ID NO: 1696962 - RNA, 19 nt, Homo sapiens
  misc_RNA (1)...(19): siRNA sense strand
caucagagcacaucaaauc

SEQ ID NO: 1696963 - RNA, 19 nt, Homo sapiens
  misc_RNA (1)...(19): siRNA sense strand
acacagacauacccaguug

SEQ ID NO: 1696964 - RNA, 19 nt, Homo sapiens
  misc_RNA (1)...(19): siRNA sense strand
ccaaagugguggacaagau

SEQ ID NO: 1696965 - RNA, 19 nt, Homo sapiens
  misc_RNA (1)...(19): siRNA sense strand
caauggagauucccagagu

SEQ ID NO: 1696966 - RNA, 19 nt, Homo sapiens
  misc_RNA (1)...(19): siRNA sense strand
gaagaggaaacgugaugaa

SEQ ID NO: 1696967 - RNA, 19 nt, Homo sapiens
  misc_RNA (1)...(19): siRNA sense strand
gacagaacccgacuauguu

SEQ ID NO: 1696968 - RNA, 19 nt, Homo sapiens
  misc_RNA (1)...(19): siRNA sense strand
gagaagaggaaacgugaug

SEQ ID NO: 1696969 - RNA, 19 nt, Homo sapiens
  misc_RNA (1)...(19): siRNA sense strand
cagagcacaucaaaucaga

SEQ ID NO: 1696970 - RNA, 19 nt, Homo sapiens
  misc_RNA (1)...(19): siRNA sense strand
agagugguguggacaguuu

SEQ ID NO: 1696971 - RNA, 19 nt, Homo sapiens
  misc_RNA (1)...(19): siRNA sense strand
gagggcaucugugacaaug

SEQ ID NO: 1696972 - RNA, 19 nt, Homo sapiens
  misc_RNA (1)...(19): siRNA sense strand
caaagugguggacaagauu

SEQ ID NO: 1696973 - RNA, 19 nt, Homo sapiens
  misc_RNA (1)...(19): siRNA sense strand
cagcgucucuuccaucaac

SEQ ID NO: 1696974 - RNA, 19 nt, Homo sapiens
  misc_RNA (1)...(19): siRNA sense strand
gcacaucaaaucagaacag

SEQ ID NO: 1696975 - RNA, 19 nt, Homo sapiens
  misc_RNA (1)...(19): siRNA sense strand
gggcaucugugacaaugac

SEQ ID NO: 1696976 - RNA, 19 nt, Homo sapiens
  misc_RNA (1)...(19): siRNA sense strand
ucucuuccaucaacagaau

SEQ ID NO: 1696977 - RNA, 19 nt, Homo sapiens
  misc_RNA (1)...(19): siRNA sense strand
ggauccuacuccaucaaug

SEQ ID NO: 1696978 - RNA, 19 nt, Homo sapiens
  misc_RNA (1)...(19): siRNA sense strand
ggcaucagagcacaucaaa

SEQ ID NO: 1696979 - RNA, 19 nt, Homo sapiens
  misc_RNA (1)...(19): siRNA sense strand
ccaauggugagaagaggaa

SEQ ID NO: 1696980 - RNA, 19 nt, Homo sapiens
  misc_RNA (1)...(19): siRNA sense strand
gagcacaucaaaucagaac

SEQ ID NO: 1696981 - RNA, 19 nt, Homo sapiens
  misc_RNA (1)...(19): siRNA sense strand
agaaucauccggaccaaag

SEQ ID NO: 1696982 - RNA, 19 nt, Homo sapiens
  misc_RNA (1)...(19): siRNA sense strand
acaacgaggcuuggagauu

SEQ ID NO: 1696983 - RNA, 19 nt, Homo sapiens
  misc_RNA (1)...(19): siRNA sense strand
uauguucgccugggagauu

SEQ ID NO: 1696984 - RNA, 19 nt, Homo sapiens
  misc_RNA (1)...(19): siRNA sense strand
ccagagugguguggacagu

SEQ ID NO: 1696985 - RNA, 19 nt, Homo sapiens
  misc_RNA (1)...(19): siRNA sense strand
cccagcgucucuuccauca

SEQ ID NO: 1696986 - RNA, 19 nt, Homo sapiens
  misc_RNA (1)...(19): siRNA sense strand
acaagauugcugaauacaa

SEQ ID NO: 1696987 - RNA, 19 nt, Homo sapiens
  misc_RNA (1)...(19): siRNA sense strand
gggauccuacuccaucaau

SEQ ID NO: 1696988 - RNA, 19 nt, Homo sapiens
  misc_RNA (1)...(19): siRNA sense strand
ccacuggccagggaagcua

SEQ ID NO: 1696989 - RNA, 19 nt, Homo sapiens
  misc_RNA (1)...(19): siRNA sense strand
ucuuugagcguccuuccua

SEQ ID NO: 1696990 - RNA, 19 nt, Homo sapiens
  misc_RNA (1)...(19): siRNA sense strand
caagauugcugaauacaaa

SEQ ID NO: 1696991 - RNA, 19 nt, Homo sapiens
  misc_RNA (1)...(19): siRNA sense strand
gaagucaagucgagucuau

SEQ ID NO: 1696992 - RNA, 19 nt, Homo sapiens
  misc_RNA (1)...(19): siRNA sense strand
ggacaagauugcugaauac

SEQ ID NO: 1696993 - RNA, 19 nt, Homo sapiens
  misc_RNA (1)...(19): siRNA sense strand
caacgaggcuuggagauuc

SEQ ID NO: 1696994 - RNA, 19 nt, Homo sapiens
  misc_RNA (1)...(19): siRNA sense strand
cgacagaacccgacuaugu

SEQ ID NO: 1696995 - RNA, 19 nt, Homo sapiens
  misc_RNA (1)...(19): siRNA sense strand
uggacaagauugcugaaua

SEQ ID NO: 1696996 - RNA, 19 nt, Homo sapiens
  misc_RNA (1)...(19): siRNA sense strand
caucagagcacaucaaauc

SEQ ID NO: 1696997 - RNA, 19 nt, Homo sapiens
  misc_RNA (1)...(19): siRNA sense strand
acacagacauacccaguug

SEQ ID NO: 1696998 - RNA, 19 nt, Homo sapiens
  misc_RNA (1)...(19): siRNA sense strand
ccaaagugguggacaagau

SEQ ID NO: 1696999 - RNA, 19 nt, Homo sapiens
  misc_RNA (1)...(19): siRNA sense strand
caauggagauucccagagu

SEQ ID NO: 1697000 - RNA, 19 nt, Homo sapiens
  misc_RNA (1)...(19): siRNA sense strand
gaagaggaaacgugaugaa

SEQ ID NO: 1697001 - RNA, 19 nt, Homo sapiens
  misc_RNA (1)...(19): siRNA sense strand
gacagaacccgacuauguu

SEQ ID NO: 1697002 - RNA, 19 nt, Homo sapiens
  misc_RNA (1)...(19): siRNA sense strand
gagaagaggaaacgugaug

SEQ ID NO: 1697003 - RNA, 19 nt, Homo sapiens
  misc_RNA (1)...(19): siRNA sense strand
cagagcacaucaaaucaga

SEQ ID NO: 1697004 - RNA, 19 nt, Homo sapiens
  misc_RNA (1)...(19): siRNA sense strand
agagugguguggacaguuu

SEQ ID NO: 1697005 - RNA, 19 nt, Homo sapiens
  misc_RNA (1)...(19): siRNA sense strand
gagggcaucugugacaaug

SEQ ID NO: 1697006 - RNA, 19 nt, Homo sapiens
  misc_RNA (1)...(19): siRNA sense strand
caaagugguggacaagauu

SEQ ID NO: 1697007 - RNA, 19 nt, Homo sapiens
  misc_RNA (1)...(19): siRNA sense strand
cagcgucucuuccaucaac

SEQ ID NO: 1697008 - RNA, 19 nt, Homo sapiens
  misc_RNA (1)...(19): siRNA sense strand
gcacaucaaaucagaacag

SEQ ID NO: 1697009 - RNA, 19 nt, Homo sapiens
  misc_RNA (1)...(19): siRNA sense strand
ccuaugaccgccacuaguu

SEQ ID NO: 1697010 - RNA, 19 nt, Homo sapiens
  misc_RNA (1)...(19): siRNA sense strand
gggcaucugugacaaugac

SEQ ID NO: 1697011 - RNA, 19 nt, Homo sapiens
  misc_RNA (1)...(19): siRNA sense strand
ucucuuccaucaacagaau

SEQ ID NO: 1697012 - RNA, 19 nt, Homo sapiens
  misc_RNA (1)...(19): siRNA sense strand
ggauccuacuccaucaaug

SEQ ID NO: 1697013 - RNA, 19 nt, Homo sapiens
  misc_RNA (1)...(19): siRNA sense strand
gggaccacaucaagcuuca

SEQ ID NO: 1697014 - RNA, 19 nt, Homo sapiens
  misc_RNA (1)...(19): siRNA sense strand
cuaugaccgccacuaguua

SEQ ID NO: 1697015 - RNA, 19 nt, Homo sapiens
  misc_RNA (1)...(19): siRNA sense strand
ggcaucagagcacaucaaa

SEQ ID NO: 1697016 - RNA, 19 nt, Homo sapiens
  misc_RNA (1)...(19): siRNA sense strand
ccaauggugagaagaggaa

SEQ ID NO: 1697017 - RNA, 19 nt, Homo sapiens
  misc_RNA (1)...(19): siRNA sense strand
gagcacaucaaaucagaac

SEQ ID NO: 1697018 - RNA, 19 nt, Homo sapiens
  misc_RNA (1)...(19): siRNA sense strand
agaaucauccggaccaaag

SEQ ID NO: 1697019 - RNA, 19 nt, Homo sapiens
  misc_RNA (1)...(19): siRNA sense strand
acaacgaggcuuggagauu

SEQ ID NO: 1697020 - RNA, 19 nt, Homo sapiens
  misc_RNA (1)...(19): siRNA sense strand
uauguucgccugggagauu

SEQ ID NO: 1697021 - RNA, 19 nt, Homo sapiens
  misc_RNA (1)...(19): siRNA sense strand
ccagagugguguggacagu

SEQ ID NO: 1697022 - RNA, 19 nt, Homo sapiens
  misc_RNA (1)...(19): siRNA sense strand
cccagcgucucuuccauca

SEQ ID NO: 1697023 - RNA, 19 nt, Homo sapiens
  misc_RNA (1)...(19): siRNA sense strand
acaagauugcugaauacaa

SEQ ID NO: 1697024 - RNA, 19 nt, Homo sapiens
  misc_RNA (1)...(19): siRNA sense strand
gggauccuacuccaucaau

SEQ ID NO: 1697025 - RNA, 19 nt, Homo sapiens
  misc_RNA (1)...(19): siRNA sense strand
cagcuucggccuccacauc

SEQ ID NO: 1697026 - RNA, 19 nt, Homo sapiens
  misc_RNA (1)...(19): siRNA sense strand
ccacuggccagggaagcua

SEQ ID NO: 1697027 - RNA, 19 nt, Homo sapiens
  misc_RNA (1)...(19): siRNA sense strand
ucuuugagcguccuuccua

SEQ ID NO: 1697028 - RNA, 19 nt, Homo sapiens
  misc_RNA (1)...(19): siRNA sense strand
caagauugcugaauacaaa

SEQ ID NO: 1697029 - RNA, 19 nt, Homo sapiens
  misc_RNA (1)...(19): siRNA sense strand
gaagucaagucgagucuau

SEQ ID NO: 1697030 - RNA, 19 nt, Homo sapiens
  misc_RNA (1)...(19): siRNA sense strand
ggacaagauugcugaauac

SEQ ID NO: 1697031 - RNA, 19 nt, Homo sapiens
  misc_RNA (1)...(19): siRNA sense strand
caacgaggcuuggagauuc

SEQ ID NO: 1697032 - RNA, 19 nt, Homo sapiens
  misc_RNA (1)...(19): siRNA sense strand
cgacagaacccgacuaugu

SEQ ID NO: 1697033 - RNA, 19 nt, Homo sapiens
  misc_RNA (1)...(19): siRNA sense strand
uggacaagauugcugaaua

SEQ ID NO: 1697034 - RNA, 19 nt, Homo sapiens
  misc_RNA (1)...(19): siRNA sense strand
caucagagcacaucaaauc

SEQ ID NO: 1697035 - RNA, 19 nt, Homo sapiens
  misc_RNA (1)...(19): siRNA sense strand
acacagacauacccaguug

SEQ ID NO: 1697036 - RNA, 19 nt, Homo sapiens
  misc_RNA (1)...(19): siRNA sense strand
ccaaagugguggacaagau

SEQ ID NO: 1697037 - RNA, 19 nt, Homo sapiens
  misc_RNA (1)...(19): siRNA sense strand
caauggagauucccagagu

SEQ ID NO: 1697038 - RNA, 19 nt, Homo sapiens
  misc_RNA (1)...(19): siRNA sense strand
gaagaggaaacgugaugaa

SEQ ID NO: 1697039 - RNA, 19 nt, Homo sapiens
  misc_RNA (1)...(19): siRNA sense strand
gacagaacccgacuauguu

SEQ ID NO: 1697040 - RNA, 19 nt, Homo sapiens
  misc_RNA (1)...(19): siRNA sense strand
gagaagaggaaacgugaug

SEQ ID NO: 1697041 - RNA, 19 nt, Homo sapiens
  misc_RNA (1)...(19): siRNA sense strand
cagagcacaucaaaucaga

SEQ ID NO: 1697042 - RNA, 19 nt, Homo sapiens
  misc_RNA (1)...(19): siRNA sense strand
agagugguguggacaguuu

SEQ ID NO: 1697043 - RNA, 19 nt, Homo sapiens
  misc_RNA (1)...(19): siRNA sense strand
gagggcaucugugacaaug

SEQ ID NO: 1697044 - RNA, 19 nt, Homo sapiens
  misc_RNA (1)...(19): siRNA sense strand
caaagugguggacaagauu

SEQ ID NO: 1697045 - RNA, 19 nt, Homo sapiens
  misc_RNA (1)...(19): siRNA sense strand
cagcgucucuuccaucaac

SEQ ID NO: 1697046 - RNA, 19 nt, Homo sapiens
  misc_RNA (1)...(19): siRNA sense strand
gcacaucaaaucagaacag

SEQ ID NO: 1697047 - RNA, 19 nt, Homo sapiens
  misc_RNA (1)...(19): siRNA sense strand
ccuaugaccgccacuaguu

SEQ ID NO: 1697048 - RNA, 19 nt, Homo sapiens
  misc_RNA (1)...(19): siRNA sense strand
gggcaucugugacaaugac

SEQ ID NO: 1697049 - RNA, 19 nt, Homo sapiens
  misc_RNA (1)...(19): siRNA sense strand
ucucuuccaucaacagaau

SEQ ID NO: 1697050 - RNA, 19 nt, Homo sapiens
  misc_RNA (1)...(19): siRNA sense strand
ggauccuacuccaucaaug

SEQ ID NO: 1697051 - RNA, 19 nt, Homo sapiens
  misc_RNA (1)...(19): siRNA sense strand
gggaccacaucaagcuuca

SEQ ID NO: 1697052 - RNA, 19 nt, Homo sapiens
  misc_RNA (1)...(19): siRNA sense strand
cuaugaccgccacuaguua

SEQ ID NO: 1697053 - RNA, 19 nt, Homo sapiens
  misc_RNA (1)...(19): siRNA sense strand
ggcaucagagcacaucaaa

SEQ ID NO: 1697054 - RNA, 19 nt, Homo sapiens
  misc_RNA (1)...(19): siRNA sense strand
ccaauggugagaagaggaa

SEQ ID NO: 1697055 - RNA, 19 nt, Homo sapiens
  misc_RNA (1)...(19): siRNA sense strand
gagcacaucaaaucagaac

SEQ ID NO: 1697056 - RNA, 19 nt, Homo sapiens
  misc_RNA (1)...(19): siRNA sense strand
agaaucauccggaccaaag

SEQ ID NO: 1697057 - RNA, 19 nt, Homo sapiens
  misc_RNA (1)...(19): siRNA sense strand
acaacgaggcuuggagauu

SEQ ID NO: 1697058 - RNA, 19 nt, Homo sapiens
  misc_RNA (1)...(19): siRNA sense strand
uauguucgccugggagauu

SEQ ID NO: 1697059 - RNA, 19 nt, Homo sapiens
  misc_RNA (1)...(19): siRNA sense strand
ccagagugguguggacagu

SEQ ID NO: 1697060 - RNA, 19 nt, Homo sapiens
  misc_RNA (1)...(19): siRNA sense strand
cccagcgucucuuccauca

SEQ ID NO: 1697061 - RNA, 19 nt, Homo sapiens
  misc_RNA (1)...(19): siRNA sense strand
acaagauugcugaauacaa

SEQ ID NO: 1697062 - RNA, 19 nt, Homo sapiens
  misc_RNA (1)...(19): siRNA sense strand
gggauccuacuccaucaau

SEQ ID NO: 1697063 - RNA, 19 nt, Homo sapiens
  misc_RNA (1)...(19): siRNA sense strand
cagcuucggccuccacauc

SEQ ID NO: 1697064 - RNA, 19 nt, Homo sapiens
  misc_RNA (1)...(19): siRNA sense strand
ccacuggccagggaagcua

SEQ ID NO: 1697065 - RNA, 19 nt, Homo sapiens
  misc_RNA (1)...(19): siRNA sense strand
ucuuugagcguccuuccua

SEQ ID NO: 1697066 - RNA, 19 nt, Homo sapiens
  misc_RNA (1)...(19): siRNA sense strand
gagauaauccggucuagua

SEQ ID NO: 1697067 - RNA, 19 nt, Homo sapiens
  misc_RNA (1)...(19): siRNA sense strand
ccaacaagcugcucagauu

SEQ ID NO: 1697068 - RNA, 19 nt, Homo sapiens
  misc_RNA (1)...(19): siRNA sense strand
acaaugagguuaacaauuc

SEQ ID NO: 1697069 - RNA, 19 nt, Homo sapiens
  misc_RNA (1)...(19): siRNA sense strand
gaugaaagacugaaauuug

SEQ ID NO: 1697070 - RNA, 19 nt, Homo sapiens
  misc_RNA (1)...(19): siRNA sense strand
gaacaaauccguggaagug

SEQ ID NO: 1697071 - RNA, 19 nt, Homo sapiens
  misc_RNA (1)...(19): siRNA sense strand
agaaaucaguggcucauaa

SEQ ID NO: 1697072 - RNA, 19 nt, Homo sapiens
  misc_RNA (1)...(19): siRNA sense strand
ugacugaagugaagacuga

SEQ ID NO: 1697073 - RNA, 19 nt, Homo sapiens
  misc_RNA (1)...(19): siRNA sense strand
acaagucacuguuacauga

SEQ ID NO: 1697074 - RNA, 19 nt, Homo sapiens
  misc_RNA (1)...(19): siRNA sense strand
caacggaacccuccucuau

SEQ ID NO: 1697075 - RNA, 19 nt, Homo sapiens
  misc_RNA (1)...(19): siRNA sense strand
cagcugaagugguuuauuc

SEQ ID NO: 1697076 - RNA, 19 nt, Homo sapiens
  misc_RNA (1)...(19): siRNA sense strand
gaaauuccuuaccuaaagu

SEQ ID NO: 1697077 - RNA, 19 nt, Homo sapiens
  misc_RNA (1)...(19): siRNA sense strand
ugacagcacugacaacauc

SEQ ID NO: 1697078 - RNA, 19 nt, Homo sapiens
  misc_RNA (1)...(19): siRNA sense strand
gugcaugccugcccacuga

SEQ ID NO: 1697079 - RNA, 19 nt, Homo sapiens
  misc_RNA (1)...(19): siRNA sense strand
uacaacagcugaagugguu

SEQ ID NO: 1697080 - RNA, 19 nt, Homo sapiens
  misc_RNA (1)...(19): siRNA sense strand
gcacugacaacaucacuau

SEQ ID NO: 1697081 - RNA, 19 nt, Homo sapiens
  misc_RNA (1)...(19): siRNA sense strand
gagaauaugucgucaugac

SEQ ID NO: 1697082 - RNA, 19 nt, Homo sapiens
  misc_RNA (1)...(19): siRNA sense strand
gacauggaguacacuauug

SEQ ID NO: 1697083 - RNA, 19 nt, Homo sapiens
  misc_RNA (1)...(19): siRNA sense strand
cgacugagaccaagaccua

SEQ ID NO: 1697084 - RNA, 19 nt, Homo sapiens
  misc_RNA (1)...(19): siRNA sense strand
gaacccuccucuauacaau

SEQ ID NO: 1697085 - RNA, 19 nt, Homo sapiens
  misc_RNA (1)...(19): siRNA sense strand
agaaauuccuuaccuaaag

SEQ ID NO: 1697086 - RNA, 19 nt, Homo sapiens
  misc_RNA (1)...(19): siRNA sense strand
caacagcugaagugguuua

SEQ ID NO: 1697087 - RNA, 19 nt, Homo sapiens
  misc_RNA (1)...(19): siRNA sense strand
ggaaucaagacgacaagaa

SEQ ID NO: 1697088 - RNA, 19 nt, Homo sapiens
  misc_RNA (1)...(19): siRNA sense strand
gaagugguuuauucuugga

SEQ ID NO: 1697089 - RNA, 19 nt, Homo sapiens
  misc_RNA (1)...(19): siRNA sense strand
ccagaaauuccuuaccuaa

SEQ ID NO: 1697090 - RNA, 19 nt, Homo sapiens
  misc_RNA (1)...(19): siRNA sense strand
gauaaucacacaaacaagu

SEQ ID NO: 1697091 - RNA, 19 nt, Homo sapiens
  misc_RNA (1)...(19): siRNA sense strand
cagaggcccuggagaugaa

SEQ ID NO: 1697092 - RNA, 19 nt, Homo sapiens
  misc_RNA (1)...(19): siRNA sense strand
gccagaaauuccuuaccua

SEQ ID NO: 1697093 - RNA, 19 nt, Homo sapiens
  misc_RNA (1)...(19): siRNA sense strand
gaaagacugaaauuugaug

SEQ ID NO: 1697094 - RNA, 19 nt, Homo sapiens
  misc_RNA (1)...(19): siRNA sense strand
ggccaaggacacugaauuu

SEQ ID NO: 1697095 - RNA, 19 nt, Homo sapiens
  misc_RNA (1)...(19): siRNA sense strand
gaguaucagugccagaaau

SEQ ID NO: 1697096 - RNA, 19 nt, Homo sapiens
  misc_RNA (1)...(19): siRNA sense strand
acaaucuccuggcuaguaa

SEQ ID NO: 1697097 - RNA, 19 nt, Homo sapiens
  misc_RNA (1)...(19): siRNA sense strand
ccaugcauuuggaagauuu

SEQ ID NO: 1697098 - RNA, 19 nt, Homo sapiens
  misc_RNA (1)...(19): siRNA sense strand
aaaauuggcuacuuuguga

SEQ ID NO: 1697099 - RNA, 19 nt, Homo sapiens
  misc_RNA (1)...(19): siRNA sense strand
gaaccaguaugaccuuuug

SEQ ID NO: 1697100 - RNA, 19 nt, Homo sapiens
  misc_RNA (1)...(19): siRNA sense strand
cgacggccauggacugguu

SEQ ID NO: 1697101 - RNA, 19 nt, Homo sapiens
  misc_RNA (1)...(19): siRNA sense strand
caucuuuccugugcucuuu

SEQ ID NO: 1697102 - RNA, 19 nt, Homo sapiens
  misc_RNA (1)...(19): siRNA sense strand
uuucugcacugauugaauu

SEQ ID NO: 1697103 - RNA, 19 nt, Homo sapiens
  misc_RNA (1)...(19): siRNA sense strand
cugaagugguuuauucuug

SEQ ID NO: 1697104 - RNA, 19 nt, Homo sapiens
  misc_RNA (1)...(19): siRNA sense strand
ugacauggaguacacuauu

SEQ ID NO: 1697105 - RNA, 19 nt, Homo sapiens
  misc_RNA (1)...(19): siRNA sense strand
cauauucaaucuggucuau

SEQ ID NO: 1697106 - RNA, 19 nt, Homo sapiens
  misc_RNA (1)...(19): siRNA sense strand
ccaucaaccuggccaagga

SEQ ID NO: 1697107 - RNA, 19 nt, Homo sapiens
  misc_RNA (1)...(19): siRNA sense strand
caggaugguucucgcuuga

SEQ ID NO: 1697108 - RNA, 19 nt, Homo sapiens
  misc_RNA (1)...(19): siRNA sense strand
gggauucuuuuccugauua

SEQ ID NO: 1697109 - RNA, 19 nt, Homo sapiens
  misc_RNA (1)...(19): siRNA sense strand
caacaagcugcucagauug

SEQ ID NO: 1697110 - RNA, 19 nt, Homo sapiens
  misc_RNA (1)...(19): siRNA sense strand
cagaaauuccuuaccuaaa

SEQ ID NO: 1697111 - RNA, 19 nt, Homo sapiens
  misc_RNA (1)...(19): siRNA sense strand
caaugagguuaacaauuca

SEQ ID NO: 1697112 - RNA, 19 nt, Homo sapiens
  misc_RNA (1)...(19): siRNA sense strand
ggaacccuccucuauacaa

SEQ ID NO: 1697113 - RNA, 19 nt, Homo sapiens
  misc_RNA (1)...(19): siRNA sense strand
cagcaagguugacaaaauu

SEQ ID NO: 1697114 - RNA, 19 nt, Homo sapiens
  misc_RNA (1)...(19): siRNA sense strand
acaucuacgugaccaguuu

SEQ ID NO: 1697115 - RNA, 19 nt, Homo sapiens
  misc_RNA (1)...(19): siRNA sense strand
gaccaagaccuacaacagu

SEQ ID NO: 1697116 - RNA, 19 nt, Homo sapiens
  misc_RNA (1)...(19): siRNA sense strand
gacaacaucacuaucuuca

SEQ ID NO: 1697117 - RNA, 19 nt, Homo sapiens
  misc_RNA (1)...(19): siRNA sense strand
agaccuacuugccauguau

SEQ ID NO: 1697118 - RNA, 19 nt, Homo sapiens
  misc_RNA (1)...(19): siRNA sense strand
cgucuguuaugccuuugua

SEQ ID NO: 1697119 - RNA, 19 nt, Homo sapiens
  misc_RNA (1)...(19): siRNA sense strand
caggacagcccgacugaga

SEQ ID NO: 1697120 - RNA, 19 nt, Homo sapiens
  misc_RNA (1)...(19): siRNA sense strand
gaagcuaugccuauacaac

SEQ ID NO: 1697121 - RNA, 19 nt, Homo sapiens
  misc_RNA (1)...(19): siRNA sense strand
gcacuaccuucaacaucgu

SEQ ID NO: 1697122 - RNA, 19 nt, Homo sapiens
  misc_RNA (1)...(19): siRNA sense strand
gcaaagaaaaccagcacua

SEQ ID NO: 1697123 - RNA, 19 nt, Homo sapiens
  misc_RNA (1)...(19): siRNA sense strand
aggagaauaugucgucaug

SEQ ID NO: 1697124 - RNA, 19 nt, Homo sapiens
  misc_RNA (1)...(19): siRNA sense strand
ggacaccuucuuccacaau

SEQ ID NO: 1697125 - RNA, 19 nt, Homo sapiens
  misc_RNA (1)...(19): siRNA sense strand
ccacugugcuuaccaugac

SEQ ID NO: 1697126 - RNA, 19 nt, Homo sapiens
  misc_RNA (1)...(19): siRNA sense strand
gaaucaagacgacaagaac

SEQ ID NO: 1697127 - RNA, 19 nt, Homo sapiens
  misc_RNA (1)...(19): siRNA sense strand
gaaaucaguggcucauaac

SEQ ID NO: 1697128 - RNA, 19 nt, Homo sapiens
  misc_RNA (1)...(19): siRNA sense strand
ggacaccggacaccuucuu

SEQ ID NO: 1697129 - RNA, 19 nt, Homo sapiens
  misc_RNA (1)...(19): siRNA sense strand
gcaugauccgcaaacagua

SEQ ID NO: 1697130 - RNA, 19 nt, Homo sapiens
  misc_RNA (1)...(19): siRNA sense strand
cccuggagaugaagaagaa

SEQ ID NO: 1697131 - RNA, 19 nt, Homo sapiens
  misc_RNA (1)...(19): siRNA sense strand
cagaccuacuugccaugua

SEQ ID NO: 1697132 - RNA, 19 nt, Homo sapiens
  misc_RNA (1)...(19): siRNA sense strand
uugccacugucaacuauuu

SEQ ID NO: 1697133 - RNA, 19 nt, Homo sapiens
  misc_RNA (1)...(19): siRNA sense strand
ugauugaauuugccacugu

SEQ ID NO: 1697134 - RNA, 19 nt, Homo sapiens
  misc_RNA (1)...(19): siRNA sense strand
uaucuucaccagaaucuug

SEQ ID NO: 1697135 - RNA, 19 nt, Homo sapiens
  misc_RNA (1)...(19): siRNA sense strand
gcucuuugccauauucaau

SEQ ID NO: 1697136 - RNA, 19 nt, Homo sapiens
  misc_RNA (1)...(19): siRNA sense strand
uuuggaagcuaugccuaua

SEQ ID NO: 1697137 - RNA, 19 nt, Homo sapiens
  misc_RNA (1)...(19): siRNA sense strand
ccacugaaguuuggaagcu

SEQ ID NO: 1697138 - RNA, 19 nt, Homo sapiens
  misc_RNA (1)...(19): siRNA sense strand
acaacccacuuccaucuca

SEQ ID NO: 1697139 - RNA, 19 nt, Homo sapiens
  misc_RNA (1)...(19): siRNA sense strand
uggaagcuaugccuauaca

SEQ ID NO: 1697140 - RNA, 19 nt, Homo sapiens
  misc_RNA (1)...(19): siRNA sense strand
gcuuggagaugcagugacu

SEQ ID NO: 1697141 - RNA, 19 nt, Homo sapiens
  misc_RNA (1)...(19): siRNA sense strand
ggcaugauccgcaaacagu

SEQ ID NO: 1697142 - RNA, 19 nt, Homo sapiens
  misc_RNA (1)...(19): siRNA sense strand
gacaaaauuucccgcauca

SEQ ID NO: 1697143 - RNA, 19 nt, Homo sapiens
  misc_RNA (1)...(19): siRNA sense strand
uaccuaaaguggcauaugc

SEQ ID NO: 1697144 - RNA, 19 nt, Homo sapiens
  misc_RNA (1)...(19): siRNA sense strand
gucauucugucacaagugu

SEQ ID NO: 1697145 - RNA, 19 nt, Homo sapiens
  misc_RNA (1)...(19): siRNA sense strand
caacccacuuccaucucaa

SEQ ID NO: 1697146 - RNA, 19 nt, Homo sapiens
  misc_RNA (1)...(19): siRNA sense strand
cugagugucccaugcauuu

SEQ ID NO: 1697147 - RNA, 19 nt, Homo sapiens
  misc_RNA (1)...(19): siRNA sense strand
gaugacagcacugacaaca

SEQ ID NO: 1697148 - RNA, 19 nt, Homo sapiens
  misc_RNA (1)...(19): siRNA sense strand
caacagugucagcaagguu

SEQ ID NO: 1697149 - RNA, 19 nt, Homo sapiens
  misc_RNA (1)...(19): siRNA sense strand
aaucuuggaucgucuucug

SEQ ID NO: 1697150 - RNA, 19 nt, Homo sapiens
  misc_RNA (1)...(19): siRNA sense strand
gaagugaagacugacaucu

SEQ ID NO: 1697151 - RNA, 19 nt, Homo sapiens
  misc_RNA (1)...(19): siRNA sense strand
ucacuaucuucaccagaau

SEQ ID NO: 1697152 - RNA, 19 nt, Homo sapiens
  misc_RNA (1)...(19): siRNA sense strand
ccugugcucuuugccauau

SEQ ID NO: 1697153 - RNA, 19 nt, Homo sapiens
  misc_RNA (1)...(19): siRNA sense strand
ggucuaguacaggagaaua

SEQ ID NO: 1697154 - RNA, 19 nt, Homo sapiens
  misc_RNA (1)...(19): siRNA sense strand
gauaauccggucuaguaca

SEQ ID NO: 1697155 - RNA, 19 nt, Homo sapiens
  misc_RNA (1)...(19): siRNA sense strand
aaagaacaaauccguggaa

SEQ ID NO: 1697156 - RNA, 19 nt, Homo sapiens
  misc_RNA (1)...(19): siRNA sense strand
gacaccuucuuccacaaug

SEQ ID NO: 1697157 - RNA, 19 nt, Homo sapiens
  misc_RNA (1)...(19): siRNA sense strand
agugaagacugacaucuac

SEQ ID NO: 1697158 - RNA, 19 nt, Homo sapiens
  misc_RNA (1)...(19): siRNA sense strand
gaccaccuaucccaucaac

SEQ ID NO: 1697159 - RNA, 19 nt, Homo sapiens
  misc_RNA (1)...(19): siRNA sense strand
acggaacccuccucuauac

SEQ ID NO: 1697160 - RNA, 19 nt, Homo sapiens
  misc_RNA (1)...(19): siRNA sense strand
aacaaucuccuggcuagua

SEQ ID NO: 1697161 - RNA, 19 nt, Homo sapiens
  misc_RNA (1)...(19): siRNA sense strand
acacugacauggaguacac

SEQ ID NO: 1697162 - RNA, 19 nt, Homo sapiens
  misc_RNA (1)...(19): siRNA sense strand
ugacaacccacuuccaucu

SEQ ID NO: 1697163 - RNA, 19 nt, Homo sapiens
  misc_RNA (1)...(19): siRNA sense strand
ucagcaagguugacaaaau

SEQ ID NO: 1697164 - RNA, 19 nt, Homo sapiens
  misc_RNA (1)...(19): siRNA sense strand
aacggaacccuccucuaua

SEQ ID NO: 1697165 - RNA, 19 nt, Homo sapiens
  misc_RNA (1)...(19): siRNA sense strand
ucuauugggccacauaugu

SEQ ID NO: 1697166 - RNA, 19 nt, Homo sapiens
  misc_RNA (1)...(19): siRNA sense strand
ccaaggagcugaucaauaa

SEQ ID NO: 1697167 - RNA, 19 nt, Homo sapiens
  misc_RNA (1)...(19): siRNA sense strand
gaagaagagaagaucaaua

SEQ ID NO: 1697168 - RNA, 19 nt, Homo sapiens
  misc_RNA (1)...(19): siRNA sense strand
ggagaacauuaucgacauu

SEQ ID NO: 1697169 - RNA, 19 nt, Homo sapiens
  misc_RNA (1)...(19): siRNA sense strand
gaggaggugugccagacua

SEQ ID NO: 1697170 - RNA, 19 nt, Homo sapiens
  misc_RNA (1)...(19): siRNA sense strand
gaaaccugcuaguggagaa

SEQ ID NO: 1697171 - RNA, 19 nt, Homo sapiens
  misc_RNA (1)...(19): siRNA sense strand
ggcagaagcaguuguuaaa

SEQ ID NO: 1697172 - RNA, 19 nt, Homo sapiens
  misc_RNA (1)...(19): siRNA sense strand
gcgaggagcaugaagaaga

SEQ ID NO: 1697173 - RNA, 19 nt, Homo sapiens
  misc_RNA (1)...(19): siRNA sense strand
gccaaggagcugaucaaua

SEQ ID NO: 1697174 - RNA, 19 nt, Homo sapiens
  misc_RNA (1)...(19): siRNA sense strand
gaacauuaucgacauuuac

SEQ ID NO: 1697175 - RNA, 19 nt, Homo sapiens
  misc_RNA (1)...(19): siRNA sense strand
ggucuucggugcccacaag

SEQ ID NO: 1697176 - RNA, 19 nt, Homo sapiens
  misc_RNA (1)...(19): siRNA sense strand
gagaacauuaucgacauuu

SEQ ID NO: 1697177 - RNA, 19 nt, Homo sapiens
  misc_RNA (1)...(19): siRNA sense strand
ggaggcagaagcaguuguu

SEQ ID NO: 1697178 - RNA, 19 nt, Homo sapiens
  misc_RNA (1)...(19): siRNA sense strand
cauggaagagccacaaaug

SEQ ID NO: 1697179 - RNA, 19 nt, Homo sapiens
  misc_RNA (1)...(19): siRNA sense strand
caaccugugccgcaaaugu

SEQ ID NO: 1697180 - RNA, 19 nt, Homo sapiens
  misc_RNA (1)...(19): siRNA sense strand
cgaggagcaugaagaagag

SEQ ID NO: 1697181 - RNA, 19 nt, Homo sapiens
  misc_RNA (1)...(19): siRNA sense strand
gccagacuaucgaggacaa

SEQ ID NO: 1697182 - RNA, 19 nt, Homo sapiens
  misc_RNA (1)...(19): siRNA sense strand
agaagcaguuguuaaacca

SEQ ID NO: 1697183 - RNA, 19 nt, Homo sapiens
  misc_RNA (1)...(19): siRNA sense strand
aagcagugaucacacagau

SEQ ID NO: 1697184 - RNA, 19 nt, Homo sapiens
  misc_RNA (1)...(19): siRNA sense strand
cagaagcaguuguuaaacc

SEQ ID NO: 1697185 - RNA, 19 nt, Homo sapiens
  misc_RNA (1)...(19): siRNA sense strand
uggagaacauuaucgacau

SEQ ID NO: 1697186 - RNA, 19 nt, Homo sapiens
  misc_RNA (1)...(19): siRNA sense strand
ccacaaauggcgcuguauc

SEQ ID NO: 1697187 - RNA, 19 nt, Homo sapiens
  misc_RNA (1)...(19): siRNA sense strand
gugcgaggagcaugaagaa

SEQ ID NO: 1697188 - RNA, 19 nt, Homo sapiens
  misc_RNA (1)...(19): siRNA sense strand
ucuacggccugcagcgaaa

SEQ ID NO: 1697189 - RNA, 19 nt, Homo sapiens
  misc_RNA (1)...(19): siRNA sense strand
ccacugcccaccauuuaca

SEQ ID NO: 1697190 - RNA, 19 nt, Homo sapiens
  misc_RNA (1)...(19): siRNA sense strand
gcaugaagaagagaagauc

SEQ ID NO: 1697191 - RNA, 19 nt, Homo sapiens
  misc_RNA (1)...(19): siRNA sense strand
gaggcagaagcaguuguua

SEQ ID NO: 1697192 - RNA, 19 nt, Homo sapiens
  misc_RNA (1)...(19): siRNA sense strand
cagacuaucgaggacaaua

SEQ ID NO: 1697193 - RNA, 19 nt, Homo sapiens
  misc_RNA (1)...(19): siRNA sense strand
auggagcaauucaccguaa

SEQ ID NO: 1697194 - RNA, 19 nt, Homo sapiens
  misc_RNA (1)...(19): siRNA sense strand
aggcagaagcaguuguuaa

SEQ ID NO: 1697195 - RNA, 19 nt, Homo sapiens
  misc_RNA (1)...(19): siRNA sense strand
ggccucgaauccucuaugg

SEQ ID NO: 1697196 - RNA, 19 nt, Homo sapiens
  misc_RNA (1)...(19): siRNA sense strand
augagagcauggagcaauu

SEQ ID NO: 1697197 - RNA, 19 nt, Homo sapiens
  misc_RNA (1)...(19): siRNA sense strand
ggagcacguggccgaaaug

SEQ ID NO: 1697198 - RNA, 19 nt, Homo sapiens
  misc_RNA (1)...(19): siRNA sense strand
gagcaugaagaagagaaga

SEQ ID NO: 1697199 - RNA, 19 nt, Homo sapiens
  misc_RNA (1)...(19): siRNA sense strand
gagagcauggagcaauuca

SEQ ID NO: 1697200 - RNA, 19 nt, Homo sapiens
  misc_RNA (1)...(19): siRNA sense strand
ggccucauccgucaguaug

SEQ ID NO: 1697201 - RNA, 19 nt, Homo sapiens
  misc_RNA (1)...(19): siRNA sense strand
gcagaagcaguuguuaaac

SEQ ID NO: 1697202 - RNA, 19 nt, Homo sapiens
  misc_RNA (1)...(19): siRNA sense strand
gugcccaccugcucucucu

SEQ ID NO: 1697203 - RNA, 19 nt, Homo sapiens
  misc_RNA (1)...(19): siRNA sense strand
ugaagaagagaagaucaau

SEQ ID NO: 1697204 - RNA, 19 nt, Homo sapiens
  misc_RNA (1)...(19): siRNA sense strand
uuaucgacauuuacaagca

SEQ ID NO: 1697205 - RNA, 19 nt, Homo sapiens
  misc_RNA (1)...(19): siRNA sense strand
uggagcacguggccgaaau

SEQ ID NO: 1697206 - RNA, 19 nt, Homo sapiens
  misc_RNA (1)...(19): siRNA sense strand
ugcaagcagugaucacaca

SEQ ID NO: 1697207 - RNA, 19 nt, Homo sapiens
  misc_RNA (1)...(19): siRNA sense strand
gcuaguggagaacauuauc

SEQ ID NO: 1697208 - RNA, 19 nt, Homo sapiens
  misc_RNA (1)...(19): siRNA sense strand
uaugagagcauggagcaau

SEQ ID NO: 1697209 - RNA, 19 nt, Homo sapiens
  misc_RNA (1)...(19): siRNA sense strand
ccaaggagcugaucaauaa

SEQ ID NO: 1697210 - RNA, 19 nt, Homo sapiens
  misc_RNA (1)...(19): siRNA sense strand
gaagaagagaagaucaaua

SEQ ID NO: 1697211 - RNA, 19 nt, Homo sapiens
  misc_RNA (1)...(19): siRNA sense strand
ggagaacauuaucgacauu

SEQ ID NO: 1697212 - RNA, 19 nt, Homo sapiens
  misc_RNA (1)...(19): siRNA sense strand
gaggaggugugccagacua

SEQ ID NO: 1697213 - RNA, 19 nt, Homo sapiens
  misc_RNA (1)...(19): siRNA sense strand
gaaaccugcuaguggagaa

SEQ ID NO: 1697214 - RNA, 19 nt, Homo sapiens
  misc_RNA (1)...(19): siRNA sense strand
ggcagaagcaguuguuaaa

SEQ ID NO: 1697215 - RNA, 19 nt, Homo sapiens
  misc_RNA (1)...(19): siRNA sense strand
gcgaggagcaugaagaaga

SEQ ID NO: 1697216 - RNA, 19 nt, Homo sapiens
  misc_RNA (1)...(19): siRNA sense strand
gccaaggagcugaucaaua

SEQ ID NO: 1697217 - RNA, 19 nt, Homo sapiens
  misc_RNA (1)...(19): siRNA sense strand
gaacauuaucgacauuuac

SEQ ID NO: 1697218 - RNA, 19 nt, Homo sapiens
  misc_RNA (1)...(19): siRNA sense strand
ggucuucggugcccacaag

SEQ ID NO: 1697219 - RNA, 19 nt, Homo sapiens
  misc_RNA (1)...(19): siRNA sense strand
gagaacauuaucgacauuu

SEQ ID NO: 1697220 - RNA, 19 nt, Homo sapiens
  misc_RNA (1)...(19): siRNA sense strand
ggaggcagaagcaguuguu

SEQ ID NO: 1697221 - RNA, 19 nt, Homo sapiens
  misc_RNA (1)...(19): siRNA sense strand
cauggaagagccacaaaug

SEQ ID NO: 1697222 - RNA, 19 nt, Homo sapiens
  misc_RNA (1)...(19): siRNA sense strand
caaccugugccgcaaaugu

SEQ ID NO: 1697223 - RNA, 19 nt, Homo sapiens
  misc_RNA (1)...(19): siRNA sense strand
cgaggagcaugaagaagag

SEQ ID NO: 1697224 - RNA, 19 nt, Homo sapiens
  misc_RNA (1)...(19): siRNA sense strand
gccagacuaucgaggacaa

SEQ ID NO: 1697225 - RNA, 19 nt, Homo sapiens
  misc_RNA (1)...(19): siRNA sense strand
agaagcaguuguuaaacca

SEQ ID NO: 1697226 - RNA, 19 nt, Homo sapiens
  misc_RNA (1)...(19): siRNA sense strand
aagcagugaucacacagau

SEQ ID NO: 1697227 - RNA, 19 nt, Homo sapiens
  misc_RNA (1)...(19): siRNA sense strand
cagaagcaguuguuaaacc

SEQ ID NO: 1697228 - RNA, 19 nt, Homo sapiens
  misc_RNA (1)...(19): siRNA sense strand
uggagaacauuaucgacau

SEQ ID NO: 1697229 - RNA, 19 nt, Homo sapiens
  misc_RNA (1)...(19): siRNA sense strand
ccacaaauggcgcuguauc

SEQ ID NO: 1697230 - RNA, 19 nt, Homo sapiens
  misc_RNA (1)...(19): siRNA sense strand
gugcgaggagcaugaagaa

SEQ ID NO: 1697231 - RNA, 19 nt, Homo sapiens
  misc_RNA (1)...(19): siRNA sense strand
ucuacggccugcagcgaaa

SEQ ID NO: 1697232 - RNA, 19 nt, Homo sapiens
  misc_RNA (1)...(19): siRNA sense strand
ccacugcccaccauuuaca

SEQ ID NO: 1697233 - RNA, 19 nt, Homo sapiens
  misc_RNA (1)...(19): siRNA sense strand
gcaugaagaagagaagauc

SEQ ID NO: 1697234 - RNA, 19 nt, Homo sapiens
  misc_RNA (1)...(19): siRNA sense strand
gaggcagaagcaguuguua

SEQ ID NO: 1697235 - RNA, 19 nt, Homo sapiens
  misc_RNA (1)...(19): siRNA sense strand
cagacuaucgaggacaaua

SEQ ID NO: 1697236 - RNA, 19 nt, Homo sapiens
  misc_RNA (1)...(19): siRNA sense strand
auggagcaauucaccguaa

SEQ ID NO: 1697237 - RNA, 19 nt, Homo sapiens
  misc_RNA (1)...(19): siRNA sense strand
aggcagaagcaguuguuaa

SEQ ID NO: 1697238 - RNA, 19 nt, Homo sapiens
  misc_RNA (1)...(19): siRNA sense strand
ggccucgaauccucuaugg

SEQ ID NO: 1697239 - RNA, 19 nt, Homo sapiens
  misc_RNA (1)...(19): siRNA sense strand
augagagcauggagcaauu

SEQ ID NO: 1697240 - RNA, 19 nt, Homo sapiens
  misc_RNA (1)...(19): siRNA sense strand
ggagcacguggccgaaaug

SEQ ID NO: 1697241 - RNA, 19 nt, Homo sapiens
  misc_RNA (1)...(19): siRNA sense strand
gagcaugaagaagagaaga

SEQ ID NO: 1697242 - RNA, 19 nt, Homo sapiens
  misc_RNA (1)...(19): siRNA sense strand
gagagcauggagcaauuca

SEQ ID NO: 1697243 - RNA, 19 nt, Homo sapiens
  misc_RNA (1)...(19): siRNA sense strand
ggccucauccgucaguaug

SEQ ID NO: 1697244 - RNA, 19 nt, Homo sapiens
  misc_RNA (1)...(19): siRNA sense strand
gcagaagcaguuguuaaac

SEQ ID NO: 1697245 - RNA, 19 nt, Homo sapiens
  misc_RNA (1)...(19): siRNA sense strand
gugcccaccugcucucucu

SEQ ID NO: 1697246 - RNA, 19 nt, Homo sapiens
  misc_RNA (1)...(19): siRNA sense strand
ugaagaagagaagaucaau

SEQ ID NO: 1697247 - RNA, 19 nt, Homo sapiens
  misc_RNA (1)...(19): siRNA sense strand
uuaucgacauuuacaagca

SEQ ID NO: 1697248 - RNA, 19 nt, Homo sapiens
  misc_RNA (1)...(19): siRNA sense strand
uggagcacguggccgaaau

SEQ ID NO: 1697249 - RNA, 19 nt, Homo sapiens
  misc_RNA (1)...(19): siRNA sense strand
ugcaagcagugaucacaca

SEQ ID NO: 1697250 - RNA, 19 nt, Homo sapiens
  misc_RNA (1)...(19): siRNA sense strand
gcuaguggagaacauuauc

SEQ ID NO: 1697251 - RNA, 19 nt, Homo sapiens
  misc_RNA (1)...(19): siRNA sense strand
uaugagagcauggagcaau

SEQ ID NO: 1697252 - RNA, 19 nt, Homo sapiens
  misc_RNA (1)...(19): siRNA sense strand
gcaaaggaauguuaaucua

SEQ ID NO: 1697253 - RNA, 19 nt, Homo sapiens
  misc_RNA (1)...(19): siRNA sense strand
gaauggauauuugcagaua

SEQ ID NO: 1697254 - RNA, 19 nt, Homo sapiens
  misc_RNA (1)...(19): siRNA sense strand
cagaaucacugaaagcaaa

SEQ ID NO: 1697255 - RNA, 19 nt, Homo sapiens
  misc_RNA (1)...(19): siRNA sense strand
caucguggcgcauguauua

SEQ ID NO: 1697256 - RNA, 19 nt, Homo sapiens
  misc_RNA (1)...(19): siRNA sense strand
gaagacaauuauucacguu

SEQ ID NO: 1697257 - RNA, 19 nt, Homo sapiens
  misc_RNA (1)...(19): siRNA sense strand
gaaaccaaauccugaucaa

SEQ ID NO: 1697258 - RNA, 19 nt, Homo sapiens
  misc_RNA (1)...(19): siRNA sense strand
caagagcaaaggaauguua

SEQ ID NO: 1697259 - RNA, 19 nt, Homo sapiens
  misc_RNA (1)...(19): siRNA sense strand
ccauuaaaguuacugguuu

SEQ ID NO: 1697260 - RNA, 19 nt, Homo sapiens
  misc_RNA (1)...(19): siRNA sense strand
uaaguacgauguucaagug

SEQ ID NO: 1697261 - RNA, 19 nt, Homo sapiens
  misc_RNA (1)...(19): siRNA sense strand
gaaaauaaacgcuccaaaa

SEQ ID NO: 1697262 - RNA, 19 nt, Homo sapiens
  misc_RNA (1)...(19): siRNA sense strand
gaaaccagaaucacugaaa

SEQ ID NO: 1697263 - RNA, 19 nt, Homo sapiens
  misc_RNA (1)...(19): siRNA sense strand
gaguggagccaaccuauuu

SEQ ID NO: 1697264 - RNA, 19 nt, Homo sapiens
  misc_RNA (1)...(19): siRNA sense strand
gcagaacgaccacucacua

SEQ ID NO: 1697265 - RNA, 19 nt, Homo sapiens
  misc_RNA (1)...(19): siRNA sense strand
caaauaaauccuccacuga

SEQ ID NO: 1697266 - RNA, 19 nt, Homo sapiens
  misc_RNA (1)...(19): siRNA sense strand
ccuggaaccucaauuguga

SEQ ID NO: 1697267 - RNA, 19 nt, Homo sapiens
  misc_RNA (1)...(19): siRNA sense strand
ucacgccauugaucaaaua

SEQ ID NO: 1697268 - RNA, 19 nt, Homo sapiens
  misc_RNA (1)...(19): siRNA sense strand
ccacaaacacuacagaaga

SEQ ID NO: 1697269 - RNA, 19 nt, Homo sapiens
  misc_RNA (1)...(19): siRNA sense strand
ugaaggaacucgucucucu

SEQ ID NO: 1697270 - RNA, 19 nt, Homo sapiens
  misc_RNA (1)...(19): siRNA sense strand
gagccaaccuauuuaugug

SEQ ID NO: 1697271 - RNA, 19 nt, Homo sapiens
  misc_RNA (1)...(19): siRNA sense strand
gaacucgucucucuaucca

SEQ ID NO: 1697272 - RNA, 19 nt, Homo sapiens
  misc_RNA (1)...(19): siRNA sense strand
gaagaugacuaugaaacca

SEQ ID NO: 1697273 - RNA, 19 nt, Homo sapiens
  misc_RNA (1)...(19): siRNA sense strand
ugacuuacuuccugaugaa

SEQ ID NO: 1697274 - RNA, 19 nt, Homo sapiens
  misc_RNA (1)...(19): siRNA sense strand
gaaagcaaauguguaacca

SEQ ID NO: 1697275 - RNA, 19 nt, Homo sapiens
  misc_RNA (1)...(19): siRNA sense strand
gcagggcucuggagugagu

SEQ ID NO: 1697276 - RNA, 19 nt, Homo sapiens
  misc_RNA (1)...(19): siRNA sense strand
gaaugucacagcagagauu

SEQ ID NO: 1697277 - RNA, 19 nt, Homo sapiens
  misc_RNA (1)...(19): siRNA sense strand
uacaaggaauggauauuug

SEQ ID NO: 1697278 - RNA, 19 nt, Homo sapiens
  misc_RNA (1)...(19): siRNA sense strand
guacgauguucaagugaga

SEQ ID NO: 1697279 - RNA, 19 nt, Homo sapiens
  misc_RNA (1)...(19): siRNA sense strand
ccugucaauuucaccauua

SEQ ID NO: 1697280 - RNA, 19 nt, Homo sapiens
  misc_RNA (1)...(19): siRNA sense strand
ggagccaaccuauuuaugu

SEQ ID NO: 1697281 - RNA, 19 nt, Homo sapiens
  misc_RNA (1)...(19): siRNA sense strand
agaaaccagugucugcuuu

SEQ ID NO: 1697282 - RNA, 19 nt, Homo sapiens
  misc_RNA (1)...(19): siRNA sense strand
gaacgaccacucacuacug

SEQ ID NO: 1697283 - RNA, 19 nt, Homo sapiens
  misc_RNA (1)...(19): siRNA sense strand
gaaggaacucgucucucua

SEQ ID NO: 1697284 - RNA, 19 nt, Homo sapiens
  misc_RNA (1)...(19): siRNA sense strand
gauacugcaagcugacuua

SEQ ID NO: 1697285 - RNA, 19 nt, Homo sapiens
  misc_RNA (1)...(19): siRNA sense strand
cuacagaagacaauuauuc

SEQ ID NO: 1697286 - RNA, 19 nt, Homo sapiens
  misc_RNA (1)...(19): siRNA sense strand
ccaaugcauucaucucaau

SEQ ID NO: 1697287 - RNA, 19 nt, Homo sapiens
  misc_RNA (1)...(19): siRNA sense strand
ggaccauccugcagaacga

SEQ ID NO: 1697288 - RNA, 19 nt, Homo sapiens
  misc_RNA (1)...(19): siRNA sense strand
aauaaacgcuccaaaagaa

SEQ ID NO: 1697289 - RNA, 19 nt, Homo sapiens
  misc_RNA (1)...(19): siRNA sense strand
caaaagaagaugacuauga

SEQ ID NO: 1697290 - RNA, 19 nt, Homo sapiens
  misc_RNA (1)...(19): siRNA sense strand
aaauaucgcaugcugguuu

SEQ ID NO: 1697291 - RNA, 19 nt, Homo sapiens
  misc_RNA (1)...(19): siRNA sense strand
aaauaaauccuccacugaa

SEQ ID NO: 1697292 - RNA, 19 nt, Homo sapiens
  misc_RNA (1)...(19): siRNA sense strand
cauuaaaguuacugguuug

SEQ ID NO: 1697293 - RNA, 19 nt, Homo sapiens
  misc_RNA (1)...(19): siRNA sense strand
aauaaauccuccacugaau

SEQ ID NO: 1697294 - RNA, 19 nt, Homo sapiens
  misc_RNA (1)...(19): siRNA sense strand
caaaggaauguuaaucuag

SEQ ID NO: 1697295 - RNA, 19 nt, Homo sapiens
  misc_RNA (1)...(19): siRNA sense strand
cgccauugaucaaauaaau

SEQ ID NO: 1697296 - RNA, 19 nt, Homo sapiens
  misc_RNA (1)...(19): siRNA sense strand
acacuacagaagacaauua

SEQ ID NO: 1697297 - RNA, 19 nt, Homo sapiens
  misc_RNA (1)...(19): siRNA sense strand
ggaaaccaaauccugauca

SEQ ID NO: 1697298 - RNA, 19 nt, Homo sapiens
  misc_RNA (1)...(19): siRNA sense strand
gaucaagagcaaaggaaug

SEQ ID NO: 1697299 - RNA, 19 nt, Homo sapiens
  misc_RNA (1)...(19): siRNA sense strand
ugaagaaugccaagaauac

SEQ ID NO: 1697300 - RNA, 19 nt, Homo sapiens
  misc_RNA (1)...(19): siRNA sense strand
gagcaaaggaauguuaauc

SEQ ID NO: 1697301 - RNA, 19 nt, Homo sapiens
  misc_RNA (1)...(19): siRNA sense strand
gaccaaugcauucaucuca

SEQ ID NO: 1697302 - RNA, 19 nt, Homo sapiens
  misc_RNA (1)...(19): siRNA sense strand
gaagaaugccaagaauaca

SEQ ID NO: 1697303 - RNA, 19 nt, Homo sapiens
  misc_RNA (1)...(19): siRNA sense strand
aaccaaauccugaucaaga

SEQ ID NO: 1697304 - RNA, 19 nt, Homo sapiens
  misc_RNA (1)...(19): siRNA sense strand
acugaaagcaaauguguaa

SEQ ID NO: 1697305 - RNA, 19 nt, Homo sapiens
  misc_RNA (1)...(19): siRNA sense strand
gcaaauguguaaccauccu

SEQ ID NO: 1697306 - RNA, 19 nt, Homo sapiens
  misc_RNA (1)...(19): siRNA sense strand
caagugagagcagcaguga

SEQ ID NO: 1697307 - RNA, 19 nt, Homo sapiens
  misc_RNA (1)...(19): siRNA sense strand
acugcaagcugacuuacuu

SEQ ID NO: 1697308 - RNA, 19 nt, Homo sapiens
  misc_RNA (1)...(19): siRNA sense strand
gcccuuugaucagcuguuu

SEQ ID NO: 1697309 - RNA, 19 nt, Homo sapiens
  misc_RNA (1)...(19): siRNA sense strand
uuaaggucauaccaaguuu

SEQ ID NO: 1697310 - RNA, 19 nt, Homo sapiens
  misc_RNA (1)...(19): siRNA sense strand
aggcagggcucuggaguga

SEQ ID NO: 1697311 - RNA, 19 nt, Homo sapiens
  misc_RNA (1)...(19): siRNA sense strand
ccauugcuuugauuaugaa

SEQ ID NO: 1697312 - RNA, 19 nt, Homo sapiens
  misc_RNA (1)...(19): siRNA sense strand
uaaauccuccacugaaugu

SEQ ID NO: 1697313 - RNA, 19 nt, Homo sapiens
  misc_RNA (1)...(19): siRNA sense strand
ggcuugcggugcuuguuaa

SEQ ID NO: 1697314 - RNA, 19 nt, Homo sapiens
  misc_RNA (1)...(19): siRNA sense strand
ucacuucucccaccuguca

SEQ ID NO: 1697315 - RNA, 19 nt, Homo sapiens
  misc_RNA (1)...(19): siRNA sense strand
cugaggacacgcaguauuu

SEQ ID NO: 1697316 - RNA, 19 nt, Homo sapiens
  misc_RNA (1)...(19): siRNA sense strand
aaaccagaaucacugaaag

SEQ ID NO: 1697317 - RNA, 19 nt, Homo sapiens
  misc_RNA (1)...(19): siRNA sense strand
uaaccauccuccacaaagg

SEQ ID NO: 1697318 - RNA, 19 nt, Homo sapiens
  misc_RNA (1)...(19): siRNA sense strand
ggauauuugcagauagaaa

SEQ ID NO: 1697319 - RNA, 19 nt, Homo sapiens
  misc_RNA (1)...(19): siRNA sense strand
acaauacaaggaauggaua

SEQ ID NO: 1697320 - RNA, 19 nt, Homo sapiens
  misc_RNA (1)...(19): siRNA sense strand
gaucaucguggcgcaugua

SEQ ID NO: 1697321 - RNA, 19 nt, Homo sapiens
  misc_RNA (1)...(19): siRNA sense strand
uccauugcuuugauuauga

SEQ ID NO: 1697322 - RNA, 19 nt, Homo sapiens
  misc_RNA (1)...(19): siRNA sense strand
gagaaaccagugucugcuu

SEQ ID NO: 1697323 - RNA, 19 nt, Homo sapiens
  misc_RNA (1)...(19): siRNA sense strand
ucacugaaagcaaaugugu

SEQ ID NO: 1697324 - RNA, 19 nt, Homo sapiens
  misc_RNA (1)...(19): siRNA sense strand
gcaccacaaacacuacaga

SEQ ID NO: 1697325 - RNA, 19 nt, Homo sapiens
  misc_RNA (1)...(19): siRNA sense strand
caaugcauucaucucaaua

SEQ ID NO: 1697326 - RNA, 19 nt, Homo sapiens
  misc_RNA (1)...(19): siRNA sense strand
gacugaagaaugccaagaa

SEQ ID NO: 1697327 - RNA, 19 nt, Homo sapiens
  misc_RNA (1)...(19): siRNA sense strand
guauggcucuuggacugaa

SEQ ID NO: 1697328 - RNA, 19 nt, Homo sapiens
  misc_RNA (1)...(19): siRNA sense strand
caagaauacagcaaagaca

SEQ ID NO: 1697329 - RNA, 19 nt, Homo sapiens
  misc_RNA (1)...(19): siRNA sense strand
guaaccauccuccacaaag

SEQ ID NO: 1697330 - RNA, 19 nt, Homo sapiens
  misc_RNA (1)...(19): siRNA sense strand
cugaagaaugccaagaaua

SEQ ID NO: 1697331 - RNA, 19 nt, Homo sapiens
  misc_RNA (1)...(19): siRNA sense strand
ucucccaccugucaauuuc

SEQ ID NO: 1697332 - RNA, 19 nt, Homo sapiens
  misc_RNA (1)...(19): siRNA sense strand
cauaccaaguuucccuuca

SEQ ID NO: 1697333 - RNA, 19 nt, Homo sapiens
  misc_RNA (1)...(19): siRNA sense strand
cacaaacacuacagaagac

SEQ ID NO: 1697334 - RNA, 19 nt, Homo sapiens
  misc_RNA (1)...(19): siRNA sense strand
cacugcaccuggcuuguug

SEQ ID NO: 1697335 - RNA, 19 nt, Homo sapiens
  misc_RNA (1)...(19): siRNA sense strand
ggaauggauauuugcagau

SEQ ID NO: 1697336 - RNA, 19 nt, Homo sapiens
  misc_RNA (1)...(19): siRNA sense strand
ggacugaagaaugccaaga

SEQ ID NO: 1697337 - RNA, 19 nt, Homo sapiens
  misc_RNA (1)...(19): siRNA sense strand
acucgucucucuauccaau

SEQ ID NO: 1697338 - RNA, 19 nt, Homo sapiens
  misc_RNA (1)...(19): siRNA sense strand
caauacaaggaauggauau

SEQ ID NO: 1697339 - RNA, 19 nt, Homo sapiens
  misc_RNA (1)...(19): siRNA sense strand
ugguuuggcucaaguucuu

SEQ ID NO: 1697340 - RNA, 19 nt, Homo sapiens
  misc_RNA (1)...(19): siRNA sense strand
acugaagaaugccaagaau

SEQ ID NO: 1697341 - RNA, 19 nt, Homo sapiens
  misc_RNA (1)...(19): siRNA sense strand
cugacuuacuuccugauga

SEQ ID NO: 1697342 - RNA, 19 nt, Homo sapiens
  misc_RNA (1)...(19): siRNA sense strand
gaaauaucgcaugcugguu

SEQ ID NO: 1697343 - RNA, 19 nt, Homo sapiens
  misc_RNA (1)...(19): siRNA sense strand
guguaaccauccuccacaa

SEQ ID NO: 1697344 - RNA, 19 nt, Homo sapiens
  misc_RNA (1)...(19): siRNA sense strand
ggacuuuuauccucagcaa

SEQ ID NO: 1697345 - RNA, 19 nt, Homo sapiens
  misc_RNA (1)...(19): siRNA sense strand
uuuaaggucauaccaaguu

SEQ ID NO: 1697346 - RNA, 19 nt, Homo sapiens
  misc_RNA (1)...(19): siRNA sense strand
gcauguauuacucauccuu

SEQ ID NO: 1697347 - RNA, 19 nt, Homo sapiens
  misc_RNA (1)...(19): siRNA sense strand
uggcuugcggugcuuguua

SEQ ID NO: 1697348 - RNA, 19 nt, Homo sapiens
  misc_RNA (1)...(19): siRNA sense strand
aaacacuacagaagacaau

SEQ ID NO: 1697349 - RNA, 19 nt, Homo sapiens
  misc_RNA (1)...(19): siRNA sense strand
caaacacuacagaagacaa

SEQ ID NO: 1697350 - RNA, 19 nt, Homo sapiens
  misc_RNA (1)...(19): siRNA sense strand
gacuaugaaaccagaauca

SEQ ID NO: 1697351 - RNA, 19 nt, Homo sapiens
  misc_RNA (1)...(19): siRNA sense strand
auggauauuugcagauaga

SEQ ID NO: 1697352 - RNA, 19 nt, Homo sapiens
  misc_RNA (1)...(19): siRNA sense strand
gcaaaggaauguuaaucua

SEQ ID NO: 1697353 - RNA, 19 nt, Homo sapiens
  misc_RNA (1)...(19): siRNA sense strand
gaauggauauuugcagaua

SEQ ID NO: 1697354 - RNA, 19 nt, Homo sapiens
  misc_RNA (1)...(19): siRNA sense strand
cagaaucacugaaagcaaa

SEQ ID NO: 1697355 - RNA, 19 nt, Homo sapiens
  misc_RNA (1)...(19): siRNA sense strand
caucguggcgcauguauua

SEQ ID NO: 1697356 - RNA, 19 nt, Homo sapiens
  misc_RNA (1)...(19): siRNA sense strand
gaagacaauuauucacguu

SEQ ID NO: 1697357 - RNA, 19 nt, Homo sapiens
  misc_RNA (1)...(19): siRNA sense strand
gaaaccaaauccugaucaa

SEQ ID NO: 1697358 - RNA, 19 nt, Homo sapiens
  misc_RNA (1)...(19): siRNA sense strand
caagagcaaaggaauguua

SEQ ID NO: 1697359 - RNA, 19 nt, Homo sapiens
  misc_RNA (1)...(19): siRNA sense strand
ccauuaaaguuacugguuu

SEQ ID NO: 1697360 - RNA, 19 nt, Homo sapiens
  misc_RNA (1)...(19): siRNA sense strand
uaaguacgauguucaagug

SEQ ID NO: 1697361 - RNA, 19 nt, Homo sapiens
  misc_RNA (1)...(19): siRNA sense strand
gaaaauaaacgcuccaaaa

SEQ ID NO: 1697362 - RNA, 19 nt, Homo sapiens
  misc_RNA (1)...(19): siRNA sense strand
gaaaccagaaucacugaaa

SEQ ID NO: 1697363 - RNA, 19 nt, Homo sapiens
  misc_RNA (1)...(19): siRNA sense strand
gaguggagccaaccuauuu

SEQ ID NO: 1697364 - RNA, 19 nt, Homo sapiens
  misc_RNA (1)...(19): siRNA sense strand
gcagaacgaccacucacua

SEQ ID NO: 1697365 - RNA, 19 nt, Homo sapiens
  misc_RNA (1)...(19): siRNA sense strand
caaauaaauccuccacuga

SEQ ID NO: 1697366 - RNA, 19 nt, Homo sapiens
  misc_RNA (1)...(19): siRNA sense strand
ccuggaaccucaauuguga

SEQ ID NO: 1697367 - RNA, 19 nt, Homo sapiens
  misc_RNA (1)...(19): siRNA sense strand
ucacgccauugaucaaaua

SEQ ID NO: 1697368 - RNA, 19 nt, Homo sapiens
  misc_RNA (1)...(19): siRNA sense strand
ccacaaacacuacagaaga

SEQ ID NO: 1697369 - RNA, 19 nt, Homo sapiens
  misc_RNA (1)...(19): siRNA sense strand
ugaaggaacucgucucucu

SEQ ID NO: 1697370 - RNA, 19 nt, Homo sapiens
  misc_RNA (1)...(19): siRNA sense strand
gagccaaccuauuuaugug

SEQ ID NO: 1697371 - RNA, 19 nt, Homo sapiens
  misc_RNA (1)...(19): siRNA sense strand
gaacucgucucucuaucca

SEQ ID NO: 1697372 - RNA, 19 nt, Homo sapiens
  misc_RNA (1)...(19): siRNA sense strand
gaagaugacuaugaaacca

SEQ ID NO: 1697373 - RNA, 19 nt, Homo sapiens
  misc_RNA (1)...(19): siRNA sense strand
ugacuuacuuccugaugaa

SEQ ID NO: 1697374 - RNA, 19 nt, Homo sapiens
  misc_RNA (1)...(19): siRNA sense strand
gaaagcaaauguguaacca

SEQ ID NO: 1697375 - RNA, 19 nt, Homo sapiens
  misc_RNA (1)...(19): siRNA sense strand
gcagggcucuggagugagu

SEQ ID NO: 1697376 - RNA, 19 nt, Homo sapiens
  misc_RNA (1)...(19): siRNA sense strand
gaaugucacagcagagauu

SEQ ID NO: 1697377 - RNA, 19 nt, Homo sapiens
  misc_RNA (1)...(19): siRNA sense strand
uacaaggaauggauauuug

SEQ ID NO: 1697378 - RNA, 19 nt, Homo sapiens
  misc_RNA (1)...(19): siRNA sense strand
guacgauguucaagugaga

SEQ ID NO: 1697379 - RNA, 19 nt, Homo sapiens
  misc_RNA (1)...(19): siRNA sense strand
ccugucaauuucaccauua

SEQ ID NO: 1697380 - RNA, 19 nt, Homo sapiens
  misc_RNA (1)...(19): siRNA sense strand
ggagccaaccuauuuaugu

SEQ ID NO: 1697381 - RNA, 19 nt, Homo sapiens
  misc_RNA (1)...(19): siRNA sense strand
agaaaccagugucugcuuu

SEQ ID NO: 1697382 - RNA, 19 nt, Homo sapiens
  misc_RNA (1)...(19): siRNA sense strand
gaacgaccacucacuacug

SEQ ID NO: 1697383 - RNA, 19 nt, Homo sapiens
  misc_RNA (1)...(19): siRNA sense strand
gaaggaacucgucucucua

SEQ ID NO: 1697384 - RNA, 19 nt, Homo sapiens
  misc_RNA (1)...(19): siRNA sense strand
gauacugcaagcugacuua

SEQ ID NO: 1697385 - RNA, 19 nt, Homo sapiens
  misc_RNA (1)...(19): siRNA sense strand
cuacagaagacaauuauuc

SEQ ID NO: 1697386 - RNA, 19 nt, Homo sapiens
  misc_RNA (1)...(19): siRNA sense strand
ccaaugcauucaucucaau

SEQ ID NO: 1697387 - RNA, 19 nt, Homo sapiens
  misc_RNA (1)...(19): siRNA sense strand
ggaccauccugcagaacga

SEQ ID NO: 1697388 - RNA, 19 nt, Homo sapiens
  misc_RNA (1)...(19): siRNA sense strand
aauaaacgcuccaaaagaa

SEQ ID NO: 1697389 - RNA, 19 nt, Homo sapiens
  misc_RNA (1)...(19): siRNA sense strand
caaaagaagaugacuauga

SEQ ID NO: 1697390 - RNA, 19 nt, Homo sapiens
  misc_RNA (1)...(19): siRNA sense strand
aaauaucgcaugcugguuu

SEQ ID NO: 1697391 - RNA, 19 nt, Homo sapiens
  misc_RNA (1)...(19): siRNA sense strand
aaauaaauccuccacugaa

SEQ ID NO: 1697392 - RNA, 19 nt, Homo sapiens
  misc_RNA (1)...(19): siRNA sense strand
cauuaaaguuacugguuug

SEQ ID NO: 1697393 - RNA, 19 nt, Homo sapiens
  misc_RNA (1)...(19): siRNA sense strand
aauaaauccuccacugaau

SEQ ID NO: 1697394 - RNA, 19 nt, Homo sapiens
  misc_RNA (1)...(19): siRNA sense strand
caaaggaauguuaaucuag

SEQ ID NO: 1697395 - RNA, 19 nt, Homo sapiens
  misc_RNA (1)...(19): siRNA sense strand
cgccauugaucaaauaaau

SEQ ID NO: 1697396 - RNA, 19 nt, Homo sapiens
  misc_RNA (1)...(19): siRNA sense strand
acacuacagaagacaauua

SEQ ID NO: 1697397 - RNA, 19 nt, Homo sapiens
  misc_RNA (1)...(19): siRNA sense strand
ggaaaccaaauccugauca

SEQ ID NO: 1697398 - RNA, 19 nt, Homo sapiens
  misc_RNA (1)...(19): siRNA sense strand
gaucaagagcaaaggaaug

SEQ ID NO: 1697399 - RNA, 19 nt, Homo sapiens
  misc_RNA (1)...(19): siRNA sense strand
ugaagaaugccaagaauac

SEQ ID NO: 1697400 - RNA, 19 nt, Homo sapiens
  misc_RNA (1)...(19): siRNA sense strand
gagcaaaggaauguuaauc

SEQ ID NO: 1697401 - RNA, 19 nt, Homo sapiens
  misc_RNA (1)...(19): siRNA sense strand
gaccaaugcauucaucuca

SEQ ID NO: 1697402 - RNA, 19 nt, Homo sapiens
  misc_RNA (1)...(19): siRNA sense strand
gaagaaugccaagaauaca

SEQ ID NO: 1697403 - RNA, 19 nt, Homo sapiens
  misc_RNA (1)...(19): siRNA sense strand
aaccaaauccugaucaaga

SEQ ID NO: 1697404 - RNA, 19 nt, Homo sapiens
  misc_RNA (1)...(19): siRNA sense strand
acugaaagcaaauguguaa

SEQ ID NO: 1697405 - RNA, 19 nt, Homo sapiens
  misc_RNA (1)...(19): siRNA sense strand
gcaaauguguaaccauccu

SEQ ID NO: 1697406 - RNA, 19 nt, Homo sapiens
  misc_RNA (1)...(19): siRNA sense strand
caagugagagcagcaguga

SEQ ID NO: 1697407 - RNA, 19 nt, Homo sapiens
  misc_RNA (1)...(19): siRNA sense strand
acugcaagcugacuuacuu

SEQ ID NO: 1697408 - RNA, 19 nt, Homo sapiens
  misc_RNA (1)...(19): siRNA sense strand
gcccuuugaucagcuguuu

SEQ ID NO: 1697409 - RNA, 19 nt, Homo sapiens
  misc_RNA (1)...(19): siRNA sense strand
uuaaggucauaccaaguuu

SEQ ID NO: 1697410 - RNA, 19 nt, Homo sapiens
  misc_RNA (1)...(19): siRNA sense strand
aggcagggcucuggaguga

SEQ ID NO: 1697411 - RNA, 19 nt, Homo sapiens
  misc_RNA (1)...(19): siRNA sense strand
ccauugcuuugauuaugaa

SEQ ID NO: 1697412 - RNA, 19 nt, Homo sapiens
  misc_RNA (1)...(19): siRNA sense strand
uaaauccuccacugaaugu

SEQ ID NO: 1697413 - RNA, 19 nt, Homo sapiens
  misc_RNA (1)...(19): siRNA sense strand
ggcuugcggugcuuguuaa

SEQ ID NO: 1697414 - RNA, 19 nt, Homo sapiens
  misc_RNA (1)...(19): siRNA sense strand
ucacuucucccaccuguca

SEQ ID NO: 1697415 - RNA, 19 nt, Homo sapiens
  misc_RNA (1)...(19): siRNA sense strand
cugaggacacgcaguauuu

SEQ ID NO: 1697416 - RNA, 19 nt, Homo sapiens
  misc_RNA (1)...(19): siRNA sense strand
aaaccagaaucacugaaag

SEQ ID NO: 1697417 - RNA, 19 nt, Homo sapiens
  misc_RNA (1)...(19): siRNA sense strand
uaaccauccuccacaaagg

SEQ ID NO: 1697418 - RNA, 19 nt, Homo sapiens
  misc_RNA (1)...(19): siRNA sense strand
ggauauuugcagauagaaa

SEQ ID NO: 1697419 - RNA, 19 nt, Homo sapiens
  misc_RNA (1)...(19): siRNA sense strand
acaauacaaggaauggaua

SEQ ID NO: 1697420 - RNA, 19 nt, Homo sapiens
  misc_RNA (1)...(19): siRNA sense strand
gaucaucguggcgcaugua

SEQ ID NO: 1697421 - RNA, 19 nt, Homo sapiens
  misc_RNA (1)...(19): siRNA sense strand
uccauugcuuugauuauga

SEQ ID NO: 1697422 - RNA, 19 nt, Homo sapiens
  misc_RNA (1)...(19): siRNA sense strand
gagaaaccagugucugcuu

SEQ ID NO: 1697423 - RNA, 19 nt, Homo sapiens
  misc_RNA (1)...(19): siRNA sense strand
ucacugaaagcaaaugugu

SEQ ID NO: 1697424 - RNA, 19 nt, Homo sapiens
  misc_RNA (1)...(19): siRNA sense strand
gcaccacaaacacuacaga

SEQ ID NO: 1697425 - RNA, 19 nt, Homo sapiens
  misc_RNA (1)...(19): siRNA sense strand
caaugcauucaucucaaua

SEQ ID NO: 1697426 - RNA, 19 nt, Homo sapiens
  misc_RNA (1)...(19): siRNA sense strand
gacugaagaaugccaagaa

SEQ ID NO: 1697427 - RNA, 19 nt, Homo sapiens
  misc_RNA (1)...(19): siRNA sense strand
guauggcucuuggacugaa

SEQ ID NO: 1697428 - RNA, 19 nt, Homo sapiens
  misc_RNA (1)...(19): siRNA sense strand
caagaauacagcaaagaca

SEQ ID NO: 1697429 - RNA, 19 nt, Homo sapiens
  misc_RNA (1)...(19): siRNA sense strand
guaaccauccuccacaaag

SEQ ID NO: 1697430 - RNA, 19 nt, Homo sapiens
  misc_RNA (1)...(19): siRNA sense strand
cugaagaaugccaagaaua

SEQ ID NO: 1697431 - RNA, 19 nt, Homo sapiens
  misc_RNA (1)...(19): siRNA sense strand
ucucccaccugucaauuuc

SEQ ID NO: 1697432 - RNA, 19 nt, Homo sapiens
  misc_RNA (1)...(19): siRNA sense strand
cauaccaaguuucccuuca

SEQ ID NO: 1697433 - RNA, 19 nt, Homo sapiens
  misc_RNA (1)...(19): siRNA sense strand
cacaaacacuacagaagac

SEQ ID NO: 1697434 - RNA, 19 nt, Homo sapiens
  misc_RNA (1)...(19): siRNA sense strand
cacugcaccuggcuuguug

SEQ ID NO: 1697435 - RNA, 19 nt, Homo sapiens
  misc_RNA (1)...(19): siRNA sense strand
ggaauggauauuugcagau

SEQ ID NO: 1697436 - RNA, 19 nt, Homo sapiens
  misc_RNA (1)...(19): siRNA sense strand
ggacugaagaaugccaaga

SEQ ID NO: 1697437 - RNA, 19 nt, Homo sapiens
  misc_RNA (1)...(19): siRNA sense strand
acucgucucucuauccaau

SEQ ID NO: 1697438 - RNA, 19 nt, Homo sapiens
  misc_RNA (1)...(19): siRNA sense strand
caauacaaggaauggauau

SEQ ID NO: 1697439 - RNA, 19 nt, Homo sapiens
  misc_RNA (1)...(19): siRNA sense strand
ugguuuggcucaaguucuu

SEQ ID NO: 1697440 - RNA, 19 nt, Homo sapiens
  misc_RNA (1)...(19): siRNA sense strand
acugaagaaugccaagaau

SEQ ID NO: 1697441 - RNA, 19 nt, Homo sapiens
  misc_RNA (1)...(19): siRNA sense strand
cugacuuacuuccugauga

SEQ ID NO: 1697442 - RNA, 19 nt, Homo sapiens
  misc_RNA (1)...(19): siRNA sense strand
gaaauaucgcaugcugguu

SEQ ID NO: 1697443 - RNA, 19 nt, Homo sapiens
  misc_RNA (1)...(19): siRNA sense strand
guguaaccauccuccacaa

SEQ ID NO: 1697444 - RNA, 19 nt, Homo sapiens
  misc_RNA (1)...(19): siRNA sense strand
ggacuuuuauccucagcaa

SEQ ID NO: 1697445 - RNA, 19 nt, Homo sapiens
  misc_RNA (1)...(19): siRNA sense strand
uuuaaggucauaccaaguu

SEQ ID NO: 1697446 - RNA, 19 nt, Homo sapiens
  misc_RNA (1)...(19): siRNA sense strand
gcauguauuacucauccuu

SEQ ID NO: 1697447 - RNA, 19 nt, Homo sapiens
  misc_RNA (1)...(19): siRNA sense strand
uggcuugcggugcuuguua

SEQ ID NO: 1697448 - RNA, 19 nt, Homo sapiens
  misc_RNA (1)...(19): siRNA sense strand
aaacacuacagaagacaau

SEQ ID NO: 1697449 - RNA, 19 nt, Homo sapiens
  misc_RNA (1)...(19): siRNA sense strand
caaacacuacagaagacaa

SEQ ID NO: 1697450 - RNA, 19 nt, Homo sapiens
  misc_RNA (1)...(19): siRNA sense strand
gacuaugaaaccagaauca

SEQ ID NO: 1697451 - RNA, 19 nt, Homo sapiens
  misc_RNA (1)...(19): siRNA sense strand
auggauauuugcagauaga

SEQ ID NO: 1697452 - RNA, 19 nt, Homo sapiens
  misc_RNA (1)...(19): siRNA sense strand
gcaaaggaauguuaaucua

SEQ ID NO: 1697453 - RNA, 19 nt, Homo sapiens
  misc_RNA (1)...(19): siRNA sense strand
gaauggauauuugcagaua

SEQ ID NO: 1697454 - RNA, 19 nt, Homo sapiens
  misc_RNA (1)...(19): siRNA sense strand
cagaaucacugaaagcaaa

SEQ ID NO: 1697455 - RNA, 19 nt, Homo sapiens
  misc_RNA (1)...(19): siRNA sense strand
caucguggcgcauguauua

SEQ ID NO: 1697456 - RNA, 19 nt, Homo sapiens
  misc_RNA (1)...(19): siRNA sense strand
gaagacaauuauucacguu

SEQ ID NO: 1697457 - RNA, 19 nt, Homo sapiens
  misc_RNA (1)...(19): siRNA sense strand
gaaaccaaauccugaucaa

SEQ ID NO: 1697458 - RNA, 19 nt, Homo sapiens
  misc_RNA (1)...(19): siRNA sense strand
caagagcaaaggaauguua

SEQ ID NO: 1697459 - RNA, 19 nt, Homo sapiens
  misc_RNA (1)...(19): siRNA sense strand
ccauuaaaguuacugguuu

SEQ ID NO: 1697460 - RNA, 19 nt, Homo sapiens
  misc_RNA (1)...(19): siRNA sense strand
uaaguacgauguucaagug

SEQ ID NO: 1697461 - RNA, 19 nt, Homo sapiens
  misc_RNA (1)...(19): siRNA sense strand
gaaaauaaacgcuccaaaa

SEQ ID NO: 1697462 - RNA, 19 nt, Homo sapiens
  misc_RNA (1)...(19): siRNA sense strand
gaaaccagaaucacugaaa

SEQ ID NO: 1697463 - RNA, 19 nt, Homo sapiens
  misc_RNA (1)...(19): siRNA sense strand
gaguggagccaaccuauuu

SEQ ID NO: 1697464 - RNA, 19 nt, Homo sapiens
  misc_RNA (1)...(19): siRNA sense strand
gcagaacgaccacucacua

SEQ ID NO: 1697465 - RNA, 19 nt, Homo sapiens
  misc_RNA (1)...(19): siRNA sense strand
caaauaaauccuccacuga

SEQ ID NO: 1697466 - RNA, 19 nt, Homo sapiens
  misc_RNA (1)...(19): siRNA sense strand
ccuggaaccucaauuguga

SEQ ID NO: 1697467 - RNA, 19 nt, Homo sapiens
  misc_RNA (1)...(19): siRNA sense strand
ucacgccauugaucaaaua

SEQ ID NO: 1697468 - RNA, 19 nt, Homo sapiens
  misc_RNA (1)...(19): siRNA sense strand
ccacaaacacuacagaaga

SEQ ID NO: 1697469 - RNA, 19 nt, Homo sapiens
  misc_RNA (1)...(19): siRNA sense strand
ugaaggaacucgucucucu

SEQ ID NO: 1697470 - RNA, 19 nt, Homo sapiens
  misc_RNA (1)...(19): siRNA sense strand
gagccaaccuauuuaugug

SEQ ID NO: 1697471 - RNA, 19 nt, Homo sapiens
  misc_RNA (1)...(19): siRNA sense strand
gaacucgucucucuaucca

SEQ ID NO: 1697472 - RNA, 19 nt, Homo sapiens
  misc_RNA (1)...(19): siRNA sense strand
gaagaugacuaugaaacca

SEQ ID NO: 1697473 - RNA, 19 nt, Homo sapiens
  misc_RNA (1)...(19): siRNA sense strand
ugacuuacuuccugaugaa

SEQ ID NO: 1697474 - RNA, 19 nt, Homo sapiens
  misc_RNA (1)...(19): siRNA sense strand
gaaagcaaauguguaacca

SEQ ID NO: 1697475 - RNA, 19 nt, Homo sapiens
  misc_RNA (1)...(19): siRNA sense strand
gcagggcucuggagugagu

SEQ ID NO: 1697476 - RNA, 19 nt, Homo sapiens
  misc_RNA (1)...(19): siRNA sense strand
gaaugucacagcagagauu

SEQ ID NO: 1697477 - RNA, 19 nt, Homo sapiens
  misc_RNA (1)...(19): siRNA sense strand
uacaaggaauggauauuug

SEQ ID NO: 1697478 - RNA, 19 nt, Homo sapiens
  misc_RNA (1)...(19): siRNA sense strand
guacgauguucaagugaga

SEQ ID NO: 1697479 - RNA, 19 nt, Homo sapiens
  misc_RNA (1)...(19): siRNA sense strand
ccugucaauuucaccauua

SEQ ID NO: 1697480 - RNA, 19 nt, Homo sapiens
  misc_RNA (1)...(19): siRNA sense strand
ggagccaaccuauuuaugu

SEQ ID NO: 1697481 - RNA, 19 nt, Homo sapiens
  misc_RNA (1)...(19): siRNA sense strand
agaaaccagugucugcuuu

SEQ ID NO: 1697482 - RNA, 19 nt, Homo sapiens
  misc_RNA (1)...(19): siRNA sense strand
gaacgaccacucacuacug

SEQ ID NO: 1697483 - RNA, 19 nt, Homo sapiens
  misc_RNA (1)...(19): siRNA sense strand
gaaggaacucgucucucua

SEQ ID NO: 1697484 - RNA, 19 nt, Homo sapiens
  misc_RNA (1)...(19): siRNA sense strand
gauacugcaagcugacuua

SEQ ID NO: 1697485 - RNA, 19 nt, Homo sapiens
  misc_RNA (1)...(19): siRNA sense strand
cuacagaagacaauuauuc

SEQ ID NO: 1697486 - RNA, 19 nt, Homo sapiens
  misc_RNA (1)...(19): siRNA sense strand
ccaaugcauucaucucaau

SEQ ID NO: 1697487 - RNA, 19 nt, Homo sapiens
  misc_RNA (1)...(19): siRNA sense strand
ggaccauccugcagaacga

SEQ ID NO: 1697488 - RNA, 19 nt, Homo sapiens
  misc_RNA (1)...(19): siRNA sense strand
aauaaacgcuccaaaagaa

SEQ ID NO: 1697489 - RNA, 19 nt, Homo sapiens
  misc_RNA (1)...(19): siRNA sense strand
caaaagaagaugacuauga

SEQ ID NO: 1697490 - RNA, 19 nt, Homo sapiens
  misc_RNA (1)...(19): siRNA sense strand
aaauaucgcaugcugguuu

SEQ ID NO: 1697491 - RNA, 19 nt, Homo sapiens
  misc_RNA (1)...(19): siRNA sense strand
aaauaaauccuccacugaa

SEQ ID NO: 1697492 - RNA, 19 nt, Homo sapiens
  misc_RNA (1)...(19): siRNA sense strand
cauuaaaguuacugguuug

SEQ ID NO: 1697493 - RNA, 19 nt, Homo sapiens
  misc_RNA (1)...(19): siRNA sense strand
aauaaauccuccacugaau

SEQ ID NO: 1697494 - RNA, 19 nt, Homo sapiens
  misc_RNA (1)...(19): siRNA sense strand
caaaggaauguuaaucuag

SEQ ID NO: 1697495 - RNA, 19 nt, Homo sapiens
  misc_RNA (1)...(19): siRNA sense strand
cgccauugaucaaauaaau

SEQ ID NO: 1697496 - RNA, 19 nt, Homo sapiens
  misc_RNA (1)...(19): siRNA sense strand
acacuacagaagacaauua

SEQ ID NO: 1697497 - RNA, 19 nt, Homo sapiens
  misc_RNA (1)...(19): siRNA sense strand
ggaaaccaaauccugauca

SEQ ID NO: 1697498 - RNA, 19 nt, Homo sapiens
  misc_RNA (1)...(19): siRNA sense strand
gaucaagagcaaaggaaug

SEQ ID NO: 1697499 - RNA, 19 nt, Homo sapiens
  misc_RNA (1)...(19): siRNA sense strand
ugaagaaugccaagaauac

SEQ ID NO: 1697500 - RNA, 19 nt, Homo sapiens
  misc_RNA (1)...(19): siRNA sense strand
gagcaaaggaauguuaauc

SEQ ID NO: 1697501 - RNA, 19 nt, Homo sapiens
  misc_RNA (1)...(19): siRNA sense strand
gaccaaugcauucaucuca

SEQ ID NO: 1697502 - RNA, 19 nt, Homo sapiens
  misc_RNA (1)...(19): siRNA sense strand
gaagaaugccaagaauaca

SEQ ID NO: 1697503 - RNA, 19 nt, Homo sapiens
  misc_RNA (1)...(19): siRNA sense strand
aaccaaauccugaucaaga

SEQ ID NO: 1697504 - RNA, 19 nt, Homo sapiens
  misc_RNA (1)...(19): siRNA sense strand
acugaaagcaaauguguaa

SEQ ID NO: 1697505 - RNA, 19 nt, Homo sapiens
  misc_RNA (1)...(19): siRNA sense strand
gcaaauguguaaccauccu

SEQ ID NO: 1697506 - RNA, 19 nt, Homo sapiens
  misc_RNA (1)...(19): siRNA sense strand
caagugagagcagcaguga

SEQ ID NO: 1697507 - RNA, 19 nt, Homo sapiens
  misc_RNA (1)...(19): siRNA sense strand
acugcaagcugacuuacuu

SEQ ID NO: 1697508 - RNA, 19 nt, Homo sapiens
  misc_RNA (1)...(19): siRNA sense strand
gcccuuugaucagcuguuu

SEQ ID NO: 1697509 - RNA, 19 nt, Homo sapiens
  misc_RNA (1)...(19): siRNA sense strand
uuaaggucauaccaaguuu

SEQ ID NO: 1697510 - RNA, 19 nt, Homo sapiens
  misc_RNA (1)...(19): siRNA sense strand
aggcagggcucuggaguga

SEQ ID NO: 1697511 - RNA, 19 nt, Homo sapiens
  misc_RNA (1)...(19): siRNA sense strand
ccauugcuuugauuaugaa

SEQ ID NO: 1697512 - RNA, 19 nt, Homo sapiens
  misc_RNA (1)...(19): siRNA sense strand
uaaauccuccacugaaugu

SEQ ID NO: 1697513 - RNA, 19 nt, Homo sapiens
  misc_RNA (1)...(19): siRNA sense strand
ggcuugcggugcuuguuaa

SEQ ID NO: 1697514 - RNA, 19 nt, Homo sapiens
  misc_RNA (1)...(19): siRNA sense strand
ucacuucucccaccuguca

SEQ ID NO: 1697515 - RNA, 19 nt, Homo sapiens
  misc_RNA (1)...(19): siRNA sense strand
cugaggacacgcaguauuu

SEQ ID NO: 1697516 - RNA, 19 nt, Homo sapiens
  misc_RNA (1)...(19): siRNA sense strand
aaaccagaaucacugaaag

SEQ ID NO: 1697517 - RNA, 19 nt, Homo sapiens
  misc_RNA (1)...(19): siRNA sense strand
uaaccauccuccacaaagg

SEQ ID NO: 1697518 - RNA, 19 nt, Homo sapiens
  misc_RNA (1)...(19): siRNA sense strand
ggauauuugcagauagaaa

SEQ ID NO: 1697519 - RNA, 19 nt, Homo sapiens
  misc_RNA (1)...(19): siRNA sense strand
acaauacaaggaauggaua

SEQ ID NO: 1697520 - RNA, 19 nt, Homo sapiens
  misc_RNA (1)...(19): siRNA sense strand
gaucaucguggcgcaugua

SEQ ID NO: 1697521 - RNA, 19 nt, Homo sapiens
  misc_RNA (1)...(19): siRNA sense strand
uccauugcuuugauuauga

SEQ ID NO: 1697522 - RNA, 19 nt, Homo sapiens
  misc_RNA (1)...(19): siRNA sense strand
gagaaaccagugucugcuu

SEQ ID NO: 1697523 - RNA, 19 nt, Homo sapiens
  misc_RNA (1)...(19): siRNA sense strand
ucacugaaagcaaaugugu

SEQ ID NO: 1697524 - RNA, 19 nt, Homo sapiens
  misc_RNA (1)...(19): siRNA sense strand
gcaccacaaacacuacaga

SEQ ID NO: 1697525 - RNA, 19 nt, Homo sapiens
  misc_RNA (1)...(19): siRNA sense strand
caaugcauucaucucaaua

SEQ ID NO: 1697526 - RNA, 19 nt, Homo sapiens
  misc_RNA (1)...(19): siRNA sense strand
gacugaagaaugccaagaa

SEQ ID NO: 1697527 - RNA, 19 nt, Homo sapiens
  misc_RNA (1)...(19): siRNA sense strand
guauggcucuuggacugaa

SEQ ID NO: 1697528 - RNA, 19 nt, Homo sapiens
  misc_RNA (1)...(19): siRNA sense strand
caagaauacagcaaagaca

SEQ ID NO: 1697529 - RNA, 19 nt, Homo sapiens
  misc_RNA (1)...(19): siRNA sense strand
guaaccauccuccacaaag

SEQ ID NO: 1697530 - RNA, 19 nt, Homo sapiens
  misc_RNA (1)...(19): siRNA sense strand
cugaagaaugccaagaaua

SEQ ID NO: 1697531 - RNA, 19 nt, Homo sapiens
  misc_RNA (1)...(19): siRNA sense strand
ucucccaccugucaauuuc

SEQ ID NO: 1697532 - RNA, 19 nt, Homo sapiens
  misc_RNA (1)...(19): siRNA sense strand
cauaccaaguuucccuuca

SEQ ID NO: 1697533 - RNA, 19 nt, Homo sapiens
  misc_RNA (1)...(19): siRNA sense strand
cacaaacacuacagaagac

SEQ ID NO: 1697534 - RNA, 19 nt, Homo sapiens
  misc_RNA (1)...(19): siRNA sense strand
cacugcaccuggcuuguug

SEQ ID NO: 1697535 - RNA, 19 nt, Homo sapiens
  misc_RNA (1)...(19): siRNA sense strand
ggaauggauauuugcagau

SEQ ID NO: 1697536 - RNA, 19 nt, Homo sapiens
  misc_RNA (1)...(19): siRNA sense strand
ggacugaagaaugccaaga

SEQ ID NO: 1697537 - RNA, 19 nt, Homo sapiens
  misc_RNA (1)...(19): siRNA sense strand
acucgucucucuauccaau

SEQ ID NO: 1697538 - RNA, 19 nt, Homo sapiens
  misc_RNA (1)...(19): siRNA sense strand
caauacaaggaauggauau

SEQ ID NO: 1697539 - RNA, 19 nt, Homo sapiens
  misc_RNA (1)...(19): siRNA sense strand
ugguuuggcucaaguucuu

SEQ ID NO: 1697540 - RNA, 19 nt, Homo sapiens
  misc_RNA (1)...(19): siRNA sense strand
acugaagaaugccaagaau

SEQ ID NO: 1697541 - RNA, 19 nt, Homo sapiens
  misc_RNA (1)...(19): siRNA sense strand
cugacuuacuuccugauga

SEQ ID NO: 1697542 - RNA, 19 nt, Homo sapiens
  misc_RNA (1)...(19): siRNA sense strand
gaaauaucgcaugcugguu

SEQ ID NO: 1697543 - RNA, 19 nt, Homo sapiens
  misc_RNA (1)...(19): siRNA sense strand
guguaaccauccuccacaa

SEQ ID NO: 1697544 - RNA, 19 nt, Homo sapiens
  misc_RNA (1)...(19): siRNA sense strand
ggacuuuuauccucagcaa

SEQ ID NO: 1697545 - RNA, 19 nt, Homo sapiens
  misc_RNA (1)...(19): siRNA sense strand
uuuaaggucauaccaaguu

SEQ ID NO: 1697546 - RNA, 19 nt, Homo sapiens
  misc_RNA (1)...(19): siRNA sense strand
gcauguauuacucauccuu

SEQ ID NO: 1697547 - RNA, 19 nt, Homo sapiens
  misc_RNA (1)...(19): siRNA sense strand
uggcuugcggugcuuguua

SEQ ID NO: 1697548 - RNA, 19 nt, Homo sapiens
  misc_RNA (1)...(19): siRNA sense strand
aaacacuacagaagacaau

SEQ ID NO: 1697549 - RNA, 19 nt, Homo sapiens
  misc_RNA (1)...(19): siRNA sense strand
caaacacuacagaagacaa

SEQ ID NO: 1697550 - RNA, 19 nt, Homo sapiens
  misc_RNA (1)...(19): siRNA sense strand
gacuaugaaaccagaauca

SEQ ID NO: 1697551 - RNA, 19 nt, Homo sapiens
  misc_RNA (1)...(19): siRNA sense strand
auggauauuugcagauaga

SEQ ID NO: 1697552 - RNA, 19 nt, Homo sapiens
  misc_RNA (1)...(19): siRNA sense strand
gcaaaggaauguuaaucua

SEQ ID NO: 1697553 - RNA, 19 nt, Homo sapiens
  misc_RNA (1)...(19): siRNA sense strand
gaauggauauuugcagaua

SEQ ID NO: 1697554 - RNA, 19 nt, Homo sapiens
  misc_RNA (1)...(19): siRNA sense strand
cagaaucacugaaagcaaa

SEQ ID NO: 1697555 - RNA, 19 nt, Homo sapiens
  misc_RNA (1)...(19): siRNA sense strand
caucguggcgcauguauua

SEQ ID NO: 1697556 - RNA, 19 nt, Homo sapiens
  misc_RNA (1)...(19): siRNA sense strand
gaagacaauuauucacguu

SEQ ID NO: 1697557 - RNA, 19 nt, Homo sapiens
  misc_RNA (1)...(19): siRNA sense strand
gaaaccaaauccugaucaa

SEQ ID NO: 1697558 - RNA, 19 nt, Homo sapiens
  misc_RNA (1)...(19): siRNA sense strand
caagagcaaaggaauguua

SEQ ID NO: 1697559 - RNA, 19 nt, Homo sapiens
  misc_RNA (1)...(19): siRNA sense strand
ccauuaaaguuacugguuu

SEQ ID NO: 1697560 - RNA, 19 nt, Homo sapiens
  misc_RNA (1)...(19): siRNA sense strand
uaaguacgauguucaagug

SEQ ID NO: 1697561 - RNA, 19 nt, Homo sapiens
  misc_RNA (1)...(19): siRNA sense strand
gaaaauaaacgcuccaaaa

SEQ ID NO: 1697562 - RNA, 19 nt, Homo sapiens
  misc_RNA (1)...(19): siRNA sense strand
gaaaccagaaucacugaaa

SEQ ID NO: 1697563 - RNA, 19 nt, Homo sapiens
  misc_RNA (1)...(19): siRNA sense strand
gaguggagccaaccuauuu

SEQ ID NO: 1697564 - RNA, 19 nt, Homo sapiens
  misc_RNA (1)...(19): siRNA sense strand
gcagaacgaccacucacua

SEQ ID NO: 1697565 - RNA, 19 nt, Homo sapiens
  misc_RNA (1)...(19): siRNA sense strand
caaauaaauccuccacuga

SEQ ID NO: 1697566 - RNA, 19 nt, Homo sapiens
  misc_RNA (1)...(19): siRNA sense strand
ccuggaaccucaauuguga

SEQ ID NO: 1697567 - RNA, 19 nt, Homo sapiens
  misc_RNA (1)...(19): siRNA sense strand
ucacgccauugaucaaaua

SEQ ID NO: 1697568 - RNA, 19 nt, Homo sapiens
  misc_RNA (1)...(19): siRNA sense strand
ccacaaacacuacagaaga

SEQ ID NO: 1697569 - RNA, 19 nt, Homo sapiens
  misc_RNA (1)...(19): siRNA sense strand
ugaaggaacucgucucucu

SEQ ID NO: 1697570 - RNA, 19 nt, Homo sapiens
  misc_RNA (1)...(19): siRNA sense strand
gagccaaccuauuuaugug

SEQ ID NO: 1697571 - RNA, 19 nt, Homo sapiens
  misc_RNA (1)...(19): siRNA sense strand
gaacucgucucucuaucca

SEQ ID NO: 1697572 - RNA, 19 nt, Homo sapiens
  misc_RNA (1)...(19): siRNA sense strand
gaagaugacuaugaaacca

SEQ ID NO: 1697573 - RNA, 19 nt, Homo sapiens
  misc_RNA (1)...(19): siRNA sense strand
ugacuuacuuccugaugaa

SEQ ID NO: 1697574 - RNA, 19 nt, Homo sapiens
  misc_RNA (1)...(19): siRNA sense strand
gaaagcaaauguguaacca

SEQ ID NO: 1697575 - RNA, 19 nt, Homo sapiens
  misc_RNA (1)...(19): siRNA sense strand
gcagggcucuggagugagu

SEQ ID NO: 1697576 - RNA, 19 nt, Homo sapiens
  misc_RNA (1)...(19): siRNA sense strand
gaaugucacagcagagauu

SEQ ID NO: 1697577 - RNA, 19 nt, Homo sapiens
  misc_RNA (1)...(19): siRNA sense strand
uacaaggaauggauauuug

SEQ ID NO: 1697578 - RNA, 19 nt, Homo sapiens
  misc_RNA (1)...(19): siRNA sense strand
guacgauguucaagugaga

SEQ ID NO: 1697579 - RNA, 19 nt, Homo sapiens
  misc_RNA (1)...(19): siRNA sense strand
ccugucaauuucaccauua

SEQ ID NO: 1697580 - RNA, 19 nt, Homo sapiens
  misc_RNA (1)...(19): siRNA sense strand
ggagccaaccuauuuaugu

SEQ ID NO: 1697581 - RNA, 19 nt, Homo sapiens
  misc_RNA (1)...(19): siRNA sense strand
agaaaccagugucugcuuu

SEQ ID NO: 1697582 - RNA, 19 nt, Homo sapiens
  misc_RNA (1)...(19): siRNA sense strand
gaacgaccacucacuacug

SEQ ID NO: 1697583 - RNA, 19 nt, Homo sapiens
  misc_RNA (1)...(19): siRNA sense strand
gaaggaacucgucucucua

SEQ ID NO: 1697584 - RNA, 19 nt, Homo sapiens
  misc_RNA (1)...(19): siRNA sense strand
gauacugcaagcugacuua

SEQ ID NO: 1697585 - RNA, 19 nt, Homo sapiens
  misc_RNA (1)...(19): siRNA sense strand
cuacagaagacaauuauuc

SEQ ID NO: 1697586 - RNA, 19 nt, Homo sapiens
  misc_RNA (1)...(19): siRNA sense strand
ccaaugcauucaucucaau

SEQ ID NO: 1697587 - RNA, 19 nt, Homo sapiens
  misc_RNA (1)...(19): siRNA sense strand
ggaccauccugcagaacga

SEQ ID NO: 1697588 - RNA, 19 nt, Homo sapiens
  misc_RNA (1)...(19): siRNA sense strand
aauaaacgcuccaaaagaa

SEQ ID NO: 1697589 - RNA, 19 nt, Homo sapiens
  misc_RNA (1)...(19): siRNA sense strand
caaaagaagaugacuauga

SEQ ID NO: 1697590 - RNA, 19 nt, Homo sapiens
  misc_RNA (1)...(19): siRNA sense strand
aaauaucgcaugcugguuu

SEQ ID NO: 1697591 - RNA, 19 nt, Homo sapiens
  misc_RNA (1)...(19): siRNA sense strand
aaauaaauccuccacugaa

SEQ ID NO: 1697592 - RNA, 19 nt, Homo sapiens
  misc_RNA (1)...(19): siRNA sense strand
cauuaaaguuacugguuug

SEQ ID NO: 1697593 - RNA, 19 nt, Homo sapiens
  misc_RNA (1)...(19): siRNA sense strand
aauaaauccuccacugaau

SEQ ID NO: 1697594 - RNA, 19 nt, Homo sapiens
  misc_RNA (1)...(19): siRNA sense strand
caaaggaauguuaaucuag

SEQ ID NO: 1697595 - RNA, 19 nt, Homo sapiens
  misc_RNA (1)...(19): siRNA sense strand
cgccauugaucaaauaaau

SEQ ID NO: 1697596 - RNA, 19 nt, Homo sapiens
  misc_RNA (1)...(19): siRNA sense strand
acacuacagaagacaauua

SEQ ID NO: 1697597 - RNA, 19 nt, Homo sapiens
  misc_RNA (1)...(19): siRNA sense strand
ggaaaccaaauccugauca

SEQ ID NO: 1697598 - RNA, 19 nt, Homo sapiens
  misc_RNA (1)...(19): siRNA sense strand
gaucaagagcaaaggaaug

SEQ ID NO: 1697599 - RNA, 19 nt, Homo sapiens
  misc_RNA (1)...(19): siRNA sense strand
ugaagaaugccaagaauac

SEQ ID NO: 1697600 - RNA, 19 nt, Homo sapiens
  misc_RNA (1)...(19): siRNA sense strand
gagcaaaggaauguuaauc

SEQ ID NO: 1697601 - RNA, 19 nt, Homo sapiens
  misc_RNA (1)...(19): siRNA sense strand
gaccaaugcauucaucuca

SEQ ID NO: 1697602 - RNA, 19 nt, Homo sapiens
  misc_RNA (1)...(19): siRNA sense strand
gaagaaugccaagaauaca

SEQ ID NO: 1697603 - RNA, 19 nt, Homo sapiens
  misc_RNA (1)...(19): siRNA sense strand
aaccaaauccugaucaaga

SEQ ID NO: 1697604 - RNA, 19 nt, Homo sapiens
  misc_RNA (1)...(19): siRNA sense strand
acugaaagcaaauguguaa

SEQ ID NO: 1697605 - RNA, 19 nt, Homo sapiens
  misc_RNA (1)...(19): siRNA sense strand
gcaaauguguaaccauccu

SEQ ID NO: 1697606 - RNA, 19 nt, Homo sapiens
  misc_RNA (1)...(19): siRNA sense strand
caagugagagcagcaguga

SEQ ID NO: 1697607 - RNA, 19 nt, Homo sapiens
  misc_RNA (1)...(19): siRNA sense strand
acugcaagcugacuuacuu

SEQ ID NO: 1697608 - RNA, 19 nt, Homo sapiens
  misc_RNA (1)...(19): siRNA sense strand
gcccuuugaucagcuguuu

SEQ ID NO: 1697609 - RNA, 19 nt, Homo sapiens
  misc_RNA (1)...(19): siRNA sense strand
uuaaggucauaccaaguuu

SEQ ID NO: 1697610 - RNA, 19 nt, Homo sapiens
  misc_RNA (1)...(19): siRNA sense strand
aggcagggcucuggaguga

SEQ ID NO: 1697611 - RNA, 19 nt, Homo sapiens
  misc_RNA (1)...(19): siRNA sense strand
ccauugcuuugauuaugaa

SEQ ID NO: 1697612 - RNA, 19 nt, Homo sapiens
  misc_RNA (1)...(19): siRNA sense strand
uaaauccuccacugaaugu

SEQ ID NO: 1697613 - RNA, 19 nt, Homo sapiens
  misc_RNA (1)...(19): siRNA sense strand
ggcuugcggugcuuguuaa

SEQ ID NO: 1697614 - RNA, 19 nt, Homo sapiens
  misc_RNA (1)...(19): siRNA sense strand
ucacuucucccaccuguca

SEQ ID NO: 1697615 - RNA, 19 nt, Homo sapiens
  misc_RNA (1)...(19): siRNA sense strand
cugaggacacgcaguauuu

SEQ ID NO: 1697616 - RNA, 19 nt, Homo sapiens
  misc_RNA (1)...(19): siRNA sense strand
aaaccagaaucacugaaag

SEQ ID NO: 1697617 - RNA, 19 nt, Homo sapiens
  misc_RNA (1)...(19): siRNA sense strand
uaaccauccuccacaaagg

SEQ ID NO: 1697618 - RNA, 19 nt, Homo sapiens
  misc_RNA (1)...(19): siRNA sense strand
ggauauuugcagauagaaa

SEQ ID NO: 1697619 - RNA, 19 nt, Homo sapiens
  misc_RNA (1)...(19): siRNA sense strand
acaauacaaggaauggaua

SEQ ID NO: 1697620 - RNA, 19 nt, Homo sapiens
  misc_RNA (1)...(19): siRNA sense strand
gaucaucguggcgcaugua

SEQ ID NO: 1697621 - RNA, 19 nt, Homo sapiens
  misc_RNA (1)...(19): siRNA sense strand
uccauugcuuugauuauga

SEQ ID NO: 1697622 - RNA, 19 nt, Homo sapiens
  misc_RNA (1)...(19): siRNA sense strand
gagaaaccagugucugcuu

SEQ ID NO: 1697623 - RNA, 19 nt, Homo sapiens
  misc_RNA (1)...(19): siRNA sense strand
ucacugaaagcaaaugugu

SEQ ID NO: 1697624 - RNA, 19 nt, Homo sapiens
  misc_RNA (1)...(19): siRNA sense strand
gcaccacaaacacuacaga

SEQ ID NO: 1697625 - RNA, 19 nt, Homo sapiens
  misc_RNA (1)...(19): siRNA sense strand
caaugcauucaucucaaua

SEQ ID NO: 1697626 - RNA, 19 nt, Homo sapiens
  misc_RNA (1)...(19): siRNA sense strand
gacugaagaaugccaagaa

SEQ ID NO: 1697627 - RNA, 19 nt, Homo sapiens
  misc_RNA (1)...(19): siRNA sense strand
guauggcucuuggacugaa

SEQ ID NO: 1697628 - RNA, 19 nt, Homo sapiens
  misc_RNA (1)...(19): siRNA sense strand
caagaauacagcaaagaca

SEQ ID NO: 1697629 - RNA, 19 nt, Homo sapiens
  misc_RNA (1)...(19): siRNA sense strand
guaaccauccuccacaaag

SEQ ID NO: 1697630 - RNA, 19 nt, Homo sapiens
  misc_RNA (1)...(19): siRNA sense strand
cugaagaaugccaagaaua

SEQ ID NO: 1697631 - RNA, 19 nt, Homo sapiens
  misc_RNA (1)...(19): siRNA sense strand
ucucccaccugucaauuuc

SEQ ID NO: 1697632 - RNA, 19 nt, Homo sapiens
  misc_RNA (1)...(19): siRNA sense strand
cauaccaaguuucccuuca

SEQ ID NO: 1697633 - RNA, 19 nt, Homo sapiens
  misc_RNA (1)...(19): siRNA sense strand
cacaaacacuacagaagac

SEQ ID NO: 1697634 - RNA, 19 nt, Homo sapiens
  misc_RNA (1)...(19): siRNA sense strand
cacugcaccuggcuuguug

SEQ ID NO: 1697635 - RNA, 19 nt, Homo sapiens
  misc_RNA (1)...(19): siRNA sense strand
ggaauggauauuugcagau

SEQ ID NO: 1697636 - RNA, 19 nt, Homo sapiens
  misc_RNA (1)...(19): siRNA sense strand
ggacugaagaaugccaaga

SEQ ID NO: 1697637 - RNA, 19 nt, Homo sapiens
  misc_RNA (1)...(19): siRNA sense strand
acucgucucucuauccaau

SEQ ID NO: 1697638 - RNA, 19 nt, Homo sapiens
  misc_RNA (1)...(19): siRNA sense strand
caauacaaggaauggauau

SEQ ID NO: 1697639 - RNA, 19 nt, Homo sapiens
  misc_RNA (1)...(19): siRNA sense strand
ugguuuggcucaaguucuu

SEQ ID NO: 1697640 - RNA, 19 nt, Homo sapiens
  misc_RNA (1)...(19): siRNA sense strand
acugaagaaugccaagaau

SEQ ID NO: 1697641 - RNA, 19 nt, Homo sapiens
  misc_RNA (1)...(19): siRNA sense strand
cugacuuacuuccugauga

SEQ ID NO: 1697642 - RNA, 19 nt, Homo sapiens
  misc_RNA (1)...(19): siRNA sense strand
gaaauaucgcaugcugguu

SEQ ID NO: 1697643 - RNA, 19 nt, Homo sapiens
  misc_RNA (1)...(19): siRNA sense strand
guguaaccauccuccacaa

SEQ ID NO: 1697644 - RNA, 19 nt, Homo sapiens
  misc_RNA (1)...(19): siRNA sense strand
ggacuuuuauccucagcaa

SEQ ID NO: 1697645 - RNA, 19 nt, Homo sapiens
  misc_RNA (1)...(19): siRNA sense strand
uuuaaggucauaccaaguu

SEQ ID NO: 1697646 - RNA, 19 nt, Homo sapiens
  misc_RNA (1)...(19): siRNA sense strand
gcauguauuacucauccuu

SEQ ID NO: 1697647 - RNA, 19 nt, Homo sapiens
  misc_RNA (1)...(19): siRNA sense strand
uggcuugcggugcuuguua

SEQ ID NO: 1697648 - RNA, 19 nt, Homo sapiens
  misc_RNA (1)...(19): siRNA sense strand
aaacacuacagaagacaau

SEQ ID NO: 1697649 - RNA, 19 nt, Homo sapiens
  misc_RNA (1)...(19): siRNA sense strand
caaacacuacagaagacaa

SEQ ID NO: 1697650 - RNA, 19 nt, Homo sapiens
  misc_RNA (1)...(19): siRNA sense strand
gacuaugaaaccagaauca

SEQ ID NO: 1697651 - RNA, 19 nt, Homo sapiens
  misc_RNA (1)...(19): siRNA sense strand
auggauauuugcagauaga

SEQ ID NO: 1697652 - RNA, 19 nt, Homo sapiens
  misc_RNA (1)...(19): siRNA sense strand
gcaaaggaauguuaaucua

SEQ ID NO: 1697653 - RNA, 19 nt, Homo sapiens
  misc_RNA (1)...(19): siRNA sense strand
gaauggauauuugcagaua

SEQ ID NO: 1697654 - RNA, 19 nt, Homo sapiens
  misc_RNA (1)...(19): siRNA sense strand
cagaaucacugaaagcaaa

SEQ ID NO: 1697655 - RNA, 19 nt, Homo sapiens
  misc_RNA (1)...(19): siRNA sense strand
caucguggcgcauguauua

SEQ ID NO: 1697656 - RNA, 19 nt, Homo sapiens
  misc_RNA (1)...(19): siRNA sense strand
gaagacaauuauucacguu

SEQ ID NO: 1697657 - RNA, 19 nt, Homo sapiens
  misc_RNA (1)...(19): siRNA sense strand
gaaaccaaauccugaucaa

SEQ ID NO: 1697658 - RNA, 19 nt, Homo sapiens
  misc_RNA (1)...(19): siRNA sense strand
caagagcaaaggaauguua

SEQ ID NO: 1697659 - RNA, 19 nt, Homo sapiens
  misc_RNA (1)...(19): siRNA sense strand
ccauuaaaguuacugguuu

SEQ ID NO: 1697660 - RNA, 19 nt, Homo sapiens
  misc_RNA (1)...(19): siRNA sense strand
uaaguacgauguucaagug

SEQ ID NO: 1697661 - RNA, 19 nt, Homo sapiens
  misc_RNA (1)...(19): siRNA sense strand
gaaaauaaacgcuccaaaa

SEQ ID NO: 1697662 - RNA, 19 nt, Homo sapiens
  misc_RNA (1)...(19): siRNA sense strand
gaaaccagaaucacugaaa

SEQ ID NO: 1697663 - RNA, 19 nt, Homo sapiens
  misc_RNA (1)...(19): siRNA sense strand
gaguggagccaaccuauuu

SEQ ID NO: 1697664 - RNA, 19 nt, Homo sapiens
  misc_RNA (1)...(19): siRNA sense strand
gcagaacgaccacucacua

SEQ ID NO: 1697665 - RNA, 19 nt, Homo sapiens
  misc_RNA (1)...(19): siRNA sense strand
caaauaaauccuccacuga

SEQ ID NO: 1697666 - RNA, 19 nt, Homo sapiens
  misc_RNA (1)...(19): siRNA sense strand
ccuggaaccucaauuguga

SEQ ID NO: 1697667 - RNA, 19 nt, Homo sapiens
  misc_RNA (1)...(19): siRNA sense strand
ucacgccauugaucaaaua

SEQ ID NO: 1697668 - RNA, 19 nt, Homo sapiens
  misc_RNA (1)...(19): siRNA sense strand
ccacaaacacuacagaaga

SEQ ID NO: 1697669 - RNA, 19 nt, Homo sapiens
  misc_RNA (1)...(19): siRNA sense strand
ugaaggaacucgucucucu

SEQ ID NO: 1697670 - RNA, 19 nt, Homo sapiens
  misc_RNA (1)...(19): siRNA sense strand
gagccaaccuauuuaugug

SEQ ID NO: 1697671 - RNA, 19 nt, Homo sapiens
  misc_RNA (1)...(19): siRNA sense strand
gaacucgucucucuaucca

SEQ ID NO: 1697672 - RNA, 19 nt, Homo sapiens
  misc_RNA (1)...(19): siRNA sense strand
gaagaugacuaugaaacca

SEQ ID NO: 1697673 - RNA, 19 nt, Homo sapiens
  misc_RNA (1)...(19): siRNA sense strand
ugacuuacuuccugaugaa

SEQ ID NO: 1697674 - RNA, 19 nt, Homo sapiens
  misc_RNA (1)...(19): siRNA sense strand
gaaagcaaauguguaacca

SEQ ID NO: 1697675 - RNA, 19 nt, Homo sapiens
  misc_RNA (1)...(19): siRNA sense strand
gcagggcucuggagugagu

SEQ ID NO: 1697676 - RNA, 19 nt, Homo sapiens
  misc_RNA (1)...(19): siRNA sense strand
gaaugucacagcagagauu

SEQ ID NO: 1697677 - RNA, 19 nt, Homo sapiens
  misc_RNA (1)...(19): siRNA sense strand
uacaaggaauggauauuug

SEQ ID NO: 1697678 - RNA, 19 nt, Homo sapiens
  misc_RNA (1)...(19): siRNA sense strand
guacgauguucaagugaga

SEQ ID NO: 1697679 - RNA, 19 nt, Homo sapiens
  misc_RNA (1)...(19): siRNA sense strand
ccugucaauuucaccauua

SEQ ID NO: 1697680 - RNA, 19 nt, Homo sapiens
  misc_RNA (1)...(19): siRNA sense strand
ggagccaaccuauuuaugu

SEQ ID NO: 1697681 - RNA, 19 nt, Homo sapiens
  misc_RNA (1)...(19): siRNA sense strand
agaaaccagugucugcuuu

SEQ ID NO: 1697682 - RNA, 19 nt, Homo sapiens
  misc_RNA (1)...(19): siRNA sense strand
gaacgaccacucacuacug

SEQ ID NO: 1697683 - RNA, 19 nt, Homo sapiens
  misc_RNA (1)...(19): siRNA sense strand
gaaggaacucgucucucua

SEQ ID NO: 1697684 - RNA, 19 nt, Homo sapiens
  misc_RNA (1)...(19): siRNA sense strand
gauacugcaagcugacuua

SEQ ID NO: 1697685 - RNA, 19 nt, Homo sapiens
  misc_RNA (1)...(19): siRNA sense strand
cuacagaagacaauuauuc

SEQ ID NO: 1697686 - RNA, 19 nt, Homo sapiens
  misc_RNA (1)...(19): siRNA sense strand
ccaaugcauucaucucaau

SEQ ID NO: 1697687 - RNA, 19 nt, Homo sapiens
  misc_RNA (1)...(19): siRNA sense strand
ggaccauccugcagaacga

SEQ ID NO: 1697688 - RNA, 19 nt, Homo sapiens
  misc_RNA (1)...(19): siRNA sense strand
aauaaacgcuccaaaagaa

SEQ ID NO: 1697689 - RNA, 19 nt, Homo sapiens
  misc_RNA (1)...(19): siRNA sense strand
caaaagaagaugacuauga

SEQ ID NO: 1697690 - RNA, 19 nt, Homo sapiens
  misc_RNA (1)...(19): siRNA sense strand
aaauaucgcaugcugguuu

SEQ ID NO: 1697691 - RNA, 19 nt, Homo sapiens
  misc_RNA (1)...(19): siRNA sense strand
aaauaaauccuccacugaa

SEQ ID NO: 1697692 - RNA, 19 nt, Homo sapiens
  misc_RNA (1)...(19): siRNA sense strand
cauuaaaguuacugguuug

SEQ ID NO: 1697693 - RNA, 19 nt, Homo sapiens
  misc_RNA (1)...(19): siRNA sense strand
aauaaauccuccacugaau

SEQ ID NO: 1697694 - RNA, 19 nt, Homo sapiens
  misc_RNA (1)...(19): siRNA sense strand
caaaggaauguuaaucuag

SEQ ID NO: 1697695 - RNA, 19 nt, Homo sapiens
  misc_RNA (1)...(19): siRNA sense strand
cgccauugaucaaauaaau

SEQ ID NO: 1697696 - RNA, 19 nt, Homo sapiens
  misc_RNA (1)...(19): siRNA sense strand
acacuacagaagacaauua

SEQ ID NO: 1697697 - RNA, 19 nt, Homo sapiens
  misc_RNA (1)...(19): siRNA sense strand
ggaaaccaaauccugauca

SEQ ID NO: 1697698 - RNA, 19 nt, Homo sapiens
  misc_RNA (1)...(19): siRNA sense strand
gaucaagagcaaaggaaug

SEQ ID NO: 1697699 - RNA, 19 nt, Homo sapiens
  misc_RNA (1)...(19): siRNA sense strand
ugaagaaugccaagaauac

SEQ ID NO: 1697700 - RNA, 19 nt, Homo sapiens
  misc_RNA (1)...(19): siRNA sense strand
gagcaaaggaauguuaauc

SEQ ID NO: 1697701 - RNA, 19 nt, Homo sapiens
  misc_RNA (1)...(19): siRNA sense strand
gaccaaugcauucaucuca

SEQ ID NO: 1697702 - RNA, 19 nt, Homo sapiens
  misc_RNA (1)...(19): siRNA sense strand
gaagaaugccaagaauaca

SEQ ID NO: 1697703 - RNA, 19 nt, Homo sapiens
  misc_RNA (1)...(19): siRNA sense strand
aaccaaauccugaucaaga

SEQ ID NO: 1697704 - RNA, 19 nt, Homo sapiens
  misc_RNA (1)...(19): siRNA sense strand
acugaaagcaaauguguaa

SEQ ID NO: 1697705 - RNA, 19 nt, Homo sapiens
  misc_RNA (1)...(19): siRNA sense strand
gcaaauguguaaccauccu

SEQ ID NO: 1697706 - RNA, 19 nt, Homo sapiens
  misc_RNA (1)...(19): siRNA sense strand
caagugagagcagcaguga

SEQ ID NO: 1697707 - RNA, 19 nt, Homo sapiens
  misc_RNA (1)...(19): siRNA sense strand
acugcaagcugacuuacuu

SEQ ID NO: 1697708 - RNA, 19 nt, Homo sapiens
  misc_RNA (1)...(19): siRNA sense strand
gcccuuugaucagcuguuu

SEQ ID NO: 1697709 - RNA, 19 nt, Homo sapiens
  misc_RNA (1)...(19): siRNA sense strand
uuaaggucauaccaaguuu

SEQ ID NO: 1697710 - RNA, 19 nt, Homo sapiens
  misc_RNA (1)...(19): siRNA sense strand
aggcagggcucuggaguga

SEQ ID NO: 1697711 - RNA, 19 nt, Homo sapiens
  misc_RNA (1)...(19): siRNA sense strand
ccauugcuuugauuaugaa

SEQ ID NO: 1697712 - RNA, 19 nt, Homo sapiens
  misc_RNA (1)...(19): siRNA sense strand
uaaauccuccacugaaugu

SEQ ID NO: 1697713 - RNA, 19 nt, Homo sapiens
  misc_RNA (1)...(19): siRNA sense strand
ggcuugcggugcuuguuaa

SEQ ID NO: 1697714 - RNA, 19 nt, Homo sapiens
  misc_RNA (1)...(19): siRNA sense strand
ucacuucucccaccuguca

SEQ ID NO: 1697715 - RNA, 19 nt, Homo sapiens
  misc_RNA (1)...(19): siRNA sense strand
cugaggacacgcaguauuu

SEQ ID NO: 1697716 - RNA, 19 nt, Homo sapiens
  misc_RNA (1)...(19): siRNA sense strand
aaaccagaaucacugaaag

SEQ ID NO: 1697717 - RNA, 19 nt, Homo sapiens
  misc_RNA (1)...(19): siRNA sense strand
uaaccauccuccacaaagg

SEQ ID NO: 1697718 - RNA, 19 nt, Homo sapiens
  misc_RNA (1)...(19): siRNA sense strand
ggauauuugcagauagaaa

SEQ ID NO: 1697719 - RNA, 19 nt, Homo sapiens
  misc_RNA (1)...(19): siRNA sense strand
acaauacaaggaauggaua

SEQ ID NO: 1697720 - RNA, 19 nt, Homo sapiens
  misc_RNA (1)...(19): siRNA sense strand
gaucaucguggcgcaugua

SEQ ID NO: 1697721 - RNA, 19 nt, Homo sapiens
  misc_RNA (1)...(19): siRNA sense strand
uccauugcuuugauuauga

SEQ ID NO: 1697722 - RNA, 19 nt, Homo sapiens
  misc_RNA (1)...(19): siRNA sense strand
gagaaaccagugucugcuu

SEQ ID NO: 1697723 - RNA, 19 nt, Homo sapiens
  misc_RNA (1)...(19): siRNA sense strand
ucacugaaagcaaaugugu

SEQ ID NO: 1697724 - RNA, 19 nt, Homo sapiens
  misc_RNA (1)...(19): siRNA sense strand
gcaccacaaacacuacaga

SEQ ID NO: 1697725 - RNA, 19 nt, Homo sapiens
  misc_RNA (1)...(19): siRNA sense strand
caaugcauucaucucaaua

SEQ ID NO: 1697726 - RNA, 19 nt, Homo sapiens
  misc_RNA (1)...(19): siRNA sense strand
gacugaagaaugccaagaa

SEQ ID NO: 1697727 - RNA, 19 nt, Homo sapiens
  misc_RNA (1)...(19): siRNA sense strand
guauggcucuuggacugaa

SEQ ID NO: 1697728 - RNA, 19 nt, Homo sapiens
  misc_RNA (1)...(19): siRNA sense strand
caagaauacagcaaagaca

SEQ ID NO: 1697729 - RNA, 19 nt, Homo sapiens
  misc_RNA (1)...(19): siRNA sense strand
guaaccauccuccacaaag

SEQ ID NO: 1697730 - RNA, 19 nt, Homo sapiens
  misc_RNA (1)...(19): siRNA sense strand
cugaagaaugccaagaaua

SEQ ID NO: 1697731 - RNA, 19 nt, Homo sapiens
  misc_RNA (1)...(19): siRNA sense strand
ucucccaccugucaauuuc

SEQ ID NO: 1697732 - RNA, 19 nt, Homo sapiens
  misc_RNA (1)...(19): siRNA sense strand
cauaccaaguuucccuuca

SEQ ID NO: 1697733 - RNA, 19 nt, Homo sapiens
  misc_RNA (1)...(19): siRNA sense strand
cacaaacacuacagaagac

SEQ ID NO: 1697734 - RNA, 19 nt, Homo sapiens
  misc_RNA (1)...(19): siRNA sense strand
cacugcaccuggcuuguug

SEQ ID NO: 1697735 - RNA, 19 nt, Homo sapiens
  misc_RNA (1)...(19): siRNA sense strand
ggaauggauauuugcagau

SEQ ID NO: 1697736 - RNA, 19 nt, Homo sapiens
  misc_RNA (1)...(19): siRNA sense strand
ggacugaagaaugccaaga

SEQ ID NO: 1697737 - RNA, 19 nt, Homo sapiens
  misc_RNA (1)...(19): siRNA sense strand
acucgucucucuauccaau

SEQ ID NO: 1697738 - RNA, 19 nt, Homo sapiens
  misc_RNA (1)...(19): siRNA sense strand
caauacaaggaauggauau

SEQ ID NO: 1697739 - RNA, 19 nt, Homo sapiens
  misc_RNA (1)...(19): siRNA sense strand
ugguuuggcucaaguucuu

SEQ ID NO: 1697740 - RNA, 19 nt, Homo sapiens
  misc_RNA (1)...(19): siRNA sense strand
acugaagaaugccaagaau

SEQ ID NO: 1697741 - RNA, 19 nt, Homo sapiens
  misc_RNA (1)...(19): siRNA sense strand
cugacuuacuuccugauga

SEQ ID NO: 1697742 - RNA, 19 nt, Homo sapiens
  misc_RNA (1)...(19): siRNA sense strand
gaaauaucgcaugcugguu

SEQ ID NO: 1697743 - RNA, 19 nt, Homo sapiens
  misc_RNA (1)...(19): siRNA sense strand
guguaaccauccuccacaa

SEQ ID NO: 1697744 - RNA, 19 nt, Homo sapiens
  misc_RNA (1)...(19): siRNA sense strand
ggacuuuuauccucagcaa

SEQ ID NO: 1697745 - RNA, 19 nt, Homo sapiens
  misc_RNA (1)...(19): siRNA sense strand
uuuaaggucauaccaaguu

SEQ ID NO: 1697746 - RNA, 19 nt, Homo sapiens
  misc_RNA (1)...(19): siRNA sense strand
gcauguauuacucauccuu

SEQ ID NO: 1697747 - RNA, 19 nt, Homo sapiens
  misc_RNA (1)...(19): siRNA sense strand
uggcuugcggugcuuguua

SEQ ID NO: 1697748 - RNA, 19 nt, Homo sapiens
  misc_RNA (1)...(19): siRNA sense strand
aaacacuacagaagacaau

SEQ ID NO: 1697749 - RNA, 19 nt, Homo sapiens
  misc_RNA (1)...(19): siRNA sense strand
caaacacuacagaagacaa

SEQ ID NO: 1697750 - RNA, 19 nt, Homo sapiens
  misc_RNA (1)...(19): siRNA sense strand
gacuaugaaaccagaauca

SEQ ID NO: 1697751 - RNA, 19 nt, Homo sapiens
  misc_RNA (1)...(19): siRNA sense strand
auggauauuugcagauaga

SEQ ID NO: 1697752 - RNA, 19 nt, Homo sapiens
  misc_RNA (1)...(19): siRNA sense strand
gcaaaggaauguuaaucua

SEQ ID NO: 1697753 - RNA, 19 nt, Homo sapiens
  misc_RNA (1)...(19): siRNA sense strand
gaauggauauuugcagaua

SEQ ID NO: 1697754 - RNA, 19 nt, Homo sapiens
  misc_RNA (1)...(19): siRNA sense strand
cagaaucacugaaagcaaa

SEQ ID NO: 1697755 - RNA, 19 nt, Homo sapiens
  misc_RNA (1)...(19): siRNA sense strand
caucguggcgcauguauua

SEQ ID NO: 1697756 - RNA, 19 nt, Homo sapiens
  misc_RNA (1)...(19): siRNA sense strand
gaagacaauuauucacguu

SEQ ID NO: 1697757 - RNA, 19 nt, Homo sapiens
  misc_RNA (1)...(19): siRNA sense strand
gaaaccaaauccugaucaa

SEQ ID NO: 1697758 - RNA, 19 nt, Homo sapiens
  misc_RNA (1)...(19): siRNA sense strand
caagagcaaaggaauguua

SEQ ID NO: 1697759 - RNA, 19 nt, Homo sapiens
  misc_RNA (1)...(19): siRNA sense strand
ccauuaaaguuacugguuu

SEQ ID NO: 1697760 - RNA, 19 nt, Homo sapiens
  misc_RNA (1)...(19): siRNA sense strand
uaaguacgauguucaagug

SEQ ID NO: 1697761 - RNA, 19 nt, Homo sapiens
  misc_RNA (1)...(19): siRNA sense strand
gaaaauaaacgcuccaaaa

SEQ ID NO: 1697762 - RNA, 19 nt, Homo sapiens
  misc_RNA (1)...(19): siRNA sense strand
gaaaccagaaucacugaaa

SEQ ID NO: 1697763 - RNA, 19 nt, Homo sapiens
  misc_RNA (1)...(19): siRNA sense strand
gaguggagccaaccuauuu

SEQ ID NO: 1697764 - RNA, 19 nt, Homo sapiens
  misc_RNA (1)...(19): siRNA sense strand
gcagaacgaccacucacua

SEQ ID NO: 1697765 - RNA, 19 nt, Homo sapiens
  misc_RNA (1)...(19): siRNA sense strand
caaauaaauccuccacuga

SEQ ID NO: 1697766 - RNA, 19 nt, Homo sapiens
  misc_RNA (1)...(19): siRNA sense strand
ccuggaaccucaauuguga

SEQ ID NO: 1697767 - RNA, 19 nt, Homo sapiens
  misc_RNA (1)...(19): siRNA sense strand
ucacgccauugaucaaaua

SEQ ID NO: 1697768 - RNA, 19 nt, Homo sapiens
  misc_RNA (1)...(19): siRNA sense strand
ccacaaacacuacagaaga

SEQ ID NO: 1697769 - RNA, 19 nt, Homo sapiens
  misc_RNA (1)...(19): siRNA sense strand
ugaaggaacucgucucucu

SEQ ID NO: 1697770 - RNA, 19 nt, Homo sapiens
  misc_RNA (1)...(19): siRNA sense strand
gagccaaccuauuuaugug

SEQ ID NO: 1697771 - RNA, 19 nt, Homo sapiens
  misc_RNA (1)...(19): siRNA sense strand
gaacucgucucucuaucca

SEQ ID NO: 1697772 - RNA, 19 nt, Homo sapiens
  misc_RNA (1)...(19): siRNA sense strand
gaagaugacuaugaaacca

SEQ ID NO: 1697773 - RNA, 19 nt, Homo sapiens
  misc_RNA (1)...(19): siRNA sense strand
ugacuuacuuccugaugaa

SEQ ID NO: 1697774 - RNA, 19 nt, Homo sapiens
  misc_RNA (1)...(19): siRNA sense strand
gaaagcaaauguguaacca

SEQ ID NO: 1697775 - RNA, 19 nt, Homo sapiens
  misc_RNA (1)...(19): siRNA sense strand
gcagggcucuggagugagu

SEQ ID NO: 1697776 - RNA, 19 nt, Homo sapiens
  misc_RNA (1)...(19): siRNA sense strand
gaaugucacagcagagauu

SEQ ID NO: 1697777 - RNA, 19 nt, Homo sapiens
  misc_RNA (1)...(19): siRNA sense strand
uacaaggaauggauauuug

SEQ ID NO: 1697778 - RNA, 19 nt, Homo sapiens
  misc_RNA (1)...(19): siRNA sense strand
guacgauguucaagugaga

SEQ ID NO: 1697779 - RNA, 19 nt, Homo sapiens
  misc_RNA (1)...(19): siRNA sense strand
ccugucaauuucaccauua

SEQ ID NO: 1697780 - RNA, 19 nt, Homo sapiens
  misc_RNA (1)...(19): siRNA sense strand
ggagccaaccuauuuaugu

SEQ ID NO: 1697781 - RNA, 19 nt, Homo sapiens
  misc_RNA (1)...(19): siRNA sense strand
agaaaccagugucugcuuu

SEQ ID NO: 1697782 - RNA, 19 nt, Homo sapiens
  misc_RNA (1)...(19): siRNA sense strand
gaacgaccacucacuacug

SEQ ID NO: 1697783 - RNA, 19 nt, Homo sapiens
  misc_RNA (1)...(19): siRNA sense strand
gaaggaacucgucucucua

SEQ ID NO: 1697784 - RNA, 19 nt, Homo sapiens
  misc_RNA (1)...(19): siRNA sense strand
gauacugcaagcugacuua

SEQ ID NO: 1697785 - RNA, 19 nt, Homo sapiens
  misc_RNA (1)...(19): siRNA sense strand
cuacagaagacaauuauuc

SEQ ID NO: 1697786 - RNA, 19 nt, Homo sapiens
  misc_RNA (1)...(19): siRNA sense strand
ccaaugcauucaucucaau

SEQ ID NO: 1697787 - RNA, 19 nt, Homo sapiens
  misc_RNA (1)...(19): siRNA sense strand
ggaccauccugcagaacga

SEQ ID NO: 1697788 - RNA, 19 nt, Homo sapiens
  misc_RNA (1)...(19): siRNA sense strand
aauaaacgcuccaaaagaa

SEQ ID NO: 1697789 - RNA, 19 nt, Homo sapiens
  misc_RNA (1)...(19): siRNA sense strand
caaaagaagaugacuauga

SEQ ID NO: 1697790 - RNA, 19 nt, Homo sapiens
  misc_RNA (1)...(19): siRNA sense strand
aaauaucgcaugcugguuu

SEQ ID NO: 1697791 - RNA, 19 nt, Homo sapiens
  misc_RNA (1)...(19): siRNA sense strand
aaauaaauccuccacugaa

SEQ ID NO: 1697792 - RNA, 19 nt, Homo sapiens
  misc_RNA (1)...(19): siRNA sense strand
cauuaaaguuacugguuug

SEQ ID NO: 1697793 - RNA, 19 nt, Homo sapiens
  misc_RNA (1)...(19): siRNA sense strand
aauaaauccuccacugaau

SEQ ID NO: 1697794 - RNA, 19 nt, Homo sapiens
  misc_RNA (1)...(19): siRNA sense strand
caaaggaauguuaaucuag

SEQ ID NO: 1697795 - RNA, 19 nt, Homo sapiens
  misc_RNA (1)...(19): siRNA sense strand
cgccauugaucaaauaaau

SEQ ID NO: 1697796 - RNA, 19 nt, Homo sapiens
  misc_RNA (1)...(19): siRNA sense strand
acacuacagaagacaauua

SEQ ID NO: 1697797 - RNA, 19 nt, Homo sapiens
  misc_RNA (1)...(19): siRNA sense strand
ggaaaccaaauccugauca

SEQ ID NO: 1697798 - RNA, 19 nt, Homo sapiens
  misc_RNA (1)...(19): siRNA sense strand
gaucaagagcaaaggaaug

SEQ ID NO: 1697799 - RNA, 19 nt, Homo sapiens
  misc_RNA (1)...(19): siRNA sense strand
ugaagaaugccaagaauac

SEQ ID NO: 1697800 - RNA, 19 nt, Homo sapiens
  misc_RNA (1)...(19): siRNA sense strand
gagcaaaggaauguuaauc

SEQ ID NO: 1697801 - RNA, 19 nt, Homo sapiens
  misc_RNA (1)...(19): siRNA sense strand
gaccaaugcauucaucuca

SEQ ID NO: 1697802 - RNA, 19 nt, Homo sapiens
  misc_RNA (1)...(19): siRNA sense strand
gaagaaugccaagaauaca

SEQ ID NO: 1697803 - RNA, 19 nt, Homo sapiens
  misc_RNA (1)...(19): siRNA sense strand
aaccaaauccugaucaaga

SEQ ID NO: 1697804 - RNA, 19 nt, Homo sapiens
  misc_RNA (1)...(19): siRNA sense strand
acugaaagcaaauguguaa

SEQ ID NO: 1697805 - RNA, 19 nt, Homo sapiens
  misc_RNA (1)...(19): siRNA sense strand
gcaaauguguaaccauccu

SEQ ID NO: 1697806 - RNA, 19 nt, Homo sapiens
  misc_RNA (1)...(19): siRNA sense strand
caagugagagcagcaguga

SEQ ID NO: 1697807 - RNA, 19 nt, Homo sapiens
  misc_RNA (1)...(19): siRNA sense strand
acugcaagcugacuuacuu

SEQ ID NO: 1697808 - RNA, 19 nt, Homo sapiens
  misc_RNA (1)...(19): siRNA sense strand
gcccuuugaucagcuguuu

SEQ ID NO: 1697809 - RNA, 19 nt, Homo sapiens
  misc_RNA (1)...(19): siRNA sense strand
uuaaggucauaccaaguuu

SEQ ID NO: 1697810 - RNA, 19 nt, Homo sapiens
  misc_RNA (1)...(19): siRNA sense strand
aggcagggcucuggaguga

SEQ ID NO: 1697811 - RNA, 19 nt, Homo sapiens
  misc_RNA (1)...(19): siRNA sense strand
ccauugcuuugauuaugaa

SEQ ID NO: 1697812 - RNA, 19 nt, Homo sapiens
  misc_RNA (1)...(19): siRNA sense strand
uaaauccuccacugaaugu

SEQ ID NO: 1697813 - RNA, 19 nt, Homo sapiens
  misc_RNA (1)...(19): siRNA sense strand
ggcuugcggugcuuguuaa

SEQ ID NO: 1697814 - RNA, 19 nt, Homo sapiens
  misc_RNA (1)...(19): siRNA sense strand
ucacuucucccaccuguca

SEQ ID NO: 1697815 - RNA, 19 nt, Homo sapiens
  misc_RNA (1)...(19): siRNA sense strand
cugaggacacgcaguauuu

SEQ ID NO: 1697816 - RNA, 19 nt, Homo sapiens
  misc_RNA (1)...(19): siRNA sense strand
aaaccagaaucacugaaag

SEQ ID NO: 1697817 - RNA, 19 nt, Homo sapiens
  misc_RNA (1)...(19): siRNA sense strand
uaaccauccuccacaaagg

SEQ ID NO: 1697818 - RNA, 19 nt, Homo sapiens
  misc_RNA (1)...(19): siRNA sense strand
ggauauuugcagauagaaa

SEQ ID NO: 1697819 - RNA, 19 nt, Homo sapiens
  misc_RNA (1)...(19): siRNA sense strand
acaauacaaggaauggaua

SEQ ID NO: 1697820 - RNA, 19 nt, Homo sapiens
  misc_RNA (1)...(19): siRNA sense strand
gaucaucguggcgcaugua

SEQ ID NO: 1697821 - RNA, 19 nt, Homo sapiens
  misc_RNA (1)...(19): siRNA sense strand
uccauugcuuugauuauga

SEQ ID NO: 1697822 - RNA, 19 nt, Homo sapiens
  misc_RNA (1)...(19): siRNA sense strand
gagaaaccagugucugcuu

SEQ ID NO: 1697823 - RNA, 19 nt, Homo sapiens
  misc_RNA (1)...(19): siRNA sense strand
ucacugaaagcaaaugugu

SEQ ID NO: 1697824 - RNA, 19 nt, Homo sapiens
  misc_RNA (1)...(19): siRNA sense strand
gcaccacaaacacuacaga

SEQ ID NO: 1697825 - RNA, 19 nt, Homo sapiens
  misc_RNA (1)...(19): siRNA sense strand
caaugcauucaucucaaua

SEQ ID NO: 1697826 - RNA, 19 nt, Homo sapiens
  misc_RNA (1)...(19): siRNA sense strand
gacugaagaaugccaagaa

SEQ ID NO: 1697827 - RNA, 19 nt, Homo sapiens
  misc_RNA (1)...(19): siRNA sense strand
guauggcucuuggacugaa

SEQ ID NO: 1697828 - RNA, 19 nt, Homo sapiens
  misc_RNA (1)...(19): siRNA sense strand
caagaauacagcaaagaca

SEQ ID NO: 1697829 - RNA, 19 nt, Homo sapiens
  misc_RNA (1)...(19): siRNA sense strand
guaaccauccuccacaaag

SEQ ID NO: 1697830 - RNA, 19 nt, Homo sapiens
  misc_RNA (1)...(19): siRNA sense strand
cugaagaaugccaagaaua

SEQ ID NO: 1697831 - RNA, 19 nt, Homo sapiens
  misc_RNA (1)...(19): siRNA sense strand
ucucccaccugucaauuuc

SEQ ID NO: 1697832 - RNA, 19 nt, Homo sapiens
  misc_RNA (1)...(19): siRNA sense strand
cauaccaaguuucccuuca

SEQ ID NO: 1697833 - RNA, 19 nt, Homo sapiens
  misc_RNA (1)...(19): siRNA sense strand
cacaaacacuacagaagac

SEQ ID NO: 1697834 - RNA, 19 nt, Homo sapiens
  misc_RNA (1)...(19): siRNA sense strand
cacugcaccuggcuuguug

SEQ ID NO: 1697835 - RNA, 19 nt, Homo sapiens
  misc_RNA (1)...(19): siRNA sense strand
ggaauggauauuugcagau

SEQ ID NO: 1697836 - RNA, 19 nt, Homo sapiens
  misc_RNA (1)...(19): siRNA sense strand
ggacugaagaaugccaaga

SEQ ID NO: 1697837 - RNA, 19 nt, Homo sapiens
  misc_RNA (1)...(19): siRNA sense strand
acucgucucucuauccaau

SEQ ID NO: 1697838 - RNA, 19 nt, Homo sapiens
  misc_RNA (1)...(19): siRNA sense strand
caauacaaggaauggauau

SEQ ID NO: 1697839 - RNA, 19 nt, Homo sapiens
  misc_RNA (1)...(19): siRNA sense strand
ugguuuggcucaaguucuu

SEQ ID NO: 1697840 - RNA, 19 nt, Homo sapiens
  misc_RNA (1)...(19): siRNA sense strand
acugaagaaugccaagaau

SEQ ID NO: 1697841 - RNA, 19 nt, Homo sapiens
  misc_RNA (1)...(19): siRNA sense strand
cugacuuacuuccugauga

SEQ ID NO: 1697842 - RNA, 19 nt, Homo sapiens
  misc_RNA (1)...(19): siRNA sense strand
gaaauaucgcaugcugguu

SEQ ID NO: 1697843 - RNA, 19 nt, Homo sapiens
  misc_RNA (1)...(19): siRNA sense strand
guguaaccauccuccacaa

SEQ ID NO: 1697844 - RNA, 19 nt, Homo sapiens
  misc_RNA (1)...(19): siRNA sense strand
ggacuuuuauccucagcaa

SEQ ID NO: 1697845 - RNA, 19 nt, Homo sapiens
  misc_RNA (1)...(19): siRNA sense strand
uuuaaggucauaccaaguu

SEQ ID NO: 1697846 - RNA, 19 nt, Homo sapiens
  misc_RNA (1)...(19): siRNA sense strand
gcauguauuacucauccuu

SEQ ID NO: 1697847 - RNA, 19 nt, Homo sapiens
  misc_RNA (1)...(19): siRNA sense strand
uggcuugcggugcuuguua

SEQ ID NO: 1697848 - RNA, 19 nt, Homo sapiens
  misc_RNA (1)...(19): siRNA sense strand
aaacacuacagaagacaau

SEQ ID NO: 1697849 - RNA, 19 nt, Homo sapiens
  misc_RNA (1)...(19): siRNA sense strand
caaacacuacagaagacaa

SEQ ID NO: 1697850 - RNA, 19 nt, Homo sapiens
  misc_RNA (1)...(19): siRNA sense strand
gacuaugaaaccagaauca

SEQ ID NO: 1697851 - RNA, 19 nt, Homo sapiens
  misc_RNA (1)...(19): siRNA sense strand
auggauauuugcagauaga

SEQ ID NO: 1697852 - RNA, 19 nt, Homo sapiens
  misc_RNA (1)...(19): siRNA sense strand
gcaaaggaauguuaaucua

SEQ ID NO: 1697853 - RNA, 19 nt, Homo sapiens
  misc_RNA (1)...(19): siRNA sense strand
gaauggauauuugcagaua

SEQ ID NO: 1697854 - RNA, 19 nt, Homo sapiens
  misc_RNA (1)...(19): siRNA sense strand
cagaaucacugaaagcaaa

SEQ ID NO: 1697855 - RNA, 19 nt, Homo sapiens
  misc_RNA (1)...(19): siRNA sense strand
caucguggcgcauguauua

SEQ ID NO: 1697856 - RNA, 19 nt, Homo sapiens
  misc_RNA (1)...(19): siRNA sense strand
gaagacaauuauucacguu

SEQ ID NO: 1697857 - RNA, 19 nt, Homo sapiens
  misc_RNA (1)...(19): siRNA sense strand
gaaaccaaauccugaucaa

SEQ ID NO: 1697858 - RNA, 19 nt, Homo sapiens
  misc_RNA (1)...(19): siRNA sense strand
caagagcaaaggaauguua

SEQ ID NO: 1697859 - RNA, 19 nt, Homo sapiens
  misc_RNA (1)...(19): siRNA sense strand
ccauuaaaguuacugguuu

SEQ ID NO: 1697860 - RNA, 19 nt, Homo sapiens
  misc_RNA (1)...(19): siRNA sense strand
uaaguacgauguucaagug

SEQ ID NO: 1697861 - RNA, 19 nt, Homo sapiens
  misc_RNA (1)...(19): siRNA sense strand
gaaaauaaacgcuccaaaa

SEQ ID NO: 1697862 - RNA, 19 nt, Homo sapiens
  misc_RNA (1)...(19): siRNA sense strand
gaaaccagaaucacugaaa

SEQ ID NO: 1697863 - RNA, 19 nt, Homo sapiens
  misc_RNA (1)...(19): siRNA sense strand
gaguggagccaaccuauuu

SEQ ID NO: 1697864 - RNA, 19 nt, Homo sapiens
  misc_RNA (1)...(19): siRNA sense strand
gcagaacgaccacucacua

SEQ ID NO: 1697865 - RNA, 19 nt, Homo sapiens
  misc_RNA (1)...(19): siRNA sense strand
caaauaaauccuccacuga

SEQ ID NO: 1697866 - RNA, 19 nt, Homo sapiens
  misc_RNA (1)...(19): siRNA sense strand
ccuggaaccucaauuguga

SEQ ID NO: 1697867 - RNA, 19 nt, Homo sapiens
  misc_RNA (1)...(19): siRNA sense strand
ucacgccauugaucaaaua

SEQ ID NO: 1697868 - RNA, 19 nt, Homo sapiens
  misc_RNA (1)...(19): siRNA sense strand
ccacaaacacuacagaaga

SEQ ID NO: 1697869 - RNA, 19 nt, Homo sapiens
  misc_RNA (1)...(19): siRNA sense strand
ugaaggaacucgucucucu

SEQ ID NO: 1697870 - RNA, 19 nt, Homo sapiens
  misc_RNA (1)...(19): siRNA sense strand
gagccaaccuauuuaugug

SEQ ID NO: 1697871 - RNA, 19 nt, Homo sapiens
  misc_RNA (1)...(19): siRNA sense strand
gaacucgucucucuaucca

SEQ ID NO: 1697872 - RNA, 19 nt, Homo sapiens
  misc_RNA (1)...(19): siRNA sense strand
gaagaugacuaugaaacca

SEQ ID NO: 1697873 - RNA, 19 nt, Homo sapiens
  misc_RNA (1)...(19): siRNA sense strand
ugacuuacuuccugaugaa

SEQ ID NO: 1697874 - RNA, 19 nt, Homo sapiens
  misc_RNA (1)...(19): siRNA sense strand
gaaagcaaauguguaacca

SEQ ID NO: 1697875 - RNA, 19 nt, Homo sapiens
  misc_RNA (1)...(19): siRNA sense strand
gcagggcucuggagugagu

SEQ ID NO: 1697876 - RNA, 19 nt, Homo sapiens
  misc_RNA (1)...(19): siRNA sense strand
gaaugucacagcagagauu

SEQ ID NO: 1697877 - RNA, 19 nt, Homo sapiens
  misc_RNA (1)...(19): siRNA sense strand
uacaaggaauggauauuug

SEQ ID NO: 1697878 - RNA, 19 nt, Homo sapiens
  misc_RNA (1)...(19): siRNA sense strand
guacgauguucaagugaga

SEQ ID NO: 1697879 - RNA, 19 nt, Homo sapiens
  misc_RNA (1)...(19): siRNA sense strand
ccugucaauuucaccauua

SEQ ID NO: 1697880 - RNA, 19 nt, Homo sapiens
  misc_RNA (1)...(19): siRNA sense strand
ggagccaaccuauuuaugu

SEQ ID NO: 1697881 - RNA, 19 nt, Homo sapiens
  misc_RNA (1)...(19): siRNA sense strand
agaaaccagugucugcuuu

SEQ ID NO: 1697882 - RNA, 19 nt, Homo sapiens
  misc_RNA (1)...(19): siRNA sense strand
gaacgaccacucacuacug

SEQ ID NO: 1697883 - RNA, 19 nt, Homo sapiens
  misc_RNA (1)...(19): siRNA sense strand
gaaggaacucgucucucua

SEQ ID NO: 1697884 - RNA, 19 nt, Homo sapiens
  misc_RNA (1)...(19): siRNA sense strand
gauacugcaagcugacuua

SEQ ID NO: 1697885 - RNA, 19 nt, Homo sapiens
  misc_RNA (1)...(19): siRNA sense strand
cuacagaagacaauuauuc

SEQ ID NO: 1697886 - RNA, 19 nt, Homo sapiens
  misc_RNA (1)...(19): siRNA sense strand
ccaaugcauucaucucaau

SEQ ID NO: 1697887 - RNA, 19 nt, Homo sapiens
  misc_RNA (1)...(19): siRNA sense strand
ggaccauccugcagaacga

SEQ ID NO: 1697888 - RNA, 19 nt, Homo sapiens
  misc_RNA (1)...(19): siRNA sense strand
aauaaacgcuccaaaagaa

SEQ ID NO: 1697889 - RNA, 19 nt, Homo sapiens
  misc_RNA (1)...(19): siRNA sense strand
caaaagaagaugacuauga

SEQ ID NO: 1697890 - RNA, 19 nt, Homo sapiens
  misc_RNA (1)...(19): siRNA sense strand
aaauaucgcaugcugguuu

SEQ ID NO: 1697891 - RNA, 19 nt, Homo sapiens
  misc_RNA (1)...(19): siRNA sense strand
aaauaaauccuccacugaa

SEQ ID NO: 1697892 - RNA, 19 nt, Homo sapiens
  misc_RNA (1)...(19): siRNA sense strand
cauuaaaguuacugguuug

SEQ ID NO: 1697893 - RNA, 19 nt, Homo sapiens
  misc_RNA (1)...(19): siRNA sense strand
aauaaauccuccacugaau

SEQ ID NO: 1697894 - RNA, 19 nt, Homo sapiens
  misc_RNA (1)...(19): siRNA sense strand
caaaggaauguuaaucuag

SEQ ID NO: 1697895 - RNA, 19 nt, Homo sapiens
  misc_RNA (1)...(19): siRNA sense strand
cgccauugaucaaauaaau

SEQ ID NO: 1697896 - RNA, 19 nt, Homo sapiens
  misc_RNA (1)...(19): siRNA sense strand
acacuacagaagacaauua

SEQ ID NO: 1697897 - RNA, 19 nt, Homo sapiens
  misc_RNA (1)...(19): siRNA sense strand
ggaaaccaaauccugauca

SEQ ID NO: 1697898 - RNA, 19 nt, Homo sapiens
  misc_RNA (1)...(19): siRNA sense strand
gaucaagagcaaaggaaug

SEQ ID NO: 1697899 - RNA, 19 nt, Homo sapiens
  misc_RNA (1)...(19): siRNA sense strand
ugaagaaugccaagaauac

SEQ ID NO: 1697900 - RNA, 19 nt, Homo sapiens
  misc_RNA (1)...(19): siRNA sense strand
gagcaaaggaauguuaauc

SEQ ID NO: 1697901 - RNA, 19 nt, Homo sapiens
  misc_RNA (1)...(19): siRNA sense strand
gaccaaugcauucaucuca

SEQ ID NO: 1697902 - RNA, 19 nt, Homo sapiens
  misc_RNA (1)...(19): siRNA sense strand
gaagaaugccaagaauaca

SEQ ID NO: 1697903 - RNA, 19 nt, Homo sapiens
  misc_RNA (1)...(19): siRNA sense strand
aaccaaauccugaucaaga

SEQ ID NO: 1697904 - RNA, 19 nt, Homo sapiens
  misc_RNA (1)...(19): siRNA sense strand
acugaaagcaaauguguaa

SEQ ID NO: 1697905 - RNA, 19 nt, Homo sapiens
  misc_RNA (1)...(19): siRNA sense strand
gcaaauguguaaccauccu

SEQ ID NO: 1697906 - RNA, 19 nt, Homo sapiens
  misc_RNA (1)...(19): siRNA sense strand
caagugagagcagcaguga

SEQ ID NO: 1697907 - RNA, 19 nt, Homo sapiens
  misc_RNA (1)...(19): siRNA sense strand
acugcaagcugacuuacuu

SEQ ID NO: 1697908 - RNA, 19 nt, Homo sapiens
  misc_RNA (1)...(19): siRNA sense strand
gcccuuugaucagcuguuu

SEQ ID NO: 1697909 - RNA, 19 nt, Homo sapiens
  misc_RNA (1)...(19): siRNA sense strand
uuaaggucauaccaaguuu

SEQ ID NO: 1697910 - RNA, 19 nt, Homo sapiens
  misc_RNA (1)...(19): siRNA sense strand
aggcagggcucuggaguga

SEQ ID NO: 1697911 - RNA, 19 nt, Homo sapiens
  misc_RNA (1)...(19): siRNA sense strand
ccauugcuuugauuaugaa

SEQ ID NO: 1697912 - RNA, 19 nt, Homo sapiens
  misc_RNA (1)...(19): siRNA sense strand
uaaauccuccacugaaugu

SEQ ID NO: 1697913 - RNA, 19 nt, Homo sapiens
  misc_RNA (1)...(19): siRNA sense strand
ggcuugcggugcuuguuaa

SEQ ID NO: 1697914 - RNA, 19 nt, Homo sapiens
  misc_RNA (1)...(19): siRNA sense strand
ucacuucucccaccuguca

SEQ ID NO: 1697915 - RNA, 19 nt, Homo sapiens
  misc_RNA (1)...(19): siRNA sense strand
cugaggacacgcaguauuu

SEQ ID NO: 1697916 - RNA, 19 nt, Homo sapiens
  misc_RNA (1)...(19): siRNA sense strand
aaaccagaaucacugaaag

SEQ ID NO: 1697917 - RNA, 19 nt, Homo sapiens
  misc_RNA (1)...(19): siRNA sense strand
uaaccauccuccacaaagg

SEQ ID NO: 1697918 - RNA, 19 nt, Homo sapiens
  misc_RNA (1)...(19): siRNA sense strand
ggauauuugcagauagaaa

SEQ ID NO: 1697919 - RNA, 19 nt, Homo sapiens
  misc_RNA (1)...(19): siRNA sense strand
acaauacaaggaauggaua

SEQ ID NO: 1697920 - RNA, 19 nt, Homo sapiens
  misc_RNA (1)...(19): siRNA sense strand
gaucaucguggcgcaugua

SEQ ID NO: 1697921 - RNA, 19 nt, Homo sapiens
  misc_RNA (1)...(19): siRNA sense strand
uccauugcuuugauuauga

SEQ ID NO: 1697922 - RNA, 19 nt, Homo sapiens
  misc_RNA (1)...(19): siRNA sense strand
gagaaaccagugucugcuu

SEQ ID NO: 1697923 - RNA, 19 nt, Homo sapiens
  misc_RNA (1)...(19): siRNA sense strand
ucacugaaagcaaaugugu

SEQ ID NO: 1697924 - RNA, 19 nt, Homo sapiens
  misc_RNA (1)...(19): siRNA sense strand
gcaccacaaacacuacaga

SEQ ID NO: 1697925 - RNA, 19 nt, Homo sapiens
  misc_RNA (1)...(19): siRNA sense strand
caaugcauucaucucaaua

SEQ ID NO: 1697926 - RNA, 19 nt, Homo sapiens
  misc_RNA (1)...(19): siRNA sense strand
gacugaagaaugccaagaa

SEQ ID NO: 1697927 - RNA, 19 nt, Homo sapiens
  misc_RNA (1)...(19): siRNA sense strand
guauggcucuuggacugaa

SEQ ID NO: 1697928 - RNA, 19 nt, Homo sapiens
  misc_RNA (1)...(19): siRNA sense strand
caagaauacagcaaagaca

SEQ ID NO: 1697929 - RNA, 19 nt, Homo sapiens
  misc_RNA (1)...(19): siRNA sense strand
guaaccauccuccacaaag

SEQ ID NO: 1697930 - RNA, 19 nt, Homo sapiens
  misc_RNA (1)...(19): siRNA sense strand
cugaagaaugccaagaaua

SEQ ID NO: 1697931 - RNA, 19 nt, Homo sapiens
  misc_RNA (1)...(19): siRNA sense strand
ucucccaccugucaauuuc

SEQ ID NO: 1697932 - RNA, 19 nt, Homo sapiens
  misc_RNA (1)...(19): siRNA sense strand
cauaccaaguuucccuuca

SEQ ID NO: 1697933 - RNA, 19 nt, Homo sapiens
  misc_RNA (1)...(19): siRNA sense strand
cacaaacacuacagaagac

SEQ ID NO: 1697934 - RNA, 19 nt, Homo sapiens
  misc_RNA (1)...(19): siRNA sense strand
cacugcaccuggcuuguug

SEQ ID NO: 1697935 - RNA, 19 nt, Homo sapiens
  misc_RNA (1)...(19): siRNA sense strand
ggaauggauauuugcagau

SEQ ID NO: 1697936 - RNA, 19 nt, Homo sapiens
  misc_RNA (1)...(19): siRNA sense strand
ggacugaagaaugccaaga

SEQ ID NO: 1697937 - RNA, 19 nt, Homo sapiens
  misc_RNA (1)...(19): siRNA sense strand
acucgucucucuauccaau

SEQ ID NO: 1697938 - RNA, 19 nt, Homo sapiens
  misc_RNA (1)...(19): siRNA sense strand
caauacaaggaauggauau

SEQ ID NO: 1697939 - RNA, 19 nt, Homo sapiens
  misc_RNA (1)...(19): siRNA sense strand
ugguuuggcucaaguucuu

SEQ ID NO: 1697940 - RNA, 19 nt, Homo sapiens
  misc_RNA (1)...(19): siRNA sense strand
acugaagaaugccaagaau

SEQ ID NO: 1697941 - RNA, 19 nt, Homo sapiens
  misc_RNA (1)...(19): siRNA sense strand
cugacuuacuuccugauga

SEQ ID NO: 1697942 - RNA, 19 nt, Homo sapiens
  misc_RNA (1)...(19): siRNA sense strand
gaaauaucgcaugcugguu

SEQ ID NO: 1697943 - RNA, 19 nt, Homo sapiens
  misc_RNA (1)...(19): siRNA sense strand
guguaaccauccuccacaa

SEQ ID NO: 1697944 - RNA, 19 nt, Homo sapiens
  misc_RNA (1)...(19): siRNA sense strand
ggacuuuuauccucagcaa

SEQ ID NO: 1697945 - RNA, 19 nt, Homo sapiens
  misc_RNA (1)...(19): siRNA sense strand
uuuaaggucauaccaaguu

SEQ ID NO: 1697946 - RNA, 19 nt, Homo sapiens
  misc_RNA (1)...(19): siRNA sense strand
gcauguauuacucauccuu

SEQ ID NO: 1697947 - RNA, 19 nt, Homo sapiens
  misc_RNA (1)...(19): siRNA sense strand
uggcuugcggugcuuguua

SEQ ID NO: 1697948 - RNA, 19 nt, Homo sapiens
  misc_RNA (1)...(19): siRNA sense strand
aaacacuacagaagacaau

SEQ ID NO: 1697949 - RNA, 19 nt, Homo sapiens
  misc_RNA (1)...(19): siRNA sense strand
caaacacuacagaagacaa

SEQ ID NO: 1697950 - RNA, 19 nt, Homo sapiens
  misc_RNA (1)...(19): siRNA sense strand
gacuaugaaaccagaauca

SEQ ID NO: 1697951 - RNA, 19 nt, Homo sapiens
  misc_RNA (1)...(19): siRNA sense strand
auggauauuugcagauaga

SEQ ID NO: 1697952 - RNA, 19 nt, Homo sapiens
  misc_RNA (1)...(19): siRNA sense strand
gcaaaggaauguuaaucua

SEQ ID NO: 1697953 - RNA, 19 nt, Homo sapiens
  misc_RNA (1)...(19): siRNA sense strand
gaauggauauuugcagaua

SEQ ID NO: 1697954 - RNA, 19 nt, Homo sapiens
  misc_RNA (1)...(19): siRNA sense strand
cagaaucacugaaagcaaa

SEQ ID NO: 1697955 - RNA, 19 nt, Homo sapiens
  misc_RNA (1)...(19): siRNA sense strand
caucguggcgcauguauua

SEQ ID NO: 1697956 - RNA, 19 nt, Homo sapiens
  misc_RNA (1)...(19): siRNA sense strand
gaagacaauuauucacguu

SEQ ID NO: 1697957 - RNA, 19 nt, Homo sapiens
  misc_RNA (1)...(19): siRNA sense strand
gaaaccaaauccugaucaa

SEQ ID NO: 1697958 - RNA, 19 nt, Homo sapiens
  misc_RNA (1)...(19): siRNA sense strand
caagagcaaaggaauguua

SEQ ID NO: 1697959 - RNA, 19 nt, Homo sapiens
  misc_RNA (1)...(19): siRNA sense strand
ccauuaaaguuacugguuu

SEQ ID NO: 1697960 - RNA, 19 nt, Homo sapiens
  misc_RNA (1)...(19): siRNA sense strand
uaaguacgauguucaagug

SEQ ID NO: 1697961 - RNA, 19 nt, Homo sapiens
  misc_RNA (1)...(19): siRNA sense strand
gaaaauaaacgcuccaaaa

SEQ ID NO: 1697962 - RNA, 19 nt, Homo sapiens
  misc_RNA (1)...(19): siRNA sense strand
gaaaccagaaucacugaaa

SEQ ID NO: 1697963 - RNA, 19 nt, Homo sapiens
  misc_RNA (1)...(19): siRNA sense strand
gaguggagccaaccuauuu

SEQ ID NO: 1697964 - RNA, 19 nt, Homo sapiens
  misc_RNA (1)...(19): siRNA sense strand
gcagaacgaccacucacua

SEQ ID NO: 1697965 - RNA, 19 nt, Homo sapiens
  misc_RNA (1)...(19): siRNA sense strand
caaauaaauccuccacuga

SEQ ID NO: 1697966 - RNA, 19 nt, Homo sapiens
  misc_RNA (1)...(19): siRNA sense strand
ccuggaaccucaauuguga

SEQ ID NO: 1697967 - RNA, 19 nt, Homo sapiens
  misc_RNA (1)...(19): siRNA sense strand
ucacgccauugaucaaaua

SEQ ID NO: 1697968 - RNA, 19 nt, Homo sapiens
  misc_RNA (1)...(19): siRNA sense strand
ccacaaacacuacagaaga

SEQ ID NO: 1697969 - RNA, 19 nt, Homo sapiens
  misc_RNA (1)...(19): siRNA sense strand
ugaaggaacucgucucucu

SEQ ID NO: 1697970 - RNA, 19 nt, Homo sapiens
  misc_RNA (1)...(19): siRNA sense strand
gagccaaccuauuuaugug

SEQ ID NO: 1697971 - RNA, 19 nt, Homo sapiens
  misc_RNA (1)...(19): siRNA sense strand
gaacucgucucucuaucca

SEQ ID NO: 1697972 - RNA, 19 nt, Homo sapiens
  misc_RNA (1)...(19): siRNA sense strand
gaagaugacuaugaaacca

SEQ ID NO: 1697973 - RNA, 19 nt, Homo sapiens
  misc_RNA (1)...(19): siRNA sense strand
ugacuuacuuccugaugaa

SEQ ID NO: 1697974 - RNA, 19 nt, Homo sapiens
  misc_RNA (1)...(19): siRNA sense strand
gaaagcaaauguguaacca

SEQ ID NO: 1697975 - RNA, 19 nt, Homo sapiens
  misc_RNA (1)...(19): siRNA sense strand
gcagggcucuggagugagu

SEQ ID NO: 1697976 - RNA, 19 nt, Homo sapiens
  misc_RNA (1)...(19): siRNA sense strand
gaaugucacagcagagauu

SEQ ID NO: 1697977 - RNA, 19 nt, Homo sapiens
  misc_RNA (1)...(19): siRNA sense strand
uacaaggaauggauauuug

SEQ ID NO: 1697978 - RNA, 19 nt, Homo sapiens
  misc_RNA (1)...(19): siRNA sense strand
guacgauguucaagugaga

SEQ ID NO: 1697979 - RNA, 19 nt, Homo sapiens
  misc_RNA (1)...(19): siRNA sense strand
ccugucaauuucaccauua

SEQ ID NO: 1697980 - RNA, 19 nt, Homo sapiens
  misc_RNA (1)...(19): siRNA sense strand
ggagccaaccuauuuaugu

SEQ ID NO: 1697981 - RNA, 19 nt, Homo sapiens
  misc_RNA (1)...(19): siRNA sense strand
agaaaccagugucugcuuu

SEQ ID NO: 1697982 - RNA, 19 nt, Homo sapiens
  misc_RNA (1)...(19): siRNA sense strand
gaacgaccacucacuacug

SEQ ID NO: 1697983 - RNA, 19 nt, Homo sapiens
  misc_RNA (1)...(19): siRNA sense strand
gaaggaacucgucucucua

SEQ ID NO: 1697984 - RNA, 19 nt, Homo sapiens
  misc_RNA (1)...(19): siRNA sense strand
gauacugcaagcugacuua

SEQ ID NO: 1697985 - RNA, 19 nt, Homo sapiens
  misc_RNA (1)...(19): siRNA sense strand
cuacagaagacaauuauuc

SEQ ID NO: 1697986 - RNA, 19 nt, Homo sapiens
  misc_RNA (1)...(19): siRNA sense strand
ccaaugcauucaucucaau

SEQ ID NO: 1697987 - RNA, 19 nt, Homo sapiens
  misc_RNA (1)...(19): siRNA sense strand
ggaccauccugcagaacga

SEQ ID NO: 1697988 - RNA, 19 nt, Homo sapiens
  misc_RNA (1)...(19): siRNA sense strand
aauaaacgcuccaaaagaa

SEQ ID NO: 1697989 - RNA, 19 nt, Homo sapiens
  misc_RNA (1)...(19): siRNA sense strand
caaaagaagaugacuauga

SEQ ID NO: 1697990 - RNA, 19 nt, Homo sapiens
  misc_RNA (1)...(19): siRNA sense strand
aaauaucgcaugcugguuu

SEQ ID NO: 1697991 - RNA, 19 nt, Homo sapiens
  misc_RNA (1)...(19): siRNA sense strand
aaauaaauccuccacugaa

SEQ ID NO: 1697992 - RNA, 19 nt, Homo sapiens
  misc_RNA (1)...(19): siRNA sense strand
cauuaaaguuacugguuug

SEQ ID NO: 1697993 - RNA, 19 nt, Homo sapiens
  misc_RNA (1)...(19): siRNA sense strand
aauaaauccuccacugaau

SEQ ID NO: 1697994 - RNA, 19 nt, Homo sapiens
  misc_RNA (1)...(19): siRNA sense strand
caaaggaauguuaaucuag

SEQ ID NO: 1697995 - RNA, 19 nt, Homo sapiens
  misc_RNA (1)...(19): siRNA sense strand
cgccauugaucaaauaaau

SEQ ID NO: 1697996 - RNA, 19 nt, Homo sapiens
  misc_RNA (1)...(19): siRNA sense strand
acacuacagaagacaauua

SEQ ID NO: 1697997 - RNA, 19 nt, Homo sapiens
  misc_RNA (1)...(19): siRNA sense strand
ggaaaccaaauccugauca

SEQ ID NO: 1697998 - RNA, 19 nt, Homo sapiens
  misc_RNA (1)...(19): siRNA sense strand
gaucaagagcaaaggaaug

SEQ ID NO: 1697999 - RNA, 19 nt, Homo sapiens
  misc_RNA (1)...(19): siRNA sense strand
ugaagaaugccaagaauac

SEQ ID NO: 1698000 - RNA, 19 nt, Homo sapiens
  misc_RNA (1)...(19): siRNA sense strand
gagcaaaggaauguuaauc

SEQ ID NO: 1698001 - RNA, 19 nt, Homo sapiens
  misc_RNA (1)...(19): siRNA sense strand
gaccaaugcauucaucuca

SEQ ID NO: 1698002 - RNA, 19 nt, Homo sapiens
  misc_RNA (1)...(19): siRNA sense strand
gaagaaugccaagaauaca

SEQ ID NO: 1698003 - RNA, 19 nt, Homo sapiens
  misc_RNA (1)...(19): siRNA sense strand
aaccaaauccugaucaaga

SEQ ID NO: 1698004 - RNA, 19 nt, Homo sapiens
  misc_RNA (1)...(19): siRNA sense strand
acugaaagcaaauguguaa

SEQ ID NO: 1698005 - RNA, 19 nt, Homo sapiens
  misc_RNA (1)...(19): siRNA sense strand
gcaaauguguaaccauccu

SEQ ID NO: 1698006 - RNA, 19 nt, Homo sapiens
  misc_RNA (1)...(19): siRNA sense strand
caagugagagcagcaguga

SEQ ID NO: 1698007 - RNA, 19 nt, Homo sapiens
  misc_RNA (1)...(19): siRNA sense strand
acugcaagcugacuuacuu

SEQ ID NO: 1698008 - RNA, 19 nt, Homo sapiens
  misc_RNA (1)...(19): siRNA sense strand
gcccuuugaucagcuguuu

SEQ ID NO: 1698009 - RNA, 19 nt, Homo sapiens
  misc_RNA (1)...(19): siRNA sense strand
uuaaggucauaccaaguuu

SEQ ID NO: 1698010 - RNA, 19 nt, Homo sapiens
  misc_RNA (1)...(19): siRNA sense strand
aggcagggcucuggaguga

SEQ ID NO: 1698011 - RNA, 19 nt, Homo sapiens
  misc_RNA (1)...(19): siRNA sense strand
ccauugcuuugauuaugaa

SEQ ID NO: 1698012 - RNA, 19 nt, Homo sapiens
  misc_RNA (1)...(19): siRNA sense strand
uaaauccuccacugaaugu

SEQ ID NO: 1698013 - RNA, 19 nt, Homo sapiens
  misc_RNA (1)...(19): siRNA sense strand
ggcuugcggugcuuguuaa

SEQ ID NO: 1698014 - RNA, 19 nt, Homo sapiens
  misc_RNA (1)...(19): siRNA sense strand
ucacuucucccaccuguca

SEQ ID NO: 1698015 - RNA, 19 nt, Homo sapiens
  misc_RNA (1)...(19): siRNA sense strand
cugaggacacgcaguauuu

SEQ ID NO: 1698016 - RNA, 19 nt, Homo sapiens
  misc_RNA (1)...(19): siRNA sense strand
aaaccagaaucacugaaag

SEQ ID NO: 1698017 - RNA, 19 nt, Homo sapiens
  misc_RNA (1)...(19): siRNA sense strand
uaaccauccuccacaaagg

SEQ ID NO: 1698018 - RNA, 19 nt, Homo sapiens
  misc_RNA (1)...(19): siRNA sense strand
ggauauuugcagauagaaa

SEQ ID NO: 1698019 - RNA, 19 nt, Homo sapiens
  misc_RNA (1)...(19): siRNA sense strand
acaauacaaggaauggaua

SEQ ID NO: 1698020 - RNA, 19 nt, Homo sapiens
  misc_RNA (1)...(19): siRNA sense strand
gaucaucguggcgcaugua

SEQ ID NO: 1698021 - RNA, 19 nt, Homo sapiens
  misc_RNA (1)...(19): siRNA sense strand
uccauugcuuugauuauga

SEQ ID NO: 1698022 - RNA, 19 nt, Homo sapiens
  misc_RNA (1)...(19): siRNA sense strand
gagaaaccagugucugcuu

SEQ ID NO: 1698023 - RNA, 19 nt, Homo sapiens
  misc_RNA (1)...(19): siRNA sense strand
ucacugaaagcaaaugugu

SEQ ID NO: 1698024 - RNA, 19 nt, Homo sapiens
  misc_RNA (1)...(19): siRNA sense strand
gcaccacaaacacuacaga

SEQ ID NO: 1698025 - RNA, 19 nt, Homo sapiens
  misc_RNA (1)...(19): siRNA sense strand
caaugcauucaucucaaua

SEQ ID NO: 1698026 - RNA, 19 nt, Homo sapiens
  misc_RNA (1)...(19): siRNA sense strand
gacugaagaaugccaagaa

SEQ ID NO: 1698027 - RNA, 19 nt, Homo sapiens
  misc_RNA (1)...(19): siRNA sense strand
guauggcucuuggacugaa

SEQ ID NO: 1698028 - RNA, 19 nt, Homo sapiens
  misc_RNA (1)...(19): siRNA sense strand
caagaauacagcaaagaca

SEQ ID NO: 1698029 - RNA, 19 nt, Homo sapiens
  misc_RNA (1)...(19): siRNA sense strand
guaaccauccuccacaaag

SEQ ID NO: 1698030 - RNA, 19 nt, Homo sapiens
  misc_RNA (1)...(19): siRNA sense strand
cugaagaaugccaagaaua

SEQ ID NO: 1698031 - RNA, 19 nt, Homo sapiens
  misc_RNA (1)...(19): siRNA sense strand
ucucccaccugucaauuuc

SEQ ID NO: 1698032 - RNA, 19 nt, Homo sapiens
  misc_RNA (1)...(19): siRNA sense strand
cauaccaaguuucccuuca

SEQ ID NO: 1698033 - RNA, 19 nt, Homo sapiens
  misc_RNA (1)...(19): siRNA sense strand
cacaaacacuacagaagac

SEQ ID NO: 1698034 - RNA, 19 nt, Homo sapiens
  misc_RNA (1)...(19): siRNA sense strand
cacugcaccuggcuuguug

SEQ ID NO: 1698035 - RNA, 19 nt, Homo sapiens
  misc_RNA (1)...(19): siRNA sense strand
ggaauggauauuugcagau

SEQ ID NO: 1698036 - RNA, 19 nt, Homo sapiens
  misc_RNA (1)...(19): siRNA sense strand
ggacugaagaaugccaaga

SEQ ID NO: 1698037 - RNA, 19 nt, Homo sapiens
  misc_RNA (1)...(19): siRNA sense strand
acucgucucucuauccaau

SEQ ID NO: 1698038 - RNA, 19 nt, Homo sapiens
  misc_RNA (1)...(19): siRNA sense strand
caauacaaggaauggauau

SEQ ID NO: 1698039 - RNA, 19 nt, Homo sapiens
  misc_RNA (1)...(19): siRNA sense strand
ugguuuggcucaaguucuu

SEQ ID NO: 1698040 - RNA, 19 nt, Homo sapiens
  misc_RNA (1)...(19): siRNA sense strand
acugaagaaugccaagaau

SEQ ID NO: 1698041 - RNA, 19 nt, Homo sapiens
  misc_RNA (1)...(19): siRNA sense strand
cugacuuacuuccugauga

SEQ ID NO: 1698042 - RNA, 19 nt, Homo sapiens
  misc_RNA (1)...(19): siRNA sense strand
gaaauaucgcaugcugguu

SEQ ID NO: 1698043 - RNA, 19 nt, Homo sapiens
  misc_RNA (1)...(19): siRNA sense strand
guguaaccauccuccacaa

SEQ ID NO: 1698044 - RNA, 19 nt, Homo sapiens
  misc_RNA (1)...(19): siRNA sense strand
ggacuuuuauccucagcaa

SEQ ID NO: 1698045 - RNA, 19 nt, Homo sapiens
  misc_RNA (1)...(19): siRNA sense strand
uuuaaggucauaccaaguu

SEQ ID NO: 1698046 - RNA, 19 nt, Homo sapiens
  misc_RNA (1)...(19): siRNA sense strand
gcauguauuacucauccuu

SEQ ID NO: 1698047 - RNA, 19 nt, Homo sapiens
  misc_RNA (1)...(19): siRNA sense strand
uggcuugcggugcuuguua

SEQ ID NO: 1698048 - RNA, 19 nt, Homo sapiens
  misc_RNA (1)...(19): siRNA sense strand
aaacacuacagaagacaau

SEQ ID NO: 1698049 - RNA, 19 nt, Homo sapiens
  misc_RNA (1)...(19): siRNA sense strand
caaacacuacagaagacaa

SEQ ID NO: 1698050 - RNA, 19 nt, Homo sapiens
  misc_RNA (1)...(19): siRNA sense strand
gacuaugaaaccagaauca

SEQ ID NO: 1698051 - RNA, 19 nt, Homo sapiens
  misc_RNA (1)...(19): siRNA sense strand
auggauauuugcagauaga

SEQ ID NO: 1698052 - RNA, 19 nt, Homo sapiens
  misc_RNA (1)...(19): siRNA sense strand
gcaaaggaauguuaaucua

SEQ ID NO: 1698053 - RNA, 19 nt, Homo sapiens
  misc_RNA (1)...(19): siRNA sense strand
gaauggauauuugcagaua

SEQ ID NO: 1698054 - RNA, 19 nt, Homo sapiens
  misc_RNA (1)...(19): siRNA sense strand
cagaaucacugaaagcaaa

SEQ ID NO: 1698055 - RNA, 19 nt, Homo sapiens
  misc_RNA (1)...(19): siRNA sense strand
caucguggcgcauguauua

SEQ ID NO: 1698056 - RNA, 19 nt, Homo sapiens
  misc_RNA (1)...(19): siRNA sense strand
gaagacaauuauucacguu

SEQ ID NO: 1698057 - RNA, 19 nt, Homo sapiens
  misc_RNA (1)...(19): siRNA sense strand
gaaaccaaauccugaucaa

SEQ ID NO: 1698058 - RNA, 19 nt, Homo sapiens
  misc_RNA (1)...(19): siRNA sense strand
caagagcaaaggaauguua

SEQ ID NO: 1698059 - RNA, 19 nt, Homo sapiens
  misc_RNA (1)...(19): siRNA sense strand
ccauuaaaguuacugguuu

SEQ ID NO: 1698060 - RNA, 19 nt, Homo sapiens
  misc_RNA (1)...(19): siRNA sense strand
uaaguacgauguucaagug

SEQ ID NO: 1698061 - RNA, 19 nt, Homo sapiens
  misc_RNA (1)...(19): siRNA sense strand
gaaaauaaacgcuccaaaa

SEQ ID NO: 1698062 - RNA, 19 nt, Homo sapiens
  misc_RNA (1)...(19): siRNA sense strand
gaaaccagaaucacugaaa

SEQ ID NO: 1698063 - RNA, 19 nt, Homo sapiens
  misc_RNA (1)...(19): siRNA sense strand
gaguggagccaaccuauuu

SEQ ID NO: 1698064 - RNA, 19 nt, Homo sapiens
  misc_RNA (1)...(19): siRNA sense strand
gcagaacgaccacucacua

SEQ ID NO: 1698065 - RNA, 19 nt, Homo sapiens
  misc_RNA (1)...(19): siRNA sense strand
caaauaaauccuccacuga

SEQ ID NO: 1698066 - RNA, 19 nt, Homo sapiens
  misc_RNA (1)...(19): siRNA sense strand
ccuggaaccucaauuguga

SEQ ID NO: 1698067 - RNA, 19 nt, Homo sapiens
  misc_RNA (1)...(19): siRNA sense strand
ucacgccauugaucaaaua

SEQ ID NO: 1698068 - RNA, 19 nt, Homo sapiens
  misc_RNA (1)...(19): siRNA sense strand
ccacaaacacuacagaaga

SEQ ID NO: 1698069 - RNA, 19 nt, Homo sapiens
  misc_RNA (1)...(19): siRNA sense strand
ugaaggaacucgucucucu

SEQ ID NO: 1698070 - RNA, 19 nt, Homo sapiens
  misc_RNA (1)...(19): siRNA sense strand
gagccaaccuauuuaugug

SEQ ID NO: 1698071 - RNA, 19 nt, Homo sapiens
  misc_RNA (1)...(19): siRNA sense strand
gaacucgucucucuaucca

SEQ ID NO: 1698072 - RNA, 19 nt, Homo sapiens
  misc_RNA (1)...(19): siRNA sense strand
gaagaugacuaugaaacca

SEQ ID NO: 1698073 - RNA, 19 nt, Homo sapiens
  misc_RNA (1)...(19): siRNA sense strand
ugacuuacuuccugaugaa

SEQ ID NO: 1698074 - RNA, 19 nt, Homo sapiens
  misc_RNA (1)...(19): siRNA sense strand
gaaagcaaauguguaacca

SEQ ID NO: 1698075 - RNA, 19 nt, Homo sapiens
  misc_RNA (1)...(19): siRNA sense strand
gcagggcucuggagugagu

SEQ ID NO: 1698076 - RNA, 19 nt, Homo sapiens
  misc_RNA (1)...(19): siRNA sense strand
gaaugucacagcagagauu

SEQ ID NO: 1698077 - RNA, 19 nt, Homo sapiens
  misc_RNA (1)...(19): siRNA sense strand
uacaaggaauggauauuug

SEQ ID NO: 1698078 - RNA, 19 nt, Homo sapiens
  misc_RNA (1)...(19): siRNA sense strand
guacgauguucaagugaga

SEQ ID NO: 1698079 - RNA, 19 nt, Homo sapiens
  misc_RNA (1)...(19): siRNA sense strand
ccugucaauuucaccauua

SEQ ID NO: 1698080 - RNA, 19 nt, Homo sapiens
  misc_RNA (1)...(19): siRNA sense strand
ggagccaaccuauuuaugu

SEQ ID NO: 1698081 - RNA, 19 nt, Homo sapiens
  misc_RNA (1)...(19): siRNA sense strand
agaaaccagugucugcuuu

SEQ ID NO: 1698082 - RNA, 19 nt, Homo sapiens
  misc_RNA (1)...(19): siRNA sense strand
gaacgaccacucacuacug

SEQ ID NO: 1698083 - RNA, 19 nt, Homo sapiens
  misc_RNA (1)...(19): siRNA sense strand
gaaggaacucgucucucua

SEQ ID NO: 1698084 - RNA, 19 nt, Homo sapiens
  misc_RNA (1)...(19): siRNA sense strand
gauacugcaagcugacuua

SEQ ID NO: 1698085 - RNA, 19 nt, Homo sapiens
  misc_RNA (1)...(19): siRNA sense strand
cuacagaagacaauuauuc

SEQ ID NO: 1698086 - RNA, 19 nt, Homo sapiens
  misc_RNA (1)...(19): siRNA sense strand
ccaaugcauucaucucaau

SEQ ID NO: 1698087 - RNA, 19 nt, Homo sapiens
  misc_RNA (1)...(19): siRNA sense strand
ggaccauccugcagaacga

SEQ ID NO: 1698088 - RNA, 19 nt, Homo sapiens
  misc_RNA (1)...(19): siRNA sense strand
aauaaacgcuccaaaagaa

SEQ ID NO: 1698089 - RNA, 19 nt, Homo sapiens
  misc_RNA (1)...(19): siRNA sense strand
caaaagaagaugacuauga

SEQ ID NO: 1698090 - RNA, 19 nt, Homo sapiens
  misc_RNA (1)...(19): siRNA sense strand
aaauaucgcaugcugguuu

SEQ ID NO: 1698091 - RNA, 19 nt, Homo sapiens
  misc_RNA (1)...(19): siRNA sense strand
aaauaaauccuccacugaa

SEQ ID NO: 1698092 - RNA, 19 nt, Homo sapiens
  misc_RNA (1)...(19): siRNA sense strand
cauuaaaguuacugguuug

SEQ ID NO: 1698093 - RNA, 19 nt, Homo sapiens
  misc_RNA (1)...(19): siRNA sense strand
aauaaauccuccacugaau

SEQ ID NO: 1698094 - RNA, 19 nt, Homo sapiens
  misc_RNA (1)...(19): siRNA sense strand
caaaggaauguuaaucuag

SEQ ID NO: 1698095 - RNA, 19 nt, Homo sapiens
  misc_RNA (1)...(19): siRNA sense strand
cgccauugaucaaauaaau

SEQ ID NO: 1698096 - RNA, 19 nt, Homo sapiens
  misc_RNA (1)...(19): siRNA sense strand
acacuacagaagacaauua

SEQ ID NO: 1698097 - RNA, 19 nt, Homo sapiens
  misc_RNA (1)...(19): siRNA sense strand
ggaaaccaaauccugauca

SEQ ID NO: 1698098 - RNA, 19 nt, Homo sapiens
  misc_RNA (1)...(19): siRNA sense strand
gaucaagagcaaaggaaug

SEQ ID NO: 1698099 - RNA, 19 nt, Homo sapiens
  misc_RNA (1)...(19): siRNA sense strand
ugaagaaugccaagaauac

SEQ ID NO: 1698100 - RNA, 19 nt, Homo sapiens
  misc_RNA (1)...(19): siRNA sense strand
gagcaaaggaauguuaauc

SEQ ID NO: 1698101 - RNA, 19 nt, Homo sapiens
  misc_RNA (1)...(19): siRNA sense strand
gaccaaugcauucaucuca

SEQ ID NO: 1698102 - RNA, 19 nt, Homo sapiens
  misc_RNA (1)...(19): siRNA sense strand
gaagaaugccaagaauaca

SEQ ID NO: 1698103 - RNA, 19 nt, Homo sapiens
  misc_RNA (1)...(19): siRNA sense strand
aaccaaauccugaucaaga

SEQ ID NO: 1698104 - RNA, 19 nt, Homo sapiens
  misc_RNA (1)...(19): siRNA sense strand
acugaaagcaaauguguaa

SEQ ID NO: 1698105 - RNA, 19 nt, Homo sapiens
  misc_RNA (1)...(19): siRNA sense strand
gcaaauguguaaccauccu

SEQ ID NO: 1698106 - RNA, 19 nt, Homo sapiens
  misc_RNA (1)...(19): siRNA sense strand
caagugagagcagcaguga

SEQ ID NO: 1698107 - RNA, 19 nt, Homo sapiens
  misc_RNA (1)...(19): siRNA sense strand
acugcaagcugacuuacuu

SEQ ID NO: 1698108 - RNA, 19 nt, Homo sapiens
  misc_RNA (1)...(19): siRNA sense strand
gcccuuugaucagcuguuu

SEQ ID NO: 1698109 - RNA, 19 nt, Homo sapiens
  misc_RNA (1)...(19): siRNA sense strand
uuaaggucauaccaaguuu

SEQ ID NO: 1698110 - RNA, 19 nt, Homo sapiens
  misc_RNA (1)...(19): siRNA sense strand
aggcagggcucuggaguga

SEQ ID NO: 1698111 - RNA, 19 nt, Homo sapiens
  misc_RNA (1)...(19): siRNA sense strand
ccauugcuuugauuaugaa

SEQ ID NO: 1698112 - RNA, 19 nt, Homo sapiens
  misc_RNA (1)...(19): siRNA sense strand
uaaauccuccacugaaugu

SEQ ID NO: 1698113 - RNA, 19 nt, Homo sapiens
  misc_RNA (1)...(19): siRNA sense strand
ggcuugcggugcuuguuaa

SEQ ID NO: 1698114 - RNA, 19 nt, Homo sapiens
  misc_RNA (1)...(19): siRNA sense strand
ucacuucucccaccuguca

SEQ ID NO: 1698115 - RNA, 19 nt, Homo sapiens
  misc_RNA (1)...(19): siRNA sense strand
cugaggacacgcaguauuu

SEQ ID NO: 1698116 - RNA, 19 nt, Homo sapiens
  misc_RNA (1)...(19): siRNA sense strand
aaaccagaaucacugaaag

SEQ ID NO: 1698117 - RNA, 19 nt, Homo sapiens
  misc_RNA (1)...(19): siRNA sense strand
uaaccauccuccacaaagg

SEQ ID NO: 1698118 - RNA, 19 nt, Homo sapiens
  misc_RNA (1)...(19): siRNA sense strand
ggauauuugcagauagaaa

SEQ ID NO: 1698119 - RNA, 19 nt, Homo sapiens
  misc_RNA (1)...(19): siRNA sense strand
acaauacaaggaauggaua

SEQ ID NO: 1698120 - RNA, 19 nt, Homo sapiens
  misc_RNA (1)...(19): siRNA sense strand
gaucaucguggcgcaugua

SEQ ID NO: 1698121 - RNA, 19 nt, Homo sapiens
  misc_RNA (1)...(19): siRNA sense strand
uccauugcuuugauuauga

SEQ ID NO: 1698122 - RNA, 19 nt, Homo sapiens
  misc_RNA (1)...(19): siRNA sense strand
gagaaaccagugucugcuu

SEQ ID NO: 1698123 - RNA, 19 nt, Homo sapiens
  misc_RNA (1)...(19): siRNA sense strand
ucacugaaagcaaaugugu

SEQ ID NO: 1698124 - RNA, 19 nt, Homo sapiens
  misc_RNA (1)...(19): siRNA sense strand
gcaccacaaacacuacaga

SEQ ID NO: 1698125 - RNA, 19 nt, Homo sapiens
  misc_RNA (1)...(19): siRNA sense strand
caaugcauucaucucaaua

SEQ ID NO: 1698126 - RNA, 19 nt, Homo sapiens
  misc_RNA (1)...(19): siRNA sense strand
gacugaagaaugccaagaa

SEQ ID NO: 1698127 - RNA, 19 nt, Homo sapiens
  misc_RNA (1)...(19): siRNA sense strand
guauggcucuuggacugaa

SEQ ID NO: 1698128 - RNA, 19 nt, Homo sapiens
  misc_RNA (1)...(19): siRNA sense strand
caagaauacagcaaagaca

SEQ ID NO: 1698129 - RNA, 19 nt, Homo sapiens
  misc_RNA (1)...(19): siRNA sense strand
guaaccauccuccacaaag

SEQ ID NO: 1698130 - RNA, 19 nt, Homo sapiens
  misc_RNA (1)...(19): siRNA sense strand
cugaagaaugccaagaaua

SEQ ID NO: 1698131 - RNA, 19 nt, Homo sapiens
  misc_RNA (1)...(19): siRNA sense strand
ucucccaccugucaauuuc

SEQ ID NO: 1698132 - RNA, 19 nt, Homo sapiens
  misc_RNA (1)...(19): siRNA sense strand
cauaccaaguuucccuuca

SEQ ID NO: 1698133 - RNA, 19 nt, Homo sapiens
  misc_RNA (1)...(19): siRNA sense strand
cacaaacacuacagaagac

SEQ ID NO: 1698134 - RNA, 19 nt, Homo sapiens
  misc_RNA (1)...(19): siRNA sense strand
cacugcaccuggcuuguug

SEQ ID NO: 1698135 - RNA, 19 nt, Homo sapiens
  misc_RNA (1)...(19): siRNA sense strand
ggaauggauauuugcagau

SEQ ID NO: 1698136 - RNA, 19 nt, Homo sapiens
  misc_RNA (1)...(19): siRNA sense strand
ggacugaagaaugccaaga

SEQ ID NO: 1698137 - RNA, 19 nt, Homo sapiens
  misc_RNA (1)...(19): siRNA sense strand
acucgucucucuauccaau

SEQ ID NO: 1698138 - RNA, 19 nt, Homo sapiens
  misc_RNA (1)...(19): siRNA sense strand
caauacaaggaauggauau

SEQ ID NO: 1698139 - RNA, 19 nt, Homo sapiens
  misc_RNA (1)...(19): siRNA sense strand
ugguuuggcucaaguucuu

SEQ ID NO: 1698140 - RNA, 19 nt, Homo sapiens
  misc_RNA (1)...(19): siRNA sense strand
acugaagaaugccaagaau

SEQ ID NO: 1698141 - RNA, 19 nt, Homo sapiens
  misc_RNA (1)...(19): siRNA sense strand
cugacuuacuuccugauga

SEQ ID NO: 1698142 - RNA, 19 nt, Homo sapiens
  misc_RNA (1)...(19): siRNA sense strand
gaaauaucgcaugcugguu

SEQ ID NO: 1698143 - RNA, 19 nt, Homo sapiens
  misc_RNA (1)...(19): siRNA sense strand
guguaaccauccuccacaa

SEQ ID NO: 1698144 - RNA, 19 nt, Homo sapiens
  misc_RNA (1)...(19): siRNA sense strand
ggacuuuuauccucagcaa

SEQ ID NO: 1698145 - RNA, 19 nt, Homo sapiens
  misc_RNA (1)...(19): siRNA sense strand
uuuaaggucauaccaaguu

SEQ ID NO: 1698146 - RNA, 19 nt, Homo sapiens
  misc_RNA (1)...(19): siRNA sense strand
gcauguauuacucauccuu

SEQ ID NO: 1698147 - RNA, 19 nt, Homo sapiens
  misc_RNA (1)...(19): siRNA sense strand
uggcuugcggugcuuguua

SEQ ID NO: 1698148 - RNA, 19 nt, Homo sapiens
  misc_RNA (1)...(19): siRNA sense strand
aaacacuacagaagacaau

SEQ ID NO: 1698149 - RNA, 19 nt, Homo sapiens
  misc_RNA (1)...(19): siRNA sense strand
caaacacuacagaagacaa

SEQ ID NO: 1698150 - RNA, 19 nt, Homo sapiens
  misc_RNA (1)...(19): siRNA sense strand
gacuaugaaaccagaauca

SEQ ID NO: 1698151 - RNA, 19 nt, Homo sapiens
  misc_RNA (1)...(19): siRNA sense strand
auggauauuugcagauaga

SEQ ID NO: 1698152 - RNA, 19 nt, Homo sapiens
  misc_RNA (1)...(19): siRNA sense strand
gcaaaggaauguuaaucua

SEQ ID NO: 1698153 - RNA, 19 nt, Homo sapiens
  misc_RNA (1)...(19): siRNA sense strand
gaauggauauuugcagaua

SEQ ID NO: 1698154 - RNA, 19 nt, Homo sapiens
  misc_RNA (1)...(19): siRNA sense strand
cagaaucacugaaagcaaa

SEQ ID NO: 1698155 - RNA, 19 nt, Homo sapiens
  misc_RNA (1)...(19): siRNA sense strand
caucguggcgcauguauua

SEQ ID NO: 1698156 - RNA, 19 nt, Homo sapiens
  misc_RNA (1)...(19): siRNA sense strand
gaagacaauuauucacguu

SEQ ID NO: 1698157 - RNA, 19 nt, Homo sapiens
  misc_RNA (1)...(19): siRNA sense strand
gaaaccaaauccugaucaa

SEQ ID NO: 1698158 - RNA, 19 nt, Homo sapiens
  misc_RNA (1)...(19): siRNA sense strand
caagagcaaaggaauguua

SEQ ID NO: 1698159 - RNA, 19 nt, Homo sapiens
  misc_RNA (1)...(19): siRNA sense strand
ccauuaaaguuacugguuu

SEQ ID NO: 1698160 - RNA, 19 nt, Homo sapiens
  misc_RNA (1)...(19): siRNA sense strand
uaaguacgauguucaagug

SEQ ID NO: 1698161 - RNA, 19 nt, Homo sapiens
  misc_RNA (1)...(19): siRNA sense strand
gaaaauaaacgcuccaaaa

SEQ ID NO: 1698162 - RNA, 19 nt, Homo sapiens
  misc_RNA (1)...(19): siRNA sense strand
gaaaccagaaucacugaaa

SEQ ID NO: 1698163 - RNA, 19 nt, Homo sapiens
  misc_RNA (1)...(19): siRNA sense strand
gaguggagccaaccuauuu

SEQ ID NO: 1698164 - RNA, 19 nt, Homo sapiens
  misc_RNA (1)...(19): siRNA sense strand
gcagaacgaccacucacua

SEQ ID NO: 1698165 - RNA, 19 nt, Homo sapiens
  misc_RNA (1)...(19): siRNA sense strand
caaauaaauccuccacuga

SEQ ID NO: 1698166 - RNA, 19 nt, Homo sapiens
  misc_RNA (1)...(19): siRNA sense strand
ccuggaaccucaauuguga

SEQ ID NO: 1698167 - RNA, 19 nt, Homo sapiens
  misc_RNA (1)...(19): siRNA sense strand
ucacgccauugaucaaaua

SEQ ID NO: 1698168 - RNA, 19 nt, Homo sapiens
  misc_RNA (1)...(19): siRNA sense strand
ccacaaacacuacagaaga

SEQ ID NO: 1698169 - RNA, 19 nt, Homo sapiens
  misc_RNA (1)...(19): siRNA sense strand
ugaaggaacucgucucucu

SEQ ID NO: 1698170 - RNA, 19 nt, Homo sapiens
  misc_RNA (1)...(19): siRNA sense strand
gagccaaccuauuuaugug

SEQ ID NO: 1698171 - RNA, 19 nt, Homo sapiens
  misc_RNA (1)...(19): siRNA sense strand
gaacucgucucucuaucca

SEQ ID NO: 1698172 - RNA, 19 nt, Homo sapiens
  misc_RNA (1)...(19): siRNA sense strand
gaagaugacuaugaaacca

SEQ ID NO: 1698173 - RNA, 19 nt, Homo sapiens
  misc_RNA (1)...(19): siRNA sense strand
ugacuuacuuccugaugaa

SEQ ID NO: 1698174 - RNA, 19 nt, Homo sapiens
  misc_RNA (1)...(19): siRNA sense strand
gaaagcaaauguguaacca

SEQ ID NO: 1698175 - RNA, 19 nt, Homo sapiens
  misc_RNA (1)...(19): siRNA sense strand
gcagggcucuggagugagu

SEQ ID NO: 1698176 - RNA, 19 nt, Homo sapiens
  misc_RNA (1)...(19): siRNA sense strand
gaaugucacagcagagauu

SEQ ID NO: 1698177 - RNA, 19 nt, Homo sapiens
  misc_RNA (1)...(19): siRNA sense strand
uacaaggaauggauauuug

SEQ ID NO: 1698178 - RNA, 19 nt, Homo sapiens
  misc_RNA (1)...(19): siRNA sense strand
guacgauguucaagugaga

SEQ ID NO: 1698179 - RNA, 19 nt, Homo sapiens
  misc_RNA (1)...(19): siRNA sense strand
ccugucaauuucaccauua

SEQ ID NO: 1698180 - RNA, 19 nt, Homo sapiens
  misc_RNA (1)...(19): siRNA sense strand
ggagccaaccuauuuaugu

SEQ ID NO: 1698181 - RNA, 19 nt, Homo sapiens
  misc_RNA (1)...(19): siRNA sense strand
agaaaccagugucugcuuu

SEQ ID NO: 1698182 - RNA, 19 nt, Homo sapiens
  misc_RNA (1)...(19): siRNA sense strand
gaacgaccacucacuacug

SEQ ID NO: 1698183 - RNA, 19 nt, Homo sapiens
  misc_RNA (1)...(19): siRNA sense strand
gaaggaacucgucucucua

SEQ ID NO: 1698184 - RNA, 19 nt, Homo sapiens
  misc_RNA (1)...(19): siRNA sense strand
gauacugcaagcugacuua

SEQ ID NO: 1698185 - RNA, 19 nt, Homo sapiens
  misc_RNA (1)...(19): siRNA sense strand
cuacagaagacaauuauuc

SEQ ID NO: 1698186 - RNA, 19 nt, Homo sapiens
  misc_RNA (1)...(19): siRNA sense strand
ccaaugcauucaucucaau

SEQ ID NO: 1698187 - RNA, 19 nt, Homo sapiens
  misc_RNA (1)...(19): siRNA sense strand
ggaccauccugcagaacga

SEQ ID NO: 1698188 - RNA, 19 nt, Homo sapiens
  misc_RNA (1)...(19): siRNA sense strand
aauaaacgcuccaaaagaa

SEQ ID NO: 1698189 - RNA, 19 nt, Homo sapiens
  misc_RNA (1)...(19): siRNA sense strand
caaaagaagaugacuauga

SEQ ID NO: 1698190 - RNA, 19 nt, Homo sapiens
  misc_RNA (1)...(19): siRNA sense strand
aaauaucgcaugcugguuu

SEQ ID NO: 1698191 - RNA, 19 nt, Homo sapiens
  misc_RNA (1)...(19): siRNA sense strand
aaauaaauccuccacugaa

SEQ ID NO: 1698192 - RNA, 19 nt, Homo sapiens
  misc_RNA (1)...(19): siRNA sense strand
cauuaaaguuacugguuug

SEQ ID NO: 1698193 - RNA, 19 nt, Homo sapiens
  misc_RNA (1)...(19): siRNA sense strand
aauaaauccuccacugaau

SEQ ID NO: 1698194 - RNA, 19 nt, Homo sapiens
  misc_RNA (1)...(19): siRNA sense strand
caaaggaauguuaaucuag

SEQ ID NO: 1698195 - RNA, 19 nt, Homo sapiens
  misc_RNA (1)...(19): siRNA sense strand
cgccauugaucaaauaaau

SEQ ID NO: 1698196 - RNA, 19 nt, Homo sapiens
  misc_RNA (1)...(19): siRNA sense strand
acacuacagaagacaauua

SEQ ID NO: 1698197 - RNA, 19 nt, Homo sapiens
  misc_RNA (1)...(19): siRNA sense strand
ggaaaccaaauccugauca

SEQ ID NO: 1698198 - RNA, 19 nt, Homo sapiens
  misc_RNA (1)...(19): siRNA sense strand
gaucaagagcaaaggaaug

SEQ ID NO: 1698199 - RNA, 19 nt, Homo sapiens
  misc_RNA (1)...(19): siRNA sense strand
ugaagaaugccaagaauac

SEQ ID NO: 1698200 - RNA, 19 nt, Homo sapiens
  misc_RNA (1)...(19): siRNA sense strand
gagcaaaggaauguuaauc

SEQ ID NO: 1698201 - RNA, 19 nt, Homo sapiens
  misc_RNA (1)...(19): siRNA sense strand
gaccaaugcauucaucuca

SEQ ID NO: 1698202 - RNA, 19 nt, Homo sapiens
  misc_RNA (1)...(19): siRNA sense strand
gaagaaugccaagaauaca

SEQ ID NO: 1698203 - RNA, 19 nt, Homo sapiens
  misc_RNA (1)...(19): siRNA sense strand
aaccaaauccugaucaaga

SEQ ID NO: 1698204 - RNA, 19 nt, Homo sapiens
  misc_RNA (1)...(19): siRNA sense strand
acugaaagcaaauguguaa

SEQ ID NO: 1698205 - RNA, 19 nt, Homo sapiens
  misc_RNA (1)...(19): siRNA sense strand
gcaaauguguaaccauccu

SEQ ID NO: 1698206 - RNA, 19 nt, Homo sapiens
  misc_RNA (1)...(19): siRNA sense strand
caagugagagcagcaguga

SEQ ID NO: 1698207 - RNA, 19 nt, Homo sapiens
  misc_RNA (1)...(19): siRNA sense strand
acugcaagcugacuuacuu

SEQ ID NO: 1698208 - RNA, 19 nt, Homo sapiens
  misc_RNA (1)...(19): siRNA sense strand
gcccuuugaucagcuguuu

SEQ ID NO: 1698209 - RNA, 19 nt, Homo sapiens
  misc_RNA (1)...(19): siRNA sense strand
uuaaggucauaccaaguuu

SEQ ID NO: 1698210 - RNA, 19 nt, Homo sapiens
  misc_RNA (1)...(19): siRNA sense strand
aggcagggcucuggaguga

SEQ ID NO: 1698211 - RNA, 19 nt, Homo sapiens
  misc_RNA (1)...(19): siRNA sense strand
ccauugcuuugauuaugaa

SEQ ID NO: 1698212 - RNA, 19 nt, Homo sapiens
  misc_RNA (1)...(19): siRNA sense strand
uaaauccuccacugaaugu

SEQ ID NO: 1698213 - RNA, 19 nt, Homo sapiens
  misc_RNA (1)...(19): siRNA sense strand
ggcuugcggugcuuguuaa

SEQ ID NO: 1698214 - RNA, 19 nt, Homo sapiens
  misc_RNA (1)...(19): siRNA sense strand
ucacuucucccaccuguca

SEQ ID NO: 1698215 - RNA, 19 nt, Homo sapiens
  misc_RNA (1)...(19): siRNA sense strand
cugaggacacgcaguauuu

SEQ ID NO: 1698216 - RNA, 19 nt, Homo sapiens
  misc_RNA (1)...(19): siRNA sense strand
aaaccagaaucacugaaag

SEQ ID NO: 1698217 - RNA, 19 nt, Homo sapiens
  misc_RNA (1)...(19): siRNA sense strand
uaaccauccuccacaaagg

SEQ ID NO: 1698218 - RNA, 19 nt, Homo sapiens
  misc_RNA (1)...(19): siRNA sense strand
ggauauuugcagauagaaa

SEQ ID NO: 1698219 - RNA, 19 nt, Homo sapiens
  misc_RNA (1)...(19): siRNA sense strand
acaauacaaggaauggaua

SEQ ID NO: 1698220 - RNA, 19 nt, Homo sapiens
  misc_RNA (1)...(19): siRNA sense strand
gaucaucguggcgcaugua

SEQ ID NO: 1698221 - RNA, 19 nt, Homo sapiens
  misc_RNA (1)...(19): siRNA sense strand
uccauugcuuugauuauga

SEQ ID NO: 1698222 - RNA, 19 nt, Homo sapiens
  misc_RNA (1)...(19): siRNA sense strand
gagaaaccagugucugcuu

SEQ ID NO: 1698223 - RNA, 19 nt, Homo sapiens
  misc_RNA (1)...(19): siRNA sense strand
ucacugaaagcaaaugugu

SEQ ID NO: 1698224 - RNA, 19 nt, Homo sapiens
  misc_RNA (1)...(19): siRNA sense strand
gcaccacaaacacuacaga

SEQ ID NO: 1698225 - RNA, 19 nt, Homo sapiens
  misc_RNA (1)...(19): siRNA sense strand
caaugcauucaucucaaua

SEQ ID NO: 1698226 - RNA, 19 nt, Homo sapiens
  misc_RNA (1)...(19): siRNA sense strand
gacugaagaaugccaagaa

SEQ ID NO: 1698227 - RNA, 19 nt, Homo sapiens
  misc_RNA (1)...(19): siRNA sense strand
guauggcucuuggacugaa

SEQ ID NO: 1698228 - RNA, 19 nt, Homo sapiens
  misc_RNA (1)...(19): siRNA sense strand
caagaauacagcaaagaca

SEQ ID NO: 1698229 - RNA, 19 nt, Homo sapiens
  misc_RNA (1)...(19): siRNA sense strand
guaaccauccuccacaaag

SEQ ID NO: 1698230 - RNA, 19 nt, Homo sapiens
  misc_RNA (1)...(19): siRNA sense strand
cugaagaaugccaagaaua

SEQ ID NO: 1698231 - RNA, 19 nt, Homo sapiens
  misc_RNA (1)...(19): siRNA sense strand
ucucccaccugucaauuuc

SEQ ID NO: 1698232 - RNA, 19 nt, Homo sapiens
  misc_RNA (1)...(19): siRNA sense strand
cauaccaaguuucccuuca

SEQ ID NO: 1698233 - RNA, 19 nt, Homo sapiens
  misc_RNA (1)...(19): siRNA sense strand
cacaaacacuacagaagac

SEQ ID NO: 1698234 - RNA, 19 nt, Homo sapiens
  misc_RNA (1)...(19): siRNA sense strand
cacugcaccuggcuuguug

SEQ ID NO: 1698235 - RNA, 19 nt, Homo sapiens
  misc_RNA (1)...(19): siRNA sense strand
ggaauggauauuugcagau

SEQ ID NO: 1698236 - RNA, 19 nt, Homo sapiens
  misc_RNA (1)...(19): siRNA sense strand
ggacugaagaaugccaaga

SEQ ID NO: 1698237 - RNA, 19 nt, Homo sapiens
  misc_RNA (1)...(19): siRNA sense strand
acucgucucucuauccaau

SEQ ID NO: 1698238 - RNA, 19 nt, Homo sapiens
  misc_RNA (1)...(19): siRNA sense strand
caauacaaggaauggauau

SEQ ID NO: 1698239 - RNA, 19 nt, Homo sapiens
  misc_RNA (1)...(19): siRNA sense strand
ugguuuggcucaaguucuu

SEQ ID NO: 1698240 - RNA, 19 nt, Homo sapiens
  misc_RNA (1)...(19): siRNA sense strand
acugaagaaugccaagaau

SEQ ID NO: 1698241 - RNA, 19 nt, Homo sapiens
  misc_RNA (1)...(19): siRNA sense strand
cugacuuacuuccugauga

SEQ ID NO: 1698242 - RNA, 19 nt, Homo sapiens
  misc_RNA (1)...(19): siRNA sense strand
gaaauaucgcaugcugguu

SEQ ID NO: 1698243 - RNA, 19 nt, Homo sapiens
  misc_RNA (1)...(19): siRNA sense strand
guguaaccauccuccacaa

SEQ ID NO: 1698244 - RNA, 19 nt, Homo sapiens
  misc_RNA (1)...(19): siRNA sense strand
ggacuuuuauccucagcaa

SEQ ID NO: 1698245 - RNA, 19 nt, Homo sapiens
  misc_RNA (1)...(19): siRNA sense strand
uuuaaggucauaccaaguu

SEQ ID NO: 1698246 - RNA, 19 nt, Homo sapiens
  misc_RNA (1)...(19): siRNA sense strand
gcauguauuacucauccuu

SEQ ID NO: 1698247 - RNA, 19 nt, Homo sapiens
  misc_RNA (1)...(19): siRNA sense strand
uggcuugcggugcuuguua

SEQ ID NO: 1698248 - RNA, 19 nt, Homo sapiens
  misc_RNA (1)...(19): siRNA sense strand
aaacacuacagaagacaau

SEQ ID NO: 1698249 - RNA, 19 nt, Homo sapiens
  misc_RNA (1)...(19): siRNA sense strand
caaacacuacagaagacaa

SEQ ID NO: 1698250 - RNA, 19 nt, Homo sapiens
  misc_RNA (1)...(19): siRNA sense strand
gacuaugaaaccagaauca

SEQ ID NO: 1698251 - RNA, 19 nt, Homo sapiens
  misc_RNA (1)...(19): siRNA sense strand
auggauauuugcagauaga

SEQ ID NO: 1698252 - RNA, 19 nt, Homo sapiens
  misc_RNA (1)...(19): siRNA sense strand
gcaaaggaauguuaaucua

SEQ ID NO: 1698253 - RNA, 19 nt, Homo sapiens
  misc_RNA (1)...(19): siRNA sense strand
gaauggauauuugcagaua

SEQ ID NO: 1698254 - RNA, 19 nt, Homo sapiens
  misc_RNA (1)...(19): siRNA sense strand
cagaaucacugaaagcaaa

SEQ ID NO: 1698255 - RNA, 19 nt, Homo sapiens
  misc_RNA (1)...(19): siRNA sense strand
caucguggcgcauguauua

SEQ ID NO: 1698256 - RNA, 19 nt, Homo sapiens
  misc_RNA (1)...(19): siRNA sense strand
gaagacaauuauucacguu

SEQ ID NO: 1698257 - RNA, 19 nt, Homo sapiens
  misc_RNA (1)...(19): siRNA sense strand
gaaaccaaauccugaucaa

SEQ ID NO: 1698258 - RNA, 19 nt, Homo sapiens
  misc_RNA (1)...(19): siRNA sense strand
caagagcaaaggaauguua

SEQ ID NO: 1698259 - RNA, 19 nt, Homo sapiens
  misc_RNA (1)...(19): siRNA sense strand
ccauuaaaguuacugguuu

SEQ ID NO: 1698260 - RNA, 19 nt, Homo sapiens
  misc_RNA (1)...(19): siRNA sense strand
uaaguacgauguucaagug

SEQ ID NO: 1698261 - RNA, 19 nt, Homo sapiens
  misc_RNA (1)...(19): siRNA sense strand
gaaaauaaacgcuccaaaa

SEQ ID NO: 1698262 - RNA, 19 nt, Homo sapiens
  misc_RNA (1)...(19): siRNA sense strand
gaaaccagaaucacugaaa

SEQ ID NO: 1698263 - RNA, 19 nt, Homo sapiens
  misc_RNA (1)...(19): siRNA sense strand
gaguggagccaaccuauuu

SEQ ID NO: 1698264 - RNA, 19 nt, Homo sapiens
  misc_RNA (1)...(19): siRNA sense strand
gcagaacgaccacucacua

SEQ ID NO: 1698265 - RNA, 19 nt, Homo sapiens
  misc_RNA (1)...(19): siRNA sense strand
caaauaaauccuccacuga

SEQ ID NO: 1698266 - RNA, 19 nt, Homo sapiens
  misc_RNA (1)...(19): siRNA sense strand
ccuggaaccucaauuguga

SEQ ID NO: 1698267 - RNA, 19 nt, Homo sapiens
  misc_RNA (1)...(19): siRNA sense strand
ucacgccauugaucaaaua

SEQ ID NO: 1698268 - RNA, 19 nt, Homo sapiens
  misc_RNA (1)...(19): siRNA sense strand
ccacaaacacuacagaaga

SEQ ID NO: 1698269 - RNA, 19 nt, Homo sapiens
  misc_RNA (1)...(19): siRNA sense strand
ugaaggaacucgucucucu

SEQ ID NO: 1698270 - RNA, 19 nt, Homo sapiens
  misc_RNA (1)...(19): siRNA sense strand
gagccaaccuauuuaugug

SEQ ID NO: 1698271 - RNA, 19 nt, Homo sapiens
  misc_RNA (1)...(19): siRNA sense strand
gaacucgucucucuaucca

SEQ ID NO: 1698272 - RNA, 19 nt, Homo sapiens
  misc_RNA (1)...(19): siRNA sense strand
gaagaugacuaugaaacca

SEQ ID NO: 1698273 - RNA, 19 nt, Homo sapiens
  misc_RNA (1)...(19): siRNA sense strand
ugacuuacuuccugaugaa

SEQ ID NO: 1698274 - RNA, 19 nt, Homo sapiens
  misc_RNA (1)...(19): siRNA sense strand
gaaagcaaauguguaacca

SEQ ID NO: 1698275 - RNA, 19 nt, Homo sapiens
  misc_RNA (1)...(19): siRNA sense strand
gcagggcucuggagugagu

SEQ ID NO: 1698276 - RNA, 19 nt, Homo sapiens
  misc_RNA (1)...(19): siRNA sense strand
gaaugucacagcagagauu

SEQ ID NO: 1698277 - RNA, 19 nt, Homo sapiens
  misc_RNA (1)...(19): siRNA sense strand
uacaaggaauggauauuug

SEQ ID NO: 1698278 - RNA, 19 nt, Homo sapiens
  misc_RNA (1)...(19): siRNA sense strand
guacgauguucaagugaga

SEQ ID NO: 1698279 - RNA, 19 nt, Homo sapiens
  misc_RNA (1)...(19): siRNA sense strand
ccugucaauuucaccauua

SEQ ID NO: 1698280 - RNA, 19 nt, Homo sapiens
  misc_RNA (1)...(19): siRNA sense strand
ggagccaaccuauuuaugu

SEQ ID NO: 1698281 - RNA, 19 nt, Homo sapiens
  misc_RNA (1)...(19): siRNA sense strand
agaaaccagugucugcuuu

SEQ ID NO: 1698282 - RNA, 19 nt, Homo sapiens
  misc_RNA (1)...(19): siRNA sense strand
gaacgaccacucacuacug

SEQ ID NO: 1698283 - RNA, 19 nt, Homo sapiens
  misc_RNA (1)...(19): siRNA sense strand
gaaggaacucgucucucua

SEQ ID NO: 1698284 - RNA, 19 nt, Homo sapiens
  misc_RNA (1)...(19): siRNA sense strand
gauacugcaagcugacuua

SEQ ID NO: 1698285 - RNA, 19 nt, Homo sapiens
  misc_RNA (1)...(19): siRNA sense strand
cuacagaagacaauuauuc

SEQ ID NO: 1698286 - RNA, 19 nt, Homo sapiens
  misc_RNA (1)...(19): siRNA sense strand
ccaaugcauucaucucaau

SEQ ID NO: 1698287 - RNA, 19 nt, Homo sapiens
  misc_RNA (1)...(19): siRNA sense strand
ggaccauccugcagaacga

SEQ ID NO: 1698288 - RNA, 19 nt, Homo sapiens
  misc_RNA (1)...(19): siRNA sense strand
aauaaacgcuccaaaagaa

SEQ ID NO: 1698289 - RNA, 19 nt, Homo sapiens
  misc_RNA (1)...(19): siRNA sense strand
caaaagaagaugacuauga

SEQ ID NO: 1698290 - RNA, 19 nt, Homo sapiens
  misc_RNA (1)...(19): siRNA sense strand
aaauaucgcaugcugguuu

SEQ ID NO: 1698291 - RNA, 19 nt, Homo sapiens
  misc_RNA (1)...(19): siRNA sense strand
aaauaaauccuccacugaa

SEQ ID NO: 1698292 - RNA, 19 nt, Homo sapiens
  misc_RNA (1)...(19): siRNA sense strand
cauuaaaguuacugguuug

SEQ ID NO: 1698293 - RNA, 19 nt, Homo sapiens
  misc_RNA (1)...(19): siRNA sense strand
aauaaauccuccacugaau

SEQ ID NO: 1698294 - RNA, 19 nt, Homo sapiens
  misc_RNA (1)...(19): siRNA sense strand
caaaggaauguuaaucuag

SEQ ID NO: 1698295 - RNA, 19 nt, Homo sapiens
  misc_RNA (1)...(19): siRNA sense strand
cgccauugaucaaauaaau

SEQ ID NO: 1698296 - RNA, 19 nt, Homo sapiens
  misc_RNA (1)...(19): siRNA sense strand
acacuacagaagacaauua

SEQ ID NO: 1698297 - RNA, 19 nt, Homo sapiens
  misc_RNA (1)...(19): siRNA sense strand
ggaaaccaaauccugauca

SEQ ID NO: 1698298 - RNA, 19 nt, Homo sapiens
  misc_RNA (1)...(19): siRNA sense strand
gaucaagagcaaaggaaug

SEQ ID NO: 1698299 - RNA, 19 nt, Homo sapiens
  misc_RNA (1)...(19): siRNA sense strand
ugaagaaugccaagaauac

SEQ ID NO: 1698300 - RNA, 19 nt, Homo sapiens
  misc_RNA (1)...(19): siRNA sense strand
gagcaaaggaauguuaauc

SEQ ID NO: 1698301 - RNA, 19 nt, Homo sapiens
  misc_RNA (1)...(19): siRNA sense strand
gaccaaugcauucaucuca

SEQ ID NO: 1698302 - RNA, 19 nt, Homo sapiens
  misc_RNA (1)...(19): siRNA sense strand
gaagaaugccaagaauaca

SEQ ID NO: 1698303 - RNA, 19 nt, Homo sapiens
  misc_RNA (1)...(19): siRNA sense strand
aaccaaauccugaucaaga

SEQ ID NO: 1698304 - RNA, 19 nt, Homo sapiens
  misc_RNA (1)...(19): siRNA sense strand
acugaaagcaaauguguaa

SEQ ID NO: 1698305 - RNA, 19 nt, Homo sapiens
  misc_RNA (1)...(19): siRNA sense strand
gcaaauguguaaccauccu

SEQ ID NO: 1698306 - RNA, 19 nt, Homo sapiens
  misc_RNA (1)...(19): siRNA sense strand
caagugagagcagcaguga

SEQ ID NO: 1698307 - RNA, 19 nt, Homo sapiens
  misc_RNA (1)...(19): siRNA sense strand
acugcaagcugacuuacuu

SEQ ID NO: 1698308 - RNA, 19 nt, Homo sapiens
  misc_RNA (1)...(19): siRNA sense strand
gcccuuugaucagcuguuu

SEQ ID NO: 1698309 - RNA, 19 nt, Homo sapiens
  misc_RNA (1)...(19): siRNA sense strand
uuaaggucauaccaaguuu

SEQ ID NO: 1698310 - RNA, 19 nt, Homo sapiens
  misc_RNA (1)...(19): siRNA sense strand
aggcagggcucuggaguga

SEQ ID NO: 1698311 - RNA, 19 nt, Homo sapiens
  misc_RNA (1)...(19): siRNA sense strand
ccauugcuuugauuaugaa

SEQ ID NO: 1698312 - RNA, 19 nt, Homo sapiens
  misc_RNA (1)...(19): siRNA sense strand
uaaauccuccacugaaugu

SEQ ID NO: 1698313 - RNA, 19 nt, Homo sapiens
  misc_RNA (1)...(19): siRNA sense strand
ggcuugcggugcuuguuaa

SEQ ID NO: 1698314 - RNA, 19 nt, Homo sapiens
  misc_RNA (1)...(19): siRNA sense strand
ucacuucucccaccuguca

SEQ ID NO: 1698315 - RNA, 19 nt, Homo sapiens
  misc_RNA (1)...(19): siRNA sense strand
cugaggacacgcaguauuu

SEQ ID NO: 1698316 - RNA, 19 nt, Homo sapiens
  misc_RNA (1)...(19): siRNA sense strand
aaaccagaaucacugaaag

SEQ ID NO: 1698317 - RNA, 19 nt, Homo sapiens
  misc_RNA (1)...(19): siRNA sense strand
uaaccauccuccacaaagg

SEQ ID NO: 1698318 - RNA, 19 nt, Homo sapiens
  misc_RNA (1)...(19): siRNA sense strand
ggauauuugcagauagaaa

SEQ ID NO: 1698319 - RNA, 19 nt, Homo sapiens
  misc_RNA (1)...(19): siRNA sense strand
acaauacaaggaauggaua

SEQ ID NO: 1698320 - RNA, 19 nt, Homo sapiens
  misc_RNA (1)...(19): siRNA sense strand
gaucaucguggcgcaugua

SEQ ID NO: 1698321 - RNA, 19 nt, Homo sapiens
  misc_RNA (1)...(19): siRNA sense strand
uccauugcuuugauuauga

SEQ ID NO: 1698322 - RNA, 19 nt, Homo sapiens
  misc_RNA (1)...(19): siRNA sense strand
gagaaaccagugucugcuu

SEQ ID NO: 1698323 - RNA, 19 nt, Homo sapiens
  misc_RNA (1)...(19): siRNA sense strand
ucacugaaagcaaaugugu

SEQ ID NO: 1698324 - RNA, 19 nt, Homo sapiens
  misc_RNA (1)...(19): siRNA sense strand
gcaccacaaacacuacaga

SEQ ID NO: 1698325 - RNA, 19 nt, Homo sapiens
  misc_RNA (1)...(19): siRNA sense strand
caaugcauucaucucaaua

SEQ ID NO: 1698326 - RNA, 19 nt, Homo sapiens
  misc_RNA (1)...(19): siRNA sense strand
gacugaagaaugccaagaa

SEQ ID NO: 1698327 - RNA, 19 nt, Homo sapiens
  misc_RNA (1)...(19): siRNA sense strand
guauggcucuuggacugaa

SEQ ID NO: 1698328 - RNA, 19 nt, Homo sapiens
  misc_RNA (1)...(19): siRNA sense strand
caagaauacagcaaagaca

SEQ ID NO: 1698329 - RNA, 19 nt, Homo sapiens
  misc_RNA (1)...(19): siRNA sense strand
guaaccauccuccacaaag

SEQ ID NO: 1698330 - RNA, 19 nt, Homo sapiens
  misc_RNA (1)...(19): siRNA sense strand
cugaagaaugccaagaaua

SEQ ID NO: 1698331 - RNA, 19 nt, Homo sapiens
  misc_RNA (1)...(19): siRNA sense strand
ucucccaccugucaauuuc

SEQ ID NO: 1698332 - RNA, 19 nt, Homo sapiens
  misc_RNA (1)...(19): siRNA sense strand
cauaccaaguuucccuuca

SEQ ID NO: 1698333 - RNA, 19 nt, Homo sapiens
  misc_RNA (1)...(19): siRNA sense strand
cacaaacacuacagaagac

SEQ ID NO: 1698334 - RNA, 19 nt, Homo sapiens
  misc_RNA (1)...(19): siRNA sense strand
cacugcaccuggcuuguug

SEQ ID NO: 1698335 - RNA, 19 nt, Homo sapiens
  misc_RNA (1)...(19): siRNA sense strand
ggaauggauauuugcagau

SEQ ID NO: 1698336 - RNA, 19 nt, Homo sapiens
  misc_RNA (1)...(19): siRNA sense strand
ggacugaagaaugccaaga

SEQ ID NO: 1698337 - RNA, 19 nt, Homo sapiens
  misc_RNA (1)...(19): siRNA sense strand
acucgucucucuauccaau

SEQ ID NO: 1698338 - RNA, 19 nt, Homo sapiens
  misc_RNA (1)...(19): siRNA sense strand
caauacaaggaauggauau

SEQ ID NO: 1698339 - RNA, 19 nt, Homo sapiens
  misc_RNA (1)...(19): siRNA sense strand
ugguuuggcucaaguucuu

SEQ ID NO: 1698340 - RNA, 19 nt, Homo sapiens
  misc_RNA (1)...(19): siRNA sense strand
acugaagaaugccaagaau

SEQ ID NO: 1698341 - RNA, 19 nt, Homo sapiens
  misc_RNA (1)...(19): siRNA sense strand
cugacuuacuuccugauga

SEQ ID NO: 1698342 - RNA, 19 nt, Homo sapiens
  misc_RNA (1)...(19): siRNA sense strand
gaaauaucgcaugcugguu

SEQ ID NO: 1698343 - RNA, 19 nt, Homo sapiens
  misc_RNA (1)...(19): siRNA sense strand
guguaaccauccuccacaa

SEQ ID NO: 1698344 - RNA, 19 nt, Homo sapiens
  misc_RNA (1)...(19): siRNA sense strand
ggacuuuuauccucagcaa

SEQ ID NO: 1698345 - RNA, 19 nt, Homo sapiens
  misc_RNA (1)...(19): siRNA sense strand
uuuaaggucauaccaaguu

SEQ ID NO: 1698346 - RNA, 19 nt, Homo sapiens
  misc_RNA (1)...(19): siRNA sense strand
gcauguauuacucauccuu

SEQ ID NO: 1698347 - RNA, 19 nt, Homo sapiens
  misc_RNA (1)...(19): siRNA sense strand
uggcuugcggugcuuguua

SEQ ID NO: 1698348 - RNA, 19 nt, Homo sapiens
  misc_RNA (1)...(19): siRNA sense strand
aaacacuacagaagacaau

SEQ ID NO: 1698349 - RNA, 19 nt, Homo sapiens
  misc_RNA (1)...(19): siRNA sense strand
caaacacuacagaagacaa

SEQ ID NO: 1698350 - RNA, 19 nt, Homo sapiens
  misc_RNA (1)...(19): siRNA sense strand
gacuaugaaaccagaauca

SEQ ID NO: 1698351 - RNA, 19 nt, Homo sapiens
  misc_RNA (1)...(19): siRNA sense strand
auggauauuugcagauaga

SEQ ID NO: 1698352 - RNA, 19 nt, Homo sapiens
  misc_RNA (1)...(19): siRNA sense strand
gcaaaggaauguuaaucua

SEQ ID NO: 1698353 - RNA, 19 nt, Homo sapiens
  misc_RNA (1)...(19): siRNA sense strand
gaauggauauuugcagaua

SEQ ID NO: 1698354 - RNA, 19 nt, Homo sapiens
  misc_RNA (1)...(19): siRNA sense strand
cagaaucacugaaagcaaa

SEQ ID NO: 1698355 - RNA, 19 nt, Homo sapiens
  misc_RNA (1)...(19): siRNA sense strand
caucguggcgcauguauua

SEQ ID NO: 1698356 - RNA, 19 nt, Homo sapiens
  misc_RNA (1)...(19): siRNA sense strand
gaagacaauuauucacguu

SEQ ID NO: 1698357 - RNA, 19 nt, Homo sapiens
  misc_RNA (1)...(19): siRNA sense strand
gaaaccaaauccugaucaa

SEQ ID NO: 1698358 - RNA, 19 nt, Homo sapiens
  misc_RNA (1)...(19): siRNA sense strand
caagagcaaaggaauguua

SEQ ID NO: 1698359 - RNA, 19 nt, Homo sapiens
  misc_RNA (1)...(19): siRNA sense strand
ccauuaaaguuacugguuu

SEQ ID NO: 1698360 - RNA, 19 nt, Homo sapiens
  misc_RNA (1)...(19): siRNA sense strand
uaaguacgauguucaagug

SEQ ID NO: 1698361 - RNA, 19 nt, Homo sapiens
  misc_RNA (1)...(19): siRNA sense strand
gaaaauaaacgcuccaaaa

SEQ ID NO: 1698362 - RNA, 19 nt, Homo sapiens
  misc_RNA (1)...(19): siRNA sense strand
gaaaccagaaucacugaaa

SEQ ID NO: 1698363 - RNA, 19 nt, Homo sapiens
  misc_RNA (1)...(19): siRNA sense strand
gaguggagccaaccuauuu

SEQ ID NO: 1698364 - RNA, 19 nt, Homo sapiens
  misc_RNA (1)...(19): siRNA sense strand
gcagaacgaccacucacua

SEQ ID NO: 1698365 - RNA, 19 nt, Homo sapiens
  misc_RNA (1)...(19): siRNA sense strand
caaauaaauccuccacuga

SEQ ID NO: 1698366 - RNA, 19 nt, Homo sapiens
  misc_RNA (1)...(19): siRNA sense strand
ccuggaaccucaauuguga

SEQ ID NO: 1698367 - RNA, 19 nt, Homo sapiens
  misc_RNA (1)...(19): siRNA sense strand
ucacgccauugaucaaaua

SEQ ID NO: 1698368 - RNA, 19 nt, Homo sapiens
  misc_RNA (1)...(19): siRNA sense strand
ccacaaacacuacagaaga

SEQ ID NO: 1698369 - RNA, 19 nt, Homo sapiens
  misc_RNA (1)...(19): siRNA sense strand
ugaaggaacucgucucucu

SEQ ID NO: 1698370 - RNA, 19 nt, Homo sapiens
  misc_RNA (1)...(19): siRNA sense strand
gagccaaccuauuuaugug

SEQ ID NO: 1698371 - RNA, 19 nt, Homo sapiens
  misc_RNA (1)...(19): siRNA sense strand
gaacucgucucucuaucca

SEQ ID NO: 1698372 - RNA, 19 nt, Homo sapiens
  misc_RNA (1)...(19): siRNA sense strand
gaagaugacuaugaaacca

SEQ ID NO: 1698373 - RNA, 19 nt, Homo sapiens
  misc_RNA (1)...(19): siRNA sense strand
ugacuuacuuccugaugaa

SEQ ID NO: 1698374 - RNA, 19 nt, Homo sapiens
  misc_RNA (1)...(19): siRNA sense strand
gaaagcaaauguguaacca

SEQ ID NO: 1698375 - RNA, 19 nt, Homo sapiens
  misc_RNA (1)...(19): siRNA sense strand
gcagggcucuggagugagu

SEQ ID NO: 1698376 - RNA, 19 nt, Homo sapiens
  misc_RNA (1)...(19): siRNA sense strand
gaaugucacagcagagauu

SEQ ID NO: 1698377 - RNA, 19 nt, Homo sapiens
  misc_RNA (1)...(19): siRNA sense strand
uacaaggaauggauauuug

SEQ ID NO: 1698378 - RNA, 19 nt, Homo sapiens
  misc_RNA (1)...(19): siRNA sense strand
guacgauguucaagugaga

SEQ ID NO: 1698379 - RNA, 19 nt, Homo sapiens
  misc_RNA (1)...(19): siRNA sense strand
ccugucaauuucaccauua

SEQ ID NO: 1698380 - RNA, 19 nt, Homo sapiens
  misc_RNA (1)...(19): siRNA sense strand
ggagccaaccuauuuaugu

SEQ ID NO: 1698381 - RNA, 19 nt, Homo sapiens
  misc_RNA (1)...(19): siRNA sense strand
agaaaccagugucugcuuu

SEQ ID NO: 1698382 - RNA, 19 nt, Homo sapiens
  misc_RNA (1)...(19): siRNA sense strand
gaacgaccacucacuacug

SEQ ID NO: 1698383 - RNA, 19 nt, Homo sapiens
  misc_RNA (1)...(19): siRNA sense strand
gaaggaacucgucucucua

SEQ ID NO: 1698384 - RNA, 19 nt, Homo sapiens
  misc_RNA (1)...(19): siRNA sense strand
gauacugcaagcugacuua

SEQ ID NO: 1698385 - RNA, 19 nt, Homo sapiens
  misc_RNA (1)...(19): siRNA sense strand
cuacagaagacaauuauuc

SEQ ID NO: 1698386 - RNA, 19 nt, Homo sapiens
  misc_RNA (1)...(19): siRNA sense strand
ccaaugcauucaucucaau

SEQ ID NO: 1698387 - RNA, 19 nt, Homo sapiens
  misc_RNA (1)...(19): siRNA sense strand
ggaccauccugcagaacga

SEQ ID NO: 1698388 - RNA, 19 nt, Homo sapiens
  misc_RNA (1)...(19): siRNA sense strand
aauaaacgcuccaaaagaa

SEQ ID NO: 1698389 - RNA, 19 nt, Homo sapiens
  misc_RNA (1)...(19): siRNA sense strand
caaaagaagaugacuauga

SEQ ID NO: 1698390 - RNA, 19 nt, Homo sapiens
  misc_RNA (1)...(19): siRNA sense strand
aaauaucgcaugcugguuu

SEQ ID NO: 1698391 - RNA, 19 nt, Homo sapiens
  misc_RNA (1)...(19): siRNA sense strand
aaauaaauccuccacugaa

SEQ ID NO: 1698392 - RNA, 19 nt, Homo sapiens
  misc_RNA (1)...(19): siRNA sense strand
cauuaaaguuacugguuug

SEQ ID NO: 1698393 - RNA, 19 nt, Homo sapiens
  misc_RNA (1)...(19): siRNA sense strand
aauaaauccuccacugaau

SEQ ID NO: 1698394 - RNA, 19 nt, Homo sapiens
  misc_RNA (1)...(19): siRNA sense strand
caaaggaauguuaaucuag

SEQ ID NO: 1698395 - RNA, 19 nt, Homo sapiens
  misc_RNA (1)...(19): siRNA sense strand
cgccauugaucaaauaaau

SEQ ID NO: 1698396 - RNA, 19 nt, Homo sapiens
  misc_RNA (1)...(19): siRNA sense strand
acacuacagaagacaauua

SEQ ID NO: 1698397 - RNA, 19 nt, Homo sapiens
  misc_RNA (1)...(19): siRNA sense strand
ggaaaccaaauccugauca

SEQ ID NO: 1698398 - RNA, 19 nt, Homo sapiens
  misc_RNA (1)...(19): siRNA sense strand
gaucaagagcaaaggaaug

SEQ ID NO: 1698399 - RNA, 19 nt, Homo sapiens
  misc_RNA (1)...(19): siRNA sense strand
ugaagaaugccaagaauac

SEQ ID NO: 1698400 - RNA, 19 nt, Homo sapiens
  misc_RNA (1)...(19): siRNA sense strand
gagcaaaggaauguuaauc

SEQ ID NO: 1698401 - RNA, 19 nt, Homo sapiens
  misc_RNA (1)...(19): siRNA sense strand
gaccaaugcauucaucuca

SEQ ID NO: 1698402 - RNA, 19 nt, Homo sapiens
  misc_RNA (1)...(19): siRNA sense strand
gaagaaugccaagaauaca

SEQ ID NO: 1698403 - RNA, 19 nt, Homo sapiens
  misc_RNA (1)...(19): siRNA sense strand
aaccaaauccugaucaaga

SEQ ID NO: 1698404 - RNA, 19 nt, Homo sapiens
  misc_RNA (1)...(19): siRNA sense strand
acugaaagcaaauguguaa

SEQ ID NO: 1698405 - RNA, 19 nt, Homo sapiens
  misc_RNA (1)...(19): siRNA sense strand
gcaaauguguaaccauccu

SEQ ID NO: 1698406 - RNA, 19 nt, Homo sapiens
  misc_RNA (1)...(19): siRNA sense strand
caagugagagcagcaguga

SEQ ID NO: 1698407 - RNA, 19 nt, Homo sapiens
  misc_RNA (1)...(19): siRNA sense strand
acugcaagcugacuuacuu

SEQ ID NO: 1698408 - RNA, 19 nt, Homo sapiens
  misc_RNA (1)...(19): siRNA sense strand
gcccuuugaucagcuguuu

SEQ ID NO: 1698409 - RNA, 19 nt, Homo sapiens
  misc_RNA (1)...(19): siRNA sense strand
uuaaggucauaccaaguuu

SEQ ID NO: 1698410 - RNA, 19 nt, Homo sapiens
  misc_RNA (1)...(19): siRNA sense strand
aggcagggcucuggaguga

SEQ ID NO: 1698411 - RNA, 19 nt, Homo sapiens
  misc_RNA (1)...(19): siRNA sense strand
ccauugcuuugauuaugaa

SEQ ID NO: 1698412 - RNA, 19 nt, Homo sapiens
  misc_RNA (1)...(19): siRNA sense strand
uaaauccuccacugaaugu

SEQ ID NO: 1698413 - RNA, 19 nt, Homo sapiens
  misc_RNA (1)...(19): siRNA sense strand
ggcuugcggugcuuguuaa

SEQ ID NO: 1698414 - RNA, 19 nt, Homo sapiens
  misc_RNA (1)...(19): siRNA sense strand
ucacuucucccaccuguca

SEQ ID NO: 1698415 - RNA, 19 nt, Homo sapiens
  misc_RNA (1)...(19): siRNA sense strand
cugaggacacgcaguauuu

SEQ ID NO: 1698416 - RNA, 19 nt, Homo sapiens
  misc_RNA (1)...(19): siRNA sense strand
aaaccagaaucacugaaag

SEQ ID NO: 1698417 - RNA, 19 nt, Homo sapiens
  misc_RNA (1)...(19): siRNA sense strand
uaaccauccuccacaaagg

SEQ ID NO: 1698418 - RNA, 19 nt, Homo sapiens
  misc_RNA (1)...(19): siRNA sense strand
ggauauuugcagauagaaa

SEQ ID NO: 1698419 - RNA, 19 nt, Homo sapiens
  misc_RNA (1)...(19): siRNA sense strand
acaauacaaggaauggaua

SEQ ID NO: 1698420 - RNA, 19 nt, Homo sapiens
  misc_RNA (1)...(19): siRNA sense strand
gaucaucguggcgcaugua

SEQ ID NO: 1698421 - RNA, 19 nt, Homo sapiens
  misc_RNA (1)...(19): siRNA sense strand
uccauugcuuugauuauga

SEQ ID NO: 1698422 - RNA, 19 nt, Homo sapiens
  misc_RNA (1)...(19): siRNA sense strand
gagaaaccagugucugcuu

SEQ ID NO: 1698423 - RNA, 19 nt, Homo sapiens
  misc_RNA (1)...(19): siRNA sense strand
ucacugaaagcaaaugugu

SEQ ID NO: 1698424 - RNA, 19 nt, Homo sapiens
  misc_RNA (1)...(19): siRNA sense strand
gcaccacaaacacuacaga

SEQ ID NO: 1698425 - RNA, 19 nt, Homo sapiens
  misc_RNA (1)...(19): siRNA sense strand
caaugcauucaucucaaua

SEQ ID NO: 1698426 - RNA, 19 nt, Homo sapiens
  misc_RNA (1)...(19): siRNA sense strand
gacugaagaaugccaagaa

SEQ ID NO: 1698427 - RNA, 19 nt, Homo sapiens
  misc_RNA (1)...(19): siRNA sense strand
guauggcucuuggacugaa

SEQ ID NO: 1698428 - RNA, 19 nt, Homo sapiens
  misc_RNA (1)...(19): siRNA sense strand
caagaauacagcaaagaca

SEQ ID NO: 1698429 - RNA, 19 nt, Homo sapiens
  misc_RNA (1)...(19): siRNA sense strand
guaaccauccuccacaaag

SEQ ID NO: 1698430 - RNA, 19 nt, Homo sapiens
  misc_RNA (1)...(19): siRNA sense strand
cugaagaaugccaagaaua

SEQ ID NO: 1698431 - RNA, 19 nt, Homo sapiens
  misc_RNA (1)...(19): siRNA sense strand
ucucccaccugucaauuuc

SEQ ID NO: 1698432 - RNA, 19 nt, Homo sapiens
  misc_RNA (1)...(19): siRNA sense strand
cauaccaaguuucccuuca

SEQ ID NO: 1698433 - RNA, 19 nt, Homo sapiens
  misc_RNA (1)...(19): siRNA sense strand
cacaaacacuacagaagac

SEQ ID NO: 1698434 - RNA, 19 nt, Homo sapiens
  misc_RNA (1)...(19): siRNA sense strand
cacugcaccuggcuuguug

SEQ ID NO: 1698435 - RNA, 19 nt, Homo sapiens
  misc_RNA (1)...(19): siRNA sense strand
ggaauggauauuugcagau

SEQ ID NO: 1698436 - RNA, 19 nt, Homo sapiens
  misc_RNA (1)...(19): siRNA sense strand
ggacugaagaaugccaaga

SEQ ID NO: 1698437 - RNA, 19 nt, Homo sapiens
  misc_RNA (1)...(19): siRNA sense strand
acucgucucucuauccaau

SEQ ID NO: 1698438 - RNA, 19 nt, Homo sapiens
  misc_RNA (1)...(19): siRNA sense strand
caauacaaggaauggauau

SEQ ID NO: 1698439 - RNA, 19 nt, Homo sapiens
  misc_RNA (1)...(19): siRNA sense strand
ugguuuggcucaaguucuu

SEQ ID NO: 1698440 - RNA, 19 nt, Homo sapiens
  misc_RNA (1)...(19): siRNA sense strand
acugaagaaugccaagaau

SEQ ID NO: 1698441 - RNA, 19 nt, Homo sapiens
  misc_RNA (1)...(19): siRNA sense strand
cugacuuacuuccugauga

SEQ ID NO: 1698442 - RNA, 19 nt, Homo sapiens
  misc_RNA (1)...(19): siRNA sense strand
gaaauaucgcaugcugguu

SEQ ID NO: 1698443 - RNA, 19 nt, Homo sapiens
  misc_RNA (1)...(19): siRNA sense strand
guguaaccauccuccacaa

SEQ ID NO: 1698444 - RNA, 19 nt, Homo sapiens
  misc_RNA (1)...(19): siRNA sense strand
ggacuuuuauccucagcaa

SEQ ID NO: 1698445 - RNA, 19 nt, Homo sapiens
  misc_RNA (1)...(19): siRNA sense strand
uuuaaggucauaccaaguu

SEQ ID NO: 1698446 - RNA, 19 nt, Homo sapiens
  misc_RNA (1)...(19): siRNA sense strand
gcauguauuacucauccuu

SEQ ID NO: 1698447 - RNA, 19 nt, Homo sapiens
  misc_RNA (1)...(19): siRNA sense strand
uggcuugcggugcuuguua

SEQ ID NO: 1698448 - RNA, 19 nt, Homo sapiens
  misc_RNA (1)...(19): siRNA sense strand
aaacacuacagaagacaau

SEQ ID NO: 1698449 - RNA, 19 nt, Homo sapiens
  misc_RNA (1)...(19): siRNA sense strand
caaacacuacagaagacaa

SEQ ID NO: 1698450 - RNA, 19 nt, Homo sapiens
  misc_RNA (1)...(19): siRNA sense strand
gacuaugaaaccagaauca

SEQ ID NO: 1698451 - RNA, 19 nt, Homo sapiens
  misc_RNA (1)...(19): siRNA sense strand
auggauauuugcagauaga

SEQ ID NO: 1698452 - RNA, 19 nt, Homo sapiens
  misc_RNA (1)...(19): siRNA sense strand
ggacagaucaggaguuuga

SEQ ID NO: 1698453 - RNA, 19 nt, Homo sapiens
  misc_RNA (1)...(19): siRNA sense strand
gaucaggaguuugaagaga

SEQ ID NO: 1698454 - RNA, 19 nt, Homo sapiens
  misc_RNA (1)...(19): siRNA sense strand
ccaugacgaugcuggagaa

SEQ ID NO: 1698455 - RNA, 19 nt, Homo sapiens
  misc_RNA (1)...(19): siRNA sense strand
cagcagaggacgacauuca

SEQ ID NO: 1698456 - RNA, 19 nt, Homo sapiens
  misc_RNA (1)...(19): siRNA sense strand
gcagucagagaaugaggaa

SEQ ID NO: 1698457 - RNA, 19 nt, Homo sapiens
  misc_RNA (1)...(19): siRNA sense strand
cuggacagaucaggaguuu

SEQ ID NO: 1698458 - RNA, 19 nt, Homo sapiens
  misc_RNA (1)...(19): siRNA sense strand
ugacgaugcuggagaagcu

SEQ ID NO: 1698459 - RNA, 19 nt, Homo sapiens
  misc_RNA (1)...(19): siRNA sense strand
cagagaaugaggaagaaga

SEQ ID NO: 1698460 - RNA, 19 nt, Homo sapiens
  misc_RNA (1)...(19): siRNA sense strand
aauggcaacuuccuguaug

SEQ ID NO: 1698461 - RNA, 19 nt, Homo sapiens
  misc_RNA (1)...(19): siRNA sense strand
cagaucaggaguuugaaga

SEQ ID NO: 1698462 - RNA, 19 nt, Homo sapiens
  misc_RNA (1)...(19): siRNA sense strand
agucagagaaugaggaaga

SEQ ID NO: 1698463 - RNA, 19 nt, Homo sapiens
  misc_RNA (1)...(19): siRNA sense strand
gcacagcagaggacgacau

SEQ ID NO: 1698464 - RNA, 19 nt, Homo sapiens
  misc_RNA (1)...(19): siRNA sense strand
gucagagaaugaggaagaa

SEQ ID NO: 1698465 - RNA, 19 nt, Homo sapiens
  misc_RNA (1)...(19): siRNA sense strand
ucaggaguuugaagagagu

SEQ ID NO: 1698466 - RNA, 19 nt, Homo sapiens
  misc_RNA (1)...(19): siRNA sense strand
caacuuccuguauguccuu

SEQ ID NO: 1698467 - RNA, 19 nt, Homo sapiens
  misc_RNA (1)...(19): siRNA sense strand
aaauggcaacuuccuguau

SEQ ID NO: 1698468 - RNA, 19 nt, Homo sapiens
  misc_RNA (1)...(19): siRNA sense strand
gcgucuugguggccacuga

SEQ ID NO: 1698469 - RNA, 19 nt, Homo sapiens
  misc_RNA (1)...(19): siRNA sense strand
cacagcagaggacgacauu

SEQ ID NO: 1698470 - RNA, 19 nt, Homo sapiens
  misc_RNA (1)...(19): siRNA sense strand
cgaccugcuugcccucauc

SEQ ID NO: 1698471 - RNA, 19 nt, Homo sapiens
  misc_RNA (1)...(19): siRNA sense strand
ggacagaucaggaguuuga

SEQ ID NO: 1698472 - RNA, 19 nt, Homo sapiens
  misc_RNA (1)...(19): siRNA sense strand
gaucaggaguuugaagaga

SEQ ID NO: 1698473 - RNA, 19 nt, Homo sapiens
  misc_RNA (1)...(19): siRNA sense strand
ccaugacgaugcuggagaa

SEQ ID NO: 1698474 - RNA, 19 nt, Homo sapiens
  misc_RNA (1)...(19): siRNA sense strand
gcagucagagaaugaggaa

SEQ ID NO: 1698475 - RNA, 19 nt, Homo sapiens
  misc_RNA (1)...(19): siRNA sense strand
cuggacagaucaggaguuu

SEQ ID NO: 1698476 - RNA, 19 nt, Homo sapiens
  misc_RNA (1)...(19): siRNA sense strand
ugacgaugcuggagaagcu

SEQ ID NO: 1698477 - RNA, 19 nt, Homo sapiens
  misc_RNA (1)...(19): siRNA sense strand
cagagaaugaggaagaaga

SEQ ID NO: 1698478 - RNA, 19 nt, Homo sapiens
  misc_RNA (1)...(19): siRNA sense strand
aauggcaacuuccuguaug

SEQ ID NO: 1698479 - RNA, 19 nt, Homo sapiens
  misc_RNA (1)...(19): siRNA sense strand
cagaucaggaguuugaaga

SEQ ID NO: 1698480 - RNA, 19 nt, Homo sapiens
  misc_RNA (1)...(19): siRNA sense strand
agucagagaaugaggaaga

SEQ ID NO: 1698481 - RNA, 19 nt, Homo sapiens
  misc_RNA (1)...(19): siRNA sense strand
gucagagaaugaggaagaa

SEQ ID NO: 1698482 - RNA, 19 nt, Homo sapiens
  misc_RNA (1)...(19): siRNA sense strand
ucaggaguuugaagagagu

SEQ ID NO: 1698483 - RNA, 19 nt, Homo sapiens
  misc_RNA (1)...(19): siRNA sense strand
caacuuccuguauguccuu

SEQ ID NO: 1698484 - RNA, 19 nt, Homo sapiens
  misc_RNA (1)...(19): siRNA sense strand
aaauggcaacuuccuguau

SEQ ID NO: 1698485 - RNA, 19 nt, Homo sapiens
  misc_RNA (1)...(19): siRNA sense strand
gcgucuugguggccacuga

SEQ ID NO: 1698486 - RNA, 19 nt, Homo sapiens
  misc_RNA (1)...(19): siRNA sense strand
ggacagaucaggaguuuga

SEQ ID NO: 1698487 - RNA, 19 nt, Homo sapiens
  misc_RNA (1)...(19): siRNA sense strand
gaucaggaguuugaagaga

SEQ ID NO: 1698488 - RNA, 19 nt, Homo sapiens
  misc_RNA (1)...(19): siRNA sense strand
ccaugacgaugcuggagaa

SEQ ID NO: 1698489 - RNA, 19 nt, Homo sapiens
  misc_RNA (1)...(19): siRNA sense strand
cagcagaggacgacauuca

SEQ ID NO: 1698490 - RNA, 19 nt, Homo sapiens
  misc_RNA (1)...(19): siRNA sense strand
gcagucagagaaugaggaa

SEQ ID NO: 1698491 - RNA, 19 nt, Homo sapiens
  misc_RNA (1)...(19): siRNA sense strand
cuggacagaucaggaguuu

SEQ ID NO: 1698492 - RNA, 19 nt, Homo sapiens
  misc_RNA (1)...(19): siRNA sense strand
ugacgaugcuggagaagcu

SEQ ID NO: 1698493 - RNA, 19 nt, Homo sapiens
  misc_RNA (1)...(19): siRNA sense strand
cagagaaugaggaagaaga

SEQ ID NO: 1698494 - RNA, 19 nt, Homo sapiens
  misc_RNA (1)...(19): siRNA sense strand
aauggcaacuuccuguaug

SEQ ID NO: 1698495 - RNA, 19 nt, Homo sapiens
  misc_RNA (1)...(19): siRNA sense strand
cagaucaggaguuugaaga

SEQ ID NO: 1698496 - RNA, 19 nt, Homo sapiens
  misc_RNA (1)...(19): siRNA sense strand
agucagagaaugaggaaga

SEQ ID NO: 1698497 - RNA, 19 nt, Homo sapiens
  misc_RNA (1)...(19): siRNA sense strand
gcacagcagaggacgacau

SEQ ID NO: 1698498 - RNA, 19 nt, Homo sapiens
  misc_RNA (1)...(19): siRNA sense strand
gucagagaaugaggaagaa

SEQ ID NO: 1698499 - RNA, 19 nt, Homo sapiens
  misc_RNA (1)...(19): siRNA sense strand
ucaggaguuugaagagagu

SEQ ID NO: 1698500 - RNA, 19 nt, Homo sapiens
  misc_RNA (1)...(19): siRNA sense strand
caacuuccuguauguccuu

SEQ ID NO: 1698501 - RNA, 19 nt, Homo sapiens
  misc_RNA (1)...(19): siRNA sense strand
aaauggcaacuuccuguau

SEQ ID NO: 1698502 - RNA, 19 nt, Homo sapiens
  misc_RNA (1)...(19): siRNA sense strand
gcgucuugguggccacuga

SEQ ID NO: 1698503 - RNA, 19 nt, Homo sapiens
  misc_RNA (1)...(19): siRNA sense strand
cacagcagaggacgacauu

SEQ ID NO: 1698504 - RNA, 19 nt, Homo sapiens
  misc_RNA (1)...(19): siRNA sense strand
cgaccugcuugcccucauc

SEQ ID NO: 1698505 - RNA, 19 nt, Homo sapiens
  misc_RNA (1)...(19): siRNA sense strand
ggacagaucaggaguuuga

SEQ ID NO: 1698506 - RNA, 19 nt, Homo sapiens
  misc_RNA (1)...(19): siRNA sense strand
gaucaggaguuugaagaga

SEQ ID NO: 1698507 - RNA, 19 nt, Homo sapiens
  misc_RNA (1)...(19): siRNA sense strand
ccaugacgaugcuggagaa

SEQ ID NO: 1698508 - RNA, 19 nt, Homo sapiens
  misc_RNA (1)...(19): siRNA sense strand
cagcagaggacgacauuca

SEQ ID NO: 1698509 - RNA, 19 nt, Homo sapiens
  misc_RNA (1)...(19): siRNA sense strand
gcagucagagaaugaggaa

SEQ ID NO: 1698510 - RNA, 19 nt, Homo sapiens
  misc_RNA (1)...(19): siRNA sense strand
cuggacagaucaggaguuu

SEQ ID NO: 1698511 - RNA, 19 nt, Homo sapiens
  misc_RNA (1)...(19): siRNA sense strand
ugacgaugcuggagaagcu

SEQ ID NO: 1698512 - RNA, 19 nt, Homo sapiens
  misc_RNA (1)...(19): siRNA sense strand
cagagaaugaggaagaaga

SEQ ID NO: 1698513 - RNA, 19 nt, Homo sapiens
  misc_RNA (1)...(19): siRNA sense strand
aauggcaacuuccuguaug

SEQ ID NO: 1698514 - RNA, 19 nt, Homo sapiens
  misc_RNA (1)...(19): siRNA sense strand
cagaucaggaguuugaaga

SEQ ID NO: 1698515 - RNA, 19 nt, Homo sapiens
  misc_RNA (1)...(19): siRNA sense strand
agucagagaaugaggaaga

SEQ ID NO: 1698516 - RNA, 19 nt, Homo sapiens
  misc_RNA (1)...(19): siRNA sense strand
gcacagcagaggacgacau

SEQ ID NO: 1698517 - RNA, 19 nt, Homo sapiens
  misc_RNA (1)...(19): siRNA sense strand
gucagagaaugaggaagaa

SEQ ID NO: 1698518 - RNA, 19 nt, Homo sapiens
  misc_RNA (1)...(19): siRNA sense strand
ucaggaguuugaagagagu

SEQ ID NO: 1698519 - RNA, 19 nt, Homo sapiens
  misc_RNA (1)...(19): siRNA sense strand
caacuuccuguauguccuu

SEQ ID NO: 1698520 - RNA, 19 nt, Homo sapiens
  misc_RNA (1)...(19): siRNA sense strand
aaauggcaacuuccuguau

SEQ ID NO: 1698521 - RNA, 19 nt, Homo sapiens
  misc_RNA (1)...(19): siRNA sense strand
gcgucuugguggccacuga

SEQ ID NO: 1698522 - RNA, 19 nt, Homo sapiens
  misc_RNA (1)...(19): siRNA sense strand
cacagcagaggacgacauu

SEQ ID NO: 1698523 - RNA, 19 nt, Homo sapiens
  misc_RNA (1)...(19): siRNA sense strand
cgaccugcuugcccucauc

SEQ ID NO: 1698524 - RNA, 19 nt, Homo sapiens
  misc_RNA (1)...(19): siRNA sense strand
ggacagaucaggaguuuga

SEQ ID NO: 1698525 - RNA, 19 nt, Homo sapiens
  misc_RNA (1)...(19): siRNA sense strand
gaucaggaguuugaagaga

SEQ ID NO: 1698526 - RNA, 19 nt, Homo sapiens
  misc_RNA (1)...(19): siRNA sense strand
ccaugacgaugcuggagaa

SEQ ID NO: 1698527 - RNA, 19 nt, Homo sapiens
  misc_RNA (1)...(19): siRNA sense strand
cagcagaggacgacauuca

SEQ ID NO: 1698528 - RNA, 19 nt, Homo sapiens
  misc_RNA (1)...(19): siRNA sense strand
gcagucagagaaugaggaa

SEQ ID NO: 1698529 - RNA, 19 nt, Homo sapiens
  misc_RNA (1)...(19): siRNA sense strand
cuggacagaucaggaguuu

SEQ ID NO: 1698530 - RNA, 19 nt, Homo sapiens
  misc_RNA (1)...(19): siRNA sense strand
ugacgaugcuggagaagcu

SEQ ID NO: 1698531 - RNA, 19 nt, Homo sapiens
  misc_RNA (1)...(19): siRNA sense strand
cagagaaugaggaagaaga

SEQ ID NO: 1698532 - RNA, 19 nt, Homo sapiens
  misc_RNA (1)...(19): siRNA sense strand
aauggcaacuuccuguaug

SEQ ID NO: 1698533 - RNA, 19 nt, Homo sapiens
  misc_RNA (1)...(19): siRNA sense strand
cagaucaggaguuugaaga

SEQ ID NO: 1698534 - RNA, 19 nt, Homo sapiens
  misc_RNA (1)...(19): siRNA sense strand
agucagagaaugaggaaga

SEQ ID NO: 1698535 - RNA, 19 nt, Homo sapiens
  misc_RNA (1)...(19): siRNA sense strand
gcacagcagaggacgacau

SEQ ID NO: 1698536 - RNA, 19 nt, Homo sapiens
  misc_RNA (1)...(19): siRNA sense strand
gucagagaaugaggaagaa

SEQ ID NO: 1698537 - RNA, 19 nt, Homo sapiens
  misc_RNA (1)...(19): siRNA sense strand
ucaggaguuugaagagagu

SEQ ID NO: 1698538 - RNA, 19 nt, Homo sapiens
  misc_RNA (1)...(19): siRNA sense strand
caacuuccuguauguccuu

SEQ ID NO: 1698539 - RNA, 19 nt, Homo sapiens
  misc_RNA (1)...(19): siRNA sense strand
aaauggcaacuuccuguau

SEQ ID NO: 1698540 - RNA, 19 nt, Homo sapiens
  misc_RNA (1)...(19): siRNA sense strand
gcgucuugguggccacuga

SEQ ID NO: 1698541 - RNA, 19 nt, Homo sapiens
  misc_RNA (1)...(19): siRNA sense strand
cacagcagaggacgacauu

SEQ ID NO: 1698542 - RNA, 19 nt, Homo sapiens
  misc_RNA (1)...(19): siRNA sense strand
cgaccugcuugcccucauc

SEQ ID NO: 1698543 - RNA, 19 nt, Homo sapiens
  misc_RNA (1)...(19): siRNA sense strand
ggacagaucaggaguuuga

SEQ ID NO: 1698544 - RNA, 19 nt, Homo sapiens
  misc_RNA (1)...(19): siRNA sense strand
gaucaggaguuugaagaga

SEQ ID NO: 1698545 - RNA, 19 nt, Homo sapiens
  misc_RNA (1)...(19): siRNA sense strand
ccaugacgaugcuggagaa

SEQ ID NO: 1698546 - RNA, 19 nt, Homo sapiens
  misc_RNA (1)...(19): siRNA sense strand
gcagucagagaaugaggaa

SEQ ID NO: 1698547 - RNA, 19 nt, Homo sapiens
  misc_RNA (1)...(19): siRNA sense strand
cuggacagaucaggaguuu

SEQ ID NO: 1698548 - RNA, 19 nt, Homo sapiens
  misc_RNA (1)...(19): siRNA sense strand
ugacgaugcuggagaagcu

SEQ ID NO: 1698549 - RNA, 19 nt, Homo sapiens
  misc_RNA (1)...(19): siRNA sense strand
cagagaaugaggaagaaga

SEQ ID NO: 1698550 - RNA, 19 nt, Homo sapiens
  misc_RNA (1)...(19): siRNA sense strand
aauggcaacuuccuguaug

SEQ ID NO: 1698551 - RNA, 19 nt, Homo sapiens
  misc_RNA (1)...(19): siRNA sense strand
cagaucaggaguuugaaga

SEQ ID NO: 1698552 - RNA, 19 nt, Homo sapiens
  misc_RNA (1)...(19): siRNA sense strand
agucagagaaugaggaaga

SEQ ID NO: 1698553 - RNA, 19 nt, Homo sapiens
  misc_RNA (1)...(19): siRNA sense strand
gucagagaaugaggaagaa

SEQ ID NO: 1698554 - RNA, 19 nt, Homo sapiens
  misc_RNA (1)...(19): siRNA sense strand
ucaggaguuugaagagagu

SEQ ID NO: 1698555 - RNA, 19 nt, Homo sapiens
  misc_RNA (1)...(19): siRNA sense strand
caacuuccuguauguccuu

SEQ ID NO: 1698556 - RNA, 19 nt, Homo sapiens
  misc_RNA (1)...(19): siRNA sense strand
aaauggcaacuuccuguau

SEQ ID NO: 1698557 - RNA, 19 nt, Homo sapiens
  misc_RNA (1)...(19): siRNA sense strand
gcgucuugguggccacuga

SEQ ID NO: 1698558 - RNA, 19 nt, Homo sapiens
  misc_RNA (1)...(19): siRNA sense strand
ggacagaucaggaguuuga

SEQ ID NO: 1698559 - RNA, 19 nt, Homo sapiens
  misc_RNA (1)...(19): siRNA sense strand
gaucaggaguuugaagaga

SEQ ID NO: 1698560 - RNA, 19 nt, Homo sapiens
  misc_RNA (1)...(19): siRNA sense strand
ccaugacgaugcuggagaa

SEQ ID NO: 1698561 - RNA, 19 nt, Homo sapiens
  misc_RNA (1)...(19): siRNA sense strand
cagcagaggacgacauuca

SEQ ID NO: 1698562 - RNA, 19 nt, Homo sapiens
  misc_RNA (1)...(19): siRNA sense strand
gcagucagagaaugaggaa

SEQ ID NO: 1698563 - RNA, 19 nt, Homo sapiens
  misc_RNA (1)...(19): siRNA sense strand
cuggacagaucaggaguuu

SEQ ID NO: 1698564 - RNA, 19 nt, Homo sapiens
  misc_RNA (1)...(19): siRNA sense strand
ugacgaugcuggagaagcu

SEQ ID NO: 1698565 - RNA, 19 nt, Homo sapiens
  misc_RNA (1)...(19): siRNA sense strand
cagagaaugaggaagaaga

SEQ ID NO: 1698566 - RNA, 19 nt, Homo sapiens
  misc_RNA (1)...(19): siRNA sense strand
aauggcaacuuccuguaug

SEQ ID NO: 1698567 - RNA, 19 nt, Homo sapiens
  misc_RNA (1)...(19): siRNA sense strand
cagaucaggaguuugaaga

SEQ ID NO: 1698568 - RNA, 19 nt, Homo sapiens
  misc_RNA (1)...(19): siRNA sense strand
agucagagaaugaggaaga

SEQ ID NO: 1698569 - RNA, 19 nt, Homo sapiens
  misc_RNA (1)...(19): siRNA sense strand
gcacagcagaggacgacau

SEQ ID NO: 1698570 - RNA, 19 nt, Homo sapiens
  misc_RNA (1)...(19): siRNA sense strand
gucagagaaugaggaagaa

SEQ ID NO: 1698571 - RNA, 19 nt, Homo sapiens
  misc_RNA (1)...(19): siRNA sense strand
ucaggaguuugaagagagu

SEQ ID NO: 1698572 - RNA, 19 nt, Homo sapiens
  misc_RNA (1)...(19): siRNA sense strand
caacuuccuguauguccuu

SEQ ID NO: 1698573 - RNA, 19 nt, Homo sapiens
  misc_RNA (1)...(19): siRNA sense strand
aaauggcaacuuccuguau

SEQ ID NO: 1698574 - RNA, 19 nt, Homo sapiens
  misc_RNA (1)...(19): siRNA sense strand
gcgucuugguggccacuga

SEQ ID NO: 1698575 - RNA, 19 nt, Homo sapiens
  misc_RNA (1)...(19): siRNA sense strand
cacagcagaggacgacauu

SEQ ID NO: 1698576 - RNA, 19 nt, Homo sapiens
  misc_RNA (1)...(19): siRNA sense strand
cgaccugcuugcccucauc

SEQ ID NO: 1698577 - RNA, 19 nt, Homo sapiens
  misc_RNA (1)...(19): siRNA sense strand
ggacagaucaggaguuuga

SEQ ID NO: 1698578 - RNA, 19 nt, Homo sapiens
  misc_RNA (1)...(19): siRNA sense strand
gaucaggaguuugaagaga

SEQ ID NO: 1698579 - RNA, 19 nt, Homo sapiens
  misc_RNA (1)...(19): siRNA sense strand
ccaugacgaugcuggagaa

SEQ ID NO: 1698580 - RNA, 19 nt, Homo sapiens
  misc_RNA (1)...(19): siRNA sense strand
cagcagaggacgacauuca

SEQ ID NO: 1698581 - RNA, 19 nt, Homo sapiens
  misc_RNA (1)...(19): siRNA sense strand
gcagucagagaaugaggaa

SEQ ID NO: 1698582 - RNA, 19 nt, Homo sapiens
  misc_RNA (1)...(19): siRNA sense strand
cuggacagaucaggaguuu

SEQ ID NO: 1698583 - RNA, 19 nt, Homo sapiens
  misc_RNA (1)...(19): siRNA sense strand
ugacgaugcuggagaagcu

SEQ ID NO: 1698584 - RNA, 19 nt, Homo sapiens
  misc_RNA (1)...(19): siRNA sense strand
cagagaaugaggaagaaga

SEQ ID NO: 1698585 - RNA, 19 nt, Homo sapiens
  misc_RNA (1)...(19): siRNA sense strand
aauggcaacuuccuguaug

SEQ ID NO: 1698586 - RNA, 19 nt, Homo sapiens
  misc_RNA (1)...(19): siRNA sense strand
cagaucaggaguuugaaga

SEQ ID NO: 1698587 - RNA, 19 nt, Homo sapiens
  misc_RNA (1)...(19): siRNA sense strand
agucagagaaugaggaaga

SEQ ID NO: 1698588 - RNA, 19 nt, Homo sapiens
  misc_RNA (1)...(19): siRNA sense strand
gcacagcagaggacgacau

SEQ ID NO: 1698589 - RNA, 19 nt, Homo sapiens
  misc_RNA (1)...(19): siRNA sense strand
gucagagaaugaggaagaa

SEQ ID NO: 1698590 - RNA, 19 nt, Homo sapiens
  misc_RNA (1)...(19): siRNA sense strand
ucaggaguuugaagagagu

SEQ ID NO: 1698591 - RNA, 19 nt, Homo sapiens
  misc_RNA (1)...(19): siRNA sense strand
caacuuccuguauguccuu

SEQ ID NO: 1698592 - RNA, 19 nt, Homo sapiens
  misc_RNA (1)...(19): siRNA sense strand
aaauggcaacuuccuguau

SEQ ID NO: 1698593 - RNA, 19 nt, Homo sapiens
  misc_RNA (1)...(19): siRNA sense strand
gcgucuugguggccacuga

SEQ ID NO: 1698594 - RNA, 19 nt, Homo sapiens
  misc_RNA (1)...(19): siRNA sense strand
cacagcagaggacgacauu

SEQ ID NO: 1698595 - RNA, 19 nt, Homo sapiens
  misc_RNA (1)...(19): siRNA sense strand
cgaccugcuugcccucauc

SEQ ID NO: 1698596 - RNA, 19 nt, Homo sapiens
  misc_RNA (1)...(19): siRNA sense strand
ggacagaucaggaguuuga

SEQ ID NO: 1698597 - RNA, 19 nt, Homo sapiens
  misc_RNA (1)...(19): siRNA sense strand
gaucaggaguuugaagaga

SEQ ID NO: 1698598 - RNA, 19 nt, Homo sapiens
  misc_RNA (1)...(19): siRNA sense strand
ccaugacgaugcuggagaa

SEQ ID NO: 1698599 - RNA, 19 nt, Homo sapiens
  misc_RNA (1)...(19): siRNA sense strand
cagcagaggacgacauuca

SEQ ID NO: 1698600 - RNA, 19 nt, Homo sapiens
  misc_RNA (1)...(19): siRNA sense strand
gcagucagagaaugaggaa

SEQ ID NO: 1698601 - RNA, 19 nt, Homo sapiens
  misc_RNA (1)...(19): siRNA sense strand
cuggacagaucaggaguuu

SEQ ID NO: 1698602 - RNA, 19 nt, Homo sapiens
  misc_RNA (1)...(19): siRNA sense strand
ugacgaugcuggagaagcu

SEQ ID NO: 1698603 - RNA, 19 nt, Homo sapiens
  misc_RNA (1)...(19): siRNA sense strand
cagagaaugaggaagaaga

SEQ ID NO: 1698604 - RNA, 19 nt, Homo sapiens
  misc_RNA (1)...(19): siRNA sense strand
aauggcaacuuccuguaug

SEQ ID NO: 1698605 - RNA, 19 nt, Homo sapiens
  misc_RNA (1)...(19): siRNA sense strand
cagaucaggaguuugaaga

SEQ ID NO: 1698606 - RNA, 19 nt, Homo sapiens
  misc_RNA (1)...(19): siRNA sense strand
agucagagaaugaggaaga

SEQ ID NO: 1698607 - RNA, 19 nt, Homo sapiens
  misc_RNA (1)...(19): siRNA sense strand
gcacagcagaggacgacau

SEQ ID NO: 1698608 - RNA, 19 nt, Homo sapiens
  misc_RNA (1)...(19): siRNA sense strand
gucagagaaugaggaagaa

SEQ ID NO: 1698609 - RNA, 19 nt, Homo sapiens
  misc_RNA (1)...(19): siRNA sense strand
ucaggaguuugaagagagu

SEQ ID NO: 1698610 - RNA, 19 nt, Homo sapiens
  misc_RNA (1)...(19): siRNA sense strand
caacuuccuguauguccuu

SEQ ID NO: 1698611 - RNA, 19 nt, Homo sapiens
  misc_RNA (1)...(19): siRNA sense strand
aaauggcaacuuccuguau

SEQ ID NO: 1698612 - RNA, 19 nt, Homo sapiens
  misc_RNA (1)...(19): siRNA sense strand
gcgucuugguggccacuga

SEQ ID NO: 1698613 - RNA, 19 nt, Homo sapiens
  misc_RNA (1)...(19): siRNA sense strand
cacagcagaggacgacauu

SEQ ID NO: 1698614 - RNA, 19 nt, Homo sapiens
  misc_RNA (1)...(19): siRNA sense strand
cgaccugcuugcccucauc

SEQ ID NO: 1698615 - RNA, 19 nt, Homo sapiens
  misc_RNA (1)...(19): siRNA sense strand
ggacagaucaggaguuuga

SEQ ID NO: 1698616 - RNA, 19 nt, Homo sapiens
  misc_RNA (1)...(19): siRNA sense strand
gaucaggaguuugaagaga

SEQ ID NO: 1698617 - RNA, 19 nt, Homo sapiens
  misc_RNA (1)...(19): siRNA sense strand
ccaugacgaugcuggagaa

SEQ ID NO: 1698618 - RNA, 19 nt, Homo sapiens
  misc_RNA (1)...(19): siRNA sense strand
gcagucagagaaugaggaa

SEQ ID NO: 1698619 - RNA, 19 nt, Homo sapiens
  misc_RNA (1)...(19): siRNA sense strand
cuggacagaucaggaguuu

SEQ ID NO: 1698620 - RNA, 19 nt, Homo sapiens
  misc_RNA (1)...(19): siRNA sense strand
ugacgaugcuggagaagcu

SEQ ID NO: 1698621 - RNA, 19 nt, Homo sapiens
  misc_RNA (1)...(19): siRNA sense strand
cagagaaugaggaagaaga

SEQ ID NO: 1698622 - RNA, 19 nt, Homo sapiens
  misc_RNA (1)...(19): siRNA sense strand
aauggcaacuuccuguaug

SEQ ID NO: 1698623 - RNA, 19 nt, Homo sapiens
  misc_RNA (1)...(19): siRNA sense strand
cagaucaggaguuugaaga

SEQ ID NO: 1698624 - RNA, 19 nt, Homo sapiens
  misc_RNA (1)...(19): siRNA sense strand
agucagagaaugaggaaga

SEQ ID NO: 1698625 - RNA, 19 nt, Homo sapiens
  misc_RNA (1)...(19): siRNA sense strand
gucagagaaugaggaagaa

SEQ ID NO: 1698626 - RNA, 19 nt, Homo sapiens
  misc_RNA (1)...(19): siRNA sense strand
ucaggaguuugaagagagu

SEQ ID NO: 1698627 - RNA, 19 nt, Homo sapiens
  misc_RNA (1)...(19): siRNA sense strand
caacuuccuguauguccuu

SEQ ID NO: 1698628 - RNA, 19 nt, Homo sapiens
  misc_RNA (1)...(19): siRNA sense strand
aaauggcaacuuccuguau

SEQ ID NO: 1698629 - RNA, 19 nt, Homo sapiens
  misc_RNA (1)...(19): siRNA sense strand
gcgucuugguggccacuga

SEQ ID NO: 1698630 - RNA, 19 nt, Homo sapiens
  misc_RNA (1)...(19): siRNA sense strand
ggacagaucaggaguuuga

SEQ ID NO: 1698631 - RNA, 19 nt, Homo sapiens
  misc_RNA (1)...(19): siRNA sense strand
gaucaggaguuugaagaga

SEQ ID NO: 1698632 - RNA, 19 nt, Homo sapiens
  misc_RNA (1)...(19): siRNA sense strand
ccaugacgaugcuggagaa

SEQ ID NO: 1698633 - RNA, 19 nt, Homo sapiens
  misc_RNA (1)...(19): siRNA sense strand
cagcagaggacgacauuca

SEQ ID NO: 1698634 - RNA, 19 nt, Homo sapiens
  misc_RNA (1)...(19): siRNA sense strand
gcagucagagaaugaggaa

SEQ ID NO: 1698635 - RNA, 19 nt, Homo sapiens
  misc_RNA (1)...(19): siRNA sense strand
cuggacagaucaggaguuu

SEQ ID NO: 1698636 - RNA, 19 nt, Homo sapiens
  misc_RNA (1)...(19): siRNA sense strand
ugacgaugcuggagaagcu

SEQ ID NO: 1698637 - RNA, 19 nt, Homo sapiens
  misc_RNA (1)...(19): siRNA sense strand
cagagaaugaggaagaaga

SEQ ID NO: 1698638 - RNA, 19 nt, Homo sapiens
  misc_RNA (1)...(19): siRNA sense strand
aauggcaacuuccuguaug

SEQ ID NO: 1698639 - RNA, 19 nt, Homo sapiens
  misc_RNA (1)...(19): siRNA sense strand
cagaucaggaguuugaaga

SEQ ID NO: 1698640 - RNA, 19 nt, Homo sapiens
  misc_RNA (1)...(19): siRNA sense strand
agucagagaaugaggaaga

SEQ ID NO: 1698641 - RNA, 19 nt, Homo sapiens
  misc_RNA (1)...(19): siRNA sense strand
gcacagcagaggacgacau

SEQ ID NO: 1698642 - RNA, 19 nt, Homo sapiens
  misc_RNA (1)...(19): siRNA sense strand
gucagagaaugaggaagaa

SEQ ID NO: 1698643 - RNA, 19 nt, Homo sapiens
  misc_RNA (1)...(19): siRNA sense strand
ucaggaguuugaagagagu

SEQ ID NO: 1698644 - RNA, 19 nt, Homo sapiens
  misc_RNA (1)...(19): siRNA sense strand
caacuuccuguauguccuu

SEQ ID NO: 1698645 - RNA, 19 nt, Homo sapiens
  misc_RNA (1)...(19): siRNA sense strand
aaauggcaacuuccuguau

SEQ ID NO: 1698646 - RNA, 19 nt, Homo sapiens
  misc_RNA (1)...(19): siRNA sense strand
gcgucuugguggccacuga

SEQ ID NO: 1698647 - RNA, 19 nt, Homo sapiens
  misc_RNA (1)...(19): siRNA sense strand
cacagcagaggacgacauu

SEQ ID NO: 1698648 - RNA, 19 nt, Homo sapiens
  misc_RNA (1)...(19): siRNA sense strand
cgaccugcuugcccucauc

SEQ ID NO: 1698649 - RNA, 19 nt, Homo sapiens
  misc_RNA (1)...(19): siRNA sense strand
ggacagaucaggaguuuga

SEQ ID NO: 1698650 - RNA, 19 nt, Homo sapiens
  misc_RNA (1)...(19): siRNA sense strand
gaucaggaguuugaagaga

SEQ ID NO: 1698651 - RNA, 19 nt, Homo sapiens
  misc_RNA (1)...(19): siRNA sense strand
ccaugacgaugcuggagaa

SEQ ID NO: 1698652 - RNA, 19 nt, Homo sapiens
  misc_RNA (1)...(19): siRNA sense strand
cagcagaggacgacauuca

SEQ ID NO: 1698653 - RNA, 19 nt, Homo sapiens
  misc_RNA (1)...(19): siRNA sense strand
gcagucagagaaugaggaa

SEQ ID NO: 1698654 - RNA, 19 nt, Homo sapiens
  misc_RNA (1)...(19): siRNA sense strand
cuggacagaucaggaguuu

SEQ ID NO: 1698655 - RNA, 19 nt, Homo sapiens
  misc_RNA (1)...(19): siRNA sense strand
ugacgaugcuggagaagcu

SEQ ID NO: 1698656 - RNA, 19 nt, Homo sapiens
  misc_RNA (1)...(19): siRNA sense strand
cagagaaugaggaagaaga

SEQ ID NO: 1698657 - RNA, 19 nt, Homo sapiens
  misc_RNA (1)...(19): siRNA sense strand
aauggcaacuuccuguaug

SEQ ID NO: 1698658 - RNA, 19 nt, Homo sapiens
  misc_RNA (1)...(19): siRNA sense strand
cagaucaggaguuugaaga

SEQ ID NO: 1698659 - RNA, 19 nt, Homo sapiens
  misc_RNA (1)...(19): siRNA sense strand
agucagagaaugaggaaga

SEQ ID NO: 1698660 - RNA, 19 nt, Homo sapiens
  misc_RNA (1)...(19): siRNA sense strand
gcacagcagaggacgacau

SEQ ID NO: 1698661 - RNA, 19 nt, Homo sapiens
  misc_RNA (1)...(19): siRNA sense strand
gucagagaaugaggaagaa

SEQ ID NO: 1698662 - RNA, 19 nt, Homo sapiens
  misc_RNA (1)...(19): siRNA sense strand
ucaggaguuugaagagagu

SEQ ID NO: 1698663 - RNA, 19 nt, Homo sapiens
  misc_RNA (1)...(19): siRNA sense strand
caacuuccuguauguccuu

SEQ ID NO: 1698664 - RNA, 19 nt, Homo sapiens
  misc_RNA (1)...(19): siRNA sense strand
aaauggcaacuuccuguau

SEQ ID NO: 1698665 - RNA, 19 nt, Homo sapiens
  misc_RNA (1)...(19): siRNA sense strand
gcgucuugguggccacuga

SEQ ID NO: 1698666 - RNA, 19 nt, Homo sapiens
  misc_RNA (1)...(19): siRNA sense strand
cacagcagaggacgacauu

SEQ ID NO: 1698667 - RNA, 19 nt, Homo sapiens
  misc_RNA (1)...(19): siRNA sense strand
cgaccugcuugcccucauc

SEQ ID NO: 1698668 - RNA, 19 nt, Homo sapiens
  misc_RNA (1)...(19): siRNA sense strand
gcagauggcugauuaagga

SEQ ID NO: 1698669 - RNA, 19 nt, Homo sapiens
  misc_RNA (1)...(19): siRNA sense strand
ggaacuagaagaaauguua

SEQ ID NO: 1698670 - RNA, 19 nt, Homo sapiens
  misc_RNA (1)...(19): siRNA sense strand
gcagaaaguuuacguggaa

SEQ ID NO: 1698671 - RNA, 19 nt, Homo sapiens
  misc_RNA (1)...(19): siRNA sense strand
gaagaaauguuaguggaaa

SEQ ID NO: 1698672 - RNA, 19 nt, Homo sapiens
  misc_RNA (1)...(19): siRNA sense strand
gcuaagacauacugcauuu

SEQ ID NO: 1698673 - RNA, 19 nt, Homo sapiens
  misc_RNA (1)...(19): siRNA sense strand
gagacaagcuggacuacuu

SEQ ID NO: 1698674 - RNA, 19 nt, Homo sapiens
  misc_RNA (1)...(19): siRNA sense strand
gauguucccuuuccacuuu

SEQ ID NO: 1698675 - RNA, 19 nt, Homo sapiens
  misc_RNA (1)...(19): siRNA sense strand
gagaagauccagaaacuuu

SEQ ID NO: 1698676 - RNA, 19 nt, Homo sapiens
  misc_RNA (1)...(19): siRNA sense strand
gugcagagguuucgaagaa

SEQ ID NO: 1698677 - RNA, 19 nt, Homo sapiens
  misc_RNA (1)...(19): siRNA sense strand
gauugaaccuguacaguau

SEQ ID NO: 1698678 - RNA, 19 nt, Homo sapiens
  misc_RNA (1)...(19): siRNA sense strand
gaagcauccugaacagauu

SEQ ID NO: 1698679 - RNA, 19 nt, Homo sapiens
  misc_RNA (1)...(19): siRNA sense strand
ggaauugauuaccagcuuu

SEQ ID NO: 1698680 - RNA, 19 nt, Homo sapiens
  misc_RNA (1)...(19): siRNA sense strand
ugucagaucccagauauua

SEQ ID NO: 1698681 - RNA, 19 nt, Homo sapiens
  misc_RNA (1)...(19): siRNA sense strand
ugacagagcuauugcuuac

SEQ ID NO: 1698682 - RNA, 19 nt, Homo sapiens
  misc_RNA (1)...(19): siRNA sense strand
gcaaacagucauacuauuc

SEQ ID NO: 1698683 - RNA, 19 nt, Homo sapiens
  misc_RNA (1)...(19): siRNA sense strand
ggaauggccuuuagcaaaa

SEQ ID NO: 1698684 - RNA, 19 nt, Homo sapiens
  misc_RNA (1)...(19): siRNA sense strand
gaaacgagccaggccagua

SEQ ID NO: 1698685 - RNA, 19 nt, Homo sapiens
  misc_RNA (1)...(19): siRNA sense strand
ccaagugguuuguuugaga

SEQ ID NO: 1698686 - RNA, 19 nt, Homo sapiens
  misc_RNA (1)...(19): siRNA sense strand
gaauugauuaccagcuuua

SEQ ID NO: 1698687 - RNA, 19 nt, Homo sapiens
  misc_RNA (1)...(19): siRNA sense strand
gaagcaaggccucuggaaa

SEQ ID NO: 1698688 - RNA, 19 nt, Homo sapiens
  misc_RNA (1)...(19): siRNA sense strand
gggagaagauccagaaacu

SEQ ID NO: 1698689 - RNA, 19 nt, Homo sapiens
  misc_RNA (1)...(19): siRNA sense strand
acauggaaguggaagaaua

SEQ ID NO: 1698690 - RNA, 19 nt, Homo sapiens
  misc_RNA (1)...(19): siRNA sense strand
ggcaaacagucauacuauu

SEQ ID NO: 1698691 - RNA, 19 nt, Homo sapiens
  misc_RNA (1)...(19): siRNA sense strand
aaacuuacacagaggauuu

SEQ ID NO: 1698692 - RNA, 19 nt, Homo sapiens
  misc_RNA (1)...(19): siRNA sense strand
gcagaagcaauuguuuaua

SEQ ID NO: 1698693 - RNA, 19 nt, Homo sapiens
  misc_RNA (1)...(19): siRNA sense strand
caagugguuuguuugagaa

SEQ ID NO: 1698694 - RNA, 19 nt, Homo sapiens
  misc_RNA (1)...(19): siRNA sense strand
ucccagauauuaaggcuaa

SEQ ID NO: 1698695 - RNA, 19 nt, Homo sapiens
  misc_RNA (1)...(19): siRNA sense strand
ggaagaagccaggccaaga

SEQ ID NO: 1698696 - RNA, 19 nt, Homo sapiens
  misc_RNA (1)...(19): siRNA sense strand
ggacagagaacagcugaug

SEQ ID NO: 1698697 - RNA, 19 nt, Homo sapiens
  misc_RNA (1)...(19): siRNA sense strand
gaagauauugacagagcua

SEQ ID NO: 1698698 - RNA, 19 nt, Homo sapiens
  misc_RNA (1)...(19): siRNA sense strand
gcagagguuucgaagaagu

SEQ ID NO: 1698699 - RNA, 19 nt, Homo sapiens
  misc_RNA (1)...(19): siRNA sense strand
cauaggaaagagacauuua

SEQ ID NO: 1698700 - RNA, 19 nt, Homo sapiens
  misc_RNA (1)...(19): siRNA sense strand
aaguguaacucuugaauca

SEQ ID NO: 1698701 - RNA, 19 nt, Homo sapiens
  misc_RNA (1)...(19): siRNA sense strand
ugauugaaccuguacagua

SEQ ID NO: 1698702 - RNA, 19 nt, Homo sapiens
  misc_RNA (1)...(19): siRNA sense strand
gauauugacagagcuauug

SEQ ID NO: 1698703 - RNA, 19 nt, Homo sapiens
  misc_RNA (1)...(19): siRNA sense strand
ggagcccgcagaaaguuua

SEQ ID NO: 1698704 - RNA, 19 nt, Homo sapiens
  misc_RNA (1)...(19): siRNA sense strand
caagcuggacuacuuacua

SEQ ID NO: 1698705 - RNA, 19 nt, Homo sapiens
  misc_RNA (1)...(19): siRNA sense strand
agacauacugcauuuguaa

SEQ ID NO: 1698706 - RNA, 19 nt, Homo sapiens
  misc_RNA (1)...(19): siRNA sense strand
aagcagaagcaauuguuua

SEQ ID NO: 1698707 - RNA, 19 nt, Homo sapiens
  misc_RNA (1)...(19): siRNA sense strand
gaagaguucaacauaggaa

SEQ ID NO: 1698708 - RNA, 19 nt, Homo sapiens
  misc_RNA (1)...(19): siRNA sense strand
gaaaguuuacguggaagaa

SEQ ID NO: 1698709 - RNA, 19 nt, Homo sapiens
  misc_RNA (1)...(19): siRNA sense strand
gaugagacaagcuggacua

SEQ ID NO: 1698710 - RNA, 19 nt, Homo sapiens
  misc_RNA (1)...(19): siRNA sense strand
cauggaaguggaagaauaa

SEQ ID NO: 1698711 - RNA, 19 nt, Homo sapiens
  misc_RNA (1)...(19): siRNA sense strand
gauuaaggaggaacuagaa

SEQ ID NO: 1698712 - RNA, 19 nt, Homo sapiens
  misc_RNA (1)...(19): siRNA sense strand
gaagaagccaggccaagag

SEQ ID NO: 1698713 - RNA, 19 nt, Homo sapiens
  misc_RNA (1)...(19): siRNA sense strand
gacgugaccugcacagucu

SEQ ID NO: 1698714 - RNA, 19 nt, Homo sapiens
  misc_RNA (1)...(19): siRNA sense strand
gaugggagaagauccagaa

SEQ ID NO: 1698715 - RNA, 19 nt, Homo sapiens
  misc_RNA (1)...(19): siRNA sense strand
ggaggaacuagaagaaaug

SEQ ID NO: 1698716 - RNA, 19 nt, Homo sapiens
  misc_RNA (1)...(19): siRNA sense strand
ggaauguuacucaauuuag

SEQ ID NO: 1698717 - RNA, 19 nt, Homo sapiens
  misc_RNA (1)...(19): siRNA sense strand
aaacgagccaggccaguaa

SEQ ID NO: 1698718 - RNA, 19 nt, Homo sapiens
  misc_RNA (1)...(19): siRNA sense strand
caaacagucauacuauuca

SEQ ID NO: 1698719 - RNA, 19 nt, Homo sapiens
  misc_RNA (1)...(19): siRNA sense strand
cagcuuuacuucccgauca

SEQ ID NO: 1698720 - RNA, 19 nt, Homo sapiens
  misc_RNA (1)...(19): siRNA sense strand
uaagacauacugcauuugu

SEQ ID NO: 1698721 - RNA, 19 nt, Homo sapiens
  misc_RNA (1)...(19): siRNA sense strand
gaucacacaggacagagaa

SEQ ID NO: 1698722 - RNA, 19 nt, Homo sapiens
  misc_RNA (1)...(19): siRNA sense strand
gaaccuguacaguaugaug

SEQ ID NO: 1698723 - RNA, 19 nt, Homo sapiens
  misc_RNA (1)...(19): siRNA sense strand
aaugucagaucccagauau

SEQ ID NO: 1698724 - RNA, 19 nt, Homo sapiens
  misc_RNA (1)...(19): siRNA sense strand
uaaggaggaacuagaagaa

SEQ ID NO: 1698725 - RNA, 19 nt, Homo sapiens
  misc_RNA (1)...(19): siRNA sense strand
agacaagcuggacuacuua

SEQ ID NO: 1698726 - RNA, 19 nt, Homo sapiens
  misc_RNA (1)...(19): siRNA sense strand
gaacuagaagaaauguuag

SEQ ID NO: 1698727 - RNA, 19 nt, Homo sapiens
  misc_RNA (1)...(19): siRNA sense strand
gcaauacgacuggcaaugg

SEQ ID NO: 1698728 - RNA, 19 nt, Homo sapiens
  misc_RNA (1)...(19): siRNA sense strand
aagacauacugcauuugua

SEQ ID NO: 1698729 - RNA, 19 nt, Homo sapiens
  misc_RNA (1)...(19): siRNA sense strand
gauuauaugcaguucauuc

SEQ ID NO: 1698730 - RNA, 19 nt, Homo sapiens
  misc_RNA (1)...(19): siRNA sense strand
ccucaaaacgugaaacuua

SEQ ID NO: 1698731 - RNA, 19 nt, Homo sapiens
  misc_RNA (1)...(19): siRNA sense strand
aaaagcagauugaagaguu

SEQ ID NO: 1698732 - RNA, 19 nt, Homo sapiens
  misc_RNA (1)...(19): siRNA sense strand
aaacauggaaguggaagaa

SEQ ID NO: 1698733 - RNA, 19 nt, Homo sapiens
  misc_RNA (1)...(19): siRNA sense strand
gaaguguaacucuugaauc

SEQ ID NO: 1698734 - RNA, 19 nt, Homo sapiens
  misc_RNA (1)...(19): siRNA sense strand
guauauggaauguuacuca

SEQ ID NO: 1698735 - RNA, 19 nt, Homo sapiens
  misc_RNA (1)...(19): siRNA sense strand
uaaugaagcauccugaaca

SEQ ID NO: 1698736 - RNA, 19 nt, Homo sapiens
  misc_RNA (1)...(19): siRNA sense strand
gagccaggccaguaaugaa

SEQ ID NO: 1698737 - RNA, 19 nt, Homo sapiens
  misc_RNA (1)...(19): siRNA sense strand
ggaagcaaggccucuggaa

SEQ ID NO: 1698738 - RNA, 19 nt, Homo sapiens
  misc_RNA (1)...(19): siRNA sense strand
aggaggaacuagaagaaau

SEQ ID NO: 1698739 - RNA, 19 nt, Homo sapiens
  misc_RNA (1)...(19): siRNA sense strand
caagagggagcccgcagaa

SEQ ID NO: 1698740 - RNA, 19 nt, Homo sapiens
  misc_RNA (1)...(19): siRNA sense strand
aggaauggccuuuagcaaa

SEQ ID NO: 1698741 - RNA, 19 nt, Homo sapiens
  misc_RNA (1)...(19): siRNA sense strand
acugucagaucuagauuau

SEQ ID NO: 1698742 - RNA, 19 nt, Homo sapiens
  misc_RNA (1)...(19): siRNA sense strand
cacuaucucuucuauacug

SEQ ID NO: 1698743 - RNA, 19 nt, Homo sapiens
  misc_RNA (1)...(19): siRNA sense strand
gauauuaaggcuaagacau

SEQ ID NO: 1698744 - RNA, 19 nt, Homo sapiens
  misc_RNA (1)...(19): siRNA sense strand
caaaagcgaagguaaaaga

SEQ ID NO: 1698745 - RNA, 19 nt, Homo sapiens
  misc_RNA (1)...(19): siRNA sense strand
caacaugaugggagaagau

SEQ ID NO: 1698746 - RNA, 19 nt, Homo sapiens
  misc_RNA (1)...(19): siRNA sense strand
uggaauugauuaccagcuu

SEQ ID NO: 1698747 - RNA, 19 nt, Homo sapiens
  misc_RNA (1)...(19): siRNA sense strand
aagaauuugugcagagguu

SEQ ID NO: 1698748 - RNA, 19 nt, Homo sapiens
  misc_RNA (1)...(19): siRNA sense strand
ugaagcauccugaacagau

SEQ ID NO: 1698749 - RNA, 19 nt, Homo sapiens
  misc_RNA (1)...(19): siRNA sense strand
caugauguauauggaaugu

SEQ ID NO: 1698750 - RNA, 19 nt, Homo sapiens
  misc_RNA (1)...(19): siRNA sense strand
acauuuagccaacaugaug

SEQ ID NO: 1698751 - RNA, 19 nt, Homo sapiens
  misc_RNA (1)...(19): siRNA sense strand
gagggagcccgcagaaagu

SEQ ID NO: 1698752 - RNA, 19 nt, Homo sapiens
  misc_RNA (1)...(19): siRNA sense strand
gaaacuuacacagaggauu

SEQ ID NO: 1698753 - RNA, 19 nt, Homo sapiens
  misc_RNA (1)...(19): siRNA sense strand
ggagaagauccagaaacuu

SEQ ID NO: 1698754 - RNA, 19 nt, Homo sapiens
  misc_RNA (1)...(19): siRNA sense strand
uggcaaacagucauacuau

SEQ ID NO: 1698755 - RNA, 19 nt, Homo sapiens
  misc_RNA (1)...(19): siRNA sense strand
ccaacaugaugggagaaga

SEQ ID NO: 1698756 - RNA, 19 nt, Homo sapiens
  misc_RNA (1)...(19): siRNA sense strand
ggacuacuuacuacugauc

SEQ ID NO: 1698757 - RNA, 19 nt, Homo sapiens
  misc_RNA (1)...(19): siRNA sense strand
aaagcagauugaagaguuc

SEQ ID NO: 1698758 - RNA, 19 nt, Homo sapiens
  misc_RNA (1)...(19): siRNA sense strand
aaacuuucacucaagaaga

SEQ ID NO: 1698759 - RNA, 19 nt, Homo sapiens
  misc_RNA (1)...(19): siRNA sense strand
uuucccaagugguuuguuu

SEQ ID NO: 1698760 - RNA, 19 nt, Homo sapiens
  misc_RNA (1)...(19): siRNA sense strand
caacauaggaaagagacau

SEQ ID NO: 1698761 - RNA, 19 nt, Homo sapiens
  misc_RNA (1)...(19): siRNA sense strand
agcgcaggcuggagcaaua

SEQ ID NO: 1698762 - RNA, 19 nt, Homo sapiens
  misc_RNA (1)...(19): siRNA sense strand
aaagcagaagcaauuguuu

SEQ ID NO: 1698763 - RNA, 19 nt, Homo sapiens
  misc_RNA (1)...(19): siRNA sense strand
uugaaccuguacaguauga

SEQ ID NO: 1698764 - RNA, 19 nt, Homo sapiens
  misc_RNA (1)...(19): siRNA sense strand
gaauuugugcagagguuuc

SEQ ID NO: 1698765 - RNA, 19 nt, Homo sapiens
  misc_RNA (1)...(19): siRNA sense strand
ucucuucuauacuggcaaa

SEQ ID NO: 1698766 - RNA, 19 nt, Homo sapiens
  misc_RNA (1)...(19): siRNA sense strand
aaaugucagaucccagaua

SEQ ID NO: 1698767 - RNA, 19 nt, Homo sapiens
  misc_RNA (1)...(19): siRNA sense strand
ucagaucccagauauuaag

SEQ ID NO: 1698768 - RNA, 19 nt, Homo sapiens
  misc_RNA (1)...(19): siRNA sense strand
gaucaaaguucuacaguuu

SEQ ID NO: 1698769 - RNA, 19 nt, Homo sapiens
  misc_RNA (1)...(19): siRNA sense strand
ggaaagacuucuacaaauu

SEQ ID NO: 1698770 - RNA, 19 nt, Homo sapiens
  misc_RNA (1)...(19): siRNA sense strand
gcacauaaguucugucuga

SEQ ID NO: 1698771 - RNA, 19 nt, Homo sapiens
  misc_RNA (1)...(19): siRNA sense strand
gaaggcaucuugcacauaa

SEQ ID NO: 1698772 - RNA, 19 nt, Homo sapiens
  misc_RNA (1)...(19): siRNA sense strand
caacaucccuucauccuuu

SEQ ID NO: 1698773 - RNA, 19 nt, Homo sapiens
  misc_RNA (1)...(19): siRNA sense strand
acacaaagcuuuacuguau

SEQ ID NO: 1698774 - RNA, 19 nt, Homo sapiens
  misc_RNA (1)...(19): siRNA sense strand
gaacagagcccaaaugcaa

SEQ ID NO: 1698775 - RNA, 19 nt, Homo sapiens
  misc_RNA (1)...(19): siRNA sense strand
ggacaaggaucugcaaauu

SEQ ID NO: 1698776 - RNA, 19 nt, Homo sapiens
  misc_RNA (1)...(19): siRNA sense strand
gagaaugacucuaaagaug

SEQ ID NO: 1698777 - RNA, 19 nt, Homo sapiens
  misc_RNA (1)...(19): siRNA sense strand
ggagagauguugguccuua

SEQ ID NO: 1698778 - RNA, 19 nt, Homo sapiens
  misc_RNA (1)...(19): siRNA sense strand
gaagaggaaucuaaucuca

SEQ ID NO: 1698779 - RNA, 19 nt, Homo sapiens
  misc_RNA (1)...(19): siRNA sense strand
gcuauaaggccauucauua

SEQ ID NO: 1698780 - RNA, 19 nt, Homo sapiens
  misc_RNA (1)...(19): siRNA sense strand
gcagguacaucaagacaaa

SEQ ID NO: 1698781 - RNA, 19 nt, Homo sapiens
  misc_RNA (1)...(19): siRNA sense strand
gaacuuucaucaaaccuuu

SEQ ID NO: 1698782 - RNA, 19 nt, Homo sapiens
  misc_RNA (1)...(19): siRNA sense strand
gguuggagcuggauuagua

SEQ ID NO: 1698783 - RNA, 19 nt, Homo sapiens
  misc_RNA (1)...(19): siRNA sense strand
ugaaggagcucuuagauuc

SEQ ID NO: 1698784 - RNA, 19 nt, Homo sapiens
  misc_RNA (1)...(19): siRNA sense strand
gaaagugacaccauuguuu

SEQ ID NO: 1698785 - RNA, 19 nt, Homo sapiens
  misc_RNA (1)...(19): siRNA sense strand
gaaccgaagacucauaaua

SEQ ID NO: 1698786 - RNA, 19 nt, Homo sapiens
  misc_RNA (1)...(19): siRNA sense strand
guacagcucugccauccua

SEQ ID NO: 1698787 - RNA, 19 nt, Homo sapiens
  misc_RNA (1)...(19): siRNA sense strand
gguagaagauauggaaaua

SEQ ID NO: 1698788 - RNA, 19 nt, Homo sapiens
  misc_RNA (1)...(19): siRNA sense strand
cugaagaccugaccaauaa

SEQ ID NO: 1698789 - RNA, 19 nt, Homo sapiens
  misc_RNA (1)...(19): siRNA sense strand
uaacagagaaggauuauga

SEQ ID NO: 1698790 - RNA, 19 nt, Homo sapiens
  misc_RNA (1)...(19): siRNA sense strand
guaaccaggugaugaagua

SEQ ID NO: 1698791 - RNA, 19 nt, Homo sapiens
  misc_RNA (1)...(19): siRNA sense strand
guucagcgauuccucuuua

SEQ ID NO: 1698792 - RNA, 19 nt, Homo sapiens
  misc_RNA (1)...(19): siRNA sense strand
ccagaaagcaauucaguua

SEQ ID NO: 1698793 - RNA, 19 nt, Homo sapiens
  misc_RNA (1)...(19): siRNA sense strand
ccacauacaucucuucaga

SEQ ID NO: 1698794 - RNA, 19 nt, Homo sapiens
  misc_RNA (1)...(19): siRNA sense strand
gguccaacuugcagaauua

SEQ ID NO: 1698795 - RNA, 19 nt, Homo sapiens
  misc_RNA (1)...(19): siRNA sense strand
acaaggaucugcaaauuga

SEQ ID NO: 1698796 - RNA, 19 nt, Homo sapiens
  misc_RNA (1)...(19): siRNA sense strand
uaaagaaucugcuauaagg

SEQ ID NO: 1698797 - RNA, 19 nt, Homo sapiens
  misc_RNA (1)...(19): siRNA sense strand
gaagaccagucccuugaaa

SEQ ID NO: 1698798 - RNA, 19 nt, Homo sapiens
  misc_RNA (1)...(19): siRNA sense strand
guacaaagacgauauuaug

SEQ ID NO: 1698799 - RNA, 19 nt, Homo sapiens
  misc_RNA (1)...(19): siRNA sense strand
gaaagaaacagcuccgaaa

SEQ ID NO: 1698800 - RNA, 19 nt, Homo sapiens
  misc_RNA (1)...(19): siRNA sense strand
ggagagaccaguuaauaaa

SEQ ID NO: 1698801 - RNA, 19 nt, Homo sapiens
  misc_RNA (1)...(19): siRNA sense strand
caagagugcuuuacauuca

SEQ ID NO: 1698802 - RNA, 19 nt, Homo sapiens
  misc_RNA (1)...(19): siRNA sense strand
ggagaaauuucacgguuga

SEQ ID NO: 1698803 - RNA, 19 nt, Homo sapiens
  misc_RNA (1)...(19): siRNA sense strand
gaagaaacaggaagaagaa

SEQ ID NO: 1698804 - RNA, 19 nt, Homo sapiens
  misc_RNA (1)...(19): siRNA sense strand
caagagcaauggacuuuga

SEQ ID NO: 1698805 - RNA, 19 nt, Homo sapiens
  misc_RNA (1)...(19): siRNA sense strand
gagccgagauccugaagaa

SEQ ID NO: 1698806 - RNA, 19 nt, Homo sapiens
  misc_RNA (1)...(19): siRNA sense strand
gaagagaaucaaagaauga

SEQ ID NO: 1698807 - RNA, 19 nt, Homo sapiens
  misc_RNA (1)...(19): siRNA sense strand
caaacuggcccuguuauua

SEQ ID NO: 1698808 - RNA, 19 nt, Homo sapiens
  misc_RNA (1)...(19): siRNA sense strand
ggugaaugcuugaaagaaa

SEQ ID NO: 1698809 - RNA, 19 nt, Homo sapiens
  misc_RNA (1)...(19): siRNA sense strand
gagaggaauugaugucuga

SEQ ID NO: 1698810 - RNA, 19 nt, Homo sapiens
  misc_RNA (1)...(19): siRNA sense strand
gaggagagaccaguuaaua

SEQ ID NO: 1698811 - RNA, 19 nt, Homo sapiens
  misc_RNA (1)...(19): siRNA sense strand
ggaggaaagugacaccauu

SEQ ID NO: 1698812 - RNA, 19 nt, Homo sapiens
  misc_RNA (1)...(19): siRNA sense strand
gaaagugauuccucaguuc

SEQ ID NO: 1698813 - RNA, 19 nt, Homo sapiens
  misc_RNA (1)...(19): siRNA sense strand
gcaauggacuuugaaggaa

SEQ ID NO: 1698814 - RNA, 19 nt, Homo sapiens
  misc_RNA (1)...(19): siRNA sense strand
gcacacugguuacaucuau

SEQ ID NO: 1698815 - RNA, 19 nt, Homo sapiens
  misc_RNA (1)...(19): siRNA sense strand
auagaaaccucagaaguua

SEQ ID NO: 1698816 - RNA, 19 nt, Homo sapiens
  misc_RNA (1)...(19): siRNA sense strand
gcaaagagguacugguagu

SEQ ID NO: 1698817 - RNA, 19 nt, Homo sapiens
  misc_RNA (1)...(19): siRNA sense strand
gagcaugacuccagcugaa

SEQ ID NO: 1698818 - RNA, 19 nt, Homo sapiens
  misc_RNA (1)...(19): siRNA sense strand
caaacuagauggacuucuu

SEQ ID NO: 1698819 - RNA, 19 nt, Homo sapiens
  misc_RNA (1)...(19): siRNA sense strand
ggaaguagacgaugacaug

SEQ ID NO: 1698820 - RNA, 19 nt, Homo sapiens
  misc_RNA (1)...(19): siRNA sense strand
gaagugaucaugaaaggaa

SEQ ID NO: 1698821 - RNA, 19 nt, Homo sapiens
  misc_RNA (1)...(19): siRNA sense strand
gacaugaaccuauuggaua

SEQ ID NO: 1698822 - RNA, 19 nt, Homo sapiens
  misc_RNA (1)...(19): siRNA sense strand
gaaccuauuggauaugaua

SEQ ID NO: 1698823 - RNA, 19 nt, Homo sapiens
  misc_RNA (1)...(19): siRNA sense strand
gaacaaaggcagaguaaac

SEQ ID NO: 1698824 - RNA, 19 nt, Homo sapiens
  misc_RNA (1)...(19): siRNA sense strand
gaaaggagaauuaaacagu

SEQ ID NO: 1698825 - RNA, 19 nt, Homo sapiens
  misc_RNA (1)...(19): siRNA sense strand
gaagaaaugcgugaagaaa

SEQ ID NO: 1698826 - RNA, 19 nt, Homo sapiens
  misc_RNA (1)...(19): siRNA sense strand
gcagaggacuacccauaug

SEQ ID NO: 1698827 - RNA, 19 nt, Homo sapiens
  misc_RNA (1)...(19): siRNA sense strand
guccaaaguucuuaccaua

SEQ ID NO: 1698828 - RNA, 19 nt, Homo sapiens
  misc_RNA (1)...(19): siRNA sense strand
cacaagcaauucacaagua

SEQ ID NO: 1698829 - RNA, 19 nt, Homo sapiens
  misc_RNA (1)...(19): siRNA sense strand
gaaaucacaacaacagaaa

SEQ ID NO: 1698830 - RNA, 19 nt, Homo sapiens
  misc_RNA (1)...(19): siRNA sense strand
ggaaauagaaaccucagaa

SEQ ID NO: 1698831 - RNA, 19 nt, Homo sapiens
  misc_RNA (1)...(19): siRNA sense strand
ugacaucaauugaaagaga

SEQ ID NO: 1698832 - RNA, 19 nt, Homo sapiens
  misc_RNA (1)...(19): siRNA sense strand
aaauagagccugauucuga

SEQ ID NO: 1698833 - RNA, 19 nt, Homo sapiens
  misc_RNA (1)...(19): siRNA sense strand
ggaagaaagaguacaaaga

SEQ ID NO: 1698834 - RNA, 19 nt, Homo sapiens
  misc_RNA (1)...(19): siRNA sense strand
gcaagcagaaugccacuaa

SEQ ID NO: 1698835 - RNA, 19 nt, Homo sapiens
  misc_RNA (1)...(19): siRNA sense strand
caagucagcagaagaaauu

SEQ ID NO: 1698836 - RNA, 19 nt, Homo sapiens
  misc_RNA (1)...(19): siRNA sense strand
gaaagacuucuacaaauuc

SEQ ID NO: 1698837 - RNA, 19 nt, Homo sapiens
  misc_RNA (1)...(19): siRNA sense strand
gcucuuagauucugacagu

SEQ ID NO: 1698838 - RNA, 19 nt, Homo sapiens
  misc_RNA (1)...(19): siRNA sense strand
gagaagagaaucaaagaau

SEQ ID NO: 1698839 - RNA, 19 nt, Homo sapiens
  misc_RNA (1)...(19): siRNA sense strand
uagcaaacccagagaauuu

SEQ ID NO: 1698840 - RNA, 19 nt, Homo sapiens
  misc_RNA (1)...(19): siRNA sense strand
aggaagagcugaagagaga

SEQ ID NO: 1698841 - RNA, 19 nt, Homo sapiens
  misc_RNA (1)...(19): siRNA sense strand
gaaagcaauucaguuaauc

SEQ ID NO: 1698842 - RNA, 19 nt, Homo sapiens
  misc_RNA (1)...(19): siRNA sense strand
cagaugauauugguacuuu

SEQ ID NO: 1698843 - RNA, 19 nt, Homo sapiens
  misc_RNA (1)...(19): siRNA sense strand
ugagacauguucagcagua

SEQ ID NO: 1698844 - RNA, 19 nt, Homo sapiens
  misc_RNA (1)...(19): siRNA sense strand
cagcaaaccuuuacuucau

SEQ ID NO: 1698845 - RNA, 19 nt, Homo sapiens
  misc_RNA (1)...(19): siRNA sense strand
ggaaaggccuucgaucaag

SEQ ID NO: 1698846 - RNA, 19 nt, Homo sapiens
  misc_RNA (1)...(19): siRNA sense strand
caaagagucugacaguaca

SEQ ID NO: 1698847 - RNA, 19 nt, Homo sapiens
  misc_RNA (1)...(19): siRNA sense strand
ggacugaagcaaaugguaa

SEQ ID NO: 1698848 - RNA, 19 nt, Homo sapiens
  misc_RNA (1)...(19): siRNA sense strand
gaauuaaggguauaggaaa

SEQ ID NO: 1698849 - RNA, 19 nt, Homo sapiens
  misc_RNA (1)...(19): siRNA sense strand
guagauguggucaauguua

SEQ ID NO: 1698850 - RNA, 19 nt, Homo sapiens
  misc_RNA (1)...(19): siRNA sense strand
gaaacaggaagaagaagaa

SEQ ID NO: 1698851 - RNA, 19 nt, Homo sapiens
  misc_RNA (1)...(19): siRNA sense strand
gcacaugaagcaaauaaau

SEQ ID NO: 1698852 - RNA, 19 nt, Homo sapiens
  misc_RNA (1)...(19): siRNA sense strand
agaaugagacugagaauga

SEQ ID NO: 1698853 - RNA, 19 nt, Homo sapiens
  misc_RNA (1)...(19): siRNA sense strand
gaagaaauccaccgacaca

SEQ ID NO: 1698854 - RNA, 19 nt, Homo sapiens
  misc_RNA (1)...(19): siRNA sense strand
gaagaaggaccaagaugug

SEQ ID NO: 1698855 - RNA, 19 nt, Homo sapiens
  misc_RNA (1)...(19): siRNA sense strand
caaaggaaacuaagaagga

SEQ ID NO: 1698856 - RNA, 19 nt, Homo sapiens
  misc_RNA (1)...(19): siRNA sense strand
gaacaccugugaugguaca

SEQ ID NO: 1698857 - RNA, 19 nt, Homo sapiens
  misc_RNA (1)...(19): siRNA sense strand
ggaggaaccacaagcaauu

SEQ ID NO: 1698858 - RNA, 19 nt, Homo sapiens
  misc_RNA (1)...(19): siRNA sense strand
ggacagagaacaaguacau

SEQ ID NO: 1698859 - RNA, 19 nt, Homo sapiens
  misc_RNA (1)...(19): siRNA sense strand
gggcaaagagguacuggua

SEQ ID NO: 1698860 - RNA, 19 nt, Homo sapiens
  misc_RNA (1)...(19): siRNA sense strand
acaguaacauuccaacaaa

SEQ ID NO: 1698861 - RNA, 19 nt, Homo sapiens
  misc_RNA (1)...(19): siRNA sense strand
cgacagugauugcaacuuc

SEQ ID NO: 1698862 - RNA, 19 nt, Homo sapiens
  misc_RNA (1)...(19): siRNA sense strand
aagaagaacuggaauugug

SEQ ID NO: 1698863 - RNA, 19 nt, Homo sapiens
  misc_RNA (1)...(19): siRNA sense strand
gaaaggugaaugcuugaaa

SEQ ID NO: 1698864 - RNA, 19 nt, Homo sapiens
  misc_RNA (1)...(19): siRNA sense strand
gagaacaaguacauuucaa

SEQ ID NO: 1698865 - RNA, 19 nt, Homo sapiens
  misc_RNA (1)...(19): siRNA sense strand
ggaauuaaggguauaggaa

SEQ ID NO: 1698866 - RNA, 19 nt, Homo sapiens
  misc_RNA (1)...(19): siRNA sense strand
gaucaaggcaguucagaug

SEQ ID NO: 1698867 - RNA, 19 nt, Homo sapiens
  misc_RNA (1)...(19): siRNA sense strand
ccaaaguucuuaccauauc

SEQ ID NO: 1698868 - RNA, 19 nt, Homo sapiens
  misc_RNA (1)...(19): siRNA sense strand
gaucaaaguucuacaguuu

SEQ ID NO: 1698869 - RNA, 19 nt, Homo sapiens
  misc_RNA (1)...(19): siRNA sense strand
ggaaagacuucuacaaauu

SEQ ID NO: 1698870 - RNA, 19 nt, Homo sapiens
  misc_RNA (1)...(19): siRNA sense strand
gcacauaaguucugucuga

SEQ ID NO: 1698871 - RNA, 19 nt, Homo sapiens
  misc_RNA (1)...(19): siRNA sense strand
gaaggcaucuugcacauaa

SEQ ID NO: 1698872 - RNA, 19 nt, Homo sapiens
  misc_RNA (1)...(19): siRNA sense strand
caacaucccuucauccuuu

SEQ ID NO: 1698873 - RNA, 19 nt, Homo sapiens
  misc_RNA (1)...(19): siRNA sense strand
acacaaagcuuuacuguau

SEQ ID NO: 1698874 - RNA, 19 nt, Homo sapiens
  misc_RNA (1)...(19): siRNA sense strand
gaacagagcccaaaugcaa

SEQ ID NO: 1698875 - RNA, 19 nt, Homo sapiens
  misc_RNA (1)...(19): siRNA sense strand
ggacaaggaucugcaaauu

SEQ ID NO: 1698876 - RNA, 19 nt, Homo sapiens
  misc_RNA (1)...(19): siRNA sense strand
gagaaugacucuaaagaug

SEQ ID NO: 1698877 - RNA, 19 nt, Homo sapiens
  misc_RNA (1)...(19): siRNA sense strand
ggagagauguugguccuua

SEQ ID NO: 1698878 - RNA, 19 nt, Homo sapiens
  misc_RNA (1)...(19): siRNA sense strand
gaagaggaaucuaaucuca

SEQ ID NO: 1698879 - RNA, 19 nt, Homo sapiens
  misc_RNA (1)...(19): siRNA sense strand
gcuauaaggccauucauua

SEQ ID NO: 1698880 - RNA, 19 nt, Homo sapiens
  misc_RNA (1)...(19): siRNA sense strand
gcagguacaucaagacaaa

SEQ ID NO: 1698881 - RNA, 19 nt, Homo sapiens
  misc_RNA (1)...(19): siRNA sense strand
gaacuuucaucaaaccuuu

SEQ ID NO: 1698882 - RNA, 19 nt, Homo sapiens
  misc_RNA (1)...(19): siRNA sense strand
gguuggagcuggauuagua

SEQ ID NO: 1698883 - RNA, 19 nt, Homo sapiens
  misc_RNA (1)...(19): siRNA sense strand
ugaaggagcucuuagauuc

SEQ ID NO: 1698884 - RNA, 19 nt, Homo sapiens
  misc_RNA (1)...(19): siRNA sense strand
gaaagugacaccauuguuu

SEQ ID NO: 1698885 - RNA, 19 nt, Homo sapiens
  misc_RNA (1)...(19): siRNA sense strand
gaaccgaagacucauaaua

SEQ ID NO: 1698886 - RNA, 19 nt, Homo sapiens
  misc_RNA (1)...(19): siRNA sense strand
guacagcucugccauccua

SEQ ID NO: 1698887 - RNA, 19 nt, Homo sapiens
  misc_RNA (1)...(19): siRNA sense strand
gguagaagauauggaaaua

SEQ ID NO: 1698888 - RNA, 19 nt, Homo sapiens
  misc_RNA (1)...(19): siRNA sense strand
cugaagaccugaccaauaa

SEQ ID NO: 1698889 - RNA, 19 nt, Homo sapiens
  misc_RNA (1)...(19): siRNA sense strand
uaacagagaaggauuauga

SEQ ID NO: 1698890 - RNA, 19 nt, Homo sapiens
  misc_RNA (1)...(19): siRNA sense strand
guaaccaggugaugaagua

SEQ ID NO: 1698891 - RNA, 19 nt, Homo sapiens
  misc_RNA (1)...(19): siRNA sense strand
guucagcgauuccucuuua

SEQ ID NO: 1698892 - RNA, 19 nt, Homo sapiens
  misc_RNA (1)...(19): siRNA sense strand
ccagaaagcaauucaguua

SEQ ID NO: 1698893 - RNA, 19 nt, Homo sapiens
  misc_RNA (1)...(19): siRNA sense strand
ccacauacaucucuucaga

SEQ ID NO: 1698894 - RNA, 19 nt, Homo sapiens
  misc_RNA (1)...(19): siRNA sense strand
gguccaacuugcagaauua

SEQ ID NO: 1698895 - RNA, 19 nt, Homo sapiens
  misc_RNA (1)...(19): siRNA sense strand
acaaggaucugcaaauuga

SEQ ID NO: 1698896 - RNA, 19 nt, Homo sapiens
  misc_RNA (1)...(19): siRNA sense strand
uaaagaaucugcuauaagg

SEQ ID NO: 1698897 - RNA, 19 nt, Homo sapiens
  misc_RNA (1)...(19): siRNA sense strand
gaagaccagucccuugaaa

SEQ ID NO: 1698898 - RNA, 19 nt, Homo sapiens
  misc_RNA (1)...(19): siRNA sense strand
guacaaagacgauauuaug

SEQ ID NO: 1698899 - RNA, 19 nt, Homo sapiens
  misc_RNA (1)...(19): siRNA sense strand
gaaagaaacagcuccgaaa

SEQ ID NO: 1698900 - RNA, 19 nt, Homo sapiens
  misc_RNA (1)...(19): siRNA sense strand
ggagagaccaguuaauaaa

SEQ ID NO: 1698901 - RNA, 19 nt, Homo sapiens
  misc_RNA (1)...(19): siRNA sense strand
caagagugcuuuacauuca

SEQ ID NO: 1698902 - RNA, 19 nt, Homo sapiens
  misc_RNA (1)...(19): siRNA sense strand
ggagaaauuucacgguuga

SEQ ID NO: 1698903 - RNA, 19 nt, Homo sapiens
  misc_RNA (1)...(19): siRNA sense strand
gaagaaacaggaagaagaa

SEQ ID NO: 1698904 - RNA, 19 nt, Homo sapiens
  misc_RNA (1)...(19): siRNA sense strand
caagagcaauggacuuuga

SEQ ID NO: 1698905 - RNA, 19 nt, Homo sapiens
  misc_RNA (1)...(19): siRNA sense strand
gagccgagauccugaagaa

SEQ ID NO: 1698906 - RNA, 19 nt, Homo sapiens
  misc_RNA (1)...(19): siRNA sense strand
gaagagaaucaaagaauga

SEQ ID NO: 1698907 - RNA, 19 nt, Homo sapiens
  misc_RNA (1)...(19): siRNA sense strand
caaacuggcccuguuauua

SEQ ID NO: 1698908 - RNA, 19 nt, Homo sapiens
  misc_RNA (1)...(19): siRNA sense strand
ggugaaugcuugaaagaaa

SEQ ID NO: 1698909 - RNA, 19 nt, Homo sapiens
  misc_RNA (1)...(19): siRNA sense strand
gagaggaauugaugucuga

SEQ ID NO: 1698910 - RNA, 19 nt, Homo sapiens
  misc_RNA (1)...(19): siRNA sense strand
gaggagagaccaguuaaua

SEQ ID NO: 1698911 - RNA, 19 nt, Homo sapiens
  misc_RNA (1)...(19): siRNA sense strand
ggaggaaagugacaccauu

SEQ ID NO: 1698912 - RNA, 19 nt, Homo sapiens
  misc_RNA (1)...(19): siRNA sense strand
gaaagugauuccucaguuc

SEQ ID NO: 1698913 - RNA, 19 nt, Homo sapiens
  misc_RNA (1)...(19): siRNA sense strand
gcaauggacuuugaaggaa

SEQ ID NO: 1698914 - RNA, 19 nt, Homo sapiens
  misc_RNA (1)...(19): siRNA sense strand
gcacacugguuacaucuau

SEQ ID NO: 1698915 - RNA, 19 nt, Homo sapiens
  misc_RNA (1)...(19): siRNA sense strand
auagaaaccucagaaguua

SEQ ID NO: 1698916 - RNA, 19 nt, Homo sapiens
  misc_RNA (1)...(19): siRNA sense strand
gcaaagagguacugguagu

SEQ ID NO: 1698917 - RNA, 19 nt, Homo sapiens
  misc_RNA (1)...(19): siRNA sense strand
gagcaugacuccagcugaa

SEQ ID NO: 1698918 - RNA, 19 nt, Homo sapiens
  misc_RNA (1)...(19): siRNA sense strand
caaacuagauggacuucuu

SEQ ID NO: 1698919 - RNA, 19 nt, Homo sapiens
  misc_RNA (1)...(19): siRNA sense strand
ggaaguagacgaugacaug

SEQ ID NO: 1698920 - RNA, 19 nt, Homo sapiens
  misc_RNA (1)...(19): siRNA sense strand
gaagugaucaugaaaggaa

SEQ ID NO: 1698921 - RNA, 19 nt, Homo sapiens
  misc_RNA (1)...(19): siRNA sense strand
gacaugaaccuauuggaua

SEQ ID NO: 1698922 - RNA, 19 nt, Homo sapiens
  misc_RNA (1)...(19): siRNA sense strand
gaaccuauuggauaugaua

SEQ ID NO: 1698923 - RNA, 19 nt, Homo sapiens
  misc_RNA (1)...(19): siRNA sense strand
gaacaaaggcagaguaaac

SEQ ID NO: 1698924 - RNA, 19 nt, Homo sapiens
  misc_RNA (1)...(19): siRNA sense strand
gaaaggagaauuaaacagu

SEQ ID NO: 1698925 - RNA, 19 nt, Homo sapiens
  misc_RNA (1)...(19): siRNA sense strand
gaagaaaugcgugaagaaa

SEQ ID NO: 1698926 - RNA, 19 nt, Homo sapiens
  misc_RNA (1)...(19): siRNA sense strand
gcagaggacuacccauaug

SEQ ID NO: 1698927 - RNA, 19 nt, Homo sapiens
  misc_RNA (1)...(19): siRNA sense strand
guccaaaguucuuaccaua

SEQ ID NO: 1698928 - RNA, 19 nt, Homo sapiens
  misc_RNA (1)...(19): siRNA sense strand
cacaagcaauucacaagua

SEQ ID NO: 1698929 - RNA, 19 nt, Homo sapiens
  misc_RNA (1)...(19): siRNA sense strand
gaaaucacaacaacagaaa

SEQ ID NO: 1698930 - RNA, 19 nt, Homo sapiens
  misc_RNA (1)...(19): siRNA sense strand
ggaaauagaaaccucagaa

SEQ ID NO: 1698931 - RNA, 19 nt, Homo sapiens
  misc_RNA (1)...(19): siRNA sense strand
ugacaucaauugaaagaga

SEQ ID NO: 1698932 - RNA, 19 nt, Homo sapiens
  misc_RNA (1)...(19): siRNA sense strand
aaauagagccugauucuga

SEQ ID NO: 1698933 - RNA, 19 nt, Homo sapiens
  misc_RNA (1)...(19): siRNA sense strand
ggaagaaagaguacaaaga

SEQ ID NO: 1698934 - RNA, 19 nt, Homo sapiens
  misc_RNA (1)...(19): siRNA sense strand
gcaagcagaaugccacuaa

SEQ ID NO: 1698935 - RNA, 19 nt, Homo sapiens
  misc_RNA (1)...(19): siRNA sense strand
caagucagcagaagaaauu

SEQ ID NO: 1698936 - RNA, 19 nt, Homo sapiens
  misc_RNA (1)...(19): siRNA sense strand
gaaagacuucuacaaauuc

SEQ ID NO: 1698937 - RNA, 19 nt, Homo sapiens
  misc_RNA (1)...(19): siRNA sense strand
gcucuuagauucugacagu

SEQ ID NO: 1698938 - RNA, 19 nt, Homo sapiens
  misc_RNA (1)...(19): siRNA sense strand
gagaagagaaucaaagaau

SEQ ID NO: 1698939 - RNA, 19 nt, Homo sapiens
  misc_RNA (1)...(19): siRNA sense strand
uagcaaacccagagaauuu

SEQ ID NO: 1698940 - RNA, 19 nt, Homo sapiens
  misc_RNA (1)...(19): siRNA sense strand
aggaagagcugaagagaga

SEQ ID NO: 1698941 - RNA, 19 nt, Homo sapiens
  misc_RNA (1)...(19): siRNA sense strand
gaaagcaauucaguuaauc

SEQ ID NO: 1698942 - RNA, 19 nt, Homo sapiens
  misc_RNA (1)...(19): siRNA sense strand
cagaugauauugguacuuu

SEQ ID NO: 1698943 - RNA, 19 nt, Homo sapiens
  misc_RNA (1)...(19): siRNA sense strand
ugagacauguucagcagua

SEQ ID NO: 1698944 - RNA, 19 nt, Homo sapiens
  misc_RNA (1)...(19): siRNA sense strand
cagcaaaccuuuacuucau

SEQ ID NO: 1698945 - RNA, 19 nt, Homo sapiens
  misc_RNA (1)...(19): siRNA sense strand
ggaaaggccuucgaucaag

SEQ ID NO: 1698946 - RNA, 19 nt, Homo sapiens
  misc_RNA (1)...(19): siRNA sense strand
caaagagucugacaguaca

SEQ ID NO: 1698947 - RNA, 19 nt, Homo sapiens
  misc_RNA (1)...(19): siRNA sense strand
ggacugaagcaaaugguaa

SEQ ID NO: 1698948 - RNA, 19 nt, Homo sapiens
  misc_RNA (1)...(19): siRNA sense strand
gaauuaaggguauaggaaa

SEQ ID NO: 1698949 - RNA, 19 nt, Homo sapiens
  misc_RNA (1)...(19): siRNA sense strand
guagauguggucaauguua

SEQ ID NO: 1698950 - RNA, 19 nt, Homo sapiens
  misc_RNA (1)...(19): siRNA sense strand
gaaacaggaagaagaagaa

SEQ ID NO: 1698951 - RNA, 19 nt, Homo sapiens
  misc_RNA (1)...(19): siRNA sense strand
gcacaugaagcaaauaaau

SEQ ID NO: 1698952 - RNA, 19 nt, Homo sapiens
  misc_RNA (1)...(19): siRNA sense strand
agaaugagacugagaauga

SEQ ID NO: 1698953 - RNA, 19 nt, Homo sapiens
  misc_RNA (1)...(19): siRNA sense strand
gaagaaauccaccgacaca

SEQ ID NO: 1698954 - RNA, 19 nt, Homo sapiens
  misc_RNA (1)...(19): siRNA sense strand
gaagaaggaccaagaugug

SEQ ID NO: 1698955 - RNA, 19 nt, Homo sapiens
  misc_RNA (1)...(19): siRNA sense strand
caaaggaaacuaagaagga

SEQ ID NO: 1698956 - RNA, 19 nt, Homo sapiens
  misc_RNA (1)...(19): siRNA sense strand
gaacaccugugaugguaca

SEQ ID NO: 1698957 - RNA, 19 nt, Homo sapiens
  misc_RNA (1)...(19): siRNA sense strand
ggaggaaccacaagcaauu

SEQ ID NO: 1698958 - RNA, 19 nt, Homo sapiens
  misc_RNA (1)...(19): siRNA sense strand
ggacagagaacaaguacau

SEQ ID NO: 1698959 - RNA, 19 nt, Homo sapiens
  misc_RNA (1)...(19): siRNA sense strand
gggcaaagagguacuggua

SEQ ID NO: 1698960 - RNA, 19 nt, Homo sapiens
  misc_RNA (1)...(19): siRNA sense strand
acaguaacauuccaacaaa

SEQ ID NO: 1698961 - RNA, 19 nt, Homo sapiens
  misc_RNA (1)...(19): siRNA sense strand
cgacagugauugcaacuuc

SEQ ID NO: 1698962 - RNA, 19 nt, Homo sapiens
  misc_RNA (1)...(19): siRNA sense strand
aagaagaacuggaauugug

SEQ ID NO: 1698963 - RNA, 19 nt, Homo sapiens
  misc_RNA (1)...(19): siRNA sense strand
gaaaggugaaugcuugaaa

SEQ ID NO: 1698964 - RNA, 19 nt, Homo sapiens
  misc_RNA (1)...(19): siRNA sense strand
gagaacaaguacauuucaa

SEQ ID NO: 1698965 - RNA, 19 nt, Homo sapiens
  misc_RNA (1)...(19): siRNA sense strand
ggaauuaaggguauaggaa

SEQ ID NO: 1698966 - RNA, 19 nt, Homo sapiens
  misc_RNA (1)...(19): siRNA sense strand
gaucaaggcaguucagaug

SEQ ID NO: 1698967 - RNA, 19 nt, Homo sapiens
  misc_RNA (1)...(19): siRNA sense strand
ccaaaguucuuaccauauc

SEQ ID NO: 1698968 - RNA, 19 nt, Homo sapiens
  misc_RNA (1)...(19): siRNA sense strand
gaagaucgcucugaauuug

SEQ ID NO: 1698969 - RNA, 19 nt, Homo sapiens
  misc_RNA (1)...(19): siRNA sense strand
gagaagaucgcucugaauu

SEQ ID NO: 1698970 - RNA, 19 nt, Homo sapiens
  misc_RNA (1)...(19): siRNA sense strand
guagguaucggcacaacua

SEQ ID NO: 1698971 - RNA, 19 nt, Homo sapiens
  misc_RNA (1)...(19): siRNA sense strand
cgagggacauguguaggua

SEQ ID NO: 1698972 - RNA, 19 nt, Homo sapiens
  misc_RNA (1)...(19): siRNA sense strand
gaaaugagauccgcuuccu

SEQ ID NO: 1698973 - RNA, 19 nt, Homo sapiens
  misc_RNA (1)...(19): siRNA sense strand
gagcacagaacuaccagaa

SEQ ID NO: 1698974 - RNA, 19 nt, Homo sapiens
  misc_RNA (1)...(19): siRNA sense strand
cccaacggcuguuucauug

SEQ ID NO: 1698975 - RNA, 19 nt, Homo sapiens
  misc_RNA (1)...(19): siRNA sense strand
gcacaacuauccggaucug

SEQ ID NO: 1698976 - RNA, 19 nt, Homo sapiens
  misc_RNA (1)...(19): siRNA sense strand
caacggcuguuucauugag

SEQ ID NO: 1698977 - RNA, 19 nt, Homo sapiens
  misc_RNA (1)...(19): siRNA sense strand
ucagggaggucgagguguu

SEQ ID NO: 1698978 - RNA, 19 nt, Homo sapiens
  misc_RNA (1)...(19): siRNA sense strand
ccaaagagagcaagaagag

SEQ ID NO: 1698979 - RNA, 19 nt, Homo sapiens
  misc_RNA (1)...(19): siRNA sense strand
acgcagagguggagucuuc

SEQ ID NO: 1698980 - RNA, 19 nt, Homo sapiens
  misc_RNA (1)...(19): siRNA sense strand
gcccaacggcuguuucauu

SEQ ID NO: 1698981 - RNA, 19 nt, Homo sapiens
  misc_RNA (1)...(19): siRNA sense strand
ccaagucugggaagccuua

SEQ ID NO: 1698982 - RNA, 19 nt, Homo sapiens
  misc_RNA (1)...(19): siRNA sense strand
uggagaagaucgcucugaa

SEQ ID NO: 1698983 - RNA, 19 nt, Homo sapiens
  misc_RNA (1)...(19): siRNA sense strand
agagugcccuggacuacuu

SEQ ID NO: 1698984 - RNA, 19 nt, Homo sapiens
  misc_RNA (1)...(19): siRNA sense strand
ggacaaucacuccuacauc

SEQ ID NO: 1698985 - RNA, 19 nt, Homo sapiens
  misc_RNA (1)...(19): siRNA sense strand
gaaugacaggguccagaaa

SEQ ID NO: 1698986 - RNA, 19 nt, Homo sapiens
  misc_RNA (1)...(19): siRNA sense strand
ggagaagaucgcucugaau

SEQ ID NO: 1698987 - RNA, 19 nt, Homo sapiens
  misc_RNA (1)...(19): siRNA sense strand
gcccuggacuacuucaugu

SEQ ID NO: 1698988 - RNA, 19 nt, Homo sapiens
  misc_RNA (1)...(19): siRNA sense strand
ggaggucgagguguuuaaa

SEQ ID NO: 1698989 - RNA, 19 nt, Homo sapiens
  misc_RNA (1)...(19): siRNA sense strand
ggagucuucugccaagucu

SEQ ID NO: 1698990 - RNA, 19 nt, Homo sapiens
  misc_RNA (1)...(19): siRNA sense strand
agaagaucgcucugaauuu

SEQ ID NO: 1698991 - RNA, 19 nt, Homo sapiens
  misc_RNA (1)...(19): siRNA sense strand
ucacacgcauccucaaguc

SEQ ID NO: 1698992 - RNA, 19 nt, Homo sapiens
  misc_RNA (1)...(19): siRNA sense strand
aagacaagcugcggagguu

SEQ ID NO: 1698993 - RNA, 19 nt, Homo sapiens
  misc_RNA (1)...(19): siRNA sense strand
gaagguggaggaggaagga

SEQ ID NO: 1698994 - RNA, 19 nt, Homo sapiens
  misc_RNA (1)...(19): siRNA sense strand
caacaaccuccgcaucaca

SEQ ID NO: 1698995 - RNA, 19 nt, Homo sapiens
  misc_RNA (1)...(19): siRNA sense strand
cacaacaaccuccgcauca

SEQ ID NO: 1698996 - RNA, 19 nt, Homo sapiens
  misc_RNA (1)...(19): siRNA sense strand
gcuguuuccucugcgagaa

SEQ ID NO: 1698997 - RNA, 19 nt, Homo sapiens
  misc_RNA (1)...(19): siRNA sense strand
ccacgagggacauguguag

SEQ ID NO: 1698998 - RNA, 19 nt, Homo sapiens
  misc_RNA (1)...(19): siRNA sense strand
agaaugacaggguccagaa

SEQ ID NO: 1698999 - RNA, 19 nt, Homo sapiens
  misc_RNA (1)...(19): siRNA sense strand
gcagagugcccuggacuac

SEQ ID NO: 1699000 - RNA, 19 nt, Homo sapiens
  misc_RNA (1)...(19): siRNA sense strand
ggacacgccaaaccugagu

SEQ ID NO: 1699001 - RNA, 19 nt, Homo sapiens
  misc_RNA (1)...(19): siRNA sense strand
gacaagcugcggagguuca

SEQ ID NO: 1699002 - RNA, 19 nt, Homo sapiens
  misc_RNA (1)...(19): siRNA sense strand
caacuaugaccuccuugag

SEQ ID NO: 1699003 - RNA, 19 nt, Homo sapiens
  misc_RNA (1)...(19): siRNA sense strand
gauaggccggagcccuuaa

SEQ ID NO: 1699004 - RNA, 19 nt, Homo sapiens
  misc_RNA (1)...(19): siRNA sense strand
cuacauccaguggcuguuu

SEQ ID NO: 1699005 - RNA, 19 nt, Homo sapiens
  misc_RNA (1)...(19): siRNA sense strand
gcgagaaccaggagugaac

SEQ ID NO: 1699006 - RNA, 19 nt, Homo sapiens
  misc_RNA (1)...(19): siRNA sense strand
agaucgcucugaauuugga

SEQ ID NO: 1699007 - RNA, 19 nt, Homo sapiens
  misc_RNA (1)...(19): siRNA sense strand
gggaggucgagguguuuaa

SEQ ID NO: 1699008 - RNA, 19 nt, Homo sapiens
  misc_RNA (1)...(19): siRNA sense strand
ccaaggcuggacacaguga

SEQ ID NO: 1699009 - RNA, 19 nt, Homo sapiens
  misc_RNA (1)...(19): siRNA sense strand
ggguugaggaggacacaga

SEQ ID NO: 1699010 - RNA, 19 nt, Homo sapiens
  misc_RNA (1)...(19): siRNA sense strand
ucauugaggacauucuuca

SEQ ID NO: 1699011 - RNA, 19 nt, Homo sapiens
  misc_RNA (1)...(19): siRNA sense strand
ggaggaggacgaggaggau

SEQ ID NO: 1699012 - RNA, 19 nt, Homo sapiens
  misc_RNA (1)...(19): siRNA sense strand
gaucggaccuccagaaaua

SEQ ID NO: 1699013 - RNA, 19 nt, Homo sapiens
  misc_RNA (1)...(19): siRNA sense strand
gaacucagcucagaagauu

SEQ ID NO: 1699014 - RNA, 19 nt, Homo sapiens
  misc_RNA (1)...(19): siRNA sense strand
gcaagaggcacaaauguua

SEQ ID NO: 1699015 - RNA, 19 nt, Homo sapiens
  misc_RNA (1)...(19): siRNA sense strand
ggaaagauguuaccuucaa

SEQ ID NO: 1699016 - RNA, 19 nt, Homo sapiens
  misc_RNA (1)...(19): siRNA sense strand
gagcaucaguuuacaaaga

SEQ ID NO: 1699017 - RNA, 19 nt, Homo sapiens
  misc_RNA (1)...(19): siRNA sense strand
gaaacaaguuauaccauuc

SEQ ID NO: 1699018 - RNA, 19 nt, Homo sapiens
  misc_RNA (1)...(19): siRNA sense strand
ugaagaaucuggcuauguu

SEQ ID NO: 1699019 - RNA, 19 nt, Homo sapiens
  misc_RNA (1)...(19): siRNA sense strand
gcaggugugagaauaauua

SEQ ID NO: 1699020 - RNA, 19 nt, Homo sapiens
  misc_RNA (1)...(19): siRNA sense strand
gaaauagcaucucuuuguc

SEQ ID NO: 1699021 - RNA, 19 nt, Homo sapiens
  misc_RNA (1)...(19): siRNA sense strand
aaauguggguggaauauaa

SEQ ID NO: 1699022 - RNA, 19 nt, Homo sapiens
  misc_RNA (1)...(19): siRNA sense strand
gcacaaauguuaccaucag

SEQ ID NO: 1699023 - RNA, 19 nt, Homo sapiens
  misc_RNA (1)...(19): siRNA sense strand
ccucaagccugacacuaua

SEQ ID NO: 1699024 - RNA, 19 nt, Homo sapiens
  misc_RNA (1)...(19): siRNA sense strand
uaacuacaccuuugagauu

SEQ ID NO: 1699025 - RNA, 19 nt, Homo sapiens
  misc_RNA (1)...(19): siRNA sense strand
ucaggaagaugguucaaug

SEQ ID NO: 1699026 - RNA, 19 nt, Homo sapiens
  misc_RNA (1)...(19): siRNA sense strand
acaauuggcugagaacaaa

SEQ ID NO: 1699027 - RNA, 19 nt, Homo sapiens
  misc_RNA (1)...(19): siRNA sense strand
gagcugggcuggaucucuu

SEQ ID NO: 1699028 - RNA, 19 nt, Homo sapiens
  misc_RNA (1)...(19): siRNA sense strand
gaacauuacacacccauca

SEQ ID NO: 1699029 - RNA, 19 nt, Homo sapiens
  misc_RNA (1)...(19): siRNA sense strand
gaacuugcaaggagacauu

SEQ ID NO: 1699030 - RNA, 19 nt, Homo sapiens
  misc_RNA (1)...(19): siRNA sense strand
gcaagaaccugaacauccu

SEQ ID NO: 1699031 - RNA, 19 nt, Homo sapiens
  misc_RNA (1)...(19): siRNA sense strand
gaggucaaauacuaugaaa

SEQ ID NO: 1699032 - RNA, 19 nt, Homo sapiens
  misc_RNA (1)...(19): siRNA sense strand
ccagaaauagcaucucuuu

SEQ ID NO: 1699033 - RNA, 19 nt, Homo sapiens
  misc_RNA (1)...(19): siRNA sense strand
agaaauagcaucucuuugu

SEQ ID NO: 1699034 - RNA, 19 nt, Homo sapiens
  misc_RNA (1)...(19): siRNA sense strand
gagagcaucaguuuacaaa

SEQ ID NO: 1699035 - RNA, 19 nt, Homo sapiens
  misc_RNA (1)...(19): siRNA sense strand
uuacaaagauugacaccau

SEQ ID NO: 1699036 - RNA, 19 nt, Homo sapiens
  misc_RNA (1)...(19): siRNA sense strand
ggacuuaccaggugugcaa

SEQ ID NO: 1699037 - RNA, 19 nt, Homo sapiens
  misc_RNA (1)...(19): siRNA sense strand
ucaccuguccugacgauua

SEQ ID NO: 1699038 - RNA, 19 nt, Homo sapiens
  misc_RNA (1)...(19): siRNA sense strand
caacaauucuaaggaggaa

SEQ ID NO: 1699039 - RNA, 19 nt, Homo sapiens
  misc_RNA (1)...(19): siRNA sense strand
cuaaugggaucauauugga

SEQ ID NO: 1699040 - RNA, 19 nt, Homo sapiens
  misc_RNA (1)...(19): siRNA sense strand
ggcauuggaugguaauaug

SEQ ID NO: 1699041 - RNA, 19 nt, Homo sapiens
  misc_RNA (1)...(19): siRNA sense strand
gaagaaagagguuuuaugu

SEQ ID NO: 1699042 - RNA, 19 nt, Homo sapiens
  misc_RNA (1)...(19): siRNA sense strand
cauacuaacuacaccuuug

SEQ ID NO: 1699043 - RNA, 19 nt, Homo sapiens
  misc_RNA (1)...(19): siRNA sense strand
gaucagugguguggaugaa

SEQ ID NO: 1699044 - RNA, 19 nt, Homo sapiens
  misc_RNA (1)...(19): siRNA sense strand
ggacacaggaggccggaaa

SEQ ID NO: 1699045 - RNA, 19 nt, Homo sapiens
  misc_RNA (1)...(19): siRNA sense strand
acacacccaucaggacuua

SEQ ID NO: 1699046 - RNA, 19 nt, Homo sapiens
  misc_RNA (1)...(19): siRNA sense strand
gagcucaaguucacucuac

SEQ ID NO: 1699047 - RNA, 19 nt, Homo sapiens
  misc_RNA (1)...(19): siRNA sense strand
gaagaaucuggcuauguuu

SEQ ID NO: 1699048 - RNA, 19 nt, Homo sapiens
  misc_RNA (1)...(19): siRNA sense strand
acuacgaggucaaauacua

SEQ ID NO: 1699049 - RNA, 19 nt, Homo sapiens
  misc_RNA (1)...(19): siRNA sense strand
ucacaguucuacucaggaa

SEQ ID NO: 1699050 - RNA, 19 nt, Homo sapiens
  misc_RNA (1)...(19): siRNA sense strand
guuagagggucuuguguca

SEQ ID NO: 1699051 - RNA, 19 nt, Homo sapiens
  misc_RNA (1)...(19): siRNA sense strand
ucacaugggugggaagaga

SEQ ID NO: 1699052 - RNA, 19 nt, Homo sapiens
  misc_RNA (1)...(19): siRNA sense strand
uaaacgagaccucaguuau

SEQ ID NO: 1699053 - RNA, 19 nt, Homo sapiens
  misc_RNA (1)...(19): siRNA sense strand
ggacuacgaggucaaauac

SEQ ID NO: 1699054 - RNA, 19 nt, Homo sapiens
  misc_RNA (1)...(19): siRNA sense strand
gaaccugaacauccuaaug

SEQ ID NO: 1699055 - RNA, 19 nt, Homo sapiens
  misc_RNA (1)...(19): siRNA sense strand
cuacgagacugcaauagca

SEQ ID NO: 1699056 - RNA, 19 nt, Homo sapiens
  misc_RNA (1)...(19): siRNA sense strand
caccuguccugacgauuaa

SEQ ID NO: 1699057 - RNA, 19 nt, Homo sapiens
  misc_RNA (1)...(19): siRNA sense strand
uaaucaggcugcuccauca

SEQ ID NO: 1699058 - RNA, 19 nt, Homo sapiens
  misc_RNA (1)...(19): siRNA sense strand
gaacugcaggugugagaau

SEQ ID NO: 1699059 - RNA, 19 nt, Homo sapiens
  misc_RNA (1)...(19): siRNA sense strand
gaaggcgaauggcuuguac

SEQ ID NO: 1699060 - RNA, 19 nt, Homo sapiens
  misc_RNA (1)...(19): siRNA sense strand
cauugcagcugaugaaagu

SEQ ID NO: 1699061 - RNA, 19 nt, Homo sapiens
  misc_RNA (1)...(19): siRNA sense strand
ggaacaagaaacaaguuau

SEQ ID NO: 1699062 - RNA, 19 nt, Homo sapiens
  misc_RNA (1)...(19): siRNA sense strand
ugagauugaugccguuaau

SEQ ID NO: 1699063 - RNA, 19 nt, Homo sapiens
  misc_RNA (1)...(19): siRNA sense strand
gaaagauguuaccuucaac

SEQ ID NO: 1699064 - RNA, 19 nt, Homo sapiens
  misc_RNA (1)...(19): siRNA sense strand
ccaaugaagucaaucuacu

SEQ ID NO: 1699065 - RNA, 19 nt, Homo sapiens
  misc_RNA (1)...(19): siRNA sense strand
acucagcucagaagauuua

SEQ ID NO: 1699066 - RNA, 19 nt, Homo sapiens
  misc_RNA (1)...(19): siRNA sense strand
ugaagucaaucuacuggau

SEQ ID NO: 1699067 - RNA, 19 nt, Homo sapiens
  misc_RNA (1)...(19): siRNA sense strand
acaaggcauuggaugguaa

SEQ ID NO: 1699068 - RNA, 19 nt, Homo sapiens
  misc_RNA (1)...(19): siRNA sense strand
gcaaugcuggcuaugaaga

SEQ ID NO: 1699069 - RNA, 19 nt, Homo sapiens
  misc_RNA (1)...(19): siRNA sense strand
agaaguagguccugucaac

SEQ ID NO: 1699070 - RNA, 19 nt, Homo sapiens
  misc_RNA (1)...(19): siRNA sense strand
acacugagauuagagaagu

SEQ ID NO: 1699071 - RNA, 19 nt, Homo sapiens
  misc_RNA (1)...(19): siRNA sense strand
cuucucagcugcucuguuc

SEQ ID NO: 1699072 - RNA, 19 nt, Homo sapiens
  misc_RNA (1)...(19): siRNA sense strand
gcggucagcaucacaacua

SEQ ID NO: 1699073 - RNA, 19 nt, Homo sapiens
  misc_RNA (1)...(19): siRNA sense strand
ggugugagaauaauuacuu

SEQ ID NO: 1699074 - RNA, 19 nt, Homo sapiens
  misc_RNA (1)...(19): siRNA sense strand
cugcaaugcuggcuaugaa

SEQ ID NO: 1699075 - RNA, 19 nt, Homo sapiens
  misc_RNA (1)...(19): siRNA sense strand
gguaauaugaagugugcua

SEQ ID NO: 1699076 - RNA, 19 nt, Homo sapiens
  misc_RNA (1)...(19): siRNA sense strand
gacgaacagccgcaaguuu

SEQ ID NO: 1699077 - RNA, 19 nt, Homo sapiens
  misc_RNA (1)...(19): siRNA sense strand
gccgcaaguuugaguuuga

SEQ ID NO: 1699078 - RNA, 19 nt, Homo sapiens
  misc_RNA (1)...(19): siRNA sense strand
cauggagucugaugaugau

SEQ ID NO: 1699079 - RNA, 19 nt, Homo sapiens
  misc_RNA (1)...(19): siRNA sense strand
caaaacaauuggcugagaa

SEQ ID NO: 1699080 - RNA, 19 nt, Homo sapiens
  misc_RNA (1)...(19): siRNA sense strand
ggacgaacagccgcaaguu

SEQ ID NO: 1699081 - RNA, 19 nt, Homo sapiens
  misc_RNA (1)...(19): siRNA sense strand
gccugacacuauauacgua

SEQ ID NO: 1699082 - RNA, 19 nt, Homo sapiens
  misc_RNA (1)...(19): siRNA sense strand
ggcaagaggcacaaauguu

SEQ ID NO: 1699083 - RNA, 19 nt, Homo sapiens
  misc_RNA (1)...(19): siRNA sense strand
caagaaacaaguuauacca

SEQ ID NO: 1699084 - RNA, 19 nt, Homo sapiens
  misc_RNA (1)...(19): siRNA sense strand
ggugaaauuucgagagcau

SEQ ID NO: 1699085 - RNA, 19 nt, Homo sapiens
  misc_RNA (1)...(19): siRNA sense strand
gcaucaguuuacaaagauu

SEQ ID NO: 1699086 - RNA, 19 nt, Homo sapiens
  misc_RNA (1)...(19): siRNA sense strand
ggaacucagcucagaagau

SEQ ID NO: 1699087 - RNA, 19 nt, Homo sapiens
  misc_RNA (1)...(19): siRNA sense strand
gcaggaacaagaaacaagu

SEQ ID NO: 1699088 - RNA, 19 nt, Homo sapiens
  misc_RNA (1)...(19): siRNA sense strand
cuuccucccucgacaguuu

SEQ ID NO: 1699089 - RNA, 19 nt, Homo sapiens
  misc_RNA (1)...(19): siRNA sense strand
aaacgagaccucaguuauc

SEQ ID NO: 1699090 - RNA, 19 nt, Homo sapiens
  misc_RNA (1)...(19): siRNA sense strand
uacaaagauugacaccauu

SEQ ID NO: 1699091 - RNA, 19 nt, Homo sapiens
  misc_RNA (1)...(19): siRNA sense strand
cgaccuccaucuucaccaa

SEQ ID NO: 1699092 - RNA, 19 nt, Homo sapiens
  misc_RNA (1)...(19): siRNA sense strand
gcauuggaugguaauauga

SEQ ID NO: 1699093 - RNA, 19 nt, Homo sapiens
  misc_RNA (1)...(19): siRNA sense strand
uacaaggcauuggauggua

SEQ ID NO: 1699094 - RNA, 19 nt, Homo sapiens
  misc_RNA (1)...(19): siRNA sense strand
cagcucagaagauuuaugu

SEQ ID NO: 1699095 - RNA, 19 nt, Homo sapiens
  misc_RNA (1)...(19): siRNA sense strand
uaccaggugugcaauguca

SEQ ID NO: 1699096 - RNA, 19 nt, Homo sapiens
  misc_RNA (1)...(19): siRNA sense strand
caaauguuaccaucaguag

SEQ ID NO: 1699097 - RNA, 19 nt, Homo sapiens
  misc_RNA (1)...(19): siRNA sense strand
ccaagaaauguuaucucua

SEQ ID NO: 1699098 - RNA, 19 nt, Homo sapiens
  misc_RNA (1)...(19): siRNA sense strand
acaaagacccuccauccau

SEQ ID NO: 1699099 - RNA, 19 nt, Homo sapiens
  misc_RNA (1)...(19): siRNA sense strand
ggcaaguguuccugcaaug

SEQ ID NO: 1699100 - RNA, 19 nt, Homo sapiens
  misc_RNA (1)...(19): siRNA sense strand
gcaaggagacauucaaccu

SEQ ID NO: 1699101 - RNA, 19 nt, Homo sapiens
  misc_RNA (1)...(19): siRNA sense strand
gagguuagagggucuugug

SEQ ID NO: 1699102 - RNA, 19 nt, Homo sapiens
  misc_RNA (1)...(19): siRNA sense strand
aauaugaagugugcuaagu

SEQ ID NO: 1699103 - RNA, 19 nt, Homo sapiens
  misc_RNA (1)...(19): siRNA sense strand
cgaacagccgcaaguuuga

SEQ ID NO: 1699104 - RNA, 19 nt, Homo sapiens
  misc_RNA (1)...(19): siRNA sense strand
acaaauguuaccaucagua

SEQ ID NO: 1699105 - RNA, 19 nt, Homo sapiens
  misc_RNA (1)...(19): siRNA sense strand
gggcaagaggcacaaaugu

SEQ ID NO: 1699106 - RNA, 19 nt, Homo sapiens
  misc_RNA (1)...(19): siRNA sense strand
gaccuucuggcacauacua

SEQ ID NO: 1699107 - RNA, 19 nt, Homo sapiens
  misc_RNA (1)...(19): siRNA sense strand
uagagggucuugugucaac

SEQ ID NO: 1699108 - RNA, 19 nt, Homo sapiens
  misc_RNA (1)...(19): siRNA sense strand
ucaagccugacacuauaua

SEQ ID NO: 1699109 - RNA, 19 nt, Homo sapiens
  misc_RNA (1)...(19): siRNA sense strand
gaaaagcaggaacaagaaa

SEQ ID NO: 1699110 - RNA, 19 nt, Homo sapiens
  misc_RNA (1)...(19): siRNA sense strand
aaagaucggaccuccagaa

SEQ ID NO: 1699111 - RNA, 19 nt, Homo sapiens
  misc_RNA (1)...(19): siRNA sense strand
agagaucagugguguggau

SEQ ID NO: 1699112 - RNA, 19 nt, Homo sapiens
  misc_RNA (1)...(19): siRNA sense strand
gaucggaccuccagaaaua

SEQ ID NO: 1699113 - RNA, 19 nt, Homo sapiens
  misc_RNA (1)...(19): siRNA sense strand
gaacucagcucagaagauu

SEQ ID NO: 1699114 - RNA, 19 nt, Homo sapiens
  misc_RNA (1)...(19): siRNA sense strand
gcaagaggcacaaauguua

SEQ ID NO: 1699115 - RNA, 19 nt, Homo sapiens
  misc_RNA (1)...(19): siRNA sense strand
ggaaagauguuaccuucaa

SEQ ID NO: 1699116 - RNA, 19 nt, Homo sapiens
  misc_RNA (1)...(19): siRNA sense strand
gagcaucaguuuacaaaga

SEQ ID NO: 1699117 - RNA, 19 nt, Homo sapiens
  misc_RNA (1)...(19): siRNA sense strand
gaaacaaguuauaccauuc

SEQ ID NO: 1699118 - RNA, 19 nt, Homo sapiens
  misc_RNA (1)...(19): siRNA sense strand
ugaagaaucuggcuauguu

SEQ ID NO: 1699119 - RNA, 19 nt, Homo sapiens
  misc_RNA (1)...(19): siRNA sense strand
gcaggugugagaauaauua

SEQ ID NO: 1699120 - RNA, 19 nt, Homo sapiens
  misc_RNA (1)...(19): siRNA sense strand
gaaauagcaucucuuuguc

SEQ ID NO: 1699121 - RNA, 19 nt, Homo sapiens
  misc_RNA (1)...(19): siRNA sense strand
aaauguggguggaauauaa

SEQ ID NO: 1699122 - RNA, 19 nt, Homo sapiens
  misc_RNA (1)...(19): siRNA sense strand
gcacaaauguuaccaucag

SEQ ID NO: 1699123 - RNA, 19 nt, Homo sapiens
  misc_RNA (1)...(19): siRNA sense strand
ccucaagccugacacuaua

SEQ ID NO: 1699124 - RNA, 19 nt, Homo sapiens
  misc_RNA (1)...(19): siRNA sense strand
uaacuacaccuuugagauu

SEQ ID NO: 1699125 - RNA, 19 nt, Homo sapiens
  misc_RNA (1)...(19): siRNA sense strand
ucaggaagaugguucaaug

SEQ ID NO: 1699126 - RNA, 19 nt, Homo sapiens
  misc_RNA (1)...(19): siRNA sense strand
acaauuggcugagaacaaa

SEQ ID NO: 1699127 - RNA, 19 nt, Homo sapiens
  misc_RNA (1)...(19): siRNA sense strand
gagcugggcuggaucucuu

SEQ ID NO: 1699128 - RNA, 19 nt, Homo sapiens
  misc_RNA (1)...(19): siRNA sense strand
gaacauuacacacccauca

SEQ ID NO: 1699129 - RNA, 19 nt, Homo sapiens
  misc_RNA (1)...(19): siRNA sense strand
gaacuugcaaggagacauu

SEQ ID NO: 1699130 - RNA, 19 nt, Homo sapiens
  misc_RNA (1)...(19): siRNA sense strand
gcaagaaccugaacauccu

SEQ ID NO: 1699131 - RNA, 19 nt, Homo sapiens
  misc_RNA (1)...(19): siRNA sense strand
gaggucaaauacuaugaaa

SEQ ID NO: 1699132 - RNA, 19 nt, Homo sapiens
  misc_RNA (1)...(19): siRNA sense strand
ccagaaauagcaucucuuu

SEQ ID NO: 1699133 - RNA, 19 nt, Homo sapiens
  misc_RNA (1)...(19): siRNA sense strand
agaaauagcaucucuuugu

SEQ ID NO: 1699134 - RNA, 19 nt, Homo sapiens
  misc_RNA (1)...(19): siRNA sense strand
gagagcaucaguuuacaaa

SEQ ID NO: 1699135 - RNA, 19 nt, Homo sapiens
  misc_RNA (1)...(19): siRNA sense strand
uuacaaagauugacaccau

SEQ ID NO: 1699136 - RNA, 19 nt, Homo sapiens
  misc_RNA (1)...(19): siRNA sense strand
ggacuuaccaggugugcaa

SEQ ID NO: 1699137 - RNA, 19 nt, Homo sapiens
  misc_RNA (1)...(19): siRNA sense strand
ucaccuguccugacgauua

SEQ ID NO: 1699138 - RNA, 19 nt, Homo sapiens
  misc_RNA (1)...(19): siRNA sense strand
caacaauucuaaggaggaa

SEQ ID NO: 1699139 - RNA, 19 nt, Homo sapiens
  misc_RNA (1)...(19): siRNA sense strand
cuaaugggaucauauugga

SEQ ID NO: 1699140 - RNA, 19 nt, Homo sapiens
  misc_RNA (1)...(19): siRNA sense strand
ggcauuggaugguaauaug

SEQ ID NO: 1699141 - RNA, 19 nt, Homo sapiens
  misc_RNA (1)...(19): siRNA sense strand
gaagaaagagguuuuaugu

SEQ ID NO: 1699142 - RNA, 19 nt, Homo sapiens
  misc_RNA (1)...(19): siRNA sense strand
cauacuaacuacaccuuug

SEQ ID NO: 1699143 - RNA, 19 nt, Homo sapiens
  misc_RNA (1)...(19): siRNA sense strand
gaucagugguguggaugaa

SEQ ID NO: 1699144 - RNA, 19 nt, Homo sapiens
  misc_RNA (1)...(19): siRNA sense strand
ggacacaggaggccggaaa

SEQ ID NO: 1699145 - RNA, 19 nt, Homo sapiens
  misc_RNA (1)...(19): siRNA sense strand
acacacccaucaggacuua

SEQ ID NO: 1699146 - RNA, 19 nt, Homo sapiens
  misc_RNA (1)...(19): siRNA sense strand
gagcucaaguucacucuac

SEQ ID NO: 1699147 - RNA, 19 nt, Homo sapiens
  misc_RNA (1)...(19): siRNA sense strand
gaagaaucuggcuauguuu

SEQ ID NO: 1699148 - RNA, 19 nt, Homo sapiens
  misc_RNA (1)...(19): siRNA sense strand
acuacgaggucaaauacua

SEQ ID NO: 1699149 - RNA, 19 nt, Homo sapiens
  misc_RNA (1)...(19): siRNA sense strand
ucacaguucuacucaggaa

SEQ ID NO: 1699150 - RNA, 19 nt, Homo sapiens
  misc_RNA (1)...(19): siRNA sense strand
guuagagggucuuguguca

SEQ ID NO: 1699151 - RNA, 19 nt, Homo sapiens
  misc_RNA (1)...(19): siRNA sense strand
ucacaugggugggaagaga

SEQ ID NO: 1699152 - RNA, 19 nt, Homo sapiens
  misc_RNA (1)...(19): siRNA sense strand
uaaacgagaccucaguuau

SEQ ID NO: 1699153 - RNA, 19 nt, Homo sapiens
  misc_RNA (1)...(19): siRNA sense strand
ggacuacgaggucaaauac

SEQ ID NO: 1699154 - RNA, 19 nt, Homo sapiens
  misc_RNA (1)...(19): siRNA sense strand
gaaccugaacauccuaaug

SEQ ID NO: 1699155 - RNA, 19 nt, Homo sapiens
  misc_RNA (1)...(19): siRNA sense strand
cuacgagacugcaauagca

SEQ ID NO: 1699156 - RNA, 19 nt, Homo sapiens
  misc_RNA (1)...(19): siRNA sense strand
caccuguccugacgauuaa

SEQ ID NO: 1699157 - RNA, 19 nt, Homo sapiens
  misc_RNA (1)...(19): siRNA sense strand
uaaucaggcugcuccauca

SEQ ID NO: 1699158 - RNA, 19 nt, Homo sapiens
  misc_RNA (1)...(19): siRNA sense strand
gaacugcaggugugagaau

SEQ ID NO: 1699159 - RNA, 19 nt, Homo sapiens
  misc_RNA (1)...(19): siRNA sense strand
gaaggcgaauggcuuguac

SEQ ID NO: 1699160 - RNA, 19 nt, Homo sapiens
  misc_RNA (1)...(19): siRNA sense strand
cauugcagcugaugaaagu

SEQ ID NO: 1699161 - RNA, 19 nt, Homo sapiens
  misc_RNA (1)...(19): siRNA sense strand
ggaacaagaaacaaguuau

SEQ ID NO: 1699162 - RNA, 19 nt, Homo sapiens
  misc_RNA (1)...(19): siRNA sense strand
ugagauugaugccguuaau

SEQ ID NO: 1699163 - RNA, 19 nt, Homo sapiens
  misc_RNA (1)...(19): siRNA sense strand
gaaagauguuaccuucaac

SEQ ID NO: 1699164 - RNA, 19 nt, Homo sapiens
  misc_RNA (1)...(19): siRNA sense strand
ccaaugaagucaaucuacu

SEQ ID NO: 1699165 - RNA, 19 nt, Homo sapiens
  misc_RNA (1)...(19): siRNA sense strand
acucagcucagaagauuua

SEQ ID NO: 1699166 - RNA, 19 nt, Homo sapiens
  misc_RNA (1)...(19): siRNA sense strand
ugaagucaaucuacuggau

SEQ ID NO: 1699167 - RNA, 19 nt, Homo sapiens
  misc_RNA (1)...(19): siRNA sense strand
acaaggcauuggaugguaa

SEQ ID NO: 1699168 - RNA, 19 nt, Homo sapiens
  misc_RNA (1)...(19): siRNA sense strand
gcaaugcuggcuaugaaga

SEQ ID NO: 1699169 - RNA, 19 nt, Homo sapiens
  misc_RNA (1)...(19): siRNA sense strand
agaaguagguccugucaac

SEQ ID NO: 1699170 - RNA, 19 nt, Homo sapiens
  misc_RNA (1)...(19): siRNA sense strand
acacugagauuagagaagu

SEQ ID NO: 1699171 - RNA, 19 nt, Homo sapiens
  misc_RNA (1)...(19): siRNA sense strand
cuucucagcugcucuguuc

SEQ ID NO: 1699172 - RNA, 19 nt, Homo sapiens
  misc_RNA (1)...(19): siRNA sense strand
gcggucagcaucacaacua

SEQ ID NO: 1699173 - RNA, 19 nt, Homo sapiens
  misc_RNA (1)...(19): siRNA sense strand
ggugugagaauaauuacuu

SEQ ID NO: 1699174 - RNA, 19 nt, Homo sapiens
  misc_RNA (1)...(19): siRNA sense strand
cugcaaugcuggcuaugaa

SEQ ID NO: 1699175 - RNA, 19 nt, Homo sapiens
  misc_RNA (1)...(19): siRNA sense strand
gguaauaugaagugugcua

SEQ ID NO: 1699176 - RNA, 19 nt, Homo sapiens
  misc_RNA (1)...(19): siRNA sense strand
gacgaacagccgcaaguuu

SEQ ID NO: 1699177 - RNA, 19 nt, Homo sapiens
  misc_RNA (1)...(19): siRNA sense strand
gccgcaaguuugaguuuga

SEQ ID NO: 1699178 - RNA, 19 nt, Homo sapiens
  misc_RNA (1)...(19): siRNA sense strand
cauggagucugaugaugau

SEQ ID NO: 1699179 - RNA, 19 nt, Homo sapiens
  misc_RNA (1)...(19): siRNA sense strand
caaaacaauuggcugagaa

SEQ ID NO: 1699180 - RNA, 19 nt, Homo sapiens
  misc_RNA (1)...(19): siRNA sense strand
ggacgaacagccgcaaguu

SEQ ID NO: 1699181 - RNA, 19 nt, Homo sapiens
  misc_RNA (1)...(19): siRNA sense strand
gccugacacuauauacgua

SEQ ID NO: 1699182 - RNA, 19 nt, Homo sapiens
  misc_RNA (1)...(19): siRNA sense strand
ggcaagaggcacaaauguu

SEQ ID NO: 1699183 - RNA, 19 nt, Homo sapiens
  misc_RNA (1)...(19): siRNA sense strand
caagaaacaaguuauacca

SEQ ID NO: 1699184 - RNA, 19 nt, Homo sapiens
  misc_RNA (1)...(19): siRNA sense strand
ggugaaauuucgagagcau

SEQ ID NO: 1699185 - RNA, 19 nt, Homo sapiens
  misc_RNA (1)...(19): siRNA sense strand
gcaucaguuuacaaagauu

SEQ ID NO: 1699186 - RNA, 19 nt, Homo sapiens
  misc_RNA (1)...(19): siRNA sense strand
ggaacucagcucagaagau

SEQ ID NO: 1699187 - RNA, 19 nt, Homo sapiens
  misc_RNA (1)...(19): siRNA sense strand
gcaggaacaagaaacaagu

SEQ ID NO: 1699188 - RNA, 19 nt, Homo sapiens
  misc_RNA (1)...(19): siRNA sense strand
cuuccucccucgacaguuu

SEQ ID NO: 1699189 - RNA, 19 nt, Homo sapiens
  misc_RNA (1)...(19): siRNA sense strand
aaacgagaccucaguuauc

SEQ ID NO: 1699190 - RNA, 19 nt, Homo sapiens
  misc_RNA (1)...(19): siRNA sense strand
uacaaagauugacaccauu

SEQ ID NO: 1699191 - RNA, 19 nt, Homo sapiens
  misc_RNA (1)...(19): siRNA sense strand
cgaccuccaucuucaccaa

SEQ ID NO: 1699192 - RNA, 19 nt, Homo sapiens
  misc_RNA (1)...(19): siRNA sense strand
gcauuggaugguaauauga

SEQ ID NO: 1699193 - RNA, 19 nt, Homo sapiens
  misc_RNA (1)...(19): siRNA sense strand
uacaaggcauuggauggua

SEQ ID NO: 1699194 - RNA, 19 nt, Homo sapiens
  misc_RNA (1)...(19): siRNA sense strand
cagcucagaagauuuaugu

SEQ ID NO: 1699195 - RNA, 19 nt, Homo sapiens
  misc_RNA (1)...(19): siRNA sense strand
uaccaggugugcaauguca

SEQ ID NO: 1699196 - RNA, 19 nt, Homo sapiens
  misc_RNA (1)...(19): siRNA sense strand
caaauguuaccaucaguag

SEQ ID NO: 1699197 - RNA, 19 nt, Homo sapiens
  misc_RNA (1)...(19): siRNA sense strand
ccaagaaauguuaucucua

SEQ ID NO: 1699198 - RNA, 19 nt, Homo sapiens
  misc_RNA (1)...(19): siRNA sense strand
acaaagacccuccauccau

SEQ ID NO: 1699199 - RNA, 19 nt, Homo sapiens
  misc_RNA (1)...(19): siRNA sense strand
ggcaaguguuccugcaaug

SEQ ID NO: 1699200 - RNA, 19 nt, Homo sapiens
  misc_RNA (1)...(19): siRNA sense strand
gcaaggagacauucaaccu

SEQ ID NO: 1699201 - RNA, 19 nt, Homo sapiens
  misc_RNA (1)...(19): siRNA sense strand
gagguuagagggucuugug

SEQ ID NO: 1699202 - RNA, 19 nt, Homo sapiens
  misc_RNA (1)...(19): siRNA sense strand
aauaugaagugugcuaagu

SEQ ID NO: 1699203 - RNA, 19 nt, Homo sapiens
  misc_RNA (1)...(19): siRNA sense strand
cgaacagccgcaaguuuga

SEQ ID NO: 1699204 - RNA, 19 nt, Homo sapiens
  misc_RNA (1)...(19): siRNA sense strand
acaaauguuaccaucagua

SEQ ID NO: 1699205 - RNA, 19 nt, Homo sapiens
  misc_RNA (1)...(19): siRNA sense strand
gggcaagaggcacaaaugu

SEQ ID NO: 1699206 - RNA, 19 nt, Homo sapiens
  misc_RNA (1)...(19): siRNA sense strand
gaccuucuggcacauacua

SEQ ID NO: 1699207 - RNA, 19 nt, Homo sapiens
  misc_RNA (1)...(19): siRNA sense strand
uagagggucuugugucaac

SEQ ID NO: 1699208 - RNA, 19 nt, Homo sapiens
  misc_RNA (1)...(19): siRNA sense strand
ucaagccugacacuauaua

SEQ ID NO: 1699209 - RNA, 19 nt, Homo sapiens
  misc_RNA (1)...(19): siRNA sense strand
gaaaagcaggaacaagaaa

SEQ ID NO: 1699210 - RNA, 19 nt, Homo sapiens
  misc_RNA (1)...(19): siRNA sense strand
aaagaucggaccuccagaa

SEQ ID NO: 1699211 - RNA, 19 nt, Homo sapiens
  misc_RNA (1)...(19): siRNA sense strand
agagaucagugguguggau

SEQ ID NO: 1699212 - RNA, 19 nt, Homo sapiens
  misc_RNA (1)...(19): siRNA sense strand
ggacaaaccaguucaaaua

SEQ ID NO: 1699213 - RNA, 19 nt, Homo sapiens
  misc_RNA (1)...(19): siRNA sense strand
ucacuugccugcaguauua

SEQ ID NO: 1699214 - RNA, 19 nt, Homo sapiens
  misc_RNA (1)...(19): siRNA sense strand
gaacagacaacaauaguaa

SEQ ID NO: 1699215 - RNA, 19 nt, Homo sapiens
  misc_RNA (1)...(19): siRNA sense strand
gaugauggcuugcuugaug

SEQ ID NO: 1699216 - RNA, 19 nt, Homo sapiens
  misc_RNA (1)...(19): siRNA sense strand
uaaauucacccaccuguua

SEQ ID NO: 1699217 - RNA, 19 nt, Homo sapiens
  misc_RNA (1)...(19): siRNA sense strand
gacaaucuguugauguuaa

SEQ ID NO: 1699218 - RNA, 19 nt, Homo sapiens
  misc_RNA (1)...(19): siRNA sense strand
aaucagauaucuccauuga

SEQ ID NO: 1699219 - RNA, 19 nt, Homo sapiens
  misc_RNA (1)...(19): siRNA sense strand
ucagauaucuccauugaag

SEQ ID NO: 1699220 - RNA, 19 nt, Homo sapiens
  misc_RNA (1)...(19): siRNA sense strand
gaaauuuacucgcucaacu

SEQ ID NO: 1699221 - RNA, 19 nt, Homo sapiens
  misc_RNA (1)...(19): siRNA sense strand
gcagaaagcaaguccuauu

SEQ ID NO: 1699222 - RNA, 19 nt, Homo sapiens
  misc_RNA (1)...(19): siRNA sense strand
gaagaugaaauaacugcua

SEQ ID NO: 1699223 - RNA, 19 nt, Homo sapiens
  misc_RNA (1)...(19): siRNA sense strand
gaagauaauguguucagaa

SEQ ID NO: 1699224 - RNA, 19 nt, Homo sapiens
  misc_RNA (1)...(19): siRNA sense strand
ucaaauacguccuuggaau

SEQ ID NO: 1699225 - RNA, 19 nt, Homo sapiens
  misc_RNA (1)...(19): siRNA sense strand
guaguagauuggccucaua

SEQ ID NO: 1699226 - RNA, 19 nt, Homo sapiens
  misc_RNA (1)...(19): siRNA sense strand
ccaccagccucuucugaaa

SEQ ID NO: 1699227 - RNA, 19 nt, Homo sapiens
  misc_RNA (1)...(19): siRNA sense strand
gauugaagauaauguguuc

SEQ ID NO: 1699228 - RNA, 19 nt, Homo sapiens
  misc_RNA (1)...(19): siRNA sense strand
ugaaucagauaucuccauu

SEQ ID NO: 1699229 - RNA, 19 nt, Homo sapiens
  misc_RNA (1)...(19): siRNA sense strand
caaauacguccuuggaauu

SEQ ID NO: 1699230 - RNA, 19 nt, Homo sapiens
  misc_RNA (1)...(19): siRNA sense strand
gaaaauucccuuaucgaua

SEQ ID NO: 1699231 - RNA, 19 nt, Homo sapiens
  misc_RNA (1)...(19): siRNA sense strand
gaauaugcacucuuuggaa

SEQ ID NO: 1699232 - RNA, 19 nt, Homo sapiens
  misc_RNA (1)...(19): siRNA sense strand
uagaauguaugacaguuug

SEQ ID NO: 1699233 - RNA, 19 nt, Homo sapiens
  misc_RNA (1)...(19): siRNA sense strand
gaacugacaaucuguugau

SEQ ID NO: 1699234 - RNA, 19 nt, Homo sapiens
  misc_RNA (1)...(19): siRNA sense strand
guuugaauaugcacucuuu

SEQ ID NO: 1699235 - RNA, 19 nt, Homo sapiens
  misc_RNA (1)...(19): siRNA sense strand
ugauacagauccugagcua

SEQ ID NO: 1699236 - RNA, 19 nt, Homo sapiens
  misc_RNA (1)...(19): siRNA sense strand
gcauggugauauugauaaa

SEQ ID NO: 1699237 - RNA, 19 nt, Homo sapiens
  misc_RNA (1)...(19): siRNA sense strand
aauaugcacucuuuggaaa

SEQ ID NO: 1699238 - RNA, 19 nt, Homo sapiens
  misc_RNA (1)...(19): siRNA sense strand
gaccagaugugugaugaau

SEQ ID NO: 1699239 - RNA, 19 nt, Homo sapiens
  misc_RNA (1)...(19): siRNA sense strand
uggcagagaucaucguaga

SEQ ID NO: 1699240 - RNA, 19 nt, Homo sapiens
  misc_RNA (1)...(19): siRNA sense strand
ggaucgaaguagaauguau

SEQ ID NO: 1699241 - RNA, 19 nt, Homo sapiens
  misc_RNA (1)...(19): siRNA sense strand
cgauugagcuauccacauc

SEQ ID NO: 1699242 - RNA, 19 nt, Homo sapiens
  misc_RNA (1)...(19): siRNA sense strand
ggacgugaguuccauaagc

SEQ ID NO: 1699243 - RNA, 19 nt, Homo sapiens
  misc_RNA (1)...(19): siRNA sense strand
gguaaagccauaugugcua

SEQ ID NO: 1699244 - RNA, 19 nt, Homo sapiens
  misc_RNA (1)...(19): siRNA sense strand
gcgaguugcuuucuccaau

SEQ ID NO: 1699245 - RNA, 19 nt, Homo sapiens
  misc_RNA (1)...(19): siRNA sense strand
cagaaagcaaguccuauuu

SEQ ID NO: 1699246 - RNA, 19 nt, Homo sapiens
  misc_RNA (1)...(19): siRNA sense strand
gaaauaacugcuagcuuca

SEQ ID NO: 1699247 - RNA, 19 nt, Homo sapiens
  misc_RNA (1)...(19): siRNA sense strand
gauguuaaauggucguucu

SEQ ID NO: 1699248 - RNA, 19 nt, Homo sapiens
  misc_RNA (1)...(19): siRNA sense strand
gaacuaugaaucagauauc

SEQ ID NO: 1699249 - RNA, 19 nt, Homo sapiens
  misc_RNA (1)...(19): siRNA sense strand
ugauaaacguguggaggua

SEQ ID NO: 1699250 - RNA, 19 nt, Homo sapiens
  misc_RNA (1)...(19): siRNA sense strand
ggaauuuaagugauaguga

SEQ ID NO: 1699251 - RNA, 19 nt, Homo sapiens
  misc_RNA (1)...(19): siRNA sense strand
ggaaucccaggaacuauga

SEQ ID NO: 1699252 - RNA, 19 nt, Homo sapiens
  misc_RNA (1)...(19): siRNA sense strand
auacagauccugagcuaaa

SEQ ID NO: 1699253 - RNA, 19 nt, Homo sapiens
  misc_RNA (1)...(19): siRNA sense strand
ggaacuugcuaugaucaug

SEQ ID NO: 1699254 - RNA, 19 nt, Homo sapiens
  misc_RNA (1)...(19): siRNA sense strand
ccuuggaauuuaagugaua

SEQ ID NO: 1699255 - RNA, 19 nt, Homo sapiens
  misc_RNA (1)...(19): siRNA sense strand
uaauacacucuuacccuua

SEQ ID NO: 1699256 - RNA, 19 nt, Homo sapiens
  misc_RNA (1)...(19): siRNA sense strand
ccagaugugugaugaaugc

SEQ ID NO: 1699257 - RNA, 19 nt, Homo sapiens
  misc_RNA (1)...(19): siRNA sense strand
ccaaucagcagagcuauau

SEQ ID NO: 1699258 - RNA, 19 nt, Homo sapiens
  misc_RNA (1)...(19): siRNA sense strand
guucuucccucuuuccaau

SEQ ID NO: 1699259 - RNA, 19 nt, Homo sapiens
  misc_RNA (1)...(19): siRNA sense strand
ggaacuaugaaucagauau

SEQ ID NO: 1699260 - RNA, 19 nt, Homo sapiens
  misc_RNA (1)...(19): siRNA sense strand
gaucauggaccggcuguau

SEQ ID NO: 1699261 - RNA, 19 nt, Homo sapiens
  misc_RNA (1)...(19): siRNA sense strand
auacguccuuggaauuuaa

SEQ ID NO: 1699262 - RNA, 19 nt, Homo sapiens
  misc_RNA (1)...(19): siRNA sense strand
cauugaugcuuguauugaa

SEQ ID NO: 1699263 - RNA, 19 nt, Homo sapiens
  misc_RNA (1)...(19): siRNA sense strand
cgaaguagaauguaugaca

SEQ ID NO: 1699264 - RNA, 19 nt, Homo sapiens
  misc_RNA (1)...(19): siRNA sense strand
guguggagguaaagccaua

SEQ ID NO: 1699265 - RNA, 19 nt, Homo sapiens
  misc_RNA (1)...(19): siRNA sense strand
agccauaugugcuagauga

SEQ ID NO: 1699266 - RNA, 19 nt, Homo sapiens
  misc_RNA (1)...(19): siRNA sense strand
cugacaaucuguugauguu

SEQ ID NO: 1699267 - RNA, 19 nt, Homo sapiens
  misc_RNA (1)...(19): siRNA sense strand
uagaugaccagauguguga

SEQ ID NO: 1699268 - RNA, 19 nt, Homo sapiens
  misc_RNA (1)...(19): siRNA sense strand
gagcuauauugcugccauu

SEQ ID NO: 1699269 - RNA, 19 nt, Homo sapiens
  misc_RNA (1)...(19): siRNA sense strand
caaaccaguucaaauacgu

SEQ ID NO: 1699270 - RNA, 19 nt, Homo sapiens
  misc_RNA (1)...(19): siRNA sense strand
caggaacuaugaaucagau

SEQ ID NO: 1699271 - RNA, 19 nt, Homo sapiens
  misc_RNA (1)...(19): siRNA sense strand
gaguugcuuucuccaauca

SEQ ID NO: 1699272 - RNA, 19 nt, Homo sapiens
  misc_RNA (1)...(19): siRNA sense strand
cuccagauauugaugaaga

SEQ ID NO: 1699273 - RNA, 19 nt, Homo sapiens
  misc_RNA (1)...(19): siRNA sense strand
guagaauguaugacaguuu

SEQ ID NO: 1699274 - RNA, 19 nt, Homo sapiens
  misc_RNA (1)...(19): siRNA sense strand
gaucgaaguagaauguaug

SEQ ID NO: 1699275 - RNA, 19 nt, Homo sapiens
  misc_RNA (1)...(19): siRNA sense strand
ugucauagcaccaccgaaa

SEQ ID NO: 1699276 - RNA, 19 nt, Homo sapiens
  misc_RNA (1)...(19): siRNA sense strand
cagaagauuugggccuuug

SEQ ID NO: 1699277 - RNA, 19 nt, Homo sapiens
  misc_RNA (1)...(19): siRNA sense strand
cuaugcauuucuucucuuu

SEQ ID NO: 1699278 - RNA, 19 nt, Homo sapiens
  misc_RNA (1)...(19): siRNA sense strand
cagcauggugauauugaua

SEQ ID NO: 1699279 - RNA, 19 nt, Homo sapiens
  misc_RNA (1)...(19): siRNA sense strand
aauacguccuuggaauuua

SEQ ID NO: 1699280 - RNA, 19 nt, Homo sapiens
  misc_RNA (1)...(19): siRNA sense strand
gauaaacguguggagguaa

SEQ ID NO: 1699281 - RNA, 19 nt, Homo sapiens
  misc_RNA (1)...(19): siRNA sense strand
ggagguaaagccauaugug

SEQ ID NO: 1699282 - RNA, 19 nt, Homo sapiens
  misc_RNA (1)...(19): siRNA sense strand
gaauguaugacaguuugaa

SEQ ID NO: 1699283 - RNA, 19 nt, Homo sapiens
  misc_RNA (1)...(19): siRNA sense strand
cuauauugcugccauuagu

SEQ ID NO: 1699284 - RNA, 19 nt, Homo sapiens
  misc_RNA (1)...(19): siRNA sense strand
gcuguaugguggaguuugu

SEQ ID NO: 1699285 - RNA, 19 nt, Homo sapiens
  misc_RNA (1)...(19): siRNA sense strand
guucaaauacguccuugga

SEQ ID NO: 1699286 - RNA, 19 nt, Homo sapiens
  misc_RNA (1)...(19): siRNA sense strand
acucauugaugcuuguauu

SEQ ID NO: 1699287 - RNA, 19 nt, Homo sapiens
  misc_RNA (1)...(19): siRNA sense strand
aaauggagagcgaauagaa

SEQ ID NO: 1699288 - RNA, 19 nt, Homo sapiens
  misc_RNA (1)...(19): siRNA sense strand
ggaacugacaaucuguuga

SEQ ID NO: 1699289 - RNA, 19 nt, Homo sapiens
  misc_RNA (1)...(19): siRNA sense strand
uaugacaguuugaauaugc

SEQ ID NO: 1699290 - RNA, 19 nt, Homo sapiens
  misc_RNA (1)...(19): siRNA sense strand
cauagcaccaccgaaauuu

SEQ ID NO: 1699291 - RNA, 19 nt, Homo sapiens
  misc_RNA (1)...(19): siRNA sense strand
gcccuacuaucaaggacaa

SEQ ID NO: 1699292 - RNA, 19 nt, Homo sapiens
  misc_RNA (1)...(19): siRNA sense strand
guagauuggccucauaaag

SEQ ID NO: 1699293 - RNA, 19 nt, Homo sapiens
  misc_RNA (1)...(19): siRNA sense strand
ggccuuugguaguagauug

SEQ ID NO: 1699294 - RNA, 19 nt, Homo sapiens
  misc_RNA (1)...(19): siRNA sense strand
ccuuaucgauauuaugaga

SEQ ID NO: 1699295 - RNA, 19 nt, Homo sapiens
  misc_RNA (1)...(19): siRNA sense strand
ggauugaagauaauguguu

SEQ ID NO: 1699296 - RNA, 19 nt, Homo sapiens
  misc_RNA (1)...(19): siRNA sense strand
cuccaucacugacuccaaa

SEQ ID NO: 1699297 - RNA, 19 nt, Homo sapiens
  misc_RNA (1)...(19): siRNA sense strand
guaugacaguuugaauaug

SEQ ID NO: 1699298 - RNA, 19 nt, Homo sapiens
  misc_RNA (1)...(19): siRNA sense strand
auaaacguguggagguaaa

SEQ ID NO: 1699299 - RNA, 19 nt, Homo sapiens
  misc_RNA (1)...(19): siRNA sense strand
caagaagagagcucaguuc

SEQ ID NO: 1699300 - RNA, 19 nt, Homo sapiens
  misc_RNA (1)...(19): siRNA sense strand
gcuaugcauuucuucucuu

SEQ ID NO: 1699301 - RNA, 19 nt, Homo sapiens
  misc_RNA (1)...(19): siRNA sense strand
ucagaagauuugggccuuu

SEQ ID NO: 1699302 - RNA, 19 nt, Homo sapiens
  misc_RNA (1)...(19): siRNA sense strand
aauaacugcuagcuucaga

SEQ ID NO: 1699303 - RNA, 19 nt, Homo sapiens
  misc_RNA (1)...(19): siRNA sense strand
ccaugaauauaccucaaca

SEQ ID NO: 1699304 - RNA, 19 nt, Homo sapiens
  misc_RNA (1)...(19): siRNA sense strand
ucauagcaccaccgaaauu

SEQ ID NO: 1699305 - RNA, 19 nt, Homo sapiens
  misc_RNA (1)...(19): siRNA sense strand
ggaugguucucagccuuug

SEQ ID NO: 1699306 - RNA, 19 nt, Homo sapiens
  misc_RNA (1)...(19): siRNA sense strand
gaacgcuucucucgaaaag

SEQ ID NO: 1699307 - RNA, 19 nt, Homo sapiens
  misc_RNA (1)...(19): siRNA sense strand
gacaaaccaguucaaauac

SEQ ID NO: 1699308 - RNA, 19 nt, Homo sapiens
  misc_RNA (1)...(19): siRNA sense strand
ucaagaagagagcucaguu

SEQ ID NO: 1699309 - RNA, 19 nt, Homo sapiens
  misc_RNA (1)...(19): siRNA sense strand
gguaguagauuggccucau

SEQ ID NO: 1699310 - RNA, 19 nt, Homo sapiens
  misc_RNA (1)...(19): siRNA sense strand
gcuucagcauggugauauu

SEQ ID NO: 1699311 - RNA, 19 nt, Homo sapiens
  misc_RNA (1)...(19): siRNA sense strand
cauaagccauugguaaagg

SEQ ID NO: 1699312 - RNA, 19 nt, Homo sapiens
  misc_RNA (1)...(19): siRNA sense strand
ggacaaaccaguucaaaua

SEQ ID NO: 1699313 - RNA, 19 nt, Homo sapiens
  misc_RNA (1)...(19): siRNA sense strand
ucacuugccugcaguauua

SEQ ID NO: 1699314 - RNA, 19 nt, Homo sapiens
  misc_RNA (1)...(19): siRNA sense strand
gaacagacaacaauaguaa

SEQ ID NO: 1699315 - RNA, 19 nt, Homo sapiens
  misc_RNA (1)...(19): siRNA sense strand
gaugauggcuugcuugaug

SEQ ID NO: 1699316 - RNA, 19 nt, Homo sapiens
  misc_RNA (1)...(19): siRNA sense strand
uaaauucacccaccuguua

SEQ ID NO: 1699317 - RNA, 19 nt, Homo sapiens
  misc_RNA (1)...(19): siRNA sense strand
gacaaucuguugauguuaa

SEQ ID NO: 1699318 - RNA, 19 nt, Homo sapiens
  misc_RNA (1)...(19): siRNA sense strand
aaucagauaucuccauuga

SEQ ID NO: 1699319 - RNA, 19 nt, Homo sapiens
  misc_RNA (1)...(19): siRNA sense strand
ucagauaucuccauugaag

SEQ ID NO: 1699320 - RNA, 19 nt, Homo sapiens
  misc_RNA (1)...(19): siRNA sense strand
gaaauuuacucgcucaacu

SEQ ID NO: 1699321 - RNA, 19 nt, Homo sapiens
  misc_RNA (1)...(19): siRNA sense strand
gcagaaagcaaguccuauu

SEQ ID NO: 1699322 - RNA, 19 nt, Homo sapiens
  misc_RNA (1)...(19): siRNA sense strand
gaagaugaaauaacugcua

SEQ ID NO: 1699323 - RNA, 19 nt, Homo sapiens
  misc_RNA (1)...(19): siRNA sense strand
gaagauaauguguucagaa

SEQ ID NO: 1699324 - RNA, 19 nt, Homo sapiens
  misc_RNA (1)...(19): siRNA sense strand
ucaaauacguccuuggaau

SEQ ID NO: 1699325 - RNA, 19 nt, Homo sapiens
  misc_RNA (1)...(19): siRNA sense strand
guaguagauuggccucaua

SEQ ID NO: 1699326 - RNA, 19 nt, Homo sapiens
  misc_RNA (1)...(19): siRNA sense strand
ccaccagccucuucugaaa

SEQ ID NO: 1699327 - RNA, 19 nt, Homo sapiens
  misc_RNA (1)...(19): siRNA sense strand
gauugaagauaauguguuc

SEQ ID NO: 1699328 - RNA, 19 nt, Homo sapiens
  misc_RNA (1)...(19): siRNA sense strand
ugaaucagauaucuccauu

SEQ ID NO: 1699329 - RNA, 19 nt, Homo sapiens
  misc_RNA (1)...(19): siRNA sense strand
caaauacguccuuggaauu

SEQ ID NO: 1699330 - RNA, 19 nt, Homo sapiens
  misc_RNA (1)...(19): siRNA sense strand
gaaaauucccuuaucgaua

SEQ ID NO: 1699331 - RNA, 19 nt, Homo sapiens
  misc_RNA (1)...(19): siRNA sense strand
gaauaugcacucuuuggaa

SEQ ID NO: 1699332 - RNA, 19 nt, Homo sapiens
  misc_RNA (1)...(19): siRNA sense strand
uagaauguaugacaguuug

SEQ ID NO: 1699333 - RNA, 19 nt, Homo sapiens
  misc_RNA (1)...(19): siRNA sense strand
gaacugacaaucuguugau

SEQ ID NO: 1699334 - RNA, 19 nt, Homo sapiens
  misc_RNA (1)...(19): siRNA sense strand
guuugaauaugcacucuuu

SEQ ID NO: 1699335 - RNA, 19 nt, Homo sapiens
  misc_RNA (1)...(19): siRNA sense strand
ugauacagauccugagcua

SEQ ID NO: 1699336 - RNA, 19 nt, Homo sapiens
  misc_RNA (1)...(19): siRNA sense strand
gcauggugauauugauaaa

SEQ ID NO: 1699337 - RNA, 19 nt, Homo sapiens
  misc_RNA (1)...(19): siRNA sense strand
aauaugcacucuuuggaaa

SEQ ID NO: 1699338 - RNA, 19 nt, Homo sapiens
  misc_RNA (1)...(19): siRNA sense strand
gaccagaugugugaugaau

SEQ ID NO: 1699339 - RNA, 19 nt, Homo sapiens
  misc_RNA (1)...(19): siRNA sense strand
uggcagagaucaucguaga

SEQ ID NO: 1699340 - RNA, 19 nt, Homo sapiens
  misc_RNA (1)...(19): siRNA sense strand
ggaucgaaguagaauguau

SEQ ID NO: 1699341 - RNA, 19 nt, Homo sapiens
  misc_RNA (1)...(19): siRNA sense strand
cgauugagcuauccacauc

SEQ ID NO: 1699342 - RNA, 19 nt, Homo sapiens
  misc_RNA (1)...(19): siRNA sense strand
ggacgugaguuccauaagc

SEQ ID NO: 1699343 - RNA, 19 nt, Homo sapiens
  misc_RNA (1)...(19): siRNA sense strand
gguaaagccauaugugcua

SEQ ID NO: 1699344 - RNA, 19 nt, Homo sapiens
  misc_RNA (1)...(19): siRNA sense strand
gcgaguugcuuucuccaau

SEQ ID NO: 1699345 - RNA, 19 nt, Homo sapiens
  misc_RNA (1)...(19): siRNA sense strand
cagaaagcaaguccuauuu

SEQ ID NO: 1699346 - RNA, 19 nt, Homo sapiens
  misc_RNA (1)...(19): siRNA sense strand
gaaauaacugcuagcuuca

SEQ ID NO: 1699347 - RNA, 19 nt, Homo sapiens
  misc_RNA (1)...(19): siRNA sense strand
gauguuaaauggucguucu

SEQ ID NO: 1699348 - RNA, 19 nt, Homo sapiens
  misc_RNA (1)...(19): siRNA sense strand
gaacuaugaaucagauauc

SEQ ID NO: 1699349 - RNA, 19 nt, Homo sapiens
  misc_RNA (1)...(19): siRNA sense strand
ugauaaacguguggaggua

SEQ ID NO: 1699350 - RNA, 19 nt, Homo sapiens
  misc_RNA (1)...(19): siRNA sense strand
ggaauuuaagugauaguga

SEQ ID NO: 1699351 - RNA, 19 nt, Homo sapiens
  misc_RNA (1)...(19): siRNA sense strand
ggaaucccaggaacuauga

SEQ ID NO: 1699352 - RNA, 19 nt, Homo sapiens
  misc_RNA (1)...(19): siRNA sense strand
auacagauccugagcuaaa

SEQ ID NO: 1699353 - RNA, 19 nt, Homo sapiens
  misc_RNA (1)...(19): siRNA sense strand
ggaacuugcuaugaucaug

SEQ ID NO: 1699354 - RNA, 19 nt, Homo sapiens
  misc_RNA (1)...(19): siRNA sense strand
ccuuggaauuuaagugaua

SEQ ID NO: 1699355 - RNA, 19 nt, Homo sapiens
  misc_RNA (1)...(19): siRNA sense strand
uaauacacucuuacccuua

SEQ ID NO: 1699356 - RNA, 19 nt, Homo sapiens
  misc_RNA (1)...(19): siRNA sense strand
ccagaugugugaugaaugc

SEQ ID NO: 1699357 - RNA, 19 nt, Homo sapiens
  misc_RNA (1)...(19): siRNA sense strand
ccaaucagcagagcuauau

SEQ ID NO: 1699358 - RNA, 19 nt, Homo sapiens
  misc_RNA (1)...(19): siRNA sense strand
guucuucccucuuuccaau

SEQ ID NO: 1699359 - RNA, 19 nt, Homo sapiens
  misc_RNA (1)...(19): siRNA sense strand
ggaacuaugaaucagauau

SEQ ID NO: 1699360 - RNA, 19 nt, Homo sapiens
  misc_RNA (1)...(19): siRNA sense strand
gaucauggaccggcuguau

SEQ ID NO: 1699361 - RNA, 19 nt, Homo sapiens
  misc_RNA (1)...(19): siRNA sense strand
auacguccuuggaauuuaa

SEQ ID NO: 1699362 - RNA, 19 nt, Homo sapiens
  misc_RNA (1)...(19): siRNA sense strand
cauugaugcuuguauugaa

SEQ ID NO: 1699363 - RNA, 19 nt, Homo sapiens
  misc_RNA (1)...(19): siRNA sense strand
cgaaguagaauguaugaca

SEQ ID NO: 1699364 - RNA, 19 nt, Homo sapiens
  misc_RNA (1)...(19): siRNA sense strand
guguggagguaaagccaua

SEQ ID NO: 1699365 - RNA, 19 nt, Homo sapiens
  misc_RNA (1)...(19): siRNA sense strand
agccauaugugcuagauga

SEQ ID NO: 1699366 - RNA, 19 nt, Homo sapiens
  misc_RNA (1)...(19): siRNA sense strand
cugacaaucuguugauguu

SEQ ID NO: 1699367 - RNA, 19 nt, Homo sapiens
  misc_RNA (1)...(19): siRNA sense strand
uagaugaccagauguguga

SEQ ID NO: 1699368 - RNA, 19 nt, Homo sapiens
  misc_RNA (1)...(19): siRNA sense strand
gagcuauauugcugccauu

SEQ ID NO: 1699369 - RNA, 19 nt, Homo sapiens
  misc_RNA (1)...(19): siRNA sense strand
caaaccaguucaaauacgu

SEQ ID NO: 1699370 - RNA, 19 nt, Homo sapiens
  misc_RNA (1)...(19): siRNA sense strand
caggaacuaugaaucagau

SEQ ID NO: 1699371 - RNA, 19 nt, Homo sapiens
  misc_RNA (1)...(19): siRNA sense strand
gaguugcuuucuccaauca

SEQ ID NO: 1699372 - RNA, 19 nt, Homo sapiens
  misc_RNA (1)...(19): siRNA sense strand
cuccagauauugaugaaga

SEQ ID NO: 1699373 - RNA, 19 nt, Homo sapiens
  misc_RNA (1)...(19): siRNA sense strand
guagaauguaugacaguuu

SEQ ID NO: 1699374 - RNA, 19 nt, Homo sapiens
  misc_RNA (1)...(19): siRNA sense strand
gaucgaaguagaauguaug

SEQ ID NO: 1699375 - RNA, 19 nt, Homo sapiens
  misc_RNA (1)...(19): siRNA sense strand
ugucauagcaccaccgaaa

SEQ ID NO: 1699376 - RNA, 19 nt, Homo sapiens
  misc_RNA (1)...(19): siRNA sense strand
cagaagauuugggccuuug

SEQ ID NO: 1699377 - RNA, 19 nt, Homo sapiens
  misc_RNA (1)...(19): siRNA sense strand
cuaugcauuucuucucuuu

SEQ ID NO: 1699378 - RNA, 19 nt, Homo sapiens
  misc_RNA (1)...(19): siRNA sense strand
cagcauggugauauugaua

SEQ ID NO: 1699379 - RNA, 19 nt, Homo sapiens
  misc_RNA (1)...(19): siRNA sense strand
aauacguccuuggaauuua

SEQ ID NO: 1699380 - RNA, 19 nt, Homo sapiens
  misc_RNA (1)...(19): siRNA sense strand
gauaaacguguggagguaa

SEQ ID NO: 1699381 - RNA, 19 nt, Homo sapiens
  misc_RNA (1)...(19): siRNA sense strand
ggagguaaagccauaugug

SEQ ID NO: 1699382 - RNA, 19 nt, Homo sapiens
  misc_RNA (1)...(19): siRNA sense strand
gaauguaugacaguuugaa

SEQ ID NO: 1699383 - RNA, 19 nt, Homo sapiens
  misc_RNA (1)...(19): siRNA sense strand
cuauauugcugccauuagu

SEQ ID NO: 1699384 - RNA, 19 nt, Homo sapiens
  misc_RNA (1)...(19): siRNA sense strand
gcuguaugguggaguuugu

SEQ ID NO: 1699385 - RNA, 19 nt, Homo sapiens
  misc_RNA (1)...(19): siRNA sense strand
guucaaauacguccuugga

SEQ ID NO: 1699386 - RNA, 19 nt, Homo sapiens
  misc_RNA (1)...(19): siRNA sense strand
acucauugaugcuuguauu

SEQ ID NO: 1699387 - RNA, 19 nt, Homo sapiens
  misc_RNA (1)...(19): siRNA sense strand
aaauggagagcgaauagaa

SEQ ID NO: 1699388 - RNA, 19 nt, Homo sapiens
  misc_RNA (1)...(19): siRNA sense strand
ggaacugacaaucuguuga

SEQ ID NO: 1699389 - RNA, 19 nt, Homo sapiens
  misc_RNA (1)...(19): siRNA sense strand
uaugacaguuugaauaugc

SEQ ID NO: 1699390 - RNA, 19 nt, Homo sapiens
  misc_RNA (1)...(19): siRNA sense strand
cauagcaccaccgaaauuu

SEQ ID NO: 1699391 - RNA, 19 nt, Homo sapiens
  misc_RNA (1)...(19): siRNA sense strand
gcccuacuaucaaggacaa

SEQ ID NO: 1699392 - RNA, 19 nt, Homo sapiens
  misc_RNA (1)...(19): siRNA sense strand
guagauuggccucauaaag

SEQ ID NO: 1699393 - RNA, 19 nt, Homo sapiens
  misc_RNA (1)...(19): siRNA sense strand
ggccuuugguaguagauug

SEQ ID NO: 1699394 - RNA, 19 nt, Homo sapiens
  misc_RNA (1)...(19): siRNA sense strand
ccuuaucgauauuaugaga

SEQ ID NO: 1699395 - RNA, 19 nt, Homo sapiens
  misc_RNA (1)...(19): siRNA sense strand
ggauugaagauaauguguu

SEQ ID NO: 1699396 - RNA, 19 nt, Homo sapiens
  misc_RNA (1)...(19): siRNA sense strand
cuccaucacugacuccaaa

SEQ ID NO: 1699397 - RNA, 19 nt, Homo sapiens
  misc_RNA (1)...(19): siRNA sense strand
guaugacaguuugaauaug

SEQ ID NO: 1699398 - RNA, 19 nt, Homo sapiens
  misc_RNA (1)...(19): siRNA sense strand
auaaacguguggagguaaa

SEQ ID NO: 1699399 - RNA, 19 nt, Homo sapiens
  misc_RNA (1)...(19): siRNA sense strand
caagaagagagcucaguuc

SEQ ID NO: 1699400 - RNA, 19 nt, Homo sapiens
  misc_RNA (1)...(19): siRNA sense strand
gcuaugcauuucuucucuu

SEQ ID NO: 1699401 - RNA, 19 nt, Homo sapiens
  misc_RNA (1)...(19): siRNA sense strand
ucagaagauuugggccuuu

SEQ ID NO: 1699402 - RNA, 19 nt, Homo sapiens
  misc_RNA (1)...(19): siRNA sense strand
aauaacugcuagcuucaga

SEQ ID NO: 1699403 - RNA, 19 nt, Homo sapiens
  misc_RNA (1)...(19): siRNA sense strand
ccaugaauauaccucaaca

SEQ ID NO: 1699404 - RNA, 19 nt, Homo sapiens
  misc_RNA (1)...(19): siRNA sense strand
ucauagcaccaccgaaauu

SEQ ID NO: 1699405 - RNA, 19 nt, Homo sapiens
  misc_RNA (1)...(19): siRNA sense strand
ggaugguucucagccuuug

SEQ ID NO: 1699406 - RNA, 19 nt, Homo sapiens
  misc_RNA (1)...(19): siRNA sense strand
gaacgcuucucucgaaaag

SEQ ID NO: 1699407 - RNA, 19 nt, Homo sapiens
  misc_RNA (1)...(19): siRNA sense strand
gacaaaccaguucaaauac

SEQ ID NO: 1699408 - RNA, 19 nt, Homo sapiens
  misc_RNA (1)...(19): siRNA sense strand
ucaagaagagagcucaguu

SEQ ID NO: 1699409 - RNA, 19 nt, Homo sapiens
  misc_RNA (1)...(19): siRNA sense strand
gguaguagauuggccucau

SEQ ID NO: 1699410 - RNA, 19 nt, Homo sapiens
  misc_RNA (1)...(19): siRNA sense strand
gcuucagcauggugauauu

SEQ ID NO: 1699411 - RNA, 19 nt, Homo sapiens
  misc_RNA (1)...(19): siRNA sense strand
cauaagccauugguaaagg

SEQ ID NO: 1699412 - RNA, 19 nt, Homo sapiens
  misc_RNA (1)...(19): siRNA sense strand
ggacaaaccaguucaaaua

SEQ ID NO: 1699413 - RNA, 19 nt, Homo sapiens
  misc_RNA (1)...(19): siRNA sense strand
ucacuugccugcaguauua

SEQ ID NO: 1699414 - RNA, 19 nt, Homo sapiens
  misc_RNA (1)...(19): siRNA sense strand
gaacagacaacaauaguaa

SEQ ID NO: 1699415 - RNA, 19 nt, Homo sapiens
  misc_RNA (1)...(19): siRNA sense strand
gaugauggcuugcuugaug

SEQ ID NO: 1699416 - RNA, 19 nt, Homo sapiens
  misc_RNA (1)...(19): siRNA sense strand
uaaauucacccaccuguua

SEQ ID NO: 1699417 - RNA, 19 nt, Homo sapiens
  misc_RNA (1)...(19): siRNA sense strand
gacaaucuguugauguuaa

SEQ ID NO: 1699418 - RNA, 19 nt, Homo sapiens
  misc_RNA (1)...(19): siRNA sense strand
aaucagauaucuccauuga

SEQ ID NO: 1699419 - RNA, 19 nt, Homo sapiens
  misc_RNA (1)...(19): siRNA sense strand
ucagauaucuccauugaag

SEQ ID NO: 1699420 - RNA, 19 nt, Homo sapiens
  misc_RNA (1)...(19): siRNA sense strand
gaaauuuacucgcucaacu

SEQ ID NO: 1699421 - RNA, 19 nt, Homo sapiens
  misc_RNA (1)...(19): siRNA sense strand
gcagaaagcaaguccuauu

SEQ ID NO: 1699422 - RNA, 19 nt, Homo sapiens
  misc_RNA (1)...(19): siRNA sense strand
gaagaugaaauaacugcua

SEQ ID NO: 1699423 - RNA, 19 nt, Homo sapiens
  misc_RNA (1)...(19): siRNA sense strand
gaagauaauguguucagaa

SEQ ID NO: 1699424 - RNA, 19 nt, Homo sapiens
  misc_RNA (1)...(19): siRNA sense strand
ucaaauacguccuuggaau

SEQ ID NO: 1699425 - RNA, 19 nt, Homo sapiens
  misc_RNA (1)...(19): siRNA sense strand
guaguagauuggccucaua

SEQ ID NO: 1699426 - RNA, 19 nt, Homo sapiens
  misc_RNA (1)...(19): siRNA sense strand
ccaccagccucuucugaaa

SEQ ID NO: 1699427 - RNA, 19 nt, Homo sapiens
  misc_RNA (1)...(19): siRNA sense strand
gauugaagauaauguguuc

SEQ ID NO: 1699428 - RNA, 19 nt, Homo sapiens
  misc_RNA (1)...(19): siRNA sense strand
ugaaucagauaucuccauu

SEQ ID NO: 1699429 - RNA, 19 nt, Homo sapiens
  misc_RNA (1)...(19): siRNA sense strand
caaauacguccuuggaauu

SEQ ID NO: 1699430 - RNA, 19 nt, Homo sapiens
  misc_RNA (1)...(19): siRNA sense strand
gaaaauucccuuaucgaua

SEQ ID NO: 1699431 - RNA, 19 nt, Homo sapiens
  misc_RNA (1)...(19): siRNA sense strand
gaauaugcacucuuuggaa

SEQ ID NO: 1699432 - RNA, 19 nt, Homo sapiens
  misc_RNA (1)...(19): siRNA sense strand
uagaauguaugacaguuug

SEQ ID NO: 1699433 - RNA, 19 nt, Homo sapiens
  misc_RNA (1)...(19): siRNA sense strand
gaacugacaaucuguugau

SEQ ID NO: 1699434 - RNA, 19 nt, Homo sapiens
  misc_RNA (1)...(19): siRNA sense strand
guuugaauaugcacucuuu

SEQ ID NO: 1699435 - RNA, 19 nt, Homo sapiens
  misc_RNA (1)...(19): siRNA sense strand
ugauacagauccugagcua

SEQ ID NO: 1699436 - RNA, 19 nt, Homo sapiens
  misc_RNA (1)...(19): siRNA sense strand
gcauggugauauugauaaa

SEQ ID NO: 1699437 - RNA, 19 nt, Homo sapiens
  misc_RNA (1)...(19): siRNA sense strand
aauaugcacucuuuggaaa

SEQ ID NO: 1699438 - RNA, 19 nt, Homo sapiens
  misc_RNA (1)...(19): siRNA sense strand
gaccagaugugugaugaau

SEQ ID NO: 1699439 - RNA, 19 nt, Homo sapiens
  misc_RNA (1)...(19): siRNA sense strand
uggcagagaucaucguaga

SEQ ID NO: 1699440 - RNA, 19 nt, Homo sapiens
  misc_RNA (1)...(19): siRNA sense strand
ggaucgaaguagaauguau

SEQ ID NO: 1699441 - RNA, 19 nt, Homo sapiens
  misc_RNA (1)...(19): siRNA sense strand
cgauugagcuauccacauc

SEQ ID NO: 1699442 - RNA, 19 nt, Homo sapiens
  misc_RNA (1)...(19): siRNA sense strand
ggacgugaguuccauaagc

SEQ ID NO: 1699443 - RNA, 19 nt, Homo sapiens
  misc_RNA (1)...(19): siRNA sense strand
gguaaagccauaugugcua

SEQ ID NO: 1699444 - RNA, 19 nt, Homo sapiens
  misc_RNA (1)...(19): siRNA sense strand
gcgaguugcuuucuccaau

SEQ ID NO: 1699445 - RNA, 19 nt, Homo sapiens
  misc_RNA (1)...(19): siRNA sense strand
cagaaagcaaguccuauuu

SEQ ID NO: 1699446 - RNA, 19 nt, Homo sapiens
  misc_RNA (1)...(19): siRNA sense strand
gaaauaacugcuagcuuca

SEQ ID NO: 1699447 - RNA, 19 nt, Homo sapiens
  misc_RNA (1)...(19): siRNA sense strand
gauguuaaauggucguucu

SEQ ID NO: 1699448 - RNA, 19 nt, Homo sapiens
  misc_RNA (1)...(19): siRNA sense strand
gaacuaugaaucagauauc

SEQ ID NO: 1699449 - RNA, 19 nt, Homo sapiens
  misc_RNA (1)...(19): siRNA sense strand
ugauaaacguguggaggua

SEQ ID NO: 1699450 - RNA, 19 nt, Homo sapiens
  misc_RNA (1)...(19): siRNA sense strand
ggaauuuaagugauaguga

SEQ ID NO: 1699451 - RNA, 19 nt, Homo sapiens
  misc_RNA (1)...(19): siRNA sense strand
ggaaucccaggaacuauga

SEQ ID NO: 1699452 - RNA, 19 nt, Homo sapiens
  misc_RNA (1)...(19): siRNA sense strand
auacagauccugagcuaaa

SEQ ID NO: 1699453 - RNA, 19 nt, Homo sapiens
  misc_RNA (1)...(19): siRNA sense strand
ggaacuugcuaugaucaug

SEQ ID NO: 1699454 - RNA, 19 nt, Homo sapiens
  misc_RNA (1)...(19): siRNA sense strand
ccuuggaauuuaagugaua

SEQ ID NO: 1699455 - RNA, 19 nt, Homo sapiens
  misc_RNA (1)...(19): siRNA sense strand
uaauacacucuuacccuua

SEQ ID NO: 1699456 - RNA, 19 nt, Homo sapiens
  misc_RNA (1)...(19): siRNA sense strand
ccagaugugugaugaaugc

SEQ ID NO: 1699457 - RNA, 19 nt, Homo sapiens
  misc_RNA (1)...(19): siRNA sense strand
ccaaucagcagagcuauau

SEQ ID NO: 1699458 - RNA, 19 nt, Homo sapiens
  misc_RNA (1)...(19): siRNA sense strand
guucuucccucuuuccaau

SEQ ID NO: 1699459 - RNA, 19 nt, Homo sapiens
  misc_RNA (1)...(19): siRNA sense strand
ggaacuaugaaucagauau

SEQ ID NO: 1699460 - RNA, 19 nt, Homo sapiens
  misc_RNA (1)...(19): siRNA sense strand
gaucauggaccggcuguau

SEQ ID NO: 1699461 - RNA, 19 nt, Homo sapiens
  misc_RNA (1)...(19): siRNA sense strand
auacguccuuggaauuuaa

SEQ ID NO: 1699462 - RNA, 19 nt, Homo sapiens
  misc_RNA (1)...(19): siRNA sense strand
cauugaugcuuguauugaa

SEQ ID NO: 1699463 - RNA, 19 nt, Homo sapiens
  misc_RNA (1)...(19): siRNA sense strand
cgaaguagaauguaugaca

SEQ ID NO: 1699464 - RNA, 19 nt, Homo sapiens
  misc_RNA (1)...(19): siRNA sense strand
guguggagguaaagccaua

SEQ ID NO: 1699465 - RNA, 19 nt, Homo sapiens
  misc_RNA (1)...(19): siRNA sense strand
agccauaugugcuagauga

SEQ ID NO: 1699466 - RNA, 19 nt, Homo sapiens
  misc_RNA (1)...(19): siRNA sense strand
cugacaaucuguugauguu

SEQ ID NO: 1699467 - RNA, 19 nt, Homo sapiens
  misc_RNA (1)...(19): siRNA sense strand
uagaugaccagauguguga

SEQ ID NO: 1699468 - RNA, 19 nt, Homo sapiens
  misc_RNA (1)...(19): siRNA sense strand
gagcuauauugcugccauu

SEQ ID NO: 1699469 - RNA, 19 nt, Homo sapiens
  misc_RNA (1)...(19): siRNA sense strand
caaaccaguucaaauacgu

SEQ ID NO: 1699470 - RNA, 19 nt, Homo sapiens
  misc_RNA (1)...(19): siRNA sense strand
caggaacuaugaaucagau

SEQ ID NO: 1699471 - RNA, 19 nt, Homo sapiens
  misc_RNA (1)...(19): siRNA sense strand
gaguugcuuucuccaauca

SEQ ID NO: 1699472 - RNA, 19 nt, Homo sapiens
  misc_RNA (1)...(19): siRNA sense strand
cuccagauauugaugaaga

SEQ ID NO: 1699473 - RNA, 19 nt, Homo sapiens
  misc_RNA (1)...(19): siRNA sense strand
guagaauguaugacaguuu

SEQ ID NO: 1699474 - RNA, 19 nt, Homo sapiens
  misc_RNA (1)...(19): siRNA sense strand
gaucgaaguagaauguaug

SEQ ID NO: 1699475 - RNA, 19 nt, Homo sapiens
  misc_RNA (1)...(19): siRNA sense strand
ugucauagcaccaccgaaa

SEQ ID NO: 1699476 - RNA, 19 nt, Homo sapiens
  misc_RNA (1)...(19): siRNA sense strand
cagaagauuugggccuuug

SEQ ID NO: 1699477 - RNA, 19 nt, Homo sapiens
  misc_RNA (1)...(19): siRNA sense strand
cuaugcauuucuucucuuu

SEQ ID NO: 1699478 - RNA, 19 nt, Homo sapiens
  misc_RNA (1)...(19): siRNA sense strand
cagcauggugauauugaua

SEQ ID NO: 1699479 - RNA, 19 nt, Homo sapiens
  misc_RNA (1)...(19): siRNA sense strand
aauacguccuuggaauuua

SEQ ID NO: 1699480 - RNA, 19 nt, Homo sapiens
  misc_RNA (1)...(19): siRNA sense strand
gauaaacguguggagguaa

SEQ ID NO: 1699481 - RNA, 19 nt, Homo sapiens
  misc_RNA (1)...(19): siRNA sense strand
ggagguaaagccauaugug

SEQ ID NO: 1699482 - RNA, 19 nt, Homo sapiens
  misc_RNA (1)...(19): siRNA sense strand
gaauguaugacaguuugaa

SEQ ID NO: 1699483 - RNA, 19 nt, Homo sapiens
  misc_RNA (1)...(19): siRNA sense strand
cuauauugcugccauuagu

SEQ ID NO: 1699484 - RNA, 19 nt, Homo sapiens
  misc_RNA (1)...(19): siRNA sense strand
gcuguaugguggaguuugu

SEQ ID NO: 1699485 - RNA, 19 nt, Homo sapiens
  misc_RNA (1)...(19): siRNA sense strand
guucaaauacguccuugga

SEQ ID NO: 1699486 - RNA, 19 nt, Homo sapiens
  misc_RNA (1)...(19): siRNA sense strand
acucauugaugcuuguauu

SEQ ID NO: 1699487 - RNA, 19 nt, Homo sapiens
  misc_RNA (1)...(19): siRNA sense strand
aaauggagagcgaauagaa

SEQ ID NO: 1699488 - RNA, 19 nt, Homo sapiens
  misc_RNA (1)...(19): siRNA sense strand
ggaacugacaaucuguuga

SEQ ID NO: 1699489 - RNA, 19 nt, Homo sapiens
  misc_RNA (1)...(19): siRNA sense strand
uaugacaguuugaauaugc

SEQ ID NO: 1699490 - RNA, 19 nt, Homo sapiens
  misc_RNA (1)...(19): siRNA sense strand
cauagcaccaccgaaauuu

SEQ ID NO: 1699491 - RNA, 19 nt, Homo sapiens
  misc_RNA (1)...(19): siRNA sense strand
gcccuacuaucaaggacaa

SEQ ID NO: 1699492 - RNA, 19 nt, Homo sapiens
  misc_RNA (1)...(19): siRNA sense strand
guagauuggccucauaaag

SEQ ID NO: 1699493 - RNA, 19 nt, Homo sapiens
  misc_RNA (1)...(19): siRNA sense strand
ggccuuugguaguagauug

SEQ ID NO: 1699494 - RNA, 19 nt, Homo sapiens
  misc_RNA (1)...(19): siRNA sense strand
ccuuaucgauauuaugaga

SEQ ID NO: 1699495 - RNA, 19 nt, Homo sapiens
  misc_RNA (1)...(19): siRNA sense strand
ggauugaagauaauguguu

SEQ ID NO: 1699496 - RNA, 19 nt, Homo sapiens
  misc_RNA (1)...(19): siRNA sense strand
cuccaucacugacuccaaa

SEQ ID NO: 1699497 - RNA, 19 nt, Homo sapiens
  misc_RNA (1)...(19): siRNA sense strand
guaugacaguuugaauaug

SEQ ID NO: 1699498 - RNA, 19 nt, Homo sapiens
  misc_RNA (1)...(19): siRNA sense strand
auaaacguguggagguaaa

SEQ ID NO: 1699499 - RNA, 19 nt, Homo sapiens
  misc_RNA (1)...(19): siRNA sense strand
caagaagagagcucaguuc

SEQ ID NO: 1699500 - RNA, 19 nt, Homo sapiens
  misc_RNA (1)...(19): siRNA sense strand
gcuaugcauuucuucucuu

SEQ ID NO: 1699501 - RNA, 19 nt, Homo sapiens
  misc_RNA (1)...(19): siRNA sense strand
ucagaagauuugggccuuu

SEQ ID NO: 1699502 - RNA, 19 nt, Homo sapiens
  misc_RNA (1)...(19): siRNA sense strand
aauaacugcuagcuucaga

SEQ ID NO: 1699503 - RNA, 19 nt, Homo sapiens
  misc_RNA (1)...(19): siRNA sense strand
ccaugaauauaccucaaca

SEQ ID NO: 1699504 - RNA, 19 nt, Homo sapiens
  misc_RNA (1)...(19): siRNA sense strand
ucauagcaccaccgaaauu

SEQ ID NO: 1699505 - RNA, 19 nt, Homo sapiens
  misc_RNA (1)...(19): siRNA sense strand
ggaugguucucagccuuug

SEQ ID NO: 1699506 - RNA, 19 nt, Homo sapiens
  misc_RNA (1)...(19): siRNA sense strand
gaacgcuucucucgaaaag

SEQ ID NO: 1699507 - RNA, 19 nt, Homo sapiens
  misc_RNA (1)...(19): siRNA sense strand
gacaaaccaguucaaauac

SEQ ID NO: 1699508 - RNA, 19 nt, Homo sapiens
  misc_RNA (1)...(19): siRNA sense strand
ucaagaagagagcucaguu

SEQ ID NO: 1699509 - RNA, 19 nt, Homo sapiens
  misc_RNA (1)...(19): siRNA sense strand
gguaguagauuggccucau

SEQ ID NO: 1699510 - RNA, 19 nt, Homo sapiens
  misc_RNA (1)...(19): siRNA sense strand
gcuucagcauggugauauu

SEQ ID NO: 1699511 - RNA, 19 nt, Homo sapiens
  misc_RNA (1)...(19): siRNA sense strand
cauaagccauugguaaagg

SEQ ID NO: 1699512 - RNA, 19 nt, Homo sapiens
  misc_RNA (1)...(19): siRNA sense strand
ggaacugccuugucaugua

SEQ ID NO: 1699513 - RNA, 19 nt, Homo sapiens
  misc_RNA (1)...(19): siRNA sense strand
gaagacagccaccaauauu

SEQ ID NO: 1699514 - RNA, 19 nt, Homo sapiens
  misc_RNA (1)...(19): siRNA sense strand
gaguguggaucgcuaugua

SEQ ID NO: 1699515 - RNA, 19 nt, Homo sapiens
  misc_RNA (1)...(19): siRNA sense strand
agacagccaccaauauuua

SEQ ID NO: 1699516 - RNA, 19 nt, Homo sapiens
  misc_RNA (1)...(19): siRNA sense strand
gaacugccuugucauguac

SEQ ID NO: 1699517 - RNA, 19 nt, Homo sapiens
  misc_RNA (1)...(19): siRNA sense strand
ccaccaauauuuacaucuu

SEQ ID NO: 1699518 - RNA, 19 nt, Homo sapiens
  misc_RNA (1)...(19): siRNA sense strand
ggaaugcgcugugcaagac

SEQ ID NO: 1699519 - RNA, 19 nt, Homo sapiens
  misc_RNA (1)...(19): siRNA sense strand
cggcacaggucgaggauga

SEQ ID NO: 1699520 - RNA, 19 nt, Homo sapiens
  misc_RNA (1)...(19): siRNA sense strand
ggucgaggaugaagagauc

SEQ ID NO: 1699521 - RNA, 19 nt, Homo sapiens
  misc_RNA (1)...(19): siRNA sense strand
agacagucauugccauuga

SEQ ID NO: 1699522 - RNA, 19 nt, Homo sapiens
  misc_RNA (1)...(19): siRNA sense strand
ucauugccauugacuacua

SEQ ID NO: 1699523 - RNA, 19 nt, Homo sapiens
  misc_RNA (1)...(19): siRNA sense strand
ugaagacagccaccaauau

SEQ ID NO: 1699524 - RNA, 19 nt, Homo sapiens
  misc_RNA (1)...(19): siRNA sense strand
gccauugacuacuacaaca

SEQ ID NO: 1699525 - RNA, 19 nt, Homo sapiens
  misc_RNA (1)...(19): siRNA sense strand
caagacagucauugccauu

SEQ ID NO: 1699526 - RNA, 19 nt, Homo sapiens
  misc_RNA (1)...(19): siRNA sense strand
gcgccguucugggagguua

SEQ ID NO: 1699527 - RNA, 19 nt, Homo sapiens
  misc_RNA (1)...(19): siRNA sense strand
gggaaugcgcugugcaaga

SEQ ID NO: 1699528 - RNA, 19 nt, Homo sapiens
  misc_RNA (1)...(19): siRNA sense strand
gcaucuuccucuucuccuu

SEQ ID NO: 1699529 - RNA, 19 nt, Homo sapiens
  misc_RNA (1)...(19): siRNA sense strand
cacccuaacugccaugagu

SEQ ID NO: 1699530 - RNA, 19 nt, Homo sapiens
  misc_RNA (1)...(19): siRNA sense strand
aagacagccaccaauauuu

SEQ ID NO: 1699531 - RNA, 19 nt, Homo sapiens
  misc_RNA (1)...(19): siRNA sense strand
accagcaccuucacccuaa

SEQ ID NO: 1699532 - RNA, 19 nt, Homo sapiens
  misc_RNA (1)...(19): siRNA sense strand
ugacuacuacaacauguuc

SEQ ID NO: 1699533 - RNA, 19 nt, Homo sapiens
  misc_RNA (1)...(19): siRNA sense strand
ucgagugccugguggagau

SEQ ID NO: 1699534 - RNA, 19 nt, Homo sapiens
  misc_RNA (1)...(19): siRNA sense strand
augaagacagccaccaaua

SEQ ID NO: 1699535 - RNA, 19 nt, Homo sapiens
  misc_RNA (1)...(19): siRNA sense strand
caaguucugcugugcaucu

SEQ ID NO: 1699536 - RNA, 19 nt, Homo sapiens
  misc_RNA (1)...(19): siRNA sense strand
agacugccguggccauucu

SEQ ID NO: 1699537 - RNA, 19 nt, Homo sapiens
  misc_RNA (1)...(19): siRNA sense strand
gcacaggucgaggaugaag

SEQ ID NO: 1699538 - RNA, 19 nt, Homo sapiens
  misc_RNA (1)...(19): siRNA sense strand
ccucuacgccuuccuggau

SEQ ID NO: 1699539 - RNA, 19 nt, Homo sapiens
  misc_RNA (1)...(19): siRNA sense strand
ggugguaguggcuguguuc

SEQ ID NO: 1699540 - RNA, 19 nt, Homo sapiens
  misc_RNA (1)...(19): siRNA sense strand
gggacgugcaggugucuga

SEQ ID NO: 1699541 - RNA, 19 nt, Homo sapiens
  misc_RNA (1)...(19): siRNA sense strand
ccgcaucugcugcucaaug

SEQ ID NO: 1699542 - RNA, 19 nt, Homo sapiens
  misc_RNA (1)...(19): siRNA sense strand
aaaugaagacagccaccaa

SEQ ID NO: 1699543 - RNA, 19 nt, Homo sapiens
  misc_RNA (1)...(19): siRNA sense strand
gggaacugccuugucaugu

SEQ ID NO: 1699544 - RNA, 19 nt, Homo sapiens
  misc_RNA (1)...(19): siRNA sense strand
ggaacugccuugucaugua

SEQ ID NO: 1699545 - RNA, 19 nt, Homo sapiens
  misc_RNA (1)...(19): siRNA sense strand
gaagacagccaccaauauu

SEQ ID NO: 1699546 - RNA, 19 nt, Homo sapiens
  misc_RNA (1)...(19): siRNA sense strand
gaguguggaucgcuaugua

SEQ ID NO: 1699547 - RNA, 19 nt, Homo sapiens
  misc_RNA (1)...(19): siRNA sense strand
agacagccaccaauauuua

SEQ ID NO: 1699548 - RNA, 19 nt, Homo sapiens
  misc_RNA (1)...(19): siRNA sense strand
gaacugccuugucauguac

SEQ ID NO: 1699549 - RNA, 19 nt, Homo sapiens
  misc_RNA (1)...(19): siRNA sense strand
ccaccaauauuuacaucuu

SEQ ID NO: 1699550 - RNA, 19 nt, Homo sapiens
  misc_RNA (1)...(19): siRNA sense strand
ggaaugcgcugugcaagac

SEQ ID NO: 1699551 - RNA, 19 nt, Homo sapiens
  misc_RNA (1)...(19): siRNA sense strand
cggcacaggucgaggauga

SEQ ID NO: 1699552 - RNA, 19 nt, Homo sapiens
  misc_RNA (1)...(19): siRNA sense strand
ggucgaggaugaagagauc

SEQ ID NO: 1699553 - RNA, 19 nt, Homo sapiens
  misc_RNA (1)...(19): siRNA sense strand
agacagucauugccauuga

SEQ ID NO: 1699554 - RNA, 19 nt, Homo sapiens
  misc_RNA (1)...(19): siRNA sense strand
ucauugccauugacuacua

SEQ ID NO: 1699555 - RNA, 19 nt, Homo sapiens
  misc_RNA (1)...(19): siRNA sense strand
ugaagacagccaccaauau

SEQ ID NO: 1699556 - RNA, 19 nt, Homo sapiens
  misc_RNA (1)...(19): siRNA sense strand
gccauugacuacuacaaca

SEQ ID NO: 1699557 - RNA, 19 nt, Homo sapiens
  misc_RNA (1)...(19): siRNA sense strand
caagacagucauugccauu

SEQ ID NO: 1699558 - RNA, 19 nt, Homo sapiens
  misc_RNA (1)...(19): siRNA sense strand
gcgccguucugggagguua

SEQ ID NO: 1699559 - RNA, 19 nt, Homo sapiens
  misc_RNA (1)...(19): siRNA sense strand
gggaaugcgcugugcaaga

SEQ ID NO: 1699560 - RNA, 19 nt, Homo sapiens
  misc_RNA (1)...(19): siRNA sense strand
gcaucuuccucuucuccuu

SEQ ID NO: 1699561 - RNA, 19 nt, Homo sapiens
  misc_RNA (1)...(19): siRNA sense strand
cacccuaacugccaugagu

SEQ ID NO: 1699562 - RNA, 19 nt, Homo sapiens
  misc_RNA (1)...(19): siRNA sense strand
aagacagccaccaauauuu

SEQ ID NO: 1699563 - RNA, 19 nt, Homo sapiens
  misc_RNA (1)...(19): siRNA sense strand
accagcaccuucacccuaa

SEQ ID NO: 1699564 - RNA, 19 nt, Homo sapiens
  misc_RNA (1)...(19): siRNA sense strand
ugacuacuacaacauguuc

SEQ ID NO: 1699565 - RNA, 19 nt, Homo sapiens
  misc_RNA (1)...(19): siRNA sense strand
ucgagugccugguggagau

SEQ ID NO: 1699566 - RNA, 19 nt, Homo sapiens
  misc_RNA (1)...(19): siRNA sense strand
augaagacagccaccaaua

SEQ ID NO: 1699567 - RNA, 19 nt, Homo sapiens
  misc_RNA (1)...(19): siRNA sense strand
caaguucugcugugcaucu

SEQ ID NO: 1699568 - RNA, 19 nt, Homo sapiens
  misc_RNA (1)...(19): siRNA sense strand
agacugccguggccauucu

SEQ ID NO: 1699569 - RNA, 19 nt, Homo sapiens
  misc_RNA (1)...(19): siRNA sense strand
gcacaggucgaggaugaag

SEQ ID NO: 1699570 - RNA, 19 nt, Homo sapiens
  misc_RNA (1)...(19): siRNA sense strand
ccucuacgccuuccuggau

SEQ ID NO: 1699571 - RNA, 19 nt, Homo sapiens
  misc_RNA (1)...(19): siRNA sense strand
ggugguaguggcuguguuc

SEQ ID NO: 1699572 - RNA, 19 nt, Homo sapiens
  misc_RNA (1)...(19): siRNA sense strand
gggacgugcaggugucuga

SEQ ID NO: 1699573 - RNA, 19 nt, Homo sapiens
  misc_RNA (1)...(19): siRNA sense strand
ccgcaucugcugcucaaug

SEQ ID NO: 1699574 - RNA, 19 nt, Homo sapiens
  misc_RNA (1)...(19): siRNA sense strand
aaaugaagacagccaccaa

SEQ ID NO: 1699575 - RNA, 19 nt, Homo sapiens
  misc_RNA (1)...(19): siRNA sense strand
gggaacugccuugucaugu

SEQ ID NO: 1699576 - RNA, 19 nt, Homo sapiens
  misc_RNA (1)...(19): siRNA sense strand
ggaacugccuugucaugua

SEQ ID NO: 1699577 - RNA, 19 nt, Homo sapiens
  misc_RNA (1)...(19): siRNA sense strand
gaagacagccaccaauauu

SEQ ID NO: 1699578 - RNA, 19 nt, Homo sapiens
  misc_RNA (1)...(19): siRNA sense strand
gaguguggaucgcuaugua

SEQ ID NO: 1699579 - RNA, 19 nt, Homo sapiens
  misc_RNA (1)...(19): siRNA sense strand
agacagccaccaauauuua

SEQ ID NO: 1699580 - RNA, 19 nt, Homo sapiens
  misc_RNA (1)...(19): siRNA sense strand
gaacugccuugucauguac

SEQ ID NO: 1699581 - RNA, 19 nt, Homo sapiens
  misc_RNA (1)...(19): siRNA sense strand
ccaccaauauuuacaucuu

SEQ ID NO: 1699582 - RNA, 19 nt, Homo sapiens
  misc_RNA (1)...(19): siRNA sense strand
ggaaugcgcugugcaagac

SEQ ID NO: 1699583 - RNA, 19 nt, Homo sapiens
  misc_RNA (1)...(19): siRNA sense strand
cggcacaggucgaggauga

SEQ ID NO: 1699584 - RNA, 19 nt, Homo sapiens
  misc_RNA (1)...(19): siRNA sense strand
ggucgaggaugaagagauc

SEQ ID NO: 1699585 - RNA, 19 nt, Homo sapiens
  misc_RNA (1)...(19): siRNA sense strand
agacagucauugccauuga

SEQ ID NO: 1699586 - RNA, 19 nt, Homo sapiens
  misc_RNA (1)...(19): siRNA sense strand
ucauugccauugacuacua

SEQ ID NO: 1699587 - RNA, 19 nt, Homo sapiens
  misc_RNA (1)...(19): siRNA sense strand
ugaagacagccaccaauau

SEQ ID NO: 1699588 - RNA, 19 nt, Homo sapiens
  misc_RNA (1)...(19): siRNA sense strand
gccauugacuacuacaaca

SEQ ID NO: 1699589 - RNA, 19 nt, Homo sapiens
  misc_RNA (1)...(19): siRNA sense strand
caagacagucauugccauu

SEQ ID NO: 1699590 - RNA, 19 nt, Homo sapiens
  misc_RNA (1)...(19): siRNA sense strand
gcgccguucugggagguua

SEQ ID NO: 1699591 - RNA, 19 nt, Homo sapiens
  misc_RNA (1)...(19): siRNA sense strand
gggaaugcgcugugcaaga

SEQ ID NO: 1699592 - RNA, 19 nt, Homo sapiens
  misc_RNA (1)...(19): siRNA sense strand
gcaucuuccucuucuccuu

SEQ ID NO: 1699593 - RNA, 19 nt, Homo sapiens
  misc_RNA (1)...(19): siRNA sense strand
cacccuaacugccaugagu

SEQ ID NO: 1699594 - RNA, 19 nt, Homo sapiens
  misc_RNA (1)...(19): siRNA sense strand
aagacagccaccaauauuu

SEQ ID NO: 1699595 - RNA, 19 nt, Homo sapiens
  misc_RNA (1)...(19): siRNA sense strand
accagcaccuucacccuaa

SEQ ID NO: 1699596 - RNA, 19 nt, Homo sapiens
  misc_RNA (1)...(19): siRNA sense strand
ugacuacuacaacauguuc

SEQ ID NO: 1699597 - RNA, 19 nt, Homo sapiens
  misc_RNA (1)...(19): siRNA sense strand
ucgagugccugguggagau

SEQ ID NO: 1699598 - RNA, 19 nt, Homo sapiens
  misc_RNA (1)...(19): siRNA sense strand
augaagacagccaccaaua

SEQ ID NO: 1699599 - RNA, 19 nt, Homo sapiens
  misc_RNA (1)...(19): siRNA sense strand
caaguucugcugugcaucu

SEQ ID NO: 1699600 - RNA, 19 nt, Homo sapiens
  misc_RNA (1)...(19): siRNA sense strand
agacugccguggccauucu

SEQ ID NO: 1699601 - RNA, 19 nt, Homo sapiens
  misc_RNA (1)...(19): siRNA sense strand
gcacaggucgaggaugaag

SEQ ID NO: 1699602 - RNA, 19 nt, Homo sapiens
  misc_RNA (1)...(19): siRNA sense strand
ccucuacgccuuccuggau

SEQ ID NO: 1699603 - RNA, 19 nt, Homo sapiens
  misc_RNA (1)...(19): siRNA sense strand
ggugguaguggcuguguuc

SEQ ID NO: 1699604 - RNA, 19 nt, Homo sapiens
  misc_RNA (1)...(19): siRNA sense strand
gggacgugcaggugucuga

SEQ ID NO: 1699605 - RNA, 19 nt, Homo sapiens
  misc_RNA (1)...(19): siRNA sense strand
ccgcaucugcugcucaaug

SEQ ID NO: 1699606 - RNA, 19 nt, Homo sapiens
  misc_RNA (1)...(19): siRNA sense strand
aaaugaagacagccaccaa

SEQ ID NO: 1699607 - RNA, 19 nt, Homo sapiens
  misc_RNA (1)...(19): siRNA sense strand
gggaacugccuugucaugu

SEQ ID NO: 1699608 - RNA, 19 nt, Homo sapiens
  misc_RNA (1)...(19): siRNA sense strand
ggaacugccuugucaugua

SEQ ID NO: 1699609 - RNA, 19 nt, Homo sapiens
  misc_RNA (1)...(19): siRNA sense strand
gaagacagccaccaauauu

SEQ ID NO: 1699610 - RNA, 19 nt, Homo sapiens
  misc_RNA (1)...(19): siRNA sense strand
gaguguggaucgcuaugua

SEQ ID NO: 1699611 - RNA, 19 nt, Homo sapiens
  misc_RNA (1)...(19): siRNA sense strand
agacagccaccaauauuua

SEQ ID NO: 1699612 - RNA, 19 nt, Homo sapiens
  misc_RNA (1)...(19): siRNA sense strand
gaacugccuugucauguac

SEQ ID NO: 1699613 - RNA, 19 nt, Homo sapiens
  misc_RNA (1)...(19): siRNA sense strand
ccaccaauauuuacaucuu

SEQ ID NO: 1699614 - RNA, 19 nt, Homo sapiens
  misc_RNA (1)...(19): siRNA sense strand
ggaaugcgcugugcaagac

SEQ ID NO: 1699615 - RNA, 19 nt, Homo sapiens
  misc_RNA (1)...(19): siRNA sense strand
cggcacaggucgaggauga

SEQ ID NO: 1699616 - RNA, 19 nt, Homo sapiens
  misc_RNA (1)...(19): siRNA sense strand
ggucgaggaugaagagauc

SEQ ID NO: 1699617 - RNA, 19 nt, Homo sapiens
  misc_RNA (1)...(19): siRNA sense strand
agacagucauugccauuga

SEQ ID NO: 1699618 - RNA, 19 nt, Homo sapiens
  misc_RNA (1)...(19): siRNA sense strand
ucauugccauugacuacua

SEQ ID NO: 1699619 - RNA, 19 nt, Homo sapiens
  misc_RNA (1)...(19): siRNA sense strand
ugaagacagccaccaauau

SEQ ID NO: 1699620 - RNA, 19 nt, Homo sapiens
  misc_RNA (1)...(19): siRNA sense strand
gccauugacuacuacaaca

SEQ ID NO: 1699621 - RNA, 19 nt, Homo sapiens
  misc_RNA (1)...(19): siRNA sense strand
caagacagucauugccauu

SEQ ID NO: 1699622 - RNA, 19 nt, Homo sapiens
  misc_RNA (1)...(19): siRNA sense strand
gcgccguucugggagguua

SEQ ID NO: 1699623 - RNA, 19 nt, Homo sapiens
  misc_RNA (1)...(19): siRNA sense strand
gggaaugcgcugugcaaga

SEQ ID NO: 1699624 - RNA, 19 nt, Homo sapiens
  misc_RNA (1)...(19): siRNA sense strand
gcaucuuccucuucuccuu

SEQ ID NO: 1699625 - RNA, 19 nt, Homo sapiens
  misc_RNA (1)...(19): siRNA sense strand
cacccuaacugccaugagu

SEQ ID NO: 1699626 - RNA, 19 nt, Homo sapiens
  misc_RNA (1)...(19): siRNA sense strand
aagacagccaccaauauuu

SEQ ID NO: 1699627 - RNA, 19 nt, Homo sapiens
  misc_RNA (1)...(19): siRNA sense strand
accagcaccuucacccuaa

SEQ ID NO: 1699628 - RNA, 19 nt, Homo sapiens
  misc_RNA (1)...(19): siRNA sense strand
ugacuacuacaacauguuc

SEQ ID NO: 1699629 - RNA, 19 nt, Homo sapiens
  misc_RNA (1)...(19): siRNA sense strand
ucgagugccugguggagau

SEQ ID NO: 1699630 - RNA, 19 nt, Homo sapiens
  misc_RNA (1)...(19): siRNA sense strand
augaagacagccaccaaua

SEQ ID NO: 1699631 - RNA, 19 nt, Homo sapiens
  misc_RNA (1)...(19): siRNA sense strand
caaguucugcugugcaucu

SEQ ID NO: 1699632 - RNA, 19 nt, Homo sapiens
  misc_RNA (1)...(19): siRNA sense strand
agacugccguggccauucu

SEQ ID NO: 1699633 - RNA, 19 nt, Homo sapiens
  misc_RNA (1)...(19): siRNA sense strand
gcacaggucgaggaugaag

SEQ ID NO: 1699634 - RNA, 19 nt, Homo sapiens
  misc_RNA (1)...(19): siRNA sense strand
ccucuacgccuuccuggau

SEQ ID NO: 1699635 - RNA, 19 nt, Homo sapiens
  misc_RNA (1)...(19): siRNA sense strand
ggugguaguggcuguguuc

SEQ ID NO: 1699636 - RNA, 19 nt, Homo sapiens
  misc_RNA (1)...(19): siRNA sense strand
gggacgugcaggugucuga

SEQ ID NO: 1699637 - RNA, 19 nt, Homo sapiens
  misc_RNA (1)...(19): siRNA sense strand
ccgcaucugcugcucaaug

SEQ ID NO: 1699638 - RNA, 19 nt, Homo sapiens
  misc_RNA (1)...(19): siRNA sense strand
aaaugaagacagccaccaa

SEQ ID NO: 1699639 - RNA, 19 nt, Homo sapiens
  misc_RNA (1)...(19): siRNA sense strand
gggaacugccuugucaugu

SEQ ID NO: 1699640 - RNA, 19 nt, Homo sapiens
  misc_RNA (1)...(19): siRNA sense strand
caaguuagauugccaguua

SEQ ID NO: 1699641 - RNA, 19 nt, Homo sapiens
  misc_RNA (1)...(19): siRNA sense strand
ggaauuagaucaagauaug

SEQ ID NO: 1699642 - RNA, 19 nt, Homo sapiens
  misc_RNA (1)...(19): siRNA sense strand
gaaagaagaugagcaaaga

SEQ ID NO: 1699643 - RNA, 19 nt, Homo sapiens
  misc_RNA (1)...(19): siRNA sense strand
gguaugagcuguuaaguga

SEQ ID NO: 1699644 - RNA, 19 nt, Homo sapiens
  misc_RNA (1)...(19): siRNA sense strand
gagaagauauggaauguga

SEQ ID NO: 1699645 - RNA, 19 nt, Homo sapiens
  misc_RNA (1)...(19): siRNA sense strand
gacagaaucuucagaguuu

SEQ ID NO: 1699646 - RNA, 19 nt, Homo sapiens
  misc_RNA (1)...(19): siRNA sense strand
ggcaauagcugaagaagaa

SEQ ID NO: 1699647 - RNA, 19 nt, Homo sapiens
  misc_RNA (1)...(19): siRNA sense strand
caagauaugucgaaagaaa

SEQ ID NO: 1699648 - RNA, 19 nt, Homo sapiens
  misc_RNA (1)...(19): siRNA sense strand
gaacuaaggcugagagauu

SEQ ID NO: 1699649 - RNA, 19 nt, Homo sapiens
  misc_RNA (1)...(19): siRNA sense strand
gaccaaagcucaagacugu

SEQ ID NO: 1699650 - RNA, 19 nt, Homo sapiens
  misc_RNA (1)...(19): siRNA sense strand
ggaaauugaugaacaaaca

SEQ ID NO: 1699651 - RNA, 19 nt, Homo sapiens
  misc_RNA (1)...(19): siRNA sense strand
gaagaugacucucaagaag

SEQ ID NO: 1699652 - RNA, 19 nt, Homo sapiens
  misc_RNA (1)...(19): siRNA sense strand
caucaucucuuucaacgua

SEQ ID NO: 1699653 - RNA, 19 nt, Homo sapiens
  misc_RNA (1)...(19): siRNA sense strand
uagaagagauggaaauuga

SEQ ID NO: 1699654 - RNA, 19 nt, Homo sapiens
  misc_RNA (1)...(19): siRNA sense strand
gaaucuaccuccaacauug

SEQ ID NO: 1699655 - RNA, 19 nt, Homo sapiens
  misc_RNA (1)...(19): siRNA sense strand
ggacaauguugcuaauaaa

SEQ ID NO: 1699656 - RNA, 19 nt, Homo sapiens
  misc_RNA (1)...(19): siRNA sense strand
gcaccucaguguaugauuu

SEQ ID NO: 1699657 - RNA, 19 nt, Homo sapiens
  misc_RNA (1)...(19): siRNA sense strand
aaacuuagcucuucuuucu

SEQ ID NO: 1699658 - RNA, 19 nt, Homo sapiens
  misc_RNA (1)...(19): siRNA sense strand
gaucaacuguguaacaaga

SEQ ID NO: 1699659 - RNA, 19 nt, Homo sapiens
  misc_RNA (1)...(19): siRNA sense strand
gggaggaguucaugaauug

SEQ ID NO: 1699660 - RNA, 19 nt, Homo sapiens
  misc_RNA (1)...(19): siRNA sense strand
gcaagcagauguauuugug

SEQ ID NO: 1699661 - RNA, 19 nt, Homo sapiens
  misc_RNA (1)...(19): siRNA sense strand
gaaagugccuuaaaagaaa

SEQ ID NO: 1699662 - RNA, 19 nt, Homo sapiens
  misc_RNA (1)...(19): siRNA sense strand
gcugagagauuuucuuuua

SEQ ID NO: 1699663 - RNA, 19 nt, Homo sapiens
  misc_RNA (1)...(19): siRNA sense strand
gguagaagccuaagaaaga

SEQ ID NO: 1699664 - RNA, 19 nt, Homo sapiens
  misc_RNA (1)...(19): siRNA sense strand
cuugauagcugcacucuuu

SEQ ID NO: 1699665 - RNA, 19 nt, Homo sapiens
  misc_RNA (1)...(19): siRNA sense strand
gugaugauaucuuugcaua

SEQ ID NO: 1699666 - RNA, 19 nt, Homo sapiens
  misc_RNA (1)...(19): siRNA sense strand
cgaggaagaccacaaguua

SEQ ID NO: 1699667 - RNA, 19 nt, Homo sapiens
  misc_RNA (1)...(19): siRNA sense strand
ggaaagugaugaagaugug

SEQ ID NO: 1699668 - RNA, 19 nt, Homo sapiens
  misc_RNA (1)...(19): siRNA sense strand
gaagaugagcaaagaaauu

SEQ ID NO: 1699669 - RNA, 19 nt, Homo sapiens
  misc_RNA (1)...(19): siRNA sense strand
cagaauaugugcacagcua

SEQ ID NO: 1699670 - RNA, 19 nt, Homo sapiens
  misc_RNA (1)...(19): siRNA sense strand
gccauagccuguaccaaua

SEQ ID NO: 1699671 - RNA, 19 nt, Homo sapiens
  misc_RNA (1)...(19): siRNA sense strand
gccuagaccuucaucauuu

SEQ ID NO: 1699672 - RNA, 19 nt, Homo sapiens
  misc_RNA (1)...(19): siRNA sense strand
agaagcagcugccagaauu

SEQ ID NO: 1699673 - RNA, 19 nt, Homo sapiens
  misc_RNA (1)...(19): siRNA sense strand
caacuucccuaacuucaga

SEQ ID NO: 1699674 - RNA, 19 nt, Homo sapiens
  misc_RNA (1)...(19): siRNA sense strand
gcuagucuaucccaaguuu

SEQ ID NO: 1699675 - RNA, 19 nt, Homo sapiens
  misc_RNA (1)...(19): siRNA sense strand
gaaauucaacggcagauau

SEQ ID NO: 1699676 - RNA, 19 nt, Homo sapiens
  misc_RNA (1)...(19): siRNA sense strand
gaugauccacccacauuua

SEQ ID NO: 1699677 - RNA, 19 nt, Homo sapiens
  misc_RNA (1)...(19): siRNA sense strand
cccauugccuuaaauauaa

SEQ ID NO: 1699678 - RNA, 19 nt, Homo sapiens
  misc_RNA (1)...(19): siRNA sense strand
caucauaccuacuguguuc

SEQ ID NO: 1699679 - RNA, 19 nt, Homo sapiens
  misc_RNA (1)...(19): siRNA sense strand
gaaugcgcguugcaagaua

SEQ ID NO: 1699680 - RNA, 19 nt, Homo sapiens
  misc_RNA (1)...(19): siRNA sense strand
caagaugaguuuccugaug

SEQ ID NO: 1699681 - RNA, 19 nt, Homo sapiens
  misc_RNA (1)...(19): siRNA sense strand
ggaagaguaugagguagaa

SEQ ID NO: 1699682 - RNA, 19 nt, Homo sapiens
  misc_RNA (1)...(19): siRNA sense strand
gauagcaaaccaacauaua

SEQ ID NO: 1699683 - RNA, 19 nt, Homo sapiens
  misc_RNA (1)...(19): siRNA sense strand
ccaaagagcaacuaacuga

SEQ ID NO: 1699684 - RNA, 19 nt, Homo sapiens
  misc_RNA (1)...(19): siRNA sense strand
ggaaguagccaaagagcaa

SEQ ID NO: 1699685 - RNA, 19 nt, Homo sapiens
  misc_RNA (1)...(19): siRNA sense strand
ggaggaagaguaugaggua

SEQ ID NO: 1699686 - RNA, 19 nt, Homo sapiens
  misc_RNA (1)...(19): siRNA sense strand
gcgcuuacaugaaauuugu

SEQ ID NO: 1699687 - RNA, 19 nt, Homo sapiens
  misc_RNA (1)...(19): siRNA sense strand
gaagagagacuaaagaaaa

SEQ ID NO: 1699688 - RNA, 19 nt, Homo sapiens
  misc_RNA (1)...(19): siRNA sense strand
gaccuggacugacguauca

SEQ ID NO: 1699689 - RNA, 19 nt, Homo sapiens
  misc_RNA (1)...(19): siRNA sense strand
gaguaaaccuagagaagau

SEQ ID NO: 1699690 - RNA, 19 nt, Homo sapiens
  misc_RNA (1)...(19): siRNA sense strand
gaagaagagagacuaaaga

SEQ ID NO: 1699691 - RNA, 19 nt, Homo sapiens
  misc_RNA (1)...(19): siRNA sense strand
aacagacucuugcaaguua

SEQ ID NO: 1699692 - RNA, 19 nt, Homo sapiens
  misc_RNA (1)...(19): siRNA sense strand
ggaguuccuuaaugcauuu

SEQ ID NO: 1699693 - RNA, 19 nt, Homo sapiens
  misc_RNA (1)...(19): siRNA sense strand
gauggaaauugaugaacaa

SEQ ID NO: 1699694 - RNA, 19 nt, Homo sapiens
  misc_RNA (1)...(19): siRNA sense strand
caaguacuguaucaacaaa

SEQ ID NO: 1699695 - RNA, 19 nt, Homo sapiens
  misc_RNA (1)...(19): siRNA sense strand
gaauacaacccucguaaca

SEQ ID NO: 1699696 - RNA, 19 nt, Homo sapiens
  misc_RNA (1)...(19): siRNA sense strand
gcccauugccuuaaauaua

SEQ ID NO: 1699697 - RNA, 19 nt, Homo sapiens
  misc_RNA (1)...(19): siRNA sense strand
gcaauggcacucuuucaaa

SEQ ID NO: 1699698 - RNA, 19 nt, Homo sapiens
  misc_RNA (1)...(19): siRNA sense strand
gugcacagcuagcccguuu

SEQ ID NO: 1699699 - RNA, 19 nt, Homo sapiens
  misc_RNA (1)...(19): siRNA sense strand
gaaagccguuugugagaca

SEQ ID NO: 1699700 - RNA, 19 nt, Homo sapiens
  misc_RNA (1)...(19): siRNA sense strand
ggaaugugaugaccuuaag

SEQ ID NO: 1699701 - RNA, 19 nt, Homo sapiens
  misc_RNA (1)...(19): siRNA sense strand
ccaagagagugaauccaaa

SEQ ID NO: 1699702 - RNA, 19 nt, Homo sapiens
  misc_RNA (1)...(19): siRNA sense strand
gagggaaacuuagcucuuc

SEQ ID NO: 1699703 - RNA, 19 nt, Homo sapiens
  misc_RNA (1)...(19): siRNA sense strand
caaacaaaggucauaguaa

SEQ ID NO: 1699704 - RNA, 19 nt, Homo sapiens
  misc_RNA (1)...(19): siRNA sense strand
uauagacgauacuggauuu

SEQ ID NO: 1699705 - RNA, 19 nt, Homo sapiens
  misc_RNA (1)...(19): siRNA sense strand
gaaacaagaagaaaugaag

SEQ ID NO: 1699706 - RNA, 19 nt, Homo sapiens
  misc_RNA (1)...(19): siRNA sense strand
gaacugcuuugaauacaac

SEQ ID NO: 1699707 - RNA, 19 nt, Homo sapiens
  misc_RNA (1)...(19): siRNA sense strand
caauggcacucuuucaaau

SEQ ID NO: 1699708 - RNA, 19 nt, Homo sapiens
  misc_RNA (1)...(19): siRNA sense strand
gaagauauggaaugugaug

SEQ ID NO: 1699709 - RNA, 19 nt, Homo sapiens
  misc_RNA (1)...(19): siRNA sense strand
gaccauccuuggaaaguga

SEQ ID NO: 1699710 - RNA, 19 nt, Homo sapiens
  misc_RNA (1)...(19): siRNA sense strand
ugagcagugugguucauua

SEQ ID NO: 1699711 - RNA, 19 nt, Homo sapiens
  misc_RNA (1)...(19): siRNA sense strand
gaagagauggaaauugaug

SEQ ID NO: 1699712 - RNA, 19 nt, Homo sapiens
  misc_RNA (1)...(19): siRNA sense strand
ggaguaacccuagaaguau

SEQ ID NO: 1699713 - RNA, 19 nt, Homo sapiens
  misc_RNA (1)...(19): siRNA sense strand
acaagaaccuggaagauac

SEQ ID NO: 1699714 - RNA, 19 nt, Homo sapiens
  misc_RNA (1)...(19): siRNA sense strand
gacagugggcguucuuaua

SEQ ID NO: 1699715 - RNA, 19 nt, Homo sapiens
  misc_RNA (1)...(19): siRNA sense strand
gcagugugguucauuaucu

SEQ ID NO: 1699716 - RNA, 19 nt, Homo sapiens
  misc_RNA (1)...(19): siRNA sense strand
gaguaacccuagaaguauu

SEQ ID NO: 1699717 - RNA, 19 nt, Homo sapiens
  misc_RNA (1)...(19): siRNA sense strand
cgaagaaacuguggaaguc

SEQ ID NO: 1699718 - RNA, 19 nt, Homo sapiens
  misc_RNA (1)...(19): siRNA sense strand
gaggauuauucuggucuua

SEQ ID NO: 1699719 - RNA, 19 nt, Homo sapiens
  misc_RNA (1)...(19): siRNA sense strand
caauugaucccuuacuauu

SEQ ID NO: 1699720 - RNA, 19 nt, Homo sapiens
  misc_RNA (1)...(19): siRNA sense strand
gcuaauaaacagacucuug

SEQ ID NO: 1699721 - RNA, 19 nt, Homo sapiens
  misc_RNA (1)...(19): siRNA sense strand
ccagagccaucgccuguga

SEQ ID NO: 1699722 - RNA, 19 nt, Homo sapiens
  misc_RNA (1)...(19): siRNA sense strand
cagucaagaucuguaaaua

SEQ ID NO: 1699723 - RNA, 19 nt, Homo sapiens
  misc_RNA (1)...(19): siRNA sense strand
gaagaagaaggucaaagug

SEQ ID NO: 1699724 - RNA, 19 nt, Homo sapiens
  misc_RNA (1)...(19): siRNA sense strand
ccaaagcaacguucuagaa

SEQ ID NO: 1699725 - RNA, 19 nt, Homo sapiens
  misc_RNA (1)...(19): siRNA sense strand
gagaucagcauuagaaagu

SEQ ID NO: 1699726 - RNA, 19 nt, Homo sapiens
  misc_RNA (1)...(19): siRNA sense strand
ggaguaaaccuagagaaga

SEQ ID NO: 1699727 - RNA, 19 nt, Homo sapiens
  misc_RNA (1)...(19): siRNA sense strand
gagaaacuauuaucaucag

SEQ ID NO: 1699728 - RNA, 19 nt, Homo sapiens
  misc_RNA (1)...(19): siRNA sense strand
gaagaccacaaguuagauu

SEQ ID NO: 1699729 - RNA, 19 nt, Homo sapiens
  misc_RNA (1)...(19): siRNA sense strand
gaaugaagacguagaagag

SEQ ID NO: 1699730 - RNA, 19 nt, Homo sapiens
  misc_RNA (1)...(19): siRNA sense strand
gagcuucguuugagcaauc

SEQ ID NO: 1699731 - RNA, 19 nt, Homo sapiens
  misc_RNA (1)...(19): siRNA sense strand
uagcugcacucuuucagaa

SEQ ID NO: 1699732 - RNA, 19 nt, Homo sapiens
  misc_RNA (1)...(19): siRNA sense strand
ugaguuuccugauggagua

SEQ ID NO: 1699733 - RNA, 19 nt, Homo sapiens
  misc_RNA (1)...(19): siRNA sense strand
aaagagaggcuuaaaguag

SEQ ID NO: 1699734 - RNA, 19 nt, Homo sapiens
  misc_RNA (1)...(19): siRNA sense strand
uaaacagacucuugcaagu

SEQ ID NO: 1699735 - RNA, 19 nt, Homo sapiens
  misc_RNA (1)...(19): siRNA sense strand
aggacaauguugcuaauaa

SEQ ID NO: 1699736 - RNA, 19 nt, Homo sapiens
  misc_RNA (1)...(19): siRNA sense strand
gagcaaagacacagagcaa

SEQ ID NO: 1699737 - RNA, 19 nt, Homo sapiens
  misc_RNA (1)...(19): siRNA sense strand
gcagauguauuuguggaau

SEQ ID NO: 1699738 - RNA, 19 nt, Homo sapiens
  misc_RNA (1)...(19): siRNA sense strand
ucugaaagcuccacuugau

SEQ ID NO: 1699739 - RNA, 19 nt, Homo sapiens
  misc_RNA (1)...(19): siRNA sense strand
gaucuuccaaugcauauga

SEQ ID NO: 1699740 - RNA, 19 nt, Homo sapiens
  misc_RNA (1)...(19): siRNA sense strand
caaguuagauugccaguua

SEQ ID NO: 1699741 - RNA, 19 nt, Homo sapiens
  misc_RNA (1)...(19): siRNA sense strand
ggaauuagaucaagauaug

SEQ ID NO: 1699742 - RNA, 19 nt, Homo sapiens
  misc_RNA (1)...(19): siRNA sense strand
gaaagaagaugagcaaaga

SEQ ID NO: 1699743 - RNA, 19 nt, Homo sapiens
  misc_RNA (1)...(19): siRNA sense strand
gguaugagcuguuaaguga

SEQ ID NO: 1699744 - RNA, 19 nt, Homo sapiens
  misc_RNA (1)...(19): siRNA sense strand
gagaagauauggaauguga

SEQ ID NO: 1699745 - RNA, 19 nt, Homo sapiens
  misc_RNA (1)...(19): siRNA sense strand
gacagaaucuucagaguuu

SEQ ID NO: 1699746 - RNA, 19 nt, Homo sapiens
  misc_RNA (1)...(19): siRNA sense strand
ggcaauagcugaagaagaa

SEQ ID NO: 1699747 - RNA, 19 nt, Homo sapiens
  misc_RNA (1)...(19): siRNA sense strand
caagauaugucgaaagaaa

SEQ ID NO: 1699748 - RNA, 19 nt, Homo sapiens
  misc_RNA (1)...(19): siRNA sense strand
gaacuaaggcugagagauu

SEQ ID NO: 1699749 - RNA, 19 nt, Homo sapiens
  misc_RNA (1)...(19): siRNA sense strand
gaccaaagcucaagacugu

SEQ ID NO: 1699750 - RNA, 19 nt, Homo sapiens
  misc_RNA (1)...(19): siRNA sense strand
ggaaauugaugaacaaaca

SEQ ID NO: 1699751 - RNA, 19 nt, Homo sapiens
  misc_RNA (1)...(19): siRNA sense strand
gaagaugacucucaagaag

SEQ ID NO: 1699752 - RNA, 19 nt, Homo sapiens
  misc_RNA (1)...(19): siRNA sense strand
caucaucucuuucaacgua

SEQ ID NO: 1699753 - RNA, 19 nt, Homo sapiens
  misc_RNA (1)...(19): siRNA sense strand
uagaagagauggaaauuga

SEQ ID NO: 1699754 - RNA, 19 nt, Homo sapiens
  misc_RNA (1)...(19): siRNA sense strand
gaaucuaccuccaacauug

SEQ ID NO: 1699755 - RNA, 19 nt, Homo sapiens
  misc_RNA (1)...(19): siRNA sense strand
ggacaauguugcuaauaaa

SEQ ID NO: 1699756 - RNA, 19 nt, Homo sapiens
  misc_RNA (1)...(19): siRNA sense strand
gcaccucaguguaugauuu

SEQ ID NO: 1699757 - RNA, 19 nt, Homo sapiens
  misc_RNA (1)...(19): siRNA sense strand
aaacuuagcucuucuuucu

SEQ ID NO: 1699758 - RNA, 19 nt, Homo sapiens
  misc_RNA (1)...(19): siRNA sense strand
gaucaacuguguaacaaga

SEQ ID NO: 1699759 - RNA, 19 nt, Homo sapiens
  misc_RNA (1)...(19): siRNA sense strand
gggaggaguucaugaauug

SEQ ID NO: 1699760 - RNA, 19 nt, Homo sapiens
  misc_RNA (1)...(19): siRNA sense strand
gcaagcagauguauuugug

SEQ ID NO: 1699761 - RNA, 19 nt, Homo sapiens
  misc_RNA (1)...(19): siRNA sense strand
gaaagugccuuaaaagaaa

SEQ ID NO: 1699762 - RNA, 19 nt, Homo sapiens
  misc_RNA (1)...(19): siRNA sense strand
gcugagagauuuucuuuua

SEQ ID NO: 1699763 - RNA, 19 nt, Homo sapiens
  misc_RNA (1)...(19): siRNA sense strand
gguagaagccuaagaaaga

SEQ ID NO: 1699764 - RNA, 19 nt, Homo sapiens
  misc_RNA (1)...(19): siRNA sense strand
cuugauagcugcacucuuu

SEQ ID NO: 1699765 - RNA, 19 nt, Homo sapiens
  misc_RNA (1)...(19): siRNA sense strand
gugaugauaucuuugcaua

SEQ ID NO: 1699766 - RNA, 19 nt, Homo sapiens
  misc_RNA (1)...(19): siRNA sense strand
cgaggaagaccacaaguua

SEQ ID NO: 1699767 - RNA, 19 nt, Homo sapiens
  misc_RNA (1)...(19): siRNA sense strand
ggaaagugaugaagaugug

SEQ ID NO: 1699768 - RNA, 19 nt, Homo sapiens
  misc_RNA (1)...(19): siRNA sense strand
gaagaugagcaaagaaauu

SEQ ID NO: 1699769 - RNA, 19 nt, Homo sapiens
  misc_RNA (1)...(19): siRNA sense strand
cagaauaugugcacagcua

SEQ ID NO: 1699770 - RNA, 19 nt, Homo sapiens
  misc_RNA (1)...(19): siRNA sense strand
gccauagccuguaccaaua

SEQ ID NO: 1699771 - RNA, 19 nt, Homo sapiens
  misc_RNA (1)...(19): siRNA sense strand
gccuagaccuucaucauuu

SEQ ID NO: 1699772 - RNA, 19 nt, Homo sapiens
  misc_RNA (1)...(19): siRNA sense strand
agaagcagcugccagaauu

SEQ ID NO: 1699773 - RNA, 19 nt, Homo sapiens
  misc_RNA (1)...(19): siRNA sense strand
caacuucccuaacuucaga

SEQ ID NO: 1699774 - RNA, 19 nt, Homo sapiens
  misc_RNA (1)...(19): siRNA sense strand
gcuagucuaucccaaguuu

SEQ ID NO: 1699775 - RNA, 19 nt, Homo sapiens
  misc_RNA (1)...(19): siRNA sense strand
gaaauucaacggcagauau

SEQ ID NO: 1699776 - RNA, 19 nt, Homo sapiens
  misc_RNA (1)...(19): siRNA sense strand
gaugauccacccacauuua

SEQ ID NO: 1699777 - RNA, 19 nt, Homo sapiens
  misc_RNA (1)...(19): siRNA sense strand
cccauugccuuaaauauaa

SEQ ID NO: 1699778 - RNA, 19 nt, Homo sapiens
  misc_RNA (1)...(19): siRNA sense strand
caucauaccuacuguguuc

SEQ ID NO: 1699779 - RNA, 19 nt, Homo sapiens
  misc_RNA (1)...(19): siRNA sense strand
gaaugcgcguugcaagaua

SEQ ID NO: 1699780 - RNA, 19 nt, Homo sapiens
  misc_RNA (1)...(19): siRNA sense strand
caagaugaguuuccugaug

SEQ ID NO: 1699781 - RNA, 19 nt, Homo sapiens
  misc_RNA (1)...(19): siRNA sense strand
ggaagaguaugagguagaa

SEQ ID NO: 1699782 - RNA, 19 nt, Homo sapiens
  misc_RNA (1)...(19): siRNA sense strand
gauagcaaaccaacauaua

SEQ ID NO: 1699783 - RNA, 19 nt, Homo sapiens
  misc_RNA (1)...(19): siRNA sense strand
ccaaagagcaacuaacuga

SEQ ID NO: 1699784 - RNA, 19 nt, Homo sapiens
  misc_RNA (1)...(19): siRNA sense strand
ggaaguagccaaagagcaa

SEQ ID NO: 1699785 - RNA, 19 nt, Homo sapiens
  misc_RNA (1)...(19): siRNA sense strand
ggaggaagaguaugaggua

SEQ ID NO: 1699786 - RNA, 19 nt, Homo sapiens
  misc_RNA (1)...(19): siRNA sense strand
gcgcuuacaugaaauuugu

SEQ ID NO: 1699787 - RNA, 19 nt, Homo sapiens
  misc_RNA (1)...(19): siRNA sense strand
gaagagagacuaaagaaaa

SEQ ID NO: 1699788 - RNA, 19 nt, Homo sapiens
  misc_RNA (1)...(19): siRNA sense strand
gaccuggacugacguauca

SEQ ID NO: 1699789 - RNA, 19 nt, Homo sapiens
  misc_RNA (1)...(19): siRNA sense strand
gaguaaaccuagagaagau

SEQ ID NO: 1699790 - RNA, 19 nt, Homo sapiens
  misc_RNA (1)...(19): siRNA sense strand
gaagaagagagacuaaaga

SEQ ID NO: 1699791 - RNA, 19 nt, Homo sapiens
  misc_RNA (1)...(19): siRNA sense strand
aacagacucuugcaaguua

SEQ ID NO: 1699792 - RNA, 19 nt, Homo sapiens
  misc_RNA (1)...(19): siRNA sense strand
ggaguuccuuaaugcauuu

SEQ ID NO: 1699793 - RNA, 19 nt, Homo sapiens
  misc_RNA (1)...(19): siRNA sense strand
gauggaaauugaugaacaa

SEQ ID NO: 1699794 - RNA, 19 nt, Homo sapiens
  misc_RNA (1)...(19): siRNA sense strand
caaguacuguaucaacaaa

SEQ ID NO: 1699795 - RNA, 19 nt, Homo sapiens
  misc_RNA (1)...(19): siRNA sense strand
gaauacaacccucguaaca

SEQ ID NO: 1699796 - RNA, 19 nt, Homo sapiens
  misc_RNA (1)...(19): siRNA sense strand
gcccauugccuuaaauaua

SEQ ID NO: 1699797 - RNA, 19 nt, Homo sapiens
  misc_RNA (1)...(19): siRNA sense strand
gcaauggcacucuuucaaa

SEQ ID NO: 1699798 - RNA, 19 nt, Homo sapiens
  misc_RNA (1)...(19): siRNA sense strand
gugcacagcuagcccguuu

SEQ ID NO: 1699799 - RNA, 19 nt, Homo sapiens
  misc_RNA (1)...(19): siRNA sense strand
gaaagccguuugugagaca

SEQ ID NO: 1699800 - RNA, 19 nt, Homo sapiens
  misc_RNA (1)...(19): siRNA sense strand
ggaaugugaugaccuuaag

SEQ ID NO: 1699801 - RNA, 19 nt, Homo sapiens
  misc_RNA (1)...(19): siRNA sense strand
ccaagagagugaauccaaa

SEQ ID NO: 1699802 - RNA, 19 nt, Homo sapiens
  misc_RNA (1)...(19): siRNA sense strand
gagggaaacuuagcucuuc

SEQ ID NO: 1699803 - RNA, 19 nt, Homo sapiens
  misc_RNA (1)...(19): siRNA sense strand
caaacaaaggucauaguaa

SEQ ID NO: 1699804 - RNA, 19 nt, Homo sapiens
  misc_RNA (1)...(19): siRNA sense strand
uauagacgauacuggauuu

SEQ ID NO: 1699805 - RNA, 19 nt, Homo sapiens
  misc_RNA (1)...(19): siRNA sense strand
gaaacaagaagaaaugaag

SEQ ID NO: 1699806 - RNA, 19 nt, Homo sapiens
  misc_RNA (1)...(19): siRNA sense strand
gaacugcuuugaauacaac

SEQ ID NO: 1699807 - RNA, 19 nt, Homo sapiens
  misc_RNA (1)...(19): siRNA sense strand
caauggcacucuuucaaau

SEQ ID NO: 1699808 - RNA, 19 nt, Homo sapiens
  misc_RNA (1)...(19): siRNA sense strand
gaagauauggaaugugaug

SEQ ID NO: 1699809 - RNA, 19 nt, Homo sapiens
  misc_RNA (1)...(19): siRNA sense strand
gaccauccuuggaaaguga

SEQ ID NO: 1699810 - RNA, 19 nt, Homo sapiens
  misc_RNA (1)...(19): siRNA sense strand
ugagcagugugguucauua

SEQ ID NO: 1699811 - RNA, 19 nt, Homo sapiens
  misc_RNA (1)...(19): siRNA sense strand
gaagagauggaaauugaug

SEQ ID NO: 1699812 - RNA, 19 nt, Homo sapiens
  misc_RNA (1)...(19): siRNA sense strand
ggaguaacccuagaaguau

SEQ ID NO: 1699813 - RNA, 19 nt, Homo sapiens
  misc_RNA (1)...(19): siRNA sense strand
acaagaaccuggaagauac

SEQ ID NO: 1699814 - RNA, 19 nt, Homo sapiens
  misc_RNA (1)...(19): siRNA sense strand
gacagugggcguucuuaua

SEQ ID NO: 1699815 - RNA, 19 nt, Homo sapiens
  misc_RNA (1)...(19): siRNA sense strand
gcagugugguucauuaucu

SEQ ID NO: 1699816 - RNA, 19 nt, Homo sapiens
  misc_RNA (1)...(19): siRNA sense strand
gaguaacccuagaaguauu

SEQ ID NO: 1699817 - RNA, 19 nt, Homo sapiens
  misc_RNA (1)...(19): siRNA sense strand
cgaagaaacuguggaaguc

SEQ ID NO: 1699818 - RNA, 19 nt, Homo sapiens
  misc_RNA (1)...(19): siRNA sense strand
gaggauuauucuggucuua

SEQ ID NO: 1699819 - RNA, 19 nt, Homo sapiens
  misc_RNA (1)...(19): siRNA sense strand
caauugaucccuuacuauu

SEQ ID NO: 1699820 - RNA, 19 nt, Homo sapiens
  misc_RNA (1)...(19): siRNA sense strand
gcuaauaaacagacucuug

SEQ ID NO: 1699821 - RNA, 19 nt, Homo sapiens
  misc_RNA (1)...(19): siRNA sense strand
ccagagccaucgccuguga

SEQ ID NO: 1699822 - RNA, 19 nt, Homo sapiens
  misc_RNA (1)...(19): siRNA sense strand
cagucaagaucuguaaaua

SEQ ID NO: 1699823 - RNA, 19 nt, Homo sapiens
  misc_RNA (1)...(19): siRNA sense strand
gaagaagaaggucaaagug

SEQ ID NO: 1699824 - RNA, 19 nt, Homo sapiens
  misc_RNA (1)...(19): siRNA sense strand
ccaaagcaacguucuagaa

SEQ ID NO: 1699825 - RNA, 19 nt, Homo sapiens
  misc_RNA (1)...(19): siRNA sense strand
gagaucagcauuagaaagu

SEQ ID NO: 1699826 - RNA, 19 nt, Homo sapiens
  misc_RNA (1)...(19): siRNA sense strand
ggaguaaaccuagagaaga

SEQ ID NO: 1699827 - RNA, 19 nt, Homo sapiens
  misc_RNA (1)...(19): siRNA sense strand
gagaaacuauuaucaucag

SEQ ID NO: 1699828 - RNA, 19 nt, Homo sapiens
  misc_RNA (1)...(19): siRNA sense strand
gaagaccacaaguuagauu

SEQ ID NO: 1699829 - RNA, 19 nt, Homo sapiens
  misc_RNA (1)...(19): siRNA sense strand
gaaugaagacguagaagag

SEQ ID NO: 1699830 - RNA, 19 nt, Homo sapiens
  misc_RNA (1)...(19): siRNA sense strand
gagcuucguuugagcaauc

SEQ ID NO: 1699831 - RNA, 19 nt, Homo sapiens
  misc_RNA (1)...(19): siRNA sense strand
uagcugcacucuuucagaa

SEQ ID NO: 1699832 - RNA, 19 nt, Homo sapiens
  misc_RNA (1)...(19): siRNA sense strand
ugaguuuccugauggagua

SEQ ID NO: 1699833 - RNA, 19 nt, Homo sapiens
  misc_RNA (1)...(19): siRNA sense strand
aaagagaggcuuaaaguag

SEQ ID NO: 1699834 - RNA, 19 nt, Homo sapiens
  misc_RNA (1)...(19): siRNA sense strand
uaaacagacucuugcaagu

SEQ ID NO: 1699835 - RNA, 19 nt, Homo sapiens
  misc_RNA (1)...(19): siRNA sense strand
aggacaauguugcuaauaa

SEQ ID NO: 1699836 - RNA, 19 nt, Homo sapiens
  misc_RNA (1)...(19): siRNA sense strand
gagcaaagacacagagcaa

SEQ ID NO: 1699837 - RNA, 19 nt, Homo sapiens
  misc_RNA (1)...(19): siRNA sense strand
gcagauguauuuguggaau

SEQ ID NO: 1699838 - RNA, 19 nt, Homo sapiens
  misc_RNA (1)...(19): siRNA sense strand
ucugaaagcuccacuugau

SEQ ID NO: 1699839 - RNA, 19 nt, Homo sapiens
  misc_RNA (1)...(19): siRNA sense strand
gaucuuccaaugcauauga

SEQ ID NO: 1699840 - RNA, 19 nt, Homo sapiens
  misc_RNA (1)...(19): siRNA sense strand
caaguuagauugccaguua

SEQ ID NO: 1699841 - RNA, 19 nt, Homo sapiens
  misc_RNA (1)...(19): siRNA sense strand
ggaauuagaucaagauaug

SEQ ID NO: 1699842 - RNA, 19 nt, Homo sapiens
  misc_RNA (1)...(19): siRNA sense strand
gaaagaagaugagcaaaga

SEQ ID NO: 1699843 - RNA, 19 nt, Homo sapiens
  misc_RNA (1)...(19): siRNA sense strand
gguaugagcuguuaaguga

SEQ ID NO: 1699844 - RNA, 19 nt, Homo sapiens
  misc_RNA (1)...(19): siRNA sense strand
gagaagauauggaauguga

SEQ ID NO: 1699845 - RNA, 19 nt, Homo sapiens
  misc_RNA (1)...(19): siRNA sense strand
gacagaaucuucagaguuu

SEQ ID NO: 1699846 - RNA, 19 nt, Homo sapiens
  misc_RNA (1)...(19): siRNA sense strand
ggcaauagcugaagaagaa

SEQ ID NO: 1699847 - RNA, 19 nt, Homo sapiens
  misc_RNA (1)...(19): siRNA sense strand
caagauaugucgaaagaaa

SEQ ID NO: 1699848 - RNA, 19 nt, Homo sapiens
  misc_RNA (1)...(19): siRNA sense strand
gaacuaaggcugagagauu

SEQ ID NO: 1699849 - RNA, 19 nt, Homo sapiens
  misc_RNA (1)...(19): siRNA sense strand
gaccaaagcucaagacugu

SEQ ID NO: 1699850 - RNA, 19 nt, Homo sapiens
  misc_RNA (1)...(19): siRNA sense strand
ggaaauugaugaacaaaca

SEQ ID NO: 1699851 - RNA, 19 nt, Homo sapiens
  misc_RNA (1)...(19): siRNA sense strand
gaagaugacucucaagaag

SEQ ID NO: 1699852 - RNA, 19 nt, Homo sapiens
  misc_RNA (1)...(19): siRNA sense strand
caucaucucuuucaacgua

SEQ ID NO: 1699853 - RNA, 19 nt, Homo sapiens
  misc_RNA (1)...(19): siRNA sense strand
uagaagagauggaaauuga

SEQ ID NO: 1699854 - RNA, 19 nt, Homo sapiens
  misc_RNA (1)...(19): siRNA sense strand
gaaucuaccuccaacauug

SEQ ID NO: 1699855 - RNA, 19 nt, Homo sapiens
  misc_RNA (1)...(19): siRNA sense strand
ggacaauguugcuaauaaa

SEQ ID NO: 1699856 - RNA, 19 nt, Homo sapiens
  misc_RNA (1)...(19): siRNA sense strand
gcaccucaguguaugauuu

SEQ ID NO: 1699857 - RNA, 19 nt, Homo sapiens
  misc_RNA (1)...(19): siRNA sense strand
aaacuuagcucuucuuucu

SEQ ID NO: 1699858 - RNA, 19 nt, Homo sapiens
  misc_RNA (1)...(19): siRNA sense strand
gaucaacuguguaacaaga

SEQ ID NO: 1699859 - RNA, 19 nt, Homo sapiens
  misc_RNA (1)...(19): siRNA sense strand
gggaggaguucaugaauug

SEQ ID NO: 1699860 - RNA, 19 nt, Homo sapiens
  misc_RNA (1)...(19): siRNA sense strand
gcaagcagauguauuugug

SEQ ID NO: 1699861 - RNA, 19 nt, Homo sapiens
  misc_RNA (1)...(19): siRNA sense strand
gaaagugccuuaaaagaaa

SEQ ID NO: 1699862 - RNA, 19 nt, Homo sapiens
  misc_RNA (1)...(19): siRNA sense strand
gcugagagauuuucuuuua

SEQ ID NO: 1699863 - RNA, 19 nt, Homo sapiens
  misc_RNA (1)...(19): siRNA sense strand
gguagaagccuaagaaaga

SEQ ID NO: 1699864 - RNA, 19 nt, Homo sapiens
  misc_RNA (1)...(19): siRNA sense strand
cuugauagcugcacucuuu

SEQ ID NO: 1699865 - RNA, 19 nt, Homo sapiens
  misc_RNA (1)...(19): siRNA sense strand
gugaugauaucuuugcaua

SEQ ID NO: 1699866 - RNA, 19 nt, Homo sapiens
  misc_RNA (1)...(19): siRNA sense strand
cgaggaagaccacaaguua

SEQ ID NO: 1699867 - RNA, 19 nt, Homo sapiens
  misc_RNA (1)...(19): siRNA sense strand
ggaaagugaugaagaugug

SEQ ID NO: 1699868 - RNA, 19 nt, Homo sapiens
  misc_RNA (1)...(19): siRNA sense strand
gaagaugagcaaagaaauu

SEQ ID NO: 1699869 - RNA, 19 nt, Homo sapiens
  misc_RNA (1)...(19): siRNA sense strand
cagaauaugugcacagcua

SEQ ID NO: 1699870 - RNA, 19 nt, Homo sapiens
  misc_RNA (1)...(19): siRNA sense strand
gccauagccuguaccaaua

SEQ ID NO: 1699871 - RNA, 19 nt, Homo sapiens
  misc_RNA (1)...(19): siRNA sense strand
gccuagaccuucaucauuu

SEQ ID NO: 1699872 - RNA, 19 nt, Homo sapiens
  misc_RNA (1)...(19): siRNA sense strand
agaagcagcugccagaauu

SEQ ID NO: 1699873 - RNA, 19 nt, Homo sapiens
  misc_RNA (1)...(19): siRNA sense strand
caacuucccuaacuucaga

SEQ ID NO: 1699874 - RNA, 19 nt, Homo sapiens
  misc_RNA (1)...(19): siRNA sense strand
gcuagucuaucccaaguuu

SEQ ID NO: 1699875 - RNA, 19 nt, Homo sapiens
  misc_RNA (1)...(19): siRNA sense strand
gaaauucaacggcagauau

SEQ ID NO: 1699876 - RNA, 19 nt, Homo sapiens
  misc_RNA (1)...(19): siRNA sense strand
gaugauccacccacauuua

SEQ ID NO: 1699877 - RNA, 19 nt, Homo sapiens
  misc_RNA (1)...(19): siRNA sense strand
cccauugccuuaaauauaa

SEQ ID NO: 1699878 - RNA, 19 nt, Homo sapiens
  misc_RNA (1)...(19): siRNA sense strand
caucauaccuacuguguuc

SEQ ID NO: 1699879 - RNA, 19 nt, Homo sapiens
  misc_RNA (1)...(19): siRNA sense strand
gaaugcgcguugcaagaua

SEQ ID NO: 1699880 - RNA, 19 nt, Homo sapiens
  misc_RNA (1)...(19): siRNA sense strand
caagaugaguuuccugaug

SEQ ID NO: 1699881 - RNA, 19 nt, Homo sapiens
  misc_RNA (1)...(19): siRNA sense strand
ggaagaguaugagguagaa

SEQ ID NO: 1699882 - RNA, 19 nt, Homo sapiens
  misc_RNA (1)...(19): siRNA sense strand
gauagcaaaccaacauaua

SEQ ID NO: 1699883 - RNA, 19 nt, Homo sapiens
  misc_RNA (1)...(19): siRNA sense strand
ccaaagagcaacuaacuga

SEQ ID NO: 1699884 - RNA, 19 nt, Homo sapiens
  misc_RNA (1)...(19): siRNA sense strand
ggaaguagccaaagagcaa

SEQ ID NO: 1699885 - RNA, 19 nt, Homo sapiens
  misc_RNA (1)...(19): siRNA sense strand
ggaggaagaguaugaggua

SEQ ID NO: 1699886 - RNA, 19 nt, Homo sapiens
  misc_RNA (1)...(19): siRNA sense strand
gcgcuuacaugaaauuugu

SEQ ID NO: 1699887 - RNA, 19 nt, Homo sapiens
  misc_RNA (1)...(19): siRNA sense strand
gaagagagacuaaagaaaa

SEQ ID NO: 1699888 - RNA, 19 nt, Homo sapiens
  misc_RNA (1)...(19): siRNA sense strand
gaccuggacugacguauca

SEQ ID NO: 1699889 - RNA, 19 nt, Homo sapiens
  misc_RNA (1)...(19): siRNA sense strand
gaguaaaccuagagaagau

SEQ ID NO: 1699890 - RNA, 19 nt, Homo sapiens
  misc_RNA (1)...(19): siRNA sense strand
gaagaagagagacuaaaga

SEQ ID NO: 1699891 - RNA, 19 nt, Homo sapiens
  misc_RNA (1)...(19): siRNA sense strand
aacagacucuugcaaguua

SEQ ID NO: 1699892 - RNA, 19 nt, Homo sapiens
  misc_RNA (1)...(19): siRNA sense strand
ggaguuccuuaaugcauuu

SEQ ID NO: 1699893 - RNA, 19 nt, Homo sapiens
  misc_RNA (1)...(19): siRNA sense strand
gauggaaauugaugaacaa

SEQ ID NO: 1699894 - RNA, 19 nt, Homo sapiens
  misc_RNA (1)...(19): siRNA sense strand
caaguacuguaucaacaaa

SEQ ID NO: 1699895 - RNA, 19 nt, Homo sapiens
  misc_RNA (1)...(19): siRNA sense strand
gaauacaacccucguaaca

SEQ ID NO: 1699896 - RNA, 19 nt, Homo sapiens
  misc_RNA (1)...(19): siRNA sense strand
gcccauugccuuaaauaua

SEQ ID NO: 1699897 - RNA, 19 nt, Homo sapiens
  misc_RNA (1)...(19): siRNA sense strand
gcaauggcacucuuucaaa

SEQ ID NO: 1699898 - RNA, 19 nt, Homo sapiens
  misc_RNA (1)...(19): siRNA sense strand
gugcacagcuagcccguuu

SEQ ID NO: 1699899 - RNA, 19 nt, Homo sapiens
  misc_RNA (1)...(19): siRNA sense strand
gaaagccguuugugagaca

SEQ ID NO: 1699900 - RNA, 19 nt, Homo sapiens
  misc_RNA (1)...(19): siRNA sense strand
ggaaugugaugaccuuaag

SEQ ID NO: 1699901 - RNA, 19 nt, Homo sapiens
  misc_RNA (1)...(19): siRNA sense strand
ccaagagagugaauccaaa

SEQ ID NO: 1699902 - RNA, 19 nt, Homo sapiens
  misc_RNA (1)...(19): siRNA sense strand
gagggaaacuuagcucuuc

SEQ ID NO: 1699903 - RNA, 19 nt, Homo sapiens
  misc_RNA (1)...(19): siRNA sense strand
caaacaaaggucauaguaa

SEQ ID NO: 1699904 - RNA, 19 nt, Homo sapiens
  misc_RNA (1)...(19): siRNA sense strand
uauagacgauacuggauuu

SEQ ID NO: 1699905 - RNA, 19 nt, Homo sapiens
  misc_RNA (1)...(19): siRNA sense strand
gaaacaagaagaaaugaag

SEQ ID NO: 1699906 - RNA, 19 nt, Homo sapiens
  misc_RNA (1)...(19): siRNA sense strand
gaacugcuuugaauacaac

SEQ ID NO: 1699907 - RNA, 19 nt, Homo sapiens
  misc_RNA (1)...(19): siRNA sense strand
caauggcacucuuucaaau

SEQ ID NO: 1699908 - RNA, 19 nt, Homo sapiens
  misc_RNA (1)...(19): siRNA sense strand
gaagauauggaaugugaug

SEQ ID NO: 1699909 - RNA, 19 nt, Homo sapiens
  misc_RNA (1)...(19): siRNA sense strand
gaccauccuuggaaaguga

SEQ ID NO: 1699910 - RNA, 19 nt, Homo sapiens
  misc_RNA (1)...(19): siRNA sense strand
ugagcagugugguucauua

SEQ ID NO: 1699911 - RNA, 19 nt, Homo sapiens
  misc_RNA (1)...(19): siRNA sense strand
gaagagauggaaauugaug

SEQ ID NO: 1699912 - RNA, 19 nt, Homo sapiens
  misc_RNA (1)...(19): siRNA sense strand
ggaguaacccuagaaguau

SEQ ID NO: 1699913 - RNA, 19 nt, Homo sapiens
  misc_RNA (1)...(19): siRNA sense strand
acaagaaccuggaagauac

SEQ ID NO: 1699914 - RNA, 19 nt, Homo sapiens
  misc_RNA (1)...(19): siRNA sense strand
gacagugggcguucuuaua

SEQ ID NO: 1699915 - RNA, 19 nt, Homo sapiens
  misc_RNA (1)...(19): siRNA sense strand
gcagugugguucauuaucu

SEQ ID NO: 1699916 - RNA, 19 nt, Homo sapiens
  misc_RNA (1)...(19): siRNA sense strand
gaguaacccuagaaguauu

SEQ ID NO: 1699917 - RNA, 19 nt, Homo sapiens
  misc_RNA (1)...(19): siRNA sense strand
cgaagaaacuguggaaguc

SEQ ID NO: 1699918 - RNA, 19 nt, Homo sapiens
  misc_RNA (1)...(19): siRNA sense strand
gaggauuauucuggucuua

SEQ ID NO: 1699919 - RNA, 19 nt, Homo sapiens
  misc_RNA (1)...(19): siRNA sense strand
caauugaucccuuacuauu

SEQ ID NO: 1699920 - RNA, 19 nt, Homo sapiens
  misc_RNA (1)...(19): siRNA sense strand
gcuaauaaacagacucuug

SEQ ID NO: 1699921 - RNA, 19 nt, Homo sapiens
  misc_RNA (1)...(19): siRNA sense strand
ccagagccaucgccuguga

SEQ ID NO: 1699922 - RNA, 19 nt, Homo sapiens
  misc_RNA (1)...(19): siRNA sense strand
cagucaagaucuguaaaua

SEQ ID NO: 1699923 - RNA, 19 nt, Homo sapiens
  misc_RNA (1)...(19): siRNA sense strand
gaagaagaaggucaaagug

SEQ ID NO: 1699924 - RNA, 19 nt, Homo sapiens
  misc_RNA (1)...(19): siRNA sense strand
ccaaagcaacguucuagaa

SEQ ID NO: 1699925 - RNA, 19 nt, Homo sapiens
  misc_RNA (1)...(19): siRNA sense strand
gagaucagcauuagaaagu

SEQ ID NO: 1699926 - RNA, 19 nt, Homo sapiens
  misc_RNA (1)...(19): siRNA sense strand
ggaguaaaccuagagaaga

SEQ ID NO: 1699927 - RNA, 19 nt, Homo sapiens
  misc_RNA (1)...(19): siRNA sense strand
gagaaacuauuaucaucag

SEQ ID NO: 1699928 - RNA, 19 nt, Homo sapiens
  misc_RNA (1)...(19): siRNA sense strand
gaagaccacaaguuagauu

SEQ ID NO: 1699929 - RNA, 19 nt, Homo sapiens
  misc_RNA (1)...(19): siRNA sense strand
gaaugaagacguagaagag

SEQ ID NO: 1699930 - RNA, 19 nt, Homo sapiens
  misc_RNA (1)...(19): siRNA sense strand
gagcuucguuugagcaauc

SEQ ID NO: 1699931 - RNA, 19 nt, Homo sapiens
  misc_RNA (1)...(19): siRNA sense strand
uagcugcacucuuucagaa

SEQ ID NO: 1699932 - RNA, 19 nt, Homo sapiens
  misc_RNA (1)...(19): siRNA sense strand
ugaguuuccugauggagua

SEQ ID NO: 1699933 - RNA, 19 nt, Homo sapiens
  misc_RNA (1)...(19): siRNA sense strand
aaagagaggcuuaaaguag

SEQ ID NO: 1699934 - RNA, 19 nt, Homo sapiens
  misc_RNA (1)...(19): siRNA sense strand
uaaacagacucuugcaagu

SEQ ID NO: 1699935 - RNA, 19 nt, Homo sapiens
  misc_RNA (1)...(19): siRNA sense strand
aggacaauguugcuaauaa

SEQ ID NO: 1699936 - RNA, 19 nt, Homo sapiens
  misc_RNA (1)...(19): siRNA sense strand
gagcaaagacacagagcaa

SEQ ID NO: 1699937 - RNA, 19 nt, Homo sapiens
  misc_RNA (1)...(19): siRNA sense strand
gcagauguauuuguggaau

SEQ ID NO: 1699938 - RNA, 19 nt, Homo sapiens
  misc_RNA (1)...(19): siRNA sense strand
ucugaaagcuccacuugau

SEQ ID NO: 1699939 - RNA, 19 nt, Homo sapiens
  misc_RNA (1)...(19): siRNA sense strand
gaucuuccaaugcauauga

SEQ ID NO: 1699940 - RNA, 19 nt, Homo sapiens
  misc_RNA (1)...(19): siRNA sense strand
caaguuagauugccaguua

SEQ ID NO: 1699941 - RNA, 19 nt, Homo sapiens
  misc_RNA (1)...(19): siRNA sense strand
ggaauuagaucaagauaug

SEQ ID NO: 1699942 - RNA, 19 nt, Homo sapiens
  misc_RNA (1)...(19): siRNA sense strand
gaaagaagaugagcaaaga

SEQ ID NO: 1699943 - RNA, 19 nt, Homo sapiens
  misc_RNA (1)...(19): siRNA sense strand
gguaugagcuguuaaguga

SEQ ID NO: 1699944 - RNA, 19 nt, Homo sapiens
  misc_RNA (1)...(19): siRNA sense strand
gagaagauauggaauguga

SEQ ID NO: 1699945 - RNA, 19 nt, Homo sapiens
  misc_RNA (1)...(19): siRNA sense strand
gacagaaucuucagaguuu

SEQ ID NO: 1699946 - RNA, 19 nt, Homo sapiens
  misc_RNA (1)...(19): siRNA sense strand
ggcaauagcugaagaagaa

SEQ ID NO: 1699947 - RNA, 19 nt, Homo sapiens
  misc_RNA (1)...(19): siRNA sense strand
caagauaugucgaaagaaa

SEQ ID NO: 1699948 - RNA, 19 nt, Homo sapiens
  misc_RNA (1)...(19): siRNA sense strand
gaacuaaggcugagagauu

SEQ ID NO: 1699949 - RNA, 19 nt, Homo sapiens
  misc_RNA (1)...(19): siRNA sense strand
gaccaaagcucaagacugu

SEQ ID NO: 1699950 - RNA, 19 nt, Homo sapiens
  misc_RNA (1)...(19): siRNA sense strand
ggaaauugaugaacaaaca

SEQ ID NO: 1699951 - RNA, 19 nt, Homo sapiens
  misc_RNA (1)...(19): siRNA sense strand
gaagaugacucucaagaag

SEQ ID NO: 1699952 - RNA, 19 nt, Homo sapiens
  misc_RNA (1)...(19): siRNA sense strand
caucaucucuuucaacgua

SEQ ID NO: 1699953 - RNA, 19 nt, Homo sapiens
  misc_RNA (1)...(19): siRNA sense strand
uagaagagauggaaauuga

SEQ ID NO: 1699954 - RNA, 19 nt, Homo sapiens
  misc_RNA (1)...(19): siRNA sense strand
gaaucuaccuccaacauug

SEQ ID NO: 1699955 - RNA, 19 nt, Homo sapiens
  misc_RNA (1)...(19): siRNA sense strand
ggacaauguugcuaauaaa

SEQ ID NO: 1699956 - RNA, 19 nt, Homo sapiens
  misc_RNA (1)...(19): siRNA sense strand
gcaccucaguguaugauuu

SEQ ID NO: 1699957 - RNA, 19 nt, Homo sapiens
  misc_RNA (1)...(19): siRNA sense strand
aaacuuagcucuucuuucu

SEQ ID NO: 1699958 - RNA, 19 nt, Homo sapiens
  misc_RNA (1)...(19): siRNA sense strand
gaucaacuguguaacaaga

SEQ ID NO: 1699959 - RNA, 19 nt, Homo sapiens
  misc_RNA (1)...(19): siRNA sense strand
gggaggaguucaugaauug

SEQ ID NO: 1699960 - RNA, 19 nt, Homo sapiens
  misc_RNA (1)...(19): siRNA sense strand
gcaagcagauguauuugug

SEQ ID NO: 1699961 - RNA, 19 nt, Homo sapiens
  misc_RNA (1)...(19): siRNA sense strand
gaaagugccuuaaaagaaa

SEQ ID NO: 1699962 - RNA, 19 nt, Homo sapiens
  misc_RNA (1)...(19): siRNA sense strand
gcugagagauuuucuuuua

SEQ ID NO: 1699963 - RNA, 19 nt, Homo sapiens
  misc_RNA (1)...(19): siRNA sense strand
gguagaagccuaagaaaga

SEQ ID NO: 1699964 - RNA, 19 nt, Homo sapiens
  misc_RNA (1)...(19): siRNA sense strand
cuugauagcugcacucuuu

SEQ ID NO: 1699965 - RNA, 19 nt, Homo sapiens
  misc_RNA (1)...(19): siRNA sense strand
gugaugauaucuuugcaua

SEQ ID NO: 1699966 - RNA, 19 nt, Homo sapiens
  misc_RNA (1)...(19): siRNA sense strand
cgaggaagaccacaaguua

SEQ ID NO: 1699967 - RNA, 19 nt, Homo sapiens
  misc_RNA (1)...(19): siRNA sense strand
ggaaagugaugaagaugug

SEQ ID NO: 1699968 - RNA, 19 nt, Homo sapiens
  misc_RNA (1)...(19): siRNA sense strand
gaagaugagcaaagaaauu

SEQ ID NO: 1699969 - RNA, 19 nt, Homo sapiens
  misc_RNA (1)...(19): siRNA sense strand
cagaauaugugcacagcua

SEQ ID NO: 1699970 - RNA, 19 nt, Homo sapiens
  misc_RNA (1)...(19): siRNA sense strand
gccauagccuguaccaaua

SEQ ID NO: 1699971 - RNA, 19 nt, Homo sapiens
  misc_RNA (1)...(19): siRNA sense strand
gccuagaccuucaucauuu

SEQ ID NO: 1699972 - RNA, 19 nt, Homo sapiens
  misc_RNA (1)...(19): siRNA sense strand
agaagcagcugccagaauu

SEQ ID NO: 1699973 - RNA, 19 nt, Homo sapiens
  misc_RNA (1)...(19): siRNA sense strand
caacuucccuaacuucaga

SEQ ID NO: 1699974 - RNA, 19 nt, Homo sapiens
  misc_RNA (1)...(19): siRNA sense strand
gcuagucuaucccaaguuu

SEQ ID NO: 1699975 - RNA, 19 nt, Homo sapiens
  misc_RNA (1)...(19): siRNA sense strand
gaaauucaacggcagauau

SEQ ID NO: 1699976 - RNA, 19 nt, Homo sapiens
  misc_RNA (1)...(19): siRNA sense strand
gaugauccacccacauuua

SEQ ID NO: 1699977 - RNA, 19 nt, Homo sapiens
  misc_RNA (1)...(19): siRNA sense strand
cccauugccuuaaauauaa

SEQ ID NO: 1699978 - RNA, 19 nt, Homo sapiens
  misc_RNA (1)...(19): siRNA sense strand
caucauaccuacuguguuc

SEQ ID NO: 1699979 - RNA, 19 nt, Homo sapiens
  misc_RNA (1)...(19): siRNA sense strand
gaaugcgcguugcaagaua

SEQ ID NO: 1699980 - RNA, 19 nt, Homo sapiens
  misc_RNA (1)...(19): siRNA sense strand
caagaugaguuuccugaug

SEQ ID NO: 1699981 - RNA, 19 nt, Homo sapiens
  misc_RNA (1)...(19): siRNA sense strand
ggaagaguaugagguagaa

SEQ ID NO: 1699982 - RNA, 19 nt, Homo sapiens
  misc_RNA (1)...(19): siRNA sense strand
gauagcaaaccaacauaua

SEQ ID NO: 1699983 - RNA, 19 nt, Homo sapiens
  misc_RNA (1)...(19): siRNA sense strand
ccaaagagcaacuaacuga

SEQ ID NO: 1699984 - RNA, 19 nt, Homo sapiens
  misc_RNA (1)...(19): siRNA sense strand
ggaaguagccaaagagcaa

SEQ ID NO: 1699985 - RNA, 19 nt, Homo sapiens
  misc_RNA (1)...(19): siRNA sense strand
ggaggaagaguaugaggua

SEQ ID NO: 1699986 - RNA, 19 nt, Homo sapiens
  misc_RNA (1)...(19): siRNA sense strand
gcgcuuacaugaaauuugu

SEQ ID NO: 1699987 - RNA, 19 nt, Homo sapiens
  misc_RNA (1)...(19): siRNA sense strand
gaagagagacuaaagaaaa

SEQ ID NO: 1699988 - RNA, 19 nt, Homo sapiens
  misc_RNA (1)...(19): siRNA sense strand
gaccuggacugacguauca

SEQ ID NO: 1699989 - RNA, 19 nt, Homo sapiens
  misc_RNA (1)...(19): siRNA sense strand
gaguaaaccuagagaagau

SEQ ID NO: 1699990 - RNA, 19 nt, Homo sapiens
  misc_RNA (1)...(19): siRNA sense strand
gaagaagagagacuaaaga

SEQ ID NO: 1699991 - RNA, 19 nt, Homo sapiens
  misc_RNA (1)...(19): siRNA sense strand
aacagacucuugcaaguua

SEQ ID NO: 1699992 - RNA, 19 nt, Homo sapiens
  misc_RNA (1)...(19): siRNA sense strand
ggaguuccuuaaugcauuu

SEQ ID NO: 1699993 - RNA, 19 nt, Homo sapiens
  misc_RNA (1)...(19): siRNA sense strand
gauggaaauugaugaacaa

SEQ ID NO: 1699994 - RNA, 19 nt, Homo sapiens
  misc_RNA (1)...(19): siRNA sense strand
caaguacuguaucaacaaa

SEQ ID NO: 1699995 - RNA, 19 nt, Homo sapiens
  misc_RNA (1)...(19): siRNA sense strand
gaauacaacccucguaaca

SEQ ID NO: 1699996 - RNA, 19 nt, Homo sapiens
  misc_RNA (1)...(19): siRNA sense strand
gcccauugccuuaaauaua

SEQ ID NO: 1699997 - RNA, 19 nt, Homo sapiens
  misc_RNA (1)...(19): siRNA sense strand
gcaauggcacucuuucaaa

SEQ ID NO: 1699998 - RNA, 19 nt, Homo sapiens
  misc_RNA (1)...(19): siRNA sense strand
gugcacagcuagcccguuu

SEQ ID NO: 1699999 - RNA, 19 nt, Homo sapiens
  misc_RNA (1)...(19): siRNA sense strand
gaaagccguuugugagaca

SEQ ID NO: 1700000 - RNA, 19 nt, Homo sapiens
  misc_RNA (1)...(19): siRNA sense strand
ggaaugugaugaccuuaag

SEQ ID NO: 1700001 - RNA, 19 nt, Homo sapiens
  misc_RNA (1)...(19): siRNA sense strand
ccaagagagugaauccaaa

SEQ ID NO: 1700002 - RNA, 19 nt, Homo sapiens
  misc_RNA (1)...(19): siRNA sense strand
gagggaaacuuagcucuuc

SEQ ID NO: 1700003 - RNA, 19 nt, Homo sapiens
  misc_RNA (1)...(19): siRNA sense strand
caaacaaaggucauaguaa

SEQ ID NO: 1700004 - RNA, 19 nt, Homo sapiens
  misc_RNA (1)...(19): siRNA sense strand
uauagacgauacuggauuu

SEQ ID NO: 1700005 - RNA, 19 nt, Homo sapiens
  misc_RNA (1)...(19): siRNA sense strand
gaaacaagaagaaaugaag

SEQ ID NO: 1700006 - RNA, 19 nt, Homo sapiens
  misc_RNA (1)...(19): siRNA sense strand
gaacugcuuugaauacaac

SEQ ID NO: 1700007 - RNA, 19 nt, Homo sapiens
  misc_RNA (1)...(19): siRNA sense strand
caauggcacucuuucaaau

SEQ ID NO: 1700008 - RNA, 19 nt, Homo sapiens
  misc_RNA (1)...(19): siRNA sense strand
gaagauauggaaugugaug

SEQ ID NO: 1700009 - RNA, 19 nt, Homo sapiens
  misc_RNA (1)...(19): siRNA sense strand
gaccauccuuggaaaguga

SEQ ID NO: 1700010 - RNA, 19 nt, Homo sapiens
  misc_RNA (1)...(19): siRNA sense strand
ugagcagugugguucauua

SEQ ID NO: 1700011 - RNA, 19 nt, Homo sapiens
  misc_RNA (1)...(19): siRNA sense strand
gaagagauggaaauugaug

SEQ ID NO: 1700012 - RNA, 19 nt, Homo sapiens
  misc_RNA (1)...(19): siRNA sense strand
ggaguaacccuagaaguau

SEQ ID NO: 1700013 - RNA, 19 nt, Homo sapiens
  misc_RNA (1)...(19): siRNA sense strand
acaagaaccuggaagauac

SEQ ID NO: 1700014 - RNA, 19 nt, Homo sapiens
  misc_RNA (1)...(19): siRNA sense strand
gacagugggcguucuuaua

SEQ ID NO: 1700015 - RNA, 19 nt, Homo sapiens
  misc_RNA (1)...(19): siRNA sense strand
gcagugugguucauuaucu

SEQ ID NO: 1700016 - RNA, 19 nt, Homo sapiens
  misc_RNA (1)...(19): siRNA sense strand
gaguaacccuagaaguauu

SEQ ID NO: 1700017 - RNA, 19 nt, Homo sapiens
  misc_RNA (1)...(19): siRNA sense strand
cgaagaaacuguggaaguc

SEQ ID NO: 1700018 - RNA, 19 nt, Homo sapiens
  misc_RNA (1)...(19): siRNA sense strand
gaggauuauucuggucuua

SEQ ID NO: 1700019 - RNA, 19 nt, Homo sapiens
  misc_RNA (1)...(19): siRNA sense strand
caauugaucccuuacuauu

SEQ ID NO: 1700020 - RNA, 19 nt, Homo sapiens
  misc_RNA (1)...(19): siRNA sense strand
gcuaauaaacagacucuug

SEQ ID NO: 1700021 - RNA, 19 nt, Homo sapiens
  misc_RNA (1)...(19): siRNA sense strand
ccagagccaucgccuguga

SEQ ID NO: 1700022 - RNA, 19 nt, Homo sapiens
  misc_RNA (1)...(19): siRNA sense strand
cagucaagaucuguaaaua

SEQ ID NO: 1700023 - RNA, 19 nt, Homo sapiens
  misc_RNA (1)...(19): siRNA sense strand
gaagaagaaggucaaagug

SEQ ID NO: 1700024 - RNA, 19 nt, Homo sapiens
  misc_RNA (1)...(19): siRNA sense strand
ccaaagcaacguucuagaa

SEQ ID NO: 1700025 - RNA, 19 nt, Homo sapiens
  misc_RNA (1)...(19): siRNA sense strand
gagaucagcauuagaaagu

SEQ ID NO: 1700026 - RNA, 19 nt, Homo sapiens
  misc_RNA (1)...(19): siRNA sense strand
ggaguaaaccuagagaaga

SEQ ID NO: 1700027 - RNA, 19 nt, Homo sapiens
  misc_RNA (1)...(19): siRNA sense strand
gagaaacuauuaucaucag

SEQ ID NO: 1700028 - RNA, 19 nt, Homo sapiens
  misc_RNA (1)...(19): siRNA sense strand
gaagaccacaaguuagauu

SEQ ID NO: 1700029 - RNA, 19 nt, Homo sapiens
  misc_RNA (1)...(19): siRNA sense strand
gaaugaagacguagaagag

SEQ ID NO: 1700030 - RNA, 19 nt, Homo sapiens
  misc_RNA (1)...(19): siRNA sense strand
gagcuucguuugagcaauc

SEQ ID NO: 1700031 - RNA, 19 nt, Homo sapiens
  misc_RNA (1)...(19): siRNA sense strand
uagcugcacucuuucagaa

SEQ ID NO: 1700032 - RNA, 19 nt, Homo sapiens
  misc_RNA (1)...(19): siRNA sense strand
ugaguuuccugauggagua

SEQ ID NO: 1700033 - RNA, 19 nt, Homo sapiens
  misc_RNA (1)...(19): siRNA sense strand
aaagagaggcuuaaaguag

SEQ ID NO: 1700034 - RNA, 19 nt, Homo sapiens
  misc_RNA (1)...(19): siRNA sense strand
uaaacagacucuugcaagu

SEQ ID NO: 1700035 - RNA, 19 nt, Homo sapiens
  misc_RNA (1)...(19): siRNA sense strand
aggacaauguugcuaauaa

SEQ ID NO: 1700036 - RNA, 19 nt, Homo sapiens
  misc_RNA (1)...(19): siRNA sense strand
gagcaaagacacagagcaa

SEQ ID NO: 1700037 - RNA, 19 nt, Homo sapiens
  misc_RNA (1)...(19): siRNA sense strand
gcagauguauuuguggaau

SEQ ID NO: 1700038 - RNA, 19 nt, Homo sapiens
  misc_RNA (1)...(19): siRNA sense strand
ucugaaagcuccacuugau

SEQ ID NO: 1700039 - RNA, 19 nt, Homo sapiens
  misc_RNA (1)...(19): siRNA sense strand
gaucuuccaaugcauauga

SEQ ID NO: 1700040 - RNA, 19 nt, Homo sapiens
  misc_RNA (1)...(19): siRNA sense strand
ggaggaagcuguuaccaua

SEQ ID NO: 1700041 - RNA, 19 nt, Homo sapiens
  misc_RNA (1)...(19): siRNA sense strand
gaaaugaaguugauggauu

SEQ ID NO: 1700042 - RNA, 19 nt, Homo sapiens
  misc_RNA (1)...(19): siRNA sense strand
caaguaaugucgauaaaga

SEQ ID NO: 1700043 - RNA, 19 nt, Homo sapiens
  misc_RNA (1)...(19): siRNA sense strand
gcacguauaugccgagauc

SEQ ID NO: 1700044 - RNA, 19 nt, Homo sapiens
  misc_RNA (1)...(19): siRNA sense strand
gaucgaggaugaagaagga

SEQ ID NO: 1700045 - RNA, 19 nt, Homo sapiens
  misc_RNA (1)...(19): siRNA sense strand
gagaugcuguuguaauuuc

SEQ ID NO: 1700046 - RNA, 19 nt, Homo sapiens
  misc_RNA (1)...(19): siRNA sense strand
ucaaggaccucaucaacga

SEQ ID NO: 1700047 - RNA, 19 nt, Homo sapiens
  misc_RNA (1)...(19): siRNA sense strand
caguaugucugcagaugua

SEQ ID NO: 1700048 - RNA, 19 nt, Homo sapiens
  misc_RNA (1)...(19): siRNA sense strand
guugauggauuuagauguu

SEQ ID NO: 1700049 - RNA, 19 nt, Homo sapiens
  misc_RNA (1)...(19): siRNA sense strand
uaccugaacuucuuuacaa

SEQ ID NO: 1700050 - RNA, 19 nt, Homo sapiens
  misc_RNA (1)...(19): siRNA sense strand
aaagaugccuucuggugaa

SEQ ID NO: 1700051 - RNA, 19 nt, Homo sapiens
  misc_RNA (1)...(19): siRNA sense strand
gcacugagguaccugaacu

SEQ ID NO: 1700052 - RNA, 19 nt, Homo sapiens
  misc_RNA (1)...(19): siRNA sense strand
uggagaugcuguuguaauu

SEQ ID NO: 1700053 - RNA, 19 nt, Homo sapiens
  misc_RNA (1)...(19): siRNA sense strand
ugagguaccugaacuucuu

SEQ ID NO: 1700054 - RNA, 19 nt, Homo sapiens
  misc_RNA (1)...(19): siRNA sense strand
uauuggagaugcuguugua

SEQ ID NO: 1700055 - RNA, 19 nt, Homo sapiens
  misc_RNA (1)...(19): siRNA sense strand
caagaucgaggaugaagaa

SEQ ID NO: 1700056 - RNA, 19 nt, Homo sapiens
  misc_RNA (1)...(19): siRNA sense strand
ugaaguugauggauuuaga

SEQ ID NO: 1700057 - RNA, 19 nt, Homo sapiens
  misc_RNA (1)...(19): siRNA sense strand
gaggccugcugggauauua

SEQ ID NO: 1700058 - RNA, 19 nt, Homo sapiens
  misc_RNA (1)...(19): siRNA sense strand
gaugccuucuggugaauuu

SEQ ID NO: 1700059 - RNA, 19 nt, Homo sapiens
  misc_RNA (1)...(19): siRNA sense strand
cgagaucucagccauauug

SEQ ID NO: 1700060 - RNA, 19 nt, Homo sapiens
  misc_RNA (1)...(19): siRNA sense strand
gccgagaucucagccauau

SEQ ID NO: 1700061 - RNA, 19 nt, Homo sapiens
  misc_RNA (1)...(19): siRNA sense strand
agagaugaaugaaccaguu

SEQ ID NO: 1700062 - RNA, 19 nt, Homo sapiens
  misc_RNA (1)...(19): siRNA sense strand
ggagaugcuguuguaauuu

SEQ ID NO: 1700063 - RNA, 19 nt, Homo sapiens
  misc_RNA (1)...(19): siRNA sense strand
guggagaacuuggaaaugg

SEQ ID NO: 1700064 - RNA, 19 nt, Homo sapiens
  misc_RNA (1)...(19): siRNA sense strand
uaccuuggcgcuaguauuu

SEQ ID NO: 1700065 - RNA, 19 nt, Homo sapiens
  misc_RNA (1)...(19): siRNA sense strand
gcggauaugggacacuuaa

SEQ ID NO: 1700066 - RNA, 19 nt, Homo sapiens
  misc_RNA (1)...(19): siRNA sense strand
gaaguugauggauuuagau

SEQ ID NO: 1700067 - RNA, 19 nt, Homo sapiens
  misc_RNA (1)...(19): siRNA sense strand
gaacuuggaaauggaaaca

SEQ ID NO: 1700068 - RNA, 19 nt, Homo sapiens
  misc_RNA (1)...(19): siRNA sense strand
aacgaggccugcugggaua

SEQ ID NO: 1700069 - RNA, 19 nt, Homo sapiens
  misc_RNA (1)...(19): siRNA sense strand
ggagaacuuggaaauggaa

SEQ ID NO: 1700070 - RNA, 19 nt, Homo sapiens
  misc_RNA (1)...(19): siRNA sense strand
acacuaagggccgaagaua

SEQ ID NO: 1700071 - RNA, 19 nt, Homo sapiens
  misc_RNA (1)...(19): siRNA sense strand
ccuuggcgcuaguauuuga

SEQ ID NO: 1700072 - RNA, 19 nt, Homo sapiens
  misc_RNA (1)...(19): siRNA sense strand
ccacuccacucucuucaac

SEQ ID NO: 1700073 - RNA, 19 nt, Homo sapiens
  misc_RNA (1)...(19): siRNA sense strand
aggaagcuguuaccauaga

SEQ ID NO: 1700074 - RNA, 19 nt, Homo sapiens
  misc_RNA (1)...(19): siRNA sense strand
guuguaauuuccugugcaa

SEQ ID NO: 1700075 - RNA, 19 nt, Homo sapiens
  misc_RNA (1)...(19): siRNA sense strand
caacggugacacucaguau

SEQ ID NO: 1700076 - RNA, 19 nt, Homo sapiens
  misc_RNA (1)...(19): siRNA sense strand
caacuaacuuuugcacuga

SEQ ID NO: 1700077 - RNA, 19 nt, Homo sapiens
  misc_RNA (1)...(19): siRNA sense strand
gcuguuaccauagagauga

SEQ ID NO: 1700078 - RNA, 19 nt, Homo sapiens
  misc_RNA (1)...(19): siRNA sense strand
uaaagaggaggaagcuguu

SEQ ID NO: 1700079 - RNA, 19 nt, Homo sapiens
  misc_RNA (1)...(19): siRNA sense strand
gaagauaacgcggauaccu

SEQ ID NO: 1700080 - RNA, 19 nt, Homo sapiens
  misc_RNA (1)...(19): siRNA sense strand
caaaagacggagugaaauu

SEQ ID NO: 1700081 - RNA, 19 nt, Homo sapiens
  misc_RNA (1)...(19): siRNA sense strand
caccaaaccaggagaaagu

SEQ ID NO: 1700082 - RNA, 19 nt, Homo sapiens
  misc_RNA (1)...(19): siRNA sense strand
ugauggauuuagauguuga

SEQ ID NO: 1700083 - RNA, 19 nt, Homo sapiens
  misc_RNA (1)...(19): siRNA sense strand
ggauaugggacacuuaaaa

SEQ ID NO: 1700084 - RNA, 19 nt, Homo sapiens
  misc_RNA (1)...(19): siRNA sense strand
cucccaagaucgaggauga

SEQ ID NO: 1700085 - RNA, 19 nt, Homo sapiens
  misc_RNA (1)...(19): siRNA sense strand
cacuaagggccgaagauaa

SEQ ID NO: 1700086 - RNA, 19 nt, Homo sapiens
  misc_RNA (1)...(19): siRNA sense strand
uggugaauuugcacguaua

SEQ ID NO: 1700087 - RNA, 19 nt, Homo sapiens
  misc_RNA (1)...(19): siRNA sense strand
gcacucaaggaccucauca

SEQ ID NO: 1700088 - RNA, 19 nt, Homo sapiens
  misc_RNA (1)...(19): siRNA sense strand
gcuccauccucaagaaggu

SEQ ID NO: 1700089 - RNA, 19 nt, Homo sapiens
  misc_RNA (1)...(19): siRNA sense strand
ggaagcuguuaccauagag

SEQ ID NO: 1700090 - RNA, 19 nt, Homo sapiens
  misc_RNA (1)...(19): siRNA sense strand
uggagaacuuggaaaugga

SEQ ID NO: 1700091 - RNA, 19 nt, Homo sapiens
  misc_RNA (1)...(19): siRNA sense strand
gaagcuguuaccauagaga

SEQ ID NO: 1700092 - RNA, 19 nt, Homo sapiens
  misc_RNA (1)...(19): siRNA sense strand
guaccugaacuucuuuaca

SEQ ID NO: 1700093 - RNA, 19 nt, Homo sapiens
  misc_RNA (1)...(19): siRNA sense strand
gaauuccagaacaggagua

SEQ ID NO: 1700094 - RNA, 19 nt, Homo sapiens
  misc_RNA (1)...(19): siRNA sense strand
aaagaggaggaagcuguua

SEQ ID NO: 1700095 - RNA, 19 nt, Homo sapiens
  misc_RNA (1)...(19): siRNA sense strand
gcaccaaaccaggagaaag

SEQ ID NO: 1700096 - RNA, 19 nt, Homo sapiens
  misc_RNA (1)...(19): siRNA sense strand
gcagauguaccccuuguug

SEQ ID NO: 1700097 - RNA, 19 nt, Homo sapiens
  misc_RNA (1)...(19): siRNA sense strand
ugaauuugcacguauaugc

SEQ ID NO: 1700098 - RNA, 19 nt, Homo sapiens
  misc_RNA (1)...(19): siRNA sense strand
cagacuaugaaaugaaguu

SEQ ID NO: 1700099 - RNA, 19 nt, Homo sapiens
  misc_RNA (1)...(19): siRNA sense strand
gagguaccugaacuucuuu

SEQ ID NO: 1700100 - RNA, 19 nt, Homo sapiens
  misc_RNA (1)...(19): siRNA sense strand
ucuggugaauuugcacgua

SEQ ID NO: 1700101 - RNA, 19 nt, Homo sapiens
  misc_RNA (1)...(19): siRNA sense strand
guaguaaagaugccuucug

SEQ ID NO: 1700102 - RNA, 19 nt, Homo sapiens
  misc_RNA (1)...(19): siRNA sense strand
gacuaugaaaugaaguuga

SEQ ID NO: 1700103 - RNA, 19 nt, Homo sapiens
  misc_RNA (1)...(19): siRNA sense strand
gaggaagcuguuaccauag

SEQ ID NO: 1700104 - RNA, 19 nt, Homo sapiens
  misc_RNA (1)...(19): siRNA sense strand
gauaugggacacuuaaaau

SEQ ID NO: 1700105 - RNA, 19 nt, Homo sapiens
  misc_RNA (1)...(19): siRNA sense strand
ucaacggugacacucagua

SEQ ID NO: 1700106 - RNA, 19 nt, Homo sapiens
  misc_RNA (1)...(19): siRNA sense strand
aagauaacgcggauaccuu

SEQ ID NO: 1700107 - RNA, 19 nt, Homo sapiens
  misc_RNA (1)...(19): siRNA sense strand
ggugaauuugcacguauau

SEQ ID NO: 1700108 - RNA, 19 nt, Homo sapiens
  misc_RNA (1)...(19): siRNA sense strand
cuggugaauuugcacguau

SEQ ID NO: 1700109 - RNA, 19 nt, Homo sapiens
  misc_RNA (1)...(19): siRNA sense strand
ggaggaagcuguuaccaua

SEQ ID NO: 1700110 - RNA, 19 nt, Homo sapiens
  misc_RNA (1)...(19): siRNA sense strand
gaaaugaaguugauggauu

SEQ ID NO: 1700111 - RNA, 19 nt, Homo sapiens
  misc_RNA (1)...(19): siRNA sense strand
caaguaaugucgauaaaga

SEQ ID NO: 1700112 - RNA, 19 nt, Homo sapiens
  misc_RNA (1)...(19): siRNA sense strand
gcacguauaugccgagauc

SEQ ID NO: 1700113 - RNA, 19 nt, Homo sapiens
  misc_RNA (1)...(19): siRNA sense strand
gaucgaggaugaagaagga

SEQ ID NO: 1700114 - RNA, 19 nt, Homo sapiens
  misc_RNA (1)...(19): siRNA sense strand
gagaugcuguuguaauuuc

SEQ ID NO: 1700115 - RNA, 19 nt, Homo sapiens
  misc_RNA (1)...(19): siRNA sense strand
ucaaggaccucaucaacga

SEQ ID NO: 1700116 - RNA, 19 nt, Homo sapiens
  misc_RNA (1)...(19): siRNA sense strand
caguaugucugcagaugua

SEQ ID NO: 1700117 - RNA, 19 nt, Homo sapiens
  misc_RNA (1)...(19): siRNA sense strand
guugauggauuuagauguu

SEQ ID NO: 1700118 - RNA, 19 nt, Homo sapiens
  misc_RNA (1)...(19): siRNA sense strand
uaccugaacuucuuuacaa

SEQ ID NO: 1700119 - RNA, 19 nt, Homo sapiens
  misc_RNA (1)...(19): siRNA sense strand
aaagaugccuucuggugaa

SEQ ID NO: 1700120 - RNA, 19 nt, Homo sapiens
  misc_RNA (1)...(19): siRNA sense strand
gcacugagguaccugaacu

SEQ ID NO: 1700121 - RNA, 19 nt, Homo sapiens
  misc_RNA (1)...(19): siRNA sense strand
uggagaugcuguuguaauu

SEQ ID NO: 1700122 - RNA, 19 nt, Homo sapiens
  misc_RNA (1)...(19): siRNA sense strand
ugagguaccugaacuucuu

SEQ ID NO: 1700123 - RNA, 19 nt, Homo sapiens
  misc_RNA (1)...(19): siRNA sense strand
uauuggagaugcuguugua

SEQ ID NO: 1700124 - RNA, 19 nt, Homo sapiens
  misc_RNA (1)...(19): siRNA sense strand
caagaucgaggaugaagaa

SEQ ID NO: 1700125 - RNA, 19 nt, Homo sapiens
  misc_RNA (1)...(19): siRNA sense strand
ugaaguugauggauuuaga

SEQ ID NO: 1700126 - RNA, 19 nt, Homo sapiens
  misc_RNA (1)...(19): siRNA sense strand
gaggccugcugggauauua

SEQ ID NO: 1700127 - RNA, 19 nt, Homo sapiens
  misc_RNA (1)...(19): siRNA sense strand
gaugccuucuggugaauuu

SEQ ID NO: 1700128 - RNA, 19 nt, Homo sapiens
  misc_RNA (1)...(19): siRNA sense strand
cgagaucucagccauauug

SEQ ID NO: 1700129 - RNA, 19 nt, Homo sapiens
  misc_RNA (1)...(19): siRNA sense strand
gccgagaucucagccauau

SEQ ID NO: 1700130 - RNA, 19 nt, Homo sapiens
  misc_RNA (1)...(19): siRNA sense strand
agagaugaaugaaccaguu

SEQ ID NO: 1700131 - RNA, 19 nt, Homo sapiens
  misc_RNA (1)...(19): siRNA sense strand
ggagaugcuguuguaauuu

SEQ ID NO: 1700132 - RNA, 19 nt, Homo sapiens
  misc_RNA (1)...(19): siRNA sense strand
guggagaacuuggaaaugg

SEQ ID NO: 1700133 - RNA, 19 nt, Homo sapiens
  misc_RNA (1)...(19): siRNA sense strand
uaccuuggcgcuaguauuu

SEQ ID NO: 1700134 - RNA, 19 nt, Homo sapiens
  misc_RNA (1)...(19): siRNA sense strand
gcggauaugggacacuuaa

SEQ ID NO: 1700135 - RNA, 19 nt, Homo sapiens
  misc_RNA (1)...(19): siRNA sense strand
gaaguugauggauuuagau

SEQ ID NO: 1700136 - RNA, 19 nt, Homo sapiens
  misc_RNA (1)...(19): siRNA sense strand
gaacuuggaaauggaaaca

SEQ ID NO: 1700137 - RNA, 19 nt, Homo sapiens
  misc_RNA (1)...(19): siRNA sense strand
aacgaggccugcugggaua

SEQ ID NO: 1700138 - RNA, 19 nt, Homo sapiens
  misc_RNA (1)...(19): siRNA sense strand
ggagaacuuggaaauggaa

SEQ ID NO: 1700139 - RNA, 19 nt, Homo sapiens
  misc_RNA (1)...(19): siRNA sense strand
acacuaagggccgaagaua

SEQ ID NO: 1700140 - RNA, 19 nt, Homo sapiens
  misc_RNA (1)...(19): siRNA sense strand
ccuuggcgcuaguauuuga

SEQ ID NO: 1700141 - RNA, 19 nt, Homo sapiens
  misc_RNA (1)...(19): siRNA sense strand
ccacuccacucucuucaac

SEQ ID NO: 1700142 - RNA, 19 nt, Homo sapiens
  misc_RNA (1)...(19): siRNA sense strand
aggaagcuguuaccauaga

SEQ ID NO: 1700143 - RNA, 19 nt, Homo sapiens
  misc_RNA (1)...(19): siRNA sense strand
guuguaauuuccugugcaa

SEQ ID NO: 1700144 - RNA, 19 nt, Homo sapiens
  misc_RNA (1)...(19): siRNA sense strand
caacggugacacucaguau

SEQ ID NO: 1700145 - RNA, 19 nt, Homo sapiens
  misc_RNA (1)...(19): siRNA sense strand
caacuaacuuuugcacuga

SEQ ID NO: 1700146 - RNA, 19 nt, Homo sapiens
  misc_RNA (1)...(19): siRNA sense strand
gcuguuaccauagagauga

SEQ ID NO: 1700147 - RNA, 19 nt, Homo sapiens
  misc_RNA (1)...(19): siRNA sense strand
uaaagaggaggaagcuguu

SEQ ID NO: 1700148 - RNA, 19 nt, Homo sapiens
  misc_RNA (1)...(19): siRNA sense strand
gaagauaacgcggauaccu

SEQ ID NO: 1700149 - RNA, 19 nt, Homo sapiens
  misc_RNA (1)...(19): siRNA sense strand
caaaagacggagugaaauu

SEQ ID NO: 1700150 - RNA, 19 nt, Homo sapiens
  misc_RNA (1)...(19): siRNA sense strand
caccaaaccaggagaaagu

SEQ ID NO: 1700151 - RNA, 19 nt, Homo sapiens
  misc_RNA (1)...(19): siRNA sense strand
ugauggauuuagauguuga

SEQ ID NO: 1700152 - RNA, 19 nt, Homo sapiens
  misc_RNA (1)...(19): siRNA sense strand
ggauaugggacacuuaaaa

SEQ ID NO: 1700153 - RNA, 19 nt, Homo sapiens
  misc_RNA (1)...(19): siRNA sense strand
cucccaagaucgaggauga

SEQ ID NO: 1700154 - RNA, 19 nt, Homo sapiens
  misc_RNA (1)...(19): siRNA sense strand
cacuaagggccgaagauaa

SEQ ID NO: 1700155 - RNA, 19 nt, Homo sapiens
  misc_RNA (1)...(19): siRNA sense strand
uggugaauuugcacguaua

SEQ ID NO: 1700156 - RNA, 19 nt, Homo sapiens
  misc_RNA (1)...(19): siRNA sense strand
gcacucaaggaccucauca

SEQ ID NO: 1700157 - RNA, 19 nt, Homo sapiens
  misc_RNA (1)...(19): siRNA sense strand
gcuccauccucaagaaggu

SEQ ID NO: 1700158 - RNA, 19 nt, Homo sapiens
  misc_RNA (1)...(19): siRNA sense strand
ggaagcuguuaccauagag

SEQ ID NO: 1700159 - RNA, 19 nt, Homo sapiens
  misc_RNA (1)...(19): siRNA sense strand
uggagaacuuggaaaugga

SEQ ID NO: 1700160 - RNA, 19 nt, Homo sapiens
  misc_RNA (1)...(19): siRNA sense strand
gaagcuguuaccauagaga

SEQ ID NO: 1700161 - RNA, 19 nt, Homo sapiens
  misc_RNA (1)...(19): siRNA sense strand
guaccugaacuucuuuaca

SEQ ID NO: 1700162 - RNA, 19 nt, Homo sapiens
  misc_RNA (1)...(19): siRNA sense strand
gaauuccagaacaggagua

SEQ ID NO: 1700163 - RNA, 19 nt, Homo sapiens
  misc_RNA (1)...(19): siRNA sense strand
aaagaggaggaagcuguua

SEQ ID NO: 1700164 - RNA, 19 nt, Homo sapiens
  misc_RNA (1)...(19): siRNA sense strand
gcaccaaaccaggagaaag

SEQ ID NO: 1700165 - RNA, 19 nt, Homo sapiens
  misc_RNA (1)...(19): siRNA sense strand
gcagauguaccccuuguug

SEQ ID NO: 1700166 - RNA, 19 nt, Homo sapiens
  misc_RNA (1)...(19): siRNA sense strand
ugaauuugcacguauaugc

SEQ ID NO: 1700167 - RNA, 19 nt, Homo sapiens
  misc_RNA (1)...(19): siRNA sense strand
cagacuaugaaaugaaguu

SEQ ID NO: 1700168 - RNA, 19 nt, Homo sapiens
  misc_RNA (1)...(19): siRNA sense strand
gagguaccugaacuucuuu

SEQ ID NO: 1700169 - RNA, 19 nt, Homo sapiens
  misc_RNA (1)...(19): siRNA sense strand
ucuggugaauuugcacgua

SEQ ID NO: 1700170 - RNA, 19 nt, Homo sapiens
  misc_RNA (1)...(19): siRNA sense strand
guaguaaagaugccuucug

SEQ ID NO: 1700171 - RNA, 19 nt, Homo sapiens
  misc_RNA (1)...(19): siRNA sense strand
gacuaugaaaugaaguuga

SEQ ID NO: 1700172 - RNA, 19 nt, Homo sapiens
  misc_RNA (1)...(19): siRNA sense strand
gaggaagcuguuaccauag

SEQ ID NO: 1700173 - RNA, 19 nt, Homo sapiens
  misc_RNA (1)...(19): siRNA sense strand
gauaugggacacuuaaaau

SEQ ID NO: 1700174 - RNA, 19 nt, Homo sapiens
  misc_RNA (1)...(19): siRNA sense strand
ucaacggugacacucagua

SEQ ID NO: 1700175 - RNA, 19 nt, Homo sapiens
  misc_RNA (1)...(19): siRNA sense strand
aagauaacgcggauaccuu

SEQ ID NO: 1700176 - RNA, 19 nt, Homo sapiens
  misc_RNA (1)...(19): siRNA sense strand
ggugaauuugcacguauau

SEQ ID NO: 1700177 - RNA, 19 nt, Homo sapiens
  misc_RNA (1)...(19): siRNA sense strand
cuggugaauuugcacguau

SEQ ID NO: 1700178 - RNA, 19 nt, Homo sapiens
  misc_RNA (1)...(19): siRNA sense strand
ggaaaugcuugacaucaug

SEQ ID NO: 1700179 - RNA, 19 nt, Homo sapiens
  misc_RNA (1)...(19): siRNA sense strand
cagcguggacgaugaauuu

SEQ ID NO: 1700180 - RNA, 19 nt, Homo sapiens
  misc_RNA (1)...(19): siRNA sense strand
gaagauggacagaaacaag

SEQ ID NO: 1700181 - RNA, 19 nt, Homo sapiens
  misc_RNA (1)...(19): siRNA sense strand
caugauggcucggucaguu

SEQ ID NO: 1700182 - RNA, 19 nt, Homo sapiens
  misc_RNA (1)...(19): siRNA sense strand
gggaacacguggagagcuu

SEQ ID NO: 1700183 - RNA, 19 nt, Homo sapiens
  misc_RNA (1)...(19): siRNA sense strand
gaaaugcuugacaucauga

SEQ ID NO: 1700184 - RNA, 19 nt, Homo sapiens
  misc_RNA (1)...(19): siRNA sense strand
ggaauucauugagucuugu

SEQ ID NO: 1700185 - RNA, 19 nt, Homo sapiens
  misc_RNA (1)...(19): siRNA sense strand
cguggacgaugaauuugaa

SEQ ID NO: 1700186 - RNA, 19 nt, Homo sapiens
  misc_RNA (1)...(19): siRNA sense strand
gaccauugaggaauucauu

SEQ ID NO: 1700187 - RNA, 19 nt, Homo sapiens
  misc_RNA (1)...(19): siRNA sense strand
gaaugucccagcggaauug

SEQ ID NO: 1700188 - RNA, 19 nt, Homo sapiens
  misc_RNA (1)...(19): siRNA sense strand
gaggaaaugcuugacauca

SEQ ID NO: 1700189 - RNA, 19 nt, Homo sapiens
  misc_RNA (1)...(19): siRNA sense strand
gauuuacucccaguucuuu

SEQ ID NO: 1700190 - RNA, 19 nt, Homo sapiens
  misc_RNA (1)...(19): siRNA sense strand
gcagauuuacucccaguuc

SEQ ID NO: 1700191 - RNA, 19 nt, Homo sapiens
  misc_RNA (1)...(19): siRNA sense strand
ucaaugaggagaacuucaa

SEQ ID NO: 1700192 - RNA, 19 nt, Homo sapiens
  misc_RNA (1)...(19): siRNA sense strand
gagaacuucaagcagauuu

SEQ ID NO: 1700193 - RNA, 19 nt, Homo sapiens
  misc_RNA (1)...(19): siRNA sense strand
ugaaguccaucuaugacau

SEQ ID NO: 1700194 - RNA, 19 nt, Homo sapiens
  misc_RNA (1)...(19): siRNA sense strand
caucaugaaguccaucuau

SEQ ID NO: 1700195 - RNA, 19 nt, Homo sapiens
  misc_RNA (1)...(19): siRNA sense strand
gaaguccaucuaugacaug

SEQ ID NO: 1700196 - RNA, 19 nt, Homo sapiens
  misc_RNA (1)...(19): siRNA sense strand
aggaauucauugagucuug

SEQ ID NO: 1700197 - RNA, 19 nt, Homo sapiens
  misc_RNA (1)...(19): siRNA sense strand
gaacuucaagcagauuuac

SEQ ID NO: 1700198 - RNA, 19 nt, Homo sapiens
  misc_RNA (1)...(19): siRNA sense strand
ccauugaggaauucauuga

SEQ ID NO: 1700199 - RNA, 19 nt, Homo sapiens
  misc_RNA (1)...(19): siRNA sense strand
gcaggagcaaaccaaauuc

SEQ ID NO: 1700200 - RNA, 19 nt, Homo sapiens
  misc_RNA (1)...(19): siRNA sense strand
cagauuuacucccaguucu

SEQ ID NO: 1700201 - RNA, 19 nt, Homo sapiens
  misc_RNA (1)...(19): siRNA sense strand
ggacagaaacaaggauggu

SEQ ID NO: 1700202 - RNA, 19 nt, Homo sapiens
  misc_RNA (1)...(19): siRNA sense strand
aggaaaugcuugacaucau

SEQ ID NO: 1700203 - RNA, 19 nt, Homo sapiens
  misc_RNA (1)...(19): siRNA sense strand
ggagaacuucaagcagauu

SEQ ID NO: 1700204 - RNA, 19 nt, Homo sapiens
  misc_RNA (1)...(19): siRNA sense strand
ugaauuguccaccgugugu

SEQ ID NO: 1700205 - RNA, 19 nt, Homo sapiens
  misc_RNA (1)...(19): siRNA sense strand
cagaagauggacagaaaca

SEQ ID NO: 1700206 - RNA, 19 nt, Homo sapiens
  misc_RNA (1)...(19): siRNA sense strand
ugcaggagcaaaccaaauu

SEQ ID NO: 1700207 - RNA, 19 nt, Homo sapiens
  misc_RNA (1)...(19): siRNA sense strand
ggugaccauugaggaauuc

SEQ ID NO: 1700208 - RNA, 19 nt, Homo sapiens
  misc_RNA (1)...(19): siRNA sense strand
agaacuucaagcagauuua

SEQ ID NO: 1700209 - RNA, 19 nt, Homo sapiens
  misc_RNA (1)...(19): siRNA sense strand
gcguggacgaugaauuuga

SEQ ID NO: 1700210 - RNA, 19 nt, Homo sapiens
  misc_RNA (1)...(19): siRNA sense strand
gagcagcugcaggagcaaa

SEQ ID NO: 1700211 - RNA, 19 nt, Homo sapiens
  misc_RNA (1)...(19): siRNA sense strand
cagcaccuaugccacuuuu

SEQ ID NO: 1700212 - RNA, 19 nt, Homo sapiens
  misc_RNA (1)...(19): siRNA sense strand
ggaaaugcuugacaucaug

SEQ ID NO: 1700213 - RNA, 19 nt, Homo sapiens
  misc_RNA (1)...(19): siRNA sense strand
cagcguggacgaugaauuu

SEQ ID NO: 1700214 - RNA, 19 nt, Homo sapiens
  misc_RNA (1)...(19): siRNA sense strand
gaagauggacagaaacaag

SEQ ID NO: 1700215 - RNA, 19 nt, Homo sapiens
  misc_RNA (1)...(19): siRNA sense strand
caugauggcucggucaguu

SEQ ID NO: 1700216 - RNA, 19 nt, Homo sapiens
  misc_RNA (1)...(19): siRNA sense strand
gggaacacguggagagcuu

SEQ ID NO: 1700217 - RNA, 19 nt, Homo sapiens
  misc_RNA (1)...(19): siRNA sense strand
gaaaugcuugacaucauga

SEQ ID NO: 1700218 - RNA, 19 nt, Homo sapiens
  misc_RNA (1)...(19): siRNA sense strand
ggaauucauugagucuugu

SEQ ID NO: 1700219 - RNA, 19 nt, Homo sapiens
  misc_RNA (1)...(19): siRNA sense strand
cguggacgaugaauuugaa

SEQ ID NO: 1700220 - RNA, 19 nt, Homo sapiens
  misc_RNA (1)...(19): siRNA sense strand
gaccauugaggaauucauu

SEQ ID NO: 1700221 - RNA, 19 nt, Homo sapiens
  misc_RNA (1)...(19): siRNA sense strand
gaaugucccagcggaauug

SEQ ID NO: 1700222 - RNA, 19 nt, Homo sapiens
  misc_RNA (1)...(19): siRNA sense strand
gaggaaaugcuugacauca

SEQ ID NO: 1700223 - RNA, 19 nt, Homo sapiens
  misc_RNA (1)...(19): siRNA sense strand
gauuuacucccaguucuuu

SEQ ID NO: 1700224 - RNA, 19 nt, Homo sapiens
  misc_RNA (1)...(19): siRNA sense strand
gcagauuuacucccaguuc

SEQ ID NO: 1700225 - RNA, 19 nt, Homo sapiens
  misc_RNA (1)...(19): siRNA sense strand
ucaaugaggagaacuucaa

SEQ ID NO: 1700226 - RNA, 19 nt, Homo sapiens
  misc_RNA (1)...(19): siRNA sense strand
gagaacuucaagcagauuu

SEQ ID NO: 1700227 - RNA, 19 nt, Homo sapiens
  misc_RNA (1)...(19): siRNA sense strand
ugaaguccaucuaugacau

SEQ ID NO: 1700228 - RNA, 19 nt, Homo sapiens
  misc_RNA (1)...(19): siRNA sense strand
caucaugaaguccaucuau

SEQ ID NO: 1700229 - RNA, 19 nt, Homo sapiens
  misc_RNA (1)...(19): siRNA sense strand
gaaguccaucuaugacaug

SEQ ID NO: 1700230 - RNA, 19 nt, Homo sapiens
  misc_RNA (1)...(19): siRNA sense strand
aggaauucauugagucuug

SEQ ID NO: 1700231 - RNA, 19 nt, Homo sapiens
  misc_RNA (1)...(19): siRNA sense strand
gaacuucaagcagauuuac

SEQ ID NO: 1700232 - RNA, 19 nt, Homo sapiens
  misc_RNA (1)...(19): siRNA sense strand
ccauugaggaauucauuga

SEQ ID NO: 1700233 - RNA, 19 nt, Homo sapiens
  misc_RNA (1)...(19): siRNA sense strand
gcaggagcaaaccaaauuc

SEQ ID NO: 1700234 - RNA, 19 nt, Homo sapiens
  misc_RNA (1)...(19): siRNA sense strand
cagauuuacucccaguucu

SEQ ID NO: 1700235 - RNA, 19 nt, Homo sapiens
  misc_RNA (1)...(19): siRNA sense strand
ggacagaaacaaggauggu

SEQ ID NO: 1700236 - RNA, 19 nt, Homo sapiens
  misc_RNA (1)...(19): siRNA sense strand
aggaaaugcuugacaucau

SEQ ID NO: 1700237 - RNA, 19 nt, Homo sapiens
  misc_RNA (1)...(19): siRNA sense strand
ggagaacuucaagcagauu

SEQ ID NO: 1700238 - RNA, 19 nt, Homo sapiens
  misc_RNA (1)...(19): siRNA sense strand
ugaauuguccaccgugugu

SEQ ID NO: 1700239 - RNA, 19 nt, Homo sapiens
  misc_RNA (1)...(19): siRNA sense strand
cagaagauggacagaaaca

SEQ ID NO: 1700240 - RNA, 19 nt, Homo sapiens
  misc_RNA (1)...(19): siRNA sense strand
ugcaggagcaaaccaaauu

SEQ ID NO: 1700241 - RNA, 19 nt, Homo sapiens
  misc_RNA (1)...(19): siRNA sense strand
ggugaccauugaggaauuc

SEQ ID NO: 1700242 - RNA, 19 nt, Homo sapiens
  misc_RNA (1)...(19): siRNA sense strand
agaacuucaagcagauuua

SEQ ID NO: 1700243 - RNA, 19 nt, Homo sapiens
  misc_RNA (1)...(19): siRNA sense strand
gcguggacgaugaauuuga

SEQ ID NO: 1700244 - RNA, 19 nt, Homo sapiens
  misc_RNA (1)...(19): siRNA sense strand
gagcagcugcaggagcaaa

SEQ ID NO: 1700245 - RNA, 19 nt, Homo sapiens
  misc_RNA (1)...(19): siRNA sense strand
cagcaccuaugccacuuuu

SEQ ID NO: 1700246 - RNA, 19 nt, Homo sapiens
  misc_RNA (1)...(19): siRNA sense strand
ggaaaugcuugacaucaug

SEQ ID NO: 1700247 - RNA, 19 nt, Homo sapiens
  misc_RNA (1)...(19): siRNA sense strand
cagcguggacgaugaauuu

SEQ ID NO: 1700248 - RNA, 19 nt, Homo sapiens
  misc_RNA (1)...(19): siRNA sense strand
gaagauggacagaaacaag

SEQ ID NO: 1700249 - RNA, 19 nt, Homo sapiens
  misc_RNA (1)...(19): siRNA sense strand
caugauggcucggucaguu

SEQ ID NO: 1700250 - RNA, 19 nt, Homo sapiens
  misc_RNA (1)...(19): siRNA sense strand
gggaacacguggagagcuu

SEQ ID NO: 1700251 - RNA, 19 nt, Homo sapiens
  misc_RNA (1)...(19): siRNA sense strand
gaaaugcuugacaucauga

SEQ ID NO: 1700252 - RNA, 19 nt, Homo sapiens
  misc_RNA (1)...(19): siRNA sense strand
ggaauucauugagucuugu

SEQ ID NO: 1700253 - RNA, 19 nt, Homo sapiens
  misc_RNA (1)...(19): siRNA sense strand
cguggacgaugaauuugaa

SEQ ID NO: 1700254 - RNA, 19 nt, Homo sapiens
  misc_RNA (1)...(19): siRNA sense strand
gaccauugaggaauucauu

SEQ ID NO: 1700255 - RNA, 19 nt, Homo sapiens
  misc_RNA (1)...(19): siRNA sense strand
gaaugucccagcggaauug

SEQ ID NO: 1700256 - RNA, 19 nt, Homo sapiens
  misc_RNA (1)...(19): siRNA sense strand
gaggaaaugcuugacauca

SEQ ID NO: 1700257 - RNA, 19 nt, Homo sapiens
  misc_RNA (1)...(19): siRNA sense strand
gauuuacucccaguucuuu

SEQ ID NO: 1700258 - RNA, 19 nt, Homo sapiens
  misc_RNA (1)...(19): siRNA sense strand
gcagauuuacucccaguuc

SEQ ID NO: 1700259 - RNA, 19 nt, Homo sapiens
  misc_RNA (1)...(19): siRNA sense strand
ucaaugaggagaacuucaa

SEQ ID NO: 1700260 - RNA, 19 nt, Homo sapiens
  misc_RNA (1)...(19): siRNA sense strand
gagaacuucaagcagauuu

SEQ ID NO: 1700261 - RNA, 19 nt, Homo sapiens
  misc_RNA (1)...(19): siRNA sense strand
ugaaguccaucuaugacau

SEQ ID NO: 1700262 - RNA, 19 nt, Homo sapiens
  misc_RNA (1)...(19): siRNA sense strand
caucaugaaguccaucuau

SEQ ID NO: 1700263 - RNA, 19 nt, Homo sapiens
  misc_RNA (1)...(19): siRNA sense strand
gaaguccaucuaugacaug

SEQ ID NO: 1700264 - RNA, 19 nt, Homo sapiens
  misc_RNA (1)...(19): siRNA sense strand
aggaauucauugagucuug

SEQ ID NO: 1700265 - RNA, 19 nt, Homo sapiens
  misc_RNA (1)...(19): siRNA sense strand
gaacuucaagcagauuuac

SEQ ID NO: 1700266 - RNA, 19 nt, Homo sapiens
  misc_RNA (1)...(19): siRNA sense strand
ccauugaggaauucauuga

SEQ ID NO: 1700267 - RNA, 19 nt, Homo sapiens
  misc_RNA (1)...(19): siRNA sense strand
gcaggagcaaaccaaauuc

SEQ ID NO: 1700268 - RNA, 19 nt, Homo sapiens
  misc_RNA (1)...(19): siRNA sense strand
cagauuuacucccaguucu

SEQ ID NO: 1700269 - RNA, 19 nt, Homo sapiens
  misc_RNA (1)...(19): siRNA sense strand
ggacagaaacaaggauggu

SEQ ID NO: 1700270 - RNA, 19 nt, Homo sapiens
  misc_RNA (1)...(19): siRNA sense strand
aggaaaugcuugacaucau

SEQ ID NO: 1700271 - RNA, 19 nt, Homo sapiens
  misc_RNA (1)...(19): siRNA sense strand
ggagaacuucaagcagauu

SEQ ID NO: 1700272 - RNA, 19 nt, Homo sapiens
  misc_RNA (1)...(19): siRNA sense strand
ugaauuguccaccgugugu

SEQ ID NO: 1700273 - RNA, 19 nt, Homo sapiens
  misc_RNA (1)...(19): siRNA sense strand
cagaagauggacagaaaca

SEQ ID NO: 1700274 - RNA, 19 nt, Homo sapiens
  misc_RNA (1)...(19): siRNA sense strand
ugcaggagcaaaccaaauu

SEQ ID NO: 1700275 - RNA, 19 nt, Homo sapiens
  misc_RNA (1)...(19): siRNA sense strand
ggugaccauugaggaauuc

SEQ ID NO: 1700276 - RNA, 19 nt, Homo sapiens
  misc_RNA (1)...(19): siRNA sense strand
agaacuucaagcagauuua

SEQ ID NO: 1700277 - RNA, 19 nt, Homo sapiens
  misc_RNA (1)...(19): siRNA sense strand
gcguggacgaugaauuuga

SEQ ID NO: 1700278 - RNA, 19 nt, Homo sapiens
  misc_RNA (1)...(19): siRNA sense strand
gagcagcugcaggagcaaa

SEQ ID NO: 1700279 - RNA, 19 nt, Homo sapiens
  misc_RNA (1)...(19): siRNA sense strand
cagcaccuaugccacuuuu

SEQ ID NO: 1700280 - RNA, 19 nt, Homo sapiens
  misc_RNA (1)...(19): siRNA sense strand
ggaaaugcuugacaucaug

SEQ ID NO: 1700281 - RNA, 19 nt, Homo sapiens
  misc_RNA (1)...(19): siRNA sense strand
cagcguggacgaugaauuu

SEQ ID NO: 1700282 - RNA, 19 nt, Homo sapiens
  misc_RNA (1)...(19): siRNA sense strand
gaagauggacagaaacaag

SEQ ID NO: 1700283 - RNA, 19 nt, Homo sapiens
  misc_RNA (1)...(19): siRNA sense strand
caugauggcucggucaguu

SEQ ID NO: 1700284 - RNA, 19 nt, Homo sapiens
  misc_RNA (1)...(19): siRNA sense strand
gggaacacguggagagcuu

SEQ ID NO: 1700285 - RNA, 19 nt, Homo sapiens
  misc_RNA (1)...(19): siRNA sense strand
gaaaugcuugacaucauga

SEQ ID NO: 1700286 - RNA, 19 nt, Homo sapiens
  misc_RNA (1)...(19): siRNA sense strand
ggaauucauugagucuugu

SEQ ID NO: 1700287 - RNA, 19 nt, Homo sapiens
  misc_RNA (1)...(19): siRNA sense strand
cguggacgaugaauuugaa

SEQ ID NO: 1700288 - RNA, 19 nt, Homo sapiens
  misc_RNA (1)...(19): siRNA sense strand
gaccauugaggaauucauu
